United States Patent Application Publication US 2011/0183924 A1 - sequence listing, part 286

SEQ ID NO: 899016 - protein, 753 aa, Homo sapiens
MSTYKRATLDEEDLVDSLSEGDAYPNGLQVNFHSPRSGQRCWAARTQVEKRLVVLVVLLAAGLVACLAALGIQYQTRSPSVCLSEACVSVTSSILSSMDPTVDPCHDFFSYACGGWIKANPVPDGHSRWGTFSNLWEHNQAIIKHLLENSTASVSEAERKAQVYYRACMNETRIEELRAKPLMELIERLGGWNITGPWAKDNFQDTLQVVTAHYRTSPFFSVYVSADSKNSNSNVIQVDQSGLGLPSRDYYLNKTENEKVLTGYLNYMVQLGKLLGGGDEEAIRPQMQQILDFETALANITIPQEKRRDEELIYHKVTAAELQTLAPAINWLPFLNTIFYPVEINESEPIVVYDKEYLEQISTLINTTDRCLLNNYMIWNLVRKTSSFLDQRFQDADEKFMEVMYGTKKTCLPRWKFCVSDTENNLGFALGPMFVKATFAEDSKSIATEIILEIKKAFEESLSTLKWMDEETRKSAKEKADAIYNMIGYPNFIMDPKELDKVFNDYTAVPDLYFENAMRFFNFSWRVTADQLRKAPNRDQWSMTPPMVNAYYSPTKNEIVFPAGILQAPFYTRSSPKALNFGGIGVVVGHELTHAFDDQGREYDKDGNLRPWWKNSSVEAFKRQTECMVEQYSNYSVNGEPVNGRHTLGENIADNGGLKAAYRAYQNWVKKNGAEHSLPTLGLTNNQLFFLGFAQVWCSVRTPESSHEGLITDPHSPSRFRVIGSLSNSKEFSEHFRCPPGSPMNPPHKCEVW

SEQ ID NO: 899017 - protein, 770 aa, Homo sapiens; identical to SEQ ID NO: 899012

SEQ ID NO: 899018 - protein, 770 aa, Homo sapiens; identical to SEQ ID NO: 899012

SEQ ID NO: 899019 - protein, 551 aa, Homo sapiens
ARITGVSHHTWPHGCLGGTVQPPGSLCRTWLAKPPTNSRPVDSGGAATEQFGVWALQVLTGYLNYMVQLGKLLGGGDEEAIRPQMQQILDFETALANITIPQEKRRDEELIYHKVTAAELQTLAPAINWLPFLNTIFYPVEINESEPIVVYDKEYLEQISTLINTTDRCLLNNYMIWNLVRKTSSFLDQRFQDADEKFMEVMYGTKKTCLPRWKFCVSDTENNLGFALGPMFVKATFAEDSKSIATEIILEIKKAFEESLSTLKWMDEETRKSAKEKADAIYNMIGYPNFIMDPKELDKVFNDYTAVPDLYFENAMRFFNFSWRVTADQLRKAPNRDQWSMTPPMVNAYYSPTKNEIVFPAGILQAPFYTRSSPKALNFGGIGVVVGHELTHAFDDQGREYDKDGNLRPWWKNSSVEAFKRQTECMVEQYSNYSVNGEPVNGRHTLGENIADNGGLKAAYRAYQNWVKKNGAEHSLPTLGLTNNQLFFLGFAQVWCSVRTPESSHEGLITDPHSPSRFRVIGSLSNSKEFSEHFRCPPGSPMNPPHKCEVW

SEQ ID NO: 899020 - protein, 277 aa, Homo sapiens
MEKADAIYNMIGYPNFIMDPKELDKVFNDYTAVPDLYFENAMRFFNFSWRVTADQLRKAPNRDQWSMTPPMVNAYYSPTKNEIVFPAGILQAPFYTRSSPKALNFGGIGVVVGHELTHAFDDQGREYDKDGNLRPWWKNSSVEAFKRQTECMVEQYSNYSVNGEPVNGRHTLGENIADNGGLKAAYRAYQNWVKKNGAEHSLPTLGLTNNQLFFLGFAQVWCSVRTPESSHEGLITDPHSPSRFRVIGSLSNSKEFSEHFRCPPGSPMNPPHKCEVW

SEQ ID NO: 899021 - protein, 770 aa, Homo sapiens; identical to SEQ ID NO: 899012

SEQ ID NO: 899022 - protein, 128 aa, Homo sapiens
MGATKWKHLERPLPSSGEARPRDGGGGSTCPPQPPLSRLSSPGLLAQPCLDSALPSPGKLESSCPRGSRRHRDTPATLGSASKLVQGIESGFQMEVLVPARSSPGSSAEETGTREVAEAEASRSPLAT

SEQ ID NO: 899023 - protein, 770 aa, Homo sapiens; identical to SEQ ID NO: 899012

SEQ ID NO: 899024 - protein, 125 aa, Homo sapiens
MAGPGSQDQSSPLVPYLRLQPPVSTPRRQPLLLDALGLRSALAQPCLDSALPSPGKLESSCPRGSRRHRDTPATLGSASKLVQGIESGFQMEVLVPARSSPGSSAEETGTREVAEAEASRSPLAT

SEQ ID NO: 899025 - protein, 146 aa, Homo sapiens
MVSAARGGLVRSSPASTVAGSGAAGGTRGRPGSRGAGRRLQQQPPPGSRKAWSRGAPGQSAALPAALRLVPSGAAAPSLVLVPAGCGGLGVPGSLWGRLLRSVLGCSEVPGLSLAWRPRAAGLGRARGWRRFRGAWMQLDLSVPGH

SEQ ID NO: 899026 - protein, 68 aa, Homo sapiens
FWRQDWWPAWQHWASSTRQVGAFVLHGGLDSLLHPAPSARARGASLLKPGQGSEAKEGARPRGVWVLR

SEQ ID NO: 899027 - protein, 770 aa, Homo sapiens; identical to SEQ ID NO: 899012

SEQ ID NO: 899028 - protein, 770 aa, Homo sapiens; identical to SEQ ID NO: 899012

SEQ ID NO: 899029 - protein, 754 aa, Homo sapiens; identical to SEQ ID NO: 899014

SEQ ID NO: 899030 - protein, 753 aa, Homo sapiens; identical to SEQ ID NO: 899016

SEQ ID NO: 899031 - protein, 722 aa, Homo sapiens
MMSTYKRATLDEEDLVDSLSEGDAYPNGLQVNFHSPRSGQRCWAARTQVEKRLVVLVVLLAAGLVACLAALGIQYQTRSPSVCLSEACVSVTSSILSSMDPTVDPCHDFFSYACGGWIKANPVPDGHSRWGTFSNLWEHNQAIIKHLLENSTASVSEAERKAQVYYRACMNETRIEELRAKPLMELIERLGGWNITGPWAKDNFQDTLQVVTAHYRTSPFFSVYVSADSKNSNSNVIQVDQSGLGLPSRDYYLNKTENEKVLTGYLNYMVQLGKLLGGGDEEAIRPQMQQILDFETALANITIPQEKRRDEELIYHKVTAAELQTLAPAINWLPFLNTIFYPVEINESEPIVVYDKEYLEQISTLINTTDRCLLNNYMIWNLVRKTSSFLDQRFQDADEKFMEVMYGTKKTCLPRWKFCVSDTENNLGFALGPMFVKATFAEDSKSIATEIILEIKKAFEESLSTLKWMDEETRKSAKEKADAIYNMIGYPNFIMDPKELDKVFNDYTAVPDLYFENAMRFFNFSWRVTADQLRKAPNRDQWSMTPPMVNAYYSPTKNEIVFPAGILQAPFYTRSSPKALNFGGIGVVVGHELTHAFDDQGREYDKDGNLRPWWKNSSVEAFKRQTECMVEQYSNYSVNGEPVNGRHTLGENIADNGGLKAAYRVWCSVRTPESSHEGLITDPHSPSRFRVIGSLSNSKEFSEHFRCPPGSPMNPPHKCEVW

SEQ ID NO: 899032 - protein, 474 aa, Homo sapiens
MTSFGMTSFGMTSFETALANITIPQEKRRDEELIYHKVTAAELQTLAPAINWLPFLNTIFYPVEINESEPIVVYDKEYLEQISTLINTTDRCLLNNYMIWNLVRKTSSFLDQRFQDADEKFMEVMYGTKKTCLPRWKFCVSDTENNLGFALGPMFVKATFAEDSKSIATEIILEIKKAFEESLSTLKWMDEETRKSAKEKADAIYNMIGYPNFIMDPKELDKVFNDYTAVPDLYFENAMRFFNFSWRVTADQLRKAPNRDQWSMTPPMVNAYYSPTKNEIVFPAGILQAPFYTRSSPKALNFGGIGVVVGHELTHAFDDQGREYDKDGNLRPWWKNSSVEAFKRQTECMVEQYSNYSVNGEPVNGRHTLGENIADNGGLKAAYRAYQNWVKKNGAEHSLPTLGLTNNQLFFLGFAQVWCSVRTPESSHEGLITDPHSPSRFRVIGSLSNSKEFSEHFRCPPGSPMNPPHKCEVW

SEQ ID NO: 899033 - protein, 379 aa, Homo sapiens
FQNKAWAPHGATSQQERGWETKGWGPASPLTCVFQTCLPRWKFCVSDTENNLGFALGPMFVKATFAEDSKSIATEIILEIKKAFEESLSTLKWMDEETRKSAKEKADAIYNMIGYPNFIMDPKELDKVFNDYTAVPDLYFENAMRFFNFSWRVTADQLRKAPNRDQWSMTPPMVNAYYSPTKNEIVFPAGILQAPFYTRSSPKALNFGGIGVVVGHELTHAFDDQGREYDKDGNLRPWWKNSSVEAFKRQTECMVEQYSNYSVNGEPVNGRHTLGENIADNGGLKAAYRAYQNWVKKNGAEHSLPTLGLTNNQLFFLGFAQVWCSVRTPESSHEGLITDPHSPSRFRVIGSLSNSKEFSEHFRCPPGSPMNPPHKCEVW

SEQ ID NO: 899034 - protein, 770 aa, Homo sapiens; identical to SEQ ID NO: 899012

SEQ ID NO: 899035 - protein, 128 aa, Homo sapiens; identical to SEQ ID NO: 899022

SEQ ID NO: 899036 - protein, 754 aa, Homo sapiens; identical to SEQ ID NO: 899014

SEQ ID NO: 899037 - protein, 297 aa, Homo sapiens
MMSTYKRATLDEEDLVDSLSEGDAYPNGLQVNFHSPRSGQRCWAARTQVEKRLVVLVVLLAAGLVACLAALGIQYQTRSPSVCLSEACVSVTSSILSSMDPTVDPCHDFFSYACGGWIKANPVPDGHSRWGTFSNLWEHNQAIIKHLLENSTASVSEAERKAQVYYRACMNETRIEELRAKPLMELIERLGGWNITGPWAKDNFQDTLQVVTAHYRTSPFFSVYVSADSKNSNSNVIQVDQSGLGLPSRDYYLNKTENEKVSVPLPSQPASQHGPSCSVSTPTPVQVFEARGAQGCQ

SEQ ID NO: 899038 - protein, 109 aa, Homo sapiens
MEPNSPKKIQFAVPVFQSQIAPEAAEQIRKRRPTPASLVILNEHNPPEIDDKRGPNTQGELQNASPKQRKQSVYTPPTIKGVKHLKGQNESAFPEEEEGTNEREEQRDH

SEQ ID NO: 899039 - protein, 1226 aa, Homo sapiens
TFSCKEGHVLQGPSVLKCLPSQQWNDSFPVCKIVLCTPPPLISFGVPIPSSALHFGSTVKYSCVGGFFLRGNSTTLCQPDGTWSSPLPECVPVECPQPEEIPNGIIDVQGLAYLSTALYTCKPGFELVGNTTTLCGEDGHWLGGKPTCKAIECLKPKEILNGKFSYTDLHYGQTVTYSCNRGFRLEGPSALTCLETGDWDVDAPSCNAIHCDSPQPIENGFVEGADYSYGAIIIYSCFPGFQVAGHAMQTCEESGWSSSIPTCMPIDCGLPPHIDFGDCTKLKDDQGYFEQEDDMMEVPYVTPHPPYHLGAVAKTWENTKESPATHSSNFLYGTMVSYTCNPGYELLGNPVLICQEDGTWNGSAPSCISIECDLPTAPENGFLRFTETSMGSAVQYSCKPGHILAGSDLRLCLENRKWSGASPRCEAISCKKPNPVMNGSIKGSNYTYLSTLYYECDPGYVLNGTERRTCQDDKNWDEDEPICIPVDCSSPPVSANGQVRGDEYTFQKEIEYTCNEGFLLEGARSRVCLANGSWSGATPDCVPVRCATPPQLANGVTEGLDYGFMKEVTFHCHEGYILHGAPKLTCQSDGNWDAEIPLCKPVNCGPPEDLAHGFPNGFSFIHGGHIQYQCFPGYKLHGNSSRRCLSNGSWSGSSPSCLPCRCSTPVIEYGTVNGTDFDCGKAARIQCFKGFKLLGLSEITCEADGQWSSGFPHCEHTSCGSLPMIPNAFISETSSWKENVITYSCRSGYVIQGSSDLICTEKGVWSQPYPVCEPLSCGSPPSVANAVATGEAHTYESEVKLRCLEGYTMDTDTDTFTCQKDGRWFPERISCSPKKCPLPENITHILVHGDDFSVNRQVSVSCAEGYTFEGVNISVCQLDGTWEPPFSDESCSPVSCGKPESPEHGFVVGSKYTFESTIIYQCEPGYELEGNRERVCQENRQWSGGVAICKETRCETPLEFLNGKADIENRTTGPNVVYSCNRGYSLEGPSEAHCTENGTWSHPVPLCKPNPCPVPFVIPENALLSEKEFYVDQNVSIKCREGFLLQGHGIITCNPDETWTQTSAKCEKISCGPPAHVENAIARGVHYQYGDMITYSCYSGYMLEGFLRSVCLENGTWTSPPICRAVCRFPCQNGGICQRPNACSCPEGWMGRLCEEPICILPCLNGGRCVAPYQCDCPPGWTGSRCHTAVCQSPCLNGGKCVRPNRCHCLSSWTGHNCSRKRRTGF

SEQ ID NO: 899040 - protein, 298 aa, Homo sapiens
MGNRERVCQENRQWSGGVAICKETRCETPLEFLNGKADIENRTTGPNVVYSCNRGYSLEGPSEAHCTENGTWSHPVPLCKPNPCPVPFVIPENALLSEKEFYVDQNVSIKCREGFLLQGHGIITCNPDETWTQTSAKCEKISCGPPAHVENAIARGVHYQYGDMITYSCYSGYMLEGFLRSVCLENGTWTSPPICRAVCRFPCQNGGICQRPNACSCPEGWMGRLCEEPICILPCLNGGRCVAPYQCDCPPGWTGSRCHTAVCQSPCLNGGKCVRPNRCHCLSSWTGHNCSRKRRTGF

SEQ ID NO: 899041 - protein, 1080 aa, Homo sapiens
TFSCKEGHVLQGPSVLKCLPSQQWNDSFPVCKIVLCTPPPLISFGVPIPSSALHFGSTVKYSCVGGFFLRGNSTTLCQPDGTWSSPLPECVPVECPQPEEIPNGIIDVQGLAYLSTALYTCKPGFELVGNTTTLCGEDGHWLGGKPTCKAIECLKPKEILNGKFSYTDLHYGQTVTYSCNRGFRLEGPSALTCLETGDWDVDAPSCNAIHCDSPQPIENGFVEGADYSYGAIIIYSCFPGFQVAGHAMQTCEESGWSSSIPTCMPIDCGLPPHIDFGDCTKLKDDQGYFEQEDDMMEVPYVTPHPPYHLGAVAKTWENTKESPATHSSNFLYGTMVSYTCNPGYELLGNPVLICQEDGTWNGSAPSCISIECDLPTAPENGFLRFTETSMGSAVQYSCKPGHILAGSDLRLCLENRKWSGASPRCEAISCKKPNPVMNGSIKGSNYTYLSTLYYECDPGYVLNGTERRTCQDDKNWDEDEPICIPVDCSSPPVSANGQVRGDEYTFQKEIEYTCNEGFLLEGARSRVCLANGSWSGATPDCVPVRCATPPQLANGVTEGLDYGFMKEVTFHCHEGYILHGAPKLTCQSDGNWDAEIPLCKPVNCGPPEDLAHGFPNGFSFIHGGHIQYQCFPGYKLHGNSSRRCLSNGSWSGSSPSCLPCRCSTPVIEYGTVNGTDFDCGKAARIQCFKGFKLLGLSEITCEADGQWSSGFPHCEHTSCGSLPMIPNAFISETSSWKENVITYSCRSGYVIQGSSDLICTEKGVWSQPYPVCEPLSCGSPPSVANAVATGEAHTYESEVKLRCLEGYTMDTDTDTFTCQKDGRWFPERISCSPKKCPLPENITHILVHGDDFSVNRQVSVSCAEGYTFEGVNISVCQLDGTWEPPFSDESCSPVSCGKPESPEHGFVVGSKYTFESTIIYQCEPGYELEGNRERVCQENRQWSGGVAICKETRCETPLEFLNGKADIENRTTGPNVVYSCNRGYSLEGPSEAHCTENGTWSHPVPLCKPNPCPVPFVIPENALLSEKEFYVDQNVSIKCREGFLLQGHGIITCNPDETWTQTSAKCESLFLSRGLDGAPL

SEQ ID NO: 899042 - protein, 135 aa, Homo sapiens
MITYSCYSGYMLEGFLRSVCLENGTWTSPPICRAVCRFPCQNGGICQRPNACSCPEGWMGRLCEEPICILPCLNGGRCVAPYQCDCPPGWTGSRCHTAVCQSPCLNGGKCVRPNRCHCLSSWTGHNCSRKRRTGF

SEQ ID NO: 899043 - protein, 499 aa, Homo sapiens
TFSCKEGHVLQGPSVLKCLPSQQWNDSFPVCKIVLCTPPPLISFGVPIPSSALHFGSTVKYSCVGGFFLRGNSTTLCQPDGTWSSPLPECVPVECPQPEEIPNGIIDVQGLAYLSTALYTCKPGFELVGNTTTLCGEDGHWLGGKPTCKAIECLKPKEILNGKFSYTDLHYGQTVTYSCNRGFRLEGPSALTCLETGDWDVDAPSCNAIHCDSPQPIENGFVEGADYSYGAIIIYSCFPGFQVAGHAMQTCEESGWSSSIPTCMPIDCGLPPHIDFGDCTKLKDDQGYFEQEDDMMEVPYVTPHPPYHLGAVAKTWENTKESPATHSSNFLYGTMVSYTCNPGYELLGNPVLICQEDGTWNGSAPSCISIECDLPTAPENGFLRFTETSMGSAVQYSCKPGHILAGSDLRLCLENRKWSGASPQGEPSEDVEPHRYYMHKDGIQCKLDTKKHAPQRTRTRDPKRCEMAPRGGKAKMKKTGKSREHGGSNEDSSKATHIT

SEQ ID NO: 899044 - protein, 1226 aa, Homo sapiens; identical to SEQ ID NO: 899039

SEQ ID NO: 899045 - protein, 418 aa, Homo sapiens
MDTDTDTFTCQKDGRWFPERISCSPKKCPLPENITHILVHGDDFSVNRQVSVSCAEGYTFEGVNISVCQLDGTWEPPFSDESCSPVSCGKPESPEHGFVVGSKYTFESTIIYQCEPGYELEGNRERVCQENRQWSGGVAICKETRCETPLEFLNGKADIENRTTGPNVVYSCNRGYSLEGPSEAHCTENGTWSHPVPLCKPNPCPVPFVIPENALLSEKEFYVDQNVSIKCREGFLLQGHGIITCNPDETWTQTSAKCEKISCGPPAHVENAIARGVHYQYGDMITYSCYSGYMLEGFLRSVCLENGTWTSPPICRAVCRFPCQNGGICQRPNACSCPEGWMGRLCEEPICILPCLNGGRCVAPYQCDCPPGWTGSRCHTAVCQSPCLNGGKCVRPNRCHCLSSWTGHNCSRKRRTGF

SEQ ID NO: 899046 - protein, 228 aa, Homo sapiens
MRRARWLNPVIPALCPQLRWQQNALLSEKEFYVDQNVSIKCREGFLLQGHGIITCNPDETWTQTSAKCEKISCGPPAHVENAIARGVHYQYGDMITYSCYSGYMLEGFLRSVCLENGTWTSPPICRAVCRFPCQNGGICQRPNACSCPEGWMGRLCEEPICILPCLNGGRCVAPYQCDCPPGWTGSRCHTAVCQSPCLNGGKCVRPNRCHCLSSWTGHNCSRKRRTGF

SEQ ID NO: 899047 - protein, 132 aa, Homo sapiens
CVKLAVDLLEDLPSPASAVFQPPHQRLDAFLSGPLGGDSHQLSEVSYTRLLANILLRNRTGSSHDSMSSREMRSSSRLDFCCVSSMLEGVGIESEKQKEVWESYSCLPVSLLKWWKMCKTKPMSLSFFLDGT

SEQ ID NO: 899048 - protein, 1078 aa, Homo sapiens
RSRPEEELAAGGRWAERPAARARRRRQRGPGPERHMRRFKRKHLTAIDCQHLARSHLAVTQPFGQRWTNRDPNHGLYPKPRTKRGSRGQGSQRCIPEFFLAGKQPCTNDMAKSNSVGQDSCQDSEGDMIFPAESSCALPQEGSAGPGSPGSAPPSRKRSWSSEEESNQATGTSRWDGVSKKAPRHHLSVPCTRPREARQEAEDSTSRLSAESGETDQDAGDVGPDPIPDSYYGLLGTLPCQEALSHICSLPSEVLRHVFAFLPVEDLYWNLSLVCHLWREIISDPLFIPWKKLYHRYLMNEEQAVSKVDGILSNCGIEKESDLCVLNLIRYTATTKCSPSVDPERVLWSLRDHPLLPEAEACVRQHLPDLYAAAGGVNIWALVAAVVLLSSSVNDIQRLLFCLRRPSSTVTMPDVTETLYCIAVLLYAMREKGINISNRIHYNIFYCLYLQENSCTQATKVKEEPSVWPGKKTIQLTHEQQLILNHKMEPLQVVKIMAFAGTGKTSTLVKYAEKWSQSRFLYVTFNKSIAKQAERVFPSNVICKTFHSMAYGHIGRKYQSKKKLNLFKLTPFMVNSVLAEGKGGFIRAKLVCKTLENFFASADEELTIDHVPIWCKNSQGQRVMVEQSEKLNGVLEASRLWDNMRKLGECTEEAHQMTHDGYLKLWQLSKPSLASFDAIFVDEAQDCTPAIMNIVLSQPCGKIFVGDPHQQIYTFRGAVNALFTVPHTHVFYLTQSFRFGVEIAYVGATILDVCKRVRKKTLVGGNHQSGIRGDAKGQVALLSRTNANVFDEAVRVTEGEFPSRIHLIGGIKSFGLDRIIDIWILLQPEEERRKQNLVIKDKFIRRWVHKEGFSGFKRYVTAAEDKELEAKIAVVEKYNIRIPELVQRIEKCHIEDLDFAEYILGTVHKAKGLEFDTVHVLDDFVKVPCARHNLPQLPHFRVESFSEDEWNLLYVAVTRAKKRLIMTKSLENILTLAGEYFLQAELTSNVLKTGVVRCCVGQCNNAIPVDTVLTMKKLPITYSNRKENKGGYLCHSCAEQRIGPLAFLTASPEQVRAMERTVENIVLPRHEALLFLVF

SEQ ID NO: 899049 - protein, 827 aa, Homo sapiens
GRGQRRSSLPGDAGLSGRRRGPGGGGSGVRVRSATFIPWKKLYHRYLMNEEQAVSKVDGILSNCGIEKESDLCVLNLIRYTATTKCSPSVDPERVLWSLRDHPLLPEAEACVRQHLPDLYAAAGGVNIWALVAAVVLLSSSVNDIQRLLFCLRRPSSTVTMPDVTETLYCIAVLLYAMREKGINISNRIHYNIFYCLYLQENSCTQATKVKEEPSVWPGKKTIQLTHEQQLILNHKMEPLQVVKIMAFAGTGKTSTLVKYAEKWSQSRFLYVTFNKSIAKQAERVFPSNVICKTFHSMAYGHIGRKYQSKKKLNLFKLTPFMVNSVLAEGKGGFIRAKLVCKTLENFFASADEELTIDHVPIWCKNSQGQRVMVEQSEKLNGVLEASRLWDNMRKLGECTEEAHQMTHDGYLKLWQLSKPSLASFDAIFVDEAQDCTPAIMNIVLSQPCGKIFVGDPHQQIYTFRGAVNALFTVPHTHVFYLTQSFRFGVEIAYVGATILDVCKRVRKKTLVGGNHQSGIRGDAKGQVALLSRTNANVFDEAVRVTEGEFPSRIHLIGGIKSFGLDRIIDIWILLQPEEERRKQNLVIKDKFIRRWVHKEGFSGFKRYVTAAEDKELEAKIAVVEKYNIRIPELVQRIEKCHIEDLDFAEYILGTVHKAKGLEFDTVHVLDDFVKVPCARHNLPQLPHFRVESFSEDEWNLLYVAVTRAKKRLIMTKSLENILTLAGEYFLQAELTSNVLKTGVVRCCVGQCNNAIPVDTVLTMKKLPITYSNRKENKGGYLCHSCAEQRIGPLAFLTASPEQVRAMERTVENIVLPRHEALLFLVF

SEQ ID NO: 899050 - protein, 591 aa, Homo sapiens
MEPLQVVKIMAFAGTGKTSTLVKYAEKWSQSRFLYVTFNKSIAKQAERVFPSNVICKTFHSMAYGHIGRKYQSKKKLNLFKLTPFMVNSVLAEGKGGFIRAKLVCKTLENFFASADEELTIDHVPIWCKNSQGQRVMVEQSEKLNGVLEASRLWDNMRKLGECTEEAHQMTHDGYLKLWQLSKPSLASFDAIFVDEAQDCTPAIMNIVLSQPCGKIFVGDPHQQIYTFRGAVNALFTVPHTHVFYLTQSFRFGVEIAYVGATILDVCKRVRKKTLVGGNHQSGIRGDAKGQVALLSRTNANVFDEAVRVTEGEFPSRIHLIGGIKSFGLDRIIDIWILLQPEEERRKQNLVIKDKFIRRWVHKEGFSGFKRYVTAAEDKELEAKIAVVEKYNIRIPELVQRIEKCHIEDLDFAEYILGTVHKAKGLEFDTVHVLDDFVKVPCARHNLPQLPHFRVESFSEDEWNLLYVAVTRAKKRLIMTKSLENILTLAGEYFLQAELTSNVLKTGVVRCCVGQCNNAIPVDTVLTMKKLPITYSNRKENKGGYLCHSCAEQRIGPLAFLTASPEQVRAMERTVENIVLPRHEALLFLVF

SEQ ID NO: 899051 - protein, 435 aa, Homo sapiens
MRKLGECTEEAHQMTHDGYLKLWQLSKPSLASFDAIFVDEAQDCTPAIMNIVLSQPCGKIFVGDPHQQIYTFRGAVNALFTVPHTHVFYLTQSFRFGVEIAYVGATILDVCKRVRKKTLVGGNHQSGIRGDAKGQVALLSRTNANVFDEAVRVTEGEFPSRIHLIGGIKSFGLDRIIDIWILLQPEEERRKQNLVIKDKFIRRWVHKEGFSGFKRYVTAAEDKELEAKIAVVEKYNIRIPELVQRIEKCHIEDLDFAEYILGTVHKAKGLEFDTVHVLDDFVKVPCARHNLPQLPHFRVESFSEDEWNLLYVAVTRAKKRLIMTKSLENILTLAGEYFLQAELTSNVLKTGVVRCCVGQCNNAIPVDTVLTMKKLPITYSNRKENKGGYLCHSCAEQRIGPLAFLTASPEQVRAMERTVENIVLPRHEALLFLVF

SEQ ID NO: 899052 - protein, 645 aa, Homo sapiens
RSRPEEELAAGGRWAERPAARARRRRQRGPGPERHMRRFKRKHLTAIDCQHLARSHLAVTQPFGQRWTNRDPNHGLYPKPRTKRGSRGQGSQRCIPEFFLAGKQPCTNDMAKSNSVGQDSCQDSEGDMIFPAESSCALPQEGSAGPGSPGSAPPSRKRSWSSEEESNQATGTSRWDGVSKKAPRHHLSVPCTRPREARQEAEDSTSRLSAESGETDQDAGDVGPDPIPDSYYGLLGTLPCQEALSHICSLPSEVLRHVFAFLPVEDLYWNLSLVCHLWREIISDPLFIPWKKLYHRYLMNEEQAVSKVDGILSNCGIEKESDLCVLNLIRYTATTKCSPSVDPERVLWSLRDHPLLPEAEACVRQHLPDLYAAAGGVNIWALVAAVVLLSSSVNDIQRLLFCLRRPSSTVTMPDVTETLYCIAVLLYAMREKGINISNRIHYNIFYCLYLQENSCTQATKVKEEPSVWPGKKTIQLTHEQQLILNHKMEPLQVVKIMAFAGTGKTSTLVKYAEKWSQSRFLYVTFNKSIAKQAERVFPSNVICKTFHSMAYGHIGRKYQSKKKLNLFKLTPFMVNSVLAEGKGGFIRAKLVCKTLENFFASADEELTIDHVPIWCKNSQGQRVMVEQSEKLSHFLRMNGIYCMLQ

SEQ ID NO: 899053 - protein, 110 aa, Homo sapiens
MTLFLALSSQEYFLQAELTSNVLKTGVVRCCVGQCNNAIPVDTVLTMKKLPITYSNRKENKGGYLCHSCAEQRIGPLAFLTASPEQVRAMERTVENIVLPRHEALLFLVF

SEQ ID NO: 899054 - protein, 934 aa, Homo sapiens
  misc_feature (934)..(934): Xaa can be any naturally occurring amino acid
RSRPEEELAAGGRWAERPAARARRRRQRGPGPERHMRRFKRKHLTAIDCQHLARSHLAVTQPFGQRWTNRDPNHGLYPKPRTKRGSRGQGSQRCIPEFFLAGKQPCTNDMAKSNSVGQDSCQDSEGDMIFPAESSCALPQEGSAGPGSPGSAPPSRKRSWSSEEESNQATGTSRWDGVSKKAPRHHLSVPCTRPREARQEAEDSTSRLSAESGETDQDAGDVGPDPIPDSYYGLLGTLPCQEALSHICSLPSEVLRHVFAFLPVEDLYWNLSLVCHLWREIISDPLFIPWKKLYHRYLMNEEQAVSKVDGILSNCGIEKESDLCVLNLIRYTATTKCSPSVDPERVLWSLRDHPLLPEAEACVRQHLPDLYAAAGGVNIWALVAAVVLLSSSVNDIQRLLFCLRRPSSTVTMPDVTETLYCIAVLLYAMREKGINISNRIHYNIFYCLYLQENSCTQATKVKEEPSVWPGKKTIQLTHEQQLILNHKMEPLQVVKIMAFAGTGKTSTLVKYAEKWSQSRFLYVTFNKSIAKQAERVFPSNVICKTFHSMAYGHIGRKYQSKKKLNLFKLTPFMVNSVLAEGKGGFIRAKLVCKTLENFFASADEELTIDHVPIWCKNSQGQRVMVEQSEKLNGVLEASRLWDNMRKLGECTEEAHQMTHDGYLKLWQLSKPSLASFDAIFVDEAQDCTPAIMNIVLSQPCGKIFVGDPHQQIYTFRGAVNALFTVPHTHVFYLTQSFRFGVEIAYVGATILDVCKRVRKKTLVGGNHQSGIRGDAKGQVALLSRTNANVFDEAVRVTEGEFPSRIHLIGGIKSFGLDRIIDIWILLQPEEERRKQNLVIKDKFIRRWVHKEGFSGFKRYVTAAEDKELEAKIAVVEKYNIRIPELVQRIEKCPTPTSSISRRVFGFGVEIAYVGATILDVCKRVRKKDFWVGGX

SEQ ID NO: 899055 - protein, 855 aa, Homo sapiens
RSRPEEELAAGGRWAERPAARARRRRQRGPGPERHMRRFKRKHLTAIDCQHLARSHLAVTQPFGQRWTNRDPNHGLYPKPRTKRGSRGQGSQRCIPEFFLAGKQPCTNDMAKSNSVGQDSCQDSEGDMIFPAESSCALPQEGSAGPGSPGSAPPSRKRSWSSEEESNQATGTSRWDGVSKKAPRHHLSVPCTRPREARQEAEDSTSRLSAESGETDQDAGDVGPDPIPDSYYGLLGTLPCQEALSHICSLPSEVLRHVFAFLPVEDLYWNLSLVCHLWREIISDPLFIPWKKLYHRYLMNEEQAVSKVDGILSNCGIEKESDLCVLNLIRYTATTKCSPSVDPERVLWSLRDHPLLPEAEACVRQHLPDLYAAAGGVNIWALVAAVVLLSSSVNDIQRLLFCLRRPSSTVTMPDVTETLYCIAVLLYAMREKGINISNRIHYNIFYCLYLQENSCTQATKVKEEPSVWPGKKTIQLTHEQQLILNHKMEPLQVVKIMAFAGTGKTSTLVKYAEKWSQSRFLYVTFNKSIAKQAERVFPSNVICKTFHSMAYGHIGRKYQSKKKLNLFKLTPFMVNSVLAEGKGGFIRAKLVCKTLENFFASADEELTIDHVPIWCKNSQGQRVMVEQSEKLNGVLEASRLWDNMRKLGECTEEAHQMTHDGYLKLWQLSKPSLASFDAIFVDEAQDCTPAIMNIVLSQPCGKIFVGDPHQQIYTFRGAVNALFTVPHTHVFYLTQSFRFGVEIAYVGATILDVCKRVRKKTLVGGNHQSGIRGDAKGQVALLSRTNANVFDEAVRVTEGEFPSRIHLIGVVWGFVFSYMEVMTCENVAAQRKHSQCEGAGRRVMHCAGVGGGWST

SEQ ID NO: 899056 - protein, 557 aa, Homo sapiens
RSRPEEELAAGGRWAERPAARARRRRQRGPGPERHMRRFKRKHLTAIDCQHLARSHLAVTQPFGQRWTNRDPNHGLYPKPRTKRGSRGQGSQRCIPEFFLAGKQPCTNDMAKSNSVGQDSCQDSEGDMIFPAESSCALPQEGSAGPGSPGSAPPSRKRSWSSEEESNQATGTSRWDGVSKKAPRHHLSVPCTRPREARQEAEDSTSRLSAESGETDQDAGDVGPDPIPDSYYGLLGTLPCQEALSHICSLPSEVLRHVFAFLPVEDLYWNLSLVCHLWREIISDPLFIPWKKLYHRYLMNEEQAVSKVDGILSNCGIEKESDLCVLNLIRYTATTKCSPSVDPERVLWSLRDHPLLPEAEACVRQHLPDLYAAAGGVNIWALVAAVVLLSSSVNDIQRLLFCLRRPSSTVTMPDVTETLYCIAVLLYAMREKGINISNRIHYNIFYCLYLQENSCTQATKVKEEPSVWPGKKTIQLTHEQQLILNHKMEPLQVVKIMAFAGTGKTSTLVKYAEKWSQSRFLYVTFNKSIAKQAERVFPSNVICKTFHSMAYGHIGRK

SEQ ID NO: 899057 - protein, 330 aa, Homo sapiens
RSRPEEELAAGGRWAERPAARARRRRQRGPGPERHMRRFKRKHLTAIDCQHLARSHLAVTQPFGQRWTNRDPNHGLYPKPRTKRGSRGQGSQRCIPEFFLAGKQPCTNDMAKSNSVGQDSCQDSEGDMIFPAESSCALPQEGSAGPGSPGSAPPSRKRSWSSEEESNQATGTSRWDGVSKKAPRHHLSVPCTRPREARQEAEDSTSRLSAESGETDQDAGDVGPDPIPDSYYGLLGTLPCQEALSHICSLPSEVLRHVFAFLPVEDLYWNLSLVCHLWREIISDPLFIPWKKLYHRYLMNEEQAVSKVDGILSNCGIEKESDLCVLNLIR

SEQ ID NO: 899058 - protein, 83 aa, Homo sapiens
SGTFDWENLVIKDKFIRRWVHKEGFSGFKRYVTAAEDKELEAKIAVVEKYNIRIPELVQRIEKCHIEDLDFAGKGSSWFLPPP

SEQ ID NO: 899059 - protein, 1026 aa, Homo sapiens
RSRPEEELAAGGRWAERPAARARRRRQRGPGPERHSQGSQRCIPEFFLAGKQPCTNDMAKSNSVGQDSCQDSEGDMIFPAESSCALPQEGSAGPGSPGSAPPSRKRSWSSEEESNQATGTSRWDGVSKKAPRHHLSVPCTRPREARQEAEDSTSRLSAESGETDQDAGDVGPDPIPDSYYGLLGTLPCQEALSHICSLPSEVLRHVFAFLPVEDLYWNLSLVCHLWREIISDPLFIPWKKLYHRYLMNEEQAVSKVDGILSNCGIEKESDLCVLNLIRYTATTKCSPSVDPERVLWSLRDHPLLPEAEACVRQHLPDLYAAAGGVNIWALVAAVVLLSSSVNDIQRLLFCLRRPSSTVTMPDVTETLYCIAVLLYAMREKGINISNRIHYNIFYCLYLQENSCTQATKVKEEPSVWPGKKTIQLTHEQQLILNHKMEPLQVVKIMAFAGTGKTSTLVKYAEKWSQSRFLYVTFNKSIAKQAERVFPSNVICKTFHSMAYGHIGRKYQSKKKLNLFKLTPFMVNSVLAEGKGGFIRAKLVCKTLENFFASADEELTIDHVPIWCKNSQGQRVMVEQSEKLNGVLEASRLWDNMRKLGECTEEAHQMTHDGYLKLWQLSKPSLASFDAIFVDEAQDCTPAIMNIVLSQPCGKIFVGDPHQQIYTFRGAVNALFTVPHTHVFYLTQSFRFGVEIAYVGATILDVCKRVRKKTLVGGNHQSGIRGDAKGQVALLSRTNANVFDEAVRVTEGEFPSRIHLIGGIKSFGLDRIIDIWILLQPEEERRKQNLVIKDKFIRRWVHKEGFSGFKRYVTAAEDKELEAKIAVVEKYNIRIPELVQRIEKCHIEDLDFAEYILGTVHKAKGLEFDTVHVLDDFVKVPCARHNLPQLPHFRVESFSEDEWNLLYVAVTRAKKRLIMTKSLENILTLAGEYFLQAELTSNVLKTGVVRCCVGQCNNAIPVDTVLTMKKLPITYSNRKENKGGYLCHSCAEQRIGPLAFLTASPEQVRAMERTVENIVLPRHEALLFLVF

SEQ ID NO: 899060 - protein, 718 aa, Homo sapiens
MACGLSLPPCAPGLQGVNIWALVAAVVLLSSSVNDIQRLLFCLRRPSSTVTMPDVTETLYCIAVLLYAMREKGINISNRIHYNIFYCLYLQENSCTQATKVKEEPSVWPGKKTIQLTHEQQLILNHKMEPLQVVKIMAFAGTGKTSTLVKYAEKWSQSRFLYVTFNKSIAKQAERVFPSNVICKTFHSMAYGHIGRKYQSKKKLNLFKLTPFMVNSVLAEGKGGFIRAKLVCKTLENFFASADEELTIDHVPIWCKNSQGQRVMVEQSEKLNGVLEASRLWDNMRKLGECTEEAHQMTHDGYLKLWQLSKPSLASFDAIFVDEAQDCTPAIMNIVLSQPCGKIFVGDPHQQIYTFRGAVNALFTVPHTHVFYLTQSFRFGVEIAYVGATILDVCKRVRKKTLVGGNHQSGIRGDAKGQVALLSRTNANVFDEAVRVTEGEFPSRIHLIGGIKSFGLDRIIDIWILLQPEEERRKQNLVIKDKFIRRWVHKEGFSGFKRYVTAAEDKELEAKIAVVEKYNIRIPELVQRIEKCHIEDLDFAEYILGTVHKAKGLEFDTVHVLDDFVKVPCARHNLPQLPHFRVESFSEDEWNLLYVAVTRAKKRLIMTKSLENILTLAGEYFLQAELTSNVLKTGVVRCCVGQCNNAIPVDTVLTMKKLPITYSNRKENKGGYLCHSCAEQRIGPLAFLTASPEQVRAMERTVENIVLPRHEALLFLVF

SEQ ID NO: 899061 - protein, 1176 aa, Homo sapiens
RSRPEEELAAGGRWAERPAARARRRRQRGPGPERHMRRFKRKHLTAIDCQHLARSHLAVTQPFGQRWTNRDPNHGLYPKPRTKRGSRGQGSQRCIPEFFLAGKQPCTNDMAKSNSVGQDSCQDSEGDMIFPAESSCALPQEGSAGPGSPGSAPPSRKRSWSSEEESNQATGTSRWDGVSKKAPRHHLSVPCTRPREARQEAEDSTSRLSAESGETDQDAGDVGPDPIPDSYYGLLGTLPCQEALSHICSLPSEVLRHVFAFLPVEDLYWNLSLVCHLWREIISDPLFIPWKKLYHRYLMNEEQAVSKVDGILSNCGIEKESDLCVLNLIRYTATTKCSPSVDPERVLWSLRDHPLLPEAEACVRQHLPDLYAAAGGVNIWALVAAVVLLSSSVNDIQRLLFCLRRPSSTVTMPDVTETLYCIAVLLYAMREKGINISNRIHYNIFYCLYLQENSCTQATKVKEEPSVWPGKKTIQLTHEQQLILNHKMEPLQVVKIMAFAGTGKTSTLVKYAEKWSQSRFLYVTFNKSIAKQAERVFPSNVICKTFHSMAYGHIGRKYQSKKKLNLFKLTPFMVNSVLAEGKGGFIRAKLVCKTLENFFASADEELTIDHVPIWCKNSQGQRVMVEQSEKLNGVLEASRLWDNMRKLGECTEEAHQMTHDGYLKLWQLSKPSLASFDAIFVDEAQDCTPAIMNIVLSQPCGKIFVGDPHQQIYTFRGAVNALFTVPHTHVFYLTQSFRFGVEIAYVGATILDVCKRVRKKTLVGGNHQSGIRGDAKGQVALLSRTNANVFDEAVRVTEGEFPSRIHLIGGIKSFGLDRIIDIWILLQPEEERRKQNLVIKDKFIRRWVHKEGFSGFKRYVTAAEDKELEAKIAVVEKYNIRIPELVQRIEKCHIEDLDFAGKGSSWFLPPPKEEEQMVFCCSFFFLETEYGSVAQAGVQWRDLGSLQCPPSGFKQLSCLSLVSSWDYRPHHQPGKLVVFFVEMESHHVGQAGLELPTSEYILGTVHKAKGLEFDTVHVLDDFVKVPCARHNLPQLPHFRVESFSEDEWNLLYVAVTRAKKRLIMTKSLENILTLAGEYFLQAELTSNVLKTGVVRCCVGQCNNAIPVDTVLTMKKLPITYSNRKENKGGYLCHSCAEQRIGPLAFLTASPEQVRAMERTVENIVLPRHEALLFLVF

SEQ ID NO: 899062 - protein, 211 aa, Homo sapiens [sequence omitted]

SEQ ID NO: 899063 - protein, 911 aa, Homo sapiens
RSRPEEELAAGGRWAERPAARARRRRQRGPGPERHMRRFKRKHLTAIDCQHLARSHLAVTQPFGQRWTNRDPNHGLYPKPRTKRGSRGQGSQRCIPEFFLAGKQPCTNDMAKSNSVGQDSCQDSEGDMIFPAESSCALPQEGSAGPGSPGSAPPSRKRSWSSEEESNQATGTSRWDGVSKKAPRHHLSVPCTRPREARQEAEDSTSRLSAESGETDQDAGDVGPDPIPDSYYGLLGTLPCQEALSHICSLPSEVLRHVFAFLPVEDLYWNLSLVCHLWREIISDPLFIPWKKLYHRYLMNEEQAVSKVDGILSNCGIEKESDLCVLNLIRYTATTKCSPSVDPERVLWSLRDHPLLPEAEACVRQHLPDLYAAAGGVNIWALVAAVVLLSSSVNDIQRLLFCLRRPSSTVTMPDVTETLYCIAVLLYAMREKGINISNRIHYNIFYCLYLQENSCTQATKVKEEPSVWPGKKTIQLTHEQQLILNHKMEPLQVVKIMAFAGTGKTSTLVKYAEKWSQSRFLYVTFNKSIAKQAERVFPSNVICKTFHSMAYGHIGRKYQSKKKLNLFKLTPFMVNSVLAEGKGGFIRAKLVCKTLENFFASADEELTIDHVPIWCKNSQGQRVMVEQSEKLNGVLEASRLWDNMRKLGECTEEAHQMTHDGYLKLWQLSKPSLASFDAIFVDEAQDCTPAIMNIVLSQPCGKIFVGDPHQQIYTFRGAVNALFTVPHTHVFYLTQSFRFGVEIAYVGATILDVCKRVRKKTLVGGNHQSGIRGDAKGQVALLSRTNANVFDEAVRVTEGEFPSRIHLIGGIKSFGLDRIIDIWILLQPEEERRKQNLVIKDKFIRRWVHKEGFSGFKRYVTAAEDKELEAKIAVVEKYNIRIPELVQRIEKCHIEDLDFAGKGSSWFLPPP

SEQ ID NO: 899064 - protein, 638 aa, Homo sapiens
RSRPEEELAAGGRWAERPAARARRRRQRGPGPERHMRRFKRKHLTAIDCQHLARSHLAVTQPFGQRWTNRDPNHGLYPKPRTKRGSRGQGSQRCIPEFFLAGKQPCTNDMAKSNSVGQDSCQDSEGDMIFPAESSCALPQEGSAGPGSPGSAPPSRKRSWSSEEESNQATGTSRWDGVSKKAPRHHLSVPCTRPREARQEAEDSTSRLSAESGETDQDAGDVGPDPIPDSYYGLLGTLPCQEALSHICSLPSEVLRHVFAFLPVEDLYWNLSLVCHLWREIISDPLFIPWKKLYHRYLMNEEQAVSKVDGILSNCGIEKESDLCVLNLIRYTATTKCSPSVDPERVLWSLRDHPLLPEAEACVRQHLPDLYAAAGGVNIWALVAAVVLLSSSVNDIQRLLFCLRRPSSTVTMPDVTETLYCIAVLLYAMREKGINISNRIHYNIFYCLYLQENSCTQATKVKEEPSVWPGKKTIQLTHEQQLILNHKMEPLQVVKIMAFAGTGKTSTLVKYAEKWSQSRFLYVTFNKSIAKQAERVFPSNVICKTFHSMAYGHIGRKYQSKKKLNLFKLTPFMVNSVLAEGKGGFIRAKLVCKTLENFFASADEELTIDHVPIWCKNSQGQRVMVEQSEKLTGECLSV

SEQ ID NO: 899065 - protein, 439 aa, Homo sapiens
RSRPEEELAAGGRWAERPAARARRRRQRGPGPERHMRRFKRKHLTAIDCQHLARSHLAVTQPFGQRWTNRDPNHGLYPKPRTKRGSRGQGSQRCIPEFFLAGKQPCTNDMAKSNSVGQDSCQDSEGDMIFPAESSCALPQEGSAGPGSPGSAPPSRKRSWSSEEESNQATGTSRWDGVSKKAPRHHLSVPCTRPREARQEAEDSTSRLSAESGETDQDAGDVGPDPIPDSYYGLLGTLPCQEALSHICSLPSEVLRHVFAFLPVEDLYWNLSLVCHLWREIISDPLFIPWKKLYHRYLMNEEQAVSKVDGILSNCGIEKESDLCVLNLIRYTATTKCSPSVDPERVLWSLRDHPLLPEAEACVRQHLPDLYAAAGGVNIWALVAAVVLLSSSVNDIQRLLFCLRRPSSTVTMPDVTETLYCIAVLLYAMREKGINISNR

SEQ ID NO: 899066 - protein, 75 aa, Homo sapiens
ENPCSLVVPLSSLSCPSPQSNRKENKGGYLCHSCAEQRIGPLAFLTASPEQVRAMERTVENIVLPRHEALLFLVF

SEQ ID NO: 899067 - protein, 3697 aa, Homo sapiens
MDPPRPALLALLALPALLLLLLAGARAEEEMLENVSLVCPKDATRFKHLRKYTYNYEAESSSGVPGTADSRSATRINCKVELEVPQLCSFILKTSQCTLKEVYGFNPEGKALLKKTKNSEEFAAAMSRYELKLAIPEGKQVFLYPEKDEPTYILNIKRGIISALLVPPETEEAKQVLFLDTVYGNCSTHFTVKTRKGNVATEISTERDLGQCDRFKPIRTGISPLALIKGMTRPLSTLISSSQSCQYTLDAKRKHVAEAICKEQHLFLPFSYKNKYGMVAQVTQTLKLEDTPKINSRFFGEGTKKMGLAFESTKSTSPPKQAEAVLKTLQELKKLTISEQNIQRANLFNKLVTELRGLSDEAVTSLLPQLIEVSSPITLQALVQCGQPQCSTHILQWLKRVHANPLLIDVVTYLVALIPEPSAQQLREIFNMARDQRSRATLYALSHAVNNYHKTNPTGTQELLDIANYLMEQIQDDCTGDEDYTYLILRVIGNMGQTMEQLTPELKSSILKCVQSTKPSLMIQKAAIQALRKMEPKDKDQEVLLQTFLDDASPGDKRLAAYLMLMRSPSQADINKIVQILPWEQNEQVKNFVASHIANILNSEELDIQDLKKLVKEALKESQLPTVMDFRKFSRNYQLYKSVSLPSLDPASAKIEGNLIFDPNNYLPKESMLKTTLTAFGFASADLIEIGLEGKGFEPTLEALFGKQGFFPDSVNKALYWVNGQVPDGVSKVLVDHFGYTKDDKHEQDMVNGIMLSVEKLIKDLKSKEVPEARAYLRILGEELGFASLHDLQLLGKLLLMGARTLQGIPQMIGEVIRKGSKNDFFLHYIFMENAFELPTGAGLQLQISSSGVIAPGAKAGVKLEVANMQAELVAKPSVSVEFVTNMGIIIPDFARSGVQMNTNFFHESGLEAHVALKAGKLKFIIPSPKRPVKLLSGGNTLHLVSTTKTEVIPPLIENRQSWSVCKQVFPGLNYCTSGAYSNASSTDSASYYPLTGDTRLELELRPTGEIEQYSVSATYELQREDRALVDTLKFVTQAEGAKQTEATMTFKYNRQSMTLSSEVQIPDFDVDLGTILRVNDESTEGKTSYRLTLDIQNKKITEVALMGHLSCDTKEERKIKGVISIPRLQAEARSEILAHWSPAKLLLQMDSSATAYGSTVSKRVAWHYDEEKIEFEWNTGTNVDTKKMTSNFPVDLSDYPKSLHMYANRLLDHRVPQTDMTFRHVGSKLIVAMSSWLQKASGSLPYTQTLQDHLNSLKEFNLQNMGLPDFHIPENLFLKSDGRVKYTLNKNSLKIEIPLPFGGKSSRDLKMLETVRTPALHFKSVGFHLPSREFQVPTFTIPKLYQLQVPLLGVLDLSTNVYSNLYNWSASYSGGNTSTDHFSLRARYHMKADSVVDLLSYNVQGSGETTYDHKNTFTLSCDGSLRHKFLDSNIKFSHVEKLGNNPVSKGLLIFDASSSWGPQMSASVHLDSKKKQHLFVKEVKIDGQFRVSSFYAKGTYGLSCQRDPNTGRLNGESNLRFNSSYLQGTNQITGRYEDGTLSLTSTSDLQSGIIKNTASLKYENYELTLKSDTNGKYKNFATSNKMDMTFSKQNALLRSEYQADYESLRFFSLLSGSLNSHGLELNADILGTDKINSGAHKATLRIGQDGISTSATTNLKCSLLVLENELNAELGLSGASMKLTTNGRFREHNAKFSLDGKAALTELSLGSAYQAMILGVDSKNIFNFKVSQEGLKLSNDMMGSYAEMKFDHTNSLNIAGLSLDFSSKLDNIYSSDKFYKQTVNLQLQPYSLVTTLNSDLKYNALDLTNNGKLRLEPLKLHVAGNLKGAYQNNEIKHIYAISSAALSASYKADTVAKVQGVEFSHRLNTDIAGLASAIDMSTNYNSDSLHFSNVFRSVMAPFTMTIDAHTNGNGKLALWGEHTGQLYSKFLLKAEPLAFTFSHDYKGSTSHHLVSRKSISAALEHKVSALLTPAEQTGTWKLKTQFNNNEYSQDLDAYNTKDKIGVELTGRTLADLTLLDSPIKVPLLLSEPINIIDALEMRDAVEKPQEFTIVAFVKYDKNQDVHSINLPFFETLQEYFERNRQTIIVVLENVQRNLKHINIDQFVRKYRAALGKLPQQANDYLNSFNWERQVSHAKEKLTALTKKYRITENDIQIALDDAKINFNEKLSQLQTYMIQFDQYIKDSYDLHDLKIAIANIIDEIIEKLKSLDEHYHIRVNLVKTIHDLHLFIENIDFNKSGSSTASWIQNVDTKYQIRIQIQEKLQQLKRHIQNIDIQHLAGKLKQHIEAIDVRVLLDQLGTTISFERINDVLEHVKHFVINLIGDFEVAEKINAFRAKVHELIERYEVDQQIQVLMDKLVELAHQYKLKETIQKLSNVLQQVKIKDYFEKLVGFIDDAVKKLNELSFKTFIEDVNKFLDMLIKKLKSFDYHQFVDETNDKIREVTQRLNGEIQALELPQKAEALKLFLEETKATVAVYLESLQDTKITLIINWLQEALSSASLAHMKAKFRETLEDTRDRMYQMDIQQELQRYLSLVGQVYSTLVTYISDWWTLAAKNLTDFAEQYSIQDWAKRMKALVEQGFTVPEIKTILGTMPAFEVSLQALQKATFQTPDFIVPLTDLRIPSVQINFKDLKNIKIPSRFSTPEFTILNTFHIPSFTIDFVEMKVKIIRTIDQMLNSELQWPVPDIYLRDLKVEDIPLARITLPDFRLPEIAIPEFIIPTLNLNDFQVPDLHIPEFQLPHISHTIEVPTFGKLYSILKIQSPLFTLDANADIGNGTTSANEAGIAASITAKGESKLEVLNFDFQANAQLSNPKINPLALKESVKFSSKYLRTEHGSEMLFFGNAIEGKSNTVASLHTEKNTLELSNGVIVKINNQLTLDSNTKYFHKLNIPKLDFSSQADLRNEIKTLLKAGHIAWTSSGKGSWKWACPRFSDEGTHESQISFTIEGPLTSFGLSNKINSKHLRVNQNLVYESGSLNFSKLEIQSQVDSQHVGHSVLTAKGMALFGEGKAEFTGRHDAHLNGKVIGTLKNSLFFSAQPFEITASTNNEGNLKVRFPLRLTGKIDFLNNYALFLSPSAQQASWQVSARFNQYKYNQNFSAGNNENIMEAHVGINGEANLDFLNIPLTIPEMRLPYTIITTPPLKDFSLWEKTGLKEFLKTTKQSFDLSVKAQYKKNKHRHSITNPLAVLCEFISQSIKSFDRHFEKNRNNALDFVTKSYNETKIKFDKYKAEKSHDELPRTFQIPGYTVPVVNVEVSPFTIEMSAFGYVFPKAVSMPSFSILGSDVRVPSYTLILPSLELPVLHVPRNLKLSLPDFKELCTISHIFIPAMGNITYDFSFKSSVITLNTNAELFNQSDIVAHLLSSSSSVIDALQYKLEGTTRLTRKRGLKLATALSLSNKFVEGSHNSTVSLTTKNMEVSVAKTTKAEIPILRMNFKQELNGNTKSKPTVSSSMEFKYDFNSSMLYSTAKGAVDHKLSLESLTSYFSIESSTKGDVKGSVLSREYSGTIASEANTYLNSKSTRSSVKLQGTSKIDDIWNLEVKENFAGEATLQRIYSLWEHSTKNHLQLEGLFFTNGEHTSKATLELSPWQMSALVQVHASQPSSFHDFPDLGQEVALNANTKNQKIRWKNEVRIHSGSFQSQVELSNDQEKAHLDIAGSLEGHLRFLKNIILPVYGQELMGFPKAGCNHQHW

SEQ ID NO: 899068 - protein, 3552 aa, Homo sapiens
MSRYELKLAIPEGKQVFLYPEKDEPTYILNIKRGIISALLVPPETEEAKQVLFLDTVYGNCSTHFTVKTRKGNVATEISTERDLGQCDRFKPIRTGISPLALIKGMTRPLSTLISSSQSCQYTLDAKRKHVAEAICKEQHLFLPFSYKNKYGMVAQVTQTLKLEDTPKINSRFFGEGTKKMGLAFESTKSTSPPKQAEAVLKTLQELKKLTISEQNIQRANLFNKLVTELRGLSDEAVTSLLPQLIEVSSPITLQALVQCGQPQCSTHILQWLKRVHANPLLIDVVTYLVALIPEPSAQQLREIFNMARDQRSRATLYALSHAVNNYHKTNPTGTQELLDIANYLMEQIQDDCTGDEDYTYLILRVIGNMGQTMEQLTPELKSSILKCVQSTKPSLMIQKAAIQALRKMEPKDKDQEVLLQTFLDDASPGDKRLAAYLMLMRSPSQADINKIVQILPWEQNEQVKNFVASHIANILNSEELDIQDLKKLVKEALKESQLPTVMDFRKFSRNYQLYKSVSLPSLDPASAKIEGNLIFDPNNYLPKESMLKTTLTAFGFASADLIEIGLEGKGFEPTLEALFGKQGFFPDSVNKALYWVNGQVPDGVSKVLVDHFGYTKDDKHEQDMVNGIMLSVEKLIKDLKSKEVPEARAYLRILGEELGFASLHDLQLLGKLLLMGARTLQGIPQMIGEVIRKGSKNDFFLHYIFMENAFELPTGAGLQLQISSSGVIAPGAKAGVKLEVANMQAELVAKPSVSVEFVTNMGIIIPDFARSGVQMNTNFFHESGLEAHVALKAGKLKFIIPSPKRPVKLLSGGNTLHLVSTTKTEVIPPLIENRQSWSVCKQVFPGLNYCTSGAYSNASSTDSASYYPLTGDTRLELELRPTGEIEQYSVSATYELQREDRALVDTLKFVTQAEGAKQTEATMTFKYNRQSMTLSSEVQIPDFDVDLGTILRVNDESTEGKTSYRLTLDIQNKKITEVALMGHLSCDTKEERKIKGVISIPRLQAEARSEILAHWSPAKLLLQMDSSATAYGSTVSKRVAWHYDEEKIEFEWNTGTNVDTKKMTSNFPVDLSDYPKSLHMYANRLLDHRVPQTDMTFRHVGSKLIVAMSSWLQKASGSLPYTQTLQDHLNSLKEFNLQNMGLPDFHIPENLFLKSDGRVKYTLNKNSLKIEIPLPFGGKSSRDLKMLETVRTPALHFKSVGFHLPSREFQVPTFTIPKLYQLQVPLLGVLDLSTNVYSNLYNWSASYSGGNTSTDHFSLRARYHMKADSVVDLLSYNVQGSGETTYDHKNTFTLSCDGSLRHKFLDSNIKFSHVEKLGNNPVSKGLLIFDASSSWGPQMSASVHLDSKKKQHLFVKEVKIDGQFRVSSFYAKGTYGLSCQRDPNTGRLNGESNLRFNSSYLQGTNQITGRYEDGTLSLTSTSDLQSGIIKNTASLKYENYELTLKSDTNGKYKNFATSNKMDMTFSKQNALLRSEYQADYESLRFFSLLSGSLNSHGLELNADILGTDKINSGAHKATLRIGQDGISTSATTNLKCSLLVLENELNAELGLSGASMKLTTNGRFREHNAKFSLDGKAALTELSLGSAYQAMILGVDSKNIFNFKVSQEGLKLSNDMMGSYAEMKFDHTNSLNIAGLSLDFSSKLDNIYSSDKFYKQTVNLQLQPYSLVTTLNSDLKYNALDLTNNGKLRLEPLKLHVAGNLKGAYQNNEIKHIYAISSAALSASYKADTVAKVQGVEFSHRLNTDIAGLASAIDMSTNYNSDSLHFSNVFRSVMAPFTMTIDAHTNGNGKLALWGEHTGQLYSKFLLKAEPLAFTFSHDYKGSTSHHLVSRKSISAALEHKVSALLTPAEQTGTWKLKTQFNNNEYSQDLDAYNTKDKIGVELTGRTLADLTLLDSPIKVPLLLSEPINIIDALEMRDAVEKPQEFTIVAFVKYDKNQDVHSINLPFFETLQEYFERNRQTIIVVLENVQRNLKHINIDQFVRKYRAALGKLPQQANDYLNSFNWERQVSHAKEKLTALTKKYRITENDIQIALDDAKINFNEKLSQLQTYMIQFDQYIKDSYDLHDLKIAIANIIDEIIEKLKSLDEHYHIRVNLVKTIHDLHLFIENIDFNKSGSSTASWIQNVDTKYQIRIQIQEKLQQLKRHIQNIDIQHLAGKLKQHIEAIDVRVLLDQLGTTISFERINDVLEHVKHFVINLIGDFEVAEKINAFRAKVHELIERYEVDQQIQVLMDKLVELAHQYKLKETIQKLSNVLQQVKIKDYFEKLVGFIDDAVKKLNELSFKTFIEDVNKFLDMLIKKLKSFDYHQFVDETNDKIREVTQRLNGEIQALELPQKAEALKLFLEETKATVAVYLESLQDTKITLIINWLQEALSSASLAHMKAKFRETLEDTRDRMYQMDIQQELQRYLSLVGQVYSTLVTYISDWWTLAAKNLTDFAEQYSIQDWAKRMKALVEQGFTVPEIKTILGTMPAFEVSLQALQKATFQTPDFIVPLTDLRIPSVQINFKDLKNIKIPSRFSTPEFTILNTFHIPSFTIDFVEMKVKIIRTIDQMLNSELQWPVPDIYLRDLKVEDIPLARITLPDFRLPEIAIPEFQLPHISHTIEVPTFGKLYSILKIQSPLFTLDANADIGNGTTSANEAGIAASITAKGESKLEVLNFDFQANAQLSNPKINPLALKESVKFSSKYLRTEHGSEMLFFGNAIEGKSNTVASLHTEKNTLELSNGVIVKINNQLTLDSNTKYFHKLNIPKLDFSSQADLRNEIKTLLKAGHIAWTSSGKGSWKWACPRFSDEGTHESQISFTIEGPLTSFGLSNKINSKHLRVNQNLVYESGSLNFSKLEIQSQVDSQHVGHSVLTAKGMALFGEGKAEFTGRHDAHLNGKVIGTLKNSLFFSAQPFEITASTNNEGNLKVRFPLRLTGKIDFLNNYALFLSPSAQQASWQVSARFNQYKYNQNFSAGNNENIMEAHVGINGEANLDFLNIPLTIPEMRLPYTIITTPPLKDFSLWEKTGLKEFLKTTKQSFDLSVKAQYKKNKHRHSITNPLAVLCEFISQSIKSFDRHFEKNRNNALDFVTKSYNETKIKFDKYKAEKSHDELPRTFQIPGYTVPVVNVEVSPFTIEMSAFGYVFPKAVSMPSFSILGSDVRVPSYTLILPSLELPVLHVPRNLKLSLPHFKELCTISHIFIPAMGNITYDFSFKSSVITLNTNAELFNQSDIVAHLLSSSSSVIDALQYKLEGTTRLTRKRGLKLATALSLSNKFVEGSHNSTVSLTTKNMEVSVAKTTKAEIPILRMNFKQELNGNTKSKPTVSSSMEFKYDFNSSMLYSTAKGAVDHKLSLESLTSYFSIESSTKGDVKGSVLSREYSGTIASEANTYLNSKSTRSSVKLQGTSKIDDIWNLEVKENFAGEATLQRIYSLWEHSTKNHLQLEGLFFTNGEHTSKATLELSPWQMSALVQVHASQPSSFHDFPDLGQEVALNANTKNQKIRWKNEVRIHSGSFQSQVELSNDQEKAHLDIAGSLEGHLRFLKNIILPVYGQELMGFPKAGCNHQHW

SEQ ID NO: 899069 - protein, 3642 aa, Homo sapiens
MDPPRPALLALLALPALLLLLLAGARAEEEMLENVSLVCPKDATRFKHLRKYTYNYEAESSSGVPGTADSRSATRINCKVELEVPQLCSFILKTSQCTLKEVYGFNPEGKALLKKTKNSEEFAAAMSRYELKLAIPEGKQVFLYPEKDEPTYILNIKRGIISALLVPPETEEAKQVLFLDTVYGNCSTHFTVKTRKGNVATEISTERDLGQCDRFKPIRTGISPLALIKGMTRPLSTLISSSQSCQYTLDAKRKHVAEAICKEQHLFLPFSYKNKYGMVAQVTQTLKLEDTPKINSRFFGEGTKKMGLAFESTKSTSPPKQAEAVLKTLQELKKLTISEQNIQRANLFNKLVTELRGLSDEAVTSLLPQLIEVSSPITLQALVQCGQPQCSTHILQWLKRVHANPLLIDVVTYLVALIPEPSAQQLREIFNMARDQRSRATLYALSHAVNNYHKTNPTGTQELLDIANYLMEQIQDDCTGDEDYTYLILRVIGNMGQTMEQLTPELKSSILKCVQSTKPSLMIQKAAIQALRKMEPKDKDQEVLLQTFLDDASPGDKRLAAYLMLMRSPSQADINKIVQILPWEQNEQVKNFVASHIANILNSEELDIQDLKKLVKEALKESQLPTVMDFRKFSRNYQLYKSVSLPSLDPASAKIEGNLIFDPNNYLPKESMLKTTLTAFGFASADLIEIGLEGKGFEPTLEALFGKQGFFPDSVNKALYWVNGQVPDGVSKVLVDHFGYTKDDKHEQDMVNGIMLSVEKLIKDLKSKEVPEARAYLRILGEELGFASLHDLQLLGKLLLMGARTLQGIPQMIGEVIRKGSKNDFFLHYIFMENAFELPTGAGLQLQISSSGVIAPGAKAGVKLEVANMQAELVAKPSVSVEFVTNMGIIIPDFARSGVQMNTNFFHESGLEAHVALKAGKLKFIIPSPKRPVKLLSGGNTLHLVSTTKQVFPGLNYCTSGAYSNASSTDSASYYPLTGDTRLELELRPTGEIEQYSVSATYELQREDRALVDTLKFVTQAEGAKQTEATMTFKYNRQSMTLSSEVQIPDFDVDLGTILRVNDESTEGKTSYRLTLDIQNKKITEVALMGHLSCDTKEERKIKGVISIPRLQAEARSEILAHWSPAKLLLQMDSSATAYGSTVSKRVAWHYDEEKIEFEWNTGTNVDTKKMTSNFPVDLSDYPKSLHMYANRLLDHRVPQTDMTFRHVGSKLIVAMSSWLQKASGSLPYTQTLQDHLNSLKEFNLQNMGLPDFHIPENLFLKSDGRVKYTLNKNSLKIEIPLPFGGKSSRDLKMLETVRTPALHFKSVGFHLPSREFQVPTFTIPKLYQLQVPLLGVLDLSTNVYSNLYNWSASYSGGNTSTDHFSLRARYHMKADSVVDLLSYNVQGSGETTYDHKNTFTLSCDGSLRHKFLDSNIKFSHVEKLGNNPVSKGLLIFDASSSWGPQMSASVHLDSKKKQHLFVKEVKIDGQFRVSSFYAKGTYGLSCQRDPNTGRLNGESNLRFNSSYLQGTNQITGRYEDGTLSLTSTSDLQSGIIKNTASLKYENYELTLKSDTNGKYKNFATSNKMDMTFSKQNALLRSEYQADYESLRFFSLLSGSLNSHGLELNADILGTDKINSGAHKATLRIGQDGISTSATTNLKCSLLVLENELNAELGLSGASMKLTTNGRFREHNAKFSLDGKAALTELSLGSAYQAMILGVDSKNIFNFKVSQEGLKLSNDMMGSYAEMKFDHTNSLNIAGLSLDFSSKLDNIYSSDKFYKQTVNLQLQPYSLVTTLNSDLKYNALDLTNNGKLRLEPLKLHVAGNLKGAYQNNEIKHIYAISSAALSASYKADTVAKVQGVEFSHRLNTDIAGLASAIDMSTNYNSDSLHFSNVFRSVMAPFTMTIDAHTNGNGKLALWGEHTGQLYSKFLLKAEPLAFTFSHDYKGSTSHHLVSRKSISAALEHKVSALLTPAEQTGTWKLKTQFNNNEYSQDLDAYNTKDKIGVELTGRTLADLTLLDSPIKVPLLLSEPINIIDALEMRDAVEKPQEFTIVAFVKYDKNQDVHSINLPFFETLQEYFERNRQTIIVVLENVQRNLKHINIDQFVRKYRAALGKLPQQANDYLNSFNWERQVSHAKEKLTALTKKYRITENDIQIALDDAKINFNEKLSQLQTYMIQFDQYIKDSYDLHDLKIAIANIIDEIIEKLKSLDEHYHIRVNLVKTIHDLHLFIENIDFNKSGSSTASWIQNVDTKYQIRIQIQEKLQQLKRHIQNIDIQHLAGKLKQHIEAIDVRVLLDQLGTTISFERINDVLEHVKHFVINLIGDFEVAEKINAFRAKVHELIERYEVDQQIQVLMDKLVELAHQYKLKETIQKLSNVLQQVKIKDYFEKLVGFIDDAVKKLNELSFKTFIEDVNKFLDMLIKKLKSFDYHQFVDETNDKIREVTQRLNGEIQALELPQKAEALKLFLEETKATVAVYLESLQDTKITLIINWLQEALSSASLAHMKAKFRETLEDTRDRMYQMDIQQELQRYLSLVGQVYSTLVTYISDWWTLAAKNLTDFAEQYSIQDWAKRMKALVEQGFTVPEIKTILGTMPAFEVSLQALQKATFQTPDFIVPLTDLRIPSVQINFKDLKNIKIPSRFSTPEFTILNTFHIPSFTIDFVEMKVKIIRTIDQMLNSELQWPVPDIYLRDLKVEDIPLARITLPDFRLPEIAIPEFQLPHISHTIEVPTFGKLYSILKIQSPLFTLDANADIGNGTTSANEAGIAASITAKGESKLEVLNFDFQANAQLSNPKINPLALKESVKFSSKYLRTEHGSEMLFFGNAIEGKSNTVASLHTEKNTLELSNGVIVKINNQLTLDSNTKYFHKLNIPKLDFSSQADLRNEIKTLLKAGHIAWTSSGKGSWKWACPRFSDEGTHESQISFTIEGPLTSFGLSNKINSKHLRVNQNLVYESGSLNFSKLEIQSQVDSQHVGHSVLTAKGMALFGEGKAEFTGRHDAHLNGKVIGTLKNSLFFSAQPFEITASTNNEGNLKVRFPLRLTGKIDFLNNYALFLSPSAQQASWQVSARFNQYKYNQNFSAGNNENIMEAHVGINGEANLDFLNIPLTIPEMRLPYTIITTPPLKDFSLWEKTGLKEFLKTTKQSFDLSVKAQYKKNKHRHSITNPLAVLCEFISQSIKSFDRHFEKNRNNALDFVTKSYNETKIKFDKYKAEKSHDELPRTFQIPGYTVPVVNVEVSPFTIEMSAFGYVFPKAVSMPSFSILGSDVRVPSYTLILPSLELPVLHVPRNLKLSLPDFKELCTISHIFIPAMGNITYDFSFKSSVITLNTNAELFNQSDIVAHLLSSSSSVIDALQYKLEGTTRLTRKRGLKLATALSLSNKFVEGSHNSTVSLTTKNMEVSVAKTTKAEIPILRMNFKQELNGNTKSKPTVSSSMEFKYDFNSSMLYSTAKGAVDHKLSLESLTSYFSIESSTKGDVKGSVLSREYSGTIASEANTYLNSKSTRSSVKLQGTSKIDDIWNLEVKENFAGEATLQRIYSLWEHSTKNHLQLEGLFFTNGEHTSKATLELSPWQMSALVQVHASQPSSFHDFPDLGQEVALNANTKNQKIRWKNEVRIHSGSFQSQVELSNDQEKAHLDIAGSLEGHLRFLKNIILTSL

SEQ ID NO: 899070 - protein, 3697 aa, Homo sapiens; identical to SEQ ID NO: 899067

SEQ ID NO: 899071 - protein, 3697 aa, Homo sapiens; identical to SEQ ID NO: 899067

SEQ ID NO: 899072 - protein, 3697 aa, Homo sapiens; identical to SEQ ID NO: 899067

SEQ ID NO: 899073 - protein, 1082 aa, Homo sapiens
MEVDISSTFSIESSTKGDVKGSVLSREYSGTIASEANTYLNSKSTRSSVKLQGTSKIDDIWNLEVKENFAGEATLQRIYSLWEHSTKNHLQLEGLFFTNGEHTSKATLELSPWQMSALVQVHASQPSSFHDFPDLGQEVALNANTKNQKIRWKNEVRIHSGSFQSQVELSNDQEKAHLDIAGSLEGHLRFLKNIILPVYDKSLWDFLKLDVTTSIGRRQHLRVSTAFVYTKNPNGYSFSIPVKVLADKFIIPGLKLNDLNSVLVMPTFHVPFTDLQVPSCKLDFREIQIYKKLRTSSFALNLPTLPEVKFPEVDVLTKYSQPEDSLIPFFEITVPESQLTVSQFTLPKSVSDGIAALDLNAVANKIADFELPTIIVPEQTIEIPSIKFSVPAGIVIPSFQALTARFEVDSPVYNATWSASLKNKADYVETVLDSTCSSTVQFLEYELNVLGTHKIEDGTLASKTKGTFAHRDFSAEYEEDGKYEGLQEWEGKAHLNIKSPAFTDLHLRYQKDKKGISTSAASPAVGTVGMDMDEDDDFSKWNFYYSPQSSPDKKLTIFKTELRVRESDEETQIKVNWEEEAASGLLTSLKDNVPKATGVLYDYVNKYHWEHTGLTLREVSSKLRRNLQNNAEWVYQGAIRQIDDIDVRFQKAASGTTGTYQEWKDKAQNLYQELLTQEGQASFQGLKDNVFDGLVRVTQEFHMKVKHLIDSLIDFLNFPRFQFPGKPGIYTREELCTMFIREVGTVLSQVYSKVHNGSEILFSYFQDLVITLPFELRKHKLIDVISMYRELLKDLSKEAQEVFKAIQSLKTTEVLRNLQDLLQFIFQLIEDNIKQLKEMKFTYLINYIQDEINTIFSDYIPYVFKLLKENLCLNLHKFNEFIQNELQEASQELQQIHQYIMALREEYFDPSIVGWTVKYYELEEKIVSLIKNLLVALKDFHSEYIVSASNFTSQLSSQVEQFLHRNIQEYLSILTDPDGKGKEKIAELSATAQEIIKSQAIATKKIISDYHQQFRYKLQDFSDQLSDYYEKFIAESKRLIDLSIQNYHTFLIYITELLKKLQSTTVMNPYMKLAPGELTIIL

SEQ ID NO: 899074 - protein, 4164 aa, Homo sapiens
MDPPRPALLALLALPALLLLLLAGARAEEEMLENVSLVCPKDATRFKHLRKYTYNYEAESSSGVPGTADSRSATRINCKVELEVPQLCSFILKTSQCTLKEVYGFNPEGKALLKKTKNSEEFAAAMSRYELKLAIPEGKQVFLYPEKDEPTYILNIKRGIISALLVPPETEEAKQVLFLDTVYGNCSTHFTVKTRKGNVATEISTERDLGQCDRFKPIRTGISPLALIKGMTRPLSTLISSSQSCQYTLDAKRKHVAEAICKEQHLFLPFSYKNKYGMVAQVTQTLKLEDTPKINSRFFGEGTKKMGLAFESTKSTSPPKQAEAVLKTLQELKKLTISEQNIQRANLFNKLVTELRGLSDEAVTSLLPQLIEVSSPITLQALVQCGQPQCSTHILQWLKRVHANPLLIDVVTYLVALIPEPSAQQLREIFNMARDQRSRATLYALSHAVNNYHKTNPTGTQELLDIANYLMEQIQDDCTGDEDYTYLILRVIGNMGQTMEQLTPELKSSILKCVQSTKPSLMIQKAAIQALRKMEPKDKDQEVLLQTFLDDASPGDKRLAAYLMLMRSPSQADINKIVQILPWEQNEQVKNFVASHIANILNSEELDIQDLKKLVKEALKESQLPTVMDFRKFSRNYQLYKSVSLPSLDPASAKIEGNLIFDPNNYLPKESMLKTTLTAFGFASADLIEIGLEGKGFEPTLEALFGKQGFFPDSVNKALYWVNGQVPDGVSKVLVDHFGYTKDDKHEQDMVNGIMLSVEKLIKDLKSKEVPEARAYLRILGEELGFASLHDLQLLGKLLLMGARTLQGIPQMIGEVIRKGSKNDFFLHYIFMENAFELPTGAGLQLQISSSGVIAPGAKAGVKLEVANMQAELVAKPSVSVEFVTNMGIIIPDFARSGVQMNTNFFHESGLEAHVALKAGKLKFIIPSPKRPVKLLSGGNTLHLVSTTKTEVIPPLIENRQSWSVCKQVFPGLNYCTSGAYSNASSTDSASYYPLTGDTRLELELRPTGEIEQYSVSATYELQREDRALVDTLKFVTQAEGAKQTEATMTFKYNRQSMTLSSEVQIPDFDVDLGTILRVNDESTEGKTSYRLTLDIQNKKITEVALMGHLSCDTKEERKIKGVISIPRLQAEARSEILAHWSPAKLLLQMDSSATAYGSTVSKRVAWHYDEEKIEFEWNTGTNVDTKKMTSNFPVDLSDYPKSLHMYANRLLDHRVPQTDMTFRHVGSKLIVAMSSWLQKASGSLPYTQTLQDHLNSLKEFNLQNMGLPDFHIPENLFLKSDGRVKYTLNKNSLKIEIPLPFGGKSSRDLKMLETVRTPALHFKSVGFHLPSREFQVPTFTIPKLYQLQVPLLGVLDLSTNVYSNLYNWSASYSGGNTSTDHFSLRARYHMKADSVVDLLSYNVQGSGETTYDHKNTFTLSCDGSLRHKFLDSNIKFSHVEKLGNNPVSKGLLIFDASSSWGPQMSASVHLDSKKKQHLFVKEVKIDGQFRVSSFYAKGTYGLSCQRDPNTGRLNGESNLRFNSSYLQGTNQITGRYEDGTLSLTSTSDLQSGIIKNTASLKYENYELTLKSDTNGKYKNFATSNKMDMTFSKQNALLRSEYQADYESLRFFSLLSGSLNSHGLELNADILGTDKINSGAHKATLRIGQDGISTSATTNLKCSLLVLENELNAELGLSGASMKLTTNGRFREHNAKFSLDGKAALTELSLGSAYQAMILGVDSKNIFNFKVSQEGLKLSNDMMGSYAEMKFDHTNSLNIAGLSLDFSSKLDNIYSSDKFYKQTVNLQLQPYSLVTTLNSDLKYNALDLTNNGKLRLEPLKLHVAGNLKGAYQNNEIKHIYAISSAALSASYKADTVAKVQGVEFSHRLNTDIAGLASAIDMSTNYNSDSLHFSNVFRSVMAPFTMTIDAHTNGNGKLALWGEHTGQLYSKFLLKAEPLAFTFSHDYKGSTSHHLVSRKSISAALEHKVSALLTPAEQTGTWKLKTQFNNNEYSQDLDAYNTKDKIGVELTGRTLADLTLLDSPIKVPLLLSEPINIIDALEMRDAVEKPQEFTIVAFVKYDKNQDVHSINLPFFETLQEYFERNRQTIIVVLENVQRNLKHINIDQFVRKYRAALGKLPQQANDYLNSFNWERQVSHAKEKLTALTKKYRITENDIQIALDDAKINFNEKLSQLQTYMIQFDQYIKDSYDLHDLKIAIANIIDEIIEKLKSLDEHYHIRVNLVKTIHDLHLFIENIDFNKSGSSTASWIQNVDTKYQIRIQIQEKLQQLKRHIQNIDIQHLAGKLKQHIEAIDVRVLLDQLGTTISFERINDVLEHVKHFVINLIGDFEVAEKINAFRAKVHELIERYEVDQQIQVLMDKLVELAHQYKLKETIQKLSNVLQQVKIKDYFEKLVGFIDDAVKKLNELSFKTFIEDVNKFLDMLIKKLKSFDYHQFVDETNDKIREVTQRLNGEIQALELPQKAEALKLFLEETKATVAVYLESLQDTKITLIINWLQEALSSASLAHMKAKFRETLEDTRDRMYQMDIQQELQRYLSLVGQVYSTLVTYISDWWTLAAKNLTDFAEQYSIQDWAKRMKALVEQGFTVPEIKTILGTMPAFEVSLQALQKATFQTPDFIVPLTDLRIPSVQINFKDLKNIKIPSRFSTPEFTILNTFHIPSFTIDFVEMKVKIIRTIDQMLNSELQWPVPDIYLRDLKVEDIPLARITLPDFRLPEIAIPEFIIPTLNLNDFQVPDLHIPEFQLPHISHTIEVPTFGKLYSILKIQSPLFTLDANADIGNGTTSANEAGIAASITAKGESKLEVLNFDFQANAQLSNPKINPLALKESVKFSSKYLRTEHGSEMLFFGNAIEGKSNTVASLHTEKNTLELSNGVIVKINNQLTLDSNTKYFHKLNIPKLDFSSQADLRNEIKTLLKAGHIAWTSSGKGSWKWACPRFSDEGTHESQISFTIEGPLTSFGLSNKINSKHLRVNQNLVYESGSLNFSKLEIQSQVDSQHVGHSVLTAKGMALFGEGKAEFTGRHDAHLNGKVIGTLKNSLFFSAQPFEITASTNNEGNLKVRFPLRLTGKIDFLNNYALFLSPSAQQASWQVSARFNQYKYNQNFSAGNNENIMEAHVGINGEANLDFLNIPLTIPEMRLPYTIITTPPLKDFSLWEKTGLKEFLKTTKQSFDLSVKAQYKKNKHRHSITNPLAVLCEFISQSIKSFDRHFEKNRNNALDFVTKSYNETKIKFDKYKAEKSHDELPRTFQIPGYTVPVVNVEVSPFTIEMSAFGYVFPKAVSMPSFSILGSDVRVPSYTLILPSLELPVLHVPRNLKLSLPDFKELCTISHIFIPAMGNITYDFSFKSSVITLNTNAELFNQSDIVAHLLSSSSSVIDALQYKLEGTTRLTRKRGLKLATALSLSNKFVEGSHNSTVSLTTKNMEVSVAKTTKAEIPILRMNFKQELNGNTKSKPTVSSSMEFKYDFNSSMLYSTAKGAVDHKLSLESLTSYFSIESSTKGDVKGSVLSREYSGTIASEANTYLNSKSTRSSVKLQGTSKIDDIWNLEVKENFAGEATLQRIYSLWEHSTKNHLQLEGLFFTNGEHTSKATLELSPWQMSALVQVHASQPSSFHDFPDLGQEVALNANTKNQKIRWKNEVRIHSGSFQSQVELSNDQEKAHLDIAGSLEGHLRFLKNIILPVYDKSLWDFLKLDVTTSIGRRQHLRVSTAFVYTKNPNGYSFSIPVKVLADKFIIPGLKLNDLNSVLVMPTFHVPFTDLQVPSCKLDFREIQIYKKLRTSSFALNLPTLPEVKFPEVDVLTKYSQPEDSLIPFFEITVPESQLTVSQFTLPKSVSDGIAALDLNAVANKIADFELPTIIVPEQTIEIPSIKFSVPAGIVIPSFQALTARFEVDSPVYNATWSASLKNKADYVETVLDSTCSSTVQFLEYELNVLGTHKIEDGTLASKTKGTFAHRDFSAEYEEDGKYEGLQEWEGKAHLNIKSPAFTDLHLRYQKDKKGISTSAASPAVGTVGMDMDEDDDFSKWNFYYSPQSSPVYHINEEADRRIRSSMERAVVYSLKTRATGVLYDYVNKYHWEHTGLTLREVSSKLRRNLQNNAEWVYQGAIRQIDDIDVRFQKAASGTTGTYQEWKDKANLSRRDQRQAFQDQDRLMVGEYQIHVKSALMII

SEQ ID NO: 899075 - protein, 3956 aa, Homo sapiens
MDPPRPALLALLALPALLLLLLAGARAEEEMLENVSLVCPKDATRFKHLRKYTYNYEAESSSGVPGTADSRSATRINCKVELEVPQLCSFILKTSQCTLKEVYGFNPEGKALLKKTKNSEEFAAAMSRYELKLAIPEGKQVFLYPEKDEPTYILNIKRGIISALLVPPETEEAKQVLFLDTVYGNCSTHFTVKTRKGNVATEISTERDLGQCDRFKPIRTGISPLALIKGMTRPLSTLISSSQSCQYTLDAKRKHVAEAICKEQHLFLPFSYKNKYGMVAQVTQTLKLEDTPKINSRFFGEGTKKMGLAFESTKSTSPPKQAEAVLKTLQELKKLTISEQNIQRANLFNKLVTELRGLSDEAVTSLLPQLIEVSSPITLQALVQCGQPQCSTHILQWLKRVHANPLLIDVVTYLVALIPEPSAQQLREIFNMARDQRSRATLYALSHAVNNYHKTNPTGTQELLDIANYLMEQIQDDCTGDEDYTYLILRVIGNMGQTMEQLTPELKSSILKCVQSTKPSLMIQKAAIQALRKMEPKDKDQEVLLQTFLDDASPGDKRLAAYLMLMRSPSQADINKIVQILPWEQNEQVKNFVASHIANILNSEELDIQDLKKLVKEALKESQLPTVMDFRKFSRNYQLYKSVSLPSLDPASAKIEGNLIFDPNNYLPKESMLKTTLTAFGFASADLIEIGLEGKGFEPTLEALFGKQGFFPDSVNKALYWVNGQVPDGVSKVLVDHFGYTKDDKHEQDMVNGIMLSVEKLIKDLKSKEVPEARAYLRILGEELGFASLHDLQLLGKLLLMGARTLQGIPQMIGEVIRKGSKNDFFLHYIFMENAFELPTGAGLQLQISSSGVIAPGAKAGVKLEVANMQAELVAKPSVSVEFVTNMGIIIPDFARSGVQMNTNFFHESGLEAHVALKAGKLKFIIPSPKRPVKLLSGGNTLHLVSTTKTEVIPPLIENRQSWSVCKQVFPGLNYCTSGAYSNASSTDSASYYPLTGDTRLELELRPTGEIEQYSVSATYELQREDRALVDTLKFVTQAEGAKQTEATMTFKYNRQSMTLSSEVQIPDFDVDLGTILRVNDESTEGKTSYRLTLDIQNKKITEVALMGHLSCDTKEERKIKGVISIPRLQAEARSEILAHWSPAKLLLQMDSSATAYGSTVSKRVAWHYDEEKIEFEWNTGTNVDTKKMTSNFPVDLSDYPKSLHMYANRLLDHRVPQTDMTFRHVGSKLIVAMSSWLQKASGSLPYTQTLQDHLNSLKEFNLQNMGLPDFHIPENLFLKSDGRVKYTLNKNSLKIEIPLPFGGKSSRDLKMLETVRTPALHFKSVGFHLPSREFQVPTFTIPKLYQLQVPLLGVLDLSTNVYSNLYNWSASYSGGNTSTDHFSLRARYHMKADSVVDLLSYNVQGSGETTYDHKNTFTLSCDGSLRHKFLDSNIKFSHVEKLGNNPVSKGLLIFDASSSWGPQMSASVHLDSKKKQHLFVKEVKIDGQFRVSSFYAKGTYGLSCQRDPNTGRLNGESNLRFNSSYLQGTNQITGRYEDGTLSLTSTSDLQSGIIKNTASLKYENYELTLKSDTNGKYKNFATSNKMDMTFSKQNALLRSEYQADYESLRFFSLLSGSLNSHGLELNADILGTDKINSGAHKATLRIGQDGISTSATTNLKCSLLVLENELNAELGLSGASMKLTTNGRFREHNAKFSLDGKAALTELSLGSAYQAMILGVDSKNIFNFKVSQEGLKLSNDMMGSYAEMKFDHTNSLNIAGLSLDFSSKLDNIYSSDKFYKQTVNLQLQPYSLVTTLNSDLKYNALDLTNNGKLRLEPLKLHVAGNLKGAYQNNEIKHIYAISSAALSASYKADTVAKVQGVEFSHRLNTDIAGLASAIDMSTNYNSDSLHFSNVFRSVMAPFTMTIDAHTNGNGKLALWGEHTGQLYSKFLLKAEPLAFTFSHDYKGSTSHHLVSRKSISAALEHKVSALLTPAEQTGTWKLKTQFNNNEYSQDLDAYNTKDKIGVELTGRTLADLTLLDSPIKVPLLLSEPINIIDALEMRDAVEKPQEFTIVAFVKYDKNQDVHSINLPFFETLQEYFERNRQTIIVVLENVQRNLKHINIDQFVRKYRAALGKLPQQANDYLNSFNWERQVSHAKEKLTALTKKYRITENDIQIALDDAKINFNEKLSQLQTYMIQFDQYIKDSYDLHDLKIAIANIIDEIIEKLKSLDEHYHIRVNLVKTIHDLHLFIENIDFNKSGSSTASWIQNVDTKYQIRIQIQEKLQQLKRHIQNIDIQHLAGKLKQHIEAIDVRVLLDQLGTTISFERINDVLEHVKHFVINLIGDFEVAEKINAFRAKVHELIERYEVDQQIQVLMDKLVELAHQYKLKETIQKLSNVLQQVKIKDYFEKLVGFIDDAVKKLNELSFKTFIEDVNKFLDMLIKKLKSFDYHQFVDETNDKIREVTQRLNGEIQALELPQKAEALKLFLEETKATVAVYLESLQDTKITLIINWLQEALSSASLAHMKAKFRETLEDTRDRMYQMDIQQELQRYLSLVGQVYSTLVTYISDWWTLAAKNLTDFAEQYSIQDWAKRMKALVEQGFTVPEIKTILGTMPAFEVSLQALQKATFQTPDFIVPLTDLRIPSVQINFKDLKNIKIPSRFSTPEFTILNTFHIPSFTIDFVEMKVKIIRTIDQMLNSELQWPVPDIYLRDLKVEDIPLARITLPDFRLPEIAIPEFIIPTLNLNDFQVPDLHIPEFQLPHISHTIEVPTFGKLYSILKIQSPLFTLDANADIGNGTTSANEAGIAASITAKGESKLEVLNFDFQANAQLSNPKINPLALKESVKFSSKYLRTEHGSEMLFFGNAIEGKSNTVASLHTEKNTLELSNGVIVKINNQLTLDSNTKYFHKLNIPKLDFSSQADLRNEIKTLLKAGHIAWTSSGKGSWKWACPRFSDEGTHESQISFTIEGPLTSFGLSNKINSKHLRVNQNLVYESGSLNFSKLEIQSQVDSQHVGHSVLTAKGMALFGEGKAEFTGRHDAHLNGKVIGTLKNSLFFSAQPFEITASTNNEGNLKVRFPLRLTGKIDFLNNYALFLSPSAQQASWQVSARFNQYKYNQNFSAGNNENIMEAHVGINGEANLDFLNIPLTIPEMRLPYTIITTPPLKDFSLWEKTGLKEFLKTTKQSFDLSVKAQYKKNKHRHSITNPLAVLCEFISQSIKSFDRHFEKNRNNALDFVTKSYNETKIKFDKYKAEKSHDELPRTFQIPGYTVPVVNVEVSPFTIEMSAFGYVFPKAVSMPSFSILGSDVRVPSYTLILPSLELPVLHVPRNLKLSLPDFKELCTISHIFIPAMGNITYDFSFKSSVITLNTNAELFNQSDIVAHLLSSSSSVIDALQYKLEGTTRLTRKRGLKLATALSLSNKFVEGSHNSTVSLTTKNMEVSVAKTTKAEIPILRMNFKQELNGNTKSKPTVSSSMEFKYDFNSSMLYSTAKGAVDHKLSLESLTSYFSIESSTKGDVKGSVLSREYSGTIASEANTYLNSKSTRSSVKLQGTSKIDDIWNLEVKENFAGEATLQRIYSLWEHSTKNHLQLEGLFFTNGEHTSKATLELSPWQMSALVQVHASQPSSFHDFPDLGQEVALNANTKNQKIRWKNEVRIHSGSFQSQVELSNDQEKAHLDIAGSLEGHLRFLKNIILPVYDKSLWDFLKLDVTTSIGRRQHLRVSTAFVYTKNPNGYSFSIPVKVLADKFIIPGLKLNDLNSVLVMPTFHVPFTDLQVPSCKLDFREIQIYKKLRTSSFALNLPTLPEVKFPEVDVLTKYSQPEDSLIPFFEITVPESQLTVSQFTLPIADFELPTIIVPEQTIEIPSIKFSVPAGIVIPSFQALTARFEVDSPVYNATWSASSYTHPLILHHSSIPPPPPPLSLSHLSLHAFLPPQSPSLRLPSHSAITPPLLFPSSPLLPFLSSSTSVLVKLTP

SEQ ID NO: 899076 - protein, 2750 aa, Homo sapiens
MDPPRPALLALLALPALLLLLLAGARAEEEMLENVSLVCPKDATRFKHLRKYTYNYEAESSSGVPGTADSRSATRINCKVELEVPQLCSFILKTSQCTLKEVYGFNPEGKALLKKTKNSEEFAAAMSRYELKLAIPEGKQVFLYPEKDEPTYILNIKRGIISALLVPPETEEAKQVLFLDTVYGNCSTHFTVKTRKGNVATEISTERDLGQCDRFKPIRTGISPLALIKGMTRPLSTLISSSQSCQYTLDAKRKHVAEAICKEQHLFLPFSYKNKYGMVAQVTQTLKLEDTPKINSRFFGEGTKKMGLAFESTKSTSPPKQAEAVLKTLQELKKLTISEQNIQRANLFNKLVTELRGLSDEAVTSLLPQLIEVSSPITLQALVQCGQPQCSTHILQWLKRVHANPLLIDVVTYLVALIPEPSAQQLREIFNMARDQRSRATLYALSHAVNNYHKTNPTGTQELLDIANYLMEQIQDDCTGDEDYTYLILRVIGNMGQTMEQLTPELKSSILKCVQSTKPSLMIQKAAIQALRKMEPKDKDQEVLLQTFLDDASPGDKRLAAYLMLMRSPSQADINKIVQILPWEQNEQVKNFVASHIANILNSEELDIQDLKKLVKEALKESQLPTVMDFRKFSRNYQLYKSVSLPSLDPASAKIEGNLIFDPNNYLPKESMLKTTLTAFGFASADLIEIGLEGKGFEPTLEALFGKQGFFPDSVNKALYWVNGQVPDGVSKVLVDHFGYTKDDKHEQDMVNGIMLSVEKLIKDLKSKEVPEARAYLRILGEELGFASLHDLQLLGKLLLMGARTLQGIPQMIGEVIRKGSKNDFFLHYIFMENAFELPTGAGLQLQISSSGVIAPGAKAGVKLEVANMQAELVAKPSVSVEFVTNMGIIIPDFARSGVQMNTNFFHESGLEAHVALKAGKLKFIIPSPKRPVKLLSGGNTLHLVSTTKTEVIPPLIENRQSWSVCKQVFPGLNYCTSGAYSNASSTDSASYYPLTGDTRLELELRPTGEIEQYSVSATYELQREDRALVDTLKFVTQAEGAKQTEATMTFKYNRQSMTLSSEVQIPDFDVDLGTILRVNDESTEGKTSYRLTLDIQNKKITEVALMGHLSCDTKEERKIKGVISIPRLQAEARSEILAHWSPAKLLLQMDSSATAYGSTVSKRVAWHYDEEKIEFEWNTGTNVDTKKMTSNFPVDLSDYPKSLHMYANRLLDHRVPQTDMTFRHVGSKLIVAMSSWLQKASGSLPYTQTLQDHLNSLKEFNLQNMGLPDFHIPENLFLKSDGRVKYTLNKNSLKIEIPLPFGGKSSRDLKMLETVRTPALHFKSVGFHLPSREFQVPTFTIPKLYQLQVPLLGVLDLSTNVYSNLYNWSASYSGGNTSTDHFSLRARYHMKADSVVDLLSYNVQGSGETTYDHKNTFTLSCDGSLRHKFLDSNIKFSHVEKLGNNPVSKGLLIFDASSSWGPQMSASVHLDSKKKQHLFVKEVKIDGQFRVSSFYAKGTYGLSCQRDPNTGRLNGESNLRFNSSYLQGTNQITGRYEDGTLSLTSTSDLQSGIIKNTASLKYENYELTLKSDTNGKYKNFATSNKMDMTFSKQNALLRSEYQADYESLRFFSLLSGSLNSHGLELNADILGTDKINSGAHKATLRIGQDGISTSATTNLKCSLLVLENELNAELGLSGASMKLTTNGRFREHNAKFSLDGKAALTELSLGSAYQAMILGVDSKNIFNFKVSQEGLKLSNDMMGSYAEMKFDHTNSLNIAGLSLDFSSKLDNIYSSDKFYKQTVNLQLQPYSLVTTLNSDLKYNALDLTNNGKLRLEPLKLHVAGNLKGAYQNNEIKHIYAISSAALSASYKADTVAKVQGVEFSHRLNTDIAGLASAIDMSTNYNSDSLHFSNVFRSVMAPFTMTIDAHTNGNGKLALWGEHTGQLYSKFLLKAEPLAFTFSHDYKGSTSHHLVSRKSISAALEHKVSALLTPAEQTGTWKLKTQFNNNEYSQDLDAYNTKDKIGVELTGRTLADLTLLDSPIKVPLLLSEPINIIDALEMRDAVEKPQEFTIVAFVKYDKNQDVHSINLPFFETLQEYFERNRQTIIVVLENVQRNLKHINIDQFVRKYRAALGKLPQQANDYLNSFNWERQVSHAKEKLTALTKKYRITENDIQIALDDAKINFNEKLSQLQTYMIQFDQYIKDSYDLHDLKIAIANIIDEIIEKLKSLDEHYHIRVNLVKTIHDLHLFIENIDFNKSGSSTASWIQNVDTKYQIRIQIQEKLQQLKRHIQNIDIQHLAGKLKQHIEAIDVRVLLDQLGTTISFERINDVLEHVKHFVINLIGDFEVAEKINAFRAKVHELIERYEVDQQIQVLMDKLVELAHQYKLKETIQKLSNVLQQVKIKDYFEKLVGFIDDAVKKLNELSFKTFIEDVNKFLDMLIKKLKSFDYHQFVDETNDKIREVTQRLNGEIQALELPQKAEALKLFLEETKATVAVYLESLQDTKITLIINWLQEALSSASLAHMKAKFRETLEDTRDRMYQMDIQQELQRYLSLVGQVYSTLVTYISDWWTLAAKNLTDFAEQYSIQDWAKRMKALVEQGFTVPEIKTILGTMPAFEVSLQALQKATFQTPDFIVPLTDLRIPSVQINFKDLKNIKIPSRFSTPEFTILNTFHIPSFTIDFVEMKVKIIRTIDQMLNSELQWPVPDIYLRDLKVEDIPLARITLPDFRLPEIAIPEFIIPTLNLNDFQVPDLHITRIPASPHLTHN

SEQ ID NO: 899077 - protein, 3697 aa, Homo sapiens; identical to SEQ ID NO: 899067

SEQ ID NO: 899078 - protein, 3677 aa, Homo sapiens
MDPPRPALLALLALPALLLLLLAGARAEEEMLENVSLVCPKDATRFKHLRKYTYNYEAESSSGVPGTADSRSATRINCKVELEVPQLCSFILKTSQCTLKEVYGFNPEGKALLKKTKNSEEFAAAMSRYELKLAIPEGKQVFLYPEKDEPTYILNIKRGIISALLVPPETEEAKQVLFLDTVYGNCSTHFTVKTRKGNVATEISTERDLGQCDRFKPIRTGISPLALIKGMTRPLSTLISSSQSCQYTLDAKRKHVAEAICKEQHLFLPFSYKNKYGMVAQVTQTLKLEDTPKINSRFFGEGTKKMGLAFESTKSTSPPKQAEAVLKTLQELKKLTISEQNIQRANLFNKLVTELRGLSDEAVTSLLPQLIEVSSPITLQALVQCGQPQCSTHILQWLKRVHANPLLIDVVTYLVALIPEPSAQQLREIFNMARDQRSRATLYALSHAVNNYHKTNPTGTQELLDIANYLMEQIQDDCTGDEDYTYLILRVIGNMGQTMEQLTPELKSSILKCVQSTKPSLMIQKAAIQALRKMEPKDKDQEVLLQTFLDDASPGDKRLAAYLMLMRSPSQADINKIVQILPWEQNEQVKNFVASHIANILNSEELDIQDLKKLVKEALKESQLPTVMDFRKFSRNYQLYKSVSLPSLDPASAKIEGNLIFDPNNYLPKESMLKTTLTAFGFASADLIEIGLEGKGFEPTLEALFGKQGFFPDSVNKALYWVNGQVPDGVSKVLVDHFGYTKDDKHEQDMVNGIMLSVEKLIKDLKSKEVPEARAYLRILGEELGFASLHDLQLLGKLLLMGARTLQGIPQMIGEVIRKGSKNDFFLHYIFMENAFELPTGAGLQLQISSSGVIAPGAKAGVKLEVANMQAELVAKPSVSVEFVTNMGIIIPDFARSGVQMNTNFFHESGLEAHVALKAGKLKFIIPSPKRPVKLLSGGNTLHLVSTTKTEVIPPLIENRQSWSVCKQVFPGLNYCTSGAYSNASSTDSASYYPLTGDTRLELELRPTGEIEQYSVSATYELQREDRALVDTLKFVTQAEGAKQTEATMTFKYNRQSMTLSSEVQIPDFDVDLGTILRVNDESTEGKTSYRLTLDIQNKKITEVALMGHLSCDTKEERKIKGVISIPRLQAEARSEILAHWSPAKLLLQMDSSATAYGSTVSKRVAWHYDEEKIEFEWNTGTNVDTKKMTSNFPVDLSDYPKSLHMYANRLLDHRVPQTDMTFRHVGSKLIVAMSSWLQKASGSLPYTQTLQDHLNSLKEFNLQNMGLPDFHIPENLFLKSDGRVKYTLNKNSLKIEIPLPFGGKSSRDLKMLETVRTPALHFKSVGFHLPSREFQVPTFTIPKLYQLQVPLLGVLDLSTNVYSNLYNWSASYSGGNTSTDHFSLRARYHMKADSVVDLLSYNVQGSGETTYDHKNTFTLSCDGSLRHKFLDSNIKFSHVEKLGNNPVSKGLLIFDASSSWGPQMSASVHLDSKKKQHLFVKEVKIDGQFRVSSFYAKGTYGLSCQRDPNTGRLNGESNLRFNSSYLQGTNQITGRYEDGTLSLTSTSDLQSGIIKNTASLKYENYELTLKSDTNGKYKNFATSNKMDMTFSKQNALLRSEYQADYESLRFFSLLSGSLNSHGLELNADILGTDKINSGAHKATLRIGQDGISTSATTNLKCSLLVLENELNAELGLSGASMKLTTNGRFREHNAKFSLDGKAALTELSLGSAYQAMILGVDSKNIFNFKVSQEGLKLSNDMMGSYAEMKFDHTNSLNIAGLSLDFSSKLDNIYSSDKFYKQTVNLQLQPYSLVTTLNSDLKYNALDLTNNGKLRLEPLKLHVAGNLKGAYQNNEIKHIYAISSAALSASYKADTVAKVQGVEFSHRLNTDIAGLASAIDMSTNYNSDSLHFSNVFRSVMAPFTMTIDAHTNGNGKLALWGEHTGQLYSKFLLKAEPLAFTFSHDYKGSTSHHLVSRKSISAALEHKVSALLTPAEQTGTWKLKTQFNNNEYSQDLDAYNTKDKIGVELTGRTLADLTLLDSPIKVPLLLSEPINIIDALEMRDAVEKPQEFTIVAFVKYDKNQDVHSINLPFFETLQEYFERNRQTIIVVLENVQRNLKHINIDQFVRKYRAALGKLPQQANDYLNSFNWERQVSHAKEKLTALTKKYRITENDIQIALDDAKINFNEKLSQLQTYMIQFDQYIKDSYDLHDLKIAIANIIDEIIEKLKSLDEHYHIRVNLVKTIHDLHLFIENIDFNKSGSSTASWIQNVDTKYQIRIQIQEKLQQLKRHIQNIDIQHLAGKLKQHIEAIDVRVLLDQLGTTISFERINDVLEHVKHFVINLIGDFEVAEKINAFRAKVHELIERYEVDQQIQVLMDKLVELAHQYKLKETIQKLSNVLQQVKIKDYFEKLVGFIDDAVKKLNELSFKTFIEDVNKFLDMLIKKLKSFDYHQFVDETNDKIREVTQRLNGEIQALELPQKAEALKLFLEETKATVAVYLESLQDTKITLIINWLQEALSSASLAHMKAKFRETLEDTRDRMYQMDIQQELQRYLSLVGQVYSTLVTYISDWWTLAAKNLTDFAEQYSIQDWAKRMKALVEQGFTVPEIKTILGTMPAFEVSLQALQKATFQTPDFIVPLTDLRIPSVQINFKDLKNIKIPSRFSTPEFTILNTFHIPSFTIDFVEMKVKIIRTIDQMLNSELQWPVPDIYLRDLKVEDIPLARITLPDFRLPEIAIPEFQLPHISHTIEVPTFGKLYSILKIQSPLFTLDANADIGNGTTSANEAGIAASITAKGESKLEVLNFDFQANAQLSNPKINPLALKESVKFSSKYLRTEHGSEMLFFGNAIEGKSNTVASLHTEKNTLELSNGVIVKINNQLTLDSNTKYFHKLNIPKLDFSSQADLRNEIKTLLKAGHIAWTSSGKGSWKWACPRFSDEGTHESQISFTIEGPLTSFGLSNKINSKHLRVNQNLVYESGSLNFSKLEIQSQVDSQHVGHSVLTAKGMALFGEGKAEFTGRHDAHLNGKVIGTLKNSLFFSAQPFEITASTNNEGNLKVRFPLRLTGKIDFLNNYALFLSPSAQQASWQVSARFNQYKYNQNFSAGNNENIMEAHVGINGEANLDFLNIPLTIPEMRLPYTIITTPPLKDFSLWEKTGLKEFLKTTKQSFDLSVKAQYKKNKHRHSITNPLAVLCEFISQSIKSFDRHFEKNRNNALDFVTKSYNETKIKFDKYKAEKSHDELPRTFQIPGYTVPVVNVEVSPFTIEMSAFGYVFPKAVSMPSFSILGSDVRVPSYTLILPSLELPVLHVPRNLKLSLPDFKELCTISHIFIPAMGNITYDFSFKSSVITLNTNAELFNQSDIVAHLLSSSSSVIDALQYKLEGTTRLTRKRGLKLATALSLSNKFVEGSHNSTVSLTTKNMEVSVAKTTKAEIPILRMNFKQELNGNTKSKPTVSSSMEFKYDFNSSMLYSTAKGAVDHKLSLESLTSYFSIESSTKGDVKGSVLSREYSGTIASEANTYLNSKSTRSSVKLQGTSKIDDIWNLEVKENFAGEATLQRIYSLWEHSTKNHLQLEGLFFTNGEHTSKATLELSPWQMSALVQVHASQPSSFHDFPDLGQEVALNANTKNQKIRWKNEVRIHSGSFQSQVELSNDQEKAHLDIAGSLEGHLRFLKNIILPVYGQELMGFPKAGCNHQHW

SEQ ID NO: 899079 - protein, 3630 aa, Homo sapiens
MLENVSLVCPKDATRFKHLRKYTYNYEAESSSGVPGTADSRSATRINCKVELEVPQLCSFILKTSQCTLKEVYGFNPEGKALLKKTKNSEEFAAAMSRYELKLAIPEGKQVFLYPEKDEPTYILNIKRGIISALLVPPETEEAKQVLFLDTVYGNCSTHFTVKTRKGNVATEISTERDLGQCDRFKPIRTGISPLALIKGMTRPLSTLISSSQSCQYTLDAKRKHVAEAICKEQHLFLPFSYKNKYGMVAQVTQTLKLEDTPKINSRFFGEGTKKMGLAFESTKSTSPPKQAEAVLKTLQELKKLTISEQNIQRANLFNKLVTELRGLSDEAVTSLLPQLIEVSSPITLQALVQCGQPQCSTHILQWLKRVHANPLLIDVVTYLVALIPEPSAQQLREIFNMARDQRSRATLYALSHAVNNYHKTNPTGTQELLDIANYLMEQIQDDCTGDEDYTYLILRVIGNMGQTMEQLTPELKSSILKCVQSTKPSLMIQKAAIQALRKMEPKDKDQEVLLQTFLDDASPGDKRLAAYLMLMRSPSQADINKIVQILPWEQNEQVKNFVASHIANILNSEELDIQDLKKLVKEALKESQLPTVMDFRKFSRNYQLYKSVSLPSLDPASAKIEGNLIFDPNNYLPKESMLKTTLTAFGFASADLIEIGLEGKGFEPTLEALFGKQGFFPDSVNKALYWVNGQVPDGVSKVLVDHFGYTKDDKHEQDMVNGIMLSVEKLIKDLKSKEVPEARAYLRILGEELGFASLHDLQLLGKLLLMGARTLQGIPQMIGEVIRKGSKNDFFLHYIFMENAFELPTGAGLQLQISSSGVIAPGAKAGVKLEVANMQAELVAKPSVSVEFVTNMGIIIPDFARSGVQMNTNFFHESGLEAHVALKAGKLKFIIPSPKRPVKLLSGGNTLHLVSTTKTEVIPPLIENRQSWSVCKQVFPGLNYCTSGAYSNASSTDSASYYPLTGDTRLELELRPTGEIEQYSVSATYELQREDRALVDTLKFVTQAEGAKQTEATMTFKYNRQSMTLSSEVQIPDFDVDLGTILRVNDESTEGKTSYRLTLDIQNKKITEVALMGHLSCDTKEERKIKGVISIPRLQAEARSEILAHWSPAKLLLQMDSSATAYGSTVSKRVAWHYDEEKIEFEWNTGTNVDTKKMTSNFPVDLSDYPKSLHMYANRLLDHRVPQTDMTFRHVGSKLIVAMSSWLQKASGSLPYTQTLQDHLNSLKEFNLQNMGLPDFHIPENLFLKSDGRVKYTLNKNSLKIEIPLPFGGKSSRDLKMLETVRTPALHFKSVGFHLPSREFQVPTFTIPKLYQLQVPLLGVLDLSTNVYSNLYNWSASYSGGNTSTDHFSLRARYHMKADSVVDLLSYNVQGSGETTYDHKNTFTLSCDGSLRHKFLDSNIKFSHVEKLGNNPVSKGLLIFDASSSWGPQMSASVHLDSKKKQHLFVKEVKIDGQFRVSSFYAKGTYGLSCQRDPNTGRLNGESNLRFNSSYLQGTNQITGRYEDGTLSLTSTSDLQSGIIKNTASLKYENYELTLKSDTNGKYKNFATSNKMDMTFSKQNALLRSEYQADYESLRFFSLLSGSLNSHGLELNADILGTDKINSGAHKATLRIGQDGISTSATTNLKCSLLVLENELNAELGLSGASMKLTTNGRFREHNAKFSLDGKAALTELSLGSAYQAMILGVDSKNIFNFKVSQEGLKLSNDMMGSYAEMKFDHTNSLNIAGLSLDFSSKLDNIYSSDKFYKQTVNLQLQPYSLVTTLNSDLKYNALDLTNNGKLRLEPLKLHVAGNLKGAYQNNEIKHIYAISSAALSASYKADTVAKVQGVEFSHRLNTDIAGLASAIDMSTNYNSDSLHFSNVFRSVMAPFTMTIDAHTNGNGKLALWGEHTGQLYSKFLLKAEPLAFTFSHDYKGSTSHHLVSRKSISAALEHKVSALLTPAEQTGTWKLKTQFNNNEYSQDLDAYNTKDKIGVELTGRTLADLTLLDSPIKVPLLLSEPINIIDALEMRDAVEKPQEFTIVAFVKYDKNQDVHSINLPFFETLQEYFERNRQTIIVVLENVQRNLKHINIDQFVRKYRAALGKLPQQANDYLNSFNWERQVSHAKEKLTALTKKYRITENDIQIALDDAKINFNEKLSQLQTYMIQFDQYIKDSYDLHDLKIAIANIIDEIIEKLKSLDEHYHIRVNLVKTIHDLHLFIENIDFNKSGSSTASWIQNVDTKYQIRIQIQEKLQQLKRHIQNIDIQHLAGKLKQHIEAIDVRVLLDQLGTTISFERINDVLEHVKHFVINLIGDFEVAEKINAFRAKVHELIERYEVDQQIQVLMDKLVELAHQYKLKETIQKLSNVLQQVKIKDYFEKLVGFIDDAVKKLNELSFKTFIEDVNKFLDMLIKKLKSFDYHQFVDETNDKIREVTQRLNGEIQALELPQKAEALKLFLEETKATVAVYLESLQDTKITLIINWLQEALSSASLAHMKAKFRETLEDTRDRMYQMDIQQELQRYLSLVGQVYSTLVTYISDWWTLAAKNLTDFAEQYSIQDWAKRMKALVEQGFTVPEIKTILGTMPAFEVSLQALQKATFQTPDFIVPLTDLRIPSVQINFKDLKNIKIPSRFSTPEFTILNTFHIPSFTIDFVEMKVKIIRTIDQMLNSELQWPVPDIYLRDLKVEDIPLARITLPDFRLPEIAIPEFQLPHISHTIEVPTFGKLYSILKIQSPLFTLDANADIGNGTTSANEAGIAASITAKGESKLEVLNFDFQANAQLSNPKINPLALKESVKFSSKYLRTEHGSEMLFFGNAIEGKSNTVASLHTEKNTLELSNGVIVKINNQLTLDSNTKYFHKLNIPKLDFSSQADLRNEIKTLLKAGHIAWTSSGKGSWKWACPRFSDEGTHESQISFTIEGPLTSFGLSNKINSKHLRVNQNLVYESGSLNFSKLEIQSQVDSQHVGHSVLTAKGMALFGEGKAEFTGRHDAHLNGKVIGTLKNSLFFSAQPFEITASTNNEGNLKVRFPLRLTGKIDFLNNYALFLSPSAQQASWQVSARFNQYKYNQNFSAGNNENIMEAHVGINGEANLDFLNIPLTIPEMRLPYTIITTPPLKDFSLWEKTGLKEFLKTTKQSFDLSVKAQYKKNKHRHSITNPLAVLCEFISQSIKSFDRHFEKNRNNALDFVTKSYNETKIKFDKYKAEKSHDELPRTFQIPGYTVPVVNVEVSPFTIEMSAFGYVFPKAVSMPSFSILGSDVRVPSYTLILPSLELPVLHVPRNLKLSLPDFKELCTISHIFIPAMGNITYDFSFKSSVITLNTNAELFNQSDIVAHLLSSSSSVIDALQYKLEGTTRLTRKRGLKLATALSLSNKFVEGSHNSTVSLTTKNMEVSVAKTTKAEIPILRMNFKQELNGNTKSKPTVSSSMEFKYDFNSSMLYSTAKGAVDHKLSLESLTSYFSIESSTKGDVKGSVLSREYSGTIASEANTYLNSKSTRSSVKLQGTSKIDDIWNLEVKENFAGEATLQRIYSLWEHSTKNHLQLEGLFFTNGEHTSKATLELSPWQMSALVQVHASQPSSFHDFPDLGQEVALNANTKNQKIRWKNEVRIHSGSFQSQVELSNDQEKAHLDIAGSLEGHLRFLKNIILTSL

SEQ ID NO: 899080 - protein, 3697 aa, Homo sapiens; identical to SEQ ID NO: 899067

SEQ ID NO: 899081 - protein, 3697 aa, Homo sapiens; identical to SEQ ID NO: 899067

SEQ ID NO: 899082 - protein, 3697 aa, Homo sapiens; identical to SEQ ID NO: 899067

SEQ ID NO: 899083 - protein, 4034 aa, Homo sapiens
MDPPRPALLALLALPALLLLLLAGARAEEEMLENVSLVCPKDATRFKHLRKYTYNYEAESSSGVPGTADSRSATRINCKVELEVPQLCSFILKTSQCTLKEVYGFNPEGKALLKKTKNSEEFAAAMSRYELKLAIPEGKQVFLYPEKDEPTYILNIKRGIISALLVPPETEEAKQVLFLDTVYGNCSTHFTVKTRKGNVATEISTERDLGQCDRFKPIRTGISPLALIKGMTRPLSTLISSSQSCQYTLDAKRKHVAEAICKEQHLFLPFSYKNKYGMVAQVTQTLKLEDTPKINSRFFGEGTKKMGLAFESTKSTSPPKQAEAVLKTLQELKKLTISEQNIQRANLFNKLVTELRGLSDEAVTSLLPQLIEVSSPITLQALVQCGQPQCSTHILQWLKRVHANPLLIDVVTYLVALIPEPSAQQLREIFNMARDQRSRATLYALSHAVNNYHKTNPTGTQELLDIANYLMEQIQDDCTGDEDYTYLILRVIGNMGQTMEQLTPELKSSILKCVQSTKPSLMIQKAAIQALRKMEPKDKDQEVLLQTFLDDASPGDKRLAAYLMLMRSPSQADINKIVQILPWEQNEQVKNFVASHIANILNSEELDIQDLKKLVKEALKESQLPTVMDFRKFSRNYQLYKSVSLPSLDPASAKIEGNLIFDPNNYLPKESMLKTTLTAFGFASADLIEIGLEGKGFEPTLEALFGKQGFFPDSVNKALYWVNGQVPDGVSKVLVDHFGYTKDDKHEQDMVNGIMLSVEKLIKDLKSKEVPEARAYLRILGEELGFASLHDLQLLGKLLLMGARTLQGIPQMIGEVIRKGSKNDFFLHYIFMENAFELPTGAGLQLQISSSGVIAPGAKAGVKLEVANMQAELVAKPSVSVEFVTNMGIIIPDFARSGVQMNTNFFHESGLEAHVALKAGKLKFIIPSPKRPVKLLSGGNTLHLVSTTKTEVIPPLIENRQSWSVCKQVFPGLNYCTSGAYSNASSTDSASYYPLTGDTRLELELRPTGEIEQYSVSATYELQREDRALVDTLKFVTQAEGAKQTEATMTFKYNRQSMTLSSEVQIPDFDVDLGTILRVNDESTEGKTSYRLTLDIQNKKITEVALMGHLSCDTKEERKIKGVISIPRLQAEARSEILAHWSPAKLLLQMDSSATAYGSTVSKRVAWHYDEEKIEFEWNTGTNVDTKKMTSNFPVDLSDYPKSLHMYANRLLDHRVPQTDMTFRHVGSKLIVAMSSWLQKASGSLPYTQTLQDHLNSLKEFNLQNMGLPDFHIPENLFLKSDGRVKYTLNKNSLKIEIPLPFGGKSSRDLKMLETVRTPALHFKSVGFHLPSREFQVPTFTIPKLYQLQVPLLGVLDLSTNVYSNLYNWSASYSGGNTSTDHFSLRARYHMKADSVVDLLSYNVQGSGETTYDHKNTFTLSCDGSLRHKFLDSNIKFSHVEKLGNNPVSKGLLIFDASSSWGPQMSASVHLDSKKKQHLFVKEVKIDGQFRVSSFYAKGTYGLSCQRDPNTGRLNGESNLRFNSSYLQGTNQITGRYEDGTLSLTSTSDLQSGIIKNTASLKYENYELTLKSDTNGKYKNFATSNKMDMTFSKQNALLRSEYQADYESLRFFSLLSGSLNSHGLELNADILGTDKINSGAHKATLRIGQDGISTSATTNLKCSLLVLENELNAELGLSGASMKLTTNGRFREHNAKFSLDGKAALTELSLGSAYQAMILGVDSKNIFNFKVSQEGLKLSNDMMGSYAEMKFDHTNSLNIAGLSLDFSSKLDNIYSSDKFYKQTVNLQLQPYSLVTTLNSDLKYNALDLTNNGKLRLEPLKLHVAGNLKGAYQNNEIKHIYAISSAALSASYKADTVAKVQGVEFSHRLNTDIAGLASAIDMSTNYNSDSLHFSNVFRSVMAPFTMTIDAHTNGNGKLALWGEHTGQLYSKFLLKAEPLAFTFSHDYKGSTSHHLVSRKSISAALEHKVSALLTPAEQTGTWKLKTQFNNNEYSQDLDAYNTKDKIGVELTGRTLADLTLLDSPIKVPLLLSEPINIIDALEMRDAVEKPQEFTIVAFVKYDKNQDVHSINLPFFETLQEYFERNRQTIIVVLENVQRNLKHINIDQFVRKYRAALGKLPQQANDYLNSFNWERQVSHAKEKLTALTKKYRITENDIQIALDDAKINFNEKLSQLQTYMIQFDQYIKDSYDLHDLKIAIANIIDEIIEKLKSLDEHYHIRVNLVKTIHDLHLFIENIDFNKSGSSTASWIQNVDTKYQIRIQIQEKLQQLKRHIQNIDIQHLAGKLKQHIEAIDVRVLLDQLGTTISFERINDVLEHVKHFVINLIGDFEVAEKINAFRAKVHELIERYEVDQQIQVLMDKLVELAHQYKLKETIQKLSNVLQQVKIKDYFEKLVGFIDDAVKKLNELSFKTFIEDVNKFLDMLIKKLKSFDYHQFVDETNDKIREVTQRLNGEIQALELPQKAEALKLFLEETKATVAVYLESLQDTKITLIINWLQEALSSASLAHMKAKFRETLEDTRDRMYQMDIQQELQRYLSLVGQVYSTLVTYISDWWTLAAKNLTDFAEQYSIQDWAKRMKALVEQGFTVPEIKTILGTMPAFEVSLQALQKATFQTPDFIVPLTDLRIPSVQINFKDLKNIKIPSRFSTPEFTILNTFHIPSFTIDFVEMKVKIIRTIDQMLNSELQWPVPDIYLRDLKVEDIPLARITLPDFRLPEIAIPEFIIPTLNLNDFQVPDLHIPEFQLPHISHTIEVPTFGKLYSILKIQSPLFTLDANADIGNGTTSANEAGIAASITAKGESKLEVLNFDFQANAQLSNPKINPLALKESVKFSSKYLRTEHGSEMLFFGNAIEGKSNTVASLHTEKNTLELSNGVIVKINNQLTLDSNTKYFHKLNIPKLDFSSQADLRNEIKTLLKAGHIAWTSSGKGSWKWACPRFSDEGTHESQISFTIEGPLTSFGLSNKINSKHLRVNQNLVYESGSLNFSKLEIQSQVDSQHVGHSVLTAKGMALFGEGKAEFTGRHDAHLNGKVIGTLKNSLFFSAQPFEITASTNNEGNLKVRFPLRLTGKIDFLNNYALFLSPSAQQASWQVSARFNQYKYNQNFSAGNNENIMEAHVGINGEANLDFLNIPLTIPEMRLPYTIITTPPLKDFSLWEKTGLKEFLKTTKQSFDLSVKAQYKKNKHRHSITNPLAVLCEFISQSIKSFDRHFEKNRNNALDFVTKSYNETKIKFDKYKAEKSHDELPRTFQIPGYTVPVVNVEVSPFTIEMSAFGYVFPKAVSMPSFSILGSDVRVPSYTLILPSLELPVLHVPRNLKLSLPDFKELCTISHIFIPAMGNITYDFSFKSSVITLNTNAELFNQSDIVAHLLSSSSSVIDALQYKLEGTTRLTRKRGLKLATALSLSNKFVEGSHNSTVSLTTKNMEVSVAKTTKAEIPILRMNFKQELNGNTKSKPTVSSSMEFKYDFNSSMLYSTAKGAVDHKLSLESLTSYFSIESSTKGDVKGSVLSREYSGTIASEANTYLNSKSTRSSVKLQGTSKIDDIWNLEVKENFAGEATLQRIYSLWEHSTKNHLQLEGLFFTNGEHTSKATLELSPWQMSALVQVHASQPSSFHDFPDLGQEVALNANTKNQKIRWKNEVRIHSGSFQSQVELSNDQEKAHLDIAGSLEGHLRFLKNIILPVYDKSLWDFLKLDVTTSIGRRQHLRVSTAFVYTKNPNGYSFSIPVKVLADKFIIPGLKLNDLNSVLVMPTFHVPFTDLQVPSCKLDFREIQIYKKLRTSSFALNLPTLPEVKFPEVDVLTKYSQPEDSLIPFFEITVPESQLTVSQFTLPKSVSDGIAALDLNAVANKIADFELPTIIVPEQTIEIPSIKFSVPAGIVIPSFQALTARFEVDSPVYNATWSASLKNKADYVETVLDSTCSSTVQFLEYELNVLGTHKIEDGTLASKTKGTFAHRDFSAEYEEDGKYEGLQEWEGKAHLNIKSPAFTDLHLRYQKDKKGISTSAASPAVGTVGMDMDEDDDFSKWNFYYSPQAPKYK

SEQ ID NO: 899084 - protein, 3340 aa, Homo sapiens
MDPPRPALLALLALPALLLLLLAGARAEEEMLENVSLVCPKDATRFKHLRKYTYNYEAESSSGVPGTADSRSATRINCKVELEVPQLCSFILKTSQCTLKEVYGFNPEGKALLKKTKNSEEFAAAMSRYELKLAIPEGKQVFLYPEKDEPTYILNIKRGIISALLVPPETEEAKQVLFLDTVYGNCSTHFTVKTRKGNVATEISTERDLGQCDRFKPIRTGISPLALIKGMTRPLSTLISSSQSCQYTLDAKRKHVAEAICKEQHLFLPFSYKNKYGMVAQVTQTLKLEDTPKINSRFFGEGTKKMGLAFESTKSTSPPKQAEAVLKTLQELKKLTISEQNIQRANLFNKLVTELRGLSDEAVTSLLPQLIEVSSPITLQALVQCGQPQCSTHILQWLKRVHANPLLIDVVTYLVALIPEPSAQQLREIFNMARDQRSRATLYALSHAVNNYHKTNPTGTQELLDIANYLMEQIQDDCTGDEDYTYLILRVIGNMGQTMEQLTPELKSSILKCVQSTKPSLMIQKAAIQALRKMEPKDKDQEVLLQTFLDDASPGDKRLAAYLMLMRSPSQADINKIVQILPWEQNEQVKNFVASHIANILNSEELDIQDLKKLVKEALKESQLPTVMDFRKFSRNYQLYKSVSLPSLDPASAKIEGNLIFDPNNYLPKESMLKTTLTAFGFASADLIEIGLEGKGFEPTLEALFGKQGFFPDSVNKALYWVNGQVPDGVSKVLVDHFGYTKDDKHEQDMVNGIMLSVEKLIKDLKSKEVPEARAYLRILGEELGFASLHDLQLLGKLLLMGARTLQGIPQMIGEVIRKGSKNDFFLHYIFMENAFELPTGAGLQLQISSSGVIAPGAKAGVKLEVANMQAELVAKPSVSVEFVTNMGIIIPDFARSGVQMNTNFFHESGLEAHVALKAGKLKFIIPSPKRPVKLLSGGNTLHLVSTTKTEVIPPLIENRQSWSVCKQVFPGLNYCTSGAYSNASSTDSASYYPLTGDTRLELELRPTGEIEQYSVSATYELQREDRALVDTLKFVTQAEGAKQTEATMTFKYNRQSMTLSSEVQIPDFDVDLGTILRVNDESTEGKTSYRLTLDIQNKKITEVALMGHLSCDTKEERKIKGVISIPRLQAEARSEILAHWSPAKLLLQMDSSATAYGSTVSKRVAWHYDEEKIEFEWNTGTNVDTKKMTSNFPVDLSDYPKSLHMYANRLLDHRVPQTDMTFRHVGSKLIVAMSSWLQKASGSLPYTQTLQDHLNSLKEFNLQNMGLPDFHIPENLFLKSDGRVKYTLNKNSLKIEIPLPFGGKSSRDLKMLETVRTPALHFKSVGFHLPSREFQVPTFTIPKLYQLQVPLLGVLDLSTNVYSNLYNWSASYSGGNTSTDHFSLRARYHMKADSVVDLLSYNVQGSGETTYDHKNTFTLSCDGSLRHKFLDSNIKFSHVEKLGNNPVSKGLLIFDASSSWGPQMSASVHLDSKKKQHLFVKEVKIDGQFRVSSFYAKGTYGLSCQRDPNTGRLNGESNLRFNSSYLQGTNQITGRYEDGTLSLTSTSDLQSGIIKNTASLKYENYELTLKSDTNGKYKNFATSNKMDMTFSKQNALLRSEYQADYESLRFFSLLSGSLNSHGLELNADILGTDKINSGAHKATLRIGQDGISTSATTNLKCSLLVLENELNAELGLSGASMKLTTNGRFREHNAKFSLDGKAALTELSLGSAYQAMILGVDSKNIFNFKVSQEGLKLSNDMMGSYAEMKFDHTNSLNIAGLSLDFSSKLDNIYSSDKFYKQTVNLQLQPYSLVTTLNSDLKYNALDLTNNGKLRLEPLKLHVAGNLKGAYQNNEIKHIYAISSAALSASYKADTVAKVQGVEFSHRLNTDIAGLASAIDMSTNYNSDSLHFSNVFRSVMAPFTMTIDAHTNGNGKLALWGEHTGQLYSKFLLKAEPLAFTFSHDYKGSTSHHLVSRKSISAALEHKVSALLTPAEQTGTWKLKTQFNNNEYSQDLDAYNTKDKIGVELTGRTLADLTLLDSPIKVPLLLSEPINIIDALEMRDAVEKPQEFTIVAFVKYDKNQDVHSINLPFFETLQEYFERNRQTIIVVLENVQRNLKHINIDQFVRKYRAALGKLPQQANDYLNSFNWERQVSHAKEKLTALTKKYRITENDIQIALDDAKINFNEKLSQLQTYMIQFDQYIKDSYDLHDLKIAIANIIDEIIEKLKSLDEHYHIRVNLVKTIHDLHLFIENIDFNKSGSSTASWIQNVDTKYQIRIQIQEKLQQLKRHIQNIDIQHLAGKLKQHIEAIDVRVLLDQLGTTISFERINDVLEHVKHFVINLIGDFEVAEKINAFRAKVHELIERYEVDQQIQVLMDKLVELAHQYKLKETIQKLSNVLQQVKIKDYFEKLVGFIDDAVKKLNELSFKTFIEDVNKFLDMLIKKLKSFDYHQFVDETNDKIREVTQRLNGEIQALELPQKAEALKLFLEETKATVAVYLESLQDTKITLIINWLQEALSSASLAHMKAKFRETLEDTRDRMYQMDIQQELQRYLSLVGQVYSTLVTYISDWWTLAAKNLTDFAEQYSIQDWAKRMKALVEQGFTVPEIKTILGTMPAFEVSLQALQKATFQTPDFIVPLTDLRIPSVQINFKDLKNIKIPSRFSTPEFTILNTFHIPSFTIDFVEMKVKIIRTIDQMLNSELQWPVPDIYLRDLKVEDIPLARITLPDFRLPEIAIPEFIIPTLNLNDFQVPDLHIPEFQLPHISHTIEVPTFGKLYSILKIQSPLFTLDANADIGNGTTSANEAGIAASITAKGESKLEVLNFDFQANAQLSNPKINPLALKESVKFSSKYLRTEHGSEMLFFGNAIEGKSNTVASLHTEKNTLELSNGVIVKINNQLTLDSNTKYFHKLNIPKLDFSSQADLRNEIKTLLKAGHIAWTSSGKGSWKWACPRFSDEGTHESQISFTIEGPLTSFGLSNKINSKHLRVNQNLVYESGSLNFSKLEIQSQVDSQHVGHSVLTAKGMALFGEGKAEFTGRHDAHLNGKVIGTLKNSLFFSAQPFEITASTNNEGNLKVRFPLRLTGKIDFLNNYALFLSPSAQQASWQVSARFNQYKYNQNFSAGNNENIMEAHVGINGEANLDFLNIPLTIPEMRLPYTIITTPPLKDFSLWEKTGLKEFLKTTKQSFDLSVKAQYKKNKHRHSITNPLAVLCEFISQSIKSFDRHFEKNRNNALDFVTKSYNETKIKFDKYKAEKSHDELPRTFQIPGYTVPVVNVEVSPFTIEMSAFGYVFPKAVSMPSFSILGSDVRVPSYTLILPSLELPVLHVPRNLKLSLPDFKELCTISLRFGKNKTPNCRR

SEQ ID NO: 899085 - protein, 330 aa, Homo sapiens
MSTKNFRVSDGDWICPDKKCGNVNFARRTSCNRCGREKTTEAKMMKAGGTEIGKTLAEKSRGLFSANDWQCKTCSNVNWARRSECNMCNTPKYAKLEERTGYGGGFNERENVEYIEREESDGEYDEFGRKKKKYRGKAVGPASILKEVEDKESEGEEEDEDEDLSKYKLDEDEDEDDADLSKYNLDASEEEDSNKKKSNRRSRSKSRSSHSRSSSRSSSPSSSRSRSRSRSRSSSSSQSRSRSSSRERSRSRGSKSRSSSRSHRGSSSPRKRSYSSSSSSPERNRKRSRSRSSSSGDRKKRRTRSRSPERRHRSSSGSSHSGSRSSSKKK

SEQ ID NO: 899086 - protein, 320 aa, Homo sapiens
MSTKNFRVSDGDWICPDKKCGNVNFARRTSCNRCGREKTTEAKMMKAGGTEIGKTLAEKSRGLFSANDWQCKTCSNVNWARRSECNMCNTPKYAKLEERTGYGGGFNERENVEYIEREESDGEYDEFGRKKKKYRGKAVGPASILKEVEDKESEGEEEDEDEDLSKYKLDEDEDEDDADLSKYNLDASEEEDSNKKKSNRRSRSKSRSSHSRSSSRSSSPSSSRSRSRSRSRSSSSSQSRSRSSSRERSRSRGSKSRSSSRSHRGSSSPRKRSYSSSSSSPERNRKRSRSRSSSSGDRKKRRTRSRSPESQVIGENTKQP

SEQ ID NO: 899087 - protein, 107 aa, Homo sapiens
MSTKNFRVSDGDWICPDKKCGNVNFARRTSCNRCGREKTTEAKMMKAGGTEIGKTLAEKSRGLFSANDWQCKTCSNVNWARRSECNMCNTPKYAKLEERTGFSSFGH

SEQ ID NO: 899088 - protein, 320 aa, Homo sapiens; identical to SEQ ID NO: 899086

SEQ ID NO: 899089 - protein, 257 aa, Homo sapiens
MSTKNFRVSDGDWICPDKKCGNVNFARRTSCNRCGREKTTEAKMMKAGGTEIGKTLAEKSRGLFSANDWQCKTCSNVNWARRSECNMCNTPKYAKLEERTGYGGGFNERENVEYIEREESDGEYDEFGRKKKKYRGKAVGPASILKEVEDKESEGEEEDEDEDLSKYKLDEDEDEDDADLSKYNLDASEEEDSNKKKSNRRSRSKSRSSHSRSSSRSSSPSSSRSRSRSRSRSSSSSQSRSRSSSRERSRSRGSKSR

SEQ ID NO: 899090 - protein, 257 aa, Homo sapiens; identical to SEQ ID NO: 899089

SEQ ID NO: 899091 - protein, 330 aa, Homo sapiens; identical to SEQ ID NO: 899085

SEQ ID NO: 899092 - protein, 257 aa, Homo sapiens; identical to SEQ ID NO: 899089

SEQ ID NO: 899093 - protein, 257 aa, Homo sapiens; identical to SEQ ID NO: 899089

SEQ ID NO: 899094 - protein, 330 aa, Homo sapiens; identical to SEQ ID NO: 899085

SEQ ID NO: 899095 - protein, 228 aa, Homo sapiens
MSTKNFRVSDGDWICPDKKCGNVNFARRTSCNRCGREKTTEAKMMKAGGTEIGKTLAEKSRGLFSANDWQCKTCSNVNWARRSECNMCNTPKYAKLEERTGYGGGFNERENVEYIEREESDGEYDEFGRKKKKYRGKAVGPASILKEVEDKESEGEEEDEDEDLSKYKLDEDEDEDDADLSKYNLDASEEEDSNKKKSNRRSRSKSRSSHSRSSSRSSSPSSSRSRSR

SEQ ID NO: 899096 - protein, 320 aa, Homo sapiens; identical to SEQ ID NO: 899086

SEQ ID NO: 899097 - protein, 118 aa, Homo sapiens
SCGVAQAGLEFLDSSSLPVLASQSARIIGVSHYAWPVSPFTCQTANFTVFKFFLNPLFTKPVSHVVFHIDKHHYQYLIILLDFLFVNTTTALICGLGYCSFFLNGHLAFSRISVIFAK

SEQ ID NO: 899098 - protein, 555 aa, Homo sapiens
MSWNNSTWNYVYFPQEVVYKIHILILKWKDVVPKRKVLLMQLSAEFYNTIIFVYTLKSLKKKFKFYFDIVSRVLITHDENFKETKLKCLSRMFSWLIQKSSVEEAVSILPYKIFIVVINPVYFWSYLITKESSLFLLLMKCLICFSINEDPAPGPTGALLPHEKDLIQVHHLLLRGTEREVVLDLLHLVIAKKDEQDHGHPKVGFLRNKNGCSYVCLIDKVNFPSQGLDFYYLLCSDFLLFNFELQKNITLLILCTLIRLFRIVDQTILVIILLFKFLVPFIIFIANSRLFLSFEIAIQKLYVEVIYELTFILQASLNTNSQEFYEHLIKKLTFRSLGICPHLNMCKCISTANCFMPFVYKEIIPCSYYIFHFAVQIFFEKGLYYGYFICTDTFNIGRMQLSSVSLFCNRLLLSFINFLFVPNYIVILMALFVVFANFSYFIQLVKIKIMYKSINCWVQLVGLSHDSYLYRMISFASSHFGVEMLRFHTVLFLCICFFVKKITLFLSGIHSVAFLPLLQIFILATYNPPSLLSSKLNEHVLYSISQVIGENTKQP

SEQ ID NO: 899099 - protein, 257 aa, Homo sapiens; identical to SEQ ID NO: 899089

SEQ ID NO: 899100 - protein, 257 aa, Homo sapiens; identical to SEQ ID NO: 899089

SEQ ID NO: 899101 - protein, 257 aa, Homo sapiens; identical to SEQ ID NO: 899089

SEQ ID NO: 899102 - protein, 257 aa, Homo sapiens; identical to SEQ ID NO: 899089

SEQ ID NO: 899103 - protein, 119 aa, Homo sapiens
MSTKNFRVSDGDWICPDKKCGNVNFARRTSCNRCGREKTTEAKMMKAGGTEIGKTLAEKSRGLFSANDWQCKTCSNVNWARRSECNMCNTPKYAKLEERTGGGVYMKEKMSKISRYKSY

SEQ ID NO: 899104 - protein, 150 aa, Homo sapiens
MVLCFPLLLLLLVLWGPVCPLHAWPKRLTKAHWFEIQHIQPSPLQCNRAMSGINNYTQHCKHQNTFLHDSFQNVAAVCDLLSIVCKNRRHNCHQSSKPVNMTDCRLTSGKYPQCRYSAAAQYKFFIVACDPPQKSDPPYKLVPVHLDSIL

SEQ ID NO: 899105 - protein, 205 aa, Homo sapiens
MVLCFPLLLLLLVLWGPVCPLHAWPKRLTKAHWFEIQHIQPSPLQCNRAMSGINNYTQHCKHQNTFLHDSFQNVAAVCDLLSIVCKNRRHNCHQSSKPVNMTDCRLTSGKYPQCRYSAAAQYKFFIVSALLSHTSIAEKAKELKMISGAAQLTIAKMWNQPNCPSSNEWIKKMWYIYTMEYYSATKRNVNNTLCSNLDGAGGLLS

SEQ ID NO: 899106 - protein, 150 aa, Homo sapiens; identical to SEQ ID NO: 899104

SEQ ID NO: 899107 - protein, 326 aa, Homo sapiens
MELSGATMARGLAVLLVLFLHIKNLPAQAADTCPEVKVVGLEGSDKLTILRGCPGLPGAPGPKGEAGVIGERGERGLPGAPGKAGPVGPKGDRGEKGMRGEKGDAGQSQSCATGPRNCKDLLDRGYFLSGWHTIYLPDCRPLTVLCDMDTDGGGWTVFQRRMDGSVDFYRDWAAYKQGFGSQLGEFWLGNDNIHALTAQGSSELRVDLVDFEGNHQFAKYKSFKVADEAEKYKLVLGAFVGGSAGNSLTGHNNNFFSTKDQDNDVSSSNCAEKFQGAWWYADCHASNLNGLYLMGPHESYANGINWSAAKGYKYSYKVSEMKVRPA

SEQ ID NO: 899108 - protein, 206 aa, Homo sapiens
CGVRMQTANRDTLAVEHYCRLRLMSLCHDTDVGELTVFQRRMDGSVDFYRDWAAYKQGFGSQLGEFWLGNDNIHALTAQGSSELRVDLVDFEGNHQFAKYKSFKVADEAEKYKLVLGAFVGGSAGNSLTGHNNNFFSTKDQDNDVSSSNCAEKFQGAWWYADCHASNLNGLYLMGPHESYANGINWSAAKGYKYSYKVSEMKVRPA

SEQ ID NO: 899109 - protein, 128 aa, Homo sapiens
NIFRNIILPLVDFEGNHQFAKYKSFKVADEAEKYKLVLGAFVGGSAGNSLTGHNNNFFSTKDQDNDVSSSNCAEKFQGAWWYADCHASNLNGLYLMGPHESYANGINWSAAKGYKYSYKVSEMKVRPA

SEQ ID NO: 899110 - protein, 145 aa, Homo sapiens [sequence omitted]

SEQ ID NO: 899111 - protein, 225 aa, Homo sapiens
MELSGATMARGLAVLLVLFLHIKNLPAQAADTCPEVKVVGLEGSDKLTILRGCPGLPGAPGPKGEAGVIGERGERGLPGAPGKAGPVGPKGDRGEKGMRGEKGDAGQSQSCATGPRNCKDLLDRGYFLSGWHTIYLPDCRPLTVLCDMDTDGGGWTVFQRRMDGSVDFYRDWAAYKQGFGSQLGEFWLGNDNIHALTAQGRATAVAQGLGGPEVLLPLRPGPSAT

SEQ ID NO: 899112 - protein, 220 aa, Homo sapiens
IPRVPFPGPRNCKDLLDRGYFLSGWHTIYLPDCRPLTVLCDMDTDGGGWTVFQRRMDGSVDFYRDWAAYKQGFGSQLGEFWLGNDNIHALTAQGSSELRVDLVDFEGNHQFAKYKSFKVADEAEKYKLVLGAFVGGSAGNSLTGHNNNFFSTKDQDNDVSSSNCAEKFQGAWWYADCHASNLNGLYLMGPHESYANGINWSAAKGYKYSYKVSEMKVRPA

SEQ ID NO: 899113 - protein, 99 aa, Homo sapiens
PISEDPQPGTAFVGGSAGNSLTGHNNNFFSTKDQDNDVSSSNCAEKFQGAWWYADCHASNLNGLYLMGPHESYANGINWSAAKGYKYSYKVSEMKVRPA

SEQ ID NO: 899114 - protein, 110 aa, Homo sapiens
  misc_feature (21)..(21): Xaa can be any naturally occurring amino acid
RGREVQAGTGSDFLGFPRGGXGRGGGSAGNSLTGHNNNFFSTKDQDNDVSSSNCAEKFQGAWWYADCHASNLNGLYLMGPHESYANGINWSAAKGYKYSYKVSEMKVRPA

SEQ ID NO: 899115 - protein, 380 aa, Homo sapiens
  misc_feature (279)..(279): Xaa can be any naturally occurring amino acid
MELSGATMARGLAVLLVLFLHIKNLPAQAADTCPEVKVVGLEGSDKLTILRGCPGLPGAPGPKGEAGVIGERGERGLPGAPGKAGPVGPKGDRGEKGMRGEKGDAGQSQSCATGPRNCKDLLDRGYFLSGWHTIYLPDCRPLTVLCDMDTDGGGWTVFQRRMDGSVDFYRDWAAYKQGFGSQLGEFWLGNDNIHALTAQEAASSVRTGGCPQESTTSCHKSKGPCRGMEHEVGDQRYGAWVSCGMLPCLAYDVAAISPMIRVADHKRLRVIHFTREGLXGLEMEVAVSSGLHDRIGVRAKFSLPGGPRPRGVPGPRGDSPLGGAKKQRCSRGSSVAHSRERKPRTVDETADVRSQLGVSPTPLGELGPRGKQRVVKRRPK

SEQ ID NO: 899116 - protein, 795 aa, Homo sapiens
MYHSLSETRHPLQPEEQEVGIDPLSSYSNKSGGDSNKNGRRTSSTLDSEGTFNSYRKEWEELFVNNNYLATIRQKGINGQLRSSRFRSICWKLFLCVLPQDKSQWISRIEELRAWYSNIKEIHITNPRKVVGQQDLMINNPLSQDEGSLWNKFFQDKELRSMIEQDVKRTFPEMQFFQQENVRKILTDVLFCYARENEQLLYKQGMHELLAPIVFVLHCDHQAFLHASESAQPSEEMKTVLNPEYLEHDAYAVFSQLMETAEPWFSTFEHDGQKGKETLMTPIPFARPQDLGPTIAIVTKVNQIQDHLLKKHDIELYMHLNRLEIAPQIYGLRWVRLLFGREFPLQDLLVVWDALFADGLSLGLVDYIFVAMLLYIRDALISSNYQTCLGLLMHYPFIGDVHSLILKALFLRDPKRNPRPVTYQFHPNLDYYKARGADLMNKSRTNAKGAPLNINKVSNSLINFGRKLISPAMAPGSAGGPVPGGNSSSSSSVVIPTRTSAEAPSHHLQQQQQQQRLMKSESMPVQLNKGLSSKNISSSPSVESLPGGREFTGSPPSSATKKDSFFSNISRSRSHSKTMGRKESEEELEAQISFLQGQLNDLDAMCKYCAKVMDTHLVNIQDVILQENLEKEDQILVSLAGLKQIKDILKGSLRFNQSQLEAEENEQITIADNHYCSSGQGQGRGQGQSVQMSGAIKQASSETPGCTDRGNSDDFILISKDDDGSSARGSFSGQAQPLRTLRSTSGKSQAPVCSPLVFSDPLMGPASASSSNPSSSPDDDSSKDSGFTIVSPLDI

SEQ ID NO: 899117 - protein, 795 aa, Homo sapiens; identical to SEQ ID NO: 899116

SEQ ID NO: 899118 - protein, 795 aa, Homo sapiens; identical to SEQ ID NO: 899116

SEQ ID NO: 899119 - protein, 659 aa, Homo sapiens
MINNPLSQDEGSLWNKFFQDKELRSMIEQDVKRTFPEMQFFQQENVRKILTDVLFCYARENEQLLYKQGMHELLAPIVFVLHCDHQAFLHASESAQPSEEMKTVLNPEYLEHDAYAVFSQLMETAEPWFSTFEHDGQKGKETLMTPIPFARPQDLGPTIAIVTKVNQIQDHLLKKHDIELYMHLNRLEIAPQIYGLRWVRLLFGREFPLQDLLVVWDALFADGLSLGLVDYIFVAMLLYIRDALISSNYQTCLGLLMHYPFIGDVHSLILKALFLRDPKRNPRPVTYQFHPNLDYYKARGADLMNKSRTNAKGAPLNINKVSNSLINFGRKLISPAMAPGSAGGPVPGGNSSSSSSVVIPTRTSAEAPSHHLQQQQQQQRLMKSESMPVQLNKGLSSKNISSSPSVESLPGGREFTGSPPSSATKKDSFFSNISRSRSHSKTMGRKESEEELEAQISFLQGQLNDLDAMCKYCAKVMDTHLVNIQDVILQENLEKEDQILVSLAGLKQIKDILKGSLRFNQSQLEAEENEQITIADNHYCSSGQGQGRGQGQSVQMSGAIKQASSETPGCTDRGNSDDFILISKDDDGSSARGSFSGQAQPLRTLRSTSGKSQAPVCSPLVFSDPLMGPASASSSNPSSSPDDDSSKDSGFTIVSPLDI

SEQ ID NO: 899120 - protein, 587 aa, Homo sapiens
MYHSLSETRHPLQPEEQEVGIDPLSSYSNKSGGDSNKNGRRTSSTLDSEGTFNSYRKEWEELFVNNNYLATIRQKGINGQLRSSRFRSICWKLFLCVLPQDKSQWISRIEELRAWYSNIKEIHITNPRKVVGQQDLMINNPLSQDEGSLWNKFFQDKELRSMIEQDVKRTFPEMQFFQQENVRKILTDVLFCYARENEQLLYKQGMHELLAPIVFVLHCDHQAFLHASESAQPSEEMKTVLNPEYLEHDAYAVFSQLMETAEPWFSTFEHDGQKGKETLMTPIPFARPQDLGPTIAIVTKVNQIQDHLLKKHDIELYMHLNRLEIAPQIYGLRWVRLLFGREFPLQDLLVVWDALFADGLSLGLVDYIFVAMLLYIRDALISSNYQTCLGLLMHYPFIGDVHSLILKALFLRDPKRNPRPVTYQFHPNLDYYKARGADLMNKSRTNAKGAPLNINKVSNSLINFGRKLISPAMAPGSAGGPVPGGNSSSSSSVVIPTRTSAEAPSHHLQQQQQQQRLMKSESMPVQLNKGLSSKNISSSPSVESLPGGREFTGSPPSSATKKDSFFSNISRSRSHSKTMGRKESVSI

SEQ ID NO: 899121 - protein, 795 aa, Homo sapiens; identical to SEQ ID NO: 899116

SEQ ID NO: 899122 - protein, 795 aa, Homo sapiens; identical to SEQ ID NO: 899116

SEQ ID NO: 899123 - protein, 795 aa, Homo sapiens; identical to SEQ ID NO: 899116

SEQ ID NO: 899124 - protein, 701 aa, Homo sapiens
MYHSLSETRHPLQPEEQEVGIDPLSSYSNKSGGDSNKNGRRTSSTLDSEGTFNSYRKEWEELFVNNNYLATIRQKGINGQLRSSRFRSICWKLFLCVLPQDKSQWISRIEELRAWYSNIKEIHITNPRKVVGQQDLMINNPLSQDEGSLWNKFFQDKELRSMIEQDVKRTFPEMQFFQQENVRKILTDVLFCYARENEQLLYKQGMHELLAPIVFVLHCDHQAFLHASESAQPSEEMKTVLNPEYLEHDAYAVFSQLMETAEPWFSTFEHDGQKGKETLMTPIPFARPQDLGPTIAIVTKVNQIQDHLLKKHDIELYMHLNRLEIAPQIYGLRWVRLLFGREFPLQDLLVVWDALFADGLSLGLVDYIFVAMLLYIRDALISSNYQTCLGLLMHYPFIGDVHSLILKALFLRDPKRNPRPVTYQFHPNLDYYKARGADLMNKSRTNAKGAPLNINKVSNSLINFGRKLISPAMAPGSAGGPVPGGNSSSSSSVVIPTRTSAEAPSHHLQQQQQQQRLMKSESMPVQLNKGLSSKNISSSPSVESLPGGREFTGSPPSSATKKDSFFSNISRSRSHSKTMGRKESEEELEAQISFLQGQLNDLDAMCKYCAKVMDTHLVNIQDVILQENLEKEDQILVSLAGLKQIKDLLVVWDALFADGLSLGLVDYIFVAMLLYIRDALISSNCQTAFSVLLTKALFLYC

SEQ ID NO: 899125 - protein, 348 aa, Homo sapiens
MYHSLSETRHPLQPEEQEVGIDPLSSYSNKSGGDSNKNGRRTSSTLDSEGTFNSYRKEWEELFVNNNYLATIRQKGINGQLRSSRFRSICWKLFLCVLPQDKSQWISRIEELRAWYSNIKEIHITNPRKVVGQQDLMINNPLSQDEGSLWNKFFQDKELRSMIEQDVKRTFPEMQFFQQENVRKILTDVLFCYARENEQLLYKQGMHELLAPIVFVLHCDHQAFLHASESAQPSEEMKTVLNPEYLEHDAYAVFSQLMETAEPWFSTFEHDGQKGKETLMTPIPFARPQDLGPTIAIVTKVNQIQDHLLKKHDIELYMHLNRLEIAPQIYGFCPWKNLETPRDNTLVK

SEQ ID NO: 899126 - protein, 424 aa, Homo sapiens
PQQLWLGSPDEVWLYLVCEHTHIFTAIIWDSRTRFGSTDFSFHPSIAGVVVLLLLQGGSAYKLVCYFTNWSQDRQEPGKFTPENIDPFLCSHLIYSFASIENNKVIIKDKSEVMLYQTINSLKTKNPKLKILLSIGGYLFGSKGFHPMVDSSTSRLEFINSIILFLRNHNFDGLDVSWIYPDQKENTHFTVLIHELAEAFQKDFTKSTKERLLLTAGVSAGRQMIDNSYQVEKLAKDLDFINLLSFDFHGSWEKPLITGHNSPLSKGWQDRGPSSYYNVEYAVGYWIHKGMPSEKVVMGIPTYGHSFTLASAETTVGAPASGPGAAGPITESSGFLAYYEICQFLKGAKITRLQDQQVPYAVKGNQWVGYDDVKSMETKVQFLKNLNLGGAMIWSIDMDDFTGKSCNQGPYPLVQAVKRSLGSL

SEQ ID NO: 899127 - protein, 390 aa, Homo sapiens
MGATTMDQKSLWAGVVVLLLLQGGSAYKLVCYFTNWSQDRQEPGKFTPENIDPFLCSHLIYSFASIENNKVIIKDKSEVMLYQTINSLKTKNPKLKILLSIGGYLFGSKGFHPMVDSSTSRLEFINSIILFLRNHNFDGLDVSWIYPDQKENTHFTVLIHELAEAFQKDFTKSTKERLLLTAGVSAGRQMIDNSYQVEKLAKDLDFINLLSFDFHGSWEKPLITGHNSPLSKGWQDRGPSSYYNVEYAVGYWIHKGMPSEKVVMGIPTYGHSFTLASAETTVGAPASGPGAAGPITESSGFLAYYEICQFLKGAKITRLQDQQVPYAVKGNQWVGYDDVKSMETKVQFLKNLNLGGAMIWSIDMDDFTGKSCNQGPYPLVQAVKRSLGSL

SEQ ID NO: 899128 - protein, 400 aa, Homo sapiens
HSSCGWGAQMKCGSILYVSTPTFSLPLSGTAEPGSAYKLVCYFTNWSQDRQEPGKFTPENIDPFLCSHLIYSFASIENNKVIIKDKSEVMLYQTINSLKTKNPKLKILLSIGGYLFGSKGFHPMVDSSTSRLEFINSIILFLRNHNFDGLDVSWIYPDQKENTHFTVLIHELAEAFQKDFTKSTKERLLLTAGVSAGRQMIDNSYQVEKLAKDLDFINLLSFDFHGSWEKPLITGHNSPLSKGWQDRGPSSYYNVEYAVGYWIHKGMPSEKVVMGIPTYGHSFTLASAETTVGAPASGPGAAGPITESSGFLAYYEICQFLKGAKITRLQDQQVPYAVKGNQWVGYDDVKSMETKVQFLKNLNLGGAMIWSIDMDDFTGKSCNQGPYPLVQAVKRSLGSL

SEQ ID NO: 899129 - protein, 201 aa, Homo sapiens [sequence omitted]

SEQ ID NO: 899130 - protein, 346 aa, Homo sapiens
MGATTMDQKSLWAGVVVLLLLQGGSAYKLVCYFTNWSQDRQEPGKFTPENIDPFLCSHLIYSFASIENNKVIIKDKSEVMLYQTINSLKTKNPKLKILLSIGGYLFGSKGFHPMVDSSTSRLEFINSIILFLRNHNFDGLDVSWIYPDQKENTHFTVLIHELAEAFQKDFTKSTKERLLLTAGVSAGRQMIDNSYQVEKLAKDLDFINLLSFDFHGSWEKPLITGHNSPLSKGWQDRGPSSYYNVEYAVGYWIHKGMPSEKVVMGIPTYGHSFTLASAETTVGAPASGPGAAGPITESSGFLAYYEICQFLKGAKITRLQDQQVPYAVKGNQWVGYDDVKSMETKD

SEQ ID NO: 899131 - protein, 380 aa, Homo sapiens
MGATTMDQKSLWAGSAYKLVCYFTNWSQDRQEPGKFTPENIDPFLCSHLIYSFASIENNKVIIKDKSEVMLYQTINSLKTKNPKLKILLSIGGYLFGSKGFHPMVDSSTSRLEFINSIILFLRNHNFDGLDVSWIYPDQKENTHFTVLIHELAEAFQKDFTKSTKERLLLTAGVSAGRQMIDNSYQVEKLAKDLDFINLLSFDFHGSWEKPLITGHNSPLSKGWQDRGPSSYYNVEYAVGYWIHKGMPSEKVVMGIPTYGHSFTLASAETTVGAPASGPGAAGPITESSGFLAYYEICQFLKGAKITRLQDQQVPYAVKGNQWVGYDDVKSMETKVQFLKNLNLGGAMIWSIDMDDFTGKSCNQGPYPLVQAVKRSLGSL

SEQ ID NO: 899132 - protein, 405 aa, Homo sapiens
PQQLWLGSPDEVWLYLVCEHTHIFTAIIWDSRTRFGSTDFSFHPSIAGVVVLLLLQGGSAYKLVCYFTNWSQDRQEPGKFTPENIDPFLCSHLIYSFASIENNKVIIKDKSEVMLYQTINSLKTKFHPMVDSSTSRLEFINSIILFLRNHNFDGLDVSWIYPDQKENTHFTVLIHELAEAFQKDFTKSTKERLLLTAGVSAGRQMIDNSYQVEKLAKDLDFINLLSFDFHGSWEKPLITGHNSPLSKGWQDRGPSSYYNVEYAVGYWIHKGMPSEKVVMGIPTYGHSFTLASAETTVGAPASGPGAAGPITESSGFLAYYEICQFLKGAKITRLQDQQVPYAVKGNQWVGYDDVKSMETKVQFLKNLNLGGAMIWSIDMDDFTGKSCNQGPYPLVQAVKRSLGSL

SEQ ID NO: 899133 - protein, 371 aa, Homo sapiens
MGATTMDQKSLWAGVVVLLLLQGGSAYKLVCYFTNWSQDRQEPGKFTPENIDPFLCSHLIYSFASIENNKVIIKDKSEVMLYQTINSLKTKNPKLKILLSIGGYLFGSKGFHPMVDSSTSRLEFINSIILFLRNHNFDGLDELAEAFQKDFTKSTKERLLLTAGVSAGRQMIDNSYQVEKLAKDLDFINLLSFDFHGSWEKPLITGHNSPLSKGWQDRGPSSYYNVEYAVGYWIHKGMPSEKVVMGIPTYGHSFTLASAETTVGAPASGPGAAGPITESSGFLAYYEICQFLKGAKITRLQDQQVPYAVKGNQWVGYDDVKSMETKVQFLKNLNLGGAMIWSIDMDDFTGKSCNQGPYPLVQAVKRSLGSL

SEQ ID NO: 899134 - protein, 445 aa, Homo sapiens
MGGVGEPGPREGPAQPGAPLPTFCWEQIRAHDQPGDKWLVIERRVYDISRWAQRHPGGSRLIGHHGAEDATDAFRAFHQDLNFVRKFLQPLLIGELAPEEPSQDGPLNAQLVEDFRALHQAAEDMKLFDASPTFFAFLLGHILAMEVLAWLLIYLLGPGWVPSALAAFILAISQAQSWCLQHDLGHASIFKKSWWNHVAQKFVMGQLKGFSAHWWNFRHFQHHAKPNIFHKDPDVTVAPVFLLGESSVEYGKKKRRYLPYNQQHLYFFLIGPPLLTLVNFEVENLAYMLVCMQWADLLWAASFYARFFLSYLPFYGVPGVLLFFVAVRVLESHWFVWITQMNHIPKEIGHEKHRDWVSSQLAATCNVEPSLFTNWFSGHLNFQIEHHLFPRMPRHNYSRVAPLVKSLCAKHGLSYEVKPFLTALVDIVRSLKKSGDIWLDAYLHQ

SEQ ID NO: 899135 - protein, 69 aa, Homo sapiens
MFDRVQRGALVLGEVDGAQQAMGEKQDNLGPWEDQGGPMSLTVHQPADFLSACRLLCPSIRSPSACLCW

SEQ ID NO: 899136 - protein, 99 aa, Homo sapiens
QQRAPRELQRRWGPRRDWGPWFEGCSQAPRDSVPPLGALDLTLQDARLEAPQAPLLTDRDSASGSRGRGEALRDAQQVRVVSPGPALRVESRAWKPAAR

SEQ ID NO: 899137 - protein, 530 aa, Homo sapiens
MAQITYYACLLMATLSALVLCDILCTDVRHCLCVCNVLCLLCCVMWRGRSSGRRRRRRPGALFASLGVLLGPRPPPGIPRTRACSMGGVGEPGPREGPAQPGAPLPTFCWEQIRAHDQPGDKWLVIERRVYDISRWAQRHPGGSRLIGHHGAEDATDAFRAFHQDLNFVRKFLQPLLIGELAPEEPSQDGPLNAQLVEDFRALHQAAEDMKLFDASPTFFAFLLGHILAMEVLAWLLIYLLGPGWVPSALAAFILAISQAQSWCLQHDLGHASIFKKSWWNHVAQKFVMGQLKGFSAHWWNFRHFQHHAKPNIFHKDPDVTVAPVFLLGESSVEYGKKKRRYLPYNQQHLYFFLIGPPLLTLVNFEVENLAYMLVCMQWADLLWAASFYARFFLSYLPFYGVPGVLLFFVAVRVLESHWFVWITQMNHIPKEIGHEKHRDWVSSQLAATCNVEPSLFTNWFSGHLNFQIEHHLFPRMPRHNYSRVAPLVKSLCAKHGLSYEVKPFLTALVDIVRSLKKSGDIWLDAYLHQ

SEQ ID NO: 899138 - protein, 321 aa, Homo sapiens [sequence omitted]

SEQ ID NO: 899139 - protein, 373 aa, Homo sapiens
MGGVGEPGPREGPAQPGAPLPTFCWEQIRAHDQPGDKWLVIERRVYDISRWAQRHPGGSRLIGHHGAEDATDAFRAFHQDLNFVRKFLQPLLIGELAPEEPSQDGPLNAQLVEDFRALHQAAEDMKLFDASPTFFAFLLGHILAMEVLAWLLIYLLGPGWVPSALAAFILAISQAQSWCLQHDLGHASIFKKSWWNHVAQKFVMGQLKGFSAHWWNFRHFQHHAKPNIFHKDPDVTVAPVFLLGESSVEYGKKKRRYLPYNQQHLYFFLIGPPLLTLVNFEVENLAYMLVCMQWADLLWAASFYARFFLSYLPFYGVPGVLLFFVAVRGMAGSGEVTHRRQVTPTAAPHQSFPFPVCRMGPVVLPPWLAGGIT

SEQ ID NO: 899140 - protein, 400 aa, Homo sapiens
LPLGIPPGLFLRVSDEDSQAPVVEPEDAFRAFHQDLNFVRKFLQPLLIGELAPEEPSQDGPLNAQLVEDFRALHQAAEDMKLFDASPTFFAFLLGHILAMEVLAWLLIYLLGPGWVPSALAAFILAISQAQSWCLQHDLGHASIFKKSWWNHVAQKFVMGQLKGFSAHWWNFRHFQHHAKPNIFHKDPDVTVAPVFLLGESSVEYGKKKRRYLPYNQQHLYFFLIGPPLLTLVNFEVENLAYMLVCMQWADLLWAASFYARFFLSYLPFYGVPGVLLFFVAVRVLESHWFVWITQMNHIPKEIGHEKHRDWVSSQLAATCNVEPSLFTNWFSGHLNFQIEHHLFPRMPRHNYSRVAPLVKSLCAKHGLSYEVKPFLTALVDIVRSLKKSGDIWLDAYLHQ

SEQ ID NO: 899141 - protein, 321 aa, Homo sapiens
MKLFDASPTFFAFLLGHILAMEVLAWLLIYLLGPGWVPSALAAFILAISQAQSWCLQHDLGHASIFKKSWWNHVAQKFVMGQLKGFSAHWWNFRHFQHHAKPNIFHKDPDVTVAPVFLLGESSVEYGKKKRRYLPYNQQHLYFFLIGPPLLTLVNFEVENLAYMLVCMQWADLLWAASFYARFFLSYLPFYGVPGVLLFFVAVRVLESHWFVWITQMNHIPKEIGHEKHRDWVSSQLAATCNVEPSLFTNWFSGHLNFQIEHHLFPRMPRHNYSRVAPLVKSLCAKHGLSYEVKPFLTALVDIVRSLKKSGDIWLDAYLHQ

SEQ ID NO: 899142 - protein, 146 aa, Homo sapiens
EPGGARSLVRRPRRQGGAGAAGGGGGGARERSSLPSGSCSDLGHRLGSPGLVRAAWAASGSRDRGRDPRSRGHRCPPSAGSRSARTTSPATSGWSSSAASTTSAAGHSGTQGAAASSATTALRTPRMPSVPSIKISILCASSYSPC

SEQ ID NO: 899143 - protein, 129 aa, Homo sapiens
AGRRTLARTAAAAAGRGRSSGRRRRRRPGALFASLGVLLGPRPPPGIPRTRACSMGGVGEPGPREGPAQPGAPLPTFCWEQIRAHDQPGDKWLVIERRVYDISRWAQRHPGGSRLIGHHGAEDATVRKP

SEQ ID NO: 899144 - protein, 82 aa, Homo sapiens
QPFRAPGTGLPSRLLTFLAPLPNIRPKIGWAGSTSSLSLGCSAQQEAAMENWVQEGQAHPGSCLDLALAALQLPYPTPVNPV

SEQ ID NO: 899145 - protein, 65 aa, Homo sapiens
GEFVVLLGEFVVLLGEFVVLLFFVLSVLESHWFVWITQMNHIPKEIGHEKHRDWVSSQVGSRGGA

SEQ ID NO: 899146 - protein, 373 aa, Homo sapiens; identical to SEQ ID NO: 899139

SEQ ID NO: 899147 - protein, 454 aa, Homo sapiens
MGGVGEPGPREGPAQPGAPLPTFCWEQIRAHDQPGDKWLVIERRVYDISRWAQRHPGGSRLIGHHGAEDATDAFRAFHQDLNFVRKFLQPLLIGELAPEEPSQDGPLNAQLVEDFRALHQAAEDMKLFDASPTFFAFLLGHILAMEVLAWLLIYLLGPGWVPSALAAFILAISQAQSWCLQHDLGHASIFKKSWWNHVAQKFVMGQLKGFSAHWWNFRHFQHHAKPNIFHKDPDVTVAPVFLLGESSVEYGKKKRRYLPYNQQHLYFFLIGPPLLTLVNFEVENLAYMLVCMQWADLLWAASFYARFFLSYLPFYGVPGVLLFFVAVRVLESHWFVWITQMNHIPKEIGHEKHRDWVSSQLAATCNVEPSLFTNWFSGHLNFQIEHQCQHTLPTPSLFPRMPRHNYSRVAPLVKSLCAKHGLSYEVKPFLTALVDIVRSLKKSGDIWLDAYLHQ

SEQ ID NO: 899148 - protein, 451 aa, Homo sapiens
QQRAPRELQRRWGPRRDWGPWFEGCSQAPRDSVPPLGALDLTLQDARLEAPQAPLLTDRDSASGSRGRGEALRDAQQDAFRAFHQDLNFVRKFLQPLLIGELAPEEPSQDGPLNAQLVEDFRALHQAAEDMKLFDASPTFFAFLLGHILAMEVLAWLLIYLLGPGWVPSALAAFILAISQAQSWCLQHDLGHASIFKKSWWNHVAQKFVMGQLKGFSAHWWNFRHFQHHAKPNIFHKDPDVTVAPVFLLGESSVEYGKKKRRYLPYNQQHLYFFLIGPPLLTLVNFEVENLAYMLVCMQWADLLWAASFYARFFLSYLPFYGVPGVLLFFVAVRVLESHWFVWITQMNHIPKEIGHEKHRDWVSSQLAATCNVEPSLFTNWFSGHLNFQIEHHLFPRMPRHNYSRVAPLVKSLCAKHGLSYEVKPFLTALVDIVRSLKKSGDIWLDAYLHQ

SEQ ID NO: 899149 - protein, 337 aa, Homo sapiens
MSALLQDAFRAFHQDLNFVRKFLQPLLIGELAPEEPSQDGPLNAQLVEDFRALHQAAEDMKLFDASPTFFAFLLGHILAMEVLAWLLIYLLGPGWVPSALAAFILAISQAQSWCLQHDLGHASIFKKSWWNHVAQKFVMGQLKGFSAHWWNFRHFQHHAKPNIFHKDPDVTVAPVFLLGESSVEYGKKKRRYLPYNQQHLYFFLIGPPLLTLVNFEVENLAYMLVCMQWAGPGKPLVRVDHTDEPHPQGDRPREAPGLGQLSAGSHLQRGALTFHQLVQRAPQLPDRAPPLPQDAETQLQPGGPAGQVAVCQARPQLRSEALPHRAGGHRQVPEEVW

SEQ ID NO: 899150 - protein, 140 aa, Homo sapiens
AGRRTLARTAAAAAGRGRSSGRRRRRRPGALFASLGVLLGPRPPPGIPRTRACSMGGVGEPGPREGPAQPGAPLPTFCWEQIRAHDQPGDKWLVIERRVYDISRWAQRHPGGSRLIGHHGAEDATVGHTGYQEGLQDPRT

SEQ ID NO: 899151 - protein, 100 aa, Homo sapiens
IYFKLLIFLLKGSTSSPVPRAMSSQQQQRQQQQCPPQRAQQQQVKQPCQPPPVKCQETCAPKTKDPCAPQVKKQCPPKGTIIPAQQKCPSAQQASKSKQK

SEQ ID NO: 899152 - protein, 66 aa, Homo sapiens
MSSQQQQRQQQQCPPQRAQQQQVKQPCQPPPVKCQETCAPKTKDPCAPQVKKQCPPKGTIIPAQQK

SEQ ID NO: 899153 - protein, 705 aa, Homo sapiens
MTIEDLPDFPLEGNPLFGRYPFIFSASDTPVIFSISAAPMPSDCEFSFFDPNDASCQEILFDPKTSVSELFAILRQWVPQVQQNIDIIGNEILKRGCNVNDRDGLTDMTLLHYTCKSGAHGIGDVETAVKFATQLIDLGADISLRSRWTNMNALHYAAYFDVPELIRVILKTSKPKDVDATCSDFNFGTALHIAAYNLCAGAVKCLLEQGANPAFRNDKGQIPADVVPDPVDMPLEMADAAATAKEIKQMLLDAVPLSCNISKAMLPNYDHVTGKAMLTSLGLKLGDRVVIAGQKVGTLRFCGTTEFASGQWAGIELDEPEGKNNGSVGKVQYFKCAPKYGIFAPLSKISKAKGRRKNITHTPSTKAAVPLIRSQKIDVAHVTSKVNTGLMTSKKDSASESTLSLPPGEELKTVTEKDVALLGSVSSCSSTSSLEHRQSYPKKQNAISSNKKTMSKSPSLSSRASAGLNSSATSTANNSRCEGELRLGERVLVVGQRLGTIRFFGTTNFAPGYWYGIELEKPHGKNDGSVGGVQYFSCSPRYGIFAPPSRVQRVTDSLDTLSEISSNKQNHSYPGFRRSFSTTSASSQKEINRRNAFSKSKAALRRSWSSTPTAGGIEGSVKLHEGSQVLLTSSNEMGTVRYVGPTDFASGIWLGLELRSAKGKNDGSVGDKRYFTCKPNHGVLVRPSRVTYRGINGSKLVDENC

SEQ ID NO: 899154 - protein, 705 aa, Homo sapiens; identical to SEQ ID NO: 899153

SEQ ID NO: 899155 - protein, 537 aa, Homo sapiens
GTPPTSPTAPTSPTAPTSPTAPTSPTAPTSPTAPTSPTVEQGANPAFRNDKGQIPADVVPDPVDMPLEMADAAATAKEIKQMLLDAVPLSCNISKAMLPNYDHVTGKAMLTSLGLKLGDRVVIAGQKVGTLRFCGTTEFASGQWAGIELDEPEGKNNGSVGKVQYFKCAPKYGIFAPLSKISKAKGRRKNITHTPSTKAAVPLIRSQKIDVAHVTSKVNTGLMTSKKDSASESTLSLPPGEELKTVTEKDVALLGSVSSCSSTSSLEHRQSYPKKQNAISSNKKTMSKSPSLSSRASAGLNSSATSTANNSRCEGELRLGERVLVVGQRLGTIRFFGTTNFAPGYWYGIELEKPHGKNDGSVGGVQYFSCSPRYGIFAPPSRVQRVTDSLDTLSEISSNKQNHSYPGFRRSFSTTSASSQKEINRRNAFSKSKAALRRSWSSTPTAGGIEGSVKLHEGSQVLLTSSNEMGTVRYVGPTDFASGIWLGLELRSAKGKNDGSVGDKRYFTCKPNHGVLVRPSRVTYRGINGSKLVDENC

SEQ ID NO: 899156 - protein, 581 aa, Homo sapiens
MQRRKQKQKNLNESHYLCMLLQSELSEFSFFDPNDASCQEILFDPKTSVSELFAILRQWVPQVQQNIDIIGNEILKRGCNVNDRDGLTDMTLLHYTCKSGAHGIGDVETAVKFATQLIDLGADISLRSRWTNMNALHYAAYFDVPELIRVILKTSKPKDVDATCSDFNFGTALHIAAYNLCAGAVKCLLEQGANPAFRNDKGQIPADVVPDPVDMPLEMADAAATAKEIKQMLLDAVPLSCNISKAMLPNYDHVTGKAMLTSLGLKLGDRVVIAGQKVGTLRFCGTTEFASGQWAGIELDEPEGKNNGSVGKVQYFKCAPKYGIFAPLSKISKAKGRRKNITHTPSTKAAVPLIRSQKIDVAHVTSKVNTGLMTSKKDSASESTLSLPPGEELKTVTEKDVALLGSVSSCSSTSSLEHRQSYPKKQNAISSNKKTMSKSPSLSSRASAGLNSSATSTANNSRCEGELRLGERVLVVGQRLGTIRFFGTTNFAPGYWYGIELEKPHGKNDGSVGGVQYFSCSPRYGIFAPPSRVQRVTDSLDTLSEISSNKQNHSYPGFRRSFSTTSASSQKEINRRNAFSK

SEQ ID NO: 899157 - protein, 574 aa, Homo sapiens
MQRRKQKQKNLNESHYLCMLLQSELSEFSFFDPNDASCQEILFDPKTSVSELFAILRQWVPQVQQNIDIIGNEILKRGCNVNDRDGLTDMTLLHYTCKSGAHGIGDVETAVKFATQLIDLGADISLRSRWTNMNALHYAAYFDVPELIRVILKTSKPKDVDATCSDFNFGTALHIAAYNLCAGAVKCLLEQGANPAFRNDKGQIPADVVPDPVDMPLEMADAAATAKEIKQMLLDAVPLSCNISKAMLPNYDHVTGKAMLTSLGLKLGDRVVIAGQKVGTLRFCGTTEFASGQWAGIELDEPEGKNNGSVGKVQYFKCAPKYGIFAPLSKISKAKGRRKNITHTPSTKAAVPLIRSQKIDVAHVTSKVNTGLMTSKKDSASESTLSLPPGEELKTVTEKDVALLGSVSSCSSTSSLEHRQSYPKKQNAISSNKKTMSKSPSLSSRASAGLNSSATSTANNSRCEGELRLGERVLVVGQRLGTIRFFGTTNFAPGYWYGIELEKPHGKNDGSVGGVQYFSCSPRYGIFAPPSRVQRVTDSLDTLSEISSNKQNHSYPGKTTQFCVPNQYFFAFIY

SEQ ID NO: 899158 - protein, 687 aa, Homo sapiens
MQRRKQKQKNLNESHYLCMLLQSELSEFSFFDPNDASCQEILFDPKTSVSELFAILRQWVPQVQQNIDIIGNEILKRGCNVNDRDGLTDMTLLHYTCKSGAHGIGDVETAVKFATQLIDLGADISLRSRWTNMNALHYAAYFDVPELIRVILKTSKPKDVDATCSDFNFGTALHIAAYNLCAGAVKCLLEQGANPAFRNDKGQIPADVVPDPVDMPLEMADAAATAKEIKQMLLDAVPLSCNISKAMLPNYDHVTGKAMLTSLGLKLGDRVVIAGQKVGTLRFCGTTEFASGQWAGIELDEPEGKNNGSVGKVQYFKCAPKYGIFAPLSKISKAKGRRKNITHTPSTKAAVPLIRSQKIDVAHVTSKVNTGLMTSKKDSASESTLSLPPGEELKTVTEKDVALLGSVSSCSSTSSLEHRQSYPKKQNAISSNKKTMSKSPSLSSRASAGLNSSATSTANNSRCEGELRLGERVLVVGQRLGTIRFFGTTNFAPGYWYGIELEKPHGKNDGSVGGVQYFSCSPRYGIFAPPSRVQRVTDSLDTLSEISSNKQNHSYPGFRRSFSTTSASSQKEINRRNAFSKSKAALRRSWSSTPTAGGIEGSVKLHEGSQVLLTSSNEMGTVRYVGPTDFASGIWLGLELRSAKGKNDGSVGDKRYFTCKPNHGVLVRPSRVTYRGINGSKLVDENC

SEQ ID NO: 899159 - protein, 705 aa, Homo sapiens; identical to SEQ ID NO: 899153

SEQ ID NO: 899160 - protein, 581 aa, Homo sapiens; identical to SEQ ID NO: 899156

SEQ ID NO: 899161 - protein, 123 aa, Homo sapiens
MTIEDLPDFPLEGNPLFGRYPFIFSASDTPVIFSISAAPMPSDCEFSFFDPNDASCQEILFDPKTSVSELFAILRQWVPQVQQNIDIIGNEILKRGCNVNDRDGLTDMTLLHYTCKSGAHGIV

SEQ ID NO: 899162 - protein, 72 aa, Homo sapiens
SSKIKKIVHSIISSFAFGLFGVFLVLLDVTLVLADLIFTDSKLYIPSEYRSISLAIALFFLMDVLLRVFVEG

SEQ ID NO: 899163 - protein, 189 aa, Homo sapiens
WARRLRVGEVCGAGRPGGSPARASRDGPRSRGVCGGSTHTRKTSSSPAPGERASVCESECEERAAARRPAPPLEQLSKLRRRPGPAARPPRAGPLSLPAAGGPGEGPRAETPEAGAPHAARPPAPRPAPARVRVLLAPCCRLSRYLLLLPGLREMRESEPGRRNPSSGGGGRGGGSPPRGGPGSMCLSW

SEQ ID NO: 899164 - protein, 189 aa, Homo sapiens; identical to SEQ ID NO: 899163

SEQ ID NO: 899165 - protein, 133 aa, Homo sapiens
MSSEENKCVEQPQPPPPEEPGAPAPSPPAADKRPRGRPRKALPLSREPERNSAHLHPGEINSFIAHTKPVWWSLHTDAHEIWCRDLDRGTSLRRSIPCPPALCSVRKIHLRPQVLRPTSPRNISPISNLIYSA

SEQ ID NO: 899166 - protein, 189 aa, Homo sapiens; identical to SEQ ID NO: 899163

SEQ ID NO: 899167 - protein, 266 aa, Homo sapiens
LAQPSHLHTRCQHTRGRGAGGDLQPLSGAAPLQHQVRSLSGERLKVLDEDGGIGPADPLQLLNVGIRAHSNGHHLDVSRQPLDLIRGRISGDHGDQVGHLLPVTLADQEAVVGGVQQGHPSVGPVATLVADLSHPLQDVPFGLCLAEGVLHGHHVGVLQHRDVDAVLAHIHPLNHLLHELLAPVEVGFTNFVRSFQDKCHIQNHGVPLGPQGRKPQEPRAHSDLCHVGGQSRRRGVRGKVTEVANDLFPLLLQLIHTAQHEGLVLR

SEQ ID NO: 899168 - protein, 1016 aa, Homo sapiens
MVLPTCPMAEFALPRHSAVMERLRRRIELCRRHHSTCEARYEAVSPERLELERQHTFALHQRCIQAKAKRAGKHRQPPAATAPAPAAPAPRLDAADGPEHGRPATHLHDTVKRNLDSATSPQNGDQQNGYGDLFPGHKKTRREAPLGVAISSNGLPPASPLGQSDKPSGADALQSSGKHSLGLDSLNKKRLADSSLHLNGGSNPSESFPLSLNKELKQEPVEDLPCMITGTVGSISQSNLMPDLNLNEQEWKELIEELNRSVPDEDMKDLFNEDFEEKKDPESSGSATQTPLAQDINIKTEFSPAAFEQEQLGSPQVRAGSAGQTFLGPSSAPVSTDSPSLGGSQTLFHTSGQPRADNPSPNLMPASAQAQNAQRALAGVVLPSQGPGGASELSSAHQLQQIAAKQKREQMLQNPQQATPAPAPGQMSTWQQTGPSHSSLDVPYPMEKPASPSSYKQDFTNSKLLMMPSVNKSSPRPGGPYLQPSHVNLLSHQPPSNLNQNSANNQGSVLDYGNTKPLSHYKADCGQGSPGSGQSKPALMAYLPQQLSHISHEQNSLFLMKPKPGNMPFRSLVPPGQEQNPSSVPVQAQATSVGTQPPAVSVASSHNSSPYLSSQQQAAVMKQHQLLLDQQKQREQQQKHLQQQQFLQRQQHLLAEQEKQQFQRHLTRPPPQYQDPTQGSFPQQVGQFTGSSAAVPGMNTLGPSNSSCPRVFPQAGNLMPMGPGHASVSSLPTNSGQQDRGVAQFPGSQNMPQSSLYGMASGITQIVAQPPPQATNGHAHIPRQTNVGQNTSVSAAYGQNSLGSSGLSQQHNKGTLNPGLTKPPVPRVSPAMGGQNSSWQHQGMPNLSGQTPGNSNVSPFTAASSFHMQQQAHLKMSSPQFSQAVPNRPMAPMSSAAAVGSLLPPVSAQQRTSAPAPAPPPTAPQQGLPGLSPAGPELGAFSQSPASQMGGRAGLHCTQAYPVRTAGQELPFAYSGQPGGSGLSSVAGHTDLIDSLLKNRTSEEWMSDLDDLLGSQ

SEQ ID NO: 899169 - protein, 396 aa, Homo sapiens
MKQHQLLLDQQKQREQQQKHLQQQQFLQRQQHLLAEQEKQQFQRHLTRPPPQYQDPTQGSFPQQVGQFTGSSAAVPGMNTLGPSNSSCPRVFPQAGNLMPMGPGHASVSSLPTNSGQQDRGVAQFPGSQNMPQSSLYGMASGITQIVAQPPPQATNGHAHIPRQTNVGQNTSVSAAYGQNSLGSSGLSQQHNKGTLNPGLTKPPVPRVSPAMGGQNSSWQHQGMPNLSGQTPGNSNVSPFTAASSFHMQQQAHLKMSSPQFSQAVPNRPMAPMSSAAAVGSLLPPVSAQQRTSAPAPAPPPTAPQQGLPGLSPAGPELGAFSQSPASQMGGRAGLHCTQAYPVRTAGQELPFAYSGQPGGSGLSSVAGHTDLIDSLLKNRTSEEWMSDLDDLLGSQ

SEQ ID NO: 899170 - protein, 1016 aa, Homo sapiens; identical to SEQ ID NO: 899168

SEQ ID NO: 899171 - protein, 1016 aa, Homo sapiens; identical to SEQ ID NO: 899168

SEQ ID NO: 899172 - protein, 601 aa, Homo sapiens
MVLPTCPMAEFALPRHSAVMERLRRRIELCRRHHSTCEARYEAVSPERLELERQHTFALHQRCIQAKAKRAGKHRQPPAATAPAPAAPAPRLDAADGPEHGRPATHLHDTVKRNLDSATSPQNGDQQNGYGDLFPGHKKTRREAPLGVAISSNGLPPASPLGQSDKPSGADALQSSGKHSLGLDSLNKKRLADSSLHLNGGSNPSESFPLSLNKELKQEPVEDLPCMITGTVGSISQSNLMPDLNLNEQEWKELIEELNRSVPDEDMKDLFNEDFEEKKDPESSGSATQTPLAQDINIKTEFSPAAFEQEQLGSPQVRAGSAGQTFLGPSSAPVSTDSPSLGGSQTLFHTSGQPRADNPSPNLMPASAQAQNAQRALAGVVLPSQGPGGASELSSAHQLQQIAAKQKREQMLQNPQQATPAPAPGQMSTWQQTGPSHSSLDVPYPMEKPASPSSYKQDFTNSKLLMMPSVNKSSPRPGGPYLQPSHVNLLSHQPPSNLNQNSANNQGSVLDYGNTKPLSHYKADCGQGSPGSGQSKPALMAYLPQQLSHISHEQNSLFLMKPKPGNMPFRSLVPPGQVSMSLCFLFLCCRHFSEVTHYFGC

SEQ ID NO: 899173 - protein, 708 aa, Homo sapiens
MVLPTCPMAEFALPRHSAVMERLRRRIELCRRHHSTCEARYEAVSPERLELERQHTFALHQRCIQAKAKRAGKHRQPPAATAPAPAAPAPRLDAADGPEHGRPATHLHDTVKRNLDSATSPQNGDQQNGYGDLFPGHKKTRREAPLGVAISSNGLPPASPLGQSDKPSGADALQSSGKHSLGLDSLNKKRLADSSLHLNGGSNPSESFPLSLNKELKQEPVEDLPCMITGTVGSISQSNLMPDLNLNEQEWKELIEELNRSVPDEDMKDLFNEDFEEKKDPESSGSATQTPLAQDINIKTEFSPAAFEQEQLGSPQVRAGSAGQTFLGPSSAPVSTDSPSLGGSQTLFHTSGQPRADNPSPNLMPASAQAQNAQRALAGVVLPSQGPGGASELSSAHQLQQIAAKQKREQMLQNPQQATPAPAPGQMSTWQQTGPSHSSLDVPYPMEKPASPSSYKQDFTNSKLLMMPSVNKSSPRPGGPYLQPSHVNLLSHQPPSNLNQNSANNQGSVLDYGNTKPLSHYKADCGQGSPGSGQSKPALMAYLPQQLSHISHEQNSLFLMKPKPGNMPFRSLVPPGQEQNPSSVPVQAQATSVGTQPPAVSVASSHNSSPYLSSQQQAAVMKQHQLLLDQQKQREQQQKHLQQQQFLQRQQHLLAEQEKQQFQRHLTRPPPQYQDPTQGSFPQQVGQFTGRGCLCDEQGQGRPLPGAG

SEQ ID NO: 899174 - protein, 477 aa, Homo sapiens
MAYLPQQLSHISHEQNSLFLMKPKPGNMPFRSLVPPGQEQNPSSVPVQAQATSVGTQPPAVSVASSHNSSPYLSSQQQAAVMKQHQLLLDQQKQREQQQKHLQQQQFLQRQQHLLAEQEKQQFQRHLTRPPPQYQDPTQGSFPQQVGQFTGSSAAVPGMNTLGPSNSSCPRVFPQAGNLMPMGPGHASVSSLPTNSGQQDRGVAQFPGSQNMPQSSLYGMASGITQIVAQPPPQATNGHAHIPRQTNVGQNTSVSAAYGQNSLGSSGLSQQHNKGTLNPGLTKPPVPRVSPAMGGQNSSWQHQGMPNLSGQTPGNSNVSPFTAASSFHMQQQAHLKMSSPQFSQAVPNRPMAPMSSAAAVGSLLPPVSAQQRTSAPAPAPPPTAPQQGLPGLSPAGPELGAFSQSPASQMGGRAGLHCTQAYPVRTAGQELPFAYSGQPGGSGLSSVAGHTDLIDSLLKNRTSEEWMSDLDDLLGSQ

SEQ ID NO: 899175 - protein, 1016 aa, Homo sapiens; identical to SEQ ID NO: 899168

SEQ ID NO: 899176 - protein, 897 aa, Homo sapiens
MVLPTCPMAEFALPRHSAVMERLRRRIELCRRHHSTCEARYEAVSPERLELERQHTFALHQRCIQAKAKRAGKHRQPPAATAPAPAAPAPRLDAADGPEHGRPATHLHDTVKRNLDSATSPQNGDQQNGYGDLFPGHKKTRREAPLGVAISSNGLPPASPLGQSDKPSGADALQSSGKHSLGLDSLNKKRLADSSLHLNGGSNPSESFPLSLNKELKQEPVEDLPCMITGTVGSISQSNLMPDLNLNEQEWKELIEELNRSVPDEDMKDLFNEDFEEKKDPESSGSATQTPLAQDINIKTEFSPAAFEQEQLGSPQVRAGSAGQTFLGPSSAPVSTDSPSLGGSQTLFHTSGQPRADNPSPNLMPASAQAQNAQRALAGVVLPSQGPGGASELSSAHQLQQIAAKQKREQMLQNPQQATPAPAPGQMSTWQQTGPSHSSLDVPYPMEKPASPSSYKQDFTNSKLLMMPSVNKSSPRPGGPYLQPSHVNLLSHQPPSNLNQNSANNQGSVLDYGNTKPLSHYKADCGQGSPGSGQSKPALMAYLPQQLSHISHEQNSLFLMKPKPGNMPFRSLVPPGQEQNPSSVPVQAQATSVGTQPPAVSVASSHNSSPYLSSQQQAAVMKQHQLLLDQQKQREQQQKHLQQQQFLQRQQHLLAEQEKQQFQRHLTRPPPQYQDPTQGSFPQQVGQFTGSSAAVPGMNTLGPSNSSCPRVFPQAGNLMPMGPGHASVSSLPTNSGQQDRGVAQFPGSQNMPQSSLYGMASGITQIVAQPPPQATNGHAHIPRQTNVGQNTSVSAAYGQNSLGSSGLSQQHNKGTLNPGLTKPPVPRVSPAMGGQNSSWQHQGMPNLSGQTPGNSNVSPFTAASGPFNASGPFNASGPFNASRPSRLRAITTPGILR

SEQ ID NO: 899177 - protein, 724 aa, Homo sapiens
MVLPTCPMAEFALPRHSAVMERLRRRIELCRRHHSTCEARYEAVSPERLELERQHTFALHQRCIQAKAKRAGKHRQPPAATAPAPAAPAPRLDAADGPEHGRPATHLHDTVKRNLDSATSPQNGDQQNGYGDLFPGHKKTRREAPLGVAISSNGLPPASPLGQSDKPSGADALQSSGKHSLGLDSLNKKRLADSSLHLNGGSNPSESFPLSLNKELKQEPVEDLPCMITGTVGSISQSNLMPDLNLNEQEWKELIEELNRSVPDEDMKDLFNEDFEEKKDPESSGSATQTPLAQDINIKTEFSPAAFEQEQLGSPQVRAGSAGQTFLGPSSAPVSTDSPSLGGSQTLFHTSGQPRADNPSPNLMPASAQAQNAQRALAGVVLPSQGPGGASELSSAHQLQQIAAKQKREQMLQNPQQATPAPAPGQMSTWQQTGPSHSSLDVPYPMEKPASPSSYKQDFTNSKLLMMPSVNKSSPRPGGPYLQPSHVNLLSHQPPSNLNQNSANNQGSVLDYGNTKPLSHYKADCGQGSPGSGQSKPALMAYLPQQLSHISHEQNSLFLMKPKPGNMPFRSLVPPGQEQNPSSVPVQAQATSVGTQPPAVSVASSHNSSPYLSSQQQAAVMKQHQLLLDQQKQREQQQKHLQQQQFLQRQQHLLAEQEKQQFQRHLTRPPPQYQDPTQGSFPQQVGQFTAQGLSCALPMIHSTEVLISSLCNGSAGLSAAQRSW

SEQ ID NO: 899178 - protein, 487 aa, Homo sapiens
MGDTGLRKRREDEKSIQSQEPKTTSLQKELGLISGISIIVGTIIGSGIFVSPKSVLSNTEAVGPCLIIWAACGVLATLGALCFAELGTMITKSGGEYPYLMEAYGPIPAYLFSWASLIVIKPTSFAIICLSFSEYVCAPFYVGCKPPQIVVKCLAAAAILFISTVNSLSVRLGSYVQNIFTAAKLVIVAIIIISGLVLLAQGNTKNFDNSFEGAQLSVGAISLAFYNGLWAYDGWNQLNYITEELRNPYRNLPLAIIIGIPLVTACYILMNVSYFTVMTATELLQSQAVAVTFGDRVLYPASWIVPLFVAFSTIGAANGTCFTAGRLIYVAGREGHMLKVLSYISVRRLTPAPAIIFYGIIATIYIIPGDINSLVNYFSFAAWLFYGLTILGLIVMRFTRKELERPIKVPVVIPVLMTLISVFLVLAPIISKPTWEYLYCVLFILSGLLFYFLFVHYKFGWAQKISKPITMHLQMLMEVVPPEEDPE

SEQ ID NO: 899179 - protein, 103 aa, Homo sapiens
PFLGLDRAGTGGQLGRSSSGSAGSRRKPAPLVQAELALASCLLLLNQDLAVRPPCSLLEPAGGNMGDTGLRKRREDEKSIQSQEPKTTSLQKEVPCALRSLAQ

SEQ ID NO: 899180 - protein, 553 aa, Homo sapiens
PFLGLDRAGTGGQLGRSSSGSAGSRRKPAPLVQAELALASCLLLLNQDLAVRPPCSLLEPAGGNMGDTGLRKRREDEKSIQSQEPKTTSLQKELGLISGISIIVGTIIGSGIFVSPKSVLSNTEAVGPCLIIWAACGVLATLGALCFAELGTMITKSGGEYPYLMEAYGPIPAYLFSWASLIVIKPTSFAIICLSFSEYVCAPFYVGCKPPQIVVKCLAAAAILFISTVNSLSVRLGSYVQNIFTAAKLVIVAIIIISGLVLLAQGNTKNFDNSFEGAQLSVGAISLAFYNGLWAYDGWNQLNYITEELRNPYRNLPLAIIIGIPLVTACYILMNVSYFTVMTATELLQSQAVAVTFGDRVLYPASWIVPLFVAFSTIGAANGTCFTAGRLIYVAGREGHMLKVLSYISVRRLTPAPAIIFYGIIATIYIIPGDINSLVNYFSFAAWLFYGLTILGLIVMRFTRKELERPIKVPVVIPVLMTLISVFLVLAPIISKPTWEYLYCVLFILSGLLFYFLFVHYKFGWAQKISSKYQQKGRLASVRCRQARRPHLS

SEQ ID NO: 899181 - protein, 551 aa, Homo sapiens
PFLGLDRAGTGGQLGRSSSGSAGSRRKPAPLVQAELALASCLLLLNQDLAVRPPCSLLEPAGGNMGDTGLRKRREDEKSIQSQEPKTTSLQKELGLISGISIIVGTIIGSGIFVSPKSVLSNTEAVGPCLIIWAACGVLATLGALCFAELGTMITKSGGEYPYLMEAYGPIPAYLFSWASLIVIKPTSFAIICLSFSEYVCAPFYVGCKPPQIVVKCLAAAAILFISTVNSLSVRLGSYVQNIFTAAKLVIVAIIIISGLVLLAQGNTKNFDNSFEGAQLSVGAISLAFYNGLWAYDGWNQLNYITEELRNPYRNLPLAIIIGIPLVTACYILMNVSYFTVMTATELLQSQAVAVTFGDRVLYPASWIVPLFVAFSTIGAANGTCFTAGRLIYVAGREGHMLKVLSYISVRRLTPAPAIIFYGIIATIYIIPGDINSLVNYFSFAAWLFYGLTILGLIVMRFTRKELERPIKVPVVIPVLMTLISVFLVLAPIISKPTWEYLYCVLFILSGLLFYFLFVHYKFGWAQKISKPITMHLQMLMEVVPPEEDPE

SEQ ID NO: 899182 - protein, 468 aa, Homo sapiens
QTGVNQAGLNVQRWSSGPSSEGGPRWAPPYERSLRWEEGSLGPGQCLTRGLWALPLCVPGALCFAELGTMITKSGGEYPYLMEAYGPIPAYLFSWASLIVIKPTSFAIICLSFSEYVCAPFYVGCKPPQIVVKCLAAAAILFISTVNSLSVRLGSYVQNIFTAAKLVIVAIIIISGLVLLAQGNTKNFDNSFEGAQLSVGAISLAFYNGLWAYDGWNQLNYITEELRNPYRNLPLAIIIGIPLVTACYILMNVSYFTVMTATELLQSQAVAVTFGDRVLYPASWIVPLFVAFSTIGAANGTCFTAGRLIYVAGREGHMLKVLSYISVRRLTPAPAIIFYGIIATIYIIPGDINSLVNYFSFAAWLFYGLTILGLIVMRFTRKELERPIKVPVVIPVLMTLISVFLVLAPIISKPTWEYLYCVLFILSGLLFYFLFVHYKFGWAQKISKPITMHLQMLMEVVPPEEDPE

SEQ ID NO: 899183 - protein, 547 aa, Homo sapiens
PFLGLDRAGTGGQLGRSSSGSAGSRRKPAPLVQAELALASCLLLLNQDLAVRPPCSLLEPAGGNMGDTGLRKRREDEKSIQSQEPKTTSLQKELGLISGISIIVGTIIGSGIFVSPKSVLSNTEAVGPCLIIWAACGVLATLGALCFAELGTMITKSGGEYPYLMEAYGPIPAYLFSWASLIVIKPTSFAIICLSFSEYVCAPFYVGCKPPQIVVKCLAAAAILFISTVNSLSVRLGSYVQNIFTAAKLVIVAIIIISGLVLLAQGNTKNFDNSFEGAQLSVGAISLAFYNGLWAYDGWNQLNYITEELRNPYRNLPLAIIIGIPLVTACYILMNVSYFTVMTATELLQSQAVAVTFGDRVLYPASWIVPLFVAFSTIGAANGTCFTAGRLIYVAGREGHMLKVLSYISVRRLTPAPAIIFYGIIATIYIIPGDINSLVNYFSFAAWLFYGLTILGLIVMRFTRKELERPIKVPVVIPVLMTLISVFLVLAPIISKPTWEYLYCVLFILSGLLFYFLFVHASAPAITLSFTLFPFTLKCACKWSPPP

SEQ ID NO: 899184 - protein, 1302 aa, Homo sapiens
MTQECPDLSLSLLSSRVKGERLHRTWTEQPLGLYLVGEKAAGQWRCVEGTLSTSLQALSPGAEMAVAPAPEAGVRYLVVAVERSWGLNDLGPPFITKVVGAWRQWRLMDRSSQPKGPPWLAWFCVTLKPESYNTSQEKIGEEARTPPGLPTGQEVGKGRKEMNGVSSQGSYLCLSLYSYIIRERDHWVHRDGEEATGLNFLFRRKCSPQAHCVRQVLGNGQRALSSSTLVGDQEGNSVAKGYFNLLFMIYSPLEQSLSGCCENTLHLWDDRVVSDPQDSIDVCGCSTEWCYPDQQSPQEVGATHTLIPLVGSCLQRGLPLGVPGRGDPCLWGRVSTGEVLAGGGSDVLVTWADLPTVPGCQNCSAVGPLHYSTSLKEGNFLPKLTLGNYSFNPLHQISYSSPPGFYPMRVKLCEADTSVCCSVAALKGLFLSIMDAGACLKSHSGPSLSQKRRMHKCNSWLFAGVGEHLLFEDGGGEGRNMIPPEVSHPGANSLPCSVSRLQMPPCPDETLQWLQEWSSLSFHLLWSGEVHCAYGRDRSGPAVMLGCGQGQGWMTQSVCLCISALFILSHFLHRLLFPAMGFWYEKGSSKWSQVLVGQGELDPSGKNHLQNDSPSGFFYHPILLGKEHLGGSWDAASPRQCQHFMGAEAEPRSSKKGHPESSSSVESLPVRTLRSSQSSHGHATHQGSMPDLFFTASLEEEQKPPFLKTIKTSKGTSLEMKCSTILAYVTRSPDYATRVPLPCPAAQELLSSSSPGVPALLIPHIPHLPQPRKQWGFSDAPPFVSLWLPLALCKLCKKLLPLLDVVDELPSTWLERWHIIQGQKVVQQCFCSGCREMEKKSPASLPPPTFLFHSSEFSSPVSCHVKRFFKMLLLLLDCLSLSSQGGDENVDTSPRLLPQPFHSRQKRLGQNKTSMIEEQGSPHNQVSPDGGWTGLVWLGKDSFKSVPEHLRAMSVMPKRATWPPWAPTLMAELHKRGSDVGMPDGGTLFSDKGLNPFHVAKQLSLPPLPPNPELGLVWAQHGCACEGSHISERKLHSPQGPRLAWGRCLLKSMSVSALGNPSRALVGNLASKEQGLGPPKEFTMMPGRVPEPGFQSAWLTEWGLGIPGQLSIHPISQGSGQGQLATGNQRLFCTVLPETVTLGKAPHFSGPQLPHLQNQSISCSPHDSLPVLIKSLCSGAHEGCEPGAPGSCLRGLVSFQPLMPRLGAGSHLVHAQMLPQTRTLGILTDSAFLSSWFVLPLLFLCNDETIIKGHLQWTIFKVLMGCHNLRYILSKSVSPTADEAGSFLISASGMTSVGELKI

SEQ ID NO: 899185 - protein, 1239 aa, Homo sapiens
MAVAPAPEAGVRYLVVAVERSWGLNDLGPPFITKVVGAWRQWRLMDRSSQPKGPPWLAWFCVTLKPESYNTSQEKIGEEARTPPGLPTGQEVGKGRKEMNGVSSQGSYLCLSLYSYIIRERDHWVHRDGEEATGLNFLFRRKCSPQAHCVRQVLGNGQRALSSSTLVGDQEGNSVAKGYFNLLFMIYSPLEQSLSGCCENTLHLWDDRVVSDPQDSKMFVDVALSGDTQTSSHPRKWGLPIPSFLWWGAACREACHWGFQAVVTLASGEGLAQGRFQLEEGSDVLVTWADLPTVPGCQNCSAVGPLHYSTSLKEGNFLPKLTLGNYSFNPLHQISYSSPPGFYPMRVKLCEADTSVCCSVAALKGLFLSIMDAGACLKSHSGPSLSQKRRMHKCNSWLFAGVGEHLLFEDGGWGRKEHDPSRSLPPWGQLTAMFSVPAPNAPLPRGNPAVVTGMELFVIPPPLVRRGSLCIWQRQEWPCSDVGLWAGTVMDDSERLSLYFCSVHSVPTFFIDSFSLQWVFGMKKAPVNGAKSWFDKGNLILQGRIISKMTPHLVSSTTQFYYGKEHLGGSWDAASPRQCQHFMGAEAEPRSSKKGHPESSSSVESLPVRTLRSSQSSHGHATHQGSMPDLFFTASLEEEQKPPFLKTIKTSKGTSLEMKCSTILAYVTRSPDMQTRVPLPCPAAQELLSSSSPGVPALLIPHIPHLPQPRKQWGFSDAPPFVSLWLPLALCKLCKKLLPLLDVVDELPSTWLERWHIIQGQKVVQQCFCSGCREMEKKSPASLPPPTFLFHSSEFSSPVSCHVKRFFKMLLLLLDCLSLSSQGGDENVDTSPRLLPQPFHSRQKRLGQNKTSMIEEQGSPHNQVSPDGGWTGLVWLGKDSFKSVPEHLRAMSVMPKRATWPPWAPTLMAELHKRGSDVGMPDGGTLFSDKGLNPFHVAKQLSLPPLPPNPELGLVWAQHGCACEGSHISERKLHSPQGPRLAWGRCLLKSMSVSALGNPSRALVGNLASKEQGLGPPKEFTMMPGRVPEPGFQSAWLTEWGLGIPGQLSIHPISQGSGQGQLATGNQRLFCTVLPETVTLGKAPHFSGPQLPHLQNQSISCSPHDSLPVLLKVSDLEHMRVASLVHLVPVSVGWFPSAPDAQAGCRLSSGPCPDAASDKNSGNPNRLCFLSSWFVLPLLFLCNDETIIKGHLQWTIFKVLMGCHNLRYILSKSVSPTADEAGSFLISASGMTSVGELKI

SEQ ID NO: 899186 - protein, 308 aa, Homo sapiens
MFNGEPGPASSGASRNVVRSSSISGEICGSQQAGGGAGTTTAKKRRSSLGAKMVAIVGLTQWSKSTLQLPQPEGATKKLRSNIRRSTETGIAVEMRSRVTRQGSRESTDGSTNSNSSDGTFIFPTTRLGAESQFSDFLDGLGPAQIVGRQTLATPPMGDVHIAIMDRSGQLEVEVIEARGLTPKPGSKSLPATYIKVYLLENGACLAKKKTKMTKKTCDPLYQQALLFDEGPQGKVLQVIVWGDYGRMDHKCFMGMAQIMLDELDLSAAVTGWYKLFPTSSVADSTLGSLTRRLSQSSLESATSPSCS

SEQ ID NO: 899187 - protein, 224 aa, Homo sapiens
MRLAKPKAGISRSSSQGKAYENKRKTGRQRQKWGMTIRFDSSFSRLRRSLDDKPYKCTECEKSFSQSSTLFQHQKIHTGKKSHKCADCGKSFFQSSNLIQHRRIHTGEKPYKCDECGESFKQSSNLIQHQRIHTGEKPYQCDECGRCFSQSSHLIQHQRTHTGEKPYQCSECGKCFSQSSHLRQHMKVHKEEKPRKTRGKNIRVKTHLPSWKAGTGRKSVAGLR

SEQ ID NO: 899188 - protein, 224 aa, Homo sapiens; identical to SEQ ID NO: 899187

SEQ ID NO: 899189 - protein, 206 aa, Homo sapiens
MVHARLPTGSRRQKWGMTIRFDSSFSRLRRSLDDKPYKCTECEKSFSQSSTLFQHQKIHTGKKSHKCADCGKSFFQSSNLIQHRRIHTGEKPYKCDECGESFKQSSNLIQHQRIHTGEKPYQCDECGRCFSQSSHLIQHQRTHTGEKPYQCSECGKCFSQSSHLRQHMKVHKEEKPRKTRGKNIRVKTHLPSWKAGTGRKSVAGLR

SEQ ID NO: 899190 - protein, 224 aa, Homo sapiens; identical to SEQ ID NO: 899187

SEQ ID NO: 899191 - protein, 229 aa, Homo sapiens
MARLALSPVPSHWMVALLLLLSAEPVPAARSEDRYRNPKGSACSRIWQSPRFIARKRGFTVKMHCYMNSASGNVSWLWKQEMDENPQQLKLEKGRMEESQNESLATLTIQGIRFEDNGIYFCQQKCNNTSEVYQGCGTELRVMGFSTLAQLKQRNTLKDGIIMIQTLLIILFIIVPIFLLLDKDDSKAGMEEDHTYEGLDIDQTATYEDIVTLRTGEVKWSVGEHPGQE

SEQ ID NO: 899192 - protein, 157 aa, Homo sapiens
RGQAAAGAVTRFPPRRSLGRCHGFGVGDRAVTMARLALSPVPSHWMVALLLLLSAEPVPAARSEDRYRNPKGFSTLAQLKQRNTLKDGIIMIQTLLIILFIIVPIFLLLDKDDSKAGMEEDHTYEGLDIDQTATYEDIVTLRTGEVKWSVGEHPGQE

SEQ ID NO: 899193 - protein, 256 aa, Homo sapiens
NYGLGARLGGGSLGRCHGFGVGDRAVTMARLALSPVPSHWMVALLLLLSAEPVPAARSEDRYRNPKGSACSRIWQSPRFIARKRGFTVKMHCYMNSASGNVSWLWKQEMDENPQQLKLEKGRMEESQNESLATLTIQGIRFEDNGIYFCQQKCNNTSEVYQGCGTELRVMGFSTLAQLKQRNTLKDGIIMIQTLLIILFIIVPIFLLLDKDDSKAGMEEDHTYEGLDIDQTATYEDIVTLRTGEVKWSVGEHPGQE

SEQ ID NO: 899194 - protein, 229 aa, Homo sapiens; identical to SEQ ID NO: 899191

SEQ ID NO: 899195 - protein, 229 aa, Homo sapiens; identical to SEQ ID NO: 899191

SEQ ID NO: 899196 - protein, 256 aa, Homo sapiens
MWRRHRVISCSACALMLYSGHRRTITSWRSLLVPSHWIGRTYSLLAATQLEPATNMAKIRRTGYRNRSACSRIWQSPRFIARKRGFTVKMHCYMNSASGNVSWLWKQEMDENPQQLKLEKGRMEESQNESLATLTIQGIRFEDNGIYFCQQKCNNTSEVYQGCGTELRVMGFSTLAQLKQRNTLKDGIIMIQTLLIILFIIVPIFLLLDKDDSKAGMEEDHTYEGLDIDQTATYEDIVTLRTGEVKWSVGEHPGQE

SEQ ID NO: 899197 - protein, 261 aa, Homo sapiens
RGQAAAGAVTRFPPRRSLGRCHGFGVGDRAVTMARLALSPVPSHWMVALLLLLSAEPVPAARSEDRYRNPKGSACSRIWQSPRFIARKRGFTVKMHCYMNSASGNVSWLWKQEMDENPQQLKLEKGRMEESQNESLATLTIQGIRFEDNGIYFCQQKCNNTSEVYQGCGTELRVMGFSTLAQLKQRNTLKDGIIMIQTLLIILFIIVPIFLLLDKDDSKAGMEEDHTYEGLDIDQTATYEDIVTLRTGEVKWSVGEHPGQE

SEQ ID NO: 899198 - protein, 270 aa, Homo sapiens
NYGLGARLGGGSLGRCHGFGVGDRAVTMARLALSPVPSHWMVALLLLLSAEPVPAARSEDRYRNPKGSACSRIWQSPRFIARKRGFTVKMHCYMNSASGNVSWLWKQEMDENPQQLKLEKGRMEESQNESLATLTIQGIRFEDNGIYFCQQKCNNTSEVYQGCGTELRVMGFSTLAQLKQRNTLKDGIIMIQTLLIILFIIVPIFLLLDKDDSKAGMEEDHTYEAGLLTEGPMGPCARRPGLSGWVSPAGVTGPLLGGPAGGRAGRPLRP

SEQ ID NO: 899199 - protein, 229 aa, Homo sapiens; identical to SEQ ID NO: 899191

SEQ ID NO: 899200 - protein, 229 aa, Homo sapiens; identical to SEQ ID NO: 899191

SEQ ID NO: 899201 - protein, 94 aa, Homo sapiens
LGRCHGFGVGDRAVTMARLALSPVPSHWMVALLLLLSGTEPTTRPVGFALISSCLGPAALPPACSTLLLCLSLFTACLPLMALGPGSVGVSCTW

SEQ ID NO: 899202 - protein, 156 aa, Homo sapiens
MATANSIIVLDDDDEDEAAAQPGPSHPLPNAASPGAEAPSSSEPHGARGSSSSGGKKCYKLENEKLFEEFLELCKMQTADHPEVVPFLYNRQQRAHSLFLASAEFCNILSRVLSRARSRPAKLYVYINELCTVLKAHSANNPSHTPSLGPHLPACL

SEQ ID NO: 899203 - protein, 105 aa, Homo sapiens
MATANSIIVLDDDDEDEAAAQPGPSHPLPNAASPGAEAPSSSEPHGARGSSSSGGKKCYKLENEKLFEEVSFSGEDCCTPGRGMADWFSCPFFPTNPTSPFSQPP

SEQ ID NO: 899204 - protein, 760 aa, Homo sapiens [sequence omitted]

SEQ ID NO: 899205 - protein, 740 aa, Homo sapiens
MATANSIIVLDDDDEDEAAAQPGPSHPLPNAASPGAEAPSSSEPHGARGSSSSGGKKCYKLENEKLFEEFLELCKMQTADHPEVVPFLYNRQQRAHSLFLASAEFCNILSRVLSRARSRPAKLYVYINELCTVLKAHSAKKKLNLAPAATTSNEPSGNNPPTHLSLDPTNAENTASQSPRTRGSRRQIQRLEQLLALYVAEIRRLQEKELDLSELDDPDSAYLQEARLKRKLIRLFGRLCELKDCSSLTGRVIEQRIPYRGTRYPEVNRRIERLINKPGPDTFPDYGDVLRAVEKAAARHSLGLPRQQLQLMAQDAFRDVGIRLQERRHLDLIYNFGCHLTDDYRPGVDPALSDPVLARRLRENRSLAMSRLDEVISKYAMLQDKSEEGERKKRRARLQGTSSHSADTPEASLDSGEGPSGMASQGCPSASRAETDDEDDEESDEEEEEEEEEEEEEATDSEEEEDLEQMQEGQEDDEEEDEEEEAAAGKDGDKSPMSSLQISNEKNLEPGKQISRSSGEQQNKGRIVSPSLLSEEPLAPSSIDAESNGEQPEELTLEEESPVSQLFELEIEALPLDTPSSVETDISSSRKQSEEPFTTVLENGAGMVSSTSFNGGVSPHNWGDSGPPCKKSRKEKKQTGSGPLGNSYVERQRSVHEKNGKKICTLPSPPSPLASLAPVADSSTRVDSPSHGLVTSSLCIPSPARLSQTPHSQPPRPGTCKTSVATQCDPEEIIVLSDSD

SEQ ID NO: 899206 - protein, 752 aa, Homo sapiens
MRGSENCGEGRLERRFLSIIVLDDDDEDEAAAQPGPSHPLPNAASPGAEAPSSSEPHGARGSSSSGGKKCYKLENEKLFEEFLELCKMQTADHPEVVPFLYNRQQRAHSLFLASAEFCNILSRVLSRARSRPAKLYVYINELCTVLKAHSAKKKLNLAPAATTSNEPSGNNPPTHLSLDPTNAENTASQSPRTRGSRRQIQRLEQLLALYVAEIRRLQEKELDLSELDDPDSAYLQEARLKRKLIRLFGRLCELKDCSSLTGRVIEQRIPYRGTRYPEVNRRIERLINKPGPDTFPDYGDVLRAVEKAAARHSLGLPRQQLQLMAQDAFRDVGIRLQERRHLDLIYNFGCHLTDDYRPGVDPALSDPVLARRLRENRSLAMSRLDEVISKYAMLQDKSEEGERKKRRARLQGTSSHSADTPEASLDSGEGPSGMASQGCPSASRAETDDEDDEESDEEEEEEEEEEEEEATDSEEEEDLEQMQEGQEDDEEEDEEEEAAAGKDGDKSPMSSLQISNEKNLEPGKQISRSSGEQQNKGRIVSPSLLSEEPLAPSSIDAESNGEQPEELTLEEESPVSQLFELEIEALPLDTPSSVETDISSSRKQSEEPFTTVLENGAGMVSSTSFNGGVSPHNWGDSGPPCKKSRKEKKQTGSGPLGNSYVERQRSVHEKNGKKICTLPSPPSPLASLAPVADSSTRVDSPSHGLVTSSLCIPSPARLSQTPHSQPPRPGTCKTSVATQCDPEEIIVLSDSD

SEQ ID NO: 899207 - protein, 665 aa, Homo sapiens
MQTADHPEVVPFLYNRQQRAHSLFLASAEFCNILSRVLSRARSRPAKLYVYINELCTVLKAHSAKKKLNLAPAATTSNEPSGNNPPTHLSLDPTNAENTASQSPRTRGSRRQIQRLEQLLALYVAEIRRLQEKELDLSELDDPDSAYLQEARLKRKLIRLFGRLCELKDCSSLTGRVIEQRIPYRGTRYPEVNRRIERLINKPGPDTFPDYGDVLRAVEKAAARHSLGLPRQQLQLMAQDAFRDVGIRLQERRHLDLIYNFGCHLTDDYRPGVDPALSDPVLARRLRENRSLAMSRLDEVISKYAMLQDKSEEGERKKRRARLQGTSSHSADTPEASLDSGEGPSGMASQGCPSASRAETDDEDDEESDEEEEEEEEEEEEEATDSEEEEDLEQMQEGQEDDEEEDEEEEAAAGKDGDKSPMSSLQISNEKNLEPGKQISRSSGEQQNKGRIVSPSLLSEEPLAPSSIDAESNGEQPEELTLEEESPVSQLFELEIEALPLDTPSSVETDISSSRKQSEEPFTTVLENGAGMVSSTSFNGGVSPHNWGDSGPPCKKSRKEKKQTGSGPLGNSYVERQRSVHEKNGKKICTLPSPPSPLASLAPVADSSTRVDSPSHGLVTSSLCIPSPARLSQTPHSQPPRPGTCKTSVATQCDPEEIIVLSDSD

SEQ ID NO: 899208 - protein, 744 aa, Homo sapiens
MATANSIIVLDDDDEDEAAAQPGPSHPLPNAASPGAEAPSSSEPHGARGSSSSGGKKCYKLENEKLFEEFLELCKMQTADHPEVVPFLYNRQQRAHSLFLASAEFCNILSRVLSRARSRPAKLYVYINELCTVLKAHSAKKKLNLAPAATTSNEPSGNNPPTHLSLDPTNAENTASQSPRTRGSRRQIQRLEQLLALYVAEIRRLQEKELDLSELDDPDSAYLQEARLKRKLIRLFGRLCELKDCSSLTGRVIEQRIPYRGTRYPEVNRRIERLINKPGPDTFPDYGDVLRAVEKAAARHSLGLPRQQLQLMAQDAFRDVGIRLQERRHLDLIYNFGCHLTDDYRPGVDPALSDPVLARRLRENRSLAMSRLDEVISKYAMLQDKSEEGERKKRRARLQGTSSHSADTPEASLDSGEGPSGMASQGCPSASRAETDDEDDEESDEEEEEEEEEEEEEATDSEEEEDLEQMQEGQEDDEEEDEEEEAAAGKDGDKSPMSSLQISNEKNLEPGKQISRSSGEQQNKGRIVSPSLLSEEPLAPSSIDAESNGEQPEELTLEEESPVSQLFELEIEALPLDTPSSVETDISSSRKQSEEPFTTVLENGAGMVSSTSFNGGVSPHNWGDSGPPCKKSRKEKKQTGSGPLGNSYVERQRSVHEKNGKKICTLPSPPSPLASLAPVADSSTRVDSPSHGLVTSSLCIPSPARLSQTPHSQPPRPGTCKVRRGGRVSSDNLFSFIGCFSCSV

SEQ ID NO: 899209 - protein, 372 aa, Homo sapiens
MSRLDEVISKYAMLQDKSEEGERKKRRARLQGTSSHSADTPEASLDSGEGPSGMASQGCPSASRAETDDEDDEESDEEEEEEEEEEEEEATDSEEEEDLEQMQEGQEDDEEEDEEEEAAAGKDGDKSPMSSLQISNEKNLEPGKQISRSSGEQQNKGRIVSPSLLSEEPLAPSSIDAESNGEQPEELTLEEESPVSQLFELEIEALPLDTPSSVETDISSSRKQSEEPFTTVLENGAGMVSSTSFNGGVSPHNWGDSGPPCKKSRKEKKQTGSGPLGNSYVERQRSVHEKNGKKICTLPSPPSPLASLAPVADSSTRVDSPSHGLVTSSLCIPSPARLSQTPHSQPPRPGTCKTSVATQCDPEEIIVLSDSD

SEQ ID NO: 899210 - protein, 363 aa, Homo sapiens
CCFFLFVLLFIILLTLLHLFQILSSSHSADTPEASLDSGEGPSGMASQGCPSASRAETDDEDDEESDEEEEEEEEEEEEEATDSEEEEDLEQMQEGQEDDEEEDEEEEAAAGKDGDKSPMSSLQISNEKNLEPGKQISRSSGEQQNKGRIVSPSLLSEEPLAPSSIDAESNGEQPEELTLEEESPVSQLFELEIEALPLDTPSSVETDISSSRKQSEEPFTTVLENGAGMVSSTSFNGGVSPHNWGDSGPPCKKSRKEKKQTGSGPLGNSYVERQRSVHEKNGKKICTLPSPPSPLASLAPVADSSTRVDSPSHGLVTSSLCIPSPARLSQTPHSQPPRPGTCKTSVATQCDPEEIIVLSDSD

SEQ ID NO: 899211 - protein, 711 aa, Homo sapiens
MATANSIIVLDDDDEDEAAAQPGPSHPLPNAASPGAEAPSSSEPHGARGSSSSGGKKCYKLENEKLFEEFLELCKMQTADHPEVVPFLYNRQQRAHSLFLASAEFCNILSRVLSRARSRPAKLYVYINELCTVLKAHSAKKKLNLAPAATTSNEPSGNNPPTHLSLDPTNAENTASQSPRTRGSRRQIQRLEQLLALYVAEIRRLQEKELDLSELDDPDSAYLQEARLKRKLIRLFGRLCELKDCSSLTGRVIEQRIPYRGTRYPEVNRRIERLINKPGPDTFPDYGDVLRAVEKAAARHSLGLPRQQLQLMAQDAFRDVGIRLQERRHLDLIYNFGCHLTDDYRPGVDPALSDPVLARRLRENRSLAMSRLDEVISKYAMLQDKSEEGERKKRRARLQGTSSHSADTPEASLDSGEGPSGMASQGCPSASRAETDDEDDEESDEEEEEEEEEEEEEATDSEEEEDLEQMQEGQEDDEEEDEEEEAAAGKDGDKSPMSSLQISNEKNLEPGKQISRSSGEQQNKGRIVSPSLLSEEPLAPSSIDAESNGEQPEELTLEEESPVSQLFELEIEALPLDTPSSVETDISSSRKQSEEPFTTVLENGAGMVSSTSFNGGVSPHNWGDSGPPCKKSRKEKKQTGSGPLGNSYVERQRSVHEKNGKKICTLPSPPSPLASLAAVPNPPFTASSAWYLQDKCGHTMRSRRDHRALRL

SEQ ID NO: 899212 - protein, 672 aa, Homo sapiens
MATANSIIVLDDDDEDEAAAQPGPSHPLPNAASPGAEAPSSSEPHGARGSSSSGGKKCYKLENEKLFEEFLELCKMQTADHPEVVPFLYNRQQRAHSLFLASAEFCNILSRVLSRARSRPAKLYVYINELCTVLKAHSAKKKLNLAPAATTSNEPSGNNPPTHLSLDPTNAENTASQSPRTRGSRRQIQRLEQLLALYVAEIRRLQEKELDLSELDDPDSAYLQEARLKRKLIRLFGRLCELKDCSSLTGRVIEQRIPYRGTRYPEVNRRIERLINKPGPDTFPDYGDVLRAVEKAAARHSLGLPRQQLQLMAQDAFRDVGIRLQERRHLDLIYNFGCHLTDDYRPGVDPALSDPVLARRLRENRSLAMSRLDEVISKYAMLQDKSEEGERKKRRARLQGTSSHSADTPEASLDSGEGPSGMASQGCPSASRAETDDEDDEESDEEEEEEEEEEEEEATDSEEEEDLEQMQEGQEDDEEEDEEEEAAAGKDGDKSPMSSLQISNEKNLEPGKQISRSSGEQQNKGRIVSPSLLSEEPLAPSSIDAESNGEQPEELTLEEESPVSQLFELEIEALPLDTPSSVETDISSSRKQSEEPFTTVLENGAGMVSSTSGCPKPPIHSLLGLVLARQVWPHNAIQKRSSCSQTLISCLPFSLPPECSGITFGGRWEADD

SEQ ID NO: 899213 - protein, 294 aa, Homo sapiens
GSRHPWDAIPLGPSPESKEASGVSSASRAETDDEDEEEEAAAGKDGDKSPMSSLQISNEKNLEPGKQISRSSGEQQNKGRIVSPSLLSEEPLAPSSIDAESNGEQPEELTLEEESPVSQLFELEIEALPLDTPSSVETDISSSRKQSEEPFTTVLENGAGMVSSTSFNGGVSPHNWGDSGPPCKKSRKEKKQTGSGPLGNSYVERQRSVHEKNGKKICTLPSPPSPLASLAPVADSSTRVDSPSHGLVTSSLCIPSPARLSQTPHSQPPRPGTCKTSVATQCDPEEIIVLSDSD

SEQ ID NO: 899214 - protein, 489 aa, Homo sapiens
MATANSIIVLDDDDEDEAAAQPGPSHPLPNAASPGAEAPSSSEPHGARGSSSSGGKKCYKLENEKLFEEFLELCKMQTADHPEVVPFLYNRQQRAHSLFLASAEFCNILSRVLSRARSRPAKLYVYINELCTVLKAHSAKKKLNLAPAATTSNEPSGNNPPTHLSLDPTNAENTASQSPRTRGSRRQIQRLEQLLALYVAEIRRLQEKELDLSELDDPDSAYLQEARLKRKLIRLFGRLCELKDCSSLTGRVIEQRIPYRGTRYPEVNRRIERLINKPGPDTFPDYGDVLRAVEKAAARHSLGLPRQQLQLMAQDAFRDVGIRLQERRHLDLIYNFGCHLTDDYRPGVDPALSDPVLARRLRENRSLAMSRLDEVISKYAMLQDKSEEGERKKRRARLQGTSSHSADTPEASLDSGEGPSGMASQGCPSASRAETDDEDDEESDEEEEEEEEEEEEEATDSEEEEDLEQMQEGQEDDEEEDEEEEAAAG

SEQ ID NO: 899215 - protein, 435 aa, Homo sapiens
MATANSIIVLDDDDEDEAAAQPGPSHPLPNAASPGAEAPSSSEPHGARGSSSSGGKKCYKLENEKLFEEFLELCKMQTADHPEVVPFLYNRQQRAHSLFLASAEFCNILSRVLSRARSRPAKLYVYINELCTVLKAHSAKKKLNLAPAATTSNEPSGNNPPTHLSLDPTNAENTASQSPRTRGSRRQIQRLEQLLALYVAEIRRLQEKELDLSELDDPDSAYLQEARLKRKLIRLFGRLCELKDCSSLTGRVIEQRIPYRGTRYPEVNRRIERLINKPGPDTFPDYGDVLRAVEKAAARHSLGLPRQQLQLMAQDAFRDVGIRLQERRHLDLIYNFGCHLTDDYRPGVDPALSDPVLARRLRENRSLAMSRLDEVISKYAMLQDKSEEGERKKRRARLQGTSSHSADTPEASLDSGEGPSGMASQGCPSASRAER

SEQ ID NO: 899216 - protein, 70 aa, Homo sapiens
AAAYYYYSTARIQASNDVRGHGLVTSSLCIPSPARLSQTPHSQPPRPGTCKTSVATQCDPEEIIVLSDSD

SEQ ID NO: 899217 - protein, 740 aa, Homo sapiens; identical to SEQ ID NO: 899205

SEQ ID NO: 899218 - protein, 740 aa, Homo sapiens; identical to SEQ ID NO: 899205

SEQ ID NO: 899219 - protein, 740 aa, Homo sapiens; identical to SEQ ID NO: 899205

SEQ ID NO: 899220 - protein, 665 aa, Homo sapiens
MATANSIIVLDDDDEDEQRAHSLFLASAEFCNILSRVLSRARSRPAKLYVYINELCTVLKAHSAKKKLNLAPAATTSNEPSGNNPPTHLSLDPTNAENTASQSPRTRGSRRQIQRLEQLLALYVAEIRRLQEKELDLSELDDPDSAYLQEARLKRKLIRLFGRLCELKDCSSLTGRVIEQRIPYRGTRYPEVNRRIERLINKPGPDTFPDYGDVLRAVEKAAARHSLGLPRQQLQLMAQDAFRDVGIRLQERRHLDLIYNFGCHLTDDYRPGVDPALSDPVLARRLRENRSLAMSRLDEVISKYAMLQDKSEEGERKKRRARLQGTSSHSADTPEASLDSGEGPSGMASQGCPSASRAETDDEDDEESDEEEEEEEEEEEEEATDSEEEEDLEQMQEGQEDDEEEDEEEEAAAGKDGDKSPMSSLQISNEKNLEPGKQISRSSGEQQNKGRIVSPSLLSEEPLAPSSIDAESNGEQPEELTLEEESPVSQLFELEIEALPLDTPSSVETDISSSRKQSEEPFTTVLENGAGMVSSTSFNGGVSPHNWGDSGPPCKKSRKEKKQTGSGPLGNSYVERQRSVHEKNGKKICTLPSPPSPLASLAPVADSSTRVDSPSHGLVTSSLCIPSPARLSQTPHSQPPRPGTCKTSVATQCDPEEIIVLSDSD

SEQ ID NO: 899221 - protein, 776 aa, Homo sapiens
MATANSIIVLDDDDEDEAAAQPGPSHPLPNAASPGAEAPSSSEPHGARGSSSSGGKKCYKLENEKLFEEFLELCKMQTADHPEVVPFLYNRQQRAHSLFLASAEFCNILSRVLSRARSRPAKLYVYINELCTVLKAHSAKKKLNLAPAATTSNEPSGNNPPTHLSLDPTNAENTASQSPRTRGSRRQIQRLEQLLALYVAEIRRLQEKELDLSELDDPDSAYLQEARLKRKLIRLFGRLCELKDCSSLTGRVIEQRIPYRGTRYPEVNRRIERLINKPGPDTFPDYGDVLRAVEKAAARHSLGLPRQQLQLMAQDAFRDVGIRLQERRHLDLIYNFGCHLTDDYRPGVDPALSDPVLARRLRENRSLAMSRLDEVISKYAMLQDKSEEGERKKRRARLQGTSSHSADTPEASLDSGEGPSGMASQGCPSASRAETDDEDDEESDEEEEEEEEEEEEEATDSEEEEDLEQMQEGQEDDEEEDEEEEAAAGKDGDKSPMSSLQISNEKNLEPGKQISRSSGEQQNKGRIVSPSLLSEEPLAPSSIDAESNGEQPEELTLEEESPVSQLFELEIEALPLDTPSSVETDISSSRKQSEEPFTTVLENGAGMVSSTSFNGGVSPHNWGDSGPPCKKSRKEKKQTGSGPLGNSYVERQRSVHEKNGKKICTLPSPPSPLASLAPVADSSTRVDSPSHGLVTSSLCIPSPARLSQTPHSQPPRPGTCKISLTLCLSLPCRQVWPHNAIQKRSSCSQTLISCLPFSLPPECSGITFGGRWEADD

SEQ ID NO: 899222 - protein, 372 aa, Homo sapiens; identical to SEQ ID NO: 899209

SEQ ID NO: 899223 - protein, 659 aa, Homo sapiens
MATANSIIVLDDDDEDEAAAQPGPSHPLPNAASPGAEAPSSSEPHGARGSSSSGGKKCYKLENEKLFEEFLELCKMQTADHPEVVPFLYNRQQRAHSLFLASAEFCNILSRVLSRARSRPAKLYVYINELCTVLKAHSAKKKLNLAPAATTSNEPSGNNPPTHLSLDPTNAENTASQSPRTRGSRRQIQRLEQLLALYVAEIRRLQEKELDLSELDDPDSAYLQEARLKRKLIRLFGRLCELKDCSSLTGRVIEQRIPYRGTRYPEVNRRIERLINKPGPDTFPDYGDVLRAVEKAAARHSLGLPRQQLQLMAQDAFRDVGIRLQERRHLDLIYNFGCHLTDDYRPGVDPALSDPVLARRLRENRSLAMSRLDEVISKYAMLQDKSEEGERKKRRARLQGTSSHSADTPEASLDSGEGPSGMASQGCPSASRAETDDEDDEESDEEEEEEEEEEEEEATDSEEEEDLEQMQEGQEDDEEEDEEEEAAAGKDGDKSPMSSLQISNEKNLEPGKQISRSSGEQQNKGRIVSPSLLSEEPLAPSSIDAESNGEQPEELTLEEESPVSQLFELEIEALPLDTPSSVETDISSSRKQSEEPFTTVLENGAGMVSSTSFNGGVSPHNWGDSGPPCKKSRKEKKQTGSGPLGNSYVERQRSVHEKR

SEQ ID NO: 899224 - protein, 602 aa, Homo sapiens
MATANSIIVLDDDDEDEAAAQPGPSHPLPNAASPGAEAPSSSEPHGARGSSSSGGKKCYKLENEKLFEEFLELCKMQTADHPEVVPFLYNRQQRAHSLFLASAEFCNILSRVLSRARSRPAKLYVYINELCTVLKAHSAKKKLNLAPAATTSNEPSGNNPPTHLSLDPTNAENTASQSPRTRGSRRQIQRLEQLLALYVAEIRRLQEKELDLSELDDPDSAYLQEARLKRKLIRLFGRLCELKDCSSLTGRVIEQRIPYRGTRYPEVNRRIERLINKPGPDTFPDYGDVLRAVEKAAARHSLGLPRQQLQLMAQDAFRDVGIRLQERRHLDLIYNFGCHLTDDYRPGVDPALSDPVLARRLRENRSLAMSRLDEVISKYAMLQDKSEEGERKKRRARLQGTSSHSADTPEASLDSGEGPSGMASQGCPSASRAETDDEDDEESDEEEEEEEEEEEEEATDSEEEEDLEQMQEGQEDDEEEDEEEEAAAGKDGDKSPMSSLQISNEKNLEPGKQISRSSGEQQNKGRIVSPSLLSEEPLAPSSIDAESNGEQPEELTLEEESPVSQLFELEIEALPLDTPSSVETSVATQCDPEEIIVLSDSD

SEQ ID NO: 899225 - protein, 598 aa, Homo sapiens
MATANSIIVLDDDDEDEAAAQPGPSHPLPNAASPGAEAPSSSEPHGARGSSSSGGKKCYKLENEKLFEEFLELCKMQTADHPEVVPFLYNRQQRAHSLFLASAEFCNILSRVLSRARSRPAKLYVYINELCTVLKAHSAKKKLNLAPAATTSNEPSGNNPPTHLSLDPTNAENTASQSPRTRGSRRQIQRLEQLLALYVAEIRRLQEKELDLSELDDPDSAYLQEARLKRKLIRLFGRLCELKDCSSLTGRVIEQRIPYRGTRYPEVNRRIERLINKPGPDTFPDYGDVLRAVEKAAARHSLGLPRQQLQLMAQDAFRDVGIRLQERRHLDLIYNFGCHLTDDYRPGVDPALSDPVLARRLRENRSLAMSRLDEVISKYAMLQDKSEEGERKKRRARLQGTSSHSADTPEASLDSGEGPSGMASQGCPSASRAETDDEDDEESDEEEEEEEEEEEEEATDSEEEEDLEQMQEGQEDDEEEDEEEEAAAGKDGDKSPMSSLQISNEKNLEPGKQISRSSGEQQNKGRIVSPSLLSEEPLAPSSIDAESNGEQPMWKGKGQCMRRMGKRYVPCPAHLPPWLPWPQLLIPPRGWTLPAMAW

SEQ ID NO: 899226 - protein, 401 aa, Homo sapiens
MATANSIIVLDDDDEDEAAAQPGPSHPLPNAASPGAEAPSSSEPHGARGSSSSGGKKCYKLENEKLFEEFLELCKMQTADHPEVVPFLYNRQQRAHSLFLASAEFCNILSRVLSRARSRPAKLYVYINELCTVLKAHSAKKKLNLAPAATTSNEPSGNNPPTHLSLDPTNAENTASQSPRTRGSRRQIQRLEQLLALYVAEIRRLQEKELDLSELDDPDSAYLQEARLKRKLIRLFGRLCELKDCSSLTGRVIEQRIPYRGTRYPEVNRRIERLINKPGPDTFPDYGDVLRAVEKAAARHSLGLPRQQLQLMAQDAFRDVGIRLQERRHLDLIYNFGCHLTDDYRPGVDPALSDPVLARRLRENRSLAMSRLDEVISKYAMLQDKCGHTMRSRRDHRALRL

SEQ ID NO: 899227 - protein, 63 aa, Homo sapiens
MASQGCPSASRAETDDEDDEESDEEEEEEEEEEEEEATDSEEEEDLEQMQEGQEDDEEEDEEE

SEQ ID NO: 899228 - protein, 536 aa, Homo sapiens
MNASLESLYSACSMQSDTVPLLQNGQHARSQPRASGPPRSIQPQVSPRQRVQRSQPVHILAVRRLQEEDQQFRTSSLPAIPNPFPELCGPGSPPVLTPGSLPPSQAAAKQDVKVFSEDGTSKVVEILADMTARDLCQLLVYKSHCVDDNSWTLVEHHPHLGLERCLEDHELVVQVESTMASESKFLFRKNYAKYEFFKNPMNFFPEQMVTWCQQSNGSQTQLLQNFLNSSSCPEIQGFLHVKELGKKSWKKLYVCLRRSGLYCSTKGTSKEPRHLQLLADLEDSNIFSLIAGRKQYNAPTDHGLCIKPNKVRNETKELRLLCAEDEQTRTCWMTAFRLLKYGMLLYQNYRIPQQRKALLSPFSTPVRSVSENSLVAMDFSGQTGRVIENPAEAQSAALEEGHAWRKRSTRMNILGSQSPLHPSTLSTVIHRTQHWFHGRISREESHRIIKQQGLVDGLFLLRDSQSNPKAFVLTLCHHQKIKNFQILPCEDDGQTFFSLDDGNTKFSDLIQLVDFYQLNKGVLPCKLKHHCIRVAL

SEQ ID NO: 899229 - protein, 594 aa, Homo sapiens
MALAGCPDSFLHHPYYQDKVEQTPRSQQDPAGPGLPAQSDRLANHQEDDVDLEALVNDMNASLESLYSACSMQSDTVPLLQNGQHARSQPRASGPPRSIQPQVSPRQRVQRSQPVHILAVRRLQEEDQQFRTSSLPAIPNPFPELCGPGSPPVLTPGSLPPSQAAAKQDVKVFSEDGTSKVVEILADMTARDLCQLLVYKSHCVDDNSWTLVEHHPHLGLERCLEDHELVVQVESTMASESKFLFRKNYAKYEFFKNPMNFFPEQMVTWCQQSNGSQTQLLQNFLNSSSCPEIQGFLHVKELGKKSWKKLYVCLRRSGLYCSTKGTSKEPRHLQLLADLEDSNIFSLIAGRKQYNAPTDHGLCIKPNKVRNETKELRLLCAEDEQTRTCWMTAFRLLKYGMLLYQNYRIPQQRKALLSPFSTPVRSVSENSLVAMDFSGQTGRVIENPAEAQSAALEEGHAWRKRSTRMNILGSQSPLHPSTLSTVIHRTQHWFHGRISREESHRIIKQQGLVDGLFLLRDSQSNPKAFVLTLCHHQKIKNFQILPCEDDGQTFFSLDDGNTKFSDLIQLVDFYQLNKGVLPCKLKHHCIRVAL

SEQ ID NO: 899230 - protein, 536 aa, Homo sapiens; identical to SEQ ID NO: 899228

SEQ ID NO: 899231 - protein, 548 aa, Homo sapiens
MALAGCPDSFLHHPYYQDKVEQTPRSQQDPAGPGLPAQSDRLANHQEDDVDLEALVNDMNASLESLYSACSMQSDTVPLLQNGQHARSQPRASGPPRSIQPQVSPRQRVQRSQPVHILAVRRLQEEDQQFRTSSLPAIPNPFPELCGPGSPPVLTPGSLPPSQAAAKQDVKVFSEDGTSKVVEILADMTARDLCQLLVYKSHCVDDNSWTLVEHHPHLGLERCLEDHELVVQVESTMASESKFLFRKNYAKYEFFKNPMNFFPEQMVTWCQQSNGSQTQLLQEPRHLQLLADLEDSNIFSLIAGRKQYNAPTDHGLCIKPNKVRNETKELRLLCAEDEQTRTCWMTAFRLLKYGMLLYQNYRIPQQRKALLSPFSTPVRSVSENSLVAMDFSGQTGRVIENPAEAQSAALEEGHAWRKRSTRMNILGSQSPLHPSTLSTVIHRTQHWFHGRISREESHRIIKQQGLVDGLFLLRDSQSNPKAFVLTLCHHQKIKNFQILPCEDDGQTFFSLDDGNTKFSDLIQLVDFYQLNKGVLPCKLKHHCIRVAL

SEQ ID NO: 899232 - protein, 194 aa, Homo sapiens [sequence omitted]

SEQ ID NO: 899233 - protein, 594 aa, Homo sapiens; identical to SEQ ID NO: 899229

SEQ ID NO: 899234 - protein, 355 aa, Homo sapiens
MNASLESLYSACSMQSDTVPLLQNGQHARSQPRASGPPRSIQPQVSPRQRVQRSQPVHILAVRRLQEEDQQFRTSSLPAIPNPFPELCGPGSPPVLTPGSLPPSQAAAKQDVKVFSEDGTSKVVEILADMTARDLCQLLVYKSHCVDDNSWTLVEHHPHLGLERCLEDHELVVQVESTMASESKFLFRKNYAKYEFFKNPMNFFPEQMVTWCQQSNGSQTQLLQNFLNSSSCPEIQGFLHVKELGKKSWKKLYVCLRRSGLYCSTKGTSKEPRHLQLLADLEDSNIFSLIAGRKQYNAPTDHGLCIKPNKVRNETKELRLLCAEDEQTRTCWMTAFRLLKYGMLLYHTRTTGYRA

SEQ ID NO: 899235 - protein, 179 aa, Homo sapiens
MNASLESLYSACSMQSDTVPLLQNGQHARSQPRASGPPRSIQPQVSPRQRVQRSQPVHILAVRRLQEEDQQFRTSSLPAIPNPFPELCGPGSPPVLTPGSLPPSQAAAKQDVKVFSEDGTSKVVEILADMTARDLCQLLVYKSHCVDDNSWTLVEHHPHLGLGREPSEQDWHLGMLMCN

SEQ ID NO: 899236 - protein, 588 aa, Homo sapiens
MQAAGPLFRSKDKVEQTPRSQQDPAGPGLPAQSDRLANHQEDDVDLEALVNDMNASLESLYSACSMQSDTVPLLQNGQHARSQPRASGPPRSIQPQVSPRQRVQRSQPVHILAVRRLQEEDQQFRTSSLPAIPNPFPELCGPGSPPVLTPGSLPPSQAAAKQDVKVFSEDGTSKVVEILADMTARDLCQLLVYKSHCVDDNSWTLVEHHPHLGLERCLEDHELVVQVESTMASESKFLFRKNYAKYEFFKNPMNFFPEQMVTWCQQSNGSQTQLLQNFLNSSSCPEIQGFLHVKELGKKSWKKLYVCLRRSGLYCSTKGTSKEPRHLQLLADLEDSNIFSLIAGRKQYNAPTDHGLCIKPNKVRNETKELRLLCAEDEQTRTCWMTAFRLLKYGMLLYQNYRIPQQRKALLSPFSTPVRSVSENSLVAMDFSGQTGRVIENPAEAQSAALEEGHAWRKRSTRMNILGSQSPLHPSTLSTVIHRTQHWFHGRISREESHRIIKQQGLVDGLFLLRDSQSNPKAFVLTLCHHQKIKNFQILPCEDDGQTFFSLDDGNTKFSDLIQLVDFYQLNKGVLPCKLKHHCIRVAL

SEQ ID NO: 899237 - protein, 594 aa, Homo sapiens; identical to SEQ ID NO: 899229

SEQ ID NO: 899238 - protein, 594 aa, Homo sapiens; identical to SEQ ID NO: 899229

SEQ ID NO: 899239 - protein, 536 aa, Homo sapiens; identical to SEQ ID NO: 899228

SEQ ID NO: 899240 - protein, 594 aa, Homo sapiens; identical to SEQ ID NO: 899229

SEQ ID NO: 899241 - protein, 234 aa, Homo sapiens
MNASLESLYSACSMQSDTVPLLQNGQHARSQPRASGPPRSIQPQVSPRQRVQRSQPVHILAVRRLQEEDQQFRTSSLPAIPNPFPELCGPGSPPVLTPGSLPPSQAAAKQDVKVFSEDGTSKVVEILADMTARDLCQLLVYKSHCVDDNSWTLVEHHPHLGLERCLEDHELVVQVESTMASESKFLFRKNYAKYEFFKNPMNFFPEQMVTWCQQSNGSQTQLLQVLGHNRSLLK

SEQ ID NO: 899242 - protein, 1327 aa, Homo sapiens
MTLDRPGEGATMLKTFTVLLFCILMDPQPELWIESNYPQAPWENITLWCRSPSRISSKFLLLKDKTQMTWIRPSHKTFQVSFLIGALTESNAGLYRCCYWKETGWSKPSKVLELEAPGQLPKPIFWIQAETPALPGCNVNILCHGWLQDLVFMLFKEGYAEPVDYQVPTGTMAIFSIDNLTPEDEGVYICRTHIQMLPTLWSEPSNPLKLVVAGLYPKPTLTAHPGPIMAPGESLNLRCQGPIYGMTFALMRVEDLEKSFYHKKTIKNEANFFFQSLKIQDTGHYLCFYYDASYRGSLLSDVLKIWVTDTFPKTWLLARPSAVVQMGQNVSLRCRGPVDGVGLALYKKGEDKPLQFLDATSIDDNTSFFLNNVTYSDTGIYSCHYLLTWKTSIRMPSHNTVELMVVDKPPKPSLSAWPSTVFKLGKAITLQCRVSHPVLEFSLEWEERETFQKFSVNGDFIISNVDGKGTGTYSCSYRVETHPNIWSHRSEPLKLMGPAGYLTWNYVLNEAIRLSLIMQLVALLLVVLWIRWKCRRLRIREAWLLGTAQGVTMLFIVTALLCCGLCNGVLIEETEIVMPTPKPELWAETNFPLAPWKNLTLWCRSPSGSTKEFVLLKDGTGWIATRPASEQVRAAFPLGALTQSHTGSYHCHSWEEMAVSEPSEALELVGTDILPKPVISASPTIRGQELQLRCKGWLAGMGFALYKEGEQEPVQQLGAVGREAFFTIQRMEDKDEGNYSCRTHTEKRPFKWSEPSEPLELVIKEMYPKPFFKTWASPVVTPGARVTFNCSTPHQHMSFILYKDGSEIASSDRSWASPGASAAHFLIISVGIGDGGNYSCRYYDFSIWSEPSDPVELVVTEFYPKPTLLAQPGPVVFPGKSVILRCQGTFQGMRFALLQEGAHVPLQFRSVSGNSADFLLHTVGAEDSGNYSCIYYETTMSNRGSYLSMPLMIWVTDTFPKPWLFAEPSSVVPMGQNVTLWCRGPVHGVGYILHKEGEATSMQLWGSTSNDGAFPITNISGTSMGRYSCCYHPDWTSSIKIQPSNTLELLVTGLLPKPSLLAQPGPMVAPGENMTLQCQGELPDSTFVLLKEGAQEPLEQQRPSGYRADFWMPAVRGEDSGIYSCVYYLDSTPFAASNHSDSLEIWVTDKPPKPSLSAWPSTMFKLGKDITLQCRGPLPGVEFVLEHDGEEAPQQFSEDGDFVINNVEGKGIGNYSCSYRLQAYPDIWSEPSDPLELVGAAGPVAQECTVGNIVRSSLIVVVVVALGVVLAIEWKKWPRLRTRGSETDGRDQTIALEECNQEGEPGTPANSPSSTSQRISVELPVPI

SEQ ID NO: 899243 - protein, 1371 aa, Homo sapiens
PFSFPSRIPDLPRSHHLLRRKILQDSEHTASTRGPMTLDRPGEGATMLKTFTVLLFCIRMSLGMTSIVMDPQPELWIESNYPQAPWENITLWCRSPSRISSKFLLLKDKTQMTWIRPSHKTFQVSFLIGALTESNAGLYRCCYWKETGWSKPSKVLELEAPGQLPKPIFWIQAETPALPGCNVNILCHGWLQDLVFMLFKEGYAEPVDYQVPTGTMAIFSIDNLTPEDEGVYICRTHIQMLPTLWSEPSNPLKLVVAGLYPKPTLTAHPGPIMAPGESLNLRCQGPIYGMTFALMRVEDLEKSFYHKKTIKNEANFFFQSLKIQDTGHYLCFYYDASYRGSLLSDVLKIWVTDTFPKTWLLARPSAVVQMGQNVSLRCRGPVDGVGLALYKKGEDKPLQFLDATSIDDNTSFFLNNVTYSDTGIYSCHYLLTWKTSIRMPSHNTVELMVVDKPPKPSLSAWPSTVFKLGKAITLQCRVSHPVLEFSLEWEERETFQKFSVNGDFIISNVDGKGTGTYSCSYRVETHPNIWSHRSEPLKLMGPAGYLTWNYVLNEAIRLSLIMQLVALLLVVLWIRWKCRRLRIREAWLLGTAQGVTMLFIVTALLCCGLCNGVLIEETEIVMPTPKPELWAETNFPLAPWKNLTLWCRSPSGSTKEFVLLKDGTGWIATRPASEQVRAAFPLGALTQSHTGSYHCHSWEEMAVSEPSEALELVGTDILPKPVISASPTIRGQELQLRCKGWLAGMGFALYKEGEQEPVQQLGAVGREAFFTIQRMEDKDEGNYSCRTHTEKRPFKWSEPSEPLELVIKEMYPKPFFKTWASPVVTPGARVTFNCSTPHQHMSFILYKDGSEIASSDRSWASPGASAAHFLIISVGIGDGGNYSCRYYDFSIWSEPSDPVELVVTEFYPKPTLLAQPGPVVFPGKSVILRCQGTFQGMRFALLQEGAHVPLQFRSVSGNSADFLLHTVGAEDSGNYSCIYYETTMSNRGSYLSMPLMIWVTDTFPKPWLFAEPSSVVPMGQNVTLWCRGPVHGVGYILHKEGEATSMQLWGSTSNDGAFPITNISGTSMGRYSCCYHPDWTSSIKIQPSNTLELLVTGLLPKPSLLAQPGPMVAPGENMTLQCQGELPDSTFVLLKEGAQEPLEQQRPSGYRADFWMPAVRGEDSGIYSCVYYLDSTPFAASNHSDSLEIWVTDKPPKPSLSAWPSTMFKLGKDITLQCRGPLPGVEFVLEHDGEEAPQQFSEDGDFVINNVEGKGIGNYSCSYRLQAYPDIWSEPSDPLELVGAAGPVAQECTVGNIVRSSLIVVVVVALGVVLAIEWKKWPRLRTRGSETDGRDQTIALEECNQEGEPGTPANSPSSTSQRISVELPVPI

SEQ ID NO: 899244 - protein, 607 aa, Homo sapiens
MHLLKSKEASENQYLLYLLSLFLVLNLVLCCILFFVFVFVFCLLEMYPKPFFKTWASPVVTPGARVTFNCSTPHQHMSFILYKDGSEIASSDRSWASPGASAAHFLIISVGIGDGGNYSCRYYDFSIWSEPSDPVELVVTEFYPKPTLLAQPGPVVFPGKSVILRCQGTFQGMRFALLQEGAHVPLQFRSVSGNSADFLLHTVGAEDSGNYSCIYYETTMSNRGSYLSMPLMIWVTDTFPKPWLFAEPSSVVPMGQNVTLWCRGPVHGVGYILHKEGEATSMQLWGSTSNDGAFPITNISGTSMGRYSCCYHPDWTSSIKIQPSNTLELLVTGLLPKPSLLAQPGPMVAPGENMTLQCQGELPDSTFVLLKEGAQEPLEQQRPSGYRADFWMPAVRGEDSGIYSCVYYLDSTPFAASNHSDSLEIWVTDKPPKPSLSAWPSTMFKLGKDITLQCRGPLPGVEFVLEHDGEEAPQQFSEDGDFVINNVEGKGIGNYSCSYRLQAYPDIWSEPSDPLELVGAAGPVAQECTVGNIVRSSLIVVVVVALGVVLAIEWKKWPRLRTRGSETDGRDQTIALEECNQEGEPGTPANSPSSTSQRISVELPVPI

SEQ ID NO: 899245 - protein, 231 aa, Homo sapiens
MLKTFTVLLFCIRMSLGMTSIVMDPQPELWIESNYPQAPWENITLWCRSPSRISSKFLLLKDKTQMTWIRPSHKTFQVSFLIGALTESNAGLYRCCYWKETGWSKPSKVLELEAPGQLPKPIFWIQAETPALPGCNVNILCHGWLQDLVFMLFKEGYAEPVDYQVPTGTMAIFSIDNLTPEDEGVYICRTHIQMLPTLWSEPSNPLKLVVAGGCGYGCWHLAIVVPGIMAG

SEQ ID NO: 899246 - protein, 1336 aa, Homo sapiens
MTLDRPGEGATMLKTFTVLLFCIRMSLGMTSIVMDPQPELWIESNYPQAPWENITLWCRSPSRISSKFLLLKDKTQMTWIRPSHKTFQVSFLIGALTESNAGLYRCCYWKETGWSKPSKVLELEAPGQLPKPIFWIQAETPALPGCNVNILCHGWLQDLVFMLFKEGYAEPVDYQVPTGTMAIFSIDNLTPEDEGVYICRTHIQMLPTLWSEPSNPLKLVVAGLYPKPTLTAHPGPIMAPGESLNLRCQGPIYGMTFALMRVEDLEKSFYHKKTIKNEANFFFQSLKIQDTGHYLCFYYDASYRGSLLSDVLKIWVTDTFPKTWLLARPSAVVQMGQNVSLRCRGPVDGVGLALYKKGEDKPLQFLDATSIDDNTSFFLNNVTYSDTGIYSCHYLLTWKTSIRMPSHNTVELMVVDKPPKPSLSAWPSTVFKLGKAITLQCRVSHPVLEFSLEWEERETFQKFSVNGDFIISNVDGKGTGTYSCSYRVETHPNIWSHRSEPLKLMGPAGYLTWNYVLNEAIRLSLIMQLVALLLVVLWIRWKCRRLRIREAWLLGTAQGVTMLFIVTALLCCGLCNGVLIEETEIVMPTPKPELWAETNFPLAPWKNLTLWCRSPSGSTKEFVLLKDGTGWIATRPASEQVRAAFPLGALTQSHTGSYHCHSWEEMAVSEPSEALELVGTDILPKPVISASPTIRGQELQLRCKGWLAGMGFALYKEGEQEPVQQLGAVGREAFFTIQRMEDKDEGNYSCRTHTEKRPFKWSEPSEPLELVIKEMYPKPFFKTWASPVVTPGARVTFNCSTPHQHMSFILYKDGSEIASSDRSWASPGASAAHFLIISVGIGDGGNYSCRYYDFSIWSEPSDPVELVVTEFYPKPTLLAQPGPVVFPGKSVILRCQGTFQGMRFALLQEGAHVPLQFRSVSGNSADFLLHTVGAEDSGNYSCIYYETTMSNRGSYLSMPLMIWVTDTFPKPWLFAEPSSVVPMGQNVTLWCRGPVHGVGYILHKEGEATSMQLWGSTSNDGAFPITNISGTSMGRYSCCYHPDWTSSIKIQPSNTLELLVTGLLPKPSLLAQPGPMVAPGENMTLQCQGELPDSTFVLLKEGAQEPLEQQRPSGYRADFWMPAVRGEDSGIYSCVYYLDSTPFAASNHSDSLEIWVTDKPPKPSLSAWPSTMFKLGKDITLQCRGPLPGVEFVLEHDGEEAPQQFSEDGDFVINNVEGKGIGNYSCSYRLQAYPDIWSEPSDPLELVGAAGPVAQECTVGNIVRSSLIVVVVVALGVVLAIEWKKWPRLRTRGSETDGRDQTIALEECNQEGEPGTPANSPSSTSQRISVELPVPI

SEQ ID NO: 899247 - protein, 1336 aa, Homo sapiens; identical to SEQ ID NO: 899246

SEQ ID NO: 899248 - protein, 538 aa, Homo sapiens
MLKTFTVLLFCIRMSLGMTSIVMDPQPELWIESNYPQAPWENITLWCRSPSRISSKFLLLKDKTQMTWIRPSHKTFQVSFLIGALTESNAGLYRCCYWKETGWSKPSKVLELEAPGQLPKPIFWIQAETPALPGCNVNILCHGWLQDLVFMLFKEGYAEPVDYQVPTGTMAIFSIDNLTPEDEGVYICRTHIQMLPTLWSEPSNPLKLVVAGLYPKPTLTAHPGPIMAPGESLNLRCQGPIYGMTFALMRVEDLEKSFYHKKTIKNEANFFFQSLKIQDTGHYLCFYYDASYRGSLLSDVLKIWVTDTFPKTWLLARPSAVVQMGQNVSLRCRGPVDGVGLALYKKGEDKPLQFLDATSIDDNTSFFLNNVTYSDTGIYSCHYLLTWKTSIRMPSHNTVELMVVDKPPKPSLSAWPSTVFKLGKAITLQCRVSHPVLEFSLEWEERETFQKFSVNGDFIISNVDGKGTGTYSCSYRVETHPNIWSHRSEPLKLMGPAGYLTWNYVLNEAIRLSLIMQLVALLLVVLWIRWKCRRLRIR

SEQ ID NO: 899249 - protein, 963 aa, Homo sapiens
VVPNARAVIVSKSRARLARSPPLSHHALLSPPFALGLLVPVPAARVELCASEAWVTQAQRGLRALLPIPGCPTFVRLSSALYSRAPSPSRPPRSPRRAPATQVALKSSPSERESNGRGRTKAPSDRAMGDSDDEYDRRRRDKFRRERSDYDRSRERDERRRGDDWNDREWDRGRERRSRGEYRDYDRNRRERFSPPRHELSPPQKRMRRDWDEHSSDPYHSGYEMPYAGGGGGPTYGPPQPWGHPDVHIMQHHVLPIQARLGSIAEIDLGVPPPVMKTFKEFLLSLDDSVDETEAVKRYNDYKLDFRRQQMQDFFLAHKDEEWFRSKYHPDEVGKRRQEARGALQNRLRVFLSLMETGWFDNLLLDIDKADAIVKMLDAAVIKMEGGTENDLRILEQEEEEEQAGKPGEPSKKEEGRAGAGLGDGERKTNDKDEKKEDGKQAENDSSNDDKTKKSEGDGDKEEKKEDSEKEAKKSSKKRNRKHSGDDSFDEGSVSESESESESGQAEEEKEEAEEALKEKEKPKEEEWEKPKDAAGLECKPRPLHKTCSLFMRNIAPNISRAEIISLCKRYPGFMRVALSEPQPERRFFRRGWVTFDRSVNIKEICWNLQNIRLRECELSPGVNRDLTRRVRNINGITQHKQIVRNDIKLAAKLIHTLDDRTQLWASEPGTPPLPTSLPSQNPILKNITDYLIEEVSAEEEELLGSSGGAPPEEPPKEGNPAEINVERDEKLIKVLDKLLLYLRIVHSLDYYNTCEYPNEDEMPNRCGIIHVRGPMPPNRISHGEVLEWQKTFEEKLTPLLSVRESLSEEEAQKMGRKDPEQEVEKFVTSNTQELGKDKWLCPLSGKKFKGPEFVRKHIFNKHAEKIEEVKKEVAFFNNFLTDAKRPALPEIKPAQPPGPAQILPPGLTPGLPYPHQTPQGLMPYGQPRPPILGYGGWCCPPCSPHRRPSIPPCPVWCWSREL

SEQ ID NO: 899250 - protein, 920 aa, Homo sapiens
YARYEAGLKSAEAQAQRGLRALLPIPGCPTFVRLSSALYSRAPSPSRPPRSPRRAPATQVALKSSPSERESNGRGRTKAPSDRAMGDSDDEYDRRRRDKFRRERSDYDRSRERDERRRGDDWNDREWDRGRERRSRGEYRDYDRNRRERFSPPRHELSPPQKRMRRDWDEHSSDPYHSGYEMPYAGGGGGPTYGPPQPWGHPDVHIMQHHVLPIQARLGSIAEIDLGVPPPVMKTFKEFLLSLDDSVDETEAVKRYNDYKLDFRRQQMQDFFLAHKDEEWFRSKYHPDEVGKRRQEARGALQNRLRVFLSLMETGWFDNLLLDIDKADAIVKMLDAAVIKMEGGTENDLRILEQEEEEEQAGKPGEPSKKEEGRAGAGLGDGERKTNDKDEKKEDGKQAENDSSNDDKTKKSEGDGDKEEKKEDSEKEAKKSSKKRNRKHSGDDSFDEGSVSESESESESGQAEEEKEEAEEALKEKEKPKEEEWEKPKDAAGLECKPRPLHKTCSLFMRNIAPNISRAEIISLCKRYPGFMRVALSEPQPERRFFRRGWVTFDRSVNIKEICWNLQNIRLRECELSPGVNRDLTRRVRNINGITQHKQIVRNDIKLAAKLIHTLDDRTQLWASEPGTPPLPTSLPSQNPILKNITDYLIEEVSAEEEELLGSSGGAPPEEPPKEGNPAEINVERDEKLIKVLDKLLLYLRIVHSLDYYNTCEYPNEDEMPNRCGIIHVRGPMPPNRISHGEVLEWQKTFEEKLTPLLSVRESLSEEEAQKMGRKDPEQEVEKFVTSNTQELGKDKWLCPLSGKKFKGPEFVRKHIFNKHAEKIEEVKKEVAFFNNFLTDAKRPALPEIKPAQPPGPAQILPPGLTPGLPYPHQTPQGLMPYGQPRPPILGYGGWCCPPCSPHRRPSIPPCPVWCWSREL

SEQ ID NO: 899251 - protein, 887 aa, Homo sapiens
YARYEAGLKSAEAQAQRGLRALLPIPGCPTFVRLSSALYSRAPSPSRPPRSPRRAPATQVALKSSPSERESNGRGRTKAPSDRAMGDSDDEYDRRRRDKFRRERSDYDRSRERDERRRGDDWNDREWDRGRERRSRGEYRDYDRNRRERFSPPRHELSPPQKRMRRDWDEHSSDPYHSGYEMPYAGGGGGPTYGPPQPWGHPDVHIMQHHVLPIQARLGSIAEIDLGVPPPVMKTFKEFLLSLDDSVDETEAVKRYNDYKLDFRRQQMQDFFLAHKDEEWFRSKYHPDEVGKRRQEARGALQNRLRVFLSLMETGWFDNLLLDIDKADAIVKMLDAAVIKMEGGTENDLRILEQEEEEEQAGKPGEPSKKEEGRAGAGLGDGERKTNDKDEKKEDGKQSSKKRNRKHSGDDSFDEGSVSESESESESGQAEEEKEEAEEALKEKEKPKEEEWEKPKDAAGLECKPRPLHKTCSLFMRNIAPNISRAEIISLCKRYPGFMRVALSEPQPERRFFRRGWVTFDRSVNIKEICWNLQNIRLRECELSPGVNRDLTRRVRNINGITQHKQIVRNDIKLAAKLIHTLDDRTQLWASEPGTPPLPTSLPSQNPILKNITDYLIEEVSAEEEELLGSSGGAPPEEPPKEGNPAEINVERDEKLIKVLDKLLLYLRIVHSLDYYNTCEYPNEDEMPNRCGIIHVRGPMPPNRISHGEVLEWQKTFEEKLTPLLSVRESLSEEEAQKMGRKDPEQEVEKFVTSNTQELGKDKWLCPLSGKKFKGPEFVRKHIFNKHAEKIEEVKKEVAFFNNFLTDAKRPALPEIKPAQPPGPAQILPPGLTPGLPYPHQTPQGLMPYGQPRPPILGYGGWCCPPCSPHRRPSIPPCPVWCWSREL

SEQ ID NO: 899252 - protein, 945 aa, Homo sapiens
YARYEAGLKSAEAQAQRGLRALLPIPGCPTFVRLSSALYSRAPSPSRPPRSPRRAPATQVALKSSPSERESNGRGRTKAPSDRAMGDSDDEYDRRRRDKFRRERSDYDRSRERDERRRGDDWNDRDRVSLLSPGLSALVQSKLAAAATCPEWDRGRERRSRGEYRDYDRNRRERFSPPRHELSPPQKRMRRDWDEHSSDPYHSGYEMPYAGGGGGPTYGPPQPWGHPDVHIMQHHVLPIQARLGSIAEIDLGVPPPVMKTFKEFLLSLDDSVDETEAVKRYNDYKLDFRRQQMQDFFLAHKDEEWFRSKYHPDEVGKRRQEARGALQNRLRVFLSLMETGWFDNLLLDIDKADAIVKMLDAAVIKMEGGTENDLRILEQEEEEEQAGKPGEPSKKEEGRAGAGLGDGERKTNDKDEKKEDGKQAENDSSNDDKTKKSEGDGDKEEKKEDSEKEAKKSSKKRNRKHSGDDSFDEGSVSESESESESGQAEEEKEEAEEALKEKEKPKEEEWEKPKDAAGLECKPRPLHKTCSLFMRNIAPNISRAEIISLCKRYPGFMRVALSEPQPERRFFRRGWVTFDRSVNIKEICWNLQNIRLRECELSPGVNRDLTRRVRNINGITQHKQIVRNDIKLAAKLIHTLDDRTQLWASEPGTPPLPTSLPSQNPILKNITDYLIEEVSAEEEELLGSSGGAPPEEPPKEGNPAEINVERDEKLIKVLDKLLLYLRIVHSLDYYNTCEYPNEDEMPNRCGIIHVRGPMPPNRISHGEVLEWQKTFEEKLTPLLSVRESLSEEEAQKMGRKDPEQEVEKFVTSNTQELGKDKWLCPLSGKKFKGPEFVRKHIFNKHAEKIEEVKKEVAFFNNFLTDAKRPALPEIKPAQPPGPAQILPPGLTPGLPYPHQTPQGLMPYGQPRPPILGYGGWCCPPCSPHRRPSIPPCPVWCWSREL

SEQ ID NO: 899253 - protein, 720 aa, Homo sapiens
PGGGPGPRSLSGPEQARLGSIAEIDLGVPPPVMKTFKEFLLSLDDSVDETEAVKRYNDYKLDFRRQQMQDFFLAHKDEEWFRSKYHPDEVGKRRQEARGALQNRLRVFLSLMETGWFDNLLLDIDKADAIVKMLDAAVIKMEGGTENDLRILEQEEEEEQAGKPGEPSKKEEGRAGAGLGDGERKTNDKDEKKEDGKQAENDSSNDDKTKKSEGDGDKEEKKEDSEKEAKKSSKKRNRKHSGDDSFDEGSVSESESESESGQAEEEKEEAEEALKEKEKPKEEEWEKPKDAAGLECKPRPLHKTCSLFMRNIAPNISRAEIISLCKRYPGFMRVALSEPQPERRFFRRGWVTFDRSVNIKEICWNLQNIRLRECELSPGVNRDLTRRVRNINGITQHKQIVRNDIKLAAKLIHTLDDRTQLWASEPGTPPLPTSLPSQNPILKNITDYLIEEVSAEEEELLGSSGGAPPEEPPKEGNPAEINVERDEKLIKVLDKLLLYLRIVHSLDYYNTCEYPNEDEMPNRCGIIHVRGPMPPNRISHGEVLEWQKTFEEKLTPLLSVRESLSEEEAQKMGRKDPEQEVEKFVTSNTQELGKDKWLCPLSGKKFKGPEFVRKHIFNKHAEKIEEVKKEVAFFNNFLTDAKRPALPEIKPAQPPGPAQILPPGLTPGLPYPHQTPQGLMPYGQPRPPILGYGGWCCPPCSPHRRPSIPPCPVWCWSREL

SEQ ID NO: 899254 - protein, 672 aa, Homo sapiens
FSVPPSILITAASSILTMASVLSFPPPLRSQVFRSKYHPDEVGKRRQEARGALQNRLRVFLSLMETGWFDNLLLDIDKADAIVKMLDAAVIKMEGGTENDLRILEQEEEEEQAGKPGEPSKKEEGRAGAGLGDGERKTNDKDEKKEDGKQAENDSSNDDKTKKSEGDGDKEEKKEDSEKEAKKSSKKRNRKHSGDDSFDEGSVSESESESESGQAEEEKEEAEEALKEKEKPKEEEWEKPKDAAGLECKPRPLHKTCSLFMRNIAPNISRAEIISLCKRYPGFMRVALSEPQPERRFFRRGWVTFDRSVNIKEICWNLQNIRLRECELSPGVNRDLTRRVRNINGITQHKQIVRNDIKLAAKLIHTLDDRTQLWASEPGTPPLPTSLPSQNPILKNITDYLIEEVSAEEEELLGSSGGAPPEEPPKEGNPAEINVERDEKLIKVLDKLLLYLRIVHSLDYYNTCEYPNEDEMPNRCGIIHVRGPMPPNRISHGEVLEWQKTFEEKLTPLLSVRESLSEEEAQKMGRKDPEQEVEKFVTSNTQELGKDKWLCPLSGKKFKGPEFVRKHIFNKHAEKIEEVKKEVAFFNNFLTDAKRPALPEIKPAQPPGPAQILPPGLTPGLPYPHQTPQGLMPYGQPRPPILGYGGWCCPPCSPHRRPSIPPCPVWCWSREL

SEQ ID NO: 899255 - protein, 652 aa, Homo sapiens
RVSSLTAQDEEWFRSKYHPDEVGKRRQEARGALQNRLRVFLSLMETGWFDNLLLDIDKADAIVKMLDAAVIKMEGGTENDLRILEQEEEEEQAGKPGEPSKKEEGRAGAGLGDGERKTNDKDEKKEDGKQAENDSSNDDKTKKSEGDGDKEEKKEDSEKEAKKSSKKRNRKHSGDDSFDEGSVSESESESESGQAEEEKEEAEEALKEKEKPKEEEWEKPKDAAGLECKPRPLHKTCSLFMRNIAPNISRAEIISLCKRYPGFMRVALSEPQPERRFFRRGWVTFDRSVNIKEICWNLQNIRLRECELSPGVNRDLTRRVRNINGITQHKQIVRNDIKLAAKLIHTLDDRTQLWASEPGTPPLPTSLPSQNPILKNITDYLIEEVSAEEEELLGSSGGAPPEEPPKEGNPAEINVERDEKLIKVLDKLLLYLRIVHSLDYYNTCEYPNEDEMPNRCGIIHVRGPMPPNRISHGEVLEWQKTFEEKLTPLLSVRESLSEEEAQKMGRKDPEQEVEKFVTSNTQELGKDKWLCPLSGKKFKGPEFVRKHIFNKHAEKIEEVKKEVAFFNNFLTDAKRPALPEIKPAQPPGPAQILPPGLTPGLPYPHQTPQGLMPYGQPRPPILGYGGWCCPPCSPHRRPSIPPCPVWCWSREL

SEQ ID NO: 899256 - protein, 566 aa, Homo sapiens
MPPRPLAHILGLPDLSKPGLACSGLGDGERKTNDKDEKKEDGKQAENDSSNDDKTKKSEGDGDKEEKKEDSEKEAKKSSKKRNRKHSGDDSFDEGSVSESESESESGQAEEEKEEAEEALKEKEKPKEEEWEKPKDAAGLECKPRPLHKTCSLFMRNIAPNISRAEIISLCKRYPGFMRVALSEPQPERRFFRRGWVTFDRSVNIKEICWNLQNIRLRECELSPGVNRDLTRRVRNINGITQHKQIVRNDIKLAAKLIHTLDDRTQLWASEPGTPPLPTSLPSQNPILKNITDYLIEEVSAEEEELLGSSGGAPPEEPPKEGNPAEINVERDEKLIKVLDKLLLYLRIVHSLDYYNTCEYPNEDEMPNRCGIIHVRGPMPPNRISHGEVLEWQKTFEEKLTPLLSVRESLSEEEAQKMGRKDPEQEVEKFVTSNTQELGKDKWLCPLSGKKFKGPEFVRKHIFNKHAEKIEEVKKEVAFFNNFLTDAKRPALPEIKPAQPPGPAQILPPGLTPGLPYPHQTPQGLMPYGQPRPPILGYGGWCCPPCSPHRRPSIPPCPVWCWSREL

SEQ ID NO: 899257 - protein, 920 aa, Homo sapiens; identical to SEQ ID NO: 899250

SEQ ID NO: 899258 - protein, 503 aa, Homo sapiens
IAGPTLEETRWKPKSSKKRNRKHSGDDSFDEGSVSESESESESGQAEEEKEEAEEALKEKEKPKEEEWEKPKDAAGLECKPRPLHKTCSLFMRNIAPNISRAEIISLCKRYPGFMRVALSEPQPERRFFRRGWVTFDRSVNIKEICWNLQNIRLRECELSPGVNRDLTRRVRNINGITQHKQIVRNDIKLAAKLIHTLDDRTQLWASEPGTPPLPTSLPSQNPILKNITDYLIEEVSAEEEELLGSSGGAPPEEPPKEGNPAEINVERDEKLIKVLDKLLLYLRIVHSLDYYNTCEYPNEDEMPNRCGIIHVRGPMPPNRISHGEVLEWQKTFEEKLTPLLSVRESLSEEEAQKMGRKDPEQEVEKFVTSNTQELGKDKWLCPLSGKKFKGPEFVRKHIFNKHAEKIEEVKKEVAFFNNFLTDAKRPALPEIKPAQPPGPAQILPPGLTPGLPYPHQTPQGLMPYGQPRPPILGYGGWCCPPCSPHRRPSIPPCPVWCWSREL

SEQ ID NO: 899259 - protein, 459 aa, Homo sapiens
MEETRCETFIVTERGDKGKFKLEWEKPKDAAGLECKPRPLHKTCSLFMRNIAPNISRAEIISLCKRYPGFMRVALSEPQPERRFFRRGWVTFDRSVNIKEICWNLQNIRLRECELSPGVNRDLTRRVRNINGITQHKQIVRNDIKLAAKLIHTLDDRTQLWASEPGTPPLPTSLPSQNPILKNITDYLIEEVSAEEEELLGSSGGAPPEEPPKEGNPAEINVERDEKLIKVLDKLLLYLRIVHSLDYYNTCEYPNEDEMPNRCGIIHVRGPMPPNRISHGEVLEWQKTFEEKLTPLLSVRESLSEEEAQKMGRKDPEQEVEKFVTSNTQELGKDKWLCPLSGKKFKGPEFVRKHIFNKHAEKIEEVKKEVAFFNNFLTDAKRPALPEIKPAQPPGPAQILPPGLTPGLPYPHQTPQGLMPYGQPRPPILGYGGWCCPPCSPHRRPSIPPCPVWCWSREL

SEQ ID NO: 899260 - protein, 954 aa, Homo sapiens
YARYEAGLKSAEAQAQRGLRALLPIPGCPTFVRLSSALYSRAPSPSRPPRSPRRAPATQVALKSSPSERESNGRGRTKAPSDRAMGDSDDEYDRRRRDKFRRERSDYDRSRERDERRRGDDWNDREWDRGRERRSRGEYRDYDRNRRERFSPPRHELSPPQKRMRRDWDEHSSDPYHSGYEMPYAGGGGGPTYGPPQPWGHPDVHIMQHHVLPIQARLGSIAEIDLGVPPPVMKTFKEFLLSLDDSVDETEAVKRYNDYKLDFRRQQMQDFFLAHKDEEWFRSKYHPDEVGKRRQEARGALQNRLRVFLSLMETGWFDNLLLDIDKADAIVKMLDAAVIKMEGGTENDLRILEQEEEEEQAGKPGEPSKKEEGRAGAGLGDGERKTNDKDEKKEDGKQAENDSSNDDKTKKSEGDGDKEEKKEDSEKEAKKSSKKRNRKHSGDDSFDEGSVSESESESESGQAEEEKEEAEEALKEKEKPKEEEWEKPKDAAGLECKPRPLHKTCSLFMRNIAPNISRAEIISLCKRYPGFMRVALSEPQPERRLSNSVRWREKCRGTLMANTNSLSLTMLTFSFLCRFFRRGWVTFDRSVNIKEICWNLQNIRLRECELSPGVNRDLTRRVRNINGITQHKQIVRNDIKLAAKLIHTLDDRTQLWASEPGTPPLPTSLPSQNPILKNITDYLIEEVSAEEEELLGSSGGAPPEEPPKEGNPAEINVERDEKLIKVLDKLLLYLRIVHSLDYYNTCEYPNEDEMPNRCGIIHVRGPMPPNRISHGEVLEWQKTFEEKLTPLLSVRESLSEEEAQKMGRKDPEQEVEKFVTSNTQELGKDKWLCPLSGKKFKGPEFVRKHIFNKHAEKIEEVKKEVAFFNNFLTDAKRPALPEIKPAQPPGPAQILPPGLTPGLPYPHQTPQGLMPYGQPRPPILGYGGWCCPPCSPHRRPSIPPCPVWCWSREL

SEQ ID NO: 899261 - protein, 920 aa, Homo sapiens; identical to SEQ ID NO: 899250

SEQ ID NO: 899262 - protein, 917 aa, Homo sapiens
YARYEAGLKSAEAQAQRGLRALLPIPGCPTFVRLSSALYSRAPSPSRPPRSPRRAPATQVALKSSPSERESNGRGRTKAPSDRAMGDSDDEYDRRRRDKFRRERSDYDRSRERDERRRGDDWNDREWDRGRERRSRGEYRDYDRNRRERFSPPRHELSPPQKRMRRDWDEHSSDPYHSGYEMPYAGGGGGPTYGPPQPWGHPDVHIMQHHVLPIQARLGSIAEIDLGVPPPVMKTFKEFLLSLDDSVDETEAVKRYNDYKLDFRRQQMQDFFLAHKDEEWFRSKYHPDEVGKRRQEARGALQNRLRVFLSLMETGWFDNLLLDIDKADAIVKMLDAAVIKMEGGTENDLRILEQEEEEEQAGKPGEPSKKEEGRAGAGLGDGERKTNDKDEKKEDGKQAENDSSNDDKTKKSEGDGDKEEKKEDSEKEAKKSSKKRNRKHSGDDSFDEGSVSESESESESGQAEEEKEEAEEALKEKEKPKEEEWEKPKDAAGLECKPRPLHKTCSLFMRNIAPNISRAEIISLCKRYPGFMRVALSEPQPERRFFRRGWVTFDRSVNIKEICWNLQNIRLRECELSPGVNRDLTRRVRNINGITQHKQIVRNDIKLAAKLIHTLDDRTQLWASEPGTPPLPTSLPSQNPILKNITDYLIEEVSAEEEELLGSSGGAPPEEPPKEGNPAEINVERDEKLIKVLDKLLLYLRIVHSLDYYNTCEYPNEDEMPNRCGIIHVRGPMPPNRISHGEVLEWQKTFEEKLTPLLSVRESLSEEEAQKMGRKDPEQEVEKFVTSNTQELGKDKWLCPLSGKKFKGPEFVRKHIFNKHAEKIEEVKKEVAFFNNFLTDAKRPALPEIKPAQPPGPAQILPPGLTPGLPYPHQTPQGLMPYGQPRPPILGYGGKYRREMKGLGECVALGEENRGWN

SEQ ID NO: 899263 - protein, 900 aa, Homo sapiens
YARYEAGLKSAEAQAQRGLRALLPIPGCPTFVRLSSALYSRAPSPSRPPRSPRRAPATQVALKSSPSERESNGRGRTKAPSDRAMGDSDDEYDRRRRDKFRRERSDYDRSRERDERRRGDDWNDREWDRGRERRSRGEYRDYDRNRRERFSPPRHELSPPQKRMRRDWDEHSSDPYHSGYEMPYAGGGGGPTYGPPQPWGHPDVHIMQHHVLPIQARLGSIAEIDLGVPPPVMKTFKEFLLSLDDSVDETEAVKRYNDYKLDFRRQQMQDFFLAHKDEEWFRSKYHPDEVGKRRQEARGALQNRLRVFLSLMETGWFDNLLLDIDKADAIVKMLDAAVIKMEGGTENDLRILEQEEEEEQAGKPGEPSKKEEGRAGAGLGDGERKTNDKDEKKEDGKQAENDSSNDDKTKKSEGDGDKEEKKEDSEKEAKKSSKKRNRKHSGDDSFDEGSVSESESESESGQAEEEKEEAEEALKEKEKPKEEEWEKPKDAAGLECKPRPLHKTCSLFMRNIAPNISRAEIISLCKRYPGFMRVALSEPQPERRFFRRGWVTFDRSVNIKEICWNLQNIRLRECELSPGVNRDLTRRVRNINGITQHKQIVRNDIKLAAKLIHTLDDRTQLWASEPGTPPLPTSLPSQNPILKNITDYLIEEVSAEEEELLGSSGGAPPEEPPKEGNPAEINVERDEKLIKVLDKLLLYLRIVHSLDYYNTCEYPNEDEMPNRCGIIHVRGPMPPNRISHGEVLEWQKTFEEKLTPLLSVRESLSEEEAQKMGRKDPEQEVEKFVTSNTQELGKDKWLCPLSGKKFKVLSLCAISSTSMQSEEVMPEIKPAQPPGPAQILLPPGLTPGLPYPHQTPQGLMPYGQPRPPILGYGGWCCPPCSPHRRPSIPPCPVWCWSREL

SEQ ID NO: 899264 - protein, 821 aa, Homo sapiens
  misc_feature (818)..(820): Xaa can be any naturally occurring amino acid
YARYEAGLKSAEAQAQRGLRALLPIPGCPTFVRLSSALYSRAPSPSRPPRSPRRAPATQVALKSSPSERESNGRGRTKAPSDRAMGDSDDEYDRRRRDKFRRERSDYDRSRERDERRRGDDWNDREWDRGRERRSRGEYRDYDRNRRERFSPPRHELSPPQKRMRRDWDEHSSDPYHSGYEMPYAGGGGGPTYGPPQPWGHPDVHIMQHHVLPIQARLGSIAEIDLGVPPPVMKTFKEFLLSLDDSVDETEAVKRYNDYKLDFRRQQMQDFFLAHKDEEWFRSKYHPDEVGKRRQEARGALQNRLRVFLSLMETGWFDNLLLDIDKADAIVKMLDAAVIKMEGGTENDLRILEQEEEEEQAGKPGEPSKKEEGRAGAGLGDGERKTNDKDEKKEDGKQAENDSSNDDKTKKSEGDGDKEEKKEDSEKEAKKSSKKRNRKHSGDDSFDEGSVSESESESESGQAEEEKEEAEEALKEKEKPKEEEWEKPKDAAGLECKPRPLHKTCSLFMRNIAPNISRAEIISLCKRYPGFMRVALSEPQPERRFFRRGWVTFDRSVNIKEICWNLQNIRLRECELSPGVNRDLTRRVRNINGITQHKQIVRNDIKLAAKLIHTLDDRTQLWASEPGTPPLPTSLPSQNPILKNITDYLIEEVSAEEEELLGSSGGAPPEEPPKEGNPAEINVERDEKLIKVLDKLLLYLRIVHSLDYYNTCEYPNEDEMPNRCGIIHVRGPMPPNRISHGEVLEWQKTFEEKLTPLLSVRESLSEEEAQKMGRKDPEQEVEKFVTSNTQELGKDKWLCPLSGKKFKPPSLAPAVVFXXXP

SEQ ID NO: 899265 - protein, 324 aa, Homo sapiens
KLSGRYEAGWFGVQLIHTLDDRTQLWASEPGTPPLPTSLPSQNPILKNITDYLIEEVSAEEEELLGSSGGAPPEEPPKEGNPAEINVERDEKLIKVLDKLLLYLRIVHSLDYYNTCEYPNEDEMPNRCGIIHVRGPMPPNRISHGEVLEWQKTFEEKLTPLLSVRESLSEEEAQKMGRKDPEQEVEKFVTSNTQELGKDKWLCPLSGKKFKGPEFVRKHIFNKHAEKIEEVKKEVAFFNNFLTDAKRPALPEIKPAQPPGPAQILPPGLTPGLPYPHQTPQGLMPYGQPRPPILGYGGWCCPPCSPHRRPSIPPCPVWCWSREL

SEQ ID NO: 899266 - protein, 452 aa, Homo sapiens
YARYEAGLKSAEAQAQRGLRALLPIPGCPTFVRLSSALYSRAPSPSRPPRSPRRAPATQVALKSSPSERESNGRGRTKAPSDRAMGDSDDEYDRRRRDKFRRERSDYDRSRERDERRRGDDWNDREWDRGRERRSRGEYRDYDRNRRERFSPPRHELSPPQKRMRRDWDEHSSDPYHSGYEMPYAGGGGGPTYGPPQPWGHPDVHIMQHHVLPIQARLGSIAEIDLGVPPPVMKTFKEFLLSLDDSVDETEAVKRYNDYKLDFRRQQMQDFFLAHKDEEWFRSKYHPDEVGKRRQEARGALQNRLRVFLSLMETGWFDNLLLDIDKADAIVKMLDAAVIKMEGGTENDLRILEQEEEEEQAGKPGEPSKKEEGRAGAGLGDGERKTNDKDEKKEDGKQAENDSSNDDKTKKSEGDGDKEEKKEDSEKEAKKDGSWRPKGHCGISGPGCPRRC

SEQ ID NO: 899267 - protein, 157 aa, Homo sapiens
MISDAIWSVVLEVSKQEVEKFVTSNTQELGKDKWLCPLSGKKFKGPEFVRKHIFNKHAEKIEEVKKEVAFFNNFLTDAKRPALPEIKPAQPPGPAQILPPGLTPGLPYPHQTPQGLMPYGQPRPPILGYGGWCCPPCSPHRRPSIPPCPVWCWSREL

SEQ ID NO: 899268 - protein, 370 aa, Homo sapiens
YARYEAGLKSAEAQAQRGLRALLPIPGCPTFVRLSSALYSRAPSPSRPPRSPRRAPATQVALKSSPSERESNGRGRTKAPSDRAMGDSDDEYDRRRRDKFRRERSDYDRSRERDERRRGDDWNDREWDRGRERRSRGEYRDYDRNRRERFSPPRHELSPPQKRMRRDWDEHSSDPYHSGYEMPYAGGGGGPTYGPPQPWGHPDVHIMQHHVLPIQARLGSIAEIDLGVPPPVMKTFKEFLLSLDDSVDETEAVKRYNDYKLDFRRQQMQDFFLAHKDEEWFRSKYHPDEVGKRRQEARGALQNRLRVFLSLMETGWFDNLLLDIDKADAIVKMLDAAVIKMEGGTENDLRILEQEEEEEQAGKPGEPSKK

SEQ ID NO: 899269 - protein, 363 aa, Homo sapiens
YARYEAGLKSAEAQAQRGLRALLPIPGCPTFVRLSSALYSRAPSPSRPPRSPRRAPATQVALKSSPSERESNGRGRTKAPSDRAMGDSDDEYDRRRRDKFRRERSDYDRSRERDERRRGDDWNDREWDRGRERRSRGEYRDYDRNRRERFSPPRHELSPPQKRMRRDWDEHSSDPYHSGYEMPYAGGGGGPTYGPPQPWGHPDVHIMQHHVLPIQARLGSIAEIDLGVPPPVMKTFKEFLLSLDDSVDETEAVKRYNDYKLDFRRQQMQDFFLAHKDEECSVKYHPDAVGHSASATAEPARTATRHKPTEGSTRYHHGELDPATDYTITSRTTSTQSPHDPTHQTMTDRTPAEPPMARPATEQ

SEQ ID NO: 899270 - protein, 287 aa, Homo sapiens
VVPNARAVIVSKSRARLARSPPLSHHALLSPPFALGLLVPVPAARVELCASEAWVTQAQRGLRALLPIPGCPTFVRLSSALYSRAPSPSRPPRSPRRAPATQVALKSSPSERESNGRGRTKVGEGRSLGGPAGAGEEPGSTGAGAEKLGASGGVGAAFSGLGWWGPRRAGLGGREAGELPARDGPFLRSSFCTISYRLSPVPRPPQTVPWVTVMTSTIEGAGAVRPAVPTGGPPYPHAPYGAGRGNYDAFRGQGGYPGKPRNRMVRGDPRAIVEYRDLDAPDDVDFF

SEQ ID NO: 899271 - protein, 302 aa, Homo sapiens
VVPNARAVIVSKSRARLARSPPLSHHALLSPPFALGLLVPVPAARVELCASEAWVTQAQRGLRALLPIPGCPTFVRLSSALYSRAPSPSRPPRSPRRAPATQVALKSSPSERESNGRGRTKVGEGRSLGGPAGAGEEPGSTGAGAEKLGASGGVGAAFSGLGWWGPRRAGLGGREAGELPARDGPFLRYVLLHHSYRLSPVPRPPQTVPWVTVMTSTIEGAGTSSEESAATTTVPAREMKDVEGTIGMTGEPFLTSSCPRFMPFHSTRVAFLSPPCNFYEGESYEMAHWTVFCGSAYLLLAK

SEQ ID NO: 899272 - protein, 79 aa, Homo sapiens
DSRCRLTSCKLCLPSCAPLLPPGLTPGLPYPHQTPQGLMPYGQPRPPILGYGGWCCPPCSPHRRPSIPPCPVWCWSREL

SEQ ID NO: 899273 - protein, 170 aa, Homo sapiens
NCLLHWQAGAGNPSSSGLGARQPLCGCPDPSPLSTQGPEFVRKHIFNKHAEKIEEVKKEVAFFNNFLTDAKRPALPLARPWVHFERHVGKQMAGEPAYPEAGRGCLARREQRAWPTGTRLPEKLEGDKRPTWPWPAEEDIAATRLIVTKHLFCAWQGSRPTEYTIQPLPR

SEQ ID NO: 899274 - protein, 1005 aa, Homo sapiens
VVPNARAVIVSKSRARLARSPPLSHHALLSPPFALGLLVPVPAARVELCASEAWVTQAQRGLRALLPIPGCPTFVRLSSALYSRAPSPSRPPRSPRRAPATQVALKSSPSERESNGRGRTKVGAGEEPGGPRWGGRGTGVHGGGRGETRGEWRCWSRVLRPRMAPSDRAMGDSDDEYDRRRRDKFRRERSDYDRSRERDERRRGDDWNDREWDRGRERRSRGEYRDYDRNRRERFSPPRHELSPPQKRMRRDWDEHSSDPYHSGYEMPYAGGGGGPTYGPPQPWGHPDVHIMQHHVLPIQARLGSIAEIDLGVPPPVMKTFKEFLLSLDDSVDETEAVKRYNDYKLDFRRQQMQDFFLAHKDEEWFRSKYHPDEVGKRRQEARGALQNRLRVFLSLMETGWFDNLLLDIDKADAIVKMLDAAVIKMEGGTENDLRILEQEEEEEQAGKPGEPSKKEEGRAGAGLGDGERKTNDKDEKKEDGKQAENDSSNDDKTKKSEGDGDKEEKKEDSEKEAKKSSKKRNRKHSGDDSFDEGSVSESESESESGQAEEEKEEAEEALKEKEKPKEEEWEKPKDAAGLECKPRPLHKTCSLFMRNIAPNISRAEIISLCKRYPGFMRVALSEPQPERRFFRRGWVTFDRSVNIKEICWNLQNIRLRECELSPGVNRDLTRRVRNINGITQHKQIVRNDIKLAAKLIHTLDDRTQLWASEPGTPPLPTSLPSQNPILKNITDYLIEEVSAEEEELLGSSGGAPPEEPPKEGNPAEINVERDEKLIKVLDKLLLYLRIVHSLDYYNTCEYPNEDEMPNRCGIIHVRGPMPPNRISHGEVLEWQKTFEEKLTPLLSVRESLSEEEAQKMGRKDPEQEVEKFVTSNTQELGKDKWLCPLSGKKFKGPEFVRKHIFNKHAEKIEEVKKEVAFFNNFLTDAKRPALPEIKPAQPPGPAQILPPGLTPGLPYPHQTPQGLMPYGQPRPPILGYGGWCCPPCSPHRRPSIPPCPVWCWSREL

SEQ ID NO: 899275 - protein, 609 aa, Homo sapiens
METGWFDNLLLDIDKADAIVKMLDAAVIKMEGGTENDLRILEQEEEEEQAGKPGEPSKKEEGRAGAGLGDGERKTNDKDEKKEDGKQAENDSSNDDKTKKSEGDGDKEEKKEDSEKEAKKSSKKRNRKHSGDDSFDEGSVSESESESESGQAEEEKEEAEEALKEKEKPKEEEWEKPKDAAGLECKPRPLHKTCSLFMRNIAPNISRAEIISLCKRYPGFMRVALSEPQPERRFFRRGWVTFDRSVNIKEICWNLQNIRLRECELSPGVNRDLTRRVRNINGITQHKQIVRNDIKLAAKLIHTLDDRTQLWASEPGTPPLPTSLPSQNPILKNITDYLIEEVSAEEEELLGSSGGAPPEEPPKEGNPAEINVERDEKLIKVLDKLLLYLRIVHSLDYYNTCEYPNEDEMPNRCGIIHVRGPMPPNRISHGEVLEWQKTFEEKLTPLLSVRESLSEEEAQKMGRKDPEQEVEKFVTSNTQELGKDKWLCPLSGKKFKGPEFVRKHIFNKHAEKIEEVKKEVAFFNNFLTDAKRPALPEIKPAQPPGPAQILPPGLTPGLPYPHQTPQGLMPYGQPRPPILGYGGWCCPPCSPHRRPSIPPCPVWCWSREL

SEQ ID NO: 899276 - protein, 609 aa, Homo sapiens; identical to SEQ ID NO: 899275

SEQ ID NO: 899277 - protein, 648 aa, Homo sapiens
EDPLNIRVFRSKYHPDEVGKRRQEARGALQNRLRVFLSLMETGWFDNLLLDIDKADAIVKMLDAAVIKMEGGTENDLRILEQEEEEEQAGKPGEPSKKEEGRAGAGLGDGERKTNDKDEKKEDGKQAENDSSNDDKTKKSEGDGDKEEKKEDSEKEAKKSSKKRNRKHSGDDSFDEGSVSESESESESGQAEEEKEEAEEALKEKEKPKEEEWEKPKDAAGLECKPRPLHKTCSLFMRNIAPNISRAEIISLCKRYPGFMRVALSEPQPERRFFRRGWVTFDRSVNIKEICWNLQNIRLRECELSPGVNRDLTRRVRNINGITQHKQIVRNDIKLAAKLIHTLDDRTQLWASEPGTPPLPTSLPSQNPILKNITDYLIEEVSAEEEELLGSSGGAPPEEPPKEGNPAEINVERDEKLIKVLDKLLLYLRIVHSLDYYNTCEYPNEDEMPNRCGIIHVRGPMPPNRISHGEVLEWQKTFEEKLTPLLSVRESLSEEEAQKMGRKDPEQEVEKFVTSNTQELGKDKWLCPLSGKKFKGPEFVRKHIFNKHAEKIEEVKKEVAFFNNFLTDAKRPALPEIKPAQPPGPAQILPPGLTPGLPYPHQTPQGLMPYGQPRPPILGYGGWCCPPCSPHRRPSIPPCPVWCWSREL

SEQ ID NO: 899278 - protein, 533 aa, Homo sapiens
METGWFDNLLLDIDKADAIVKMLDAAVIKRKEEKKEDSEKEAKKSSKKRNRKHSGDDSFDEGSVSESESESESGQAEEEKEEAEEALKEKEKPKEEEWEKPKDAAGLECKPRPLHKTCSLFMRNIAPNISRAEIISLCKRYPGFMRVALSEPQPERRFFRRGWVTFDRSVNIKEICWNLQNIRLRECELSPGVNRDLTRRVRNINGITQHKQIVRNDIKLAAKLIHTLDDRTQLWASEPGTPPLPTSLPSQNPILKNITDYLIEEVSAEEEELLGSSGGAPPEEPPKEGNPAEINVERDEKLIKVLDKLLLYLRIVHSLDYYNTCEYPNEDEMPNRCGIIHVRGPMPPNRISHGEVLEWQKTFEEKLTPLLSVRESLSEEEAQKMGRKDPEQEVEKFVTSNTQELGKDKWLCPLSGKKFKGPEFVRKHIFNKHAEKIEEVKKEVAFFNNFLTDAKRPALPEIKPAQPPGPAQILPPGLTPGLPYPHQTPQGLMPYGQPRPPILGYGGWCCPPCSPHRRPSIPPCPVWCWSREL

SEQ ID NO: 899279 - protein, 920 aa, Homo sapiens; identical to SEQ ID NO: 899250

SEQ ID NO: 899280 - protein, 920 aa, Homo sapiens; identical to SEQ ID NO: 899250

SEQ ID NO: 899281 - protein, 1022 aa, Homo sapiens
YARYEAGLKSAEAQAQRGLRALLPIPGCPTFVRLSSALYSRAPSPSRPPRSPRRAPATQVALKSSPSERESNGRGRTKAPSDRAMGDSDDEYDRRRRDKFRRERSDYDRSRERDERRRGDDWNDREWDRGRERRSRGEYRDYDRNRRERFSPPRHELSPPQKRMRRDWDEHSSDPYHSGYEMPYAGGGGGPTYGPPQPWGHPDVHIMQHHVLPIQARLGSIAEIDLGVPPPVMKTFKEFLLSLDDSVDETEAVKRYNDYKLDFRRQQMQDFFLAHKDEEWFRSKYHPDEVGKRRQEARGALQNRLRVFLSLMETGWFDNLLLDIDKADAIVKMLDAAVIKMEGGTENDLRILEQEEEEEQAGKPGEPSKKEEGRAGAGLGDGERKTNDKDEKKEDGKQAENDSSNDDKTKKSEGDGDKEEKKEDSEKEAKKSSKKRNRKHSGDDSFDEGSVSESESESESGQAEEEKEEAEEALKEKEKPKEEEWEKPKDAAGLECKPRPLHKTCSLFMRNIAPNISRAEIISLCKRYPGFMRVALSEPQPERRFFRRGWVTFDRSVNIKEICWNLQNIRVSAGGGTVGKRKGDSVPTGPLCDFVHLIVWLFCTLFDRFVWATLSLGKALGRYMGRNLCGPRPQGARSLINRWCSRGKGLRAAVSLASGVSGVKLLMMSALQLRECELSPGVNRDLTRRVRNINGITQHKQIVRNDIKLAAKLIHTLDDRTQLWASEPGTPPLPTSLPSQNPILKNITDYLIEEVSAEEEELLGSSGGAPPEEPPKEGNPAEINVERDEKLIKVLDKLLLYLRIVHSLDYYNTCEYPNEDEMPNRCGIIHVRGPMPPNRISHGEVLEWQKTFEEKLTPLLSVRESLSEEEAQKMGRKDPEQEVEKFVTSNTQELGKDKWLCPLSGKKFKGPEFVRKHIFNKHAEKIEEVKKEVAFFNNFLTDAKRPALPEIKPAQPPGPAQILPPGLTPGLPYPHQTPQGLMPYGQPRPPILGYGGWCCPPCSPHRRPSIPPCPVWCWSREL

SEQ ID NO: 899282 - protein, 917 aa, Homo sapiens; identical to SEQ ID NO: 899262

SEQ ID NO: 899283 - protein, 911 aa, Homo sapiens
YARYEAGLKSAEAQAQRGLRALLPIPGCPTFVRLSSALYSRAPSPSRPPRSPRRAPATQVALKSSPSERESNGRGRTKAPSDRAMGDSDDEYDRRRRDKFRRERSDYDRSRERDERRRGDDWNDREWDRGRERRSRGEYRDYDRNRRERFSPPRHELSPPQKRMRRDWDEHSSDPYHSGYEMPYAGGGGGPTYGPPQPWGHPDVHIMQHHVLPIQARLGSIAEIDLGVPPPVMKTFKEFLLSLDDSVDETEAVKRYNDYKLDFRRQQMQDFFLAHKDEEWFRSKYHPDEVGKRRQEARGALQNRLRVFLSLMETGWFDNLLLDIDKADAIVKMLDAAVIKMEGGTENDLRILEQEEEEEQAGKPGEPSKKEEGRAGAGLGDGERKTNDKDEKKEDGKQAENDSSNDDKTKKSEGDGDKEEKKEDSEKEAKKSSKKRNRKHSGDDSFDEGSVSESESESESGQAEEEKEEAEEALKEKEKPKEEEWEKPKDAAGLECKPRPLHKTCSLFMRNIAPNISRAEIISLCKRYPGFMRVALSEPQPERRFFRRGWVTFDRSVNIKEICWNLQNIRLRECELSPGVNRDLTRRVRNINGITQHKQIVRNDIKLAAKLIHTLDDRTQLWASEPGTPPLPTSLPSQNPILKNITDYLIEEVSAEEEELLGSSGGAPPEEPPKEGNPAEINVERDEKLIKVLDKLLLYLRIVHSLDYYNTCEYPNEDEMPNRCGIIHVRGPMPPNRISHGEVLEWQKTFEEKLTPLLSVRESLSEEEAQKMGRKDPEQEVEKFVTSNTQELGKDKWLCPLSGKKFKGPEFVRKHIFNKHAEKIEEVKKEVAFFNNFLTDAKRPALPEIKPAQPPGPAQILPPGLTPGLPYPHQTPQGLMPYGQPRPPILGYGAGAVALQSPQEGLGYMST

SEQ ID NO: 899284 - protein, 897 aa, Homo sapiens
YARYEAGLKSAEAQAQRGLRALLPIPGCPTFVRLSSALYSRAPSPSRPPRSPRRAPATQVALKSSPSERESNGRGRTKAPSDRAMGDSDDEYDRRRRDKFRRERSDYDRSRERDERRRGDDWNDREWDRGRERRSRGEYRDYDRNRRERFSPPRHELSPPQKRMRRDWDEHSSDPYHSGYEMPYAGGGGGPTYGPPQPWGHPDVHIMQHHVLPIQARLGSIAEIDLGVPPPVMKTFKEFLLSLDDSVDETEAVKRYNDYKLDFRRQQMQDFFLAHKDEEWFRSKYHPDEVGKRRQEARGALQNRLRVFLSLMETGWFDNLLLDIDKADAIVKMLDAAVIKMEGGTENDLRILEQEEEEEQAGKPGEPSKKEEGRAGAGLGDGERKTNDKDEKKEDGKQAENDSSNDDKTKKSEGDGDKEEKKEDSEKEAKKSSKKRNRKHSGDDSFDEGSVSESESESESGQAEEEKEEAEEALKEKEKPKEEEWEKPKDAAGLECKPRPLHKTCSLFMRNIAPNISRAEIISLCKRYPGFMRVALSEPQPERRFFRRGWVTFDRSVNIKEICWNLQNIRLRECELSPGVNRDLTRRVRNINGITQHKQIVRNDIKLAAKLIHTLDDRTQLWASEPGTPPLPTSLPSQNPILKNITDYLIEEVSAEEEELLGSSGGAPPEEPPKEGNPAEINVERDEKLIKVLDKLLLYLRIVHSLDYYNTCEYPNEDEMPNRCGIIHVRGPMPPNRISHGEVLEWQKTFEEKLTPLLSVRESLSEEEAQKMGRKDPEQEVEKFVTSNTQELGKDKWLCPLSGKKFKVLSLCAISSTSMQSEEVMPEIASPATWARPDTTPPRFDPRTPLPTPDSPGPDALWSAPAPDLGLWRMVRGDPRAIVEYRDLDAPDDVDFF

SEQ ID NO: 899285 - protein, 601 aa, Homo sapiens
YARYEAGLKSAEAQAQRGLRALLPIPGCPTFVRLSSALYSRAPSPSRPPRSPRRAPATQVALKSSPSERESNGRGRTKAPSDRAMGDSDDEYDRRRRDKFRRERSDYDRSRERDERRRGDDWNDREWDRGRERRSRGEYRDYDRNRRERFSPPRHELSPPQKRMRRDWDEHSSDPYHSGYEMPYAGGGGGPTYGPPQPWGHPDVHIMQHHVLPIQARLGSIAEIDLGVPPPVMKTFKEFLLSLDDSVDETEAVKRYNDYKLDFRRQQMQDFFLAHKDEEWFRSKYHPDEVGKRRQEARGALQNRLRVFLSLMETGWFDNLLLDIDKADAIVKMLDAAVIKMEGGTENDLRILEQEEEEEQAGKPGEPSKKEEGRAGAGLGDGERKTNDKDEKKEDGKQAENDSSNDDKTKKSEGDGDKEEKKEDSEKEAKKSSKKRNRKHSGDDSFDEGSVSESESESESGQAEEEKEEAEEALKEKEKPKEEEWEKPKDAAGLECKPRPLHKTCSLFMRNIAPNISRAEIISFGEFFRCGWVTFNRSVNIIEILETFRTFLSGRGRCTSGVYRYLNRCRLNINRTTPVKLFGANQLKLAANLVPLWTPPF

SEQ ID NO: 899286 - protein, 449 aa, Homo sapiens
YARYEAGLKSAEAQAQRGLRALLPIPGCPTFVRLSSALYSRAPSPSRPPRSPRRAPATQVALKSSPSERESNGRGRTKAPSDRAMGDSDDEYDRRRRDKFRRERSDYDRSRERDERRRGDDWNDREWDRGRERRSRGEYRDYDRNRRERFSPPRHELSPPQKRMRRDWDEHSSDPYHSGYEMPYAGGGGGPTYGPPQPWGHPDVHIMQHHVLPIQARLGSIAEIDLGVPPPVMKTFKEFLLSLDDSVDETEAVKRYNDYKLDFRRQQMQDFFLAHKDEEWFRSKYHPDEVGKRRQEARGALQNRLRVFLSLMETGWFDNLLLDIDKADAIVKMLDAAVIKMEGGTENDLRILEQEEEEEQAGKPGEPSKKEEGRAGAGLGDGERKTNDKDEKKEDGKQAENDSSNDDKTKKSEGDGDKEEKKEDSEKEAKKGEVSVAWGQSVGAGVLAR

SEQ ID NO: 899287 - protein, 280 aa, Homo sapiens
YARYEAGLKSAEAQAQRGLRALLPIPGCPTFVRLSSALYSRAPSPSRPPRSPRRAPATQVALKSSPSERESNGRGRTKAPSDRAMGDSDDEYDRRRRDKFRRERSDYDRSRERDERRRGDDWNDREWDRGRERRSRGEYRDYDRNRRERFSPPRHELSPPQKRMRRDWDEHSSDPYHSGYEMPYAGGGGGPTYGPPQPWGHPDVHIMQHHVLPIQARLGSIAEIDLGVPPPVMKTFKEFLLSLDDSVDETEAVKRYNDYKLDFRRQQMQDFFLAHKDEEW

SEQ ID NO: 899288 - protein, 287 aa, Homo sapiens; identical to SEQ ID NO: 899270

SEQ ID NO: 899289 - protein, 168 aa, Homo sapiens
YARYEAGLKSAEAQAQRGLRALLPIPGCPTFVRLSSALYSRAPSPSRPPRSPRRAPATQVALKSSPSERESNGRGRTKAPSDRAMGDSDDEYDRRRRDKFRRERSDYDRSRERDERRRGDDWNDREWDRGRERRSRGEYRDYDRNRRERFSPPRHELSPPQKRMRRDW

SEQ ID NO: 899290 - protein, 104 aa, Homo sapiens
MTSLNARLLSTAAAPSPPCKSPQPTEPLGPKLQAAPHFQDFGRFMGHSPLERPQLLPSYTASAMFMGRQRHGEANGLQAVFGEKEELSSKGISTTGMFIEFVNN

SEQ ID NO: 899291 - protein, 175 aa, Homo sapiens
MGSSPRYIHHLHPTLPAGTYWVDPNLGCSSDTIEVSCNFTHGGQTCLKPITASKVEFAISRVQMNFLHLLSSEVTQHITIHCLNMTVWQEGTGQTPAKQAVRFRAWNGQIFEAGGQFRPEVSMDGCKVQDGRWHQTLFTFRTQDPQQLPIISVDNLPPASSGKQYRLEVGPACFL

SEQ ID NO: 899292 - protein, 741 aa, Homo sapiens
LERMTFEARLKTAVPSALGGRDVDILQRLGLSWTKAGSPAPPGVIPFQSGFIFTQRARLQAPTGTIIPAALGTELALVLSLCSHRVNHAFLFAVRSRKRKLQLGLQFLPGKTVVHLGSRRSVAFDLDMHDGRWHHLALELRGRTVTLVTACGQRRVPVLLPFHRDPALDPGGSFLFGKMNPHAVQFEGALCQFSIYPVTQVAHNYCTHLRKQCGQADTYQSPLGPLFSQDSGRPFTFQSDLALLGLENLTTATPALGSLPAGRGPRGTVAPATPTKPQRTSPTNPHQHMAVGGPAQTPLLPAKLSASNALDPMLPASVGGSTRTPRPAAAQPSQKITATKIPKSLPTKPSAPSTSIVPIKSPHPTQKTAPSSFTKSALPTQKQVPPTSRPVPARVSRPAEKPIQRNPGMPRPPRRLVQWENRAFLGKPEMKGDLGPLGTPGEQGLIGQRGEPGLEGDSGPMGPDGLKGDRGDPGPDGEHGEKGQEGLMGEDGPPGPPGVTGVRGPEGKSGKQGEKGRTGAKGAKGYQGQLGEMGVPGDPGPPGTPGPKGSRGSLGPTGAPGRMGAQGEPGLAGYDGHKGIVGPLGPPGPKGLGCSSDTIEVSCNFTHGGQTCLKPITASKVEFAISRVQMNFLHLLSSEVTQHITIHCLNMTVWQEGTGQTPAKQAVRFRAWNGQIFEAGGQFRPEVSMDGCKVQDGRWHQTLFTFRTQDPQQLPIISVDNLPPASSGKQYRLEVGPACFL

SEQ ID NO: 899293 - protein, 1815 aa, Homo sapiens
LERMTFEARLKTAVPSALGGRDVDILQRLGLSWTKAGSPAPPGVIPFQSGFIFTQRARLQAPTGTIIPAALGTELALVLSLCSHRVNHAFLFAVRSRKRKLQLGLQFLPGKTVVHLGSRRSVAFDLDMHDGRWHHLALELRGRTVTLVTACGQRRVPVLLPFHRDPALDPGGSFLFGKMNPHAVQFEGALCQFSIYPVTQVAHNYCTHLRKQCGQADTYQSPLGPLFSQDSGRPFTFQSDLALLGLENLTTATPALGSLPAGRGPRGTVAPATPTKPQRTSPTNPHQHMAVGGPAQTPLLPAKLSASNALDPMLPASVGGSTRTPRPAAAQPSQKITATKIPKSLPTKPSAPSTSIVPIKSPHPTQKTAPSSFTKSALPTQKQVPPTSRPVPARVSRPAEKPIQRNPGMPRPPPPSTRPLPPTTSSSKKPIPTLARTEAKITSHASKPASARTSTHKPPPFTALSSSPAPTPGSTRSTRPPATMVPPTSGTSTPRTAPAVPTPGSAPTGSKKPIGSEASKKAGPKSSPRKPVPLRPGKAARDVPLSDLTTRPSPRQPQPSQQTTPALVLAPAQFLSSSPRPTSSGYSIFHLAGSTPFPLLMGPPGPKGDCGLPGPPGLPGLPGIPGARGPRGPPGPYGNPGLPGPPGAKGDMGLPGLSGNPGPPGRKGHKGYPGPAGHPGEQGQPGPEGSPGAKGYPGRQGLPGPVGDPGPKGSRGYIGLPGLFGLPGSDGERGLPGVPGKRGKMGMPGFPGVFGERGPPGLDGNPGELGLPGPPGVPGLIGDLGVLGPIGYPGPKGMKGLMGSVGEPGLKGEQGVPGVSGDPGFQGDKGSQGLPGFPGARGKPGPLGKVGDKGSIGFPGPPGPEGFPGDIGPPGDNGPEGMKGKPGARGLPGPRGQLGPEGDEGPMGPPGAPGLEGQPGRKGFPGRPGLDGVKGEPGDPGRPGPVGEQGFMGFIGLVGEPGIVGEKGDRGMMGPPGVPGPKGSMVRRSSWKPGGMGTPGEPGPQGPPGSRGPPGMRGAKGRRGPRGPDGPAGEQGSRGLKGPPGPQGRPGRPGQQGVAGERGHLGSRGFPGIPGPSGPPGTKGLPGEPGPQGPQGPIGPPGEMGPKPPGAVGEPGLPGEAGMKGDLGPLGTPGEQGLIGQRGEPGLEGDSGPMGPDGLKGDRGDPGPDGEHGEKGQEGLMGEDGPPGPPGVTGVRGPEGKSGKQGEKGRTGAKGAKGYQGQLGEMGVPGDPGPPGTPGPKGSRGSLGPTGAPGRMGAQGEPGLAGYDGHKGIVGPLGPPGPKAGEQGEDGKAEGPPGPPGDRGPVGDRGDRGEPGDPGYPGQEGVQGLRGKPGQQGQPGHPGPRGWPGPKGSKGAEGPKGKQGKAGAPGRRGVQGLQGLPGPRGVVGRQGLEGIAGPDGLPGRDGQAGQQGEQGDDGDPGPMGPAGKRGNPGVAGLPGAQGPPGFKGESGLPGQLGPPGKRGTEGRTGLPGNQGEPGSKGQPGDSGEMGFPGMAGLFGPKGPPGDIGFKGIQGPRGPPGLMGKEGIVGPLGILGPSGLPGPKGDKGSRGDWVSGWAGGPPGPRGRPGPPGPPGGPIQLQQDDLGAAFQTWMDTSGALRPESYSYPDRLVLDQGGEIFKTLHYLSNLIQSIKTPLGTKENPARVCRDLMDCEQKMVDGTYWVDPNLGCSSDTIEVSCNFTHGGQTCLKPITASKVEFAISRVQMNFLHLLSSEVTQHITIHCLNMTVWQEGTGQTPAKQAVRFRAWNGQIFEAGGQFRPEVSMDGCKVQDGRWHQTLFTFRTQDPQQLPIISVDNLPPASSGKQYRLEVGPACFL

SEQ ID NO: 899294 - protein, 1058 aa, Homo sapiens
MFVLSHALQGFPGVFGERGPPGLDGNPGELGLPGPPGVPGLIGDLGVLGPIGYPGPKGMKGLMGSVGEPGLKGEQGVPGVSGDPGFQGDKGSQGLPGFPGARGKPGPLGKVGDKGSIGFPGPPGPEGFPGDIGPPGDNGPEGMKGKPGARGLPGPRGQLGPEGDEGPMGPPGAPGLEGQPGRKGFPGRPGLDGVKGEPGDPGRPGPVGEQGFMGFIGLVGEPGIVGEKGDRGMMGPPGVPGPKGSMEGGHPGMPGGMGTPGEPGPQGPPGSRGPPGMRGAKGRRGPRGPDGPAGEQGSRGLKGPPGPQGRPGRPGQQGVAGERGHLGSRGFPGIPGPSGPPGTKGLPGEPGPQGPQGPIGPPGEMGPKPPGAVGEPGLPGEAGMKGDLGPLGTPGEQGLIGQRGEPGLEGDSGPMGPDGLKGDRGDPGPDGEHGEKGQEGLMGEDGPPGPPGVTGVRGPEGKSGKQGEKGRTGAKGAKGYQGQLGEMGVPGDPGPPGTPGPKGSRGSLGPTGAPGRMGAQGEPGLAGYDGHKGIVGPLGPPGPKGGEQGEDGKAEGPPGPPGDRGPVGDRGDRGEPGDPGYPGQEGVQGLRGKPGQQGQPGHPGPRGWPGPKGSKGAEGPKGKQGKAGAPGRRGVQGLQGLPGPRGVVGRQGLEGIAGPDGLPGRDGQAGQQGEQGDDGDPGPMGPAGKRGNPGVAGLPGAQGPPGFKGESGLPGQLGPPGKRGTEGRTGLPGNQGEPGSKGQPGDSGEMGFPGMAGLFGPKGPPGDIGFKGIQGPRGPPGLMGKEGIVGPLGILGPSGLPGPKGDKGSRGDWVSGWAGGPPGPRGRPGPPGPPGGPIQLQQDDLGAAFQTWMDTSGALRPESYSYPDRLVLDQGGEIFTKENPARVCRDLMDCEQKMVDGTYWVDPNLGCSSDTIEVSCNFTHGGQTCLKPITASKVEFAISRVQMNFLHLLSSEVTQHITIHCLNMTVWQEGTGQTPAKQAVRFRAWNGQIFEAGGQFRPEVSMDGCKVQDGRWHQTLFTFRTQDPQQLPIISVDNLPPASSGKQYRLEVGPACFL

SEQ ID NO: 899295 - protein, 1815 aa, Homo sapiens; identical to SEQ ID NO: 899293

SEQ ID NO: 899296 - protein, 744 aa, Homo sapiens
LERMTFEARLKTAVPSALGGRDVDILQRLGLSWTKAGSPAPPGVIPFQSGFIFTQRARLQAPTGTIIPAALGTELALVLSLCSHRVNHAFLFAVRSRKRKLQLGLQFLPGKTVVHLGSRRSVAFDLDMHDGRWHHLALELRGRTVTLVTACGQRRVPVLLPFHRDPALDPGGSFLFGKMNPHAVQFEGALCQFSIYPVTQVAHNYCTHLRKQCGQADTYQSPLGPLFSQDSGRPFTFQSDLALLGLENLTTATPALGSLPAGRGPRGTVAPATPTKPQRTSPTNPHQHMAVGGPAQTPLLPAKLSASNALDPMLPASVGGSTRTPRPAAAQPSQKITATKIPKSLPTKPSAPSTSIVPIKSPHPTQKTAPSSFTKSALPTQKQVPPTSRPVPARVSRPAEKPIQRNPGMPRPPPPSTRPLPPTTSSSKKPIPTLARTEAKITSHASKPASARTSTHKPPPFTALSSSPAPTPGSTRSTRPPATMVPPTSGTSTPRTAPAVPTPGSAPTGSKKPIGSEASKKAGPKSSPRKPVPLRPGKAARDVPLSDLTTRPSPRQPQPSQQTTPALVLAPAQFLSSSPRPTSSGYSIFHLAGSTPFPLLMGPPGPKGDCGLPGPPGLPGLPGIPGARGPRGPPGPYGNPGLPGPPGAKGDMGLPGLSGNPGPPGRKGLPGPVGDPGPKGSRGYIGLPGLFGLPGSDGERGLPGVPGKRGKMGMPVLLPQSSEARGGNSMPSEGALAGRHGSHL

SEQ ID NO: 899297 - protein, 951 aa, Homo sapiens
LERMTFEARLKTAVPSALGGRDVDILQRLGLSWTKAGSPAPPGVIPFQSGFIFTQRARLQAPTGTIIPAALGTELALVLSLCSHRVNHAFLFAVRSRKRKLQLGLQFLPGKTVVHLGSRRSVAFDLDMHDGRWHHLALELRGRTVTLVTACGQRRVPVLLPFHRDPALDPGGSFLFGKMNPHAVQFEGALCQFSIYPVTQVAHNYCTHLRKQCGQADTYQSPLGPLFSQDSGRPFTFQSDLALLGLENLTTATPALGSLPAGRGPRGTVAPATPTKPQRTSPTNPHQHMAVGGPAQTPLLPAKLSASNALDPMLPASVGGSTRTPRPAAAQPSQKITATKIPKSLPTKPSAPSTSIVPIKSPHPTQKTAPSSFTKSALPTQKQVPPTSRPVPARVSRPAEKPIQRNPGMPRPPPPSTRPLPPTTSSSKKPIPTLARTEAKITSHASKPASARTSTHKPPPFTALSSSPAPTPGSTRSTRPPATMVPPTSGTSTPRTAPAVPTPGSAPTGSKKPIGSEASKKAGPKSSPRKPVPLRPGKAARDVPLSDLTTRPSPRQPQPSQQTTPALVLAPAQFLSSSPRPTSSGYSIFHLAGSTPFPLLMGPPGPKGDCGLPGPPGLPGLPGIPGARGPRGPPGPYGNPGLPGPPGAKGDMGLPGLSGNPGPPGRKGHKGYPGPAGHPGEQGQPGPEGSPGAKGYPGRQGLPGPVGDPGPKGSRGYIGLPGLFGLPGSDGERGLPGVPGKRGKMGMPGFPGVFGERGPPGLDGNPGELGLPGPPGVPGLIGDLGVLGPIGYPGPKGMKGLMGSVGEPGLKGEQGVPGVSGDPGFQGDKGSQGLPGFPGARGKPGPLGKVGDKGSIGFPGPPGPEGFPGDIGPPGDNGPEGMKGKPGARGLPGPRGQLGPEGDEGPMGPPGAPGLEGQPGRKGFPGRPGLDGVKGEPGDPGRPGPVGEQVS

SEQ ID NO: 899298 - protein, 951 aa, Homo sapiens; identical to SEQ ID NO: 899297

SEQ ID NO: 899299 - protein, 1815 aa, Homo sapiens; identical to SEQ ID NO: 899293

SEQ ID NO: 899300 - protein, 1104 aa, Homo sapiens
LERMTFEARLKTAVPSALGGRDVDILQRLGLSWTKAGSPAPPGVIPFQSGFIFTQRARLQAPTGTIIPAALGTELALVLSLCSHRVNHAFLFAVRSRKRKLQLGLQFLPGKTVVHLGSRRSVAFDLDMHDGRWHHLALELRGRTVTLVTACGQRRVPVLLPFHRDPALDPGGSFLFGKMNPHAVQFEGALCQFSIYPVTQVAHNYCTHLRKQCGQADTYQSPLGPLFSQDSGRPFTFQSDLALLGLENLTTATPALGSLPAGRGPRGTVAPATPTKPQRTSPTNPHQHMAVGGPAQTPLLPAKLSASNALDPMLPASVGGSTRTPRPAAAQPSQKITATKIPKSLPTKPSAPSTSIVPIKSPHPTQKTAPSSFTKSALPTQKQVPPTSRPVPARVSRPAEKPIQRNPGMPRPPRRLVQWENRAFLGKPEMKGDLGPLGTPGEQGLIGQRGEPGLEGDSGPMGPDGLKGDRGDPGPDGEHGEKGQEGLMGEDGPPGPPGVTGVRGPEGKSGKQGEKGRTGAKGAKGYQGQLGEMGVPGDPGPPGTPGPKGSRGSLGPTGAPGRMGAQGEPGLAGYDGHKGIVGPLGPPGPKAGEQGEDGKAEGPPGPPGDRGPVGDRGDRGEPGDPGYPGQEGVQGLRGKPGQQGQPGHPGPRGWPGPKGSKGAEGPKGKQGKAGAPGRRGVQGLQGLPGPRGVVGRQGLEGIAGPDGLPGRDGQAGQQGEQGDDGDPGPMGPAGKRGNPGVAGLPGAQGPPGFKGESGLPGQLGPPGKRGTEGRTGLPGNQGEPGSKGQPGDSGEMGFPGMAGLFGPKGPPGDIGFKGIQGPRGPPGLMGKEGIVGPLGILGPSGLPGPKGDKGSRGDWVSGWAGGPPGPRGRPGPPGPPGGPIQLQQDDLGAAFQTWMDTSGALRPESYSYPDRLVLDQGGEIFTKENPARVCRDLMDCEQKMVDGTYWVDPNLGCSSDTIEVSCNFTHGGQTCLKPITASKVEFAISRVQMNFLHLLSSEVTQHITIHCLNMTVWQEGTGQTPAKQAVRFRAWNGQIFEAGGQFRPEVSMDGCKVQDGRWHQTLFTFRTQDPQQLPIISVDNLPPASSGKQYRLEVGPACFL

SEQ ID NO: 899301 - protein, 1815 aa, Homo sapiens; identical to SEQ ID NO: 899293

SEQ ID NO: 899302 - protein, 1104 aa, Homo sapiens; identical to SEQ ID NO: 899300

SEQ ID NO: 899303 - protein, 1815 aa, Homo sapiens; identical to SEQ ID NO: 899293

SEQ ID NO: 899304 - protein, 71 aa, Homo sapiens
EHLPDTIELVPLVERVGQSGLGLEVKHQHGTISGSRIASSEVLTSRSLSLQDAIIVPAFSLSLNSVETHCH

SEQ ID NO: 899305 - protein, 106 aa, Homo sapiens
MREERQRPSSLGGESLVTPTPPGLHLLPQHSAISGTLWNHCSGSPRPPPPPPALEPLPTLTGNFLCVSLRVRVGYPDSWVPLASEEQRAERGSLETRGSLGPKASR

SEQ ID NO: 899306 - protein, 668 aa, Homo sapiens
ALWDWMSLKMDNRDVAGKANRWFGVAPPKSGKMNMNILHQEELIAQKKREIEAKMEQKAKQNQVASPQPPHPGEITNAHNSSCISNKFANDGSFLQQFLKLQKAQTSTDAPTSAPSAPPSTPTPSAGKRSLLISRRTGLGLASLPGPVKSYSHAKQLPVAHRPSVFQSPDEDEEEDYEQWLEIKVSPPEGAETRKVIEKLARFVAEGGPELEKVAMEDYKDNPAFAFLHDKNSREFLYYRKKVAEIRKEAQKSQAASQKEIRLLGVVIEPSTDSLLKVSPPEDEEVKNLAEKLARFIADGGPEVETIALQNNRENQAFSFLYEPNSQGYKYYRQKLEEFRKAKASSTGSFTAPDPGLKRKSPPEALSGSLPPATTCPASSTPAPTIIPAPAAPGKPASAATVKRKRKSRWGPEEDKVELPPAELVQRDVDASPSPLSVQDLKGLGYEKGKPVGLVGVTELSDAQKKQLKEQQEMQQMYDMIMQHKRAMQDMQLLWEKAVQQHQHGYDSDEEVDSELGTWEHQLRRMEMDKTREWAEQLTKMGRGKHFIGDFLPPDELEKFMETFKALKEGREPDYSEYKEFKLTVENIGYQMLMKMGWKEGEGLGSEGQGIKNPVNKGTTTVDGAGFGIDRPAELSKEDDEYEAFRKRMMLAYRFRPNPLNNPRRPYY

SEQ ID NO: 899307 - protein, 668 aa, Homo sapiens; identical to SEQ ID NO: 899306

SEQ ID NO: 899308 - protein, 691 aa, Homo sapiens
ALWDWMSLKMDNRDVAGKANRWFGVAPPKSGKMNMNILHQEELIAQKKREIEAKMEQKAKQNQVASPQPPHPGEITNAHNSSCISNKFANDGSFLQQFLKLQKAQTSTDAPTSAPSAPPSTPTPSAGKRSLLISRRTGLGLASLPGPVKSYSHAKQLPVAHRPSVFQSPDEDEEEDYEQWLEIKERAVPIDCGVCELNPSTDSLLKVSPPEGAETRKVIEKLARFVAEGGPELEKVAMEDYKDNPAFAFLHDKNSREFLYYRKKVAEIRKEAQKSQAASQKEIRLLGVVELSPVTDSLLKVSPPEDEEVKNLAEKLARFIADGGPEVETIALQNNRENQAFSFLYEPNSQGYKYYRQKLEEFRKAKASSTGSFTAPDPGLKRKSPPEALSGSLPPATTCPASSTPAPTIIPAPAAPGKPASAATVKRKRKSRWGPEEDKVELPPAELVQRDVDASPSPLSVQDLKGLGYEKGKPVGLVGVTELSDAQKKQLKEQQEMQQMYDMIMQHKRAMQDMQLLWEKAVQQHQHGYDSDEEVDSELGTWEHQLRRMEMDKTREWAEQLTKMGRGKHFIGDFLPPDELEKFMETFKALKEGREPDYSEYKEFKLTVENIGYQMLMKMGWKEGEGLGSEGQGIKNPVNKGTTTVDGAGFGIDRPAELSKEDDEYEAFRKRMMLAYRFRPNPLNNPRRPYY

SEQ ID NO: 899309 - protein, 453 aa, Homo sapiens
MEDYKDNPAFAFLHDKNSREFLYYRKKVAEIRKEAQKSQAASQKEIRLLGVVSEPSTDSLLKVSPPEDEEVKNLAEKLARFIADGGPEVETIALQNNRENQAFSFLYEPNSQGYKYYRQKLEEFRKAKASSTGSFTAPDPGLKRKSPPEALSGSLPPATTCPASSTPAPTIIPAPAAPGKPASAATVKRKRKSRWGPEEDKVELPPAELVQRDVDASPSPLSVQDLKGLGYEKGKPVGLVGVTELSDAQKKQLKEQQEMQQMYDMIMQHKRAMQDMQLLWEKAVQQHQHGYDSDEEVDSELGTWEHQLRRMEMDKTREWAEQLTKMGRGKHFIGDFLPPDELEKFMETFKALKEGREPDYSEYKEFKLTVENIGYQMLMKMGWKEGEGLGSEGQGIKNPVNKGTTTVDGAGFGIDRPAELSKEDDEYEAFRKRMMLAYRFRPNPLNNPRRPYY

SEQ ID NO: 899310 - protein, 631 aa, Homo sapiens
MLQEELIAQKKREIEAKMEQKAKQNQVASPQPPHPGEITNAHNSSCISNKFANDGSFLQQFLKLQKAQTSTDAPTSAPSAPPSTPTPSAGKRSLLISRRTGLGLASLPGPVKSYSHAKQLPVAHRPSVFQSPDEDEEEDYEQWLEIKVSPPEGAETRKVIEKLARFVAEGGPELEKVAMEDYKDNPAFAFLHDKNSREFLYYRKKVAEIRKEAQKSQAASQKEIRLLGVVIEPSTDSLLKVSPPEDEEVKNLAEKLARFIADGGPEVETIALQNNRENQAFSFLYEPNSQGYKYYRQKLEEFRKAKASSTGSFTAPDPGLKRKSPPEALSGSLPPATTCPASSTPAPTIIPAPAAPGKPASAATVKRKRKSRWGPEEDKVELPPAELVQRDVDASPSPLSVQDLKGLGYEKGKPVGLVGVTELSDAQKKQLKEQQEMQQMYDMIMQHKRAMQDMQLLWEKAVQQHQHGYDSDEEVDSELGTWEHQLRRMEMDKTREWAEQLTKMGRGKHFIGDFLPPDELEKFMETFKALKEGREPDYSEYKEFKLTVENIGYQMLMKMGWKEGEGLGSEGQGIKNPVNKGTTTVDGAGFGIDRPAELSKEDDEYEAFRKRMMLAYRFRPNPLNNPRRPYY

SEQ ID NO: 899311 - protein, 489 aa, Homo sapiens
ALWDWMSLKMDNRDVAGKANRWFGVAPPKSGKMNMNILHQEELIAQKKREIEAKMEQKAKQNQVASPQPPHPGEITNAHNSSCISNKFANDGSFLQQFLKLQKAQTSTDAPTSAPSAPPSTPTPSAGKRSLLISRRTGLGLASLPGPVKSYSHAKQLPVAHRPSVFQSPDEDEEEDYEQWLEIKVSPPEGAETRKVIEKLARFVAEGGPELEKVAMEDYKDNPAFAFLHDKNSREFLYYRKKVAEIRKEAQKSQAASQKVSPPEDEEVKNLAEKLARFIADGGPEVETIALQNNRENQAFSFLYEPNSQGYKYYRQKLEEFRKAKASSTGSFTAPDPGLKRKSPPEALSGSLPQWAEQLTKMGRGKHFIGDFLPPDELEKFMETFKALKEGREPDYSEYKEFKLTVENIGYQMLMKMGWKEGEGLGSEGQGIKNPVNKGTTTVDGAGFGIDRPAELSKEDDEYEAFRKRMMLAYRFRPNPLNNPRRPYY

SEQ ID NO: 899312 - protein, 443 aa, Homo sapiens [sequence omitted]

SEQ ID NO: 899313 - protein, 467 aa, Homo sapiens
ALWDWMSLKMDNRDVAGKANRWFGVAPPKSGKMNMNILHQEELIAQKKREIEAKMEQKAKQNQVASPQPPHPGEITNAHNSSCISNKFANDGSFLQQFLKLQKAQTSTDAPTSAPSAPPSTPTPSAGKRSLLISRRTGLGLASLPGPVKSYSHAKQLPVAHRPSVFQSPDEDEEEDYEQWLEIKVSPPEGAETRKVIEKLARFVAEGGPELEKVAMEDYKDNPAFAFLHDKNSREFLYYRKKVAEIRKEAQKSQAASQKVSPPEDEEVKNLAEKLARFIADGGPEVETIALQNNRENQAFSFLYEPNSQGYKYYRQKLEEFRKAKASSTGSFTAPDPGLKRKSPPEALSGSLPPATTCPASSTPAPTIIPAPAAPGKPASAATVKRKRKSRWGPEEDKVELPPAELVQRDVDASPSPLSVQDLKGLGYEKGKPVGLVGPSQKPFQYRLQKKDQFCKGSQAMGRMSSP

SEQ ID NO: 899314 - protein, 325 aa, Homo sapiens
MASTRLGVNRPRRLKRKSPPEALSGSLPPATTCPASSTPAPTIIPAPAAPGKPASAATVKRKRKSRWGPEEDKVELPPAELVQRDVDASPSPLSVQDLKGLGYEKGKPVGLVGVTELSDAQKKQLKEQQEMQQMYDMIMQHKRAMQDMQLLWEKAVQQHQHGYDSDEEVDSELGTWEHQLRRMEMDKTREWAEQLTKMGRGKHFIGDFLPPDELEKFMETFKALKEGREPDYSEYKEFKLTVENIGYQMLMKMGWKEGEGLGSEGQGIKNPVNKGTTTVDGAGFGIDRPAELSKEDDEYEAFRKRMMLAYRFRPNPLNNPRRPYY

SEQ ID NO: 899315 - protein, 324 aa, Homo sapiens
ALWDWMSLKMDNRDVAGKANRWFGVAPPKSGKMNMNILHQEELIAQKKREIEAKMEQKAKQNQVASPQPPHPGEITNAHNSSCISNKFANDGSFLQQFLKLQKAQTSTDAPTSAPSAPPSTPTPSAGKRSLLISRRTGLGLASLPGPVKSYSHAKQLPVAHRPSVFQSPDEDEEEDYEQWLEIKVSPPEGAETRKVIEKLARFVAEGGPELEKVAMEDYKDNPAFAFLHDKNSREFLYYRKKVAEIRKEAQKSQAASQKVSPPEDEEVKNLAEKLARFIADGGPEVETIALQNNRENQAFSFLYEPNSQGSPRRTTSMRRSARG

SEQ ID NO: 899316 - protein, 320 aa, Homo sapiens
TRPLKMDNRDVAGKANRWFGVAPPKSGKMNMNILHQEELIAQKKREIEAKMEQKAKQNQVASPQPPHPGEITNAHNSSCISNKFANDGSFLQQFLKLQKAQTSTDAPTSAPSAPPSTPTPSAGKRSLLISRRTGLGLASLPGPVKSYSHAKQLPVAHRPSVFQSPDEDEEEDYEQWLEIKVSPPEGAETRKVIEKLARFVAEGGPELEKVAMEDYKDNPAFAFLHDKNSREFLYYRKKVAEIRKEAQKSQAASQKVSPPEDEEVKNLAEKLARFIADGGPEVETIALQNNRENQAFSFLYEPNSQGSPRRTTSMRRSARG

SEQ ID NO: 899317 - protein, 299 aa, Homo sapiens
ALWDWMSLKMDNRDVAGKANRWFGVAPPKSGKMNMNILHQEELIAQKKREIEAKMEQKAKQNQVASPQPPHPGEITNAHNSSCISNKFANDGSFLQQFLKLQKAQTSTDAPTSAPSAPPSTPTPSAGKRSLLISRRTGLGLASLPGPVKSYSHAKQLPVAHRPSVFQSPDEDEEEDYEQWLEIKVSPPEGAETRKVIEKLARFVAEGGPELEKVAMENIGYQMLMKMGWKEGEGLGSEGQGIKNPVNKGTTTVDGAGFGIDRPAELSKEDDEYEAFRKRMMLAYRFRPNPLNNPRRPYY

SEQ ID NO: 899318 - protein, 650 aa, Homo sapiens
ALWDWMSLKMDNRDVAGKANRWFGVAPPKSGKMNMNILHQEELIAQKKREIEAKMEQKAKQNQVASPQPPHPGEITNAHNSSCISNKFANDGSFLQQFLKLQKAQTSTDAPTSAPSAPPSTPTPSAGKRSLLISRRTGLGLASLPGPVKSYSHAKQLPVAHRPSVFQSPDEDEEEDYEQWLEIKVSPPEGAETRKVIEKLARFVAEGGPELEKVAMEDYKDNPAFAFLHDKNSREFLYYRKKVAEIRKEAQKSQAASQKVSPPEDEEVKNLAEKLARFIADGGPEVETIALQNNRENQAFSFLYEPNSQGYKYYRQKLEEFRKAKASSTGSFTAPDPGLKRKSPPEALSGSLPPATTCPASSTPAPTIIPAPAAPGKPASAATVKRKRKSRWGPEEDKVELPPAELVQRDVDASPSPLSVQDLKGLGYEKGKPVGLVGVTELSDAQKKQLKEQQEMQQMYDMIMQHKRAMQDMQLLWEKAVQQHQHGYDSDEEVDSELGTWEHQLRRMEMDKTREWAEQLTKMGRGKHFIGDFLPPDELEKFMETFKALKEGREPDYSEYKEFKLTVENIGYQMLMKMGWKEGEGLGSEGQGIKNPVNKGTTTVDGAGFGIDRPAELSKEDDEYEAFRKRMMLAYRFRPNPLNNPRRPYY

SEQ ID NO: 899319 - protein, 646 aa, Homo sapiens
TRPLKMDNRDVAGKANRWFGVAPPKSGKMNMNILHQEELIAQKKREIEAKMEQKAKQNQVASPQPPHPGEITNAHNSSCISNKFANDGSFLQQFLKLQKAQTSTDAPTSAPSAPPSTPTPSAGKRSLLISRRTGLGLASLPGPVKSYSHAKQLPVAHRPSVFQSPDEDEEEDYEQWLEIKVSPPEGAETRKVIEKLARFVAEGGPELEKVAMEDYKDNPAFAFLHDKNSREFLYYRKKVAEIRKEAQKSQAASQKVSPPEDEEVKNLAEKLARFIADGGPEVETIALQNNRENQAFSFLYEPNSQGYKYYRQKLEEFRKAKASSTGSFTAPDPGLKRKSPPEALSGSLPPATTCPASSTPAPTIIPAPAAPGKPASAATVKRKRKSRWGPEEDKVELPPAELVQRDVDASPSPLSVQDLKGLGYEKGKPVGLVGVTELSDAQKKQLKEQQEMQQMYDMIMQHKRAMQDMQLLWEKAVQQHQHGYDSDEEVDSELGTWEHQLRRMEMDKTREWAEQLTKMGRGKHFIGDFLPPDELEKFMETFKALKEGREPDYSEYKEFKLTVENIGYQMLMKMGWKEGEGLGSEGQGIKNPVNKGTTTVDGAGFGIDRPAELSKEDDEYEAFRKRMMLAYRFRPNPLNNPRRPYY

SEQ ID NO: 899320 - protein, 613 aa, Homo sapiens
MLQEELIAQKKREIEAKMEQKAKQNQVASPQPPHPGEITNAHNSSCISNKFANDGSFLQQFLKLQKAQTSTDAPTSAPSAPPSTPTPSAGKRSLLISRRTGLGLASLPGPVKSYSHAKQLPVAHRPSVFQSPDEDEEEDYEQWLEIKVSPPEGAETRKVIEKLARFVAEGGPELEKVAMEDYKDNPAFAFLHDKNSREFLYYRKKVAEIRKEAQKSQAASQKVSPPEDEEVKNLAEKLARFIADGGPEVETIALQNNRENQAFSFLYEPNSQGYKYYRQKLEEFRKAKASSTGSFTAPDPGLKRKSPPEALSGSLPPATTCPASSTPAPTIIPAPAAPGKPASAATVKRKRKSRWGPEEDKVELPPAELVQRDVDASPSPLSVQDLKGLGYEKGKPVGLVGVTELSDAQKKQLKEQQEMQQMYDMIMQHKRAMQDMQLLWEKAVQQHQHGYDSDEEVDSELGTWEHQLRRMEMDKTREWAEQLTKMGRGKHFIGDFLPPDELEKFMETFKALKEGREPDYSEYKEFKLTVENIGYQMLMKMGWKEGEGLGSEGQGIKNPVNKGTTTVDGAGFGIDRPAELSKEDDEYEAFRKRMMLAYRFRPNPLNNPRRPYY

SEQ ID NO: 899321 - protein, 297 aa, Homo sapiens
ALWDWMSLKMDNRDVAGKANRWFGVAPPKSGKMNMNILHQEELIAQKKREIEAKMEQKAKQNQVASPQPPHPGEITNAHNSSCISNKFANDGSFLQQFLKLQKAQTSTDAPTSAPSAPPSTPTPSAGKRSLLISRRTGLGLASLPGPVKSYSHAKQLPVAHRPSVFQSPDEDEEEDYEQWLEIKVSPPEGAETRKVIEKLARFVAEGGPELEKVAMEDYKDNPAFAFLHDKNSREFLYYRKKVAEIRKEAQKSQAASQKAFCMSPIAKGTSTTDRSWRSSGKPRPAPQAASQHLIPA

SEQ ID NO: 899322 - protein, 527 aa, Homo sapiens
ALWDWMSLKMDNRDVAGKANRWFGVAPPKSGKMNMNILHQEELIAQKKREIEAKMEQKAKQNQVASPQPPHPGEITNAHNSSCISNKFANDGSFLQQFLKLQKAQTSTDAPTSAPSAPPSTPTPSAGKRSLLISRRTGLGLASLPGPVKSYSHAKQLPVAHRPSVFQSPDEDEEEDYEQWLEIKVSPPEGAETRKVIEKLARFVAEGGPELEKVAMEDYKDNPAFAFLHDKNSREFLYYRKKVAEIRKEAQKSQAASQKVSPPEDEEVKNLAEKLARFIADGGPEVETIALQNNRENQAFSFLYEPNSQGYKYYRQKLEEFRKAKASSTGSFTAPDPGLKRKSPPEALSGSLPPATTCPASSTPAPTIIPAPAAPGKPASAATVKRKRKSRWGPEEDKVELPPAELVQRDVDASPSPLSVQDLKGLGYEKGKPVGLVGVTELSDAQKKQLKEQQEMQQMYDMIMQHKRAMQDMQLLWEKAVQQHQHGYDSDEEVDSELGTWEQPTWRAPMGRMGLKNQGKLGPQAKL

SEQ ID NO: 899323 - protein, 346 aa, Homo sapiens
DGRIMKISEIGQYGCSPYLYEEIQKCSFTAPDPGLKRKSPPEALSGSLPPATTCPASSTPAPTIIPAPAAPGKPASAATVKRKRKSRWGPEEDKVELPPAELVQRDVDASPSPLSVQDLKGLGYEKGKPVGLVGVTELSDAQKKQLKEQQEMQQMYDMIMQHKRAMQDMQLLWEKAVQQHQHGYDSDEEVDSELGTWEHQLRRMEMDKTREWAEQLTKMGRGKHFIGDFLPPDELEKFMETFKALKEGREPDYSEYKEFKLTVENIGYQMLMKMGWKEGEGLGSEGQGIKNPVNKGTTTVDGAGFGIDRPAELSKEDDEYEAFRKRMMLAYRFRPNPLNNPRRPYY

SEQ ID NO: 899324 - protein, 128 aa, Homo sapiens
MGRGKHFIGDFLPPDELEKFMETFKALKEGREPDYSEYKEFKLTVENIGYQMLMKMGWKEGEGLGSEGQGIKNPVNKGTTTVDGAGFGIDRPAELSKEDDEYEAFRKRMMLAYRFRPNPLNNPRRPYY

SEQ ID NO: 899325 - protein, 149 aa, Homo sapiens
PRPRRRMEMDKTREWAEQLTKMGRGKHFIGDFLPPDELEKFMETFKALKEGREPDYSEYKEFKLTVENIGYQMLMKMGWKEGEGLGSEGQGIKNPVNKGTTTVDGAGFGIDRPAELSKEDDEYEAFRKRMMLAYRFRPNPLNNPRRPYY

SEQ ID NO: 899326 - protein, 266 aa, Homo sapiens
  misc_feature (257)..(257): Xaa can be any naturally occurring amino acid
  misc_feature (266)..(266): Xaa can be any naturally occurring amino acid
MTVKTEAAKGTLTYSRMRGMVAILIAFMKQRRMGLNDFIQKIANNSYACKHPEVQSILKISQPQEPELMNANPSPPPSPSQQINLGPSSNPHAKPSDFHFLKVIGKGSFGKVLLARHKAEEVFYAVKVLQKKAILKKKEEKHIMSERNVLLKNVKHPFLVGLHFSFQTADKLYFVLDYINGGELFYHLQRERCFLEPRARFYAAEIASALGYLHSLNIVYRETLNQEEIFLLEFNKGTPFALNWDFRDSRQRGKQLXPTNRDKQSX

SEQ ID NO: 899327 - protein, 431 aa, Homo sapiens
MTVKTEAAKGTLTYSRMRGMVAILIAFMKQRRMGLNDFIQKIANNSYACKHPEVQSILKISQPQEPELMNANPSPPPSPSQQINLGPSSNPHAKPSDFHFLKVIGKGSFGKVLLARHKAEEVFYAVKVLQKKAILKKKEEKHIMSERNVLLKNVKHPFLVGLHFSFQTADKLYFVLDYINGGELFYHLQRERCFLEPRARFYAAEIASALGYLHSLNIVYRDLKPENILLDSQGHIVLTDFGLCKENIEHNSTTSTFCGTPEYLAPEVLHKQPYDRTVDWWCLGAVLYEMLYGLPPFYSRNTAEMYDNILNKPLQLKPNITNSARHLLEGLLQKDRTKRLGAKDDFMEIKSHVFFSLINWDDLINKKITPPFNPNVSGPNDLRHFDPEFTEEPVPNSIGKSPDSVLVTASVKEAAEAFLGFSYAPPTDSFL

SEQ ID NO: 899328 - protein, 420 aa, Homo sapiens [sequence omitted]

SEQ ID NO: 899329 - protein, 361 aa, Homo sapiens
MTVKTEAAKGTLTYSRMRGMVAILIAFMKQRRMGLNDFIQKIANNSYACKHPEVQSILKISQPQEPELMNANPSPPPSPSQQINLGPSSNPHAKPSDFHFLKVIGKGSFGKVLLARHKAEEVFYAVKVLQKKAILKKKEEKHIMSERNVLLKNVKHPFLVGLHFSFQTADKLYFVLDYINGGELFYHLQRERCFLEPRARFYAAEIASALGYLHSLNIVYRDLKPENILLDSQGHIVLTDFGLCKENIEHNSTTSTFCGTPEYLAPEVLHKQPYDRTVDWWCLGAVLYEMLYGLPPFYSRNTAEMYDNILNKPLQLKPNITNSARHLLEGLLQKDRTKRLGAKDDFVSDVFLSSWAGRDVH

SEQ ID NO: 899330 - protein, 503 aa, Homo sapiens
KSTKKAFSEATRPCTRAICLFWDSGQEILPGLSHGGSFKETQCSPVALVCRAPRRPLPMGEMQGALARARLESLLRPRHKKRAEAQKRSESFLLSGLAFMKQRRMGLNDFIQKIANNSYACKHPEVQSILKISQPQEPELMNANPSPPPSPSQQINLGPSSNPHAKPSDFHFLKVIGKGSFGKVLLARHKAEEVFYAVKVLQKKAILKKKEEKHIMSERNVLLKNVKHPFLVGLHFSFQTADKLYFVLDYINGGELFYHLQRERCFLEPRARFYAAEIASALGYLHSLNIVYRDLKPENILLDSQGHIVLTDFGLCKENIEHNSTTSTFCGTPEYLAPEVLHKQPYDRTVDWWCLGAVLYEMLYGLPPFYSRNTAEMYDNILNKPLQLKPNITNSARHLLEGLLQKDRTKRLGAKDDFMEIKSHVFFSLINWDDLINKKITPPFNPNVSGPNDLRHFDPEFTEEPVPNSIGKSPDSVLVTASVKEAAEAFLGFSYAPPTDSFL

SEQ ID NO: 899331 - protein, 363 aa, Homo sapiens [sequence omitted]

SEQ ID NO: 899332 - protein, 431 aa, Homo sapiens; identical to SEQ ID NO: 899327

SEQ ID NO: 899333 - protein, 514 aa, Homo sapiens
MTVKTEAAKGTLTYSRMRGMVAILIAFMKQRRMGLNDFIQKIANNSYACKHPEVQSILKISQPQEPELMNANPSPPPSPSQQINLGPSSNPHAKPSDFHFLKVIGKGSFGKVLLARHKAEEVFYAVKVLQKKAILKKKEEKHIMSERNVLLKNVKHPFLVGLHFSFQTADKLYFVLDYINGGEVSRGDRSQLLVSLHSLLCFSLRKKFSKIFGGENVTRISISFNLSGLELIDYLGPLPAVVLLLCMSKLIKFICNPEVTLFCLLQLFYHLQRERCFLEPRARFYAAEIASALGYLHSLNIVYRDLKPENILLDSQGHIVLTDFGLCKENIEHNSTTSTFCGTPEYLAPEVLHKQPYDRTVDWWCLGAVLYEMLYGLPPFYSRNTAEMYDNILNKPLQLKPNITNSARHLLEGLLQKDRTKRLGAKDDFMEIKSHVFFSLINWDDLINKKITPPFNPNVSGPNDLRHFDPEFTEEPVPNSIGKSPDSVLVTASVKEAAEAFLGFSYAPPTDSFL

SEQ ID NO: 899334 - protein, 328 aa, Homo sapiens
DFFKLKFQVLLARHKAEEVFYAVKVLQKKAILKKKEEKHIMSERNVLLKNVKHPFLVGLHFSFQTADKLYFVLDYINGGELFYHLQRERCFLEPRARFYAAEIASALGYLHSLNIVYRDLKPENILLDSQGHIVLTDFGLCKENIEHNSTTSTFCGTPEYLAPEVLHKQPYDRTVDWWCLGAVLYEMLYGLPPFYSRNTAEMYDNILNKPLQLKPNITNSARHLLEGLLQKDRTKRLGAKDDFMEIKSHVFFSLINWDDLINKKITPPFNPNVSGPNDLRHFDPEFTEEPVPNSIGKSPDSVLVTASVKEAAEAFLGFSYAPPTDSFL

SEQ ID NO: 899335 - protein, 288 aa, Homo sapiens
MSERNVLLKNVKHPFLVGLHFSFQTADKLYFVLDYINGGELFYHLQRERCFLEPRARFYAAEIASALGYLHSLNIVYRDLKPENILLDSQGHIVLTDFGLCKENIEHNSTTSTFCGTPEYLAPEVLHKQPYDRTVDWWCLGAVLYEMLYGLPPFYSRNTAEMYDNILNKPLQLKPNITNSARHLLEGLLQKDRTKRLGAKDDFMEIKSHVFFSLINWDDLINKKITPPFNPNVSGPNDLRHFDPEFTEEPVPNSIGKSPDSVLVTASVKEAAEAFLGFSYAPPTDSFL

SEQ ID NO: 899336 - protein, 142 aa, Homo sapiens
MLYGLPPFYSRNTAEMYDNILNKPLQLKPNITNSARHLLEGLLQKDRTKRLGAKDDFMEIKSHVFFSLINWDDLINKKITPPFNPNVSGPNDLRHFDPEFTEEPVPNSIGKSPDSVLVTASVKEAAEAFLGFSYAPPTDSFL

SEQ ID NO: 899337 - protein, 431 aa, Homo sapiens; identical to SEQ ID NO: 899327

SEQ ID NO: 899338 - protein, 431 aa, Homo sapiens; identical to SEQ ID NO: 899327

SEQ ID NO: 899339 - protein, 317 aa, Homo sapiens
MTVKTEAAKGTLTYSRMRGMVAILIAFMKQRRMGLNDFIQKIANNSYACKHPEVQSILKISQPQEPELMNANPSPPPSPSQQINLGPSSNPHAKPSDFHFLKVIGKGSFGKVLLARHKAEEVFYAVKVLQKKAILKKKEEKHIMSERNVLLKNVKHPFLVGLHFSFQTADKLYFVLDYINGGELFYHLQRERCFLEPRARFYAAEIASALGYLHSLNIVYRELKDQEEYLGRLHRDDMGPLLSFRTSAREKQSEAANKQQPFQPFVWGTAGSNLGSPEGLAFHLKARPFTEPGNLVGTWGGVGPWGKAWCLWAYLDR

SEQ ID NO: 899340 - protein, 130 aa, Homo sapiens
MTVKTEAAKGTLTYSRMRGMVAILIAFMKQRRMGLNDFIQKIANNSYACKHPEVQSILKISQPQEPELMNANPSPPPSPSQQINLGPSSNPHAKPSDFHFLKVIGKGSFGKVISNLKIFWYTSFMSSFVF

SEQ ID NO: 899341 - protein, 77 aa, Homo sapiens
LYRILVITPINEEDTPPFNPNVSGPNDLRHFDPEFTEEPVPNSIGKSPDSVLVTASVKEAAEAFLGFSYAPPTDSFL

SEQ ID NO: 899342 - protein, 340 aa, Homo sapiens
MTVKTEAAKGTLTYSRMRGMVAILIAFMKQRRMGLNDFIQKIANNSYACKHPEVQSILKISQPQEPELMNANPSPPPSPSQQINLGPSSNPHAKPSDFHFLKVIGKGSFGKVLLARHKAEEVFYAVKVLQKKAILKKKEEKHIMSERNVLLKNVKHPFLVGLHFSFQTADKLYFVLDYINGGELFYHLQRERCFLEPRARFYAAEIASALGYLHSLNIVYRDLKPENILLDSQGHIVLTDFGLCKENIEHNSTTSTFCGTPEYLAPEVLHKQPYDRTVDWWCLGAVLYEMLYGLVSGTLGTMEHCLLPTILPSHSPCLAMVSCPYQYAYQKQLRGILVIL

SEQ ID NO: 899343 - protein, 340 aa, Homo sapiens; identical to SEQ ID NO: 899342

SEQ ID NO: 899344 - protein, 421 aa, Homo sapiens
MKPSKRFFISPPSSTAFMKQRRMGLNDFIQKIANNSYACKHPEVQSILKISQPQEPELMNANPSPPPSPSQQINLGPSSNPHAKPSDFHFLKVIGKGSFGKVLLARHKAEEVFYAVKVLQKKAILKKKEEKHIMSERNVLLKNVKHPFLVGLHFSFQTADKLYFVLDYINGGELFYHLQRERCFLEPRARFYAAEIASALGYLHSLNIVYRDLKPENILLDSQGHIVLTDFGLCKENIEHNSTTSTFCGTPEYLAPEVLHKQPYDRTVDWWCLGAVLYEMLYGLPPFYSRNTAEMYDNILNKPLQLKPNITNSARHLLEGLLQKDRTKRLGAKDDFMEIKSHVFFSLINWDDLINKKITPPFNPNVSGPNDLRHFDPEFTEEPVPNSIGKSPDSVLVTASVKEAAEAFLGFSYAPPTDSFL

SEQ ID NO: 899345 - protein, 363 aa, Homo sapiens [sequence omitted]

SEQ ID NO: 899346 - protein, 227 aa, Homo sapiens
MTVKTEAAKGTLTYSRMRGMVAILIAFMKQRRMGLNDFIQKIANNSYACKHPEVQSILKISQPQEPELMNANPSPPPSPSQQINLGPSSNPHAKPSDFHFLKVIGKGSFGKVLLARHKAEEVFYAVKVLQKKAILKKKEEKHIMSERNVLLKNVKHPFLVGLHFSFQTADKLYFVLDYINGGELFYHLQRERCFLEPRARFYAAEIASALGYLHSLNIVYRTLQGEH

SEQ ID NO: 899347 - protein, 256 aa, Homo sapiens [sequence omitted]

SEQ ID NO: 899348 - protein, 299 aa, Homo sapiens
KSTKKAFSEATRPCTRAICLFWDSGQEILPGLSHGGSFKETQCSPVALVCRAPRRPLPMGEMQGALARARLESLLRPRHKKRAEAQKRSESFLLSGLAFMKQRRMGLNDFIQKIANNSYACKHPEVQSILKISQPQEPELMNANPSPPPSPSQQINLGPSSNPHAKPSDFHFLKVIGKGSFGKVLLARHKAEEVFYAVKVLQKKAILKKKEEKHIMSERNVLLKNVKHPFLVGLHFSFQTADKLYFVLDYINGGELFYHLQRERCFLEPRARFYAAEIASALGYLHSLNIVYRTLQGEH

SEQ ID NO: 899349 - protein, 156 aa, Homo sapiens
MCAHMKLPIKSKVIFPFFQPPFYSRNTAEMYDNILNKPLQLKPNITNSARHLLEGLLQKDRTKRLGAKDDFMEIKSHVFFSLINWDDLINKKITPPFNPNVSGPNDLRHFDPEFTEEPVPNSIGKSPDSVLVTASVKEAAEAFLGFSYAPPTDSFL

SEQ ID NO: 899350 - protein, 286 aa, Homo sapiens
MTVKTEAAKGTLTYSRMRGMVAILIAFMKQRRMGLNDFIQKIANNSYACKHPEVQSILKISQPQEPELMNANPSPPPSPSQQINLGPSSNPHAKPSDFHFLKVIGKGSFGKVLLARHKAEEVFYAVKVLQKKAILKKKEEKHIMSERNVLLKNVKHPFLVGLHFSFQTADKLYFVLDYINGGELFYHLQRERCFLEPRARFYAAEIASALGYLHSLNIVYRDLKPENILLDSQGHIVLTDFAGDLGQRNPFWGAGFPLGGSSGFGRLCWVRGAVCSRGALLRRDVA

SEQ ID NO: 899351 - protein, 226 aa, Homo sapiens
MTVKTEAAKGTLTYSRMRGMVAILIAFMKQRRMGLNDFIQKIANNSYACKHPEVQSILKISQPQEPELMNANPSPPPSPSQQINLGPSSNPHAKPSDFHFLKVIGKGSFGKVLLARHKAEEVFYAVKVLQKKAILKKKEEKHIMSERNVLLKNVKHPFLVGLHFSFQTADKLYFVLDYINGGELFYHLQRERCFLEPRARFYAAEIASALGYLHEHTTVHEHTTDA

SEQ ID NO: 899352 - protein, 104 aa, Homo sapiens
MTVKTEAAKGTLTYSRMRGMVAILIGECRNLAGLLLQETQSGNFLKVPDQISVCGAGRYEAVKRFFISPPSSTAFMKQRRMGLNDFIQKIANNSYACKQKFDRI

SEQ ID NO: 899353 - protein, 606 aa, Homo sapiens
MSHTASSCQELVENCAVHVAGMAQEDSRRGQVPSSFYHGANQELDLSTKVYKRESGSPYSVLVDTKMSKPHLHETEEQPYFRETRAVSDVHAVKEDRENSDDTEEEEEEVSYKREQIIVEVNLNNQTLNVSKGEKGVSSQSKETPVLKTSSEEEEEESEEEATDDSNDYGENEKQKKKEKIVEKVSVTQRRTRRAASVAAATTSPTPRTTRGRRKSVEPPKRKKRATKEPKAPVQKAKCEEKETLTCEKCPRVFNTRWYLEKHMNVTHRRMQICDKCGKKFVLESELSLHQQTDCEKNIQCVSCNKSFKKLWSLHEHIKIVHGYAEKKFSCEICEKKFYTMAHVRKHMVAHTKDMPFTCETCGKSFKRSMSLKVHSLQHSGEKPFRCENCDERFQYKYQLRSHMSIHIGHKQFMCQWCGKDFNMKQYFDEHMKTHTGEKPFICEICGKSFTSRPNMKRHRRTHTGEKPYPCDVCGQRFRFSNMLKAHKEKCFRVTSPVNVPPAVQIPLTTSPATPVPSVVNTATTPTPPINMNPVSTLPPRPIPHPFSHLHIHPHPHHPHHLPIPPVPHLPPPPALFKSEPLNHRGQSEDNFLRHLAEKNSSAQHH

SEQ ID NO: 899354 - protein, 606 aa, Homo sapiens; identical to SEQ ID NO: 899353

SEQ ID NO: 899355 - protein, 181 aa, Homo sapiens [sequence omitted]

SEQ ID NO: 899356 - protein, 479 aa, Homo sapiens
MSHTASSCQELVENCAVHVAGMAQEDSRRGQVPSSFYHGANQELDLSTKVYKRESGSPYSVLVDTKMSKPHLHETEEQPYFRETRAVSDVHAVKEDRENSDDTEEEEEEVSYKREQIIVEVNLNNQTLNVSKGEKGVSSQSKETPVLKTSSEEEEEESEEEATDDSNDYGENEKQKKKEKIVEKVSVTQRRTRRAASVAAATTSPTPRTTRGRRKSVEPPKRKKRATKEPKAPVQKAKCEEKETLTCEKCPRVFNTRWYLEKHMNVTHRRMQICDKCGKKFVLESELSLHQQTDCEKNIQCVSCNKSFKKLWSLHEHIKIVHGYAEKKFSCEICEKKFYTMAHVRKHMVAHTKDMPFTCETCGKSFKRSMSLKVHSLQHSGEKPFRCENCDERFQYKYQLRSHMSIHIGHKQFMCQWCGKDFNMKQYFDEHMKTHTGEKPFICEICGKSFTSRHLQLSLRVSLIIEEPGGRRTREGYRR

SEQ ID NO: 899357 - protein, 606 aa, Homo sapiens; identical to SEQ ID NO: 899353

SEQ ID NO: 899358 - protein, 426 aa, Homo sapiens
MSHTASSCQELVENCAVHVAGMAQEDSRRGQVPSSFYHGANQELDLSTKVYKRESGSPYSVLVDTKMSKPHLHETEEQPYFRETRAVSDVHAVKEDRENSDDTEEEEEEVSYKREQIIVECVSCNKSFKKLWSLHEHIKIVHGYAEKKFSCEICEKKFYTMAHVRKHMVAHTKDMPFTCETCGKSFKRSMSLKVHSLQHSGEKPFRCENCDERFQYKYQLRSHMSIHIGHKQFMCQWCGKDFNMKQYFDEHMKTHTGEKPFICEICGKSFTSRPNMKRHRRTHTGEKPYPCDVCGQRFRFSNMLKAHKEKCFRVTSPVNVPPAVQIPLTTSPATPVPSVVNTATTPTPPINMNPVSTLPPRPIPHPFSHLHIHPHPHHPHHLPIPPVPHLPPPPALFKSEPLNHRGQSEDNFLRHLAEKNSSAQHH

SEQ ID NO: 899359 - protein, 338 aa, Homo sapiens
IGVCRGGRDVAGGWSWKVRVVHEGRECEKKVQCVSCNKSFKKLWSLHEHIKIVHGYAEKKFSCEICEKKFYTMAHVRKHMVAHTKDMPFTCETCGKSFKRSMSLKVHSLQHSGEKPFRCENCDERFQYKYQLRSHMSIHIGHKQFMCQWCGKDFNMKQYFDEHMKTHTGEKPFICEICGKSFTSRPNMKRHRRTHTGEKPYPCDVCGQRFRFSNMLKAHKEKCFRVTSPVNVPPAVQIPLTTSPATPVPSVVNTATTPTPPINMNPVSTLPPRPIPHPFSHLHIHPHPHHPHHLPIPPVPHLPPPPALFKSEPLNHRGQSEDNFLRHLAEKNSSAQHH

SEQ ID NO: 899360 - protein, 312 aa, Homo sapiens [sequence omitted]

SEQ ID NO: 899361 - protein, 455 aa, Homo sapiens
EKAVLKPEEAEVSRQTRRLSRQNASAGAGAREAWTCGASSVRRAALHPSPAPVSRGLTRVMPRYCAAICCKNRRGRNNKDRKLSFYPFPLHDKERLEKWLKNMKRDSWVPSKYQFLCSDHFTPDSLDIRWGIRYLKQTAVPTIFSLPEDNQGKDPSKKKSQKKNLEDEKEVCPKAKSEESFVLNETKKNIVNTDVPHQHPELLHSSSLVKPPAPKTGSIQNNMLTLNLVKQHTGKPESTLETSVNQDTGRGGFHTCFENLNSTTITLTTSNSESIHQSLETQEVLEVTTSHLANPNFTSNSMEIKSAQENPFLFSTINQTVEELNTNKESVIAIFVPAENSKPSVNSFISAQKETTEMEDTDIEDSLYKDVDYGTEVLQIEHSYCRQDINKEHLWQKVSKLHSKITLLELKEQQTLGRLKSLEALIRQLKQENWLSEENVKIIENHFTTYEVTMI

SEQ ID NO: 899362 - protein, 353 aa, Homo sapiens
MKRDSWVPSKYQFLCSDHFTPDSLDIRWGIRYLKQTAVPTIFSLPEDNQGKDPSKKKSQKKNLEDEKEVCPKAKSEESFVLNETKKNIVNTDVPHQHPELLHSSSLVKPPAPKTGSIQNNMLTLNLVKQHTGKPESTLETSVNQDTGRGGFHTCFENLNSTTITLTTSNSESIHQSLETQEVLEVTTSHLANPNFTSNSMEIKSAQENPFLFSTINQTVEELNTNKESVIAIFVPAENSKPSVNSFISAQKETTEMEDTDIEDSLYKDVDYGTEVLQIEHSYCRQDINKEHLWQKVSKLHSKITLLELKEQQTLGRLKSLEALIRQLKQENWLSEENVKIIENHFTTYEVTMI

SEQ ID NO: 899363 - protein, 139 aa, Homo sapiens
MPVISAAREAEAGESLEPGRWRLRFPLHDKERLEKWLKNMKRDSWVPSKYQFLCSDHFTPDSLDIRWGIRYLKQTAVPTIFSLPEDNQGKRTFLTHTQSPGSKTLGKHAATEVLPHKPKLRSNPLVFTCRQRTTTFTSP

SEQ ID NO: 899364 - protein, 89 aa, Homo sapiens
EKAVLKPEEAEVSRQTRRLSRQNASAGAGAREAWTCGASSVRRAALHPSPAPVSRGLTRVMPRYCAAICCKNRRGRNNKDRKLSFYPYS

SEQ ID NO: 899365 - protein, 233 aa, Homo sapiens
MLTLNLVKQHTGKPESTLETSVNQDTGRGGFHTCFENLNSTTITLTTSNSESIHQSLETQEVLEVTTSHLANPNFTSNSMEIKSAQENPFLFSTINQTVEELNTNKESVIAIFVPAENSKPSVNSFISAQKETTEMEDTDIEDSLYKDVDYGTEVLQIEHSYCRQDINKEHLWQKVSKLHSKITLLELKEQQTLGRLKSLEALIRQLKQENWLSEENVKIIENHFTTYEVTMI

SEQ ID NO: 899366 - protein, 233 aa, Homo sapiens; identical to SEQ ID NO: 899365

SEQ ID NO: 899367 - protein, 191 aa, Homo sapiens
MASGQGPGPPRQECGEPALPSASEEQVAQDTEEVFRSYVFYRHQQEQEAEGVAAPADPEMVTLPLQPSSTMGQVGRQLAIIGDDINRRYDSEFQTMLQHLQPTAENAYEYFTKIATSLFESGINWGRVVALLGFGYRLALHVYQHGLTGFLGQVTRFVVDFMLHHCIARWIAQRGGWVSIQGLQCPPCCWG

SEQ ID NO: 899368 - protein, 151 aa, Homo sapiens
MGQVGRQLAIIGDDINRRYDSEFQTMLQHLQPTAENAYEYFTKIATSLFESGINWGRVVALLGFGYRLALHVYQHGLTGFLGQVTRFVVDFMLHHCIARWIAQRGGWVADLNLGPWFQFLNVLEDMGEGTCWGQDEEPTDSSEIMNSQEWP

SEQ ID NO: 899369 - protein, 211 aa, Homo sapiens
MASGQGPGPPRQECGEPALPSASEEQVAQDTEEVFRSYVFYRHQQEQEAEGVAAPADPEMVTLPLQPSSTMGQVGRQLAIIGDDINRRYDSEFQTMLQHLQPTAENAYEYFTKIATSLFESGINWGRVVALLGFGYRLALHVYQHGLTGFLGQVTRFVVDFMLHHCIARWIAQRGGWVAALNLGNGPILNVLVVLGVVLLGQFVVRRFFKS

SEQ ID NO: 899370 - protein, 141 aa, Homo sapiens
MGQVGRQLAIIGDDINRRYDSEFQTMLQHLQPTAENAYEYFTKIATSLFESGINWGRVVALLGFGYRLALHVYQHGLTGFLGQVTRFVVDFMLHHCIARWIAQRGGWVAALNLGNGPILNVLVVLGVVLLGQFVVRRFFKS

SEQ ID NO: 899371 - protein, 175 aa, Homo sapiens
ATFFTAISRNRRLKGWLPLPTQRWSPYLCNLAGELQPLGPQGHLQGGSSSHGSLCRSWELGRPRGSCPSLMVAPLLCWAPTPIQDLVSFLAHACPFLLEPSTHVLEHCQGPPRRDAQGHGQLRQNPSAMSQGLVPTAWLLAHLHASCSYSTMGQVGRQLAIIGDDINRRYDSEFQ

SEQ ID NO: 899372 - protein, 211 aa, Homo sapiens; identical to SEQ ID NO: 899369

SEQ ID NO: 899373 - protein, 211 aa, Homo sapiens; identical to SEQ ID NO: 899369

SEQ ID NO: 899374 - protein, 116 aa, Homo sapiens
MGQVGRQLAIIGDDINRRYDSEFQTMLQHLQPTAENAYEYFTKIATRYPSHSLPAPVTPLSCHNHTIPCLHDALLAWGEAFCQCPMSAVNSHVVSAPYFSLSGSQTCILGISSQLF

SEQ ID NO: 899375 - protein, 697 aa, Homo sapiens
MTFISTLHVTDMVYDAISPVDIMGMKTIGGELAVRANFGNRRENYFVPIKSSLTPSPRKQESEFWPAGYLNLTDCCSTGSPGKFFQWASFSEIVIKHISQEESVNRFRSRMFEVVDKTFRIVINVLIKCKVRMNNHNYIDGRYILKFLNNFRFSKFRVFSSLESNINIFYQSTEHNFRELVFRTFYLEMRKPFKFKFAFLKYLFQHCSPFFSLLFALSFSEEEHIFSFLLNTLWFSTEVRQARIYVRRVGIILYIKIIGTEKSKSLLSIGLFLMMEIIYVCAVQYGSHSQRWLLSISRVACDTEELNFKFYLITLNFKSYTWLVGLPNYEENKATEHLSSLMKQQEFGNCKSVLSFFHETFIDIILAYTNTGEILLIELLLTFFFSIYIFKKICFFIINLYCRVTIVLKMLSHLVNNKYAFGFLALFIIEAFRINAPNLKYFCCSLKEWVYDAPKGHFENCRSNRYHHVRSEFPCFSLNLEAYLFRRFPKYSVFSCRTLELPRSILFYAYTQHTARANVGCRFRQNTHTHTHKTLKSTMSIISTANLKDEVLTTFVYIIVSLTLNHYPAFLMQSVHKHQSENTKFVRGQDQLGLYMERQLRAVSLCVGGLAAVDSPSGYQTVASLHLQNQTSILGKNVSLPWTGHKQEIDISSENSAAARLSSCPEILRSTKHNIKTVFYTIIFVFVQQHWVLLSIL

SEQ ID NO: 899376 - protein, 224 aa, Homo sapiens
MESNHKSGDGLSGTQKEAALRALVQRTGYSLVQENGQRKYGGPPPGWDAAPPERGCEIFIGKLPRDLFEDELIPLCEKIGKIYEMRMMMDFNGNNRGYAFVTFSNKVEAKNAIKQLNNYEIRNGRLLGVCASVDNCRLFVGGIPKTKKREEEGKKEKKEEKQEEESRNAATTRNKTRYTQGQKQAKNGHEDRPTQRSARRHGTKGPKRNNGARKEELRRRRRTS

SEQ ID NO: 899377 - protein, 586 aa, Homo sapiens
MESNHKSGDGLSGTQKEAALRALVQRTGYSLVQENGQRKYGGPPPGWDAAPPERGCEIFIGKLPRDLFEDELIPLCEKIGKIYEMRMMMDFNGNNRGYAFVTFSNKVEAKNAIKQLNNYEIRNGRLLGVCASVDNCRLFVGGIPKTKKREEILSEMKKVTEGVVDVIVYPSAADKTKNRGFAFVEYESHRAAAMARRKLLPGRIQLWGHGIAVDWAEPEVEVDEDTMSSVKILYVRNLMLSTSEEMIEKEFNNIKPGAVERVKKIRDYAFVHFSNREDAVEAMKALNGKVLDGSPIEVTLAKPVDKDSYVRYTRGTGGRGTMLQGEYTYSLGQVYDPTTTYLGAPVFYAPQTYAAIPSLHFPATKGHLSNRAIIRAPSVRGAAGVRGLGGRGYLAYTGLGRGYQVKGDKREDKLYDILPGMELTPMNPVTLKPQGIKLAPQILEEICQKNNWGQPVYQLHSAIGQDQRQLFLYKITIPALASQNPAIHPFTPPKLSAFVDEAKTYAAEYTLQTLGIPTDGGDGTMATAAAAATAFPGYAVPNATAPVSAAQLKQAVTLGQDLAAYTTYEVYPTFAVTARGDGYGTF

SEQ ID NO: 899378 - protein, 586 aa, Homo sapiens; identical to SEQ ID NO: 899377

SEQ ID NO: 899379 - protein, 566 aa, Homo sapiens
MESNHKSGDGLSGTQKEAALRALVQRTGYSLVQENGQRKYGGPPPGWDAAPPERGCEIFIGKLPRDLFEDELIPLCEKIGKIYEMRMMMDFNGNNRGYAFVTFSNKVEAKNAIKQLNNYEIRNGRLLGVCASVDNCRLFVGGIPKTKKREEILSEMKKRGFAFVEYESHRAAAMARRKLLPGRIQLWGHGIAVDWAEPEVEVDEDTMSSVKILYVRNLMLSTSEEMIEKEFNNIKPGAVERVKKIRDYAFVHFSNREDAVEAMKALNGKVLDGSPIEVTLAKPVDKDSYVRYTRGTGGRGTMLQGEYTYSLGQVYDPTTTYLGAPVFYAPQTYAAIPSLHFPATKGHLSNRAIIRAPSVRGAAGVRGLGGRGYLAYTGLGRGYQVKGDKREDKLYDILPGMELTPMNPVTLKPQGIKLAPQILEEICQKNNWGQPVYQLHSAIGQDQRQLFLYKITIPALASQNPAIHPFTPPKLSAFVDEAKTYAAEYTLQTLGIPTDGGDGTMATAAAAATAFPGYAVPNATAPVSAAQLKQAVTLGQDLAAYTTYEVYPTFAVTARGDGYGTF

SEQ ID NO: 899380 - protein, 500 aa, Homo sapiens
MMMDFNGNNRGYAFVTFSNKVEAKNAIKQLNNYEIRNGRLLGVCASVDNCRLFVGGIPKTKKREEILSEMKKVTEGVVDVIVYPSAADKTKNRGFAFVEYESHRAAAMARRKLLPGRIQLWGHGIAVDWAEPEVEVDEDTMSSVKILYVRNLMLSTSEEMIEKEFNNIKPGAVERVKKIRDYAFVHFSNREDAVEAMKALNGKVLDGSPIEVTLAKPVDKDSYVRYTRGTGGRGTMLQGEYTYSLGQVYDPTTTYLGAPVFYAPQTYAAIPSLHFPATKGHLSNRAIIRAPSVRGAAGVRGLGGRGYLAYTGLGRGYQVKGDKREDKLYDILPGMELTPMNPVTLKPQGIKLAPQILEEICQKNNWGQPVYQLHSAIGQDQRQLFLYKITIPALASQNPAIHPFTPPKLSAFVDEAKTYAAEYTLQTLGIPTDGGDGTMATAAAAATAFPGYAVPNATAPVSAAQLKQAVTLGQDLAAYTTYEVYPTFAVTARGDGYGTF

SEQ ID NO: 899381 - protein, 109 aa, Homo sapiens
MPTLTDLLSSHPFTPPKLSAFVDEAKTYAAEYTLQTLGIPTDGGDGTMATAAAAATAFPGYAVPNATAPVSAAQLKQAVTLGQDLAAYTTYEVYPTFAVTARGDGYGTF

SEQ ID NO: 899382 - protein, 586 aa, Homo sapiens; identical to SEQ ID NO: 899377

SEQ ID NO: 899383 - protein, 594 aa, Homo sapiens
MEAVCLGTCPEPEASMSTAIPGLKKGNNALQSIILQTLLEKENGQRKYGGPPPGWDAAPPERGCEIFIGKLPRDLFEDELIPLCEKIGKIYEMRMMMDFNGNNRGYAFVTFSNKVEAKNAIKQLNNYEIRNGRLLGVCASVDNCRLFVGGIPKTKKREEILSEMKKVTEGVVDVIVYPSAADKTKNRGFAFVEYESHRAAAMARRKLLPGRIQLWGHGIAVDWAEPEVEVDEDTMSSVKILYVRNLMLSTSEEMIEKEFNNIKPGAVERVKKIRDYAFVHFSNREDAVEAMKALNGKVLDGSPIEVTLAKPVDKDSYVRYTRGTGGRGTMLQGEYTYSLGQVYDPTTTYLGAPVFYAPQTYAAIPSLHFPATKGHLSNRAIIRAPSVRGAAGVRGLGGRGYLAYTGLGRGYQVKGDKREDKLYDILPGMELTPMNPVTLKPQGIKLAPQILEEICQKNNWGQPVYQLHSAIGQDQRQLFLYKITIPALASQNPAIHPFTPPKLSAFVDEAKTYAAEYTLQTLGIPTDGGDGTMATAAAAATAFPGYAVPNATAPVSAAQLKQAVTLGQDLAAYTTYEVYPTFAVTARGDGYGTF

SEQ ID NO: 899384 - protein, 594 aa, Homo sapiens
MESNHKSGDGLSGTQKEAALRALVQRTGYSLVQENGQRKYGGPPPGWDAAPPERGCEIFIGKLPRDLFEDELIPLCEKIGKIYEMRMMMDFNGNNRGYAFVTFSNKVEAKNAIKQLNNYEIRNGRLLGVCASVDNCRLFVGGIPKTKKREEILSEMKKVTEGVVDVIVYPSAADKTKNRGFAFVEYESHRAAAMARRKLLPGRIQLWGHGIAVDWAEPEVEVDEDTMSSVKILYVRNLMLSTSEEMIEKEFNNIKPGAVERVKKIRDYAFVHFSNREDAVEAMKALNGKVLDGSPIEVTLAKPVDKDSYVRYTRGTGGRGTMLQGEYTYSLGQVYDPTTTYLGAPVFYAPQTYAAIPSLHFPATKGHLSNRAIIRAPSVREIYMNVPVGAAGVRGLGGRGYLAYTGLGRGYQVKGDKREDKLYDILPGMELTPMNPVTLKPQGIKLAPQILEEICQKNNWGQPVYQLHSAIGQDQRQLFLYKITIPALASQNPAIHPFTPPKLSAFVDEAKTYAAEYTLQTLGIPTDGGDGTMATAAAAATAFPGYAVPNATAPVSAAQLKQAVTLGQDLAAYTTYEVYPTFAVTARGDGYGTF

SEQ ID NO: 899385 - protein, 109 aa, Homo sapiens; identical to SEQ ID NO: 899381

SEQ ID NO: 899386 - protein, 87 aa, Homo sapiens
DEALEDEDNKKDDGISFSNQTGPAWAGSERDYTYEELLNRVFNIIFFVVFIFYSFIFLYYFILIWVLNILLLILGVKVWEFSSIRRQ

SEQ ID NO: 899387 - protein, 103 aa, Homo sapiens
DEALEDEDNKKDDGISFSNQTGPAWAGSERDYTYEELLNRVFNIMREKNPDMVAGEKRKFVMKPPQVVRVGTKKTSFVNFTDICKLLHRQPKHLLAFLLAELG

SEQ ID NO: 899388 - protein, 106 aa, Homo sapiens
MSVFVYHLVTCQCLCLCVPVSQHLCISVAHAVSLCAMVCQCLCVDGWPMSDPRQERPGWLDPAHLPSGSLALWVRVTEAFCGLKTGCSGSALRVLGPFHPLSPSGW

SEQ ID NO: 899389 - protein, 287 aa, Homo sapiens
MSPHPTALLGLVLCLAQTIHTQEEDLPRPSISAEPGTVIPLGSHVTFVCRGPVGVQTFRLERESRSTYNDTEDVSQASPSESEARFRIDSVSEGNAGPYRCIYYKPPKWSEQSDYLELLVKETSGGPDSPDTEPGSSAGPTQRPSDNSHNEHAPASQGLKAEHLYILIGVSVVFLFCLLLLVLFCLHRQNQIKQGPPRSKDEEQKPQQRPDLAVDVLERTADKATVNGLPEKDRETDTSALAAGSSQEVTYAQLDHWALTQRTARAVSPQSTKPMAESITYAAVARH

SEQ ID NO: 899390 - protein, 209 aa, Homo sapiens
MSPHPTALLGLVLCLAQTIHTQEEDLPRPSISAEPGTVIPLGSHVTFVCRGPVGVQTFRLERESRSTYNDTEDVSQASPSESEARFRIDSVSEGNAGPYRCIYYKPPKWSEQSDYLELLVKETSGGPDSPDTEPGSSAGPTQRPSDNSHNEHAPASQGLKAEHLYILIGVSVVFLFCLLLLVLFCLHRQNQIKQGPPRSKDEEQKPQQR

SEQ ID NO: 899391 - protein, 270 aa, Homo sapiens
MSPHPTALLGLVLCLAQTIHTQEEDLPRPSISAEPGTVIPLGSHVTFVCRGPVGVQTFRLERESRSTYNDTEDVSQASPSESEARFRIDSVSEGNAGPYRCIYYKPPKWSEQSDYLELLVKGPTQRPSDNSHNEHAPASQGLKAEHLYILIGVSVVFLFCLLLLVLFCLHRQNQIKQGPPRSKDEEQKPQQRPDLAVDVLERTADKATVNGLPEKDRETDTSALAAGSSQEVTYAQLDHWALTQRTARAVSPQSTKPMAESITYAAVARH

SEQ ID NO: 899392 - protein, 127 aa, Homo sapiens [sequence omitted]

SEQ ID NO: 899393 - protein, 67 aa, Homo sapiens
VTLRILLVDFKKDRETDTSALAAGSSQEVTYAQLDHWALTQRTARAVSPQSTKPMAESITYAAVARH

SEQ ID NO: 899394 - protein, 153 aa, Homo sapiens [sequence omitted]

SEQ ID NO: 899395 - protein, 122 aa, Homo sapiens
VIPLGSHVTFVCRGPVGVQTFRLERESRSTYNDTEDVSQASPSESEARFRIDSVSEGNAGPYRCIYYKPPKWSEQSDYLELLVKGEDVTWALPQSQLDPRACPQVPGPCPSCCPLWPTLSSS

SEQ ID NO: 899396 - protein, 263 aa, Homo sapiens
MSPHPTALLGLVLCLAQTIHTQEEDLPRPSISAEPGTVIPLGSHVTFVCRGPVGVQTFRLERESRSTYNDTEDVSQASPSESEARFRIDSVSEGNAGPYRCIYYKPPKWSEQSDYLELLVKETSGGPDSPDTEPGSSAGPTQRPSDNSHNEHAPASQGLKAEHLYILIGVSVVFLFCLLLLVLFCLHRQNQIKQGPPRMQRTRSKKATSKNAMTWLVDVLREEQRQRHQFMDFLRRERENGHLWPGCREFRGVTYAMVDPWAY

SEQ ID NO: 899397 - protein, 270 aa, Homo sapiens; identical to SEQ ID NO: 899391

SEQ ID NO: 899398 - protein, 209 aa, Homo sapiens; identical to SEQ ID NO: 899390

SEQ ID NO: 899399 - protein, 153 aa, Homo sapiens [sequence omitted]

SEQ ID NO: 899400 - protein, 119 aa, Homo sapiens
MSPHPTALLGLVLCLAQTIHTQEEDLPRPSISAEPGTVIPLGSHVTFVCRGPVGVQTFRLERESRSTYNDTRDFAVIICPADPKDLPRSQELALRLCYTHTAESQAQFSGLCFTPRINK

SEQ ID NO: 899401 - protein, 116 aa, Homo sapiens
VRPGGGAHVRRGVELAKVSGAGLAEVRKLGQGQGFDQLLEREGAAPARRGVPAWRRGPDGRGGAECSIPPGEKGIRVGQAASAATTYKALSQGIAGPRCLDPGCASPSLCSPWKGR

SEQ ID NO: 899402 - protein, 364 aa, Homo sapiens
MSDEGSRGSRLPLALPPASQGCSSGGGRPAAAGGGSSAGGSGNSRPPRNLQGLLQMAITAGSEEPDPPPEPMSEERRQWLQEAMSAAFRGQREEVEQMKSCLRVLSQPMPPTAGEAEQAADQQEREGALELLADLCENMDNAADFCQLSGMHLLVGRYLEAGAAGLRWRAAQLIGTCSQNVAAIQEQVLGLGALRKLLRLLDRDACDTVRVKALFAISCLVREQEAGLLQFLRLDGFSVLMRAMQQQVQKLKVKSAFLLQNLLVGHPEHKGTLCSMGMVQQLVALVRTEHSPFHEHVLGALCSLVTDFPQGVRECREPELGLEELLRHRCQLLQQHEEYQEELEFCEKLLQTCFSSPADDSMDR

SEQ ID NO: 899403 - protein, 364 aa, Homo sapiens; identical to SEQ ID NO: 899402

SEQ ID NO: 899404 - protein, 410 aa, Homo sapiens
MGGRRAPLKRRLLSRPSRIDPSGRQSCFSGDHLLPLTHSSLLHKRPMSDEGSRGSRLPLALPPASQGCSSGGGRPAAAGGGSSAGGSGNSRPPRNLQGLLQMAITAGSEEPDPPPEPMSEERRQWLQEAMSAAFRGQREEVEQMKSCLRVLSQPMPPTAGEAEQAADQQEREGALELLADLCENMDNAADFCQLSGMHLLVGRYLEAGAAGLRWRAAQLIGTCSQNVAAIQEQVLGLGALRKLLRLLDRDACDTVRVKALFAISCLVREQEAGLLQFLRLDGFSVLMRAMQQQVQKLKVKSAFLLQNLLVGHPEHKGTLCSMGMVQQLVALVRTEHSPFHEHVLGALCSLVTDFPQGVRECREPELGLEELLRHRCQLLQQHEEYQEELEFCEKLLQTCFSSPADDSMDR

SEQ ID NO: 899405 - protein, 309 aa, Homo sapiens [sequence omitted]

SEQ ID NO: 899406 - protein, 364 aa, Homo sapiens; identical to SEQ ID NO: 899402

SEQ ID NO: 899407 - protein, 364 aa, Homo sapiens; identical to SEQ ID NO: 899402

SEQ ID NO: 899408 - protein, 357 aa, Homo sapiens
MSDEGSRGSRLPLALPPASQGCSSGGGRPAAAGGGSSAGGSGNSRPPRNLQGLLQMAITAGSEEPDPPPEPMSEERRQWLQEAMSAAFRGQREEVEQMKSCLRVLSQPMPPTAGEAEQAADQQEREGALELLADLCENMDNAADFCQLSGMHLLVGRYLEAGAAGLRWRAAQLIGTCSQNVAAIQEQVLGLGALRKLLRLLDRDACDTVRVKALFAISCLVREQEAGLLQFLRLDGFSVLMRAMQQQVQKLKVKSAFLLQNLLVGHPEHKGTLCSMGMVQQLVALVRTEHSPFHEHVLGALCKGVRECREPELGLEELLRHRCQLLQQHEEYQEELEFCEKLLQTCFSSPADDSMDR

SEQ ID NO: 899409 - protein, 364 aa, Homo sapiens; identical to SEQ ID NO: 899402

SEQ ID NO: 899410 - protein, 452 aa, Homo sapiens
MACRSCVVGFSSLSSCEVTPVGSPRPGTSGWDSCRAPGPGFSSRSLTGCWSAGTISKVTVNPGLLVPLDVKLDPAVQQLKNQEKEEMKALNDKFASLIGKVQALEQRNQLLETRWSFLQGQDSAIFDLGHLYEEYQGRLQEELRKVSQERGQLEANLLQVLEKVEEFRIRYEDEISKRTDMEFTFVQLKKDLDAECLHRTELETKLKSLESFVELMKTIYEQELKDLAAQVKDVSVTVGMDSRCHIDLSGIVEEVKAQYDAVAARSLEEAEAYSRSQLEEQAARSAEYGSSLQSSRSEIADLNVRIQKLRSQILSVKSHCLKLEENIKTAEEQGELAFQDAKTKLAQLEAALQQAKQDMARQLRKYQELMNVKLALDIEIATYRKLVEGEEGRMDSPSATVVSAVQSRCKTAASRSGLSKAPSRKKKGSKGPVIKITEMSEKYFSQESEVSE

SEQ ID NO: 899411 - protein, 176 aa, Homo sapiens [sequence omitted]

SEQ ID NO: 899412 - protein, 422 aa, Homo sapiens
MACRSCVVGFSSLSSCEVTPVGSPRPGTSGWDSCRAPGPGFSSRSLTGCWSAGTISKVTVNPGLLVPLDVKLDPAVQQLKNQEKEEMKALNDKFASLIGKVQALEQRNQLLETRWSFLQGQDSAIFDLGHLYEEYQGRLQEELRKVSQERGQLEANLLQVLEKVEEFRIRYEDEISKRTDMEFTFVQLKKDLDAECLHRTELETKLKSLESFVELMKTIYEQELKDLAAQVKDVSVTVGMDSRCHIDLSGIVEEVKAQYDAVAARSLEEAEAYSRSQLEEQAARSAEYGSSLQSSRSEIADLNVRIQKLRSQILSVKSHCLKLEENIKTAEEQGELAFQDAKTKLAQLEAALQQAKQDMARQLRKYQELMNVKLALDIEIATYRKLVEGEEGRMDSPSATVVSAVQSRCKTAPSLPYPLCSL

SEQ ID NO: 899413 - protein, 422 aa, Homo sapiens; identical to SEQ ID NO: 899412

SEQ ID NO: 899414 - protein, 176 aa, Homo sapiens [sequence omitted]

SEQ ID NO: 899415 - protein, 422 aa, Homo sapiens; identical to SEQ ID NO: 899412

SEQ ID NO: 899416 - protein, 107 aa, Homo sapiens
MTERETPSQKIIIIIEKKRKDAPALLKSSQQKKGLPSTPCHSNRAFRSSVVLHGRIPGIPGPSPLSSLLYSGNGLSSPTFTCREGHVSLWLVLIEVENSRFLTSELP

SEQ ID NO: 899417 - protein, 137 aa, Homo sapiens
MSAHLQWMVVRNCSSFLIKRNKQTYSTEPNNLKARNSFRYNGLIHRKTVGVEPAADGKGVVVVIKRRSGQRKPATSYVRTTINRNARATLSSIRHMIRKNKYRPDLRMAAIRRASAILRSQKPVMVKRKRTRPTKSS

SEQ ID NO: 899418 - protein, 149 aa, Homo sapiens
MRRATLQQHQTHDPQEQVPPRPCAWQPSAGPSAILRSQKACDGEEEKRDPPHQELLSPRAPRANKGQLAFSPKQNKKGPGRSDNAPHIRPINQQLTISNDGRDVPRDSTYQGTKQHLVQKGSERDNPIIPQKVFPRRISGPLTIQASLS

SEQ ID NO: 899419 - protein, 137 aa, Homo sapiens; identical to SEQ ID NO: 899417

SEQ ID NO: 899420 - protein, 79 aa, Homo sapiens
PAATTTTTKFAAGRRNSFRYNGLIHRKTVGVEAGPADGEEVSWWSLSGDPGQRKPATSYVRTTINKKNASRHASAASDT

SEQ ID NO: 899421 - protein, 79 aa, Homo sapiens; identical to SEQ ID NO: 899420

SEQ ID NO: 899422 - protein, 137 aa, Homo sapiens; identical to SEQ ID NO: 899417

SEQ ID NO: 899423 - protein, 120 aa, Homo sapiens
MRRATLQQHQTHDPQEQVPPRPCAWQPSAGPSAILRSQKACDGEEEKRDPPHQELLSPRAPRANKGQLAFSPKKKKKKKKKNPGPGGGGGKNPGKSGGDHRVFGQRFLGPKKGKGKTGRG

SEQ ID NO: 899424 - protein, 133 aa, Homo sapiens
MGPRTSRIGATRKSSGRVSKTSERFPEYALGPLTEEFRIFPSVERIVGGSSRTSSSRLGGGDRQLLSCPPERKRKCVYGIKGVASPLAFLFPSQVAAAKGAAAMSAHLQWMVVRNCSSFLIKRNKQTYSTEPK

SEQ ID NO: 899425 - protein, 120 aa, Homo sapiens
KQAGTGRNFRDMQFLPLQRTDSPQDCGRGSRPSRRRRGVVVVIKRRSGPAEACHLLCADHHQQEKCVAPRFSSIRHMIRKNKYRPDLAHGSHPQGPAPSCAARKPVMVKRKSGTRPTKSS

SEQ ID NO: 899426 - protein, 137 aa, Homo sapiens; identical to SEQ ID NO: 899417

SEQ ID NO: 899427 - protein, 84 aa, Homo sapiens
VEMKPKNMIRYFRPTFPKRSNSFRYNGLIHRKTVGVEAGPADGEEVSWWSLSGDPGQRKPATSYVRTTINKKNASRHASAASDT

SEQ ID NO: 899428 - protein, 107 aa, Homo sapiens
RIPCSRSWNARLWAWSRPSRRRRGVVVVIKRRSGPAEACHLLCADHHQQEKCVAPRFSSIRHMIRKNKYRPDLAHGSHPQGPAPSCAARKPVMVKRKADPPTIQAPT

SEQ ID NO: 899429 - protein, 146 aa, Homo sapiens
  misc_feature (6)..(6): Xaa can be any naturally occurring amino acid
  misc_feature (19)..(19): Xaa can be any naturally occurring amino acid
PACAVXQREVPQRRCGAPXVGVRPCHGTQRDGVVGDDMDVGDALFQQQVFGFEASGHVGRRQGKRKGADPHLASRPHDLRLNAAGGCRPARGSSLRCRGWPLQAVHRARYLAMSRAMSAHLQWMVVRNCSSFLIKRNKQTYSTEPK

SEQ ID NO: 899430 - protein, 137 aa, Homo sapiens; identical to SEQ ID NO: 899417

SEQ ID NO: 899431 - protein, 120 aa, Homo sapiens
MRRATLQQHQTHDPQEQVPPRPCAWQPSAGPSAILRSQKACDGEEEKRDPPHQELLSPRAPRANKGQLAFSPASTGPPFLKRSGELWPCVLSFRPCHQNSACHLVHLEVMSMAGHAGGVG

SEQ ID NO: 899432 - protein, 66 aa, Homo sapiens
GSLIKLILFPPPPLFPSQVAALSVSGQVAAAEGAAAMSAHLQWMVVRNCSSFLIKRNKQTYSTEPK

SEQ ID NO: 899433 - protein, 120 aa, Homo sapiens; identical to SEQ ID NO: 899431

SEQ ID NO: 899434 - protein, 137 aa, Homo sapiens; identical to SEQ ID NO: 899417

SEQ ID NO: 899435 - protein, 137 aa, Homo sapiens; identical to SEQ ID NO: 899417

SEQ ID NO: 899436 - protein, 104 aa, Homo sapiens
MRRATLQQHQTHDPQEQVPPRPCAWQPSAGPSAILRSQKACDGEEEKRDPPHQELLSPRAPRANKGQLAFSPKKKSKSKQFKSGGGAQNQIGPKVSPFTFSVEG

SEQ ID NO: 899437 - protein, 149 aa, Homo sapiens; identical to SEQ ID NO: 899418

SEQ ID NO: 899438 - protein, 104 aa, Homo sapiens
MRRATLQQHQTHDPQEQVPPRPCAWQPSAGPSAILRSQKACDGEEEKRDPPHQELLSPRAPRANKGQLAFSPKTKKKKKKKKKKKKTRRRSNTCGRGAREREVQ

SEQ ID NO: 899439 - protein, 70 aa, Homo sapiens
MRRATLQQHQTHDPQEQVPPRPCAWQPSAGPSAILRSQKACDGEEEKRDPPHQELLSPRAPRAISRVPIP

SEQ ID NO: 899440 - protein, 33 aa, Homo sapiens
MGGGGEKRRKREEGGKRFGDPHFEAKGGREGGH

SEQ ID NO: 899441 - protein, 120 aa, Homo sapiens
MRRATLQQHQTHDPQEQVPPRPCAWQPSAGPSAILRSQKACDGEEENAGDPAPQPKGASLGRPPLGPPKEGKLKGSRLGLFLKNKQNKEKEQKKRHDQEKNHRAAAQKMGGPPINPPGRA

SEQ ID NO: 899442 - protein, 160 aa, Homo sapiens
MRRATLQQHQTHDPQEQVPPRPCAWQPSAGPSAILRSQKACDGEEEKRDPPHQELLSPRAPRANKGQLAFSPKKEKRPGRFEEMRVTQKSTERAHPEAALPEVGEGDRADFQNRPEVQSAAIGALQRLTKRPGGLPKIHPGAPRREPHGQNQGPDRETKR

SEQ ID NO: 899443 - protein, 75 aa, Homo sapiens
  misc_feature (58)..(58): Xaa can be any naturally occurring amino acid
MIRKNKYRPDLAHGSHPQGPAQFKPHKLQPVGEGSFILDAPALCPATIKTRATCPFFXLECGPCCPQKASFTHTF

SEQ ID NO: 899444 - protein, 109 aa, Homo sapiens
MIRKNKYRPDLAHGELGFGDQAWGDWPVLWGRASHYWLQYGLERDGFLLFSLLPTPSIGLGGGLWSVWAEPCSAPPPPGSHPQGPAPSCAARKPVMVKRKSGTRPTKSS

SEQ ID NO: 899445 - protein, 120 aa, Homo sapiens; identical to SEQ ID NO: 899431

SEQ ID NO: 899446 - protein, 120 aa, Homo sapiens; identical to SEQ ID NO: 899431

SEQ ID NO: 899447 - protein, 120 aa, Homo sapiens; identical to SEQ ID NO: 899431

SEQ ID NO: 899448 - protein, 120 aa, Homo sapiens; identical to SEQ ID NO: 899431

SEQ ID NO: 899449 - protein, 74 aa, Homo sapiens
KTPQQPHPQVHPITARYEAGGGAAAKGAAAMSAHLQWMVVRNCSSFLIKRNKQTYSTEAAIRRAERHPAQPESL

SEQ ID NO: 899450 - protein, 108 aa, Homo sapiens
MQSAALDAVSGVGCSQRRWMQSAALDAVRGVGCSQRRWMQSAAWDAVSGVGCSQSAALDAVSRRRWMQSVGGVGCSQAALDAVSGVGCSQRRWMQSAALDAVSGVGQS

SEQ ID NO: 899451 - protein, 192 aa, Homo sapiens
  misc_feature (141)..(141): Xaa can be any naturally occurring amino acid
MRRATLQQHQTHDPQEQVPPRPCAWQPSAGPSAILRSQKACDGEEEKRDPPHQELLSPRAPRANKGQLAFSPKKKKKKKKPRGIKCGGGKKGTEGARGQRRFPGPKFSGPTGGKTGRDPQKGGRNKFRKTPGNLASGAREXPPDYTPLITTESGDKDLLQTNPARNRGPSKDAAHRSEHEQPKHQSRTTQTV

SEQ ID NO: 899452 - protein, 183 aa, Homo sapiens
MCGPPSTRKMRRATLQQHQTHDPQEQVPPRPCAWQPSAGPSAILRSQKACDGEEEKRDPPHQELLSPRAPRANKGQLAFSPKKKKKKKKKKKKRGVFGGGGKTGLIKSDQLVPNVFFATRVFLVNRREITGAPQKESAYKFRNRALPVYCFHAQHKDGKSTNDTENGTITCVHTMEHNHTTEQ

SEQ ID NO: 899453 - protein, 93 aa, Homo sapiens
MLPERGGDAPESSRAPRTLENKERGAPQRERQDQHKAADQTGSAKTTQRRGKKKCRHRRTSGSEPTPPGGGPNNRATPTPPEDKTPTDETNTR

SEQ ID NO: 899454 - protein, 128 aa, Homo sapiens
MCGPPSTRKMRRATLQQHQTHDPQEQVPPRPCAWQPSAGPSAILRSQKACDGEEEKRDPPHQELLSPRAPRANKGQLAFSPKKKRKKPKETTKKKGGAPKKNPRGGPKDRATPTVVGTKGGRQKGGAK

SEQ ID NO: 899455 - protein, 105 aa, Homo sapiens
LLLLLLLLNSRPVDSRPSRRRRGVVVVIKRRSGPAEACHLLCADHHQQEKCVAPRFSSIRHMIRKNKYRPDLAHGSHPQGPAPSCAARKPVMVKRKSGTRPTKSS

SEQ ID NO: 899456 - protein, 70 aa, Homo sapiens; identical to SEQ ID NO: 899439

SEQ ID NO: 899457 - protein, 146 aa, Homo sapiens; identical to SEQ ID NO: 899429
  misc_feature (6)..(6): Xaa can be any naturally occurring amino acid
  misc_feature (19)..(19): Xaa can be any naturally occurring amino acid

SEQ ID NO: 899458 - protein, 120 aa, Homo sapiens; identical to SEQ ID NO: 899441

SEQ ID NO: 899459 - protein, 120 aa, Homo sapiens; identical to SEQ ID NO: 899431

SEQ ID NO: 899460 - protein, 409 aa, Homo sapiens
MCGPPSTRKMRRATLQQHQTHDPQEQVPPRPCAWQPSAGPSAILRSQKACDGEEEKRDPPHQELLSPRAPRANKGQLAFSPKKKKKKKKKKKKKRKKNERKKYHRGEGRLKEEGRRGSATEGETRENKEEGGPHTDEGSSGAGERGGKKRNRGAEQEHEELETGVKDDAHRAEAARHERGGGRKERREGRENTNNGARESGGRQTQTVVRPEGQQREGDDLCGIKTKQGGQARENVKEAKIDRKKDGRRGDTTSKMREAEQRPEVGGSSDRLIFIEAPHAPGARKTPRQERERRRGRRGKHENDRCPGEAPTRRALTRARATAQRRRATRYRDEDEQQGLRDKERETGGEGKYILEAQDDTPEQAHRAPSRTELLSSNLHAVAQCGQGNNDEERSRQPPSRHTTDGVDS

SEQ ID NO: 899461 - protein, 160 aa, Homo sapiens; identical to SEQ ID NO: 899442

SEQ ID NO: 899462 - protein, 34 aa, Homo sapiens
MALALRMAAMRRSRRYLFLRIMCLMLLSVARAFL

SEQ ID NO: 899463 - protein, 68 aa, Homo sapiens
MRRATLQQHQTHDPQEQVPPRPCAWQPSAGPSAILRSQKACDGEEEKRDPPHQELLSPRAPRANKVSW

SEQ ID NO: 899464 - protein, 41 aa, Homo sapiens
MIRKNKYRPDLAHGSHPQGPAPSCAARKPVMVKRKFKARQS

SEQ ID NO: 899465 - protein, 92 aa, Homo sapiens
MRRATLQQHQTHDPQEQVPPRPCAWQPSAGPSAILRSQKACDGEEEKRDPPHQELLSPRAPRANKGQLAFSPKEKNQQNGFPKKIQRKKSSE

SEQ ID NO: 899466 - protein, 116 aa, Homo sapiens
MRRATLQQHQTHDPQEQVPPRPCAWQPSAGPSAILRSQKACDGEEEKRDPPHQELLSPRAPRANKGQLAFSPVKKKIKTRGGARFPIAPIGSPIPFTGRRFPTAGWENPGGPHFNP

SEQ ID NO: 899467 - protein, 34 aa, Homo sapiens; identical to SEQ ID NO: 899462

SEQ ID NO: 899468 - protein, 120 aa, Homo sapiens; identical to SEQ ID NO: 899431

SEQ ID NO: 899469 - protein, 66 aa, Homo sapiens; identical to SEQ ID NO: 899432

SEQ ID NO: 899470 - protein, 55 aa, Homo sapiens
MIRKNKYRPDLAHEHIRRHTILRSQKACDGEEETEPTPPRDKENPATRKIKSATS

SEQ ID NO: 899471 - protein, 137 aa, Homo sapiens; identical to SEQ ID NO: 899417

SEQ ID NO: 899472 - protein, 137 aa, Homo sapiens; identical to SEQ ID NO: 899417

SEQ ID NO: 899473 - protein, 137 aa, Homo sapiens; identical to SEQ ID NO: 899417

SEQ ID NO: 899474 - protein, 137 aa, Homo sapiens; identical to SEQ ID NO: 899417

SEQ ID NO: 899475 - protein, 137 aa, Homo sapiens; identical to SEQ ID NO: 899417

SEQ ID NO: 899476 - protein, 137 aa, Homo sapiens; identical to SEQ ID NO: 899417

SEQ ID NO: 899477 - protein, 382 aa, Homo sapiens
WYRPGVRDEVSGTVPTTVRFVDSLICNSSRSFMDLKALLSSLNDFASLSFAESWDNVGLLVEPSPPHTVNTLFLTNDLTEEVMEEVLQKKADLILSYHPPIFRPMKRITWNTWKERLVIRALENRVGIYSPHTAYDAAPQGVNNWLAKGLGACTSRPIHPSKAPNYPTEGNHRVEFNVNYTQDLDKVMSAVKGIDGVSVTSFSARTGNEEQTRINLNCTQKALMQVVDFLSRNKQLYQKTEILSLEKPLLLHTGMGRLCTLDESVSLATMIDRIKRHLKLSHIRLALGVGRTLESQVKVVALCAGSGSSVLQGVEADLYLTGEMSHHDTLDAASQGINVILCEHSNTERGFLSDLRDMLDSHLENKINIILSETDRDPLQVV

SEQ ID NO: 899478 - protein, 377 aa, Homo sapiens
MLSSCVRPVPTTVRFVDSLICNSSRSFMDLKALLSSLNDFASLSFAESWDNVGLLVEPSPPHTVNTLFLTNDLTEEVMEEVLQKKADLILSYHPPIFRPMKRITWNTWKERLVIRALENRVGIYSPHTAYDAAPQGVNNWLAKGLGACTSRPIHPSKAPNYPTEGNHRVEFNVNYTQDLDKVMSAVKGIDGVSVTSFSARTGNEEQTRINLNCTQKALMQVVDFLSRNKQLYQKTEILSLEKPLLLHTGMGRLCTLDESVSLATMIDRIKRHLKLSHIRLALGVGRTLESQVKVVALCAGSGSSVLQGVEADLYLTGEMSHHDTLDAASQGINVILCEHSNTERGFLSDLRDMLDSHLENKINIILSETDRDPLQVV

SEQ ID NO: 899479 - protein, 377 aa, Homo sapiens; identical to SEQ ID NO: 899478

SEQ ID NO: 899480 - protein, 377 aa, Homo sapiens; identical to SEQ ID NO: 899478

SEQ ID NO: 899481 - protein, 285 aa, Homo sapiens
MLSSCVRPVPTTVRFVDSLICNSSRSFMDLKALLSSLNDFASLSFAESWDNVGLLVEPSPPHTVNTLFLTNDLTEEVMEEVLQKKADLILSYHPPIFRPMKRITWNTWKERLVIRALENRVGIYSPHTAYDAAPQGVNNWLAKGLGACTSRPIHPSKAPNYPTEGNHRVEFNVNYTQDLDKVMSAVKGIDGVSVTSFSARTGNEEQTRINLNCTQKALMQVVDFLSRNKQLYQKTEILSLEKSLKSKSWPCVLVLGAAFCRVLRLTFTSQVRCPIMILWMLLPKE

SEQ ID NO: 899482 - protein, 274 aa, Homo sapiens
MLSSCVRPVPTTVRFVDSLICNSSRSFMDLKALLSSLNDFASLSFAESWDNVGLLVEPSPPHTVNTLFLTNDLTEEVMEEVLQKKADLILSYHPPIFRPMKRITWNTWKERLVIRALENRVGIYSPHTAYDAAPQGVNNWLAKGLGACTSRPIHPSKAPNYPTEGNHRVEFNVNYTQDLDKVMSAVKGIDGVSVTSFSARTGNEEQTRINLNCTQKALMQVVDFLSRNKQLYQKTEILSLEKPLLLHTGMGRLCTLDESVSLATMIDRIYLIFA

SEQ ID NO: 899483 - protein, 350 aa, Homo sapiens
MDLKALLSSLNDFASLSFAESWDNVGLLVEPSPPHTVNTLFLTNDLTEEVMEEVLQKKADLILSYHPPIFRPMKRITWNTWKERLVIRALENRVGIYSPHTAYDAAPQGVNNWLAKGLGACTSRPIHPSKAPNYPTEGNHRVEFNVNYTQDLDKVMSAVKGIDGVSVTSFSARTGNEEQTRINLNCTQKALMQVVDFLSRNKQLYQKTEILSLEKPLLLHTGMGRLCTLDESVSLATMIDRIKRHLKLSHIRLALGVGRTLESQVKVVALCAGSGSSVLQGVEADLYLTGEMSHHDTLDAASQGINVILCEHSNTERGFLSDLRDMLDSHLENKINIILSETDRDPLQVV

SEQ ID NO: 899484 - protein, 377 aa, Homo sapiens; identical to SEQ ID NO: 899478

SEQ ID NO: 899485 - protein, 350 aa, Homo sapiens; identical to SEQ ID NO: 899483

SEQ ID NO: 899486 - protein, 390 aa, Homo sapiens
MLSSCVRPVPTTVRFVDSLICNSSRSFMDLKALLSSLNDFASLSFAESWDNVGLLVEPSPPHTVNTLFLTNDLTEEVMEEVLQKKADLILSYHPPIFRPMKRITWNTWKERLVIRALENRVGIYSPHTAYDAAPQGVNNWLAKGLGACTSRPIHPSKAPNYPTEGNHRVEFNVNYTQDLDKVMSAVKGIDGVSVTSFSARYNLFFSFFVCIYWTGNEEQTRINLNCTQKALMQVVDFLSRNKQLYQKTEILSLEKPLLLHTGMGRLCTLDESVSLATMIDRIKRHLKLSHIRLALGVGRTLESQVKVVALCAGSGSSVLQGVEADLYLTGEMSHHDTLDAASQGINVILCEHSNTERGFLSDLRDMLDSHLENKINIILSETDRDPLQVV

SEQ ID NO: 899487 - protein, 337 aa, Homo sapiens
MLSSCVRPVPTTVRFVDSLICNSSRSFMDLKALLSSLNDFASLSFAESWDNVGLLVEPSPPHTVNTLFLTNDLTEEVMEEVLQKKADLILSYHPPIFRPMKRITWNTWKERLVIRALENRVGIYSPHTAYDAAPQGVNNWLAKGLGACTSRPIHPSKAPNYPTEGNHRVEFNVNYTQDLDKVMSAVKGIDGVSVTSFSARTGNEEQTRINLNCTQKALMQVVDFLSRNKQLYQKTEILSLEKPLLLHTGMGRLCTLDESVSLATMIDRIKRHLKLSHIRLALGVGRTLESQVKVVALCAGSGSSVLQGVEADLYLTDNCRNIRITHSTNQLDANLNL

SEQ ID NO: 899488 - protein, 260 aa, Homo sapiens
MLSSCVRPVPTTVRFVDSLICNSSRSFMDLKALLSSLNDFASLSFAESWDNVGLLVEPSPPHTVNTLFLTNDLTEEVMEEVLQKKADLILSYHPPIFRPMKRITWNTWKERLVIRALENRVGIYSPHTAYDAAPQGVNNWLAKGLGACTSRPIHPSKAPNYPTEGNHRVEFNVNYTQDLDKVMSAVKGIDGVSVTSFSARTGNEEQTRINLNCTQKALMQVVDFLSRNKQLYQKTEILSLEKEGNKNILYLILKYCAHIF

SEQ ID NO: 899489 - protein, 313 aa, Homo sapiens
MDTSTNLDIGAQLIVEECPSTYSLTGMPDIKIEHPLDPNSEEGSAQGVAMGMKFILPNRFDMNVCSRFVKSLNEEDSKNIQDQVNSDLEVASVLFKAECNIHTSPSPGIQVRHVYTPSTTKHFSPIKQSTTLTNKHRGNEVSTTPLLANSLSVHQLAAQGEMLYLATRIEQENVINHTDEEGFTPLMWAAAHGQIAVVEFLLQNGADPQLLGKGRESALSLACSKGYTDIVKMLLDCGVDVNEYDWNGGTPLLYAVHGNHVKCVKMLLESGADPTIETDSGYNSMDLAVALGYRSVQQVIESHLLKLLQNIKE

SEQ ID NO: 899490 - protein, 179 aa, Homo sapiens [sequence omitted]

SEQ ID NO: 899491 - protein, 313 aa, Homo sapiens; identical to SEQ ID NO: 899489

SEQ ID NO: 899492 - protein, 116 aa, Homo sapiens
MDTSTNLDIGAQLIVEECPSTYSLTGMPDIKIEHPLDPNSEEGSAQGVAMGMKFILPNRFDMNVCSRFVKSLNEEDSKNIQDHLELLTSGDPPALASQSAGVTGVSTMPSLDFFFF

SEQ ID NO: 899493 - protein, 116 aa, Homo sapiens; identical to SEQ ID NO: 899492

SEQ ID NO: 899494 - protein, 1554 aa, Homo sapiens [sequence omitted]

SEQ ID NO: 899495 - protein, 107 aa, Homo sapiens
MVSFSMYMSFPGMDSNWWVLKSDFRLPTEEEIRAMVSPEQCCAYYSMIAAEQRLKDAGYGEKSFFAPEEETQLPEKKRNYLRRNATTEKKRNYLRRNATTEKKRNYL

SEQ ID NO: 899496 - protein, 2032 aa, Homo sapiens
MGPGCDLLLRTAATITAAAIMSDTDSDEDSAGGGPFSLAGFLFGNINGAGQLEGESVLDDECKKHLAGLGALGLGSLITELTANEELTGTDGALVNDEGWVRSTEDAVDYSDINEVAEDESRRYQQTMGSLQPLCHSDYDEDDYDADCEDIDCKLMPPPPPPPGPMKKDKDQDSITGVSENGEGIILPSIIAPSSLASEKVDFSSSSDSESEMGPQEATQAESEDGKLTLPLAGIMQHDATKLLPSVTELFPEFRPGKVLRFLRLFGPGKNVPSVWRSARRKRKKKHRELIQEEQIQEVECSVESEVSQKSLWNYDYAPPPPPEQCLSDDEVGKIETCRLRPMRGTNEFNEFSLIYVYIVNNTIADRICANFQMSNHGFNLSGCPFPIVKEKCLVGYAGMRGVDGDMLLNEEGLIDRWNVLRYISIVYILTPGKSSSVSLSSPPDCYTLYSLRTSGIRKFSLLYFFLLLQITMMAPVESKFSQSTGDIDKVTDTKPRVAEWRYGPARLWYDMLGVPEDGSGFDYGFKLRKTEHEPVIKSRMIEEFRKLEENNGTDLLADENFLMVTQLHWEDDIIWDGEDVKHKGTKPQRASLAGWLPSSMTRNAMAYNVQQGFAATLDDDKPWYSIFPIDNEDLVYGRWEDNIIWDAQAMPRLLEPPVLTLDPNDENLILEIPDEKEEATSNSPSKESKKESSLKKSRILLGKTGVIKEEPQQNMSQPEVKDPWNLSNDEYYYPKQQGLRGTFGGNIIQHSIPAVELRQPFFPTHMGPIKLRQFHRPPLKKYSFGALSQPGPHSVQPLLKHIKKKAKMREQERQASGGGEMFFMRTPQDLTGKDGDLILAEYSEENGPLMMQVGMATKIKNYYKRKPGKDPGAPDCKYGETVYCHTSPFLGSLHPGQLLQAFENNLFRAPIYLHKMPETDFLIIRTRQGYYIRELVDIFVVGQQCPLFEVPGPNSKRANTHIRDFLQVFIYRLFWKSKDRPRRIRMEDIKKAFPSHSESSIRKRLKLCADFKRTGMDSNWWVLKSDFRLPTEEEIRAMVSPEQCCAYYSMIAAEQRLKDAGYGEKSFFAPEEENEEDFQMKIDDEVRTAPWNTTRAFIAAMKGKCLLEVTGVADPTGCGEGFSYVKIPNKPTQQKDDKEPQPVKKTVTGTDADLRRLSLKNAKQLLRKFGVPEEEIKKLSRWEVIDVVRTMSTEQARSGEGPMSKFARGSRFSVAEHQERYKEECQRIFDLQNKVLSSTEVLSTDTDSSSAEDSDFEEMGKNIENMLQNKKTSSQLSREREEQERKELQRMLLAAGSAASGNNHRDDDTASVTSLNSSATGRCLKIYRTFRDEEGKEYVRCETVRKPAVIDAYVRIRTTKDEEFIRKFALFDEQHREEMRKERRRIQEQLRRLKRNQEKEKLKGPPEKKPKKMKERPDLKLKCGACGAIGHMRTNKFCPLYYQTNAPPSNPVAMTEEQEEELEKTVIHNDNEELIKVEGTKIVLGKQLIESADEVRRKSLVLKFPKQQLPPKKKRRVGTTVHCDYLNRPHKSIHRRRTDPMVTLSSILESIINDMRDLPNTYPFHTPVNAKVVKDYYKIITRPMDLQTLRENVRKRLYPSREEFREHLELIVKNSATYNGPKHSLTQISQSMLDLCDEKLKEKEDKLARLEKAINPLLDDDDQVAFSFILDNIVTQKMMAVPDSWPFHHPVNKKFVPDYYKVIVNPMDLETIRKNISKHKYQSRESFLDDVNLILANSVKYNGPESQYTKTAQEIVNVCYQTLTEYDEHLTQLEKDICTAKEAALEEAELESLDPMTPGPYTPQPPDLYDTNTSLSMSRDASVFQDESNMSVLDIPSATPEKQVTQEGEDGDGDLADEEEGTVQQPQASVLYEDLLMSEGEDDEEDAGSDEEGDNPFSAIQLSESGSDSDVGSGGIRPKQPRMLQENTRMDMENEESMMSYEGDGGEASHGLEDSNISYGSYEEPDPKSNTQDTSFSSIGGYEVSEEEEDEEEEEQRSGPSVLSQVHLSEDEEDSEDFHSIAGDSDLDSDE

SEQ ID NO: 899497 - protein, 1116 aa, Homo sapiens
MPETDFLIIRTRQGYYIRELVDIFVVGQQCPLFEVPGPNSKRANTHIRDFLQVFIYRLFWKSKDRPRRIRMEDIKKAFPSHSESSIRKRLKLCADFKRTGMDSNWWVLKSDFRLPTEEEIRAMVSPEQCCAYYSMIAAEQRLKDAGYGEKSFFAPEEENEEDFQMKIDDEVRTAPWNTTRAFIAAMKGKCLLEVTGVADPTGCGEGFSYVKIPNKPTQQKDDKEPQPVKKTVTGTDADLRRLSLKNAKQLLRKFGVPEEEIKKLSRWEVIDVVRTMSTEQARSGEGPMSKFARGSRFSVAEHQERYKEECQRIFDLQNKVLSSTEVLSTDTDSSSAEDSDFEEMGKNIENMLQNKKTSSQLSREREEQERKELQRMLLAAGSAASGNNHRDDDTASVTSLNSSATGRCLKIYRTFRDEEGKEYVRCETVRKPAVIDAYVRIRTTKDEEFIRKFALFDEQHREEMRKERRRIQEQLRRLKRNQEKEKLKGPPEKKPKKMKERPDLKLKCGACGAIGHMRTNKFCPLYYQTNAPPSNPVAMTEEQEEELEKTVIHNDNEELIKVEGTKIVLGKQLIESADEVRRKSLVLKFPKQQLPPKKKRRVGTTVHCDYLNRPHKSIHRRRTDPMVTLSSILESIINDMRDLPNTYPFHTPVNAKVVKDYYKIITRPMDLQTLRENVRKRLYPSREEFREHLELIVKNSATYNGPKHSLTQISQSMLDLCDEKLKEKEDKLARLEKAINPLLDDDDQVAFSFILDNIVTQKMMAVPDSWPFHHPVNKKFVPDYYKVIVNPMDLETIRKNISKHKYQSRESFLDDVNLILANSVKYNGPESQYTKTAQEIVNVCYQTLTEYDEHLTQLEKDICTAKEAALEEAELESLDPMTPGPYTPQPPDLYDTNTSLSMSRDASVFQDESNMSVLDIPSATPEKQVTQEGEDGDGDLADEEEGTVQQPQASVLYEDLLMSEGEDDEEDAGSDEEGDNPFSAIQLSESGSDSDVGSGGIRPKQPRMLQENTRMDMENEESMMSYEGDGGEASHGLEDSNISYGSYEEPDPKSNTQDTSFSSIGGYEVSEEEEDEEEEEQRSGPSVLSQVHLSEDEEDSEDFHSIAGDSDLDSDE

SEQ ID NO: 899498 - protein, 1959 aa, Homo sapiens
MGPGCDLLLRTAATITAAAIMSDTDSDEDSAGGGPFSLAGFLFGNINGAGQLEGESVLDDECKKHLAGLGALGLGSLITELTANEELTGTDGALVNDEGWVRSTEDAVDYSDINEVAEDESRRYQQTMGSLQPLCHSDYDEDDYDADCEDIDCKLMPPPPPPPGPMKKDKDQDSITGVSENGEGIILPSIIAPSSLASEKVDFSSSSDSESEMGPQEATQAESEDGKLTLPLAGIMQHDATKLLPSVTELFPEFRPGKVLRFLRLFGPGKNVPSVWRSARRKRKKKHRELIQEEQIQEVECSVESEVSQKSLWNYDYAPPPPPEQCLSDDEVGKIETCRLRPMRGTNEFNEFSLIYVYIVNNTIADRICANFQMSNHGFNLSGCPFPIVKEKCLVGYAGMRGVDGDMLLNEEGLIDRWNVLRYISIVYILTPGKSSSVSLSSPPDCYTLYSLRTSGIRKFSLLYFFLLLQITMMAPVESKFSQSTGDIDKVTDTKPRVAEWRYGPARLWYDMLGVPEDGSGFDYGFKLRKTEHEPVIKSRMIEEFRKLEENNGTDLLADENFLMVTQLHWEDDIIWDGEDVKHKGTKPQRASLAGWLPSSMTRNAMAYNVQQGFAATLDDDKPWYSIFPIDNEDLVYGRWEDNIIWDAQAMPRLLEPPVLTLDPNDENLILEIPDEKEEATSNSPSKESKKESSLKKSRILLGKTGVIKEEPQQNMSQPEVKDPWNLSNDEYYYPKQQGLRGTFGGNIIQHSIPAVELRQPFFPTHMGPIKLRQFHRPPLKKYSFGALSQPGPHSVQPLLKHIKKKAKMREQERQASGGGEMFFMRTPQDLTGKDGDLILAEYSEENGPLMMQVGMATKIKNYYKRKPGKDPGAPDCKYGETVYCHTSPFLGSLHPGQLLQAFENNLFRAPIYLHKMPETDFLIIRTRQGYYIRELVDIFVVGQQCPLFEVPGPNSKRANTHIRDFLQVFIYRLFWKSKDRPRRIRMEDIKKAFPSHSESSIRKRLKLCADFKRTGMDSNWWVLKSDFRLPTEEEIRAMVSPEQCCAYYSMIAAEQRLKDAGYGEKSFFAPEEENEEDFQMKIDDEVRTAPWNTTRAFIAAMKGKCLLEVTGVADPTGCGEGFSYVKIPNKPTQQKDDKEPQPVKKTVTGTDADLRRLSLKNAKQLLRKFGVPEEEIKKLSRWEVIDVVRTMSTEQARSGEGPMSKFARGSRFSVAEHQERYKEECQRIFDLQNKVLSSTEVLSTDTDSSSAEDSDFEEMGKNIENMLQNKKTSSQLSREREEQERKELQRMLLAAGSAASGNNHRDDDTASVTSLNSSATGRCLKIYRTFRDEEGKEYVRCETVRKPAVIDAYVRIRTTKDEEFIRKFALFDEQHREEMRKERRRIQEQLRRLKRNQEKEKLKGPPEKKPKKMKERPDLKLKCGACGAIGHMRTNKFCPLYYQTNAPPSNPVAMTEEQEEELEKTVIHNDNEELIKVEGTKIVLGKQLIESADEVRRKSLVLKFPKQQLPPKKKRRVGTTVHCDYLNRPHKSIHRRRTDPMVTLSSILESIINDMRDLPNTYPFHTPVNAKVVKDYYKIITRPMDLQTLRENVRKRLYPSREEFREHLELIVKNSATYNGPKHSLTQISQSMLDLCDEKLKEKEDKLARLEKAINPLLDDDDQVAFSFILDNIVTQKMMAVPDSWPFHHPVNKKFVPDYYKVIVNPMDLETIRKNISKHKYQSRESFLDDVNLILANSVKYNGPESQYTKTAQEIVNVCYQTLTEYDEHLTQLEKDICTAKEAALEEAELESLDPMTPGPYTPQPPDLYDTNTSLSMSRDASVFQDESNMSVLDIPSATPEKQVTQEGEDGDGDLADEEEGTVQQPQASVLYEDLLMSEGEDDEEDAGSDEEGDNPFSAIQLSESGSDSDVGSGGIRPKQPRMLQENTRMDMENEESMMSYEGDGGEASHGLEDSNIR

SEQ ID NO: 899499 - protein, 2027 aa, Homo sapiens
MGPGCDLLLRTAATITAAAIMSDTDSDEDSAGGGPFSLAGFLFGNINGAGQLEGESVLDDECKKHLAGLGALGLGSLITELTANEELTGTDGALVNDEGWVRSTEDAVDYSDINEVAEDESRRYQQTMGSLQPLCHSDYDEDDYDADCEDIDCKLMPPPPPPPGPMKKDKDQDSITGVSENGEGIILPSIIAPSSLASEKVDFSSSSDSESEMGPQEATQAESEDGKLTLPLAGIMQHDATKLLPSVTELFPEFRPGKVLRFLRLFGPGKNVPSVWRSARRKRKKKHRELIQEEQIQEVECSVESEVSQKSLWNYDYAPPPPPEQCLSDDEVGKIETCRLRPMRGTNEFNEFSLIYVYIVNNTIADRICANFQMSNHGFNLSGCPFPIVKEKCLVGYAGMRGVDGDMLLNEEGLIDRWNVLRYISIVYILTPGKSSSVSLSSPPDCYTLYSLRTSGIRKFSLLYFFLLLQITMMAPVESKFSQSTGDIDKVTDTKPRVAEWRYGPARLWYDMLGVPEDGSGFDYGFKLRKTEHEPVIKSRMIEEFRKLEENNGTDLLADENFLMVTQLHWEDDIIWDGEDVKHKGTKPQRASLAGWLPSSMTRNAMAYNVQQGFAATLDDDKPWYSIFPIDNEDLVYGRWEDNIIWDAQAMPRLLEPPVLTLDPNDENLILEIPDEKEEATSNSPSKESKKESSLKKSRILLGKTGVIKEEPQQNMSQPEVKDPWNLSNDEYYYPKQQGLRGTFGGNIIQHSIPAVELRQPFFPTHMGPIKLRQFHRPPLKKYSFGALSQPGPHSVQPLLKHIKKKAKMREQERQASGGGEMFFMRTPQDLTGKDGDLILAEYSEENGPLMMQVGMATKIKNYYKRKPGKDPGAPDCKYGETVYCHTSPFLGSLHPGQLLQAFENNLFRAPIYLHKMPETDFLIIRTRQGYYIRELVDIFVVGQQCPLFEVPGPNSKRANTHIRDFLQVFIYRLFWKSKDRPRRIRMEDIKKAFPSHSESSIRKRLKLCADFKRTGMDSNWWVLKSDFRLPTEEEIRAMVSPEQCCAYYSMIAAEQRLKDAGYGEKSFFAPEEENEEDFQMKIDDEVRTAPWNTTRAFIAAMKGKCLLEVTGVADPTGCGEGFSYVKIPNKPTQQKDDKEPQPVKKTVTGTDADLRRLSLKNAKQLLRKFGVPEEEIKKLSRWEVIDVVRTMSTEQARSGEGPMSKFARGSRFSVAEHQERYKEECQRIFDLQNKVLSSTEVLSTDTDSSSAEDSDFEEMGKNIENMLQNKKTSSQLSREREEQERKELQRMLLAAGSAASGNNHRDDDTASVTSLNSSATGRCLKIYRTFRDEEGKEYVRCETVRKPAVIDAYVRIRTTKDEEFIRKFALFDEQHREEMRKERRRIQEQLRRLKRNQEKEKLKGPPEKKPKKMKERPDLKLKCGACGAIGHMRTNKFCPLYYQTNAPPSNPVAMTEEQEEELEKTVIHNDNEELIKVEGTKIVLGKQLIESADEVRRKSLVLKFPKQQLPPKKKRRVGTTVHCDYLNRPHKSIHRRRTDPMVTLSSILESIINDMRDLPNTYPFHTPVNAKVVKDYYKIITRPMDLQTLRENVRKRLYPSREEFREHLELIVKNSATYNGPKHSLTQISQSMLDLCDEKLKEKEDKLARLEKAINPLLDDDDQVAFSFILDNIVTQKMMAVPDSWPFHHPVNKKFVPDYYKVIVNPMDLETIRKNISKHKYQSRESFLDDVNLILANSVKYNGPESQYTKTAQEIVNVCYQTLTEYDEHLTQLEKDICTAKEAALEEAELESLDPMTPGPYTPQPPDLYDTNTSLSMSRDASVFQDESNMSVLDIPSATPEKQVTQMRQGRGRLGEEDSDVDIEGYDDEEEDGKPKTPAPEGEDGDGDLADEEEGTVQQPQASVLYEDLLMSEGEDDEEDAGSDEEGDNPFSAIQLSESGSDSDVGSGGIRPKQPRMLQENTRMDMENEESMMSYEGDGGEASHGLEDSNIRWSLPLLPRLECSGVISAHCNLHLPGSSDFPASAS

SEQ ID NO: 899500 - protein, 1094 aa, Homo sapiens
MGPGCDLLLRTAATITAAAIMSDTDSDEDSAGGGPFSLAGFLFGNINGAGQLEGESVLDDECKKHLAGLGALGLGSLITELTANEELTGTDGALVNDEGWVRSTEDAVDYSDINEVAEDESRRYQQTMGSLQPLCHSDYDEDDYDADCEDIDCKLMPPPPPPPGPMKKDKDQDSITGVSENGEGIILPSIIAPSSLASEKVDFSSSSDSESEMGPQEATQAESEDGKLTLPLAGIMQHDATKLLPSVTELFPEFRPGKVLRFLRLFGPGKNVPSVWRSARRKRKKKHRELIQEEQIQEVECSVESEVSQKSLWNYDYAPPPPPEQCLSDDEVGKIETCRLRPMRGTNEFNEFSLIYVYIVNNTIADRICANFQMSNHGFNLSGCPFPIVKEKCLVGYAGMRGVDGDMLLNEEGLIDRWNVLRYISIVYILTPGKSSSVSLSSPPDCYTLYSLRTSGIRKFSLLYFFLLLQITMMAPVESKFSQSTGDIDKVTDTKPRVAEWRYGPARLWYDMLGVPEDGSGFDYGFKLRKTEHEPVIKSRMIEEFRKLEENNGTDLLADENFLMVTQLHWEDDIIWDGEDVKHKGTKPQRASLAGWLPSSMTRNAMAYNVQQGFAATLDDDKPWYSIFPIDNEDLVYGRWEDNIIWDAQAMPRLLEPPVLTLDPNDENLILEIPDEKEEATSNSPSKESKKESSLKKSRILLGKTGVIKEEPQQNMSQPEVKDPWNLSNDEYYYPKQQGLRGTFGGNIIQHSIPAVELRQPFFPTHMGPIKLRQFHRPPLKKYSFGALSQPGPHSVQPLLKHIKKKAKMREQERQASGGGEMFFMRTPQDLTGKDGDLILAEYSEENGPLMMQVGMATKIKNYYKRKPGKDPGAPDCKYGETVYCHTSPFLGSLHPGQLLQAFENNLFRAPIYLHKMPETDFLIIRTRQGYYIRELVDIFVVGQQCPLFEVPGPNSKRANTHIRDFLQVFIYRLFWKSKDRPRRIRMEDIKKAFPSHSESSIRKRLKLCADFKRTGMDSNWWVLKSDFRLPTEEEIRAMVSPEQCCAYYSMIAAEQRLKDAGYGEKSFFAPEEENEEDFQMKIDDEVRLYTSLY

SEQ ID NO: 899501 - protein, 337 aa, Homo sapiens
MGPGCDLLLRTAATITAAAIMSDTDSDEDSAGGGPFSLAGFLFGNINGAGQLEGESVLDDECKKHLAGLGALGLGSLITELTANEELTGTDGALVNDEGWVRSTEDAVDYSDINEVAEDESRRYQQTMGSLQPLCHSDYDEDDYDADCEDIDCKLMPPPPPPPGPMKKDKDQDSITGVSENGEGIILPSIIAPSSLASEKVDFSSSSDSESEMGPQEATQAESEDGKLTLPLAGIMQHDATKLLPSVTELFPEFRPGKVLRFLRLFGPGKNVPSVWRSARRKRKKKHRELIQEEQIQEVECSVESEVSQKSLWNYDYAPPPPPEQCLSDDEVGKIET

SEQ ID NO: 899502 - protein, 1872 aa, Homo sapiens
MGPGCDLLLRTAATITAAAIMSDTDSDEDSAGGGPFSLAGFLFGNINGAGQLEGESVLDDECKKHLAGLGALGLGSLITELTANEELTGTDGALVNDEGWVRSTEDAVDYSDINEVAEDESRRYQQTMGSLQPLCHSDYDEDDYDADCEDIDCKLMPPPPPPPGPMKKDKDQDSITGEKVDFSSSSDSESEMGPQEATQAESEDGKLTLPLAGIMQHDATKLLPSVTELFPEFRPGKVLRFLRLFGPGKNVPSVWRSARRKRKKKHRELIQEEQIQEVECSVESEVSQKSLWNYDYAPPPPPEQCLSDDEITMMAPVESKFSQSTGDIDKVTDTKPRVAEWRYGPARLWYDMLGVPEDGSGFDYGFKLRKTEHEPVIKSRMIEEFRKLEENNGTDLLADENFLMVTQLHWEDDIIWDGEDVKHKGTKPQRASLAGWLPSSMTRNAMAYNVQQGFAATLDDDKPWYSIFPIDNEDLVYGRWEDNIIWDAQAMPRLLEPPVLTLDPNDENLILEIPDEKEEATSNSPSKESKKESSLKKSRILLGKTGVIKEEPQQNMSQPEVKDPWNLSNDEYYYPKQQGLRGTFGGNIIQHSIPAVELRQPFFPTHMGPIKLRQFHRPPLKKYSFGALSQPGPHSVQPLLKHIKKKAKMREQERQASGGGEMFFMRTPQDLTGKDGDLILAEYSEENGPLMMQVGMATKIKNYYKRKPGKDPGAPDCKYGETVYCHTSPFLGSLHPGQLLQAFENNLFRAPIYLHKMPETDFLIIRTRQGYYIRELVDIFVVGQQCPLFEVPGPNSKRANTHIRDFLQVFIYRLFWKSKDRPRRIRMEDIKKAFPSHSESSIRKRLKLCADFKRTGMDSNWWVLKSDFRLPTEEEIRAMVSPEQCCAYYSMIAAEQRLKDAGYGEKSFFAPEEENEEDFQMKIDDEVRTAPWNTTRAFIAAMKGKCLLEVTGVADPTGCGEGFSYVKIPNKPTQQKDDKEPQPVKKTVTGTDADLRRLSLKNAKQLLRKFGVPEEEIKKLSRWEVIDVVRTMSTEQARSGEGPMSKFARGSRFSVAEHQERYKEECQRIFDLQNKVLSSTEVLSTDTDSSSAEDSDFEEMGKNIENMLQNKKTSSQLSREREEQERKELQRMLLAAGSAASGNNHRDDDTASVTSLNSSATGRCLKIYRTFRDEEGKEYVRCETVRKPAVIDAYVRIRTTKDEEFIRKFALFDEQHREEMRKERRRIQEQLRRLKRNQEKEKLKGPPEKKPKKMKERPDLKLKCGACGAIGHMRTNKFCPLYYQTNAPPSNPVAMTEEQEEELEKTVIHNDNEELIKVEGTKIVLGKQLIESADEVRRKSLVLKFPKQQLPPKKKRRVGTTVHCDYLNRPHKSIHRRRTDPMVTLSSILESIINDMRDLPNTYPFHTPVNAKVVKDYYKIITRPMDLQTLRENVRKRLYPSREEFREHLELIVKNSATYNGPKHSLTQISQSMLDLCDEKLKEKEDKLARLEKAINPLLDDDDQVAFSFILDNIVTQKMMAVPDSWPFHHPVNKKFVPDYYKVIVNPMDLETIRKNISKHKYQSRESFLDDVNLILANSVKYNGPESQYTKTAQEIVNVCYQTLTEYDEHLTQLEKDICTAKEAALEEAELESLDPMTPGPYTPQPPDLYDTNTSLSMSRDASVFQDESNMSVLDIPSATPEKQVTQEGEDGDGDLADEEEGTVQQPQASVLYEDLLMSEGEDDEEDAGSDEEGDNPFSAIQLSESGSDSDVGSGGIRPKQPRMLQENTRMDMENEESMMSYEGDGGEASHGLEDSNISYGSYEEPDPKSNTQDTSFSSIGGYEVSEEEEDEEEEEQRSGPSVLSQVHLSEDEEDSEDFHSIAGDSDLDSDE

SEQ ID NO: 899503 - protein, 1382 aa, Homo sapiens
MPRLLEPPVLTLDPNDENLILEIPDEKEEATSNSPSKESKKESSLKKSRILLGKTGVIKEEPQQNMSQPEVKDPWNLSNDEYYYPKQQGLRGTFGGNIIQHSIPAVELRQPFFPTHMGPIKLRQFHRPPLKKYSFGALSQPGPHSVQPLLKHIKKKAKMREQERQASGGGEMFFMRTPQDLTGKDGDLILAEYSEENGPLMMQVGMATKIKNYYKRKPGKDPGAPDCKYGETVYCHTSPFLGSLHPGQLLQAFENNLFRAPIYLHKMPETDFLIIRTRQGYYIRELVDIFVVGQQCPLFEVPGPNSKRANTHIRDFLQVFIYRLFWKSKDRPRRIRMEDIKKAFPSHSESSIRKRLKLCADFKRTGMDSNWWVLKSDFRLPTEEEIRAMVSPEQCCAYYSMIAAEQRLKDAGYGEKSFFAPEEENEEDFQMKIDDEVRTAPWNTTRAFIAAMKGKCLLEVTGVADPTGCGEGFSYVKIPNKPTQQKDDKEPQPVKKTVTGTDADLRRLSLKNAKQLLRKFGVPEEEIKKLSRWEVIDVVRTMSTEQARSGEGPMSKFARGSRFSVAEHQERYKEECQRIFDLQNKVLSSTEVLSTDTDSSSAEDSDFEEMGKNIENMLQNKKTSSQLSREREEQERKELQRMLLAAGSAASGNNHRDDDTASVTSLNSSATGRCLKIYRTFRDEEGKEYVRCETVRKPAVIDAYVRIRTTKDEEFIRKFALFDEQHREEMRKERRRIQEQLRRLKRNQEKEKLKGPPEKKPKKMKERPDLKLKCGACGAIGHMRTNKFCPLYYQTNAPPSNPVAMTEEQEEELEKTVIHNDNEELIKVEGTKIVLGKQLIESADEVRRKSLVLKFPKQQLPPKKKRRVGTTVHCDYLNRPHKSIHRRRTDPMVTLSSILESIINDMRDLPNTYPFHTPVNAKVVKDYYKIITRPMDLQTLRENVRKRLYPSREEFREHLELIVKNSATYNGPKHSLTQISQSMLDLCDEKLKEKEDKLARLEKAINPLLDDDDQVAFSFILDNIVTQKMMAVPDSWPFHHPVNKKFVPDYYKVIVNPMDLETIRKNISKHKYQSRESFLDDVNLILANSVKYNGPESQYTKTAQEIVNVCYQTLTEYDEHLTQLEKDICTAKEAALEEAELESLDPMTPGPYTPQPPDLYDTNTSLSMSRDASVFQDESNMSVLDIPSATPEKQVTQEGEDGDGDLADEEEGTVQQPQASVLYEDLLMSEGEDDEEDAGSDEEGDNPFSAIQLSESGSDSDVGSGGIRPKQPRMLQENTRMDMENEESMMSYEGDGGEASHGLEDSNISYGSYEEPDPKSNTQDTSFSSIGGYEVSEEEEDEEEEEQRSGPSVLSQVHLSEDEEDSEDFHSIAGDSDLDSDE

SEQ ID NO: 899504 - protein, 2066 aa, Homo sapiens
MGPGCDLLLRTAATITAAAIMSDTDSDEDSAGGGPFSLAGFLFGNINGAGQLEGESVLDDECKKHLAGLGALGLGSLITELTANEELTGTDGALVNDEGWVRSTEDAVDYSDINEVAEDESRRYQQTMGSLQPLCHSDYDEDDYDADCEDIDCKLMPPPPPPPGPMKKDKDQDSITGVSENGEGIILPSIIAPSSLASEKVDFSSSSDSESEMGPQEATQAESEDGKLTLPLAGIMQHDATKLLPSVTELFPEFRPGKVLRFLRLFGPGKNVPSVWRSARRKRKKKHRELIQEEQIQEVECSVESEVSQKSLWNYDYAPPPPPEQCLSDDEVGKIETCRLRPMRGTNEFNEFSLIYVYIVNNTIADRICANFQMSNHGFNLSGCPFPIVKEKCLVGYAGMRGVDGDMLLNEEGLIDRWNVLRYISIVYILTPGKSSSVSLSSPPDCYTLYSLRTSGIRKFSLLYFFLLLQITMMAPVESKFSQSTGDIDKVTDTKPRVAEWRYGPARLWYDMLGVPEDGSGFDYGFKLRKTEHEPVIKSRMIEEFRKLEENNGTDLLADENFLMVTQLHWEDDIIWDGEDVKHKGTKPQRASLAGWLPSSMTRNAMAYNVQQGFAATLDDDKPWYSIFPIDNEDLVYGRWEDNIIWDAQAMPRLLEPPVLTLDPNDENLILEIPDEKEEATSNSPSKESKKESSLKKSRILLGKTGVIKEEPQQNMSQPEVKDPWNLSNDEYYYPKQQGLRGTFGGNIIQHSIPAVELRQPFFPTHMGPIKLRQFHRPPLKKYSFGALSQPGPHSVQPLLKHIKKKAKMREQERQASGGGEMFFMRTPQDLTGKDGDLILAEYSEENGPLMMQVGMATKIKNYYKRKPGKDPGAPDCKYGETVYCHTSPFLGSLHPGQLLQAFENNLFRAPIYLHKMPETDFLIIRTRQGYYIRELVDIFVVGQQCPLFEVPGPNSKRANTHIRDFLQVFIYRLFWKSKDRPRRIRMEDIKKAFPSHSESSIRKRLKLCADFKRTGMDSNWWVLKSDFRLPTEEEIRAMVSPEQCCAYYSMIAAEQRLKDAGYGEKSFFAPEEENEEDFQMKIDDEVRTAPWNTTRAFIAAMKGKCLLEVTGVADPTGCGEGFSYVKIPNKPTQQKDDKEPQPVKKTVTGTDADLRRLSLKNAKQLLRKFGVPEEEIKKLSRWEVIDVVRTMSTEQARSGEGPMSKFARGSRFSVAEHQERYKEECQRIFDLQNKVLSSTEVLSTDTDSSSAEDSDFEEMGKNIENMLQNKKTSSQLSREREEQERKELQRMLLAAGSAASGNNHRDDDTASVTSLNSSATGRCLKIYRTFRDEEGKEYVRCETVRKPAVIDAYVRIRTTKDEEFIRKFALFDEQHREEMRKERRRIQEQLRRLKRNQEKEKLKGPPEKKPKKMKERPDLKLKCGACGAIGHMRTNKFCPLYYQTNAPPSNPVAMTEEQEEELEKTVIHNDNEELIKVEGTKIVLGKQLIESADEVRRKSLVLKFPKQQLPPKKKRRVGTTVHCDYLNRPHKSIHRRRTDPMVTLSSILESIINDMRDLPNTYPFHTPVNAKVVKDYYKIITRPMDLQTLRENVRKRLYPSREEFREHLELIVKNSATYNGPKHSLTQISQSMLDLCDEKLKEKEDKLARLEKAINPLLDDDDQVAFSFILDNIVTQKMMAVPDSWPFHHPVNKKFVPDYYKVIVNPMDLETIRKNISKHKYQSRESFLDDVNLILANSVKYNGPESQYTKTAQEIVNVCYQTLTEYDEHLTQLEKDICTAKEAALEEAELESLDPMTPGPYTPQPPDLYDTNTSLSMSRDASVFQDESNMSVLDIPSATPEKQVTQMRQGRGRLGEEDSDVDIEGYDDEEEDGKPKTPAPEGEDGDGDLADEEEGTVQQPQASVLYEDLLMSEGEDDEEDAGSDEEGDNPFSAIQLSESGSDSDVGSGGIRPKQPRMLQENTRMDMENEESMMSYEGDGGEASHGLEDSNISYGSYEEPDPKSNTQDTSFSSIGGYEVSEEEEDEEEEEQRSGPSVLSQVHLSEDEEDSEDFHSIAGDSDLDSDE

SEQ ID NO: 899505 - protein, 1644 aa, Homo sapiens
MGPGCDLLLRTAATITAAAIMSDTDSDEDSAGGGPFSLAGFLFGNINGAGQLEGESVLDDECKKHLAGLGALGLGSLITELTANEELTGTDGALVNDEGWVRSTEDAVDYSDINEVAEDESRRYQQTMGSLQPLCHSDYDEDDYDADCEDIDCKLMPPPPPPPGPMKKDKDQDSITGVSENGEGIILPSIIAPSSLASEKVDFSSSSDSESEMGPQEATQAESEDGKLTLPLAGIMQHDATKLLPSVTELFPEFRPGKVLRFLRLFGPGKNVPSVWRSARRKRKKKHRELIQEEQIQEVECSVESEVSQKSLWNYDYAPPPPPEQCLSDDEVGKIETCRLRPMRGTNEFNEFSLIYVYIVNNTIADRICANFQMSNHGFNLSGCPFPIVKEKCLVGYAGMRGVDGDMLLNEEGLIDRWNVLRYISIVYILTPGKSSSVSLSSPPDCYTLYSLRTSGIRKFSLLYFFLLLQITMMAPVESKFSQSTGDIDKVTDTKPRVAEWRYGPARLWYDMLGVPEDGSGFDYGFKLRKTEHEPVIKSRMIEEFRKLEENNGTDLLADENFLMVTQLHWEDDIIWDGEDVKHKGTKPQRASLAGWLPSSMTRNAMAYNVQQGFAATLDDDKPWYSIFPIDNEDLVYGRWEDNIIWDAQAMPRLLEPPVLTLDPNDENLILEIPDEKEEATSNSPSKESKKESSLKKSRILLGKTGVIKEEPQQNMSQPEVKDPWNLSNDEYYYPKQQGLRGTFGGNIIQHSIPAVELRQPFFPTHMGPIKLRQFHRPPLKKYSFGALSQPGPHSVQPLLKHIKKKAKMREQERQASGGGEMFFMRTPQDLTGKDGDLILAEYSEENGPLMMQVGMATKIKNYYKRKPGKDPGAPDCKYGETVYCHTSPFLGSLHPGQLLQAFENNLFRAPIYLHKMPETDFLIIRTRQGYYIRELVDIFVVGQQCPLFEVPGPNSKRANTHIRDFLQVFIYRLFWKSKDRPRRIRMEDIKKAFPSHSESSIRKRLKLCADFKRTGMDSNWWVLKSDFRLPTEEEIRAMVSPEQCCAYYSMIAAEQRLKDAGYGEKSFFAPEEENEEDFQMKIDDEVRTAPWNTTRAFIAAMKGKCLLEVTGVADPTGCGEGFSYVKIPNKPTQQKDDKEPQPVKKTVTGTDADLRRLSLKNAKQLLRKFGVPEEEIKKLSRWEVIDVVRTMSTEQARSGEGPMSKFARGSRFSVAEHQERYKEECQRIFDLQNKVLSSTEVLSTDTDSSSAEDSDFEEMGKNIENMLQNKKTSSQLSREREEQERKELQRMLLAAGSAASGNNHRDDDTASVTSLNSSATGRCLKIYRTFRDEEGKEYVRCETVRKPAVIDAYVRIRTTKDEEFIRKFALFDEQHREEMRKERRRIQEQLRRLKRNQEKEKLKGPPEKKPKKMKERPDLKLKCGACGAIGHMRTNKFCPLYYQTNAPPSNPVAMTEEQEEELEKTVIHNDNEELIKVEGTKIVLGKQLIESADEVRRKSLVLKFPKQQLPPKKKRRVGTTVHCDYLNRPHKSIHRRRTDPMVTLSSILESIINDMRDLPNTYPFHTPVNAKVVKDYYKIITRPMDLQTLRENVRKRLYPSREEFREHLELIVKNSATYNGIGIRIKHTRSIEKGHSHHHLPRE

SEQ ID NO: 899506 - protein, 910 aa, Homo sapiens
MGPGCDLLLRTAATITAAAIMSDTDSDEDSAGGGPFSLAGFLFGNINGAGQLEGESVLDDECKKHLAGLGALGLGSLITELTANEELTGTDGALVNDEGWVRSTEDAVDYSDINEVAEDESRRYQQTMGSLQPLCHSDYDEDDYDADCEDIDCKLMPPPPPPPGPMKKDKDQDSITGVSENGEGIILPSIIAPSSLASEKVDFSSSSDSESEMGPQEATQAESEDGKLTLPLAGIMQHDATKLLPSVTELFPEFRPGKVLRFLRLFGPGKNVPSVWRSARRKRKKKHRELIQEEQIQEVECSVESEVSQKSLWNYDYAPPPPPEQCLSDDEVGKIETCRLRPMRGTNEFNEFSLIYVYIVNNTIADRICANFQMSNHGFNLSGCPFPIVKEKCLVGYAGMRGVDGDMLLNEEGLIDRWNVLRYISIVYILTPGKSSSVSLSSPPDCYTLYSLRTSGIRKFSLLYFFLLLQITMMAPVESKFSQSTGDIDKVTDTKPRVAEWRYGPARLWYDMLGVPEDGSGFDYGFKLRKTEHEPVIKSRMIEEFRKLEENNGTDLLADENFLMVTQLHWEDDIIWDGEDVKHKGTKPQRASLAGWLPSSMTRNAMAYNVQQGFAATLDDDKPWYSIFPIDNEDLVYGRWEDNIIWDAQAMPRLLEPPVLTLDPNDENLILEIPDEKEEATSNSPSKESKKESSLKKSRILLGKTGVIKEEPQQNMSQPEVKDPWNLSNDEYYYPKQQGLRGTFGGNIIQHSIPAVELRQPFFPTHMGPIKLRQFHRPPLKKYSFGALSQPGPHSVQPLLKHIKKKAKMREQERQASGGGEMFFMRTPQDLTGKDGDLILAEYSEENGPLMMQVGMATKIKNYYKRKPGYSGEYKSVRNNELINVDFPNPDSPTTISVNSKPLFTDFLYT

SEQ ID NO: 899507 - protein, 119 aa, Homo sapiens
RVFTDHQPVLFPSRNRHKDQTHKVDRKGAQSSPPSSRIAFFDFPDLDKCISPLNSYNNYCLCNSFSQLPLGIIQCPTPLLKVTASRTTVQLRQLLNQSKTLRDRPGTVAHACNPSSLGS

SEQ ID NO: 899508 - protein, 690 aa, Homo sapiens
TRGSADSGYQLSGSLTWAGARHRRMAASRKPPRVRVNHQDFQLRNLRIIEPNEVTHSGDTGVETDGRMPPKVTSELLRQLRQAMRNSEYVTEPIQAYIIPSGDAHQSEYIAPCDCRRAFVSGFDGSAGTAIITEEHAAMWTDGRYFLQAAKQMDSNWTLMKMGLKDTPTQEDWLVSVLPEGSRVGVDPLIIPTDYWKKMAKVLRSAGHHLIPVKENLVDKIWTDRPERPCKPLLTLGLDYTGISWKDKVADLRLKMAERNVMWFVVTALDEIAWLFNLRGSDVEHNPVFFSYAIIGLETIMLFIDGDRIDAPSVKEHLLLDLGLEAEYRIQVHPYKSILSELKALCADLSPREKVWVSDKASYAVSETIPKDHRCCMPYTPICIAKAVKNSAESEGMRRAHIKDAVALCELFNWLEKEVPKGGVTEISAADKAEEFRRQQADFVDLSFPTISSTGPNGAIIHYAPVPETNRTLSLDEVYLIDSGAQYKDGTTDVTRTMHFGTPTAYEKECFTYVLKGHIAVSAAVFPTGTKGHLLDSFARSALWDSGLDYLHGTGHGVGSFLNVHEGPCGISYKTFSDEPLEAGMIVTDEPGYYEDGAFGIRIENVVLVVPVKTKYNFNNRGSLTFEPLTLVPIQTKMIDVDSLTDKECDWLNNYHLTCRDVIGKELQKQGRQEALEWLIRETQPISKQH

SEQ ID NO: 899509 - protein, 173 aa, Homo sapiens
LSRLLRAGPSAGDQLVCAPLTWAGARHRRMAASRKPPRVRVNHQDFQLRNLRIIEPNEVTHSGDTGVETDGRMPPKVTSELLRQLRQAMRNSEYVTEPIQAYIIPSGDAHQSEYIAPCDCRRAFVSGFDGSAGTAIITEEHAAMWTDGRYFLQAAKQMDSNWTLMKMGGYRHG

SEQ ID NO: 899510 - protein, 695 aa, Homo sapiens
LSRLLRAGPSAGDQLVCAPLTWAGARHRRMAASRKPPRVRVNHQDFQLRNLRIIEPNEVTHSGDTGVETDGRMPPKVTSELLRQLRQAMRNSEYVTEPIQAYIIPSGDAHQSEYIAPCDCRRAFVSGFDGSAGTAIITEEHAAMWTDGRYFLQAAKQMDSNWTLMKMGLKDTPTQEDWLVSVLPEGSRVGVDPLIIPTDYWKKMAKVLRSAGHHLIPVKENLVDKIWTDRPERPCKPLLTLGLDYTGISWKDKVADLRLKMAERNVMWFVVTALDEIAWLFNLRGSDVEHNPVFFSYAIIGLETIMLFIDGDRIDAPSVKEHLLLDLGLEAEYRIQVHPYKSILSELKALCADLSPREKVWVSDKASYAVSETIPKDHRCCMPYTPICIAKAVKNSAESEGMRRAHIKDAVALCELFNWLEKEVPKGGVTEISAADKAEEFRRQQADFVDLSFPTISSTGPNGAIIHYAPVPETNRTLSLDEVYLIDSGAQYKDGTTDVTRTMHFGTPTAYEKECFTYVLKGHIAVSAAVFPTGTKGHLLDSFARSALWDSGLDYLHGTGHGVGSFLNVHEGPCGISYKTFSDEPLEAGMIVTDEPGYYEDGAFGIRIENVVLVVPVKTKYNFNNRGSLTFEPLTLVPIQTKMIDVDSLTDKECDWLNNYHLTCRDVIGKELQKQGRQEALEWLIRETQPISKQH

SEQ ID NO: 899511 - protein, 674 aa, Homo sapiens
PRTPAANAPSPTQSHREYRVNHQDFQLRNLRIIEPNEVTHSGDTGVETDGRMPPKVTSELLRQLRQAMRNSEYVTEPIQAYIIPSGDAHQSEYIAPCDCRRAFVSGFDGSAGTAIITEEHAAMWTDGRYFLQAAKQMDSNWTLMKMGLKDTPTQEDWLVSVLPEGSRVGVDPLIIPTDYWKKMAKVLRSAGHHLIPVKENLVDKIWTDRPERPCKPLLTLGLDYTGISWKDKVADLRLKMAERNVMWFVVTALDEIAWLFNLRGSDVEHNPVFFSYAIIGLETIMLFIDGDRIDAPSVKEHLLLDLGLEAEYRIQVHPYKSILSELKALCADLSPREKVWVSDKASYAVSETIPKDHRCCMPYTPICIAKAVKNSAESEGMRRAHIKDAVALCELFNWLEKEVPKGGVTEISAADKAEEFRRQQADFVDLSFPTISSTGPNGAIIHYAPVPETNRTLSLDEVYLIDSGAQYKDGTTDVTRTMHFGTPTAYEKECFTYVLKGHIAVSAAVFPTGTKGHLLDSFARSALWDSGLDYLHGTGHGVGSFLNVHEGPCGISYKTFSDEPLEAGMIVTDEPGYYEDGAFGIRIENVVLVVPVKTKYNFNNRGSLTFEPLTLVPIQTKMIDVDSLTDKECDWLNNYHLTCRDVIGKELQKQGRQEALEWLIRETQPISKQH

SEQ ID NO: 899512 - protein, 695 aa, Homo sapiens; identical to SEQ ID NO: 899510

SEQ ID NO: 899513 - protein, 623 aa, Homo sapiens
MPPKVTSELLRQLRQAMRNSEYVTEPIQAYIIPSGDAHQSEYIAPCDCRRAFVSGFDGSAGTAIITEEHAAMWTDGRYFLQAAKQMDSNWTLMKMGLKDTPTQEDWLVSVLPEGSRVGVDPLIIPTDYWKKMAKVLRSAGHHLIPVKENLVDKIWTDRPERPCKPLLTLGLDYTGISWKDKVADLRLKMAERNVMWFVVTALDEIAWLFNLRGSDVEHNPVFFSYAIIGLETIMLFIDGDRIDAPSVKEHLLLDLGLEAEYRIQVHPYKSILSELKALCADLSPREKVWVSDKASYAVSETIPKDHRCCMPYTPICIAKAVKNSAESEGMRRAHIKDAVALCELFNWLEKEVPKGGVTEISAADKAEEFRRQQADFVDLSFPTISSTGPNGAIIHYAPVPETNRTLSLDEVYLIDSGAQYKDGTTDVTRTMHFGTPTAYEKECFTYVLKGHIAVSAAVFPTGTKGHLLDSFARSALWDSGLDYLHGTGHGVGSFLNVHEGPCGISYKTFSDEPLEAGMIVTDEPGYYEDGAFGIRIENVVLVVPVKTKYNFNNRGSLTFEPLTLVPIQTKMIDVDSLTDKECDWLNNYHLTCRDVIGKELQKQGRQEALEWLIRETQPISKQH

SEQ ID NO: 899514 - protein, 314 aa, Homo sapiens
MPYTPICIAKAVKNSAESEGMRRAHIKDAVALCELFNWLEKEVPKGGVTEISAADKAEEFRRQQADFVDLSFPTISSTGPNGAIIHYAPVPETNRTLSLDEVYLIDSGAQYKDGTTDVTRTMHFGTPTAYEKECFTYVLKGHIAVSAAVFPTGTKGHLLDSFARSALWDSGLDYLHGTGHGVGSFLNVHEGPCGISYKTFSDEPLEAGMIVTDEPGYYEDGAFGIRIENVVLVVPVKTKYNFNNRGSLTFEPLTLVPIQTKMIDVDSLTDKECDWLNNYHLTCRDVIGKELQKQGRQEALEWLIRETQPISKQH

SEQ ID NO: 899515 - protein, 552 aa, Homo sapiens
MWTDGRYFLQAAKQMDSNWTLMKMGLKDTPTQEDWLVSVLPEGSRVGVDPLIIPTDYWKKMAKVLRSAGHHLIPVKENLVDKIWTDRPERPCKPLLTLGLDYTGISWKDKVADLRLKMAERNVMWFVVTALDEIAWLFNLRGSDVEHNPVFFSYAIIGLETIMLFIDGDRIDAPSVKEHLLLDLGLEAEYRIQVHPYKSILSELKALCADLSPREKVWVSDKASYAVSETIPKDHRCCMPYTPICIAKAVKNSAESEGMRRAHIKDAVALCELFNWLEKEVPKGGVTEISAADKAEEFRRQQADFVDLSFPTISSTGPNGAIIHYAPVPETNRTLSLDEVYLIDSGAQYKDGTTDVTRTMHFGTPTAYEKECFTYVLKGHIAVSAAVFPTGTKGHLLDSFARSALWDSGLDYLHGTGHGVGSFLNVHEGPCGISYKTFSDEPLEAGMIVTDEPGYYEDGAFGIRIENVVLVVPVKTKYNFNNRGSLTFEPLTLVPIQTKMIDVDSLTDKECDWLNNYHLTCRDVIGKELQKQGRQEALEWLIRETQPISKQH

SEQ ID NO: 899516 - protein, 552 aa, Homo sapiens; identical to SEQ ID NO: 899515

SEQ ID NO: 899517 - protein, 663 aa, Homo sapiens
LSRLLRAGPSAGDQLVCAPLTWAGARHRRMAASRKPPRVRVNHQDFQLRNLRIIEPNEVTHSGDTGVETDGRMPPKVTSELLRQLRQAMRNSEYVTEPIQAYIIPSGDAHQSEYIAPCDCRRAFVSGFDGSAGTAIITEEHAAMWTDGRYFLQAAKQMDSNWTLMKMGLKDTPTQEDWLVSVLPEGSRVGVDPLIIPTDYWKKMAKVLRSAGHHLIPVKENLVDKIWTDRPERPCKPLLTLGLDYTGLFNLRGSDVEHNPVFFSYAIIGLETIMLFIDGDRIDAPSVKEHLLLDLGLEAEYRIQVHPYKSILSELKALCADLSPREKVWVSDKASYAVSETIPKDHRCCMPYTPICIAKAVKNSAESEGMRRAHIKDAVALCELFNWLEKEVPKGGVTEISAADKAEEFRRQQADFVDLSFPTISSTGPNGAIIHYAPVPETNRTLSLDEVYLIDSGAQYKDGTTDVTRTMHFGTPTAYEKECFTYVLKGHIAVSAAVFPTGTKGHLLDSFARSALWDSGLDYLHGTGHGVGSFLNVHEGPCGISYKTFSDEPLEAGMIVTDEPGYYEDGAFGIRIENVVLVVPVKTKYNFNNRGSLTFEPLTLVPIQTKMIDVDSLTDKECDWLNNYHLTCRDVIGKELQKQGRQEALEWLIRETQPISKQH

SEQ ID NO: 899518 - protein, 614 aa, Homo sapiens
LSRLLRAGPSAGDQLVCAPLTWAGARHRRMAASRKPPRVRVNHQDFQLRNLRIIEPNEVTHSGDTGVETDGRMPPKVTSELLRQLRQAMRNSEYVTEPIQAYIIPSGDAHQSEYIAPCDCRRAFVSGFDGSAGTAIITEEHAAMWTDGRYFLQAAKQMDSNWTLMKMGLKDTPTQEDWLVSVLPEGSRVGVDPLIIPTDYWKKMAKVLRSAGHHLIPVKENLVDKIWTDRPERPCKPLLTLGLDYTGISWKDKVADLRLKMAERNVMWFVVTALDEIAWLFNLRGSDVEHNPVFFSYAIIGLETIMLFIDGDRIDAPSVKEHLLLDLGLEAEYRIQVHPYKSILSELKALCADLSPREKVWVSDKASYAVSETIPKDHRCCMPYTPICIAKAVKNSAESEGMRRAHIKDAVALCELFNWLEKEVPKGGVTEISAADKAEEFRRQQADFVDLSFPTISSTGPNGAIIHYAPVPETNRTLSLDEVYLIDSGAQYKDGTTDVTRTMHFGTPTAYEKECFTYVLKGHIAVSAAVFPTGTKGHLLDSFARSALWDSGLDYLHGTGHGVGSFLNVHEGPCGISYKTFSDEPLEAGMIVTDEPGTMKMGFWIHHPASYLAV

SEQ ID NO: 899519 - protein, 566 aa, Homo sapiens
LSRLLRAGPSAGDQLVCAPLTWAGARHRRMAASRKPPRVRVNHQDFQLRNLRIIEPNEVTHSGDTGVETDGRMPPKVTSELLRQLRQAMRNSEYVTEPIQAYIIPSGDAHQSEYIAPCDCRRAFVSGFDGSAGTAIITEEHAAMWTDGRYFLQAAKQMDSNWTLMKMGLKDTPTQEDWLVSVLPEGSRVGVDPLIIPTDYWKKMAKVLRSAGHHLIPVKENLVDKIWTDRPERPCKPLLTLGLDYTGISWKDKVADLRLKMAERNVMWFVVTALDEIAWLFNLRGSDVEHNPVFFSYAIIGLETIMLFIDGDRIDAPSVKEHLLLDLGLEAEYRIQVHPYKSILSELKALCADLSPREKVWVSDKASYAVSETIPKDHRCCMPYTPICIAKAVKNSAESEGMRRAHIKDAVALCELFNWLEKEVPKGGVTEISAADKAEEFRRQQADFVDLSFPTISSTGPNGAIIHYAPVPETNRTLSLDEVYLIDSGAQYKDGTTDVTRTMHFGTPTAYEKECFTYVLKGHIAVSAAVFPTGTKDTFLTPFARSAFIGNSRGPKDLTFGHGGKP

SEQ ID NO: 899520 - protein, 647 aa, Homo sapiens
LSRLLRAGPSAGDQLVCAPLTWAGARHRRMAASRKPPRVRVNHQDFQLRNLRIIEPNEVTHSGDTGVETDGRMPPKVTSELLRQLRQAMRNSEYVTEPIQAYIIPSGDAHQSEYIAPCDCRRAFVSGFDGSAGTAIITEEHAAMWTDGRYFLQAAKQMDSNWTLMKMGLKDTPTQEDWLVSVLPEGSRVGVDPLIIPTGISWKDKVADLRLKMAERNVMWFVVTALDEIAWLFNLRGSDVEHNPVFFSYAIIGLETIMLFIDGDRIDAPSVKEHLLLDLGLEAEYRIQVHPYKSILSELKALCADLSPREKVWVSDKASYAVSETIPKDHRCCMPYTPICIAKAVKNSAESEGMRRAHIKDAVALCELFNWLEKEVPKGGVTEISAADKAEEFRRQQADFVDLSFPTISSTGPNGAIIHYAPVPETNRTLSLDEVYLIDSGAQYKDGTTDVTRTMHFGTPTAYEKECFTYVLKGHIAVSAAVFPTGTKGHLLDSFARSALWDSGLDYLHGTGHGVGSFLNVHEGPCGISYKTFSDEPLEAGMIVTDEPGYYEDGAFGIRIENVVLVVPVKTKYNFNNRGSLTFEPLTLVPIQTKMIDVDSLTDKECDWLNNYHLTCRDVIGKELQKQGRQEALEWLIRETQPISKQH

SEQ ID NO: 899521 - protein, 435 aa, Homo sapiens
MAERNVMWFVVTALDEIAWLFNLRGSDVEHNPVFFSYAIIGLETIMLFIDGDRIDAPSVKEHLLLDLGLEAEYRIQVHPYKSILSELKALCADLSPREKVWVSDKASYAVSETIPKDHRCCMPYTPICIAKAVKNSAESEGMRRAHIKDAVALCELFNWLEKEVPKGGVTEISAADKAEEFRRQQADFVDLSFPTISSTGPNGAIIHYAPVPETNRTLSLDEVYLIDSGAQYKDGTTDVTRTMHFGTPTAYEKECFTYVLKGHIAVSAAVFPTGTKGHLLDSFARSALWDSGLDYLHGTGHGVGSFLNVHEGPCGISYKTFSDEPLEAGMIVTDEPGYYEDGAFGIRIENVVLVVPVKTKYNFNNRGSLTFEPLTLVPIQTKMIDVDSLTDKECDWLNNYHLTCRDVIGKELQKQGRQEALEWLIRETQPISKQH

SEQ ID NO: 899522 - protein, 473 aa, Homo sapiens
TRGSADSGYQLSGSLTWAGARHRRMAASRKPPRVRVNHQDFQLRNLRIIEPNEVTHSGDTGVETDVEHNPVFFSYAIIGLETIMLFIDGDRIDAPSVKEHLLLDLGLEAEYRIQVHPYKSILSELKALCADLSPREKVWVSDKASYAVSETIPKDHRCCMPYTPICIAKAVKNSAESEGMRRAHIKDAVALCELFNWLEKEVPKGGVTEISAADKAEEFRRQQADFVDLSFPTISSTGPNGAIIHYAPVPETNRTLSLDEVYLIDSGAQYKDGTTDVTRTMHFGTPTAYEKECFTYVLKGHIAVSAAVFPTGTKGHLLDSFARSALWDSGLDYLHGTGHGVGSFLNVHEGPCGISYKTFSDEPLEAGMIVTDEPGYYEDGAFGIRIENVVLVVPVKTKYNFNNRGSLTFEPLTLVPIQTKMIDVDSLTDKECDWLNNYHLTCRDVIGKELQKQGRQEALEWLIRETQPISKQH

SEQ ID NO: 899523 - protein, 160 aa, Homo sapiens
MHFGTPTAYEKECFTYVLKGHIAVSAAVFPTGTKGHLLDSFARSALWDSGLDYLHGTGHGVGSFLNVHEGPCGISYKTFSDEPLEAGMIVTDEPGYYEDGAFGIRIENVVLVVPVKTKCDWLNNYHLTCRDVIGKELQKQGRQEALEWLIRETQPISKQH

SEQ ID NO: 899524 - protein, 146 aa, Homo sapiens [sequence omitted]

SEQ ID NO: 899525 - protein, 200 aa, Homo sapiens
  misc_feature (198)..(198): Xaa can be any naturally occurring amino acid
TRGSADSGYQLSGSLTWAGARHRRMAASRKPPRVRVNHQDFQLRNLRIIEPNEVTHSGDTGVETDGRMPPKVTSELLRQLRQAMRNSEYVTEPIQAYIIPSGDAHQSEYIAPCDCRRAFVSGFDGSAGTAIITEEHAAMWTDGRYFLQAAKQMDSNWTLMKMGPDRDSSQASSDSPGPGLEDGGFALEKGMPKGLWGXGA

SEQ ID NO: 899526 - protein, 666 aa, Homo sapiens
MAASRKPPRVRVNHQDFQLRNLRIIEPNEVTHSGDTGVETDGRMPPKVTSELLRQLRQAMRNSEYVTEPIQAYIIPSGDAHQSEYIAPCDCRRAFVSGFDGSAGTAIITEEHAAMWTDGRYFLQAAKQMDSNWTLMKMGLKDTPTQEDWLVSVLPEGSRVGVDPLIIPTDYWKKMAKVLRSAGHHLIPVKENLVDKIWTDRPERPCKPLLTLGLDYTGISWKDKVADLRLKMAERNVMWFVVTALDEIAWLFNLRGSDVEHNPVFFSYAIIGLETIMLFIDGDRIDAPSVKEHLLLDLGLEAEYRIQVHPYKSILSELKALCADLSPREKVWVSDKASYAVSETIPKDHRCCMPYTPICIAKAVKNSAESEGMRRAHIKDAVALCELFNWLEKEVPKGGVTEISAADKAEEFRRQQADFVDLSFPTISSTGPNGAIIHYAPVPETNRTLSLDEVYLIDSGAQYKDGTTDVTRTMHFGTPTAYEKECFTYVLKGHIAVSAAVFPTGTKGHLLDSFARSALWDSGLDYLHGTGHGVGSFLNVHEGPCGISYKTFSDEPLEAGMIVTDEPGYYEDGAFGIRIENVVLVVPVKTKYNFNNRGSLTFEPLTLVPIQTKMIDVDSLTDKECDWLNNYHLTCRDVIGKELQKQGRQEALEWLIRETQPISKQH

SEQ ID NO: 899527 - protein, 666 aa, Homo sapiens
VCNFLFFLSLRVNHQDFQLRNLRIIEPNEVTHSGDTGVETDGRMPPKVTSELLRQLRQAMRNSEYVTEPIQAYIIPSGDAHQSEYIAPCDCRRAFVSGFDGSAGTAIITEEHAAMWTDGRYFLQAAKQMDSNWTLMKMGLKDTPTQEDWLVSVLPEGSRVGVDPLIIPTDYWKKMAKVLRSAGHHLIPVKENLVDKIWTDRPERPCKPLLTLGLDYTGISWKDKVADLRLKMAERNVMWFVVTALDEIAWLFNLRGSDVEHNPVFFSYAIIGLETIMLFIDGDRIDAPSVKEHLLLDLGLEAEYRIQVHPYKSILSELKALCADLSPREKVWVSDKASYAVSETIPKDHRCCMPYTPICIAKAVKNSAESEGMRRAHIKDAVALCELFNWLEKEVPKGGVTEISAADKAEEFRRQQADFVDLSFPTISSTGPNGAIIHYAPVPETNRTLSLDEVYLIDSGAQYKDGTTDVTRTMHFGTPTAYEKECFTYVLKGHIAVSAAVFPTGTKGHLLDSFARSALWDSGLDYLHGTGHGVGSFLNVHEGPCGISYKTFSDEPLEAGMIVTDEPGYYEDGAFGIRIENVVLVVPVKTKYNFNNRGSLTFEPLTLVPIQTKMIDVDSLTDKECDWLNNYHLTCRDVIGKELQKQGRQEALEWLIRETQPISKQH

SEQ ID NO: 899528 - protein, 678 aa, Homo sapiens
LSRLLRAGPSAGDQLVCAPLTWAGARHRRMAASRKPPRVRVNHQDFQLRNLRIIEPNEVTHSGDTGVETDGRMPPKVTSELLRQLRQAMRNSEYVTEPIQAYIIPSGDAHQSEYIAPCDCRRAFVSGFDGSAGTAIITEEHAAMWTDGRYFLQAAKQMDSNWTLMKMGLKDTPTQEDWLVSVLPEGSRVGVDPLIIPTDYWKKMAKVLRSAGHHLIPVKENLVDKIWTDRPERPCKPLLTLGLDYTGISWKDKVADLRLKMAERNVMWFVVTALDEIAWLFNLRGSDVEHNPVFFSYAIIGLETIMLFIDGDRIDAPSVKEHLLLDLGLEAEYRIQVHPYKSILSELKALCADLSPREKVWVSDKASYAVSETIPKDHRCCMPYTPICIAKAVKNSAESEGMRRAHVPKGGVTEISAADKAEEFRRQQADFVDLSFPTISSTGPNGAIIHYAPVPETNRTLSLDEVYLIDSGAQYKDGTTDVTRTMHFGTPTAYEKECFTYVLKGHIAVSAAVFPTGTKGHLLDSFARSALWDSGLDYLHGTGHGVGSFLNVHEGPCGISYKTFSDEPLEAGMIVTDEPGYYEDGAFGIRIENVVLVVPVKTKYNFNNRGSLTFEPLTLVPIQTKMIDVDSLTDKECDWLNNYHLTCRDVIGKELQKQGRQEALEWLIRETQPISKQH

SEQ ID NO: 899529 - protein, 625 aa, Homo sapiens
LSRLLRAGPSAGDQLVCAPLTWAGARHRRMAASRKPPRVRVNHQDFQLRNLRIIEPNEVTHSGDTGVETDGRMPPKVTSELLRQLRQAMRNSEYVTEPIQAYIIPSGDAHQSEYIAPCDCRRAFVSGFDGSAGTAIITEEHAAMWTDGRYFLQAAKQMDSNWTLMKMGLKDTPTQEDWLVSVLPEGSRVGVDPLIIPTDYWKKMAKVLRSAGHHLIPVKENLVDKIWTDRPERPCKPLLTLGLDYTGISWKDKVADLRLKMAERNVMWFVVTALDEIAWLFNLRGSDVEHNPVFFSYAIIGLETIMLFIDGDRIDAPSVKEHLLLDLGLEAEYRIQVHPYKSILSELKALCADLSPREKVWVSDKASYAVSETIPKDHRCCMPYTPICIAKAVKNSAESEGMRRAHIKDAVALCELFNWLEKEVPKGGVTEISAADKAEEFRRQQADFVDLSFPTISSTGPNGAIIHYAPVPETNRTLSLDEVYLIDSGAQYKDGTTDVTRTMHFGTPTAYEKECFTYVLKGHIAVSAAVFPTGTKGHLLDSFARSALWDSGLDYLHGTGHGVGSFLNVHEGPCGIKRRNPSPNSINKYLPGFVFVKCSGGRKKRGRSLTSFPFPFLLPYLPFLL

SEQ ID NO: 899530 - protein, 552 aa, Homo sapiens; identical to SEQ ID NO: 899515

SEQ ID NO: 899531 - protein, 492 aa, Homo sapiens
MAKVLRSAGHHLIPVKENLVDKIWTDRPERPCKPLLTLGLDYTGISWKDKVADLRLKMAERNVMWFVVTALDEIAWLFNLRGSDVEHNPVFFSYAIIGLETIMLFIDGDRIDAPSVKEHLLLDLGLEAEYRIQVHPYKSILSELKALCADLSPREKVWVSDKASYAVSETIPKDHRCCMPYTPICIAKAVKNSAESEGMRRAHIKDAVALCELFNWLEKEVPKGGVTEISAADKAEEFRRQQADFVDLSFPTISSTGPNGAIIHYAPVPETNRTLSLDEVYLIDSGAQYKDGTTDVTRTMHFGTPTAYEKECFTYVLKGHIAVSAAVFPTGTKGHLLDSFARSALWDSGLDYLHGTGHGVGSFLNVHEGPCGISYKTFSDEPLEAGMIVTDEPGYYEDGAFGIRIENVVLVVPVKTKYNFNNRGSLTFEPLTLVPIQTKMIDVDSLTDKECDWLNNYHLTCRDVIGKELQKQGRQEALEWLIRETQPISKQH

SEQ ID NO: 899532 - protein, 549 aa, Homo sapiens
MRCVKIGTEEQMDSNCTLMKMGLKDTPTQEDWLVSVLPEGSRVGVDPLIIPTDYWKKMAKVLRSAGHHLIPVKENLVDKIWTDRPERPCKPLLTLGLDYTGISWKDKVADLRLKMAERNVMWFVVTALDEIAWLFNLRGSDVEHNPVFFSYAIIGLETIMLFIDGDRIDAPSVKEHLLLDLGLEAEYRIQVHPYKSILSELKALCADLSPREKVWVSDKASYAVSETIPKDHRCCMPYTPICIAKAVKNSAESEGMRRAHIKDAVALCELFNWLEKEVPKGGVTEISAADKAEEFRRQQADFVDLSFPTISSTGPNGAIIHYAPVPETNRTLSLDEVYLIDSGAQYKDGTTDVTRTMHFGTPTAYEKECFTYVLKGHIAVSAAVFPTGTKGHLLDSFARSALWDSGLDYLHGTGHGVGSFLNVHEGPCGISYKTFSDEPLEAGMIVTDEPGYYEDGAFGIRIENVVLVVPVKTKYNFNNRGSLTFEPLTLVPIQTKMIDVDSLTDKECDWLNNYHLTCRDVIGKELQKQGRQEALEWLIRETQPISKQH

SEQ ID NO: 899533 - protein, 549 aa, Homo sapiens
LSRLLRAGPSAGDQLVCAPLTWAGARHRRMAASRKPPRVRVNHQDFQLRNLRIIEPNEVTHSGDTGVETDGRMPPKVTSELLRQLRQAMRNSEYVTEPIQAYIIPSGDAHQSEYIAPCDCRRAFVSGFDGSAGTAIITEEHAAMWTDGRYFLQAAKQMDSNWTLMKMGLKDTPTQEDWLVSVLPEGSRVGVDPLIIPTDYWKKMAKVLRSAGHHLIPVKENLVDKIWTDRPERPCKPLLTLGLDYTGISWKDKVADLRLKMAERNVMWFVVTALDEIAWLFNLRGSDVEHNPVFFSYAIIGLETIMLFIDGDRIDAPSVKEHLLLDLGLEAEYRIQVHPYKSILSELKALCADLSPREKVWVSDKASYAVSETIPKDHRCCMPYTPICIAKAVKNSAESEGMRRAHIKDAVALCELFNWLEKEVPKGGVTEISAADKAEEFRRQQADFVDLSFPTISSTGPNGAIIHYAPVPETNRTLSLDEVYLIDSGAQYKDGTTDVTRTMHFGTPTAYEKECFTYVLKGHIAVSAAVFPTGTKDLVKGRCPDFFGQ

SEQ ID NO: 899534 - protein, 390 aa, Homo sapiens
MLFIDGDRIDAPSVKEHLLLDLGLEAEYRIQVHPYKSILSELKALCADLSPREKVWVSDKASYAVSETIPKDHRCCMPYTPICIAKAVKNSAESEGMRRAHIKDAVALCELFNWLEKEVPKGGVTEISAADKAEEFRRQQADFVDLSFPTISSTGPNGAIIHYAPVPETNRTLSLDEVYLIDSGAQYKDGTTDVTRTMHFGTPTAYEKECFTYVLKGHIAVSAAVFPTGTKGHLLDSFARSALWDSGLDYLHGTGHGVGSFLNVHEGPCGISYKTFSDEPLEAGMIVTDEPGYYEDGAFGIRIENVVLVVPVKTKYNFNNRGSLTFEPLTLVPIQTKMIDVDSLTDKECDWLNNYHLTCRDVIGKELQKQGRQEALEWLIRETQPISKQH

SEQ ID NO: 899535 - protein, 520 aa, Homo sapiens
LSRLLRAGPSAGDQLVCAPLTWAGARHRRMAASRKPPRVRVNHQDFQLRNLRIIEPNEVTHSGDTGVETDGRMPPKVTSELLRQLRQAMRNSEYVTEPIQAYIIPSGDAHQSEYIAPCDCRRAFVSGFDGSAGTAIITEEHAAMWTDGRYFLQAAKQMDSNWTLMKMGLKDTPTQEDWLVSVLPEGSRVGVDPLIIPTDYWKKMAKVLRSAGHHLIPVKENLVDKIWTDRPERPCKPLLTLGLDYTGISWKDKVADLRLKMAERNVMWFVVTALDEIAWLFNLRGSDVEHNPVFFSYAIIGLETIMLFIDGDRIDAPSVKEHLLLDLGLEAEYRIQVHPYKSILSELKALCADLSPREKVWVSDKASYAVSETIPKDHRCCMPYTPICIAKAVKNSAESEGMRRAHVPKGGVTEISAADKAEEFRRQQADFVDLSFPTISSTGPNGAIIHYAPVPETNRTLSLDEVYLIDSGAQYKDGTTDVTRTMHFGTPTAYEKECFTYVLKGHIAVSAAVFPTGTKG

SEQ ID NO: 899536 - protein, 268 aa, Homo sapiens
LSRLLRAGPSAGDQLVCAPLTWAGARHRRMAASRKPPRVRVNHQDFQLRNLRIIEPNEVTHSGDTGVETDGRMPPKVTSELLRQLRQAMRNSEYVTEPIQAYIIPSGDAHQSEYIAPCDCRRAFVSGFDGSAGTAIITEEHAAMWTDGRYFLQAAKQMDSNWTLMKMGLKDTPTQEDWLVSVLPEGSRVGVDPLIIPTDYWKKMAKVLRSAGHHLIPVKENLVDKIWTVFYDFLIVENKPRIKLLHQKEGPSKVEHLVKGRCPDFFGQ

SEQ ID NO: 899537 - protein, 198 aa, Homo sapiens
AAVERSVATVTRAGRCPTMSVRVARVAWVRGLGASYRRGASSFPVPPPGAQGVAELLRDATGAEEEAPWAATERRMPGQCSVLLFPGQGSQVVGMGRGLLNYPRVRELYAAARRVLGYDLLELSLHGPQETLDRTVHCQPAIFVASLAAVEKLHHLQPSVIENCVAAAGFSVGEFAALVFAGAMEFAEGSTVSPEEFL

SEQ ID NO: 899538 - protein, 408 aa, Homo sapiens
AAVERSVATVTRAGRCPTMSVRVARVAWVRGLGASYRRGASSFPVPPPGAQGVAELLRDATGAEEEAPWAATERRMPGQCSVLLFPGQGSQVVGMGRGLLNYPRVRELYAAARRVLGYDLLELSLHGPQETLDRTVHCQPAIFVASLAAVEKLHHLQPSVIENCVAAAGFSVGEFAALVFAGAMEFAEGLYAVKIRAEAMQEASEAVPSGMLSVLGQPQSKFNFACLEAREHCKSLGIENPVCEVSNYLFPDCRVISGHQEALRFLQKNSSKFHFRRTRMLPVSGAFHTRLMEPAVEPLTQALKAVDIKKPLVSVYSNVHAHRYRHPGHIHKLLAQQLVSPVKWEQTMHAIYERKKGRGFPQTFEVGPGRQLGAILKSCNMQAWKSYSAVDVLQTLEHVDLDPQEPPR

SEQ ID NO: 899539 - protein, 408 aa, Homo sapiens; identical to SEQ ID NO: 899538

SEQ ID NO: 899540 - protein, 419 aa, Homo sapiens
AAVERSVATVTRAGRCPTMSVRVARVAWVRGLGASYRRGASSFPVPPPGAQGVAELLRDATGAEEEAPWAATERRMPGQCSVLLFPGQGSQVVGMGRGLLNYPRVRELYAAARRVLGYDLLELSLHGPQETLDRTVHCQPAIFVASLAAVEKLHHLQPSVRPEAPDRRGKVIENCVAAAGFSVGEFAALVFAGAMEFAEGLYAVKIRAEAMQEASEAVPSGMLSVLGQPQSKFNFACLEAREHCKSLGIENPVCEVSNYLFPDCRVISGHQEALRFLQKNSSKFHFRRTRMLPVSGAFHTRLMEPAVEPLTQALKAVDIKKPLVSVYSNVHAHRYRHPGHIHKLLAQQLVSPVKWEQTMHAIYERKKGRGFPQTFEVGPGRQLGAILKSCNMQAWKSYSAVDVLQTLEHVDLDPQEPPR

SEQ ID NO: 899541 - protein, 211 aa, Homo sapiens
AAVERSVATVTRAGRCPTMSVRVARVAWVRGLGASYRRGASSFPVPPPGAQGVAELLRDATGAEEEAPWAATERRMPGQCSVLLFPGQGSQVVGMGRGLLNYPRVRELYAAARRVLGYDLLELSLHGPQETLDRTVHCQPAIFVASLAAVEKLHHLQPSVHPPRPPKVLGLQVIENCVAAAGFSVGEFAALVFAGAMEFAEGSTVSPEEFL

SEQ ID NO: 899542 - protein, 408 aa, Homo sapiens; identical to SEQ ID NO: 899538

SEQ ID NO: 899543 - protein, 198 aa, Homo sapiens; identical to SEQ ID NO: 899537

SEQ ID NO: 899544 - protein, 165 aa, Homo sapiens
AAVERSVATVTRAGRCPTMSVRVARVAWVRGLGASYRRGASSFPVPPPGAQGVAELLRDATGAEEEAPWAATERRMPGQCSVLLFPGQGSQVVGMGRGLLNYPRVRELYAAARRVLGYDLLELSLHGPQETLDRTVHCQPAIFVASLAAVEKLHHLQPSVRPEAP

SEQ ID NO: 899545 - protein, 85 aa, Homo sapiens
RHSGFICLQADYVSSSLSSLSLDPPPELFSRPFRLRTGLRHNGAIFGLAGVGHHAPATPLPFRGTIKGAARRLHLFASRSWKCSY

SEQ ID NO: 899546 - protein, 109 aa, Homo sapiens
MQVFRVQMSVDIIGTPFSRVRIRRPATHGLPLPIVMVLFLNLFCEKAPRYFKLELQEKHQVGLFLNGSHPSADYCCLPTTFHLVTPLKLSTSTIFFFYHKAFFQMESCF

SEQ ID NO: 899547 - protein, 85 aa, Homo sapiens; identical to SEQ ID NO: 899545

SEQ ID NO: 899548 - protein, 85 aa, Homo sapiens; identical to SEQ ID NO: 899545

SEQ ID NO: 899549 - protein, 85 aa, Homo sapiens; identical to SEQ ID NO: 899545

SEQ ID NO: 899550 - protein, 157 aa, Homo sapiens
MIGEIAAAVSFISKFLRLAEAARLIPVLAAQPGWFLEIVLSGTTVLFLKPCPLFPSPHMHNNGCNPGHFKKLIVFIFAPQRSLGRRNPQWELTILSVVSLFFFSSIEHYKHHWFPEKPCKGSGYRCIRINHKMDPLIGQAAQRIGLSSQELFRLLPK

SEQ ID NO: 899551 - protein, 85 aa, Homo sapiens; identical to SEQ ID NO: 899545

SEQ ID NO: 899552 - protein, 85 aa, Homo sapiens; identical to SEQ ID NO: 899545

SEQ ID NO: 899553 - protein, 85 aa, Homo sapiens; identical to SEQ ID NO: 899545

SEQ ID NO: 899554 - protein, 85 aa, Homo sapiens; identical to SEQ ID NO: 899545

SEQ ID NO: 899555 - protein, 85 aa, Homo sapiens; identical to SEQ ID NO: 899545

SEQ ID NO: 899556 - protein, 72 aa, Homo sapiens
EAGAAVRGPSADLGTKEPWGWEHYKHHWFPEKPCKGSGYRCIRINHKMDPLIGQAAQRIGLSSQELFRLLPK

SEQ ID NO: 899557 - protein, 105 aa, Homo sapiens
MIGEIAAAVSFISKFLRTKGLTSERQLQTFSQSLQELLAASDYVKIRWEDDCPQDRKRALTEEPNGQYLDLDFSTQEPGEMNVCCSSHPVNGIWLWAAQLTRERI

SEQ ID NO: 899558 - protein, 423 aa, Homo sapiens
MGFWGSASHRDPLAPKVPVTGWAPSCLSWNTLLGWFWSWRSCQSADLTSHLSRISLAGVEPSLVQAALGQLVRLSCSDDTAPESQAAWQKDGQPISSDRHRLQFDGSLIIHPLQAEDAGTYSCGSTRPGRDSQKIQLRIIGGDMAVLSEAELSRFPQPRDPAQDFGQAGAAGPLGAIPSSHPQPANRLRLDQNQPRVVDASPGQRIRMTCRAEGFPPPAIEWQRDGQPVSSPRHQLQPDGSLVISRVAVEDGGFYTCVAFNGQDRDQRWVQLRVLGELTISGLPPTVTVPEGDTARLLCVVAGESVNIRWSRNGLPVQADGHRVHQSPDGTLLIYNLRARDEGSYTCSAYQGSQAVSRSTEVKVVSPAPTAQPRDPGRDCVDQPELANCDLILQAQLCGNEYYSSFCCASCSRFQPHAQPIWQ

SEQ ID NO: 899559 - protein, 251 aa, Homo sapiens
RRPRPPLLLRRHPGRPASPELARAWPRGPSAHGAGGAVGMGPMWRMRGGATRRGSCCGGDGAADGRGPGRSGRARGGGSPSGGGGGVGWRGRADGARQQLEERFADLAASHLEAIRARDEWDRQNARLRQENARLRLENRRLKRENRSLFRQALRLPGEGGNGTPAEARRVPEEASTNRRARDSGREDEPGSPRALRARLEKLEAMYRRALLQLHLEQRGPRPSGDKEEQPLQEPDSGLRSRDSEPSGPWL

SEQ ID NO: 899560 - protein, 251 aa, Homo sapiens; identical to SEQ ID NO: 899559

SEQ ID NO: 899561 - protein, 184 aa, Homo sapiens
ARESGVGLGCDYAASSYSAEERGGWDWGVVQAIHGFRETEKSRWSEASRAILQRVQAAAFGPGQTLLSSVHVLDLEARGYIKPHVDSIKFCGATIAGLSLLSPSVMRLVHTQEPGEWLELLLEPGSLYILRGSARYDFSHEILRDEESFFGERRIPRGRRISVICRSLPEGMGPGESGQPPPAC

SEQ ID NO: 899562 - protein, 92 aa, Homo sapiens
MAGTGLLALRTLPGPSWVRGSGPSVLSRLQDAAVVRPGFLSTAEEETLSRELEPELRRRRYEYDHWDAKTTLPGRTIGDRCGWSMKRKSSSR

SEQ ID NO: 899563 - protein, 221 aa, Homo sapiens
MAGTGLLALRTLPGPSWVRGSGPSVLSRLQDAAVVRPGFLSTAEEETLSRELEPELRRRRYEYDHWDAAIHGFRETEKSRWSEASRAILQRVQAAAFGPGQTLLSSVHVLDLEARGYIKPHVDSIKFCGATIAGLSLLSPSVMRLVHTQEPGEWLELLLEPGSLYILRGSARYDFSHEILRDEESFFGERRIPRGRRISVICRSLPEGMGPGESGQPPPAC

SEQ ID NO: 899564 - protein, 221 aa, Homo sapiens; identical to SEQ ID NO: 899563

SEQ ID NO: 899565 - protein, 184 aa, Homo sapiens; identical to SEQ ID NO: 899561

SEQ ID NO: 899566 - protein, 221 aa, Homo sapiens; identical to SEQ ID NO: 899563

SEQ ID NO: 899567 - protein, 180 aa, Homo sapiens
WGIERSPSTKVYTCPNKPEIVLQAALSKCMLRVPGSKGSTGGFNRGHCFRRRKHMFHGVSWGVLTAVALHSLLYLLGSNARQPSSSASSRRAEREQLFLQSWKFDTIRFELLEIQHMLNLKYKGEKINQLLKHKNEYQGPDQISHSSFLATLSAPHAPEYPPKKIIGFKTISAPHPKNNC

SEQ ID NO: 899568 - protein, 152 aa, Homo sapiens
MAHRFPALTQEQKKELSEIAQSIVANGKGILAADESVGTMGNRLQRIKVENTEENRRQFREILFSVDSSINQSIGGVILFHETLYQKDSQGKLFRNILKEKGIVVGIKLDQGGAPLAGEQTKKPPFKGLMASQSAVLSTRKMVLTLGSGVLC

SEQ ID NO: 899569 - protein, 346 aa, Homo sapiens
MAHRFPALTQEQKKELSEIAQSIVANGKGILAADESVGTMGNRLQRIKVENTEENRRQFREILFSVDSSINQSIGGVILFHETLYQKDSQGKLFRNILKGTNKETTIQGLDGLSERCAQYKKDGVDFGKWRAVLRIADQCPSSLAIQENANALARYASICQQNGLVPIVEPEVIPDGDHDLEHCQYVTEKVLAAVYKALNDHHVYLEGTLLKPNMVTAGHACTKKYTPEQVAMATVTALHRTVPAAVPGICFLSGGMSEEDATLNLNAINLCPLPKPWKLSFSYGRALQASALAAWGGKAANKEATQEAFMKRAMANCQAAKGQYVHTGSSGAASTQSLFTACYTY

SEQ ID NO: 899570 - protein, 152 aa, Homo sapiens; identical to SEQ ID NO: 899568

SEQ ID NO: 899571 - protein, 152 aa, Homo sapiens; identical to SEQ ID NO: 899568

SEQ ID NO: 899572 - protein, 134 aa, Homo sapiens
MAHRFPALTQEQKKELSEIAQSIVANGKGILAADESVGTMGNRLQRIKVGSINQSIGGVILFHETLYQKDSQGKLFRNILKEKGIVVGIKLDQGGAPLAGEQTKKPPFKGLMASQSAVLSTRKMVLTLGSGVLC

SEQ ID NO: 899573 - protein, 152 aa, Homo sapiens; identical to SEQ ID NO: 899568

SEQ ID NO: 899574 - protein, 152 aa, Homo sapiens; identical to SEQ ID NO: 899568

SEQ ID NO: 899575 - protein, 185 aa, Homo sapiens
MNGLVPIVEPEVIPDGDHDLEHCQYVTEKVLAAVYKALNDHHVYLEGTLLKPNMVTAGHACTKKYTPEQVAMATVTALHRTVPAAVPGICFLSGGMSEEDATLNLNAINLCPLPKPWKLSFSYGRALQASALAAWGGKAANKEATQEAFMKRAMANCQAAKGQYVHTGSSGAASTQSLFTACYTY

SEQ ID NO: 899576 - protein, 152 aa, Homo sapiens; identical to SEQ ID NO: 899568

SEQ ID NO: 899577 - protein, 152 aa, Homo sapiens; identical to SEQ ID NO: 899568

SEQ ID NO: 899578 - protein, 205 aa, Homo sapiens
MRPGDWFRSFCQATNKNSFILPPCSVNVPRSSGSMTSFEFHLVGPLVLQVLAAVYKALNDHHVYLEGTLLKPNMVTAGHACTKKYTPEQVAMATVTALHRTVPAAVPGICFLSGGMSEEDATLNLNAINLCPLPKPWKLSFSYGRALQASALAAWGGKAANKEATQEAFMKRAMANCQAAKGQYVHTGSSGAASTQSLFTACYTY

SEQ ID NO: 899579 - protein, 152 aa, Homo sapiens; identical to SEQ ID NO: 899568

SEQ ID NO: 899580 - protein, 104 aa, Homo sapiens
MASLLPGICFLSGGMSEEDATLNLNAINLCPLPKPWKLSFSYGRALQASALAAWGGKAANKEATQEAFMKRAMANCQAAKGQYVHTGSSGAASTQSLFTACYTY

SEQ ID NO: 899581 - protein, 272 aa, Homo sapiens
  misc_feature (14)..(15): Xaa can be any naturally occurring amino acid
GGEGGGAGTGRRPXXRELPHPQLLISRRTLLSQTTCHHGPPISSPHPGAEEGAGKAVQKHPQGKGDRGGNQVRPRRCSSCRRTNKETTIQGLDGLSERCAQYKKDGVDFGKWRAVLRIADQCPSSLAIQENANALARYASICQQNGLVPIVEPEVIPDGDHDLEHCQYVTEKVLAAVYKALNDHHVYLEGTLLKPNMVTAGHACTKKYTPEQVAMATVTALHRTVPAAVPGICFLSGGMSEEDATLNLNAINLCPSRSSQPAIPTRVQCPPA

SEQ ID NO: 899582 - protein, 51 aa, Homo sapiens
AALGPPTIGTMGNRLQRIKVENTEENRRQFREILFSVDSSINQSIGGVILF

SEQ ID NO: 899583 - protein, 152 aa, Homo sapiens; identical to SEQ ID NO: 899568

SEQ ID NO: 899584 - protein, 134 aa, Homo sapiens; identical to SEQ ID NO: 899572

SEQ ID NO: 899585 - protein, 346 aa, Homo sapiens; identical to SEQ ID NO: 899569

SEQ ID NO: 899586 - protein, 344 aa, Homo sapiens
MAHRFPALTQEQKKELSEIAQSIVANGKGILAADESVGTMGNRLQRIKVENTEENRRQFREILFSVDSSINQSIGGVILFHETLYQKDSQGKLFRNILKEKGIVVGIKLDQGGAPLAGKKDGVDFGKWRAVLRIADQCPSSLAIQENANALARYASICQQNGLVPIVEPEVIPDGDHDLEHCQYVTEKVLAAVYKALNDHHVYLEGTLLKPNMVTAGHACTKKYTPEQVAMATVTALHRTVPAAVPGICFLSGGMSEEDATLNLNAINLCPLPKPWKLSFSYGRALQASALAAWGGKAANKEATQEAFMKRAMANCQAAKGQYVHTGSSGAASTQSLFTACYTY

SEQ ID NO: 899587 - protein, 152 aa, Homo sapiens; identical to SEQ ID NO: 899568

SEQ ID NO: 899588 - protein, 165 aa, Homo sapiens
AHTAHTRAHNTQTHSTRTHMHTQEQKKELSEIAQSIVANGKGILAADESVGTMGNRLQRIKVENTEENRRQFREILFSVDSSINQSIGGVILFHETLYQKDSQGKLFRNILKEKGIVVGIKLDQGGAPLAGEQTKKPPFKGLMASQSAVLSTRKMVLTLGSGVLC

SEQ ID NO: 899589 - protein, 255 aa, Homo sapiens
MAHRFPALTQEQKKELSEIAQSIVANGKGILAADESVGTMGNRLQRIKVGSINQSIGGVILFHETLYQKDSNGLVPIVEPEVIPDGDHDLEHCQYVTEKVLAAVYKALNDHHVYLEGTLLKPNMVTAGHACTKKYTPEQVAMATVTALHRTVPAAVPGICFLSGGMSEEDATLNLNAINLCPLPKPWKLSFSYGRALQASALAAWGGKAANKEATQEAFMKRAMANCQAAKGQYVHTGSSGAASTQSLFTACYTY

SEQ ID NO: 899590 - protein, 152 aa, Homo sapiens; identical to SEQ ID NO: 899568

SEQ ID NO: 899591 - protein, 152 aa, Homo sapiens; identical to SEQ ID NO: 899568

SEQ ID NO: 899592 - protein, 152 aa, Homo sapiens; identical to SEQ ID NO: 899568

SEQ ID NO: 899593 - protein, 152 aa, Homo sapiens; identical to SEQ ID NO: 899568

SEQ ID NO: 899594 - protein, 152 aa, Homo sapiens; identical to SEQ ID NO: 899568

SEQ ID NO: 899595 - protein, 161 aa, Homo sapiens
MVPKLFTSQICLLLLLGLLAVEGSLHVKPPQFTWAQWFETQHINMTSQQCTNAMQVINNYQRRCKNQNTFLLTTFANVVNVCGNPNMTCPSNKTRKNCHHSGSQVPLIHCNLTTPSPQNISNCRYAQTPANMFYIVACDNRDQRRDPPQYPVVPVHLDRII

SEQ ID NO: 899596 - protein, 105 aa, Homo sapiens
MTRCCSLRNRYLPSYTIGYLRACKLCTPDYDLILVRIGETLCDHSGSQVPLIHCNLTTPSPQNISNCRYAQTPANMFYIVACDNRDQRRDPPQYPVVPVHLDRII

SEQ ID NO: 899597 - protein, 2813 aa, Homo sapiens
MIPARFAGVLLALALILPGTLCAEGTRGRSSTARCSLFGSDFVNTFDGSMYSFAGYCSYLLAGGCQKRSFSIIGDFQNGKRVSLSVYLGEFFDIHLFVNGTVTQGDQRVSMPYASKGLYLETEAGYYKLSGEAYGFVARIDGSGNFQVLLSDRYFNKTCGLCGNFNIFAEDDFMTQEGTLTSDPYDFANSWALSSGEQWCERASPPSSSCNISSGEMQKGLWEQCQLLKSTSVFARCHPLVDPEPFVALCEKTLCECAGGLECACPALLEYARTCAQEGMVLYGWTDHSACSPVCPAGMEYRQCVSPCARTCQSLHIKEMCQERCVDGCSCPEGQLLDEGLCVESTECPCVHSGKRYPPGTSLSRDCNTCICRNSQWICSNEECPGECLVTGQSHFKSFDNRYFTFSGICQYLLARDCQDHSFSIVIETVQCADDRDAVCTRSVTVRLPGLHNSLVKLKHGAGVAMDGQDVQLPLLKGDLRIQHTVTASVRLSYGEDLQMDWDGRGRLLVKLSPVYAGKTCGLCGNYNGNQGDDFLTPSGLAEPRVEDFGNAWKLHGDCQDLQKQHSDPCALNPRMTRFSEEACAVLTSPTFEACHRAVSPLPYLRNCRYDVCSCSDGRECLCGALASYAAACAGRGVRVAWREPGRCELNCPKGQVYLQCGTPCNLTCRSLSYPDEECNEACLEGCFCPPGLYMDERGDCVPKAQCPCYYDGEIFQPEDIFSDHHTMCYCEDGFMHCTMSGVPGSLLPDAVLSSPLSHRSKRSLSCRPPMVKLVCPADNLRAEGLECTKTCQNYDLECMSMGCVSGCLCPPGMVRHENRCVALERCPCFHQGKEYAPGETVKIGCNTCVCRDRKWNCTDHVCDATCSTIGMAHYLTFDGLKYLFPGECQYVLVQDYCGSNPGTFRILVGNKGCSHPSVKCKKRVTILVEGGEIELFDGEVNVKRPMKDETHFEVVESGRYIILLLGKALSVVWDRHLSISVVLKQTYQEKVCGLCGNFDGIQNNDLTSSNLQVEEDPVDFGNSWKVSSQCADTRKVPLDSSPATCHNNIMKQTMVDSSCRILTSDVFQDCNKLVDPEPYLDVCIYDTCSCESIGDCACFCDTIAAYAHVCAQHGKVVTWRTATLCPQSCEERNLRENGYECEWRYNSCAPACQVTCQHPEPLACPVQCVEGCHAHCPPGKILDELLQTCVDPEDCPVCEVAGRRFASGKKVTLNPSDPEHCQICHCDVVNLTCEACQEPGGLVVPPTDAPVSPTTLYVEDISEPPLHDFYCSRLLDLVFLLDGSSRLSEAEFEVLKAFVVDMMERLRISQKWVRVAVVEYHDGSHAYIGLKDRKRPSELRRIASQVKYAGSQVASTSEVLKYTLFQIFSKIDRPEASRIALLLMASQEPQRMSRNFVRYVQGLKKKKVIVIPVGIGPHANLKQIRLIEKQAPENKAFVLSSVDELEQQRDEIVSYLCDLAPEAPPPTLPPDMAQVTVGPGLLGVSTLGPKRNSMVLDVAFVLEGSDKIGEADFNRSKEFMEEVIQRMDVGQDSIHVTVLQYSYMVTVEYPFSEAQSKGDILQRVREIRYQGGNRTNTGLALRYLSDHSFLVSQGDREQAPNLVYMVTGNPASDEIKRLPGDIQVVPIGVGPNANVQELERIGWPNAPILIQDFETLPREAPDLVLQRCCSGEGLQIPTLSPAPDCSQPLDVILLLDGSSSFPASYFDEMKSFAKAFISKANIGPRLTQVSVLQYGSITTIDVPWNVVPEKAHLLSLVDVMQREGGPSQIGDALGFAVRYLTSEMHGARPGASKAVVILVTDVSVDSVDAAADAARSNRVTVFPIGIGDRYDAAQLRILAGPAGDSNVVKLQRIEDLPTMVTLGNSFLHKLCSGFVRICMDEDGNEKRPGDVWTLPDQCHTVTCQPDGQTLLKSHRVNCDRGLRPSCPNSQSPVKVEETCGCRWTCPCVCTGSSTRHIVTFDGQNFKLTGSCSYVLFQNKEQDLEVILHNGACSPGARQGCMKSIEVKHSALSVELHSDMEVTVNGRLVSVPYVGGNMEVNVYGAIMHEVRFNHLGHIFTFTPQNNEFQLQLSPKTFASKTYGLCGICDENGANDFMLRDGTVTTDWKTLVQEWTVQRPGQTCQPILEEQCLVPDSSHCQVLLLPLFAECHKVLAPATFYAICQQDSCHQEQVCEVIASYAHLCRTNGVCVDWRTPDFCAMSCPPSLVYNHCEHGCPRHCDGNVSSCGDHPSEGCFCPPDKVMLEGSCVPEEACTQCIGEDGVQHQFLEAWVPDHQPCQICTCLSGRKVNCTTQPCPTAKAPTCGLCEVARLRQNADQCCPEYECVCDPVSCDLPPVPHCERGLQPTLTNPGECRPNFTCACRKEECKRVSPPSCPPHRLPTLRKTQCCDEYECACNCVNSTVSCPLGYLASTATNDCGCTTTTCLPDKVCVHRSTIYPVGQFWEEGCDVCTCTDMEDAVMGLRVAQCSQKPCEDSCRSGFTYVLHEGECCGRCLPSACEVVTGSPRGDSQSSWKSVGSQWASPENPCLINECVRVKEEVFIQQRNVSCPQLEVPVCPSGFQLSCKTSACCPSCRCERMEACMLNGTVIGPGKTVMIDVCTTCRCMVQVGVISGFKLECRKTTCNPCPLGYKEENNTGECCGRCLPTACTIQLRGGQIMTLKRDETLQDGCDTHFCKVNERGEYFWEKRVTGCPPFDEHKCLAEGGKIMKIPGTCCDTCEEPECNDITARLQYVKVGSCKSEVEVDIHYCQGKCASKAMYSIDINDVQDQCSCCSPTRTEPMQVALHCTNGSVVYHEVLNAMECKCSPRKCSK

SEQ ID NO: 899598 - protein, 2850 aa, Homo sapiens
MGAQDEEEGIQDLDGLLVFDKIVEVTLLNLPWYNEETEGQRGEMTAPKSPRAKIRGTLCAEGTRGRSSTARCSLFGSDFVNTFDGSMYSFAGYCSYLLAGGCQKRSFSIIGDFQNGKRVSLSVYLGEFFDIHLFVNGTVTQGDQRVSMPYASKGLYLETEAGYYKLSGEAYGFVARIDGSGNFQVLLSDRYFNKTCGLCGNFNIFAEDDFMTQEGTLTSDPYDFANSWALSSGEQWCERASPPSSSCNISSGEMQKGLWEQCQLLKSTSVFARCHPLVDPEPFVALCEKTLCECAGGLECACPALLEYARTCAQEGMVLYGWTDHSACSPVCPAGMEYRQCVSPCARTCQSLHIKEMCQERCVDGCSCPEGQLLDEGLCVESTECPCVHSGKRYPPGTSLSRDCNTCICRNSQWICSNEECPGECLVTGQSHFKSFDNRYFTFSGICQYLLARDCQDHSFSIVIETVQCADDRDAVCTRSVTVRLPGLHNSLVKLKHGAGVAMDGQDVQLPLLKGDLRIQHTVTASVRLSYGEDLQMDWDGRGRLLVKLSPVYAGKTCGLCGNYNGNQGDDFLTPSGLAEPRVEDFGNAWKLHGDCQDLQKQHSDPCALNPRMTRFSEEACAVLTSPTFEACHRAVSPLPYLRNCRYDVCSCSDGRECLCGALASYAAACAGRGVRVAWREPGRCELNCPKGQVYLQCGTPCNLTCRSLSYPDEECNEACLEGCFCPPGLYMDERGDCVPKAQCPCYYDGEIFQPEDIFSDHHTMCYCEDGFMHCTMSGVPGSLLPDAVLSSPLSHRSKRSLSCRPPMVKLVCPADNLRAEGLECTKTCQNYDLECMSMGCVSGCLCPPGMVRHENRCVALERCPCFHQGKEYAPGETVKIGCNTCVCRDRKWNCTDHVCDATCSTIGMAHYLTFDGLKYLFPGECQYVLVQDYCGSNPGTFRILVGNKGCSHPSVKCKKRVTILVEGGEIELFDGEVNVKRPMKDETHFEVVESGRYIILLLGKALSVVWDRHLSISVVLKQTYQEKVCGLCGNFDGIQNNDLTSSNLQVEEDPVDFGNSWKVSSQCADTRKVPLDSSPATCHNNIMKQTMVDSSCRILTSDVFQDCNKLVDPEPYLDVCIYDTCSCESIGDCACFCDTIAAYAHVCAQHGKVVTWRTATLCPQSCEERNLRENGYECEWRYNSCAPACQVTCQHPEPLACPVQCVEGCHAHCPPGKILDELLQTCVDPEDCPVCEVAGRRFASGKKVTLNPSDPEHCQICHCDVVNLTCEACQEPGGLVVPPTDAPVSPTTLYVEDISEPPLHDFYCSRLLDLVFLLDGSSRLSEAEFEVLKAFVVDMMERLRISQKWVRVAVVEYHDGSHAYIGLKDRKRPSELRRIASQVKYAGSQVASTSEVLKYTLFQIFSKIDRPEASRIALLLMASQEPQRMSRNFVRYVQGLKKKKVIVIPVGIGPHANLKQIRLIEKQAPENKAFVLSSVDELEQQRDEIVSYLCDLAPEAPPPTLPPDMAQVTVGPGLLGVSTLGPKRNSMVLDVAFVLEGSDKIGEADFNRSKEFMEEVIQRMDVGQDSIHVTVLQYSYMVTVEYPFSEAQSKGDILQRVREIRYQGGNRTNTGLALRYLSDHSFLVSQGDREQAPNLVYMVTGNPASDEIKRLPGDIQVVPIGVGPNANVQELERIGWPNAPILIQDFETLPREAPDLVLQRCCSGEGLQIPTLSPAPDCSQPLDVILLLDGSSSFPASYFDEMKSFAKAFISKANIGPRLTQVSVLQYGSITTIDVPWNVVPEKAHLLSLVDVMQREGGPSQIGDALGFAVRYLTSEMHGARPGASKAVVILVTDVSVDSVDAAADAARSNRVTVFPIGIGDRYDAAQLRILAGPAGDSNVVKLQRIEDLPTMVTLGNSFLHKLCSGFVRICMDEDGNEKRPGDVWTLPDQCHTVTCQPDGQTLLKSHRVNCDRGLRPSCPNSQSPVKVEETCGCRWTCPCVCTGSSTRHIVTFDGQNFKLTGSCSYVLFQNKEQDLEVILHNGACSPGARQGCMKSIEVKHSALSVELHSDMEVTVNGRLVSVPYVGGNMEVNVYGAIMHEVRFNHLGHIFTFTPQNNEFQLQLSPKTFASKTYGLCGICDENGANDFMLRDGTVTTDWKTLVQEWTVQRPGQTCQPILEEQCLVPDSSHCQVLLLPLFAECHKVLAPATFYAICQQDSCHQEQVCEVIASYAHLCRTNGVCVDWRTPDFCAMSCPPSLVYNHCEHGCPRHCDGNVSSCGDHPSEGCFCPPDKVMLEGSCVPEEACTQCIGEDGVQHQFLEAWVPDHQPCQICTCLSGRKVNCTTQPCPTAKAPTCGLCEVARLRQNADQCCPEYECVCDPVSCDLPPVPHCERGLQPTLTNPGECRPNFTCACRKEECKRVSPPSCPPHRLPTLRKTQCCDEYECACNCVNSTVSCPLGYLASTATNDCGCTTTTCLPDKVCVHRSTIYPVGQFWEEGCDVCTCTDMEDAVMGLRVAQCSQKPCEDSCRSGFTYVLHEGECCGRCLPSACEVVTGSPRGDSQSSWKSVGSQWASPENPCLINECVRVKEEVFIQQRNVSCPQLEVPVCPSGFQLSCKTSACCPSCRCERMEACMLNGTVIGPGKTVMIDVCTTCRCMVQVGVISGFKLECRKTTCNPCPLGYKEENNTGECCGRCLPTACTIQLRGGQIMTLKRDETLQDGCDTHFCKVNERGEYFWEKRVTGCPPFDEHKCLAEGGKIMKIPGTCCDTCEEPECNDITARLQYVKVGSCKSEVEVDIHYCQGKCASKAMYSIDINDVQDQCSCCSPTRTEPMQVALHCTNGSVVYHEVLNAMECKCSPRKCSK

SEQ ID NO: 899599 - protein, 2758 aa, Homo sapiens
MIPARFAGVLLALALILPGTLCAEGTRGRSSTARCSLFGSDFVNTFDGSMYSFAGYCSYLLAGGCQKRSFSIIGDFQNGKRVSLSVYLGEFFDIHLFVNGTVTQGDQRVSMPYASKGLYLETEAGYYKLSGEAYGFVARIDGSGNFQVLLSDRYFNKTCGLCGNFNIFAEDDFMTQEGTLTSDPYDFANSWALSSGEQWCERASPPSSSCNISSGEMQKGLWEQCQLLKSTSVFARCHPLVDPEPFVALCEKTLCECAGGLECACPALLEYARTCAQEGMVLYGWTDHSACSPVCPAGMEYRQCVSPCARTCQSLHIKEMCQERCVDGCSCPEGQLLDEGLCVESTECPCVHSGKRYPPGTSLSRDCNTCICRNSQWICSNEECPGECLVTGQSHFKSFDNRYFTFSGICQYLLARDCQDHSFSIVIETVQCADDRDAVCTRSVTVRLPGLHNSLVKLKHGAGVAMDGQDVQLPLLKGDLRIQHTVTASVRLSYGEDLQMDWDGRGRLLVKLSPVYAGKTCGLCGNYNGNQGDDFLTPSGLAEPRVEDFGNAWKLHGDCQDLQKQHSDPCALNPRMTRFSEEACAVLTSPTFEACHRAVSPLPYLRNCRYDVCSCSDGRECLCGALASYAAACAGRGVRVAWREPGRCELNCPKGQVYLQCGTPCNLTCRSLSYPDEECNEACLEGCFCPPGLYMDERGDCVPKAQCPCYYDGEIFQPEDIFSDHHTMCYCEDGFMHCTMSGVPGSLLPDAVLSSPLSHRSKRSLSCRPPMVKLVCPADNLRAEGLECTKTCQNYDLECMSMGCVSGCLCPPGMVRHENRCVALERCPCFHQGKEYAPGETVKIGCNTCVCRDRKWNCTDHVCDATCSTIGMAHYLTFDGLKYLFPGECQYVLVQDYCGSNPGTFRILVGNKGCSHPSVKCKKRVTILVEGGEIELFDGEVNVKRPMKDETHFEVVESGRYIILLLGKALSVVWDRHLSISVVLKQTYQEKVCGLCGNFDGIQNNDLTSSNLQVEEDPVDFGNSWKVSSQCADTRKVPLDSSPATCHNNIMKQTMVDSSCRILTSDVFQDCNKLVDPEPYLDVCIYDTCSCESIGDCACFCDTIAAYAHVCAQHGKVVTWRTATLCPQSCEERNLRENGYECEWRYNSCAPACQVTCQHPEPLACPVQCVEGCHAHCPPGKILDELLQTCVDPEDCPVCEVAGRRFASGKKVTLNPSDPEHCQICHCDVVNLTCEACQEPGGLVVPPTDAPVSPTTLYVEDISEPPLHDFYCSRLLDLVFLLDGSSRLSEAEFEVLKAFVVDMMERLRISQKWVRVAVVEYHDGSHAYIGLKDRKRPSELRRIASQVKYAGSQVASTSEVLKYTLFQIFSKIDRPEASRIALLLMASQEPQRMSRNFVRYVQGLKKKKVIVIPVGIGPHANLKQIRLIEKQAPENKAFVLSSVDELEQQRDEIVSYLCDLAPEAPPPTLPPDMAQVTVGPGLLGVSTLGPKRNSMVLDVAFVLEGSDKIGEADFNRSKEFMEEVIQRMDVGQDSIHVTVLQYSYMVTVEYPFSEAQSKGDILQRVREIRYQGGNRTNTGLALRYLSDHSFLVSQGDREQAPNLVYMVTGNPASDEIKRLPGDIQVVPIGVGPNANVQELERIGWPNAPILIQDFETLPREAPDLVLQRCCSGEGLQIPTLSPAPDCSQPLDVILLLDGSSSFPASYFDEMKSFAKAFISKANIGPRLTQVSVLQYGSITTIDVPWNVVPEKAHLLSLVDVMQREGGPSQIGDALGFAVRYLTSEMHGARPGASKAVVILVTDVSVDSVDAAADAARSNRVTVFPIGIGDRYDAAQLRILAGPAGDSNVVKLQRIEDLPTMVTLGNSFLHKLCSGFVRICMDEDGNEKRPGDVWTLPDQCHTVTCQPDGQNFKLTGSCSYVLFQNKEQDLEVILHNGACSPGARQGCMKSIEVKHSALSVELHSDMEVTVNGRLVSVPYVGGNMEVNVYGAIMHEVRFNHLGHIFTFTPQNNEFQLQLSPKTFASKTYGLCGICDENGANDFMLRDGTVTTDWKTLVQEWTVQRPGQTCQPILEEQCLVPDSSHCQVLLLPLFAECHKVLAPATFYAICQQDSCHQEQVCEVIASYAHLCRTNGVCVDWRTPDFCAMSCPPSLVYNHCEHGCPRHCDGNVSSCGDHPSEGCFCPPDKVMLEGSCVPEEACTQCIGEDGVQHQFLEAWVPDHQPCQICTCLSGRKVNCTTQPCPTAKAPTCGLCEVARLRQNADQCCPEYECVCDPVSCDLPPVPHCERGLQPTLTNPGECRPNFTCACRKEECKRVSPPSCPPHRLPTLRKTQCCDEYECACNCVNSTVSCPLGYLASTATNDCGCTTTTCLPDKVCVHRSTIYPVGQFWEEGCDVCTCTDMEDAVMGLRVAQCSQKPCEDSCRSGFTYVLHEGECCGRCLPSACEVVTGSPRGDSQSSWKSVGSQWASPENPCLINECVRVKEEVFIQQRNVSCPQLEVPVCPSGFQLSCKTSACCPSCRCERMEACMLNGTVIGPGKTVMIDVCTTCRCMVQVGVISGFKLECRKTTCNPCPLGYKEENNTGECCGRCLPTACTIQLRGGQIMTLKRDETLQDGCDTHFCKVNERGEYFWEKRVTGCPPFDEHKCLAEGGKIMKIPGTCCDTCEEPECNDITARLQYVKVGSCKSEVEVDIHYCQGKCASKAMYSIDINDVQDQCSCCSPTRTEPMQVALHCTNGSVVYHEVLNAMECKCSPRKCSK

SEQ ID NO: 899600 - protein, 2961 aa, Homo sapiens
MIPARFAGVLLALALILPGTLCAEGTRGRSSTARCSLFGSDFVNTFDGSMYSFAGYCSYLLAGGCQKRSFSIIGDFQNGKRVSLSVYLGEFFDIHLFVNGTVTQGDQRVSMPYASKGLYLETEAGYYKLSGEAYGFVARIDGSGNFQVLLSDRYFNKTCGLCGNFNIFAEDDFMTQEGTLTSDPYDFANSWALSSGEQWCERASPPSSSCNISSGEMQKGLWEQCQLLKSTSVFARCHPLVDPEPFVALCEKTLCECAGGLECACPALLEYARTCAQEGMVLYGWTDHSACSPVCPAGMEYRQCVSPCARTCQSLHIKEMCQERCVDGCSCPEGQLLDEGLCVESTECPCVHSGKRYPPGTSLSRDCNTCICRNSQWICSNEECPGECLVTGQSHFKSFDNRYFTFSGICQYLLARDCQDHSFSIVIETVQCADDRDAVCTRSVTVRLPGLHNSLVKLKHGAGVAMDGQDVQLPLLKGDLRIQHTVTASVRLSYGEDLQMDWDGRGRLLVKLSPVYAGKTCGLCGNYNGNQGDDFLTPSGLAEPRVEDFGNAWKLHGDCQDLQKQHSDPCALNPRMTRFSEEACAVLTSPTFEACHRAVSPLPYLRNCRYDVCSCSDGRECLCGALASYAAACAGRGVRVAWREPGRCELNCPKGQVYLQCGTPCNLTCRSLSYPDEECNEACLEGCFCPPGLYMDERGDCVPKAQCPCYYDGEIFQPEDIFSDHHTMCYCEDGFMHCTMSGVPGSLLPDAVLSSPLSHRSKRSLSCRPPMVKLVCPADNLRAEGLECTKTCQNYDLECMSMGCVSGCLCPPGMVRHENRCVALERCPCFHQGKEYAPGETVKIGCNTCVCRDRKWNCTDHVCDATCSTIGMAHYLTFDGLKYLFPGECQYVLVQDYCGSNPGTFRILVGNKGCSHPSVKCKKRVTILVEGGEIELFDGEVNVKRPMKDETHFEVVESGRYIILLLGKALSVVWDRHLSISVVLKQTYQEKVCGLCGNFDGIQNNDLTSSNLQVEEDPVDFGNSWKVSSQCADTRKVPLDSSPATCHNNIMKQTMVDSSCRILTSDVFQDCNKLVDPEPYLDVCIYDTCSCESIGDCACFCDTIAAYAHVCAQHGKVVTWRTATLCPQSCEERNLRENGYECEWRYNSCAPACQVTCQHPEPLACPVQCVEGCHAHCPPGKILDELLQTCVDPEDCPVCEVAGRRFASGKKVTLNPSDPEHCQIWSVTSLSTGVHILEVGTQERKVRWNPGPSGNMNVVGAIVKVAGCGCHNGEGRCSLLSPWLLTGLASGKLAFGEVEGVLRVSSEPSEVLLISREHLLKSRSIQHHSLTLIKPSGSLNLERKFAGEGLWSQLLESDPAATICTNKNEHCLGHCDVVNLTCEACQEPGGLVVPPTDAPVSPTTLYVEDISEPPLHDFYCSRLLDLVFLLDGSSRLSEAEFEVLKAFVVDMMERLRISQKWVRVAVVEYHDGSHAYIGLKDRKRPSELRRIASQVKYAGSQVASTSEVLKYTLFQIFSKIDRPEASRIALLLMASQEPQRMSRNFVRYVQGLKKKKVIVIPVGIGPHANLKQIRLIEKQAPENKAFVLSSVDELEQQRDEIVSYLCDLAPEAPPPTLPPDMAQVTVGPGLLGVSTLGPKRNSMVLDVAFVLEGSDKIGEADFNRSKEFMEEVIQRMDVGQDSIHVTVLQYSYMVTVEYPFSEAQSKGDILQRVREIRYQGGNRTNTGLALRYLSDHSFLVSQGDREQAPNLVYMVTGNPASDEIKRLPGDIQVVPIGVGPNANVQELERIGWPNAPILIQDFETLPREAPDLVLQRCCSGEGLQIPTLSPAPDCSQPLDVILLLDGSSSFPASYFDEMKSFAKAFISKANIGPRLTQVSVLQYGSITTIDVPWNVVPEKAHLLSLVDVMQREGGPSQIGDALGFAVRYLTSEMHGARPGASKAVVILVTDVSVDSVDAAADAARSNRVTVFPIGIGDRYDAAQLRILAGPAGDSNVVKLQRIEDLPTMVTLGNSFLHKLCSGFVRICMDEDGNEKRPGDVWTLPDQCHTVTCQPDGQTLLKSHRVNCDRGLRPSCPNSQSPVKVEETCGCRWTCPCVCTGSSTRHIVTFDGQNFKLTGSCSYVLFQNKEQDLEVILHNGACSPGARQGCMKSIEVKHSALSVELHSDMEVTVNGRLVSVPYVGGNMEVNVYGAIMHEVRFNHLGHIFTFTPQNNEFQLQLSPKTFASKTYGLCGICDENGANDFMLRDGTVTTDWKTLVQEWTVQRPGQTCQPILEEQCLVPDSSHCQVLLLPLFAECHKVLAPATFYAICQQDSCHQEQVCEVIASYAHLCRTNGVCVDWRTPDFCAMSCPPSLVYNHCEHGCPRHCDGNVSSCGDHPSEGCFCPPDKVMLEGSCVPEEACTQCIGEDGVQHQFLEAWVPDHQPCQICTCLSGRKVNCTTQPCPTAKAPTCGLCEVARLRQNADQCCPEYECVCDPVSCDLPPVPHCERGLQPTLTNPGECRPNFTCACRKEECKRVSPPSCPPHRLPTLRKTQCCDEYECACNCVNSTVSCPLGYLASTATNDCGCTTTTCLPDKVCVHRSTIYPVGQFWEEGCDVCTCTDMEDAVMGLRVAQCSQKPCEDSCRSGFTYVLHEGECCGRCLPSACEVVTGSPRGDSQSSWKSVGSQWASPENPCLINECVRVKEEVFIQQRNVSCPQLEVPVCPSGFQLSCKTSACCPSCRCERMEACMLNGTVIGPGKTVMIDVCTTCRCMVQVGVISGFKLECRKTTCNPCPLGYKEENNTGECCGRCLPTACTIQLRGGQIMTLKRDETLQDGCDTHFCKVNERGEYFWEKRVTGCPPFDEHKCLAEGGKIMKIPGTCCDTCEEPECNDITARLQYVKVGSCKSEVEVDIHYCQGKCASKAMYSIDINDVQDQCSCCSPTRTEPMQVALHCTNGSVVYHEVLNAMECKCSPRKCSK

SEQ ID NO: 899601 - protein, 1789 aa, Homo sapiens
SLFETIELHFSFYLDPLILKLTIRTFAPRLRARVPEHLAIGLGHLRLPLQVDPEPYLDVCIYDTCSCESIGDCACFCDTIAAYAHVCAQHGKVVTWRTATLCPQSCEERNLRENGYECEWRYNSCAPACQVTCQHPEPLACPVQCVEGCHAHCPPGKILDELLQTCVDPEDCPVCEVAGRRFASGKKVTLNPSDPEHCQICHCDVVNLTCEACQEPGGLVVPPTDAPVSPTTLYVEDISEPPLHDFYCSRLLDLVFLLDGSSRLSEAEFEVLKAFVVDMMERLRISQKWVRVAVVEYHDGSHAYIGLKDRKRPSELRRIASQVKYAGSQVASTSEVLKYTLFQIFSKIDRPEASRIALLLMASQEPQRMSRNFVRYVQGLKKKKVIVIPVGIGPHANLKQIRLIEKQAPENKAFVLSSVDELEQQRDEIVSYLCDLAPEAPPPTLPPDMAQVTVGPGLLGVSTLGPKRNSMVLDVAFVLEGSDKIGEADFNRSKEFMEEVIQRMDVGQDSIHVTVLQYSYMVTVEYPFSEAQSKGDILQRVREIRYQGGNRTNTGLALRYLSDHSFLVSQGDREQAPNLVYMVTGNPASDEIKRLPGDIQVVPIGVGPNANVQELERIGWPNAPILIQDFETLPREAPDLVLQRCCSGEGLQIPTLSPAPDCSQPLDVILLLDGSSSFPASYFDEMKSFAKAFISKANIGPRLTQVSVLQYGSITTIDVPWNVVPEKAHLLSLVDVMQREGGPSQIGDALGFAVRYLTSEMHGARPGASKAVVILVTDVSVDSVDAAADAARSNRVTVFPIGIGDRYDAAQLRILAGPAGDSNVVKLQRIEDLPTMVTLGNSFLHKLCSGFVRICMDEDGNEKRPGDVWTLPDQCHTVTCQPDGQTLLKSHRVNCDRGLRPSCPNSQSPVKVEETCGCRWTCPCVCTGSSTRHIVTFDGQNFKLTGSCSYVLFQNKEQDLEVILHNGACSPGARQGCMKSIEVKHSALSVELHSDMEVTVNGRLVSVPYVGGNMEVNVYGAIMHEVRFNHLGHIFTFTPQNNEFQLQLSPKTFASKTYGLCGICDENGANDFMLRDGTVTTDWKTLVQEWTVQRPGQTCQPILEEQCLVPDSSHCQVLLLPLFAECHKVLAPATFYAICQQDSCHQEQVCEVIASYAHLCRTNGVCVDWRTPDFCAMSCPPSLVYNHCEHGCPRHCDGNVSSCGDHPSEGCFCPPDKVMLEGSCVPEEACTQCIGEDGVQHQFLEAWVPDHQPCQICTCLSGRKVNCTTQPCPTAKAPTCGLCEVARLRQNADQCCPEYECVCDPVSCDLPPVPHCERGLQPTLTNPGECRPNFTCACRKEECKRVSPPSCPPHRLPTLRKTQCCDEYECACNCVNSTVSCPLGYLASTATNDCGCTTTTCLPDKVCVHRSTIYPVGQFWEEGCDVCTCTDMEDAVMGLRVAQCSQKPCEDSCRSGFTYVLHEGECCGRCLPSACEVVTGSPRGDSQSSWKSVGSQWASPENPCLINECVRVKEEVFIQQRNVSCPQLEVPVCPSGFQLSCKTSACCPSCRCERMEACMLNGTVIGPGKTVMIDVCTTCRCMVQVGVISGFKLECRKTTCNPCPLGYKEENNTGECCGRCLPTACTIQLRGGQIMTLKRDETLQDGCDTHFCKVNERGEYFWEKRVTGCPPFDEHKCLAEGGKIMKIPGTCCDTCEEPECNDITARLQYVKVGSCKSEVEVDIHYCQGKCASKAMYSIDINDVQDQCSCCSPTRTEPMQVALHCTNGSVVYHEVLNAMECKCSPRKCSK

SEQ ID NO: 899602 - protein, 568 aa, Homo sapiens
DSQGERASVGLALPDAVLSPDEVRASPQRSLSLLCAVLDSTEEVNCTTQPCPTAKAPTCGLCEVARLRQNADQCCPEYECVCDPVSCDLPPVPHCERGLQPTLTNPGECRPNFTCACRKEECKRVSPPSCPPHRLPTLRKTQCCDEYECACNCVNSTVSCPLGYLASTATNDCGCTTTTCLPDKVCVHRSTIYPVGQFWEEGCDVCTCTDMEDAVMGLRVAQCSQKPCEDSCRSGFTYVLHEGECCGRCLPSACEVVTGSPRGDSQSSWKSVGSQWASPENPCLINECVRVKEEVFIQQRNVSCPQLEVPVCPSGFQLSCKTSACCPSCRCERMEACMLNGTVIGPGKTVMIDVCTTCRCMVQVGVISGFKLECRKTTCNPCPLGYKEENNTGECCGRCLPTACTIQLRGGQIMTLKRDETLQDGCDTHFCKVNERGEYFWEKRVTGCPPFDEHKCLAEGGKIMKIPGTCCDTCEEPECNDITARLQYVKVGSCKSEVEVDIHYCQGKCASKAMYSIDINDVQDQCSCCSPTRTEPMQVALHCTNGSVVYHEVLNAMECKCSPRKCSK

SEQ ID NO: 899603 - protein, 403 aa, Homo sapiens
PPFDEHKCLAEGGKIMKVPGTCCDTCEEPECNDILPGCDVCTCTDMEDAVMGLRVAQCSQKPCEDSCRSGFTYVLHEGECCGRCLPSACEVVTGSPRGDSQSSWKSVGSQWASPENPCLINECVRVKEEVFIQQRNVSCPQLEVPVCPSGFQLSCKTSACCPSCRCERMEACMLNGTVIGPGKTVMIDVCTTCRCMVQVGVISGFKLECRKTTCNPCPLGYKEENNTGECCGRCLPTACTIQLRGGQIMTLKRDETLQDGCDTHFCKVNERGEYFWEKRVTGCPPFDEHKCLAEGGKIMKIPGTCCDTCEEPECNDITARLQYVKVGSCKSEVEVDIHYCQGKCASKAMYSIDINDVQDQCSCCSPTRTEPMQVALHCTNGSVVYHEVLNAMECKCSPRKCSK

SEQ ID NO: 899604 - protein, 2687 aa, Homo sapiens
MIPARFAGVLLALALILPGTLCAEGTRGRSSTARCSLFGSDFVNTFDGSMYSFAGYCSYLLAGGCQKRSFSIIGDFQNGKRVSLSVYLGEFFDIHLFVNGTVTQGDQRVSMPYASKGLYLETEAGYYKLSGEAYGFVARIDGSGNFQVLLSDRYFNKTCGLCGNFNIFAEDDFMTQEGTLTSDPYDFANSWALSSGEQWCERASPPSSSCNISSGEMQKGLWEQCQLLKSTSVFARCHPLVDPEPFVALCEKTLCECAGGLECACPALLEYARTCAQEGMVLYGWTDHSACSPVCPAGMEYRQCVSPCARTCQSLHIKEMCQERCVDGCSCPEGQLLDEGLCVESTECPCVHSGKRYPPGTSLSRDCNTCICRNSQWICSNEECPGECLVTGQSHFKSFDNRYFTFSGICQYLLARDCQDHSFSIVIETVQCADDRDAVCTRSVTVRLPGLHNSLVKLKHGAGVAMDGQDVQLPLLKGDLRIQHTVTASVRLSYGEDLQMDWDGRGRLLVKLSPVYAGKTCGLCGNYNGNQGDDFLTPSGLAEPRVEDFGNAWKLHGDCQDLQKQHSDPCALNPRMTRFSEEACAVLTSPTFEACHRAVSPLPYLRNCRYDVCSCSDGRECLCGALASYAAACAGRGVRVAWREPGRCELNCPKGQVYLQCGTPCNLTCRSLSYPDEECNEACLEGCFCPPGLYMDERGDCVPKAQCPCYYDGEIFQPEDIFSDHHTMCYCEDGFMHCTMSGVPGSLLPDAVLSSPLSHRSKRSLSCRPPMVKLVCPADNLRAEGLECTKTCQNYDLECMSMGCVSGCLCPPGMVRHENRCVALERCPCFHQGKEYAPGETVKIGCNTCVCRDRKWNCTDHVCDATCSTIGMAHYLTFDGLKYLFPGECQYVLVQDYCGSNPGTFRILVGNKGCSHPSVKCKKRVTILVEGGEIELFDGEVNVKRPMKDETHFEVVESGRYIILLLGKALSVVWDRHLSISVVLKQTYQEKVCGLCGNFDGIQNNDLTSSNLQVEEDPVDFGNSWKVSSQCADTRKVPLDSSPATCHNNIMKQTMVDSSCRILTSDVFQDCNKLVDPEPYLDVCIYDTCSCESIGDCACFCDTIAAYAHVCAQHGKVVTWRTATLCPQSCEERNLRENGYECEWRYNSCAPACQVTCQHPEPLACPVQCVEGCHAHCPPGKILDELLQTCVDPEDCPVCEVAGRRFASGKKVTLNPSDPEHCQICHCDVVNLTCEACQEPGGLVVPPTDAPVSPTTLYVEDISEPPLHDFYCSRLLDLVFLLDGSSRLSEAEFEVLKAFVVDMMERLRISQKWVRVAVVEYHDGSHAYIGLKDRKRPSELRRIASQVKYAGSQVASTSEVLKYTLFQIFSKIDRPEASRIALLLMASQEPQRMSRNFVRYVQGLKKKKVIVIPVGIGPHANLKQIRLIEKQAPENKAFVLSSVDELEQQRDEIVSYLCDLAPEAPPPTLPPDMAQVTVGPGLLGVSTLGPKRNSMVLDVAFVLEGSDKIGEADFNRSKEFMEEVIQRMDVGQDSIHVTVLQYSYMVTVEYPFSEAQSKGDILQRVREIRYQGGNRTNTGLALRYLSDHSFLVSQGDREQAPNLVYMVTGNPASDEIKRLPGDIQVVPIGVGPNANVQELERIGWPNAPILIQDFETLPREAPDLVLQRCCSGEGLQIPTLSPAPDCSQPLDVILLLDGSSSFPASYFDEMKSFAKAFISKANIGPRLTQVSVLQYGSITTIDVPWNVVPEKAHLLSLVDVMQREGGPSQIGDALGFAVRYLTSEMHGARPGASKAVVILVTDVSVDSVDAAADAARSNRVTVFPIGIGDRYDAAQLRILAGPAGDSNVVKLQRIEDLPTMVTLGNSFLHKLCSGFVRICMDEDGNEKRPGDVWTLPDQCHTVTCQPDGQTLLKSHRVNCDRGLRPSCPNSQSPVKVEETCGCRWTCPCVCTGSSTRHIVTFDGQNFKLTGSCSYVLFQNKEQDLEVILHNGACSPGARQGCMKSIEVKHSALSVELHSDMEVTVNGRLVSVPYVGGNMEVNVYGAIMHEVRFNHLGHIFTFTPQNNEFQLQLSPKTFASKTYGLCGICDENGANDFMLRDGTVTTDWKTLVQEWTVQRPGQTCQPILEEQCLVPDSSHCQVLLLPLFAECHKVLAPATFYAICQQDSCHQEQVCEVIASYAHLCRTNGVCVDWRTPDFCAMSCPPSLVYNHCEHGCPRHCDGNVSSCGDHPSEGCFCPPDKVMLEGSCVPEEACTQCIGEDGVQHQFLEAWVPDHQPCQICTCLSGRKVNCTTQPCPTAKAPTCGLCEVARLRQNADQCCPEYECVCDPVSCDLPPVPHCERGLQPTLTNPGECRPNFTCACRKEECKRVSPPSCPPHRLPTLRKTQCCDEYECACNCVNSTVSCPLGYLASTATNDCGCTTTTCLPDKVCVHRSTIYPVGQFWEEGCDVCTCTDMEDAVMGLRVAQCSQKPCEDSCRSGFTYVLHEGECCGRCLPSACEVVTGSPRGDSQSSWKSVGSQWASPENPCLINECVRVKEEVFIQQRNVSCPQLEVPVCPSGFQLSCKTSACCPSCRCERMEACMLNGTVIGPGKTVMIDVCRQRVTMMGKTYHLRRTVAEGISRCHLLLHMLWRPAGLALDNCRRPWGEPSSRGTTGQSYHQFSSEIPSENNPKVNGQLRAYALDGQL

SEQ ID NO: 899605 - protein, 2449 aa, Homo sapiens
MIPARFAGVLLALALILPGTLCAEGTRGRSSTARCSLFGSDFVNTFDGSMYSFAGYCSYLLAGGCQKRSFSIIGDFQNGKRVSLSVYLGEFFDIHLFVNGTVTQGDQRVSMPYASKGLYLETEAGYYKLSGEAYGFVARIDGSGNFQVLLSDRYFNKTCGLCGNFNIFAEDDFMTQEGTLTSDPYDFANSWALSSGEQWCERASPPSSSCNISSGEMQKGLWEQCQLLKSTSVFARCHPLVDPEPFVALCEKTLCECAGGLECACPALLEYARTCAQEGMVLYGWTDHSACSPVCPAGMEYRQCVSPCARTCQSLHIKEMCQERCVDGCSCPEGQLLDEGLCVESTECPCVHSGKRYPPGTSLSRDCNTCICRNSQWICSNEECPGECLVTGQSHFKSFDNRYFTFSGICQYLLARDCQDHSFSIVIETVQCADDRDAVCTRSVTVRLPGLHNSLVKLKHGAGVAMDGQDVQLPLLKGDLRIQHTVTASVRLSYGEDLQMDWDGRGRLLVKLSPVYAGKTCGLCGNYNGNQGDDFLTPSGLAEPRVEDFGNAWKLHGDCQDLQKQHSDPCALNPRMTRFSEEACAVLTSPTFEACHRAVSPLPYLRNCRYDVCSCSDGRECLCGALASYAAACAGRGVRVAWREPGRCELNCPKGQVYLQCGTPCNLTCRSLSYPDEECNEACLEGCFCPPGLYMDERGDCVPKAQCPCYYDGEIFQPEDIFSDHHTMCYCEDGFMHCTMSGVPGSLLPDAVLSSPLSHRSKRSLSCRPPMVKLVCPADNLRAEGLECTKTCQNYDLECMSMGCVSGCLCPPGMVRHENRCVALERCPCFHQGKEYAPGETVKIGCNTCVCRDRKWNCTDHVCDATCSTIGMAHYLTFDGLKYLFPGECQYVLVQDYCGSNPGTFRILVGNKGCSHPSVKCKKRVTILVEGGEIELFDGEVNVKRPMKDETHFEVVESGRYIILLLGKALSVVWDRHLSISVVLKQTYQEKVCGLCGNFDGIQNNDLTSSNLQVEEDPVDFGNSWKVSSQCADTRKVPLDSSPATCHNNIMKQTMVDSSCRILTSDVFQDCNKLVDPEPYLDVCIYDTCSCESIGDCACFCDTIAAYAHVCAQHGKVVTWRTATLCPQSCEERNLRENGYECEWRYNSCAPACQVTCQHPEPLACPVQCVEGCHAHCPPGKILDELLQTCVDPEDCPVCEVAGRRFASGKKVTLNPSDPEHCQICHCDVVNLTCEACQEPGGLVVPPTDAPVSPTTLYVEDISEPPLHDFYCSRLLDLVFLLDGSSRLSEAEFEVLKAFVVDMMERLRISQKWVRVAVVEYHDGSHAYIGLKDRKRPSELRRIASQVKYAGSQVASTSEVLKYTLFQIFSKIDRPEASRIALLLMASQEPQRMSRNFVRYVQGLKKKKVIVIPVGIGPHANLKQIRLIEKQAPENKAFVLSSVDELEQQRDEIVSYLCDLAPEAPPPTLPPDMAQVTVGPGLLGVSTLGPKRNSMVLDVAFVLEGSDKIGEADFNRSKEFMEEVIQRMDVGQDSIHVTVLQYSYMVTVEYPFSEAQSKGDILQRVREIRYQGGNRTNTGLALRYLSDHSFLVSQGDREQAPNLVYMVTGNPASDEIKRLPGDIQVVPIGVGPNANVQELERIGWPNAPILIQDFETLPREAPDLVLQRCCSGEGLQIPTLSPAPDCSQPLDVILLLDGSSSFPASYFDEMKSFAKAFISKANIGPRLTQVSVLQYGSITTIDVPWNVVPEKAHLLSLVDVMQREGGPSQIGDALGFAVRYLTSEMHGARPGASKAVVILVTDVSVDSVDAAADAARSNRVTVFPIGIGDRYDAAQLRILAGPAGDSNVVKLQRIEDLPTMVTLGNSFLHKLCSGFVRICMDEDGNEKRPGDVWTLPDQCHTVTCQPDGQTLLKSHRVNCDRGLRPSCPNSQSPVKVEETCGCRWTCPCVCTGSSTRHIVTFDGQNFKLTGSCSYVLFQNKEQDLEVILHNGACSPGARQGCMKSIEVKHSALSVELHSDMEVTVNGRLVSVPYVGGNMEVNVYGAIMHEVRFNHLGHIFTFTPQNNEFQLQLSPKTFASKTYGLCGICDENGANDFMLRDGTVTTDWKTLVQEWTVQRPGQTCQPILEEQCLVPDSSHCQVLLLPLFAECHKVLAPATFYAICQQDSCHQEQVCEVIASYAHLCRTNGVCVDWRTPDFCAMSCPPSLVYNHCEHGCPRHCDGNVSSCGDHPSEGCFCPPDKVMLEGSCVPEEACTQCIGEDGVQHQFLEAWVPDHQPCQICTCLSGRKVNCTTQPCPTAKAPTCGLCEVARLRQNADQCCPEYECVCDPVSCDLPPVPHLPFLSLPKHSRHGVTPTFRKAGTQIENIEEDFRDGLKLMLLLEVISGEAEPGPGRDTVYVVLPDTLASALPMSAAGFGLLKQVGDDMYEFILGSVGLSFGSAASHPGALD

SEQ ID NO: 899606 - protein, 1097 aa, Homo sapiens
MIPARFAGVLLALALILPGTLCAEGTRGRSSTARCSLFGSDFVNTFDGSMYSFAGYCSYLLAGGCQKRSFSIIGDFQNGKRVSLSVYLGEFFDIHLFVNGTVTQGDQRVSMPYASKGLYLETEAGYYKLSGEAYGFVARIDGSGNFQVLLSDRYFNKTCGLCGNFNIFAEDDFMTQEGTLTSDPYDFANSWALSSGEQWCERASPPSSSCNISSGEMQKGLWEQCQLLKSTSVFARCHPLVDPEPFVALCEKTLCECAGGLECACPALLEYARTCAQEGMVLYGWTDHSACSPVCPAGMEYRQCVSPCARTCQSLHIKEMCQERCVDGCSCPEGQLLDEGLCVESTECPCVHSGKRYPPGTSLSRDCNTCICRNSQWICSNEECPGECLVTGQSHFKSFDNRYFTFSGICQYLLARDCQDHSFSIVIETVQCADDRDAVCTRSVTVRLPGLHNSLVKLKHGAGVAMDGQDVQLPLLKGDLRIQHTVTASVRLSYGEDLQMDWDGRGRLLVKLSPVYAGKTCGLCGNYNGNQGDDFLTPSGLAEPRVEDFGNAWKLHGDCQDLQKQHSDPCALNPRMTRFSEEACAVLTSPTFEACHRAVSPLPYLRNCRYDVCSCSDGRECLCGALASYAAACAGRGVRVAWREPGRCELNCPKGQVYLQCGTPCNLTCRSLSYPDEECNEACLEGCFCPPGLYMDERGDCVPKAQCPCYYDGEIFQPEDIFSDHHTMCYCEDGFMHCTMSGVPGSLLPDAVLSSPLSHRSKRSLSCRPPMVKLVCPADNLRAEGLECTKTCQNYDLECMSMGCVSGCLCPPGMVRHENRCVALERCPCFHQGKEYAPGETVKIGCNTCVCRDRKWNCTDHVCDATCSTIGMAHYLTFDGLKYLFPGECQYVLVQDYCGSNPGTFRILVGNKGCSHPSVKCKKRVTILVEGGEIELFDGEVNVKRPMKDETHFEVVESGRYIILLLGKALSVVWDRHLSISVVLKQTYQEKVCGLCGNFDGIQNNDLTSSNLQVEEDPVDFGNSWKVSSQCADTRKVPLDSSPATCHNNIMKQTMVDSSCRILTSDVFQDCNKLVRTLRVVGSRRSQGLAWWYGHRV

SEQ ID NO: 899607 - protein, 111 aa, Homo sapiens
HSYKGWQVLEPQSLLSNIPAEALLLLLSLLELNCPKGQVYLQCGTPCNLTCRSLSYPDEECNEACLEGCFCPPGLYMDERGDCVPKAQCPCYYDGEIFQPEDIFSDHHTMW

SEQ ID NO: 899608 - protein, 86 aa, Homo sapiens
CGMAGEMMHRWDLPWVDPFDVPFQAQCALLVWSIGSVCPLAPGPARACTSKKCVRSDAWMAAAALVMNFPLYLQIRDLASTLGFGK

SEQ ID NO: 899609 - protein, 2916 aa, Homo sapiens
QLTAIVVGKGGWLVDVTAWALSPPAVGTPQPLGYITARQSGAVADLIEPLQQLRAWPRVGGTIVQQLSFPGTLEIAAALICRGSTIVQQLSFPGTLEIAAALFMIPARFAGVLLALALILPGTLCAEGTRGRSSTARCSLFGSDFVNTFDGSMYSFAGYCSYLLAGGCQKRSFSIIGDFQNGKRVSLSVYLGEFFDIHLFVNGTVTQGDQRVSMPYASKGLYLETEAGYYKLSGEAYGFVARIDGSGNFQVLLSDRYFNKTCGLCGNFNIFAEDDFMTQEGTLTSDPYDFANSWALSSGEQWCERASPPSSSCNISSGEMQKGLWEQCQLLKSTSVFARCHPLVDPEPFVALCEKTLCECAGGLECACPALLEYARTCAQEGMVLYGWTDHSACSPVCPAGMEYRQCVSPCARTCQSLHIKEMCQERCVDGCSCPEGQLLDEGLCVESTECPCVHSGKRYPPGTSLSRDCNTCICRNSQWICSNEECPGECLVTGQSHFKSFDNRYFTFSGICQYLLARDCQDHSFSIVIETVQCADDRDAVCTRSVTVRLPGLHNSLVKLKHGAGVAMDGQDVQLPLLKGDLRIQHTVTASVRLSYGEDLQMDWDGRGRLLVKLSPVYAGKTCGLCGNYNGNQGDDFLTPSGLAEPRVEDFGNAWKLHGDCQDLQKQHSDPCALNPRMTRFSEEACAVLTSPTFEACHRAVSPLPYLRNCRYDVCSCSDGRECLCGALASYAAACAGRGVRVAWREPGRCELNCPKGQVYLQCGTPCNLTCRSLSYPDEECNEACLEGCFCPPGLYMDERGDCVPKAQCPCYYDGEIFQPEDIFSDHHTMCYCEDGFMHCTMSGVPGSLLPDAVLSSPLSHRSKRSLSCRPPMVKLVCPADNLRAEGLECTKTCQNYDLECMSMGCVSGCLCPPGMVRHENRCVALERCPCFHQGKEYAPGETVKIGCNTCVCRDRKWNCTDHVCDATCSTIGMAHYLTFDGLKYLFPGECQYVLVQDYCGSNPGTFRILVGNKGCSHPSVKCKKRVTILVEGGEIELFDGEVNVKRPMKDETHFEVVESGRYIILLLGKALSVVWDRHLSISVVLKQTYQEKVCGLCGNFDGIQNNDLTSSNLQVEEDPVDFGNSWKVSSQCADTRKVPLDSSPATCHNNIMKQTMVDSSCRILTSDVFQDCNKLVDPEPYLDVCIYDTCSCESIGDCACFCDTIAAYAHVCAQHGKVVTWRTATLCPQSCEERNLRENGYECEWRYNSCAPACQVTCQHPEPLACPVQCVEGCHAHCPPGKILDELLQTCVDPEDCPVCEVAGRRFASGKKVTLNPSDPEHCQICHCDVVNLTCEACQEPGGLVVPPTDAPVSPTTLYVEDISEPPLHDFYCSRLLDLVFLLDGSSRLSEAEFEVLKAFVVDMMERLRISQKWVRVAVVEYHDGSHAYIGLKDRKRPSELRRIASQVKYAGSQVASTSEVLKYTLFQIFSKIDRPEASRIALLLMASQEPQRMSRNFVRYVQGLKKKKVIVIPVGIGPHANLKQIRLIEKQAPENKAFVLSSVDELEQQRDEIVSYLCDLAPEAPPPTLPPDMAQVTVGPGLLGVSTLGPKRNSMVLDVAFVLEGSDKIGEADFNRSKEFMEEVIQRMDVGQDSIHVTVLQYSYMVTVEYPFSEAQSKGDILQRVREIRYQGGNRTNTGLALRYLSDHSFLVSQGDREQAPNLVYMVTGNPASDEIKRLPGDIQVVPIGVGPNANVQELERIGWPNAPILIQDFETLPREAPDLVLQRCCSGEGLQIPTLSPAPDCSQPLDVILLLDGSSSFPASYFDEMKSFAKAFISKANIGPRLTQVSVLQYGSITTIDVPWNVVPEKAHLLSLVDVMQREGGPSQIGDALGFAVRYLTSEMHGARPGASKAVVILVTDVSVDSVDAAADAARSNRVTVFPIGIGDRYDAAQLRILAGPAGDSNVVKLQRIEDLPTMVTLGNSFLHKLCSGFVRICMDEDGNEKRPGDVWTLPDQCHTVTCQPDGQTLLKSHRVNCDRGLRPSCPNSQSPVKVEETCGCRWTCPCVCTGSSTRHIVTFDGQNFKLTGSCSYVLFQNKEQDLEVILHNGACSPGARQGCMKSIEVKHSALSVELHSDMEVTVNGRLVSVPYVGGNMEVNVYGAIMHEVRFNHLGHIFTFTPQNNEFQLQLSPKTFASKTYGLCGICDENGANDFMLRDGTVTTDWKTLVQEWTVQRPGQTCQPILEEQCLVPDSSHCQVLLLPLFAECHKVLAPATFYAICQQDSCHQEQVCEVIASYAHLCRTNGVCVDWRTPDFCAMSCPPSLVYNHCEHGCPRHCDGNVSSCGDHPSEGCFCPPDKVMLEGSCVPEEACTQCIGEDGVQHQFLEAWVPDHQPCQICTCLSGRKVNCTTQPCPTAKAPTCGLCEVARLRQNADQCCPEYECVCDPVSCDLPPVPHCERGLQPTLTNPGECRPNFTCACRKEECKRVSPPSCPPHRLPTLRKTQCCDEYECACNCVNSTVSCPLGYLASTATNDCGCTTTTCLPDKVCVHRSTIYPVGQFWEEGCDVCTCTDMEDAVMGLRVAQCSQKPCEDSCRSGFTYVLHEGECCGRCLPSACEVVTGSPRGDSQSSWKSVGSQWASPENPCLINECVRVKEEVFIQQRNVSCPQLEVPVCPSGFQLSCKTSACCPSCRCERMEACMLNGTVIGPGKTVMIDVCTTCRCMVQVGVISGFKLECRKTTCNPCPLGYKEENNTGECCGRCLPTACTIQLRGGQIMTLKRDETLQDGCDTHFCKVNERGEYFWEKRVTGCPPFDEHKCLAEGGKIMKIPGTCCDTCEEPECNDITARLQYVKVGSCKSEVEVDIHYCQGKCASKAMYSIDINDVQDQCSCCSPTRTEPMQVALHCTNGSVVYHEVLNAMECKCSPRKCSK

SEQ ID NO: 899610 - protein, 2813 aa, Homo sapiens; identical to SEQ ID NO: 899597

SEQ ID NO: 899611 - protein, 2593 aa, Homo sapiens
  misc_feature (14)..(14): Xaa can be any naturally occurring amino acid
GGLDTTKSVVIGTXDTMSTGLTGAANVALCEKTLCECAGGLECACPALLEYARTCAQEGMVLYGWTDHSACSPVCPAGMEYRQCVSPCARTCQSLHIKEMCQERCVDGCSCPEGQLLDEGLCVESTECPCVHSGKRYPPGTSLSRDCNTCICRNSQWICSNEECPGECLVTGQSHFKSFDNRYFTFSGICQYLLARDCQDHSFSIVIETVQCADDRDAVCTRSVTVRLPGLHNSLVKLKHGAGVAMDGQDVQLPLLKGDLRIQHTVTASVRLSYGEDLQMDWDGRGRLLVKLSPVYAGKTCGLCGNYNGNQGDDFLTPSGLAEPRVEDFGNAWKLHGDCQDLQKQHSDPCALNPRMTRFSEEACAVLTSPTFEACHRAVSPLPYLRNCRYDVCSCSDGRECLCGALASYAAACAGRGVRVAWREPGRCELNCPKGQVYLQCGTPCNLTCRSLSYPDEECNEACLEGCFCPPGLYMDERGDCVPKAQCPCYYDGEIFQPEDIFSDHHTMCYCEDGFMHCTMSGVPGSLLPDAVLSSPLSHRSKRSLSCRPPMVKLVCPADNLRAEGLECTKTCQNYDLECMSMGCVSGCLCPPGMVRHENRCVALERCPCFHQGKEYAPGETVKIGCNTCVCRDRKWNCTDHVCDATCSTIGMAHYLTFDGLKYLFPGECQYVLVQDYCGSNPGTFRILVGNKGCSHPSVKCKKRVTILVEGGEIELFDGEVNVKRPMKDETHFEVVESGRYIILLLGKALSVVWDRHLSISVVLKQTYQEKVCGLCGNFDGIQNNDLTSSNLQVEEDPVDFGNSWKVSSQCADTRKVPLDSSPATCHNNIMKQTMVDSSCRILTSDVFQDCNKLVDPEPYLDVCIYDTCSCESIGDCACFCDTIAAYAHVCAQHGKVVTWRTATLCPQSCEERNLRENGYECEWRYNSCAPACQVTCQHPEPLACPVQCVEGCHAHCPPGKILDELLQTCVDPEDCPVCEVAGRRFASGKKVTLNPSDPEHCQICHCDVVNLTCEACQEPGGLVVPPTDAPVSPTTLYVEDISEPPLHDFYCSRLLDLVFLLDGSSRLSEAEFEVLKAFVVDMMERLRISQKWVRVAVVEYHDGSHAYIGLKDRKRPSELRRIASQVKYAGSQVASTSEVLKYTLFQIFSKIDRPEASRIALLLMASQEPQRMSRNFVRYVQGLKKKKVIVIPVGIGPHANLKQIRLIEKQAPENKAFVLSSVDELEQQRDEIVSYLCDLAPEAPPPTLPPDMAQVTVGPGLLGVSTLGPKRNSMVLDVAFVLEGSDKIGEADFNRSKEFMEEVIQRMDVGQDSIHVTVLQYSYMVTVEYPFSEAQSKGDILQRVREIRYQGGNRTNTGLALRYLSDHSFLVSQGDREQAPNLVYMVTGNPASDEIKRLPGDIQVVPIGVGPNANVQELERIGWPNAPILIQDFETLPREAPDLVLQRCCSGEGLQIPTLSPAPDCSQPLDVILLLDGSSSFPASYFDEMKSFAKAFISKANIGPRLTQVSVLQYGSITTIDVPWNVVPEKAHLLSLVDVMQREGGPSQIGDALGFAVRYLTSEMHGARPGASKAVVILVTDVSVDSVDAAADAARSNRVTVFPIGIGDRYDAAQLRILAGPAGDSNVVKLQRIEDLPTMVTLGNSFLHKLCSGFVRICMDEDGNEKRPGDVWTLPDQCHTVTCQPDGQTLLKSHRVNCDRGLRPSCPNSQSPVKVEETCGCRWTCPCVCTGSSTRHIVTFDGQNFKLTGSCSYVLFQNKEQDLEVILHNGACSPGARQGCMKSIEVKHSALSVELHSDMEVTVNGRLVSVPYVGGNMEVNVYGAIMHEVRFNHLGHIFTFTPQNNEFQLQLSPKTFASKTYGLCGICDENGANDFMLRDGTVTTDWKTLVQEWTVQRPGQTCQPILEEQCLVPDSSHCQVLLLPLFAECHKVLAPATFYAICQQDSCHQEQVCEVIASYAHLCRTNGVCVDWRTPDFCAMSCPPSLVYNHCEHGCPRHCDGNVSSCGDHPSEGCFCPPDKVMLEGSCVPEEACTQCIGEDGVQHQFLEAWVPDHQPCQICTCLSGRKVNCTTQPCPTAKAPTCGLCEVARLRQNADQCCPEYECVCDPVSCDLPPVPHCERGLQPTLTNPGECRPNFTCACRKEECKRVSPPSCPPHRLPTLRKTQCCDEYECACNCVNSTVSCPLGYLASTATNDCGCTTTTCLPDKVCVHRSTIYPVGQFWEEGCDVCTCTDMEDAVMGLRVAQCSQKPCEDSCRSGFTYVLHEGECCGRCLPSACEVVTGSPRGDSQSSWKSVGSQWASPENPCLINECVRVKEEVFIQQRNVSCPQLEVPVCPSGFQLSCKTSACCPSCRCERMEACMLNGTVIGPGKTVMIDVCTTCRCMVQVGVISGFKLECRKTTCNPCPLGYKEENNTGECCGRCLPTACTIQLRGGQIMTLKRDETLQDGCDTHFCKVNERGEYFWEKRVTGCPPFDEHKCLAEGGKIMKIPGTCCDTCEEPECNDITARLQYVKVGSCKSEVEVDIHYCQGKCASKAMYSIDINDVQDQCSCCSPTRTEPMQVALHCTNGSVVYHEVLNAMECKCSPRKCSK

SEQ ID NO: 899612 - protein, 2010 aa, Homo sapiens
GRIPPPPRRIPPPPGRIPPPPGRIPPPPPSKEYAPGETVKIGCNTCVCRDRKWNCTDHVCDATCSTIGMAHYLTFDGLKYLFPGECQYVLVQDYCGSNPGTFRILVGNKGCSHPSVKCKKRVTILVEGGEIELFDGEVNVKRPMKDETHFEVVESGRYIILLLGKALSVVWDRHLSISVVLKQTYQEKVCGLCGNFDGIQNNDLTSSNLQVEEDPVDFGNSWKVSSQCADTRKVPLDSSPATCHNNIMKQTMVDSSCRILTSDVFQDCNKLVDPEPYLDVCIYDTCSCESIGDCACFCDTIAAYAHVCAQHGKVVTWRTATLCPQSCEERNLRENGYECEWRYNSCAPACQVTCQHPEPLACPVQCVEGCHAHCPPGKILDELLQTCVDPEDCPVCEVAGRRFASGKKVTLNPSDPEHCQICHCDVVNLTCEACQEPGGLVVPPTDAPVSPTTLYVEDISEPPLHDFYCSRLLDLVFLLDGSSRLSEAEFEVLKAFVVDMMERLRISQKWVRVAVVEYHDGSHAYIGLKDRKRPSELRRIASQVKYAGSQVASTSEVLKYTLFQIFSKIDRPEASRIALLLMASQEPQRMSRNFVRYVQGLKKKKVIVIPVGIGPHANLKQIRLIEKQAPENKAFVLSSVDELEQQRDEIVSYLCDLAPEAPPPTLPPDMAQVTVGPGLLGVSTLGPKRNSMVLDVAFVLEGSDKIGEADFNRSKEFMEEVIQRMDVGQDSIHVTVLQYSYMVTVEYPFSEAQSKGDILQRVREIRYQGGNRTNTGLALRYLSDHSFLVSQGDREQAPNLVYMVTGNPASDEIKRLPGDIQVVPIGVGPNANVQELERIGWPNAPILIQDFETLPREAPDLVLQRCCSGEGLQIPTLSPAPDCSQPLDVILLLDGSSSFPASYFDEMKSFAKAFISKANIGPRLTQVSVLQYGSITTIDVPWNVVPEKAHLLSLVDVMQREGGPSQIGDALGFAVRYLTSEMHGARPGASKAVVILVTDVSVDSVDAAADAARSNRVTVFPIGIGDRYDAAQLRILAGPAGDSNVVKLQRIEDLPTMVTLGNSFLHKLCSGFVRICMDEDGNEKRPGDVWTLPDQCHTVTCQPDGQTLLKSHRVNCDRGLRPSCPNSQSPVKVEETCGCRWTCPCVCTGSSTRHIVTFDGQNFKLTGSCSYVLFQNKEQDLEVILHNGACSPGARQGCMKSIEVKHSALSVELHSDMEVTVNGRLVSVPYVGGNMEVNVYGAIMHEVRFNHLGHIFTFTPQNNEFQLQLSPKTFASKTYGLCGICDENGANDFMLRDGTVTTDWKTLVQEWTVQRPGQTCQPILEEQCLVPDSSHCQVLLLPLFAECHKVLAPATFYAICQQDSCHQEQVCEVIASYAHLCRTNGVCVDWRTPDFCAMSCPPSLVYNHCEHGCPRHCDGNVSSCGDHPSEGCFCPPDKVMLEGSCVPEEACTQCIGEDGVQHQFLEAWVPDHQPCQICTCLSGRKVNCTTQPCPTAKAPTCGLCEVARLRQNADQCCPEYECVCDPVSCDLPPVPHCERGLQPTLTNPGECRPNFTCACRKEECKRVSPPSCPPHRLPTLRKTQCCDEYECACNCVNSTVSCPLGYLASTATNDCGCTTTTCLPDKVCVHRSTIYPVGQFWEEGCDVCTCTDMEDAVMGLRVAQCSQKPCEDSCRSGFTYVLHEGECCGRCLPSACEVVTGSPRGDSQSSWKSVGSQWASPENPCLINECVRVKEEVFIQQRNVSCPQLEVPVCPSGFQLSCKTSACCPSCRCERMEACMLNGTVIGPGKTVMIDVCTTCRCMVQVGVISGFKLECRKTTCNPCPLGYKEENNTGECCGRCLPTACTIQLRGGQIMTLKRDETLQDGCDTHFCKVNERGEYFWEKRVTGCPPFDEHKCLAEGGKIMKIPGTCCDTCEEPECNDITARLQYVKVGSCKSEVEVDIHYCQGKCASKAMYSIDINDVQDQCSCCSPTRTEPMQVALHCTNGSVVYHEVLNAMECKCSPRKCSK

SEQ ID NO: 899613 - protein, 934 aa, Homo sapiens
MDEDGNEKRPGDVWTLPDQCHTVTCQPDGQTLLKSHRVNCDRGLRPSCPNSQSPVKVEETCGCRWTCPCVCTGSSTRHIVTFDGQNFKLTGSCSYVLFQNKEQDLEVILHNGACSPGARQGCMKSIEVKHSALSVELHSDMEVTVNGRLVSVPYVGGNMEVNVYGAIMHEVRFNHLGHIFTFTPQNNEFQLQLSPKTFASKTYGLCGICDENGANDFMLRDGTVTTDWKTLVQEWTVQRPGQTCQPILEEQCLVPDSSHCQVLLLPLFAECHKVLAPATFYAICQQDSCHQEQVCEVIASYAHLCRTNGVCVDWRTPDFCAMSCPPSLVYNHCEHGCPRHCDGNVSSCGDHPSEGCFCPPDKVMLEGSCVPEEACTQCIGEDGVQHQFLEAWVPDHQPCQICTCLSGRKVNCTTQPCPTAKAPTCGLCEVARLRQNADQCCPEYECVCDPVSCDLPPVPHCERGLQPTLTNPGECRPNFTCACRKEECKRVSPPSCPPHRLPTLRKTQCCDEYECACNCVNSTVSCPLGYLASTATNDCGCTTTTCLPDKVCVHRSTIYPVGQFWEEGCDVCTCTDMEDAVMGLRVAQCSQKPCEDSCRSGFTYVLHEGECCGRCLPSACEVVTGSPRGDSQSSWKSVGSQWASPENPCLINECVRVKEEVFIQQRNVSCPQLEVPVCPSGFQLSCKTSACCPSCRCERMEACMLNGTVIGPGKTVMIDVCTTCRCMVQVGVISGFKLECRKTTCNPCPLGYKEENNTGECCGRCLPTACTIQLRGGQIMTLKRDETLQDGCDTHFCKVNERGEYFWEKRVTGCPPFDEHKCLAEGGKIMKIPGTCCDTCEEPECNDITARLQYVKVGSCKSEVEVDIHYCQGKCASKAMYSIDINDVQDQCSCCSPTRTEPMQVALHCTNGSVVYHEVLNAMECKCSPRKCSK

SEQ ID NO: 899614 - protein, 548 aa, Homo sapiens
IGGELESSSSISEHFSGFATPIILRPLYKQQENRTQSQIPYPTLDFSLVSSGREKPMIFKQGSPSEYAAFLEIEVSELHKHFSVPTVPSQQSNNTACRKEECKRVSPPSCPPHRLPTLRKTQCCDEYECACNCVNSTVSCPLGYLASTATNDCGCTTTTCLPDKVCVHRSTIYPVGQFWEEGCDVCTCTDMEDAVMGLRVAQCSQKPCEDSCRSGFTYVLHEGECCGRCLPSACEVVTGSPRGDSQSSWKSVGSQWASPENPCLINECVRVKEEVFIQQRNVSCPQLEVPVCPSGFQLSCKTSACCPSCRCERMEACMLNGTVIGPGKTVMIDVCTTCRCMVQVGVISGFKLECRKTTCNPCPLGYKEENNTGECCGRCLPTACTIQLRGGQIMTLKRDETLQDGCDTHFCKVNERGEYFWEKRVTGCPPFDEHKCLAEGGKIMKIPGTCCDTCEEPECNDITARLQYVKVGSCKSEVEVDIHYCQGKCASKAMYSIDINDVQDQCSCCSPTRTEPMQVALHCTNGSVVYHEVLNAMECKCSPRKCSK

SEQ ID NO: 899615 - protein, 2603 aa, Homo sapiens
MIPARFAGVLLALALILPGTLCAEGTRGRSSTARCSLFGSDFVNTFDGSMYSFAGYCSYLLAGGCQKRSFSIIGDFQNGKRVSLSVYLGEFFDIHLFVNGTVTQGDQRVSMPYASKGLYLETEAGYYKLSGEAYGFVARIDGSGNFQVLLSDRYFNKTCGLCGNFNIFAEDDFMTQEGTLTSDPYDFANSWALSSGEQWCERASPPSSSCNISSGEMQKGLWEQCQLLKSTSVFARCHPLVDPEPFVALCEKTLCECAGGLECACPALLEYARTCAQEGMVLYGWTDHSACSPVCPAGMEYRQCVSPCARTCQSLHIKEMCQERCVDGCSCPEGQLLDEGLCVESTECPCVHSGKRYPPGTSLSRDCNTCICRNSQWICSNEECPGECLVTGQSHFKSFDNRYFTFSGICQYLLARDCQDHSFSIVIETVQCADDRDAVCTRSVTVRLPGLHNSLVKLKHGAGVAMDGQDVQLPLLKGDLRIQHTVTASVRLSYGEDLQMDWDGRGRLLVKLSPVYAGKTCGLCGNYNGNQGDDFLTPSGLAEPRVEDFGNAWKLHGDCQDLQKQHSDPCALNPRMTRFSEEACAVLTSPTFEACHRAVSPLPYLRNCRYDVCSCSDGRECLCGALASYAAACAGRGVRVAWREPGRCELNCPKGQVYLQCGTPCNLTCRSLSYPDEECNEACLEGCFCPPGLYMDERGDCVPKAQCPCYYDGEIFQPEDIFSDHHTMCYCEDGFMHCTMSGVPGSLLPDAVLSSPLSHRSKRSLSCRPPMVKLVCPADNLRAEGLECTKTCQNYDLECMSMGCVSGCLCPPGMVRHENRCVALERCPCFHQGKEYAPGETVKIGCNTCVCRDRKWNCTDHVCDATCSTIGMAHYLTFDGLKYLFPGECQYVLVQDYCGSNPGTFRILVGNKGCSHPSVKCKKRVTILVEGGEIELFDGEVNVKRPMKDETHFEVVESGRYIILLLGKALSVVWDRHLSISVVLKQTYQEKVCGLCGNFDGIQNNDLTSSNLQVEEDPVDFGNSWKVSSQCADTRKVPLDSSPATCHNNIMKQTMVDSSCRILTSDVFQDCNKLVDPEPYLDVCIYDTCSCESIGDCACFCDTIAAYAHVCAQHGKVVTWRTATLCPQSCEERNLRENGYECEWRYNSCAPACQVTCQHPEPLACPVQCVEGCHAHCPPGKILDELLQTCVDPEDCPVCEVAGRRFASGKKVTLNPSDPEHCQICHCDVVNLTCEACQEPGGLVVPPTDAPVSPTTLYVEDISEPPLHDFYCSRLLDLVFLLDGSSRLSEAEFEVLKAFVVDMMERLRISQKWVRVAVVEYHDGSHAYIGLKDRKRPSELRRIASQVKYAGSQVASTSEVLKYTLFQIFSKIDRPEASRIALLLMASQEPQRMSRNFVRYVQGLKKKKVIVIPVGIGPHANLKQIRLIEKQAPENKAFVLSSVDELEQQRDEIVSYLCDLAPEAPPPTLPPDMAQVTVGPGLLGVSTLGPKRNSMVLDVAFVLEGSDKIGEADFNRSKEFMEEVIQRMDVGQDSIHVTVLQYSYMVTVEYPFSEAQSKGDILQRVREIRYQGGNRTNTGLALRYLSDHSFLVSQGDREQAPNLVYMVTGNPASDEIKRLPGDIQVVPIGVGPNANVQELERIGWPNAPILIQDFETLPREAPDLVLQRCCSGEGLQIPTLSPAPDCSQPLDVILLLDGSSSFPASYFDEMKSFAKAFISKANIGPRLTQVSVLQYGSITTIDVPWNVVPEKAHLLSLVDVMQREGGPSQIGDALGFAVRYLTSEMHGARPGASKAVVILVTDVSVDSVDAAADAARSNRVTVFPIGIGDRYDAAQLRILAGPAGDSNVVKLQRIEDLPTMVTLGNSFLHKLCSGFVRICMDEDGNEKRPGDVWTLPDQCHTVTCQPDGQTLLKSHRVNCDRGLRPSCPNSQSPVKVEETCGCRWTCPCVCTGSSTRHIVTFDGQNFKLTGSCSYVLFQNKEQDLEVILHNGACSPGARQGCMKSIEVKHSALSVELHSDMEVTVNGRLVSVPYVGGNMEVNVYGAIMHEVRFNHLGHIFTFTPQNNEFQLQLSPKTFASKTYGLCGICDENGANDFMLRDGTVTTDWKTLVQEWTVQRPGQTCQPILEEQCLVPDSSHCQVLLLPLFAECHKVLAPATFYAICQQDSCHQEQVCEVIASYAHLCRTNGVCVDWRTPDFCAMSCPPSLVYNHCEHGCPRHCDGNVSSCGDHPSEGCFCPPDKVMLEGSCVPEEACTQCIGEDGVQHQFLEAWVPDHQPCQICTCLSGRKVNCTTQPCPTAKAPTCGLCEVARLRQNADQCCPEYECVCDPVSCDLPPVPHCERGLQPTLTNPGECRPNFTCACRKEECKRVSPPSCPPHRLPTLRKTQCCDEYECACNCVNSTVSCPLGYLASTATNDCGCTTTTCLPDKVCVHRSTIYPVGQFWEEGCDVCTCTDMEDAVMGLRVAQCSQKPCEDSCRSGFTYVLHEGECCGRCLPSACEVVTGSPRGDSQSSWKSVGSQWASPENPCLINECVRVKEEVFIQQRNVSCPQLEVPVCPSGFQLSCKTSACCPSCRCGAHVRPACLLDLSLCPVNTCDYPTFSW

SEQ ID NO: 899616 - protein, 2290 aa, Homo sapiens
MIPARFAGVLLALALILPGTLCAEGTRGRSSTARCSLFGSDFVNTFDGSMYSFAGYCSYLLAGGCQKRSFSIIGDFQNGKRVSLSVYLGEFFDIHLFVNGTVTQGDQRVSMPYASKGLYLETEAGYYKLSGEAYGFVARIDGSGNFQVLLSDRYFNKTCGLCGNFNIFAEDDFMTQEGTLTSDPYDFANSWALSSGEQWCERASPPSSSCNISSGEMQKGLWEQCQLLKSTSVFARCHPLVDPEPFVALCEKTLCECAGGLECACPALLEYARTCAQEGMVLYGWTDHSACSPVCPAGMEYRQCVSPCARTCQSLHIKEMCQERCVDGCSCPEGQLLDEGLCVESTECPCVHSGKRYPPGTSLSRDCNTCICRNSQWICSNEECPGECLVTGQSHFKSFDNRYFTFSGICQYLLARDCQDHSFSIVIETVQCADDRDAVCTRSVTVRLPGLHNSLVKLKHGAGVAMDGQDVQLPLLKGDLRIQHTVTASVRLSYGEDLQMDWDGRGRLLVKLSPVYAGKTCGLCGNYNGNQGDDFLTPSGLAEPRVEDFGNAWKLHGDCQDLQKQHSDPCALNPRMTRFSEEACAVLTSPTFEACHRAVSPLPYLRNCRYDVCSCSDGRECLCGALASYAAACAGRGVRVAWREPGRCELNCPKGQVYLQCGTPCNLTCRSLSYPDEECNEACLEGCFCPPGLYMDERGDCVPKAQCPCYYDGEIFQPEDIFSDHHTMCYCEDGFMHCTMSGVPGSLLPDAVLSSPLSHRSKRSLSCRPPMVKLVCPADNLRAEGLECTKTCQNYDLECMSMGCVSGCLCPPGMVRHENRCVALERCPCFHQGKEYAPGETVKIGCNTCVCRDRKWNCTDHVCDATCSTIGMAHYLTFDGLKYLFPGECQYVLVQDYCGSNPGTFRILVGNKGCSHPSVKCKKRVTILVEGGEIELFDGEVNVKRPMKDETHFEVVESGRYIILLLGKALSVVWDRHLSISVVLKQTYQEKVCGLCGNFDGIQNNDLTSSNLQVEEDPVDFGNSWKVSSQCADTRKVPLDSSPATCHNNIMKQTMVDSSCRILTSDVFQDCNKLVDPEPYLDVCIYDTCSCESIGDCACFCDTIAAYAHVCAQHGKVVTWRTATLCPQSCEERNLRENGYECEWRYNSCAPACQVTCQHPEPLACPVQCVEGCHAHCPPGKILDELLQTCVDPEDCPVCEVAGRRFASGKKVTLNPSDPEHCQICHCDVVNLTCEACQEPGGLVVPPTDAPVSPTTLYVEDISEPPLHDFYCSRLLDLVFLLDGSSRLSEAEFEVLKAFVVDMMERLRISQKWVRVAVVEYHDGSHAYIGLKDRKRPSELRRIASQVKYAGSQVASTSEVLKYTLFQIFSKIDRPEASRIALLLMASQEPQRMSRNFVRYVQGLKKKKVIVIPVGIGPHANLKQIRLIEKQAPENKAFVLSSVDELEQQRDEIVSYLCDLAPEAPPPTLPPDMAQVTVGPGLLGVSTLGPKRNSMVLDVAFVLEGSDKIGEADFNRSKEFMEEVIQRMDVGQDSIHVTVLQYSYMVTVEYPFSEAQSKGDILQRVREIRYQGGNRTNTGLALRYLSDHSFLVSQGDREQAPNLVYMVTGNPASDEIKRLPGDIQVVPIGVGPNANVQELERIGWPNAPILIQDFETLPREAPDLVLQRCCSGEGLQIPTLSPAPDCSQPLDVILLLDGSSSFPASYFDEMKSFAKAFISKANIGPRLTQVSVLQYGSITTIDVPWNVVPEKAHLLSLVDVMQREGGPSQIGDALGFAVRYLTSEMHGARPGASKAVVILVTDVSVDSVDAAADAARSNRVTVFPIGIGDRYDAAQLRILAGPAGDSNVVKLQRIEDLPTMVTLGNSFLHKLCSGFVRICMDEDGNEKRPGDVWTLPDQCHTVTCQPDGQTLLKSHRVNCDRGLRPSCPNSQSPVKVEETCGCRWTCPCVCTGSSTRHIVTFDGQNFKLTGSCSYVLFQNKEQDLEVILHNGACSPGARQGCMKSIEVKHSALSVELHSDMEVTVNGRLVSVPYVGGNMEVNVYGAIMHEVRFNHLGHIFTFTPQNNEFQLQLSPKTFASKTYGLCGICDENGANDFMLRDGTVTTDWKTLVQEWTVQRPGQTCQPILEEQCLVPDSSHCQVLLLPLFAECHKVLAPATFYAICQQDSCHQEQVCEVIASYAHLCRTNGVCVDWRTPDFCAMSCPPSLVYNHCEHGCPRHCDGNVSSCGDHPSEGCFCPPDKVMLEGSCVPEEACTQCIGEDGVQHQVGAWAFHFPWGCFPLGSKGRYVHQ

SEQ ID NO: 899617 - protein, 92 aa, Homo sapiens
LYPCWQAPASQAVYCVVGTSPLRVDIHYCQGKCASKAMYSIDINDVQDQCSCCSPTRTEPMQVALHCTNGSVVYHEVLNAMECKCSPRKCSK

SEQ ID NO: 899618 - protein, 76 aa, Homo sapiens
PSSSWISCFVFLQVNVKRPMKDETHFEVVESGRYIILLLGKALSVVWDRHLSISVVLKQTYQVSGFLASSCWGLGL

SEQ ID NO: 899619 - protein, 969 aa, Homo sapiens
SKSIHHTRAPLAAPPSDDGDPGGRQEDMASDAVQSEPRSWSLLEQLGLAGADLAAPGVQQQLELERERLRREIRKELKLKEGAENLRRATTDLGRSLGPVELLLRGSSRRLDLLHQQLQELHAHVVLPDPAATHDGPQSPGAGGPTCSATNLSRVAGLEKQLAIELKVKQGAENMIQTYSNGSTKDRKLLLTAQQMLQDSKTKIDIIRMQLRRALQAGQLENQAAPDDTQGSPDLGAVELRIEELRHHFRVEHAVAEGAKNVLRLLSAAKAPDRKAVSEAQEKLTESNQKLGLLREALERRLGELPADHPKGRLLREELAAASSAAFSTRLAGPFPATHYSTLCKPAPLTGTLEVRVVGCRDLPETIPWNPTPSMGGPGTPDSRPPFLSRPARGLYSRSGSLSGRSSLKAEAENTSEVSTVLKLDNTVVGQTSWKPCGPNAWDQSFTLELERARELELAVFWRDQRGLCALKFLKLEDFLDNERHEVQLDMEPQGCLVAEVTFRNPVIERIPRLRRQKKIFSKQQGKAFQRARQMNIDVATWVRLLRRLIPNATGTGTFSPGASPGSEARTTGDISVEKLNLGTDSDSSPQKSSRDPPSSPSSLSSPIQESTAPELPSETQETPGPALCSPLRKSPLTLEDFKFLAVLGRGHFGKVLLSEFRPSGELFAIKALKKGDIVARDEVESLMCEKRILAAVTSAGHPFLVNLFGCFQTPEHVCFVMEYSAGGDLMLHIHSDVFSEPRAIFYSACVVLGLQFLHEHKIVYRDLKLDNLLLDTEGYVKIADFGLCKEGMGYGDRTSTFCGTPEFLAPEVLTDTSYTRAVDWWGLGVLLYEMLVGESPFPGDDEEEVFDSIVNDEVRYPRFLSAEAIGIMRRLLRRNPERRLGSSERDAEDVKKQPFFRTLGWEALLARRLPPPFVPTLSGRTDVSNFDEEFTGEAPTLSPPRDARPLTAAEQAAFLDFDFVAGGC

SEQ ID NO: 899620 - protein, 954 aa, Homo sapiens
PQPGPRMAEANNPSEQELESEPRSWSLLEQLGLAGADLAAPGVQQQLELERERLRREIRKELKLKEGAENLRRATTDLGRSLGPVELLLRGSSRRLDLLHQQLQELHAHVVLPDPAATHDGPQSPGAGGPTCSATNLSRVAGLEKQLAIELKVKQGAENMIQTYSNGSTKDRKLLLTAQQMLQDSKTKIDIIRMQLRRALQAGQLENQAAPDDTQGSPDLGAVELRIEELRHHFRVEHAVAEGAKNVLRLLSAAKAPDRKAVSEAQEKLTESNQKLGLLREALERRLGELPADHPKGRLLREELAAASSAAFSTRLAGPFPATHYSTLCKPAPLTGTLEVRVVGCRDLPETIPWNPTPSMGGPGTPDSRPPFLSRPARGLYSRSGSLSGRSSLKAEAENTSEVSTVLKLDNTVVGQTSWKPCGPNAWDQSFTLELERARELELAVFWRDQRGLCALKFLKLEDFLDNERHEVQLDMEPQGCLVAEVTFRNPVIERIPRLRRQKKIFSKQQGKAFQRARQMNIDVATWVRLLRRLIPNATGTGTFSPGASPGSEARTTGDISVEKLNLGTDSDSSPQKSSRDPPSSPSSLSSPIQESTAPELPSETQETPGPALCSPLRKSPLTLEDFKFLAVLGRGHFGKVLLSEFRPSGELFAIKALKKGDIVARDEVESLMCEKRILAAVTSAGHPFLVNLFGCFQTPEHVCFVMEYSAGGDLMLHIHSDVFSEPRAIFYSACVVLGLQFLHEHKIVYRDLKLDNLLLDTEGYVKIADFGLCKEGMGYGDRTSTFCGTPEFLAPEVLTDTSYTRAVDWWGLGVLLYEMLVGESPFPGDDEEEVFDSIVNDEVRYPRFLSAEAIGIMRRLLRRNPERRLGSSERDAEDVKKQPFFRTLGWEALLARRLPPPFVPTLSGRTDVSNFDEEFTGEAPTLSPPRDARPLTAAEQAAFLDFDFVAGGC

SEQ ID NO: 899621 - protein, 989 aa, Homo sapiens
MQIRPELVSRVPGGPKASAALGLNAWNRSPRVPARSNGGPLGSVRSSRDPERGKSEPRSWSLLEQLGLAGADLAAPGVQQQLELERERLRREIRKELKLKEGAENLRRATTDLGRSLGPVELLLRGSSRRLDLLHQQLQELHAHVVLPDPAATHDGPQSPGAGGPTCSATNLSRVAGLEKQLAIELKVKQGAENMIQTYSNGSTKDRKLLLTAQQMLQDSKTKIDIIRMQLRRALQAGQLENQAAPDDTQGSPDLGAVELRIEELRHHFRVEHAVAEGAKNVLRLLSAAKAPDRKAVSEAQEKLTESNQKLGLLREALERRLGELPADHPKGRLLREELAAASSAAFSTRLAGPFPATHYSTLCKPAPLTGTLEVRVVGCRDLPETIPWNPTPSMGGPGTPDSRPPFLSRPARGLYSRSGSLSGRSSLKAEAENTSEVSTVLKLDNTVVGQTSWKPCGPNAWDQSFTLELERARELELAVFWRDQRGLCALKFLKLEDFLDNERHEVQLDMEPQGCLVAEVTFRNPVIERIPRLRRQKKIFSKQQGKAFQRARQMNIDVATWVRLLRRLIPNATGTGTFSPGASPGSEARTTGDISVEKLNLGTDSDSSPQKSSRDPPSSPSSLSSPIQESTAPELPSETQETPGPALCSPLRKSPLTLEDFKFLAVLGRGHFGKVLLSEFRPSGELFAIKALKKGDIVARDEVESLMCEKRILAAVTSAGHPFLVNLFGCFQTPEHVCFVMEYSAGGDLMLHIHSDVFSEPRAIFYSACVVLGLQFLHEHKIVYRDLKLDNLLLDTEGYVKIADFGLCKEGMGYGDRTSTFCGTPEFLAPEVLTDTSYTRAVDWWGLGVLLYEMLVGESPFPGDDEEEVFDSIVNDEVRYPRFLSAEAIGIMRRLLRRNPERRLGSSERDAEDVKKQPFFRTLGWEALLARRLPPPFVPTLSGRTDVSNFDEEFTGEAPTLSPPRDARPLTAAEQAAFLDFDFVAGGC

SEQ ID NO: 899622 - protein, 955 aa, Homo sapiens
GCTVRKVFGSEAITLEQELESEPRSWSLLEQLGLAGADLAAPGVQQQLELERERLRREIRKELKLKEGAENLRRATTDLGRSLGPVELLLRGSSRRLDLLHQQLQELHAHVVLPDPAATHDGPQSPGAGGPTCSATNLSRVAGLEKQLAIELKVKQGAENMIQTYSNGSTKDRKLLLTAQQMLQDSKTKIDIIRMQLRRALQAGQLENQAAPDDTQGSPDLGAVELRIEELRHHFRVEHAVAEGAKNVLRLLSAAKAPDRKAVSEAQEKLTESNQKLGLLREALERRLGELPADHPKGRLLREELAAASSAAFSTRLAGPFPATHYSTLCKPAPLTGTLEVRVVGCRDLPETIPWNPTPSMGGPGTPDSRPPFLSRPARGLYSRSGSLSGRSSLKAEAENTSEVSTVLKLDNTVVGQTSWKPCGPNAWDQSFTLELERARELELAVFWRDQRGLCALKFLKLEDFLDNERHEVQLDMEPQGCLVAEVTFRNPVIERIPRLRRQKKIFSKQQGKAFQRARQMNIDVATWVRLLRRLIPNATGTGTFSPGASPGSEARTTGDISVEKLNLGTDSDSSPQKSSRDPPSSPSSLSSPIQESTAPELPSETQETPGPALCSPLRKSPLTLEDFKFLAVLGRGHFGKVLLSEFRPSGELFAIKALKKGDIVARDEVESLMCEKRILAAVTSAGHPFLVNLFGCFQTPEHVCFVMEYSAGGDLMLHIHSDVFSEPRAIFYSACVVLGLQFLHEHKIVYRDLKLDNLLLDTEGYVKIADFGLCKEGMGYGDRTSTFCGTPEFLAPEVLTDTSYTRAVDWWGLGVLLYEMLVGESPFPGDDEEEVFDSIVNDEVRYPRFLSAEAIGIMRRLLRRNPERRLGSSERDAEDVKKQPFFRTLGWEALLARRLPPPFVPTLSGRTDVSNFDEEFTGEAPTLSPPRDARPLTAAEQAAFLDFDFVAGGC

SEQ ID NO: 899623 - protein, 435 aa, Homo sapiens [sequence omitted]

SEQ ID NO: 899624 - protein, 435 aa, Homo sapiens [sequence omitted]

SEQ ID NO: 899625 - protein, 361 aa, Homo sapiens
  misc_feature (4)..(4): Xaa can be any naturally occurring amino acid
  misc_feature (23)..(23): Xaa can be any naturally occurring amino acid
  misc_feature (27)..(27): Xaa can be any naturally occurring amino acid
  misc_feature (29)..(29): Xaa can be any naturally occurring amino acid
  misc_feature (35)..(36): Xaa can be any naturally occurring amino acid
  misc_feature (38)..(38): Xaa can be any naturally occurring amino acid
STLXLVPIKINVRAARNQKPSPXWQPXRXTFTSKXXSXAVLGRVILGVLLSEFRPSGELFAIKALKKGDIVARDEVESLMCEKRILAAVTSAGHPFLVNLFGCFQTPEHVCFVMEYSAGGDLMLHIHSDVFSEPRAIFYSACVVLGLQFLHEHKIVYRDLKLDNLLLDTEGYVKIADFGLCKEGMGYGDRTSTFCGTPEFLAPEVLTDTSYTRAVDWWGLGVLLYEMLVGESPFPGDDEEEVFDSIVNDEVRYPRFLSAEAIGIMRRLLRRNPERRLGSSERDAEDVKKQPFFRTLGWEALLARRLPPPFVPTLSGRTDVSNFDEEFTGEAPTLSPPRDARPLTAAEQAAFLDFDFVAGGC

SEQ ID NO: 899626 - protein, 418 aa, Homo sapiens
LQGLGGCCGYEGISDSPYSGLLSPPQSSPIQESTAPELPSETQETPGPALCSPLRKSPLTLEDFKFLAVLGRGHFGKVRWRAGNWETPQVPGWPLKPPLPTVFQVLLSEFRPSGELFAIKALKKGDIVARDEVESLMCEKRILAAVTSAGHPFLVNLFGCFQTPEHVCFVMEYSAGGDLMLHIHSDVFSEPRAIFYSACVVLGLQFLHEHKIVYRDLKLDNLLLDTEGYVKIADFGLCKEGMGYGDRTSTFCGTPEFLAPEVLTDTSYTRAVDWWGLGVLLYEMLVGESPFPGDDEEEVFDSIVNDEVRYPRFLSAEAIGIMRRLLRRNPERRLGSSERDAEDVKKQPFFRTLGWEALLARRLPPPFVPTLSGRTDVSNFDEEFTGEAPTLSPPRDARPLTAAEQAAFLDFDFVAGGC

SEQ ID NO: 899627 - protein, 905 aa, Homo sapiens
PQPGPRMAEANNPSEQELESEPRSWSLLEQLGLAGADLAAPGVQQQLELERERLRREIRKELKLKEGAENLRRATTDLGRSLGPVELLLRGSSRRLDLLHQQLQELHAHVVLPDPAATHDGPQSPGAGGPTCSATNLSRVAGLEKQLAIELKVKQGAENMIQTYSNGSTKDRKLLLTAQQMLQDSKTKIDIIRMQLRRALQAGQLENQAAPDDTQGSPDLGAVELRIEELRHHFRVEHAVAEGAKNVLRLLSAAKAPDRKAVSEAQEKLTESNQKLGLLREALERRLGELPADHPKGRLLREELAAASSAAFSTRLAGPFPATHYSTLCKPAPLTGTLEVRVVGCRDLPETIPWNPTPSMGGPGTPDSRPPFLSRPARGLYSRSGSLSGRSSLKAEAENTSEVSTVLKLDNTVVGQTSWKPCGPNAWDQSFTLELERARELELAVFWRDQRGLCALKFLKLEDFLDNERHEVQLDMEPQGCLVAEVTFRNPVIERIPRLRRQKKIFSKQQGKAFQRARQMNIDVATWVRLLRRLIPNATGTGTFSPGASPGSEARTTGDISVEKLNLGTDSDSSPQKSSRDPPSSPSSLSSPIQESTAPELPSETQETPGPALCSPLRKSPLTLEDFKFLAVLGRGHFGKVLLSEFRPSGELFAIKALKKGDIVARDEVESLMCEKRILAAVTSAGHPFLVNLFGCFQTPEHVCFVMEYSAGGDLMLHIHSDVFSEPRAIFYSACVVLGLQFLHEHKIVYRDLKLDNLLLDTEGYVKIADFGLCKEGMGYGDRTSTFCGTPEFLAPEVLTDTSYTRAVDWWGLGVLLYEMLVGESPFPGDDEEEVFDSIVNDEVRYPRFLSAEAIGIMRRLLRRNPERRLGSSERDAEDVKKQPFFRTLGMGQPILFRALHRHSE

SEQ ID NO: 899628 - protein, 853 aa, Homo sapiens
PQPGPRMAEANNPSEQELESEPRSWSLLEQLGLAGADLAAPGVQQQLELERERLRREIRKELKLKEGAENLRRATTDLGRSLGPVELLLRGSSRRLDLLHQQLQELHAHVVLPDPAATHDGPQSPGAGGPTCSATNLSRVAGLEKQLAIELKVKQGAENMIQTYSNGSTKDRKLLLTAQQMLQDSKTKIDIIRMQLRRALQAGQLENQAAPDDTQGSPDLGAVELRIEELRHHFRVEHAVAEGAKNVLRLLSAAKAPDRKAVSEAQEKLTESNQKLGLLREALERRLGELPADHPKGRLLREELAAASSAAFSTRLAGPFPATHYSTLCKPAPLTGTLEVRVVGCRDLPETIPWNPTPSMGGPGTPDSRPPFLSRPARGLYSRSGSLSGRSSLKAEAENTSEVSTVLKLDNTVVGQTSWKPCGPNAWDQSFTLELERARELELAVFWRDQRGLCALKFLKLEDFLDNERHEVQLDMEPQGCLVAEVTFRNPVIERIPRLRRQKKIFSKQQGKAFQRARQMNIDVATWVRLLRRLIPNATGTGTFSPGASPGSEARTTGDISVEKLNLGTDSDSSPQKSSRDPPSSPSSLSSPIQESTAPELPSETQETPGPALCSPLRKSPLTLEDFKFLAVLGRGHFGKVLLSEFRPSGELFAIKALKKGDIVARDEVESLMCEKRILAAVTSAGHPFLVNLFGCFQTPEHVCFVMEYSAGGDLMLHIHSDVFSEPRAIFYSACVVLGLQFLHEHKIVYRDLKLDNLLLDTEGYVKIADFGLCKEGMGYGDRTSTFCGTPEFLAPEVLTDTSYTLSGRTDVSNFDEEFTGEAPTLSPPRDARPLTAAEQAAFLDFDFVAGGC

SEQ ID NO: 899629 - protein, 195 aa, Homo sapiens
MVDPRRSDRRLWPLQGLGMGYGDRTSTFCGTPEFLAPEVLTDTSYTRAVDWWGLGVLLYEMLVGESPFPGDDEEEVFDSIVNDEVRYPRFLSAEAIGIMRRLLRRNPERRLGSSERDAEDVKKQPFFRTLGWEALLARRLPPPFVPTLSGRTDVSNFDEEFTGEAPTLSPPRDARPLTAAEQAAFLDFDFVAGGC

SEQ ID NO: 899630 - protein, 755 aa, Homo sapiens
PQPGPRMAEANNPSEQELESEPRSWSLLEQLGLAGADLAAPGVQQQLELERERLRREIRKELKLKEGAENLRRATTDLGRSLGPVELLLRGSSRRLDLLHQQLQELHAHVVLPDPAATHDGPQSPGAGGPTCSATNLSRVAGLEKQLAIELKVKQGAENMIQTYSNGSTKDRKLLLTAQQMLQDSKTKIDIIRMQLRRALQAGQLENQAAPDDTQGSPDLGAVELRIEELRHHFRVEHAVAEGAKNVLRLLSAAKAPDRKAVSEAQEKLTESNQKLGLLREALERRLGELPADHPKGRLLREELAAASSAAFSTRLAGPFPATHYSTLCKPAPLTGTLEVRVVGCRDLPETIPWNPTPSMGGPGTPDSRPPFLSRPARGLYSRSGSLSGRSSLKAEAENTSEVSTVLKLDNTVVGQTSWKPCGPNAWDQSFTLELERARELELAVFWRDQRGLCALKFLKLEDFLDNERHEVQLDMEPQGCLVAEVTFRNPVIERIPRLRRQKKIFSKQQGKAFQRARQMNIDVATWVRLLRRLIPNATGTGTFSPGASPGSEARTTGDISVEKLNLGTDSDSSPQKSSRDPPSSPSSLSSPIQESTAPELPSETQETPGPALCSPLRKSPLTLEDFKFLAVLGRGHFGKVLLSEFRPSGELFAIKALKKGDIVARDEVESLMCEKRILAAVTSAGHPFLVNLFGCFQTPEHVCFVMEYSAGGDLMLHIHSDVFSEPRAIFYFPLPPPFCAPRWSRPHTEFKKTF

SEQ ID NO: 899631 - protein, 654 aa, Homo sapiens
PQPGPRMAEANNPSEQELESEPRSWSLLEQLGLAGADLAAPGVQQQLELERERLRREIRKELKLKEGAENLRRATTDLGRSLGPVELLLRGSSRRLDLLHQQLQELHAHVVLPDPAATHDGPQSPGAGGPTCSATNLSRVAGLEKQLAIELKVKQGAENMIQTYSNGSTKDRKLLLTAQQMLQDSKTKIDIIRMQLRRALQAGQLENQAAPDDTQGSPDLGAVELRIEELRHHFRVEHAVAEGAKNVLRLLSAAKAPDRKAVSEAQEKLTESNQKLGLLREALERRLGELPADHPKGRLLREELAAASSAAFSTRLAGPFPATHYSTLCKPAPLTGTLEVRVVGCRDLPETIPWNPTPSMGGPGTPDSRPPFLSRPARGLYSRSGSLSGRSSLKAEAENTSEVSTVLKLDNTVVGQTSWKPCGPNAWDQSFTLELERARELELAVFWRDQRGLCALKFLKLEDFLDNERHEVQLDMEPQGCLVAEVTFRNPVIERIPRLRRQKKIFSKQQGKAFQRARQMNIDVATWVRLLRRLIPNATGTGTFSPGASPGSEARTTGDISVEKLNLGTDSDSSPQKSSRDPPSSPSSLSSPIQESTAPELPSETQETPGPALCRLWAGKPCWPGACHRPLCPRCPAAPTSATSTRSSPGRPPH

SEQ ID NO: 899632 - protein, 151 aa, Homo sapiens
YEAYVDEAVGVLLSDEMLVGESPFPGDDEEEVFDSIVNDEVRYPRFLSAEAIGIMRRLLRRNPERRLGSSERDAEDVKKQPFFRTLGWEALLARRLPPPFVPTLSGRTDVSNFDEEFTGEAPTLSPPRDARPLTAAEQAAFLDFDFVAGGC

SEQ ID NO: 899633 - protein, 428 aa, Homo sapiens
PQPGPRMAEANNPSEQELESEPRSWSLLEQLGLAGADLAAPGVQQQLELERERLRREIRKELKLKEGAENLRRATTDLGRSLGPVELLLRGSSRRLDLLHQQLQELHAHVVLPDPAATHDGPQSPGAGGPTCSATNLSRVAGLEKQLAIELKVKQGAENMIQTYSNGSTKDRKLLLTAQQMLQDSKTKIDIIRMQLRRALQAGQLENQAAPDDTQGSPDLGAVELRIEELRHHFRVEHAVAEGAKNVLRLLSAAKAPDRKAVSEAQEKLTESNQKLGLLREALERRLGELPADHPKGRLLREELAAASSAAFSTRLAGPFPATHYSTLCKPAPLTAPRHARGARALLWPPSLRAGTPGGRQEDMASDAVQSEPRSWSLLEQLGPGGADLGGPGGTATQLEAWSGNRLRREIRKSLKLQEGAANLMEGH

SEQ ID NO: 899634 - protein, 358 aa, Homo sapiens
LARRGGSRAGRSGPRAGEGRAAPAPSPPRPGRTRAPLAAPPSDDGDPGGRQEDMASDAVQSEPRSWSLLEQLGLAGADLAAPGVQQQLELERERLRREIRKELKLKEGAENLRRATTDLGRSLGPVELLLRGSSRRLDLLHQQLQELHAHVVLPDPAATHDGPQSPGAGGPTCSATNLSRVAGLEKQLAIELKVKQGAENMIQTYSNGSTKDRKLLLTAQQMLQDSKTKIDIIRMQLRRALQAGQLENQAAPDDTQGSPDLGAVELRIEELRHHFRVEHAVAEGAKNVLRLLSAAKAPDRKAVSEAREMQIHRMGCGQPERDWDCRHTQGGVKKPGALGLDAGASHKNVTGSRKWATT

SEQ ID NO: 899635 - protein, 954 aa, Homo sapiens
EFPRRDSRSQVDMASDAVQSEPRSWSLLEQLGLAGADLAAPGVQQQLELERERLRREIRKELKLKEGAENLRRATTDLGRSLGPVELLLRGSSRRLDLLHQQLQELHAHVVLPDPAATHDGPQSPGAGGPTCSATNLSRVAGLEKQLAIELKVKQGAENMIQTYSNGSTKDRKLLLTAQQMLQDSKTKIDIIRMQLRRALQAGQLENQAAPDDTQGSPDLGAVELRIEELRHHFRVEHAVAEGAKNVLRLLSAAKAPDRKAVSEAQEKLTESNQKLGLLREALERRLGELPADHPKGRLLREELAAASSAAFSTRLAGPFPATHYSTLCKPAPLTGTLEVRVVGCRDLPETIPWNPTPSMGGPGTPDSRPPFLSRPARGLYSRSGSLSGRSSLKAEAENTSEVSTVLKLDNTVVGQTSWKPCGPNAWDQSFTLELERARELELAVFWRDQRGLCALKFLKLEDFLDNERHEVQLDMEPQGCLVAEVTFRNPVIERIPRLRRQKKIFSKQQGKAFQRARQMNIDVATWVRLLRRLIPNATGTGTFSPGASPGSEARTTGDISVEKLNLGTDSDSSPQKSSRDPPSSPSSLSSPIQESTAPELPSETQETPGPALCSPLRKSPLTLEDFKFLAVLGRGHFGKVLLSEFRPSGELFAIKALKKGDIVARDEVESLMCEKRILAAVTSAGHPFLVNLFGCFQTPEHVCFVMEYSAGGDLMLHIHSDVFSEPRAIFYSACVVLGLQFLHEHKIVYRDLKLDNLLLDTEGYVKIADFGLCKEGMGYGDRTSTFCGTPEFLAPEVLTDTSYTRAVDWWGLGVLLYEMLVGESPFPGDDEEEVFDSIVNDEVRYPRFLSAEAIGIMRRLLRRNPERRLGSSERDAEDVKKQPFFRTLGWEALLARRLPPPFVPTLSGRTDVSNFDEEFTGEAPTLSPPRDARPLTAAEQAAFLDFDFVAGGC

SEQ ID NO: 899636 - protein, 995 aa, Homo sapiens
LARRGGSRAGRSGPRAGEGRAAPAPSPPRPGRTRAPLAAPPSDDGDPGGRQEDMASDAVQSEPRSWSLLEQLGLAGADLAAPGVQQQLELERERLRREIRKELKLKEGAENLRRATTDLGRSLGPVELLLRGSSRRLDLLHQQLQELHAHVVLPDPAATHDGPQSPGAGGPTCSATNLSRVAGLEKQLAIELKVKQGAENMIQTYSNGSTKDRKLLLTAQQMLQDSKTKIDIIRMQLRRALQAGQLENQAAPDDTQGSPDLGAVELRIEELRHHFRVEHAVAEGAKNVLRLLSAAKAPDRKAVSEAQEKLTESNQKLGLLREALERRLGELPADHPKGRLLREELAAASSAAFSTRLAGPFPATHYSTLCKPAPLTGTLEVRVVGCRDLPETIPWNPTPSMGGPGTPDSRPPFLSRPARGLYSRSGSLSGRSSLKAEAENTSEVSTVLKLDNTVVGQTSWKPCGPNAWDQSFTLELERARELELAVFWRDQRGLCALKFLKLEDFLDNERHEVQLDMEPQGCLVAEVTFRNPVIERIPRLRRQKKIFSKQQGKAFQRARQMNIDVATWVRLLRRLIPNATGTGTFSPGASPGSEARTTGDISVEKLNLGTDSDSSPQKSSRDPPSSPSSLSSPIQESTAPELPSETQETPGPALCSPLRKSPLTLEDFKFLAVLGRGHFGKVLLSEFRPSGELFAIKALKKGDIVARDEVESLMCEKRILAAVTSAGHPFLVNLFGCFQTPEHVCFVMEYSAGGDLMLHIHSDVFSEPRAIFYSACVVLGLQFLHEHKIVYRDLKLDNLLLDTEGYVKIADFGLCKEGMGYGDRTSTFCGTPEFLAPEVLTDTSYTRAVDWWGLGVLLYEMLVGESPFPGDDEEEVFDSIVNDEVRYPRFLSAEAIGIMRRLLRRNPERRLGSSERDAEDVKKQPFFRTLGWEALLARRLPPPFVPTLSGRTDVSNFDEEFTGEAPTLSPPRDARPLTAAEQAAFLDFDFVAGGC

SEQ ID NO: 899637 - protein, 756 aa, Homo sapiens
PSLASVLASPVVLPRQCRSPDLGAVELRIEELRHHFRVEHAVAEGAKNVLRLLSAAKAPDRKAVSEAQEKLTESNQKLGLLREALERRLGELPADHPKGRLLREELAAASSAAFSTRLAGPFPATHYSTLCKPAPLTGTLEVRVVGCRDLPETIPWNPTPSMGGPGTPDSRPPFLSRPARGLYSRSGSLSGRSSLKAEAENTSEVSTVLKLDNTVVGQTSWKPCGPNAWDQSFTLELERARELELAVFWRDQRGLCALKFLKLEDFLDNERHEVQLDMEPQGCLVAEVTFRNPVIERIPRLRRQKKIFSKQQGKAFQRARQMNIDVATWVRLLRRLIPNATGTGTFSPGASPGSEARTTGDISVEKLNLGTDSDSSPQKSSRDPPSSPSSLSSPIQESTAPELPSETQETPGPALCSPLRKSPLTLEDFKFLAVLGRGHFGKVLLSEFRPSGELFAIKALKKGDIVARDEVESLMCEKRILAAVTSAGHPFLVNLFGCFQTPEHVCFVMEYSAGGDLMLHIHSDVFSEPRAIFYSACVVLGLQFLHEHKIVYRDLKLDNLLLDTEGYVKIADFGLCKEGMGYGDRTSTFCGTPEFLAPEVLTDTSYTRAVDWWGLGVLLYEMLVGESPFPGDDEEEVFDSIVNDEVRYPRFLSAEAIGIMRRLLRRNPERRLGSSERDAEDVKKQPFFRTLGWEALLARRLPPPFVPTLSGRTDVSNFDEEFTGEAPTLSPPRDARPLTAAEQAAFLDFDFVAGGC

SEQ ID NO: 899638 - protein, 557 aa, Homo sapiens
MDQTLTKHQVLLYPLCKYHCISYYTLVPYDVRTSIIQSFQMRKVWPRRIKKLAQRLVHGWLLKLEDFLDNERHEVQLDMEPQGCLVAEVTFRNPVIERIPRLRRQKKIFSKQQGKAFQRARQMNIDVATWVRLLRRLIPNATGTGTFSPGASPGSEARTTGDISVEKLNLGTDSDSSPQKSSRDPPSSPSSLSSPIQESTAPELPSETQETPGPALCSPLRKSPLTLEDFKFLAVLGRGHFGKVLLSEFRPSGELFAIKALKKGDIVARDEVESLMCEKRILAAVTSAGHPFLVNLFGCFQTPEHVCFVMEYSAGGDLMLHIHSDVFSEPRAIFYSACVVLGLQFLHEHKIVYRDLKLDNLLLDTEGYVKIADFGLCKEGMGYGDRTSTFCGTPEFLAPEVLTDTSYTRAVDWWGLGVLLYEMLVGESPFPGDDEEEVFDSIVNDEVRYPRFLSAEAIGIMRRLLRRNPERRLGSSERDAEDVKKQPFFRTLGWEALLARRLPPPFVPTLSGRTDVSNFDEEFTGEAPTLSPPRDARPLTAAEQAAFLDFDFVAGGC

SEQ ID NO: 899639 - protein, 933 aa, Homo sapiens
PQPGPRMAEANNPSEQELESEPRSWSLLEQLGLAGADLAAPGVQQQLELERERLRREIRKELKLKEGAENLRRATTDLGRSLGPVELLLRGSSRRLDLLHQQLQELHAHVVLPDPAATHDGPQSPGAGGPTCSATNLSRVAGLEKQLAIELKVKQGAENMIQTYSNGSTKDRKLLLTAQQMLQDSKTKIDIIRMQLRRALQAGQLENQAAPDDTQGSPDLGAVELRIEELRHHFRVEHAVAEGAKNVLRLLSAAKAPDRKAVSEAQEKLTESNQKLGLLREALERRLGELPADHPKGRLLREELAAASSAAFSTRLAGPFPATHYSTLCKPAPLTGTLEVRVVGCRDLPETIPWNPTPSMGGPGTPDSRPPFLSRPARGLYSRSGSLSGRSSLKAEAENTSEVSTVLKLDNTVVGQTSWKPCGPNAWDQSFTLELERARELELAVFWRDQRGLCALKFLKLEDFLDNERHEVQLDMEPQGCLVAEVTFRNPVIERIPRLRRQKKIFSKQQGKAFQRARQMNIDVATWVRLLRRLIPNATGTGTFSPGASPGSEARTTGDISVEKLNLGTDSDSSPQKSSRDPPSSPSSLSSPIQESTAPELPSETQETPGPALCSPLRKSPLTLEDFKFLAVLGRGHFGKVLLSEFRPSGELFAIKALKKGDIVARDEVESLMCEKRILAAVTSAGHPFLVNLFGCFQTPEHVCFVMEYSAGGDLMLHIHSDVFSEPRAMDLKLDNLLLDTEGYVKIADFGLCKEGMGYGDRTSTFCGTPEFLAPEVLTDTSYTRAVDWWGLGVLLYEMLVGESPFPGDDEEEVFDSIVNDEVRYPRFLSAEAIGIMRRLLRRNPERRLGSSERDAEDVKKQPFFRTLGWEALLARRLPPPFVPTLSGRTDVSNFDEEFTGEAPTLSPPRDARPLTAAEQAAFLDFDFVAGGC

SEQ ID NO: 899640 - protein, 901 aa, Homo sapiens
PQPGPRMAEANNPSEQELESEPRSWSLLEQLGLAGADLAAPGVQQQLELERERLRREIRKELKLKEGAENLRRATTDLGRSLGPVELLLRGSSRRLDLLHQQLQELHAHVVLPDPAATHDGPQSPGAGGPTCSATNLSRVAGLEKQLAIELKVKQGAENMIQTYSNGSTKDRKLLLTAQQMLQDSKTKIDIIRMQLRRALQAGQLENQAAPDDTQGSPDLGAVELRIEELRHHFRVEHAVAEGAKNVLRLLSAAKAPDRKAVSEAQEKLTESNQKLGLLREALERRLGELPADHPKGRLLREELAAASSAAFSTRLAGPFPATHYSTLCKPAPLTGTLEVRVVGCRDLPETIPWNPTPSMGGPGTPDSRPPFLSRPARGLYSRSGSLSGRSSLKAEAENTSEVSTVLKLDNTVVGQTSWKPCGPNAWDQSFTLELERARELELAVFWRDQRGLCALKFLKLEDFLDNERHEVQLDMEPQGCLVAEVTFRNPVIERIPRLRRQKKIFSKQQGKAFQRARQMNIDVATWVRLLRRLIPNATGTGTFSPGASPGSEARTTGDISVEKLNLGTDSDSSPQKSSRDPPSSPSSLSSPIQESTAPELPSETQETPGPALCSPLRKSPLTLEDFKFLAVLGRGHFGKVLLSEFRPSGELFAIKALKKGDIVARDEVESLMCEKRILAAVTSAGHPFLVNLFGCFQTPEHVCFVMEYSAGGDLMLHIHSDVFSEPRAIFYSACVVLGLQFLHEHKIVYRDLKLDNLLLDTEGYVKIADFGLCKEGMGYGDRTSTFCGTPEFLAPEVLTDTSYTRAVDWWGLGVLLYEMLVGESPFPGDDEEEVFDSIVNDEVRYPRFLSAEAIGIMRRVRTPDVGRAWGGAVGPRRGQILTQCSFLQAASEEPRAEAGI

SEQ ID NO: 899641 - protein, 905 aa, Homo sapiens
PQPGPRMAEANNPSEQELESEPRSWSLLEQLGLAGADLAAPGVQQQLELERERLRREIRKELKLKEGAENLRRATTDLGRSLGPVELLLRGSSRRLDLLHQQLQELHAHVVLPDPAATHDGPQSPGAGGPTCSATNLSRVAGLEKQLAIELKVKQGAENMIQTYSNGSTKDRKLLLTAQQMLQDSKTKIDIIRMQLRRALQAGQLENQAAPDDTQGSPDLGAVELRIEELRHHFRVEHAVAEGAKNVLRLLSAAKAPDRKAVSEAQEKLTESNQKLGLLREALERRLGELPADHPKGRLLREELAAASSAAFSTRLAGPFPATHYSTLCKPAPLTGTLEVRVVGCRDLPETIPWNPTPSMGGPGTPDSRPPFLSRPARGLYSRSGSLSGRSSLKAEAENTSEVSTVLKLDNTVVGQTSWKPCGPNAWDQSFTLELERARELELAVFWRDQRGLCALKFLKLEDFLDNERHEVQLDMEPQGCLVAEVTFRNPVIERIPRLRRQKKIFSKQQGKAFQRARQMNIDVATWVRLLRRLIPNATGTGTFSPGASPGSEARTTGDISVEKLNLGTDSDSSPQKSSRDPPSSPSSLSSPIQESTAPELPSETQETPGPALCSPLRKSPLTLEDFKFLAVLGRGHFGKVLLSEFRPSGELFAIKALKKGDIVARDEVESLMCEKRILAAVTSAGHPFLVNLFGCFQTPEHVCFVMEYSAGGDLMLHIHSDVFSEPRAIFYSACVVLGLQFLHEHKIVYRDLKLDNLLLDTEGYVKIADFGLCKEGMGYGDRTSTFCGTPEFLAPEVLTDTSYTRAVDWWGLGVLLYEMLVGESPFPGDDEEEVFDSIVNDEVRYPRFLSAEAIGIMRRLLRRNPERRLGSSERDAEDVKKQPFFRTRGWEALLARLPQPRGSS

SEQ ID NO: 899642 - protein, 769 aa, Homo sapiens
PQPGPRMAEANNPSEQELESEPRSWSLLEQLGLAGADLAAPGVQQQLELERERLRREIRKELKLKEGAENLRRATTDLGRSLGPVELLLRGSSRRLDLLHQQLQELHAHVVLPDPAATHDGPQSPGAGGPTCSATNLSRVAGLEKQLAIELKVKQGAENMIQTYSNGSTKDRKLLLTAQQMLQDSKTKIDIIRMQLRRALQAGQLENQAAPDDTQGSPDLGAVELRIEELRHHFRVEHAVAEGAKNVLRLLSAAKAPDRKAVSEAQEKLTESNQKLGLLREALERRLGELPADHPKGRLLREELAAASSAAFSTRLAGPFPATHYSTLCKPAPLTGTLEVRVVGCRDLPETIPWNPTPSMGGPGTPDSRPPFLSRPARGLYSRSGSLSGRSSLKAEAENTSEVSTVLKLDNTVVGQTSWKPCGPNAWDQSFTLELERARELELAVFWRDQRGLCALKFLKLEDFLDNERHEVQLDMEPQGCLVAEVTFRNPVIERIPRLRRQKKIFSKQQGKAFQRARQMNIDVATWVRLLRRLIPNATGTGTFSPGASPGSEARTTGDISVEKLNLGTDSDSSPQKSSRDPPSSPSSLSSPIQESTAPELPSETQETPGPALCSPLRKSPLTLEDFKFLAVLGRGHFGKVLLSEFRPSGELFAIKALKKGDIVARDEVESLMCEKRILAAVTSAGHPFLVNLFGCFQTPEHVCFVMEYSAGGDLMLHIHSDVFSEPRAILWAGKPCWPGACHRPLCPRCPAAPTSATSTRSSPGRPPH

SEQ ID NO: 899643 - protein, 177 aa, Homo sapiens
MGYGDRTSTFCGTPEFLAPEVLTDTSYTRAVDWWGLGVLLYEMLVGESPFPGDDEEEVFDSIVNDEVRYPRFLSAEAIGIMRRLLRRNPERRLGSSERDAEDVKKQPFFRTLGWEALLARRLPPPFVPTLSGRTDVSNFDEEFTGEAPTLSPPRDARPLTAAEQAAFLDFDFVAGGC

SEQ ID NO: 899644 - protein, 585 aa, Homo sapiens
PQPGPRMAEANNPSEQELESEPRSWSLLEQLGLAGADLAAPGVQQQLELERERLRREIRKELKLKEGAENLRRATTDLGRSLGPVELLLRGSSRRLDLLHQQLQELHAHVVLPDPAATHDGPQSPGAGGPTCSATNLSRVAGLEKQLAIELKVKQGAENMIQTYSNGSTKDRKLLLTAQQMLQDSKTKIDIIRMQLRRALQAGQLENQAAPDDTQGSPDLGAVELRIEELRHHFRVEHAVAEGAKNVLRLLSAAKAPDRKAVSEAQEKLTESNQKLGLLREALERRLGELPADHPKGRLLREELAAASSAAFSTRLAGPFPATHYSTLCKPAPLTGTLEVRVVGCRDLPETIPWNPTPSMGGPGTPDSRPPFLSRPARGLYSRSGSLSGRSSLKAEAENTSEVSTVLKLDNTVVGQTSWKPCGPNAWDQSFTLELERARELELAVFWRDQRGLCALKFLKLEDFLDNERHEVQLDMEPQGCLVAEVTFRNPVIERIPRLRRQKKIFSKQQGKAFQRARQMNIDVATWVRLLRRLIPNATGTGTFSPGASPGSEARTTGDISVEKLNLGTDSDSSPQKSSRDPPNK

SEQ ID NO: 899645 - protein, 412 aa, Homo sapiens
PQPGPRMAEANNPSEQELESEPRSWSLLEQLGLAGADLAAPGVQQQLELERERLRREIRKELKLKEGAENLRRATTDLGRSLGPVELLLRGSSRRLDLLHQQLQELHAHVVLPDPAATHDGPQSPGAGGPTCSATNLSRVAGLEKQLAIELKVKQGAENMIQTYSNGSTKDRKLLLTAQQMLQDSKTKIDIIRMQLRRALQAGQLENQAAPDDTQGSPDLGAVELRIEELRHHFRVEHAVAEGAKNVLRLLSAAKAPDRKAVSEAQEKLTESNQKLGLLREALERRLGELPADHPKGRLLREELAAASSAAFSTRLAGPFPATHYSTLCKPAPLTGTLEVRVVGCRDLPETIPWNPTPSMGGPGTPDSRPPFLSRPARGLYSRSGSLSGRSSLKAEAENTSEVSTVLKLDNT

SEQ ID NO: 899646 - protein, 939 aa, Homo sapiens
RRSGDGVGGGGGSGSGRGARWGGGGAGEEHEWSKMADHVQSLAQLENLCKQLYETTDTTTRLQAEKALVEFTNSPDCLSKCQLLLERGSSSYSQLLAATCLTKLVSRTNNPLPLEQRIDIRNYVLNYLATRPKLATFVTQALIQLYARITKLGWFDCQKDDYVFRNAITDVTRFLQDSVEYCIIGVTILSQLTNEINQADTTHPLTKHRKIASSFRDSSLFDIFTLSCNLLKQASGKNLNLNDESQHGLLMQLLKLTHNCLNFDFIGTSTDESSDDLCTVQIPTSWRSAFLDSSTLQLSTIGRCEYEKTCALLVQLFDQSAQSYQELLQSASASPMDIAVQEGRLTWLVYIIGAVIGGRVSFASTDEQDAMDGELVCRVLQLMNLTDSRLAQAGNEKLELAMLSFFEQFRKIYIGDQVQKSSKLYRRLSEVLGLNDETMVLSVFIGKIITNLKYWGRCEPITSKTLQLLNDLSIGYSSVRKLVKLSAVQFMLNNHTSEHFSFLGINNQSNLTDMRCRTTFYTALGRLLMVDLGEDEDQYEQFMLPLTAAFEAVAQMFSTNSFNEQEAKRTLVGLVRDLRGIAFAFNAKTSFMMLFEWIYPSYMPILQRAIELWYHDPACTTPVLKLMAELVHNRSQRLQFDVSSPNGILLFRETSKMITMYGNRILTLGEVPKDQVYALKLKGISICFSMLKAALSGSYVNFGVFRLYGDDALDNALQTFIKLLLSIPHSDLLDYPKLSQSYYSLLEVLTQDHMNFIASLEPHVIMYILSSISEGLTALDTMVCTGCCSCLDHIVTYLFKQLSRSTKKRTTPLNQESDRFLHIMQQHPEMIQQMLSTVLNIIIFEDCRNQWSMSRPLLGLILLNEKYFSDLRNSIVNSQPPEKQQAMHLCFENLMEGIERNLLTKNRDRFTQNLSAFRREVNDSMKNSTYGVNSNDMMS

SEQ ID NO: 899647 - protein, 1088 aa, Homo sapiens
MRDPGRKSLAQLENLCKQLYETTDTTTRLQAEKALVEFTNSPDCLSKCQLLLERGSSSYSQLLAATCLTKLVSRTNNPLPLEQRIDIRNYVLNYLATRPKLATFVTQALIQLYARITKLGWFDCQKDDYVFRNAITDVTRFLQDSVEYCIIGVTILSQLTNEINQADTTHPLTKHRKIASSFRDSSLFDIFTLSCNLLKQASGKNLNLNDESQHGLLMQLLKLTHNCLNFDFIGTSTDESSDDLCTVQIPTSWRSAFLDSSTLQLFFDLYHSIPPSFSPLVLSCLVQIASVRRSLFNNAERAKFLSHLVDGVKRILENPQSLSDPNNYHEFCRLLARLKSNYQLGELVKVENYPEVIRLIANFTVTSLQHWEFAPNSVHYLLSLWQRLAASVPYVKATEPHMLETYTPEVTKAYITSRLESVHIILRDGLEDPLEDTGLVQQQLDQLSTIGRCEYEKTCALLVQLFDQSAQSYQELLQSASASPMDIAVQEGRLTWLVYIIGAVIGGRVSFASTDEQDAMDGELVCRVLQLMNLTDSRLAQAGNEKLELAMLSFFEQFRKIYIGDQVQKSSKLYRRLSEVLGLNDETMVLSVFIGKIITNLKYWGRCEPITSKTLQLLNDLSIGYSSVRKLVKLSAVQFMLNNHTSEHFSFLGINNQSNLTDMRCRTTFYTALGRLLMVDLGEDEDQYEQFMLPLTAAFEAVAQMFSTNSFNEQEAKRTLVGLVRDLRGIAFAFNAKTSFMMLFEWIYPSYMPILQRAIELWYHDPACTTPVLKLMAELVHNRSQRLQFDVSSPNGILLFRETSKMITMYGNRILTLGEVPKDQVYALKLKGISICFSMLKAALSGSYVNFGVFRLYGDDALDNALQTFIKLLLSIPHSDLLDYPKLSQSYYSLLEVLTQDHMNFIASLEPHVIMYILSSISEGLTALDTMVCTGCCSCLDHIVTYLFKQLSRSTKKRTTPLNQESDRFLHIMQQHPEMIQQMLSTVLNIIIFEDCRNQWSMSRPLLGLILLNEKYFSDLRNSIVNSQPPEKQQAMHLCFENLMEGIERNLLTKNRDRFTQNLSAFRREVNDSMKNSTYGVNSNDMMS

SEQ ID NO: 899648 - protein, 401 aa, Homo sapiens
  misc_feature (1)..(1): Xaa can be any naturally occurring amino acid
XPEGVVWVTAAFEAVAQMFSTNSFNEQEAKRTLVGLVRDLRGIAFAFNAKTSFMMLFEWIYPSYMPILQRAIELWYHDPACTTPVLKLMAELVHNRSQRLQFDVSSPNGILLFRETSKMITMYGNRILTLGEVPKDQVYALKLKGISICFSMLKAALSGSYVNFGVFRLYGDDALDNALQTFIKLLLSIPHSDLLDYPKLSQSYYSLLEVLTQDHMNFIASLEPHVIMYILSSISEGLTALDTMVCTGCCSCLDHIVTYLFKQLSRSTKKRTTPLNQESDRFLHIMQQHPEMIQQMLSTVLNIIIFEDCRNQWSMSRPLLGLILLNEKYFSDLRNSIVNSQPPEKQQAMHLCFENLMEGIERNLLTKNRDRFTQNLSAFRREVNDSMKNSTYGVNSNDMMS

SEQ ID NO: 899649 - protein, 1121 aa, Homo sapiens
RRSGDGVGGGGGSGSGRGARWGGGGAGEEHEWSKMADHVQSLAQLENLCKQLYETTDTTTRLQAEKALVEFTNSPDCLSKCQLLLERGSSSYSQLLAATCLTKLVSRTNNPLPLEQRIDIRNYVLNYLATRPKLATFVTQALIQLYARITKLGWFDCQKDDYVFRNAITDVTRFLQDSVEYCIIGVTILSQLTNEINQADTTHPLTKHRKIASSFRDSSLFDIFTLSCNLLKQASGKNLNLNDESQHGLLMQLLKLTHNCLNFDFIGTSTDESSDDLCTVQIPTSWRSAFLDSSTLQLFFDLYHSIPPSFSPLVLSCLVQIASVRRSLFNNAERAKFLSHLVDGVKRILENPQSLSDPNNYHEFCRLLARLKSNYQLGELVKVENYPEVIRLIANFTVTSLQHWEFAPNSVHYLLSLWQRLAASVPYVKATEPHMLETYTPEVTKAYITSRLESVHIILRDGLEDPLEDTGLVQQQLDQLSTIGRCEYEKTCALLVQLFDQSAQSYQELLQSASASPMDIAVQEGRLTWLVYIIGAVIGGRVSFASTDEQDAMDGELVCRVLQLMNLTDSRLAQAGNEKLELAMLSFFEQFRKIYIGDQVQKSSKLYRRLSEVLGLNDETMVLSVFIGKIITNLKYWGRCEPITSKTLQLLNDLSIGYSSVRKLVKLSAVQFMLNNHTSEHFSFLGINNQSNLTDMRCRTTFYTALGRLLMVDLGEDEDQYEQFMLPLTAAFEAVAQMFSTNSFNEQEAKRTLVGLVRDLRGIAFAFNAKTSFMMLFEWIYPSYMPILQRAIELWYHDPACTTPVLKLMAELVHNRSQRLQFDVSSPNGILLFRETSKMITMYGNRILTLGEVPKDQVYALKLKGISICFSMLKAALSGSYVNFGVFRLYGDDALDNALQTFIKLLLSIPHSDLLDYPKLSQSYYSLLEVLTQDHMNFIASLEPHVIMYILSSISEGLTALDTMVCTGCCSCLDHIVTYLFKQLSRSTKKRTTPLNQESDRFLHIMQQHPEMIQQMLSTVLNIIIFEDCRNQWSMSRPLLGLILLNEKYFSDLRNSIVNSQPPEKQQAMHLCFENLMEGIERNLLTKNRDRFTQNLSAFRREVNDSMKNSTYGVNSNDMMS

SEQ ID NO: 899650 - protein, 232 aa, Homo sapiens
DAWVRTRGSIHACRKLLLSIPHSDLLDYPKLSQSYYSLLEVLTQDHMNFIASLEPHVIMYILSSISEGLTALDTMVCTGCCSCLDHIVTYLFKQLSRSTKKRTTPLNQESDRFLHIMQQHPEMIQQMLSTVLNIIIFEDCRNQWSMSRPLLGLILLNEKYFSDLRNSIVNSQPPEKQQAMHLCFENLMEGIERNLLTKNRDRFTQNLSAFRREVNDSMKNSTYGVNSNDMMS

SEQ ID NO: 899651 - protein, 174 aa, Homo sapiens
MYILSSISEGLTALDTMVCTGCCSCLDHIVTYLFKQLSRSTKKRTTPLNQESDRFLHIMQQHPEMIQQMLSTVLNIIIFEDCRNQWSMSRPLLGLILLNEKYFSDLRNSIVNSQPPEKQQAMHLCFENLMEGIERNLLTKNRDRFTQNLSAFRREVNDSMKNSTYGVNSNDMMS

SEQ ID NO: 899652 - protein, 1121 aa, Homo sapiens; identical to SEQ ID NO: 899649

SEQ ID NO: 899653 - protein, 844 aa, Homo sapiens
RRSGDGVGGGGGSGSGRGARWGGGGAGEEHEWSKMADHVQSLAQLENLCKQLYETTDTTTRLQAEKALVEFTNSPDCLSKCQLLLERGSSSYSQLLAATCLTKLVSRTNNPLPLEQRIDIRNYVLNYLATRPKLATFVTQALIQLYARITKLGWFDCQKDDYVFRNAITDVTRFLQDSVEYCIIGVTILSQLTNEINQADTTHPLTKHRKIASSFRDSSLFDIFTLSCNLLKQASGKNLNLNDESQHGLLMQLLKLTHNCLNFDFIGTSTDESSDDLCTVQIPTSWRSAFLDSSTLQLFFDLYHSIPPSFSPLVLSCLVQIASVRRSLFNNAERAKFLSHLVDGVKRILENPQSLSDPNNYHEFCRLLARLKSNYQLGELVKVENYPEVIRLIANFTVTSLQHWEFAPNSVHYLLSLWQRLAASVPYVKATEPHMLETYTPEVTKAYITSRLESVHIILRDGLEDPLEDTGLVQQQLDQLSTIGRCEYEKTCALLVQLFDQSAQSYQELLQSASASPMDIAVQEGRLTWLVYIIGAVIGGRVSFASTDEQDAMDGELVCRVLQLMNLTDSRLAQAGNEKLELAMLSFFEQFRKIYIGDQVQKSSKLYRRLSEVLGLNDETMVLSVFIGKIITNLKYWGRCEPITSKTLQLLNDLSIGYSSVRKLVKLSAVQFMLNNHTSEHFSFLGINNQSNLTDMRCRTTFYTALGRLLMVDLGEDEDQYEQFMLPLTAAFEAVAQMFSTNSFNEQEAKRTLVGLVRDLRGIAFAFNAKTSFMMLFEWIYPSYMPILQRAIELWYHDPACTTPVLKLMAELVHNRSQRLQFDVSSPNGILLFRETSKMITMYG

SEQ ID NO: 899654 - protein, 647 aa, Homo sapiens
RRSGDGVGGGGGSGSGRGARWGGGGAGEEHEWSKMADHVQSLAQLENLCKQLYETTDTTTRLQAEKALVEFTNSPDCLSKCQLLLERGSSSYSQLLAATCLTKLVSRTNNPLPLEQRIDIRNYVLNYLATRPKLATFVTQALIQLYARITKLGWFDCQKDDYVFRNAITDVTRFLQDSVEYCIIGVTILSQLTNEINQADTTHPLTKHRKIASSFRDSSLFDIFTLSCNLLKQASGKNLNLNDESQHGLLMQLLKLTHNCLNFDFIGTSTDESSDDLCTVQIPTSWRSAFLDSSTLQLFFDLYHSIPPSFSPLVLSCLVQIASVRRSLFNNAERAKFLSHLVDGVKRILENPQSLSDPNNYHEFCRLLARLKSNYQLGELVKVENYPEVIRLIANFTVTSLQHWEFAPNSVHYLLSLWQRLAASVPYVKATEPHMLETYTPEVTKAYITSRLESVHIILRDGLEDPLEDTGLVQQQLDQLSTIGRCEYEKTCALLVQLFDQSAQSYQELLQSASASPMDIAVQEGRLTWLVYIIGAVIGGRVSFASTDEQDAMDGELVCRVLQLMNLTDSRLAQAGNEKLELAMLSFFEQFRKIYIGDQVQKSSKLYRRLSEVLGLNDETMVLSVFIGKINQPWSAPEFQGPGYGPV

SEQ ID NO: 899655 - protein, 1121 aa, Homo sapiens; identical to SEQ ID NO: 899649

SEQ ID NO: 899656 - protein, 488 aa, Homo sapiens
MLKSALFYIYTSKTLQLLTDLSTGYSSVRKLVKLSAVQFMLNNHTSEHFSFLGINNQSNLTDMRCRTTFYTALGRLLMVDLGEDEDQYEQFMLPLTAAFEAVAQMFSTNSFNEQEAKRTLVGLVRDLRGIAFAFNAKTSFMMLFEWIYPSYMPILQRAIELWYHDPACTTPVLKLMAELVHNRSQRLQFDVSSPNGILLFRETSKMITMYGNRILTLGEVPKDQVYALKLKGISICFSMLKAALSGSYVNFGVFRLYGDDALDNALQTFIKLLLSIPHSDLLDYPKLSQSYYSLLEVLTQDHMNFIASLEPHVIMYILSSISEGLTALDTMVCTGCCSCLDHIVTYLFKQLSRSTKKRTTPLNQESDRFLHIMQQHPEMIQQMLSTVLNIIIFEDCRNQWSMSRPLLGLILLNEKYFSDLRNSIVNSQPPEKQQAMHLCFENLMEGIERNLLTKNRDRFTQNLSAFRREVNDSMKNSTYGVNSNDMMS

SEQ ID NO: 899657 - protein, 1121 aa, Homo sapiens; identical to SEQ ID NO: 899649

SEQ ID NO: 899658 - protein, 1121 aa, Homo sapiens; identical to SEQ ID NO: 899649

SEQ ID NO: 899659 - protein, 106 aa, Homo sapiens
MLSTVLNIIIFEDCRNQWSMSRPLLGLILLNEKYFSDLRNSIVNSQPPEKQQAMHLCFENLMEGIERNLLTKNRDRFTQNLSAFRREVNDSMKNSTYGVNSNDMMS

SEQ ID NO: 899660 - protein, 699 aa, Homo sapiens
RRSGDGVGGGGGSGSGRGARWGGGGAGEEHEWSKMADHVQSLAQLENLCKQLYETTDTTTRLQAEKALVEFTNSPDCLSKCQLLLERGSSSYSQLLAATCLTKLVSRTNNPLPLEQRIDIRNYVLNYLATRPKLATFVTQALIQLYARITKLGWFDCQKDDYVFRNAITDVTRFLQDSVEYCIIGVTILSQLTNEINQADTTHPLTKHRKIASSFRDSSLFDIFTLSCNLLKQASGKNLNLNDESQHGLLMQLLKLTHNCLNFDFIGTSTDESSDDLCTVQIPTSWRSAFLDSSTLQLFFDLYHSIPPSFSPLVLSCLVQIASVRRSLFNNAERAKFLSHLVDGVKRILENPQSLSDPNNYHEFCRLLARLKSNYQLGELVKVENYPEVIRLIANFTVTSLQHWEFAPNSVHYLLSLWQRLAASVPYVKATEPHMLETYTPEVTKAYITSRLESVHIILRDGLEDPLEDTGLVQQQLDQLSTIGRCEYEKTCALLVQLFDQSAQSYQELLQSASASPMDIAVQEGRLTWLVYIIGAVIGGRVSFASTDEQDAMDGELVCRVLQLMNLTDSRLAQAGNEKLELAMLSFFEQFRKIYIGDQVQKSSKLYRRLSEVLGLNDETMVLSVFIGKIITNLKYWGRCEPITSKTLQLLNDLSIGYSSVRKLVKLSAVQFMLNNHTVSDFSFFSWPSYHPHIHFLDT

SEQ ID NO: 899661 - protein, 245 aa, Homo sapiens
RRSGDGVGGGGGSGSGRGARWGGGGAGEEHEWSKMADHVQSLAQLENLCKQLYETTDTTTRLQAEKALVEFTNSPDCLSKCQLLLERGSSSYSQLLAATCLTKLVSRTNNPLPLEQRIDIRNYVLNYLATRPKLATFVTQALIQLYARITKLGWFDCQKDDYVFRNAITDVTRFLQDSVEYCIIGVTILSQLTNEINQVSATAFLIEADTTHPLTKHRKIASSFRDSSLFDIFTLSCNLLKQVSM

SEQ ID NO: 899662 - protein, 126 aa, Homo sapiens
MPEPAKSAPAPKKGSKKAVTKAQKKDGKKRKRSRKESYSIYVYKVLKQVHPDTGISSKAMGIMNSFVNDIFERIAGEASRLAHYNKRSTITSREIQTAVRLLLPGELAKHAVSEGTKAVTKYTSSK

SEQ ID NO: 899663 - protein, 255 aa, Homo sapiens
  misc_feature (241)..(241): Xaa can be any naturally occurring amino acid
MPEPAKSAPAPKKGSKKAVTKAQKKDGKKRKRSRKESCLQEDSQRPGAHLTVKKIFVGGIKEDTEEHHLRDYFEQYGKIEVIEIMIDRGSGKKRGFAFVTFDDHDSVDKIVIQKYHTVNGHNCEVRKALSKQEMASASSSQRGRSGSGNFGGGRGGGFGGNDNFGRGGNFSGRGGFGGSRGGGGYGGSGDGYNGFGNDGSNFGGGGSYNDFGNYNHQSSNFGPMKGGNFGGRSSGPYGGGXQSLQNHETKWLLRF

SEQ ID NO: 899664 - protein, 126 aa, Homo sapiens; identical to SEQ ID NO: 899662

SEQ ID NO: 899665 - protein, 73 aa, Homo sapiens
  misc_feature (43)..(43): Xaa can be any naturally occurring amino acid
RKGKRDMYSRTGYSYGRLAYFSVLRYTVRHSVTSYTRKGSSPXVSPCRDLALARSSRRLLDSKGSFQSHPPNH

SEQ ID NO: 899666 - protein, 126 aa, Homo sapiens; identical to SEQ ID NO: 899662

SEQ ID NO: 899667 - protein, 126 aa, Homo sapiens; identical to SEQ ID NO: 899662

SEQ ID NO: 899668 - protein, 126 aa, Homo sapiens
MSEQGDLNQAIAEEGGTEQETATPENGIVKSESLDEEEKLELQRRLEAQNQERRKSKSGAGKGKLTRSLAVCEESSARPGGESLQDQRMRACKPLFGLAEEWWEQGVDRKHPDTHISKWPCYLFRE

SEQ ID NO: 899669 - protein, 132 aa, Homo sapiens
MSEQGDLNQAIAEEGGTEQETATPENGIVKSESLDEEEKLELQRRLEAQNQERRKSKSGAGKGKLTRSLAVCEESSARPGGESLQDQESIHLQLSSFSSLQEEDKSRKDDSEREKEKDKNKDKTSEKPKIRM

SEQ ID NO: 899670 - protein, 132 aa, Homo sapiens; identical to SEQ ID NO: 899669

SEQ ID NO: 899671 - protein, 75 aa, Homo sapiens
SAKLSSRGGPAGRTPGLGPPVVVKRRRAGRREQEPAAGQPKMVAATPPVIHVDLTAPVAFLRILAEKEVFWNGIC

SEQ ID NO: 899672 - protein, 224 aa, Homo sapiens
MLGSGFKAERLRVNLRLVINRLKLLEKKKTELAQKARKEIADYLAAGKDERARIRVEHIIREDYLVEAMEILELYCDLLLARFGLIQSMKELDSGLAESVSTLIWAAPRLQSEVAELKIVADQLCAKYSKEYGKLCRTNQIGTVNDRLMHKLSVEAPPKILVERYLIEIAKNYNVPYEPDSVVMAEAPPGVETDLIDVGFTDDVNERRPWKRREWWLHSTSWWT

SEQ ID NO: 899673 - protein, 224 aa, Homo sapiens; identical to SEQ ID NO: 899672

SEQ ID NO: 899674 - protein, 224 aa, Homo sapiens; identical to SEQ ID NO: 899672

SEQ ID NO: 899675 - protein, 224 aa, Homo sapiens; identical to SEQ ID NO: 899672

SEQ ID NO: 899676 - protein, 224 aa, Homo sapiens; identical to SEQ ID NO: 899672

SEQ ID NO: 899677 - protein, 224 aa, Homo sapiens; identical to SEQ ID NO: 899672

SEQ ID NO: 899678 - protein, 224 aa, Homo sapiens; identical to SEQ ID NO: 899672

SEQ ID NO: 899679 - protein, 237 aa, Homo sapiens
MVFKLKTKEEQHSMLGSGFKAERLRVNLRLVINRLKLLEKKKTELAQKARKEIADYLAAGKDERARIRVEHIIREDYLVEAMEILELYCDLLLARFGLIQSMKELDSGLAESVSTLIWAAPRLQSEVAELKIVADQLCAKYSKEYGKLCRTNQIGTVNDRLMHKLSVEAPPKILVERYLIEIAKNYNVPYEPDSVVMAEAPPGVETDLIDVGFTDDVNERRPWKRREWWLHSTSWWT

SEQ ID NO: 899680 - protein, 224 aa, Homo sapiens; identical to SEQ ID NO: 899672

SEQ ID NO: 899681 - protein, 148 aa, Homo sapiens
MLGSGFKAERLRVNLRLVINRLKLLEKKKTELAQKARKEIADYLAAGKDERARIRVEHIIREDYLVEAMEILELYCDLLLARFGLIQSMKELDSGLAESVSTLIWAAPRLQSEVAELKIVADQLCAKYSKEYGKLCRTNQIGTVNDRS

SEQ ID NO: 899682 - protein, 147 aa, Homo sapiens
MEESGTKALGAVRPWAQSPRINSCGWPPRAQSEIKGMPPAADSVGVALPPTSAVPPPREVVPGRADSKGNRGRVPRVSAWVPAAAIAQPIPGKEGVAISAPWIPPPALVVLRPRESPFWMVNPEVGVCCVHGRIRLGGTAQHAGLWI

SEQ ID NO: 899683 - protein, 197 aa, Homo sapiens
MLGSGFKAERLRVNLRLVINRLKLLEKKKTELAQKARKEIADYLAAGKDERARIRVEHIIREDYLVEAMEILELYCDLLLARFGLIQSMKELDSGLAESVSTLIWAAPRLQSEVAELKIVADQLCAKYSKEYGKLCRTNQIGTVNDRLMHKLSVEAPPKILVERYLIEIAKNYNAMNVFGEHSMHLHSLSYLQDSTY

SEQ ID NO: 899684 - protein, 136 aa, Homo sapiens
MKELDSGLAESVSTLIWAAPRLQSEVAELKIVADQLCAKYSKEYGKLCRTNQIGTVNDRLMHKLSVEAPPKILVERYLIEIAKNYNVPYEPDSVVMAEAPPGVETDLIDVGFTDDVNERRPWKRREWWLHSTSWWT

SEQ ID NO: 899685 - protein, 70 aa, Homo sapiens
MQVLYCCEIGVGFVSSAELAQKARKEIADYLAAGKDERARIRVEHIIREDYLVEAMEILELYCDLLLARF

SEQ ID NO: 899686 - protein, 224 aa, Homo sapiens; identical to SEQ ID NO: 899672

SEQ ID NO: 899687 - protein, 224 aa, Homo sapiens; identical to SEQ ID NO: 899672

SEQ ID NO: 899688 - protein, 224 aa, Homo sapiens; identical to SEQ ID NO: 899672

SEQ ID NO: 899689 - protein, 224 aa, Homo sapiens; identical to SEQ ID NO: 899672

SEQ ID NO: 899690 - protein, 224 aa, Homo sapiens; identical to SEQ ID NO: 899672

SEQ ID NO: 899691 - protein, 243 aa, Homo sapiens
RVLIRRGVTEDSVQEEQHSMLGSGFKAERLRVNLRLVINRLKLLEKKKTELAQKARKEIADYLAAGKDERARIRVEHIIREDYLVEAMEILELYCDLLLARFGLIQSMKELDSGLAESVSTLIWAAPRLQSEVAELKIVADQLCAKYSKEYGKLCRTNQIGTVNDRLMHKLSVEAPPKILVERYLIEIAKNYNVPYEPDSVVMAEAPPGVETDLIDVGFTDDVNERRPWKRREWWLHSTSWWT

SEQ ID NO: 899692 - protein, 186 aa, Homo sapiens
MLGSGFKAERLRVNLRLVINRLKLLEKKKTELAQKARKEIADYLAAGKDERARIRVEHIIREDYLVEAMEILELYCDLLLARFGLIQSMKELDSGLAESVSTLIWAAPRLQSEVAELKIVADQLCAKYSKEYGKLCRTNQIGTVNDRLMHKLSVEAPPKILVERYLIEIAKNYNVPYEPDSVVMMM

SEQ ID NO: 899693 - protein, 224 aa, Homo sapiens; identical to SEQ ID NO: 899672

SEQ ID NO: 899694 - protein, 185 aa, Homo sapiens
MLGSGFKAERLRVNLRLVINRLKLLEKKKTELAQKARKEIADYLAAGKDERARIRVEHIIREDYLVEAMEILELYCDLLLARFGLIQSMKELDSGLAESVSTLIWAAPRLQSEVAELKIVADQLCAKYSKEYGKLCRTNQIGTVNDRLKASLSCTGFSGSPLWPFALRAVSLVPEGGTVEILFSL

SEQ ID NO: 899695 - protein, 147 aa, Homo sapiens; identical to SEQ ID NO: 899682

SEQ ID NO: 899696 - protein, 498 aa, Homo sapiens
MPLVTRNIEPRHLCRQTLPSVRSELECVTNITLANVIRQLGSLSKYAEDIFGELFTQANTFASRVSSLAERVDRLQVKVTQLDPKEEEVSLQGINTRKAFRSSTIQDQKLFDRNSLPVPVLETYNTCDTPPPLNNLTPYRDDGKEALKFYTDPSYFFDLWKEKMLQDTKDIMKEKRKHRKEKKDNPNRGNVNPRKIKTRKEEWEKMKMGQEFVESKEKLGTSGYPPTLVYQNGSIGCVENVDASSYPPPPQSDSASSPSPSFSEDNLPPPPAEFSYPVDNQRGSGLAGPKRSSVVSPSHPPPAPPLGSPPGPKPGFAPPPAPPPPPPPMIGIPPPPPPVGFGSPGTPPPPSPPSFPPHPDFAAPPPPPPPPAADYPTLPPPPLSQPTGGAPPPPPPPPPPGPPPPPFTGADGQPAIPPPLSDTTKPKSSLPAVSDARSDLLSAIRQGFQLRRVEEQREQEKRDVVGNDVATILSRRIAVEYSDSEDDSSEFDEDDWSD

SEQ ID NO: 899697 - protein, 498 aa, Homo sapiens; identical to SEQ ID NO: 899696

SEQ ID NO: 899698 - protein, 335 aa, Homo sapiens
MLQDTKDIMKEKRKHRKEKKDNPNRGNVNPRKIKTRKEEWEKMKMGQEFVESKEKLGTSGYPPTLVYQNGSIGCVENVDASSYPPPPQSDSASSPSPSFSEDNLPPPPAEFSYPVDNQRGSGLAGPKRSSVVSPSHPPPAPPLGSPPGPKPGFAPPPAPPPPPPPMIGIPPPPPPVGFGSPGTPPPPSPPSFPPHPDFAAPPPPPPPPAADYPTLPPPPLSQPTGGAPPPPPPPPPPGPPPPPFTGADGQPAIPPPLSDTTKPKSSLPAVSDARSDLLSAIRQGFQLRRVEEQREQEKRDVVGNDVATILSRRIAVEYSDSEDDSSEFDEDDWSD

SEQ ID NO: 899699 - protein, 101 aa, Homo sapiens
EFLKTEDRLFSGADGQPAIPPPLSDTTKPKSSLPAVSDARSDLLSAIRQGFQLRRVEEQREQEKRDVVGNDVATILSRRIAVEYSDSEDDSSEFDEDDWSD

SEQ ID NO: 899700 - protein, 102 aa, Homo sapiens
MLLLLFHNNLLFLYPFQYHLPIGGHSLLPSSRWIPRLRTRLPHPSVSLPLGFQLRRVEEQREQEKRDVVGNDVATILSRRIAVEYSDSEDDSSEFDEDDWSD

SEQ ID NO: 899701 - protein, 109 aa, Homo sapiens
MEQWPIRTPKRRSQGASSLPGSPRPRDLPPFLWPWGPASNSVRSNLWLCLGCEMGTFQRSSLGEGAGSASPWRLRAAGPGSSSPPVEARAPSETTLANVNAEPRRCCHG

SEQ ID NO: 899702 - protein, 498 aa, Homo sapiens; identical to SEQ ID NO: 899696

SEQ ID NO: 899703 - protein, 109 aa, Homo sapiens; identical to SEQ ID NO: 899701

SEQ ID NO: 899704 - protein, 109 aa, Homo sapiens; identical to SEQ ID NO: 899701

SEQ ID NO: 899705 - protein, 498 aa, Homo sapiens; identical to SEQ ID NO: 899696

SEQ ID NO: 899706 - protein, 498 aa, Homo sapiens; identical to SEQ ID NO: 899696

SEQ ID NO: 899707 - protein, 498 aa, Homo sapiens; identical to SEQ ID NO: 899696

SEQ ID NO: 899708 - protein, 157 aa, Homo sapiens
YLESRSVTQDGVQWLGLGSLQPPPPEVKQFSCLNLPSSWDYRCLPARLSNFCIFSRDGVSPCCPGWKCVEILSFLPGLIFCITPFSFIQPVLSLMTVHVCQEDSISYRTYAGFLNYEEYFSVSKSSHLHIAQTVLGYVCVYVCVWGLGNTIFSSQFL

SEQ ID NO: 899709 - protein, 630 aa, Homo sapiens
YLESRSVTQDGVQWLGLGSLQPPPPEVKQFSCLNLPSSWDYRCLPARLSNFCIFSRDGVSPCCPGWKCVEILSFLPGLIFCITPFSFIQPVLSLMTVHVCQEDSISYRTYAGFLNYEEYFSVSKSSHLHIAQTVLGYVCVYVCVWGLGNTIFSSQFLGPFTLLLCTSDLVSLLFPGKYAEDIFGELFTQANTFASRVSSLAERVDRLQVKVTQLDPKEEEVSLQGINTRKAFRSSTIQDQKLFDRNSLPVPVLETYNTCDTPPPLNNLTPYRDDGKEALKFYTDPSYFFDLWKEKMLQDTKDIMKEKRKHRKEKKDNPNRGNVNPRKIKTRKEEWEKMKMGQEFVESKEKLGTSGYPPTLVYQNGSIGCVENVDASSYPPPPQSDSASSPSPSFSEDNLPPPPAEFSYPVDNQRGSGLAGPKRSSVVSPSHPPPAPPLGSPPGPKPGFAPPPAPPPPPPPMIGIPPPPPPVGFGSPGTPPPPSPPSFPPHPDFAAPPPPPPPPAADYPTLPPPPLSQPTGGAPPPPPPPPPPGPPPPPFTGADGQPAIPPPLSDTTKPKSSLPAVSDARSDLLSAIRQGFQLRRVEEQREQEKRDVVGNDVATILSRRIAVEYSDSEDDSSEFDEDDWSD

SEQ ID NO: 899710 - protein, 291 aa, Homo sapiens
MGQEFVESKEKLGTSGYPPTLVYQNGSIGCVENVDASSYPPPPQSDSASSPSPSFSEDNLPPPPAEFSYPVDNQRGSGLAGPKRSSVVSPSHPPPAPPLGSPPGPKPGFAPPPAPPPPPPPMIGIPPPPPPVGFGSPGTPPPPSPPSFPPHPDFAAPPPPPPPPAADYPTLPPPPLSQPTGGAPPPPPPPPPPGPPPPPFTGADGQPAIPPPLSDTTKPKSSLPAVSDARSDLLSAIRQGFQLRRVEEQREQEKRDVVGNDVATILSRRIAVEYSDSEDDSSEFDEDDWSD

SEQ ID NO: 899711 - protein, 498 aa, Homo sapiens; identical to SEQ ID NO: 899696

SEQ ID NO: 899712 - protein, 498 aa, Homo sapiens; identical to SEQ ID NO: 899696

SEQ ID NO: 899713 - protein, 498 aa, Homo sapiens; identical to SEQ ID NO: 899696

SEQ ID NO: 899714 - protein, 109 aa, Homo sapiens; identical to SEQ ID NO: 899701

SEQ ID NO: 899715 - protein, 109 aa, Homo sapiens; identical to SEQ ID NO: 899701

SEQ ID NO: 899716 - protein, 498 aa, Homo sapiens; identical to SEQ ID NO: 899696

SEQ ID NO: 899717 - protein, 114 aa, Homo sapiens
MKVAVSPAVGPGPWGSGVGGGGTVRLLLILSGCLVYGTAETDVNVVMLQESQVCEKRASQQFCYTNVLIPKWHDIWTRIQIRVNSSRLVRVTQVENEEKLKELEHCKCRTPKLR

SEQ ID NO: 899718 - protein, 394 aa, Homo sapiens
MLQESQVCEKRASQQFCYTNVLIPKWHDIWTRIQIRVNSSRLVRVTQVENEEKLKELEQFSIWNFFSSFLKEKLNDTYVNVGLYSTKTCLKVEIIEKDTKYSVIVIRRFDPKLFLVFLLGLMLFFCGDLLSRSQIFYYSTGMTVGIVASLLIIIFILSKFMPKKSPIYVILVGGWSFSLYLIQLVFKNLQEIWRCYWQYLLSYVLTVGFMSFAVCYKYGPLENERSINLLTWTLQLMGLCFMYSGIQIPHIALAIIIIALCTKNLEHPIQWLYITCRKVCKGAEKPVPPRLLTEEEYRIQGEVETRKALEELREFCNSPDCSAWKTVSRIQSPKRFADFVEGSSHLTPNEVSVHEQEYGLGSIIAQDEIYEEASSEEEDSYSRCPAITQNNFLT

SEQ ID NO: 899719 - protein, 253 aa, Homo sapiens
MTVGIVASLLIIIFILSKFMPKKSPIYVILVGGWSFSLYLIQLVFKNLQEIWRCYWQYLLSYVLTVGFMSFAVCYKYGPLENERSINLLTWTLQLMGLCFMYSGIQIPHIALAIIIIALCTKNLEHPIQWLYITCRKVCKGAEKPVPPRLLTEEEYRIQGEVETRKALEELREFCNSPDCSAWKTVSRIQSPKRFADFVEGSSHLTPNEVSVHEQEYGLGSIIAQDEIYEEASSEEEDSYSRCPAITQNNFLT

SEQ ID NO: 899720 - protein, 394 aa, Homo sapiens; identical to SEQ ID NO: 899718

SEQ ID NO: 899721 - protein, 440 aa, Homo sapiens [sequence omitted]

SEQ ID NO: 899722 - protein, 367 aa, Homo sapiens
MKVAVSPAVGPGPWGSGVGGGGTVRLLLILSGCLVYGTAETDVNVVMLQESQVCEKRASQQFCYTNVLIPKWHDIWTRIQIRVNSSRLVRVTQVENEEKLKELEQSQIFYYSTGMTVGIVASLLIIIFILSKFMPKKSPIYVILVGGWSFSLYLIQLVFKNLQEIWRCYWQYLLSYVLTVGFMSFAVCYKYGPLENERSINLLTWTLQLMGLCFMYSGIQIPHIALAIIIIALCTKNLEHPIQWLYITCRKVCKGAEKPVPPRLLTEEEYRIQGEVETRKALEELREFCNSPDCSAWKTVSRIQSPKRFADFVEGSSHLTPNEVSVHEQEYGLGSIIAQDEIYEEASSEEEDSYSRCPAITQNNFLT

SEQ ID NO: 899723 - protein, 394 aa, Homo sapiens; identical to SEQ ID NO: 899718

SEQ ID NO: 899724 - protein, 198 aa, Homo sapiens
MARRSVLYFILLNALINKGQACFCDHYAWTQWTSCSKTCNSGTQSRHRQIVVDKYYQENFCEQICSKQETRECNWQRCPINCLLGDFGPWSDCDPCIEKQSKVRSVLRPSQFGGQPCTEPLVAFQPCIPSKLCKIEEADCKNKFRCDSGRCIARKLECTGVCTQKYNPIPSVQLMGWGSSFCTRAQREALVLSTEDMS

SEQ ID NO: 899725 - protein, 68 aa, Homo sapiens
MARRSVLYFILLNALINKGQACFCDHYAWTQWTSCSKTCNSGTQSRHRQIVVDKYYQGCPILPPGRFW

SEQ ID NO: 899726 - protein, 916 aa, Homo sapiens
MARRSVLYFILLNALINKGQACFCDHYAWTQWTSCSKTCNSGTQSRHRQIVVDKYYQENFCEQICSKQETRECNWQRCPINCLLGDFGPWSDCDPCIEKQSKVRSVLRPSQFGGQPCTEPLVAFQPCIPSKLCKIEEADCKNKFRCDSGRCIARKLECNGENDCGDNSDERDCGRTKAVCTRKYNPIPSVQLMGNGFHFLAGEPRGEVLDNSFTGGICKTVKSSRTSNPYRVPANLENVGFEVQTAEDDLKTDFYKDLTSLGHNENQQGSFSSQGGSSFSVPIFYSSKRSENINHNSAFKQAIQASHKKDSSFIRIHKVMKVLNFTTKAKDLHLSDVFLKALNHLPLEYNSALYSRIFDDFGTHYFTSGSLGGVYDLLYQFSSEELKNSGLTEEEAKHCVRIETKKRVLFAKKTKVEHRCTTNKLSEKHEGSFIQGAEKSISLIRGGRSEYGAALAWEKGSSGLEEKTFSEWLESVKENPAVIDFELAPIVDLVRNIPCAVTKRNNLRKALQEYAAKFDPCQCAPCPNNGRPTLSGTECLCVCQSGTYGENCEKQSPDYKSNAVDGQWGCWSSWSTCDATYKRSRTRECNNPAPQRGGKRCEGEKRQEEDCTFSIMENNGQPCINDDEEMKEVDLPEIEADSGCPQPVPPENGFIRNEKQLYLVGEDVEISCLTGFETVGYQYFRCLPDGTWRQGDVECQRTECIKPVVQEVLTITPFQRLYRIGESIELTCPKGFVVAGPSRYTCQGNSWTPPISNSLTCEKDTLTQLSSEEDCSHHSEDLCVFDTDSNDYFTSPACKFLAEKCLNNQQLHFLHIGSCQDGRQLEWGLERTRLSSNSTKKESCGYDTCYDWEKCSASTSKCVCLLPPQCFKGGNQLYCVKMGSSTSEKTLNICEVGTIRCANRKMEILHPGKCLA

SEQ ID NO: 899727 - protein, 803 aa, Homo sapiens
MARRSVLYFILLNALINKGQACFCDHYAWTQWTSCSKTCNSGTQSRHRQIVVDKYYQENFCEQICSKQETRECNWQRCPINCLLGDFGPWSDCDPCIEKQSKVRSVLRPSQFGGQPCTEPLVAFQPCIPSKLCKIEEADCKNKFRCDSGRCIARKLECNGENDCGDNSDERDCGRTKAVCTRKYNPIPSVQLMGNGFHFLAGEPRGEVLDNSFTGGICKTVKSSRTSNPYRVPANLENVGFEVQTAEDDLKTDFYKDLTSLGHNENQQGSFSSQGGSSFSVPIFYSSKRSENINHNSAFKQAIQASHKKDSSFIRIHKVMKVLNFTTKAKDLHLSDVFLKALNHLPLEYNSALYSRIFDDFGTHYFTSGSLGGVYDLLYQFSSEELKNSGLTEEEAKHCVRIETKKRVLFAKKTKVEHRCTTNKLSEKHEGSFIQGAEKSISLIRGGRSEYGAALAWEKGSSGLEEKTFSEWLESVKENPAVIDFELAPIVDLVRNIPCAVTKRNNLRKALQEYAAKFDPCQCAPCPNNGRPTLSGTECLCVCQSGTYGENCEKQSPDYKSNAVDGQWGCWSSWSTCDATYKRSRTRECNNPAPQRGGKRCEGEKRQEEDCTFSIMENNGQPCINDDEEMKEVDLPEIEADSGCPQPVPPENGFIRNEKQLYLVGEDVEISCLTGFETVGYQYFRCLPDGTWRQGDVECQRTECIKPVVQEVLTITPFQRLYRIGESIELTCPKGFVVAGPSRYTCQGNSWTPPISNSLTCEKVYCVKMGSSTSEKTLNICEVGTIRCANRKMEILHPGKCLA

SEQ ID NO: 899728 - protein, 835 aa, Homo sapiens
MARRSVLYFILLNALINKGQACFCDHYAWTQWTSCSKTCNSGTQSRHRQIVVDKYYQENFCEQICSKQETRECNWQRCPINCLLGDFGPWSDCDPCIEKQSKVRSVLRPSQFGGQPCTEPLVAFQPCIPSKLCKIEEADCKNKFRCDSGRCIARKLECNGENDCGDNSDERDCGRTKAVCTRKYNPIPSVQLMGNGFHFLAGEPRGEVLDNSFTGGICKTVKSSRTSNPYRVPANLENVGFEVQTAEDDLKTDFYKDLTSLGHNENQQGSFSSQGGSSFSVPIFYSSKRSENINHNSAFKQAIQASHKKDSSFIRIHKVMKVLNFTTKAKDLHLSDVFLKALNHLPLEYNSALYSRIFDDFGTHYFTSGSLGGVYDLLYQFSSEELKNSGLTEEEAKHCVRIETKKRVLFAKKTKVEHRCTTNKLSEKHEGSFIQGAEKSISLIRGGRSEYGAALAWEKGSSGLEEKTFSEWLESVKENPAVIDFELAPIVDLVRNIPCAVTKRNNLRKALQEYAAKFDPCQCAPCPNNGRPTLSGTECLCVCQSGTYGENCEKQSPDYKSNAVDGQWGCWSSWSTCDATYKRSRTRECNNPAPQRGGKRCEGEKRQEEDCTFSIMENNGQPCINDDEEMKEVDLPEIEADSGCPQPVPPENGFIRNEKQLYLVGEDVEISCLTGFETVGYQYFRCLPDGTWRQGDVECQRTECIKPVVQEVLTITPFQRLYRIGESIELTCPKGFVVAGPSRYTCQGNSWTPPISNSLTCEKDLDTSLSPSEDPLALSTLQTVEYLLLLCWEVWAAESQHCFNLRLIGRADSLHKIIDNFKPVVIEQGCVPLES

SEQ ID NO: 899729 - protein, 934 aa, Homo sapiens
MARRSVLYFILLNALINKGQACFCDHYAWTQWTSCSKTCNSGTQSRHRQIVVDKYYQENFCEQICSKQETRECNWQRCPINCLLGDFGPWSDCDPCIEKQSKVRSVLRPSQFGGQPCTEPLVAFQPCIPSKLCKIEEADCKNKFRCDSGRCIARKLECNGENDCGDNSDERDCGRTKAVCTRKYNPIPSVQLMGNGFHFLAGEPRGEVLDNSFTGGICKTVKSSRTSNPYRVPANLENVGFEVQTAEDDLKTDFYKDLTSLGHNENQQGSFSSQGGSSFSVPIFYSSKRSENINHNSAFKQAIQASHKKDSSFIRIHKVMKVLNFTTKAKDLHLSDVFLKALNHLPLEYNSALYSRIFDDFGTHYFTSGSLGGVYDLLYQFSSEELKNSGLTEEEAKHCVRIETKKRVLFAKKTKVEHRCTTNKLSEKHEGSFIQGAEKSISLIRGGRSEYGAALAWEKGSSGLEEKTFSEWLESVKENPAVIDFELAPIVDLVRNIPCAVTKRNNLRKALQEYAAKFDPCQCAPCPNNGRPTLSGTECLCVCQSGTYGENCEKQSPDYKSNAVDGQWGCWSSWSTCDATYKRSRTRECNNPAPQRGGKRCEGEKRQEEDCTFSIMENNGQPCINDDEEMKEVDLPEIEADSGCPQPVPPENGFIRNEKQLYLVGEDVEISCLTGFETVGYQYFRCLPDGTWRQGDVECQRTECIKPVVQEVLTITPFQRLYRIGESIELTCPKGFVVAGPSRYTCQGNSWTPPISNSLTCEKDTLTKLKGHCQLGQKQSGSECICMSPEEDCSHHSEDLCVFDTDSNDYFTSPACKFLAEKCLNNQQLHFLHIGSCQDGRQLEWGLERTRLSSNSTKKESCGYDTCYDWEKCSASTSKCVCLLPPQCFKGGNQLYCVKMGSSTSEKTLNICEVGTIRCANRKMEILHPGKCLA

SEQ ID NO: 899730 - protein, 102 aa, Homo sapiens
MARRSVLYFILLNALINKGQACFCDHYAWTQWTSCSKTCNSGTQSRHRQIVVDKYYQENFCEQICSKQETRECNWQRCPINCLLGDFGPWSDCDPCIEKQMH

SEQ ID NO: 899731 - protein, 312 aa, Homo sapiens
MARRSVLYFILLNALINKGQACFCDHYAWTQWTSCSKTCNSGTQSRHRQIVVDKYYQENFCEQICSKQETRECNWQRCPINCLLGDFGPWSDCDPCIEKQSKVRSVLRPSQFGGQPCTEPLVAFQPCIPSKLCKIEEADCKNKFRCDSGRCIARKLECNGENDCGDNSDERDCGRTKAVCTRKYNPIPSVQLMGNGFHFLAGEPRGEVLDNSFTGGICKTVKSSRTSNPYRVPANLENVGFEVQTAEDDLKTDFYKDLTSLGHNENQQGSFSSQGGSSFSVPIFYSSKRSENINHNSAFKQAIQASHKKNES

SEQ ID NO: 899732 - protein, 934 aa, Homo sapiens; identical to SEQ ID NO: 899729

SEQ ID NO: 899733 - protein, 243 aa, Homo sapiens
MARRSVLYFILLNALINKGQACFCDHYAWTQWTSCSKTCNSGTQSRHRQIVVDKYYQENFCEQICSKQETRECNWQRCPINCLLGDFGPWSDCDPCIEKQSKVRSVLRPSQFGGQPCTEPLVAFQPCIPSKLCKIEEADCKNKFRCDSGRCIARKLECNGENDCGDNSDERDCGRTKAVCTRKYNPIPSVQLMGNGFHFLAGEPRGEVLDNSFTGGICKTVKSSRTSNPYRVPANLENVGFEV

SEQ ID NO: 899734 - protein, 106 aa, Homo sapiens
MISSVFFPLQVGQAEQMAHIITMAHTCTAKPMHKAKRHRSATLSHSIAVQTNVKPHSRTRLGSSSNNNIGKTLTTDTPAFPLDMSGRIRQATGVPPRHQPASTQHR

SEQ ID NO: 899735 - protein, 703 aa, Homo sapiens
MAPLCSLARWNYFFLYDGSKVKEEGDPTRAGICYFYPSQTLLDQQELLCGQIAGVVRCVSDISDSPPTLVRLRKLKFAIKVDGDYLWVLGCAVELPDVSCKRFLDQLVGFFNFYNGPVSLAYENCSQEELSTEWDTFIEQILKNTSDLHKIFNSLWNLDQTKVEPLLLLKAARILQTCQRSPHILAGCILYKGLIVSTQLPPSLTAKVLLHRTAPQEQRLPTGEDAPQEHGAALPPNVQIIPVFVTKEEAISLHEFPVEQMTRSLASPAGLQDGSAQHHPKGGSTSALKENATGHVESMAWTTPDPTSPDEACPDGRKENGCLSGHDLESIRPAGLHNSARGEVLGLSSSLGKELVFLQEELDLSEIHIPEAQEVEMASGHFAFLHVPVPDGRAPYCKASLSASSSLEPTPPEDTAISSLRPPSAPEMLTQHGAQEQLEDHPGHSSQAPIPRADPLPRRTRRPLLLPRLDPGQRGNKLPTGEQGLDEDVDGVCESHAAPGLECSSGSANCQGAGPSADGISSRLTPAESCMGLVRMNLYTHCVKGLMLSLLAEEPLLGDSAAIEEVYHSSLASLNGLEVHLKETLPRDEAASTSSTYNFTYYDRIQSLLMANLPQVATPHDRRFLQAVSLMHSEFAQLPALYEMTVRNASTAVYACCNPIQETYFQQLAPAARSSGFPNPQDGAFSLSGKAKQKLLKHGVNLL

SEQ ID NO: 899736 - protein, 708 aa, Homo sapiens [sequence omitted]

SEQ ID NO: 899737 - protein, 443 aa, Homo sapiens
MTRSLASPAGLQDGSAQHHPKGGSTSALKENATGHVESMAWTTPDPTSPDEACPDGRKENGCLSGHDLESIRPAGLHNSARGEVLGLSSSLGKELVFLQEELDLSEIHIPEAQEVEMASGHFAFLHVPVPDGRAPYCKASLSASSSLEPTPPEDTAISSLRPPSAPEMLTQHGAQEQLEDHPGHSSQAPIPRADPLPRRTRRPLLLPRLDPGQRGNKLPTGEQGLDEDVDGVCESHAAPGLECSSGSANCQGAGPSADGISSRLTPAESCMGLVRMNLYTHCVKGLMLSLLAEEPLLGDSAAIEEVYHSSLASLNGLEVHLKETLPRDEAASTSSTYNFTYYDRIQSLLMANLPQVATPHDRRFLQAVSLMHSEFAQLPALYEMTVRNASTAVYACCNPIQETYFQQLAPAARSSGFPNPQDGAFSLSGKAKQKLLKHGVNLL

SEQ ID NO: 899738 - protein, 739 aa, Homo sapiens
MAPLCSLARWNYFFLYDGSKVKEEGDPTRAGICYFYPSQTLLDQQELLCGQIAGVVRCVSDISDSPPTLVRLRKLKFAIKVDGDYLWVLGCAVELPDVSCKRFLDQLVGFFNFYNGPVSLAYENCSQEELSTEWDTFIEQILKNTSDLHKIFNSLWNLDQTKALSYTLSSCSVQPFPLFSLPDCEHADGWHDASCPAQVEPLLLLKAARILQTCQRSPHILAGCILYKGLIVSTQLPPSLTAKVLLHRTAPQEQRLPTGEDAPQEHGAALPPNVQIIPVFVTKEEAISLHEFPVEQMTRSLASPAGLQDGSAQHHPKGGSTSALKENATGHVESMAWTTPDPTSPDEACPDGRKENGCLSGHDLESIRPAGLHNSARGEVLGLSSSLGKELVFLQEELDLSEIHIPEAQEVEMASGHFAFLHVPVPDGRAPYCKASLSASSSLEPTPPEDTAISSLRPPSAPEMLTQHGAQEQLEDHPGHSSQAPIPRADPLPRRTRRPLLLPRLDPGQRGNKLPTGEQGLDEDVDGVCESHAAPGLECSSGSANCQGAGPSADGISSRLTPAESCMGLVRMNLYTHCVKGLMLSLLAEEPLLGDSAAIEEVYHSSLASLNGLEVHLKETLPRDEAASTSSTYNFTYYDRIQSLLMANLPQVATPHDRRFLQAVSLMHSEFAQLPALYEMTVRNASTAVYACCNPIQETYFQQLAPAARSSGFPNPQDGAFSLSGKAKQKLLKHGVNLL

SEQ ID NO: 899739 - protein, 604 aa, Homo sapiens
MLYQEDEDLSKCKYDVTCIPESYENCSQEELSTEWDTFIEQILKNTSDLHKIFNSLWNLDQTKVEPLLLLKAARILQTCQRSPHILAGCILYKGLIVSTQLPPSLTAKVLLHRTAPQEQRLPTGEDAPQEHGAALPPNVQIIPVFVTKEEAISLHEFPVEQMTRSLASPAGLQDGSAQHHPKGGSTSALKENATGHVESMAWTTPDPTSPDEACPDGRKENGCLSGHDLESIRPAGLHNSARGEVLGLSSSLGKELVFLQEELDLSEIHIPEAQEVEMASGHFAFLHVPVPDGRAPYCKASLSASSSLEPTPPEDTAISSLRPPSAPEMLTQHGAQEQLEDHPGHSSQAPIPRADPLPRRTRRPLLLPRLDPGQRGNKLPTGEQGLDEDVDGVCESHAAPGLECSSGSANCQGAGPSADGISSRLTPAESCMGLVRMNLYTHCVKGLMLSLLAEEPLLGDSAAIEEVYHSSLASLNGLEVHLKETLPRDEAASTSSTYNFTYYDRIQSLLMANLPQVATPHDRRFLQAVSLMHSEFAQLPALYEMTVRNASTAVYACCNPIQETYFQQLAPAARSSGFPNPQDGAFSLSGKAKQKLLKHGVNLL

SEQ ID NO: 899740 - protein, 419 aa, Homo sapiens
MSDLLSIPGNPAISMTMYTPDPTSPDEACPDGRKENGCLSGHDLESIRPAGLHNSARGEVLGLSSSLGKELVFLQEELDLSEIHIPEAQEVEMASGHFAFLHVPVPDGRAPYCKASLSASSSLEPTPPEDTAISSLRPPSAPEMLTQHGAQEQLEDHPGHSSQAPIPRADPLPRRTRRPLLLPRLDPGQRGNKLPTGEQGLDEDVDGVCESHAAPGLECSSGSANCQGAGPSADGISSRLTPAESCMGLVRMNLYTHCVKGLMLSLLAEEPLLGDSAAIEEVYHSSLASLNGLEVHLKETLPRDEAASTSSTYNFTYYDRIQSLLMANLPQVATPHDRRFLQAVSLMHSEFAQLPALYEMTVRNASTAVYACCNPIQETYFQQLAPAARSSGFPNPQDGAFSLSGKAKQKLLKHGVNLL

SEQ ID NO: 899741 - protein, 708 aa, Homo sapiens [sequence omitted]

SEQ ID NO: 899742 - protein, 68 aa, Homo sapiens
SARHRRAPACQELEGEVGGAARDLRPLCRARRYGAEVAGTQLLPTFLVQSPEPRALGCLATPSQGTDV

SEQ ID NO: 899743 - protein, 225 aa, Homo sapiens [sequence omitted]

SEQ ID NO: 899744 - protein, 225 aa, Homo sapiens [sequence omitted]

SEQ ID NO: 899745 - protein, 708 aa, Homo sapiens [sequence omitted]

SEQ ID NO: 899746 - protein, 726 aa, Homo sapiens
MATSTSTEAKSASWWNYFFLYDGSKVKEEGDPTRAGICYFYPSQTLLDQQELLCGQIAGVVRCVSDISDSPPTLVRLRKLKFAIKVDGDYLWVLGCAVELPDVSCKRFLDQLVGFFNFYNGPVSLAYENCSQEELSTEWDTFIEQILKNTSDLHKIFNSLWNLDQTKVEPLLLLKAARILQTCQRSPHILAGCILYKGLIVSTQLPPSLTAKVLLHRTAPQEQRLPTGEDAPQEHGKWMLWSFKNRVTHQNPNGAALPPNVQIIPVFVTKEEAISLHEFPVEQMTRSLASPAGLQDGSAQHHPKGGSTSALKENATGHVESMAWTTPDPTSPDEACPDGRKENGCLSGHDLESIRPAGLHNSARGEVLGLSSSLGKELVFLQEELDLSEIHIPEAQEVEMASGHFAFLHVPVPDGRAPYCKASLSASSSLEPTPPEDTAISSLRPPSAPEMLTQHGAQEQLEDHPGHSSQAPIPRADPLPRRTRRPLLLPRLDPGQRGNKLPTGEQGLDEDVDGVCESHAAPGLECSSGSANCQGAGPSADGISSRLTPAESCMGLVRMNLYTHCVKGLMLSLLAEEPLLGDSAAIEEVYHSSLASLNGLEVHLKETLPRDEAASTSSTYNFTYYDRIQSLLMANLPQVATPHDRRFLQAVSLMHSEFAQLPALYEMTVRNASTAVYACCNPIQETYFQQLAPAARSSGFPNPQDGAFSLSGKAKQKLLKHGVNLL

SEQ ID NO: 899747 - protein, 714 aa, Homo sapiens
KARYEAGCVLYLHRGKSASWWNYFFLYDGSKVKEEGDPTRAGICYFYPSQTLLDQQELLCGQIAGVVRCVSDISDSPPTLVRLRKLKFAIKVDGDYLWVLGCAVELPDVSCKRFLDQLVGFFNFYNGPVSLAYENCSQEELSTEWDTFIEQILKNTSDLHKIFNSLWNLDQTKVEPLLLLKAARILQTCQRSPHILAGCILYKGLIVSTQLPPSLTAKVLLHRTAPQEQRLPTGEDAPQEHGAALPPNVQIIPVFVTKEEAISLHEFPVEQMTRSLASPAGLQDGSAQHHPKGGSTSALKENATGHVESMAWTTPDPTSPDEACPDGRKENGCLSGHDLESIRPAGLHNSARGEVLGLSSSLGKELVFLQEELDLSEIHIPEAQEVEMASGHFAFLHVPVPDGRAPYCKASLSASSSLEPTPPEDTAISSLRPPSAPEMLTQHGAQEQLEDHPGHSSQAPIPRADPLPRRTRRPLLLPRLDPGQRGNKLPTGEQGLDEDVDGVCESHAAPGLECSSGSANCQGAGPSADGISSRLTPAESCMGLVRMNLYTHCVKGLMLSLLAEEPLLGDSAAIEEVYHSSLASLNGLEVHLKETLPRDEAASTSSTYNFTYYDRIQSLLMANLPQVATPHDRRFLQAVSLMHSEFAQLPALYEMTVRNASTAVYACCNPIQETYFQQLAPAARSSGFPNPQDGAFSLSGKAKQKLLKHGVNLL

SEQ ID NO: 899748 - protein, 708 aa, Homo sapiens [sequence omitted]

SEQ ID NO: 899749 - protein, 360 aa, Homo sapiens
MATSTSTEAKSASWWNYFFLYDGSKVKEEGDPTRAGICYFYPSQTLLDQQELLCGQIAGVVRCVSDISDSPPTLVRLRKLKFAIKVDGDYLWVLGCAVELPDVSCKRFLDQLVGFFNFYNGPVSLAYENCSQEELSTEWDTFIEQILKNTSDLHKIFNSLWNLDQTKVEPLLLLKAARILQTCQRSPHILAGCILYKGLIVSTQLPPSLTAKVLLHRTAPQEQYHSSLASLNGLEVHLKETLPRDEAASTSSTYNFTYYDRIQSLLMANLPQVATPHDRRFLQAVSLMHSEFAQLPALYEMTVRNASTAVYACCNPIQETYFQQLAPAARSSGFPNPQDGAFSLSGKAKQKLLKHGVNLL

SEQ ID NO: 899750 - protein, 174 aa, Homo sapiens
GLSDSIAKILDVLFWGEWGNSIDRHLSLQTISDCVVQKRWRKPDLDTKIHMSSNLAYSYFFAFGNFTFQVHKYDRIQSLLMANLPQVATPHDRRFLQAVSLMHSEFAQLPALYEMTVRNASTAVYACCNPIQETYFQQLAPAARSSGFPNPQDGAFSLSGKAKQKLLKHGVNLL

SEQ ID NO: 899751 - protein, 611 aa, Homo sapiens
NAAQDAAAAAAAPLPLALRPSPALLQRQGGRAAAARLGSPGPQPGLRSHPQASPGGAHAPTARTRGSSAGTAATCSRPRGDDTMRCALALSALLLLLSTPPLLPSSPSPSPSPSPSQNATQTTTDSSNKTAPTPASSVTIMATDTAQQSTVPTSKANEILASVKATTLGVSSDSPGTTTLAQQVSGPVNTTVARGGGSGNPTTTIESPKSTKSADTTTVATSTATAKPNTTSSQNGAEDTTNSGGKSSHSVTTDLTSTKAEHLTTPHPTSPLSPRQPTLTHPVATPTSSGHDHLMKISSSSSTVAIPGYTFTSPGMTTTLPSSVISQRTQQTSSQMPASSTAPSSQETVQPTSPATALRTPTLPETMSSSPTAASTTHRYPKTPSPTVAHESNWAKCEDLETQTQSEKQLVLNLTGNTLCAGGASDEKLISLICRAVKATFNPAQDKCGIRLASVPGSQTVVVKEITIHTKLPAKDVYERLKDKWDELKEAGVSDMKLGDQGPPEEAEDRFSMPLIITIVCMASFLLLVAALYGCCHQRLSQRKDQQRLTEELQTVENGYHDNPTLEVMETSSEMQEKKVVSLNGELGDSWIVPLDNLTKDDLDEEEDTHL

SEQ ID NO: 899752 - protein, 461 aa, Homo sapiens
NAAQDAAAAAAAPLPLALRPSPALLQRQGGRAAAARLGSPGPQPGLRSHPQASPGGAHAPTARTRGSSAGTAATCSRPRGDDTMRCALALSALLLLLSTPPLLPSSPSPSPSPSPSQNATQTTTDSSNKTAPTPASSVTIMATDTAQQSTVPTSKANEILASVKATTLGVSSDSPGTTTLAQQVSGPVNTTVARGGGSGNPTTTIESPKSTKSADTTTVATSTATAKPNTTSSQNGAEDTTNSGGKSSHSVTTDLTSTKAEHLTTPHPTSPLSPRQPTLTHPVATPTSSGHDHLMKISSSSSTVAIPGYTFTSPGMTTTLPSSVISQRTQQTSSQMPASSTAPSSQETVQPTSPATALRTPTLPETMSSSPTAASTTHRYPKTPSPTVAHESNWAKCEDLETQTQSEKQLVLNLTGNTLCAGGHIVDHYKEEKFEDRSPAAECLSEKETEELMAWMRNVSA

SEQ ID NO: 899753 - protein, 611 aa, Homo sapiens; identical to SEQ ID NO: 899751

SEQ ID NO: 899754 - protein, 493 aa, Homo sapiens
NAAQDAAAAAAAPLPLALRPSPALLQRQGGRAAAARLGSPGPQPGLRSHPQASPGGAHAPTARTRGSSAGTAATCSRPRGDDTMRCALALSALLLLLSTPPLLPSSPSPSPSPSPSQNATQTTTDSSNKTAPTPASSVTIMATDTAQQSTVPTSKANEILASVKATTLGVSSDSPGTTTLAQQVSGPVNTTVARGGGSGNPTTTIESPKSTKSADTTTVATSTATAKPNTTSSQNGAEDTTNSGGKSSHSVTTDLTSTKAEHLTTPHPTSPLSPRQPTLTHPVATPTSSGHDHLMKISSSSSTVAIPGYTFTSPGMTTTLPSSVISQRTQQTSSQMPASSTAPSSQETVQPTSPATALRTPTLPETMSSSPTAASTTHRYPKTPSPTVAHESNWAKCEDLETQTQSEKQLVLNLTGNTLCAGGASDEKLISLICRAVKASSTAPSSQETVQPTSPATALQNTYPARDHELQPHSSINYPPDTPKHLLPCRRAG

SEQ ID NO: 899755 - protein, 72 aa, Homo sapiens
IFSHYPRFPNDSVIGYLAKNSTDLQSDASQLYGPFLPGDSAAHEPGNGIENTYPARDHELQPHSSINYPPIP

SEQ ID NO: 899756 - protein, 756 aa, Homo sapiens
MVAPVLETSHVFCCPNRVRGVLNWSSGPRGLLAFGTSCSVVLYDPLKRVVVTNLNGHTARVNCIQWICKQDGSPSTELVSGGSDNQVIHWEIEDNQLLKAVHLQGHEGPVYAVHAVYQRRTSDPALCTLIVSAAADSAVRLWSKKGPEVPILACGNDDCRIHIFAQQNDQFQKVLSLCGHEDWIRGVEWAAFGRDLFLASCSQDCLIRIWKLYIKSTSLETQDDDNIRLKENTFTIENESVKIAFAVTLETVLAGHENWVNAVHWQPVFYKDGVLQQPVRLLSASMDKTMILWAPDEESGVWLEQREWTPEIVISGHFDGVQDLVWDPEGEFIITVGTDQTTRLFAPWKRKDQSQVTWHEIARPQIHGYDLKCLAMINRFQFVSGADEKVLRVFSAPRNFVENFCAITGQSLNHVLCNQDSDLPEGATVPALGLSNKAVFQGDIASQPSDEEELLTSTGFEYQQVAFQPSILTEPPTEDHLLQNTLWPEVQKLYGHGYEIFCVTCNSSKTLLASACKAAKKEHAAIILWNTTSWKQVQNLVFHSLTVTQMAFSPNEKFLLAVSRDRTWSLWKKQDTISPEFEPVFSLFAFTNKITSVHSRIIWSCDWSPDSKYFFTGSRDKKVVVWGECDSTDDCIEHNIGPCSSVLDVGGAVTAVSVCPVLHPSQRYVVAVGLECGKICLYTWKKTDQVPEINDWTHCVETSQSQSHTLAIRKLCWKNCSGKTEQKEAEGAEWLHFASCGEDHTVKIHRVNKCAL

SEQ ID NO: 899757 - protein, 826 aa, Homo sapiens
MVAPVLETSHVFCCPNRVRGVLNWSSGPRGLLAFGTSCSVVLYDPLKRVVVTNLNGHTARVNCIQWICKQDGSPSTELVSGGSDNQVIHWEIEDNQLLKAVHLQGHEGPVYAVHAVYQRRTSDPALCTLIVSAAADSAVRLWSKKGPEVMCLQTLNFGNGFALALCLSFLPNTDVPILACGNDDCRIHIFAQQNDQFQKVLSLCGHEDWIRGVEWAAFGRDLFLASCSQDCLIRIWKLYIKSTSLETQDDDNIRLKENTFTIENESVKIAFAVTLETVLAGHENWVNAVHWQPVFYKDGVLQQPVRLLSASMDKTMILWAPDEESGVWLEQVRVGEVGGNTLGFYDCQFNEDGSMIIAHAFHGALHLWKQNTVNPREWTPEIVISGHFDGVQDLVWDPEGEFIITVGTDQTTRLFAPWKRKDQSQVTWHEIARPQIHGYDLKCLAMINRFQFVSGADEKVLRVFSAPRNFVENFCAITGQSLNHVLCNQDSDLPEGATVPALGLSNKAVFQGDIASQPSDEEELLTSTGFEYQQVAFQPSILTEPPTEDHLLQNTLWPEVQKLYGHGYEIFCVTCNSSKTLLASACKAAKKEHAAIILWNTTSWKQVQNLVFHSLTVTQMAFSPNEKFLLAVSRDRTWSLWKKQDTISPEFEPVFSLFAFTNKITSVHSRIIWSCDWSPDSKYFFTGSRDKKVVVWGECDSTDDCIEHNIGPCSSVLDVGGAVTAVSVCPVLHPSQRYVVAVGLECGKICLYTWKKTDQVPEINDWTHCVETSQSQSHTLAIRKLCWKNCSGKTEQKEAEGAEWLHFASCGEDHTVKIHRVNKCAL

SEQ ID NO: 899758 - protein, 590 aa, Homo sapiens
MVAPVLETSHVFCCPNRVRGVLNWSSGPRGLLAFGTSCSVVLYDPLKRVVVTNLNGHTARVNCIQWICKQDGSPSTELVSGGSDNQVIHWEIEDNQLLKAVHLQGHEGPVYAVHAVYQRRTSDPALCTLIVSAAADSAVRLWSKKGPEVMCLQTLNFGNGFALALCLSFLPNTDVPILACGNDDCRIHIFAQQNDQFQKVLSLCGHEDWIRGVEWAAFGRDLFLASCSQDCLIRIWKLYIKSTSLETQDDDNIRLKENTFTIENESVKIAFAVTLETVLAGHENWVNAVHWQPVFYKDGVLQQPVRLLSASMDKTMILWAPDEESGVWLEQVRVGEVGGNTLGFYDCQFNEDGSMIIAHAFHGALHLWKQNTVNPREWTPEIVISGHFDGVQDLVWDPEGEFIITVGTDQTTRLFAPWKRKDQSQVTWHEIARPQIHGYDLKCLAMINRFQFVSGADEKVLRVFSAPRNFVENFCAITGQSLNHVLCNQDSDLPEGATVPALGLSNKAVFQGDIASQPSDEEELLTSTGFEYQQVAFQPSILTDMGTVMKYFVLLVTVQRLCLPQLVRQLRKSMQLSFFGTLHLGNRCRI

SEQ ID NO: 899759 - protein, 677 aa, Homo sapiens
MCLQTLNFGNGFALALCLSFLPNTDVPILACGNDDCRIHIFAQQNDQFQKVLSLCGHEDWIRGVEWAAFGRDLFLASCSQDCLIRIWKLYIKSTSLETQDDDNIRLKENTFTIENESVKIAFAVTLETVLAGHENWVNAVHWQPVFYKDGVLQQPVRLLSASMDKTMILWAPDEESGVWLEQVRVGEVGGNTLGFYDCQFNEDGSMIIAHAFHGALHLWKQNTVNPREWTPEIVISGHFDGVQDLVWDPEGEFIITVGTDQTTRLFAPWKRKDQSQVTWHEIARPQIHGYDLKCLAMINRFQFVSGADEKVLRVFSAPRNFVENFCAITGQSLNHVLCNQDSDLPEGATVPALGLSNKAVFQGDIASQPSDEEELLTSTGFEYQQVAFQPSILTEPPTEDHLLQNTLWPEVQKLYGHGYEIFCVTCNSSKTLLASACKAAKKEHAAIILWNTTSWKQVQNLVFHSLTVTQMAFSPNEKFLLAVSRDRTWSLWKKQDTISPEFEPVFSLFAFTNKITSVHSRIIWSCDWSPDSKYFFTGSRDKKVVVWGECDSTDDCIEHNIGPCSSVLDVGGAVTAVSVCPVLHPSQRYVVAVGLECGKICLYTWKKTDQVPEINDWTHCVETSQSQSHTLAIRKLCWKNCSGKTEQKEAEGAEWLHFASCGEDHTVKIHRVNKCAL

SEQ ID NO: 899760 - protein, 646 aa, Homo sapiens
RLGRGLGVRIAQQNDQFQKVLSLCGHEDWIRGVEWAAFGRDLFLASCSQDCLIRIWKLYIKSTSLETQDDDNIRLKENTFTIENESVKIAFAVTLETVLAGHENWVNAVHWQPVFYKDGVLQQPVRLLSASMDKTMILWAPDEESGVWLEQVRVGEVGGNTLGFYDCQFNEDGSMIIAHAFHGALHLWKQNTVNPREWTPEIVISGHFDGVQDLVWDPEGEFIITVGTDQTTRLFAPWKRKDQSQVTWHEIARPQIHGYDLKCLAMINRFQFVSGADEKVLRVFSAPRNFVENFCAITGQSLNHVLCNQDSDLPEGATVPALGLSNKAVFQGDIASQPSDEEELLTSTGFEYQQVAFQPSILTEPPTEDHLLQNTLWPEVQKLYGHGYEIFCVTCNSSKTLLASACKAAKKEHAAIILWNTTSWKQVQNLVFHSLTVTQMAFSPNEKFLLAVSRDRTWSLWKKQDTISPEFEPVFSLFAFTNKITSVHSRIIWSCDWSPDSKYFFTGSRDKKVVVWGECDSTDDCIEHNIGPCSSVLDVGGAVTAVSVCPVLHPSQRYVVAVGLECGKICLYTWKKTDQVPEINDWTHCVETSQSQSHTLAIRKLCWKNCSGKTEQKEAEGAEWLHFASCGEDHTVKIHRVNKCAL

SEQ ID NO: 899761 - protein, 826 aa, Homo sapiens; identical to SEQ ID NO: 899757

SEQ ID NO: 899762 - protein, 457 aa, Homo sapiens
GALPLQREWTPEIVISGHFDGVQDLVWDPEGEFIITVGTDQTTRLFAPWKRKDQSQVTWHEIARPQIHGYDLKCLAMINRFQFVSGADEKVLRVFSAPRNFVENFCAITGQSLNHVLCNQDSDLPEGATVPALGLSNKAVFQGDIASQPSDEEELLTSTGFEYQQVAFQPSILTEPPTEDHLLQNTLWPEVQKLYGHGYEIFCVTCNSSKTLLASACKAAKKEHAAIILWNTTSWKQVQNLVFHSLTVTQMAFSPNEKFLLAVSRDRTWSLWKKQDTISPEFEPVFSLFAFTNKITSVHSRIIWSCDWSPDSKYFFTGSRDKKVVVWGECDSTDDCIEHNIGPCSSVLDVGGAVTAVSVCPVLHPSQRYVVAVGLECGKICLYTWKKTDQVPEINDWTHCVETSQSQSHTLAIRKLCWKNCSGKTEQKEAEGAEWLHFASCGEDHTVKIHRVNKCAL

SEQ ID NO: 899763 - protein, 705 aa, Homo sapiens
MVAPVLETSHVFCCPNRVRGVLNWSSGPRGLLAFGTSCSVVLYDPLKRVVVTNLNGHTARVNCIQWICKQDGSPSTELVSGGSDNQVIHWEIEDNQLLKAVHLQGHEGPVYAVHAVYQRRTSDPALCTLIVSAAADSAVRLWSKKGPEVMCLQTLNFGNGFALALCLSFLPNTDVPILACGNDDCRIHIFAQQNDQFQKVLSLCGHEDWIRGVEWAAFGRDLFLASCSQDCLIRIWKLYIKSTSLETQDDDNIRLKENTFTIENESVKIAFAVTLETVLAGHENWVNAVHWQPVFYKDGVLQQPVRLLSASMDKTMILWAPDEESGVWLEQVRVGEVGGNTLGFYDCQFNEDGSMIIAHAFHGALHLWKQNTVNPREWTPEIVISGHFDGVQDLVWDPEGEFIITVGTDQTTRLFAPWKRKDQSQVTWHEIARPQIHGYDLKCLAMINRFQFVSGADEKVLRVFSAPRNFVENFCAITGQSLNHVLCNQDSDLPEGATVPALGLSNKAVFQGDIASQPSDEEELLTSTGFEYQQVAFQPSILTEPPTEDHLLQNTLWPEVQKLYGHGYEIFCVTCNSSKTLLASACKAAKKEHAAIILWNTTSWKQVQNLVFHSLTVTQMAFSPNEKFLLAVSRDRTWSLWKKQDTISPEFVELFGLVIGVLTASISSLGVETKRWLSGVSATPLMTVLSTTLAPAPQSWTWVGL

SEQ ID NO: 899764 - protein, 661 aa, Homo sapiens
MVAPVLETSHVFCCPNRVRGVLNWSSGPRGLLAFGTSCSVVLYDPLKRVVVTNLNGHTARVNCIQWICKQDGSPSTELVSGGSDNQVIHWEIEDNQLLKAVHLQGHEGPVYAVHAVYQRRTSDPALCTLIVSAAADSAVRLWSKKGPEVMCLQTLNFGNGFALALCLSFLPNTDVPILACGNDDCRIHIFAQQNDQFQKVLSLCGHEDWIRGVEWAAFGRDLFLASCSQDCLIRIWKLYIKSTSLETQDDDNIRLKENTFTIENESVKIAFAVTLETVLAGHENWVNAVHWQPVFYKDGVLQQPVRLLSASMDKTMILWAPDEESGVWLEQVRVGEVGGNTLGFYDCQFNEDGSMIIAHAFHGALHLWKQNTVNPREWTPEIVISGHFDGVQDLVWDPEGEFIITVGTDQTTRLFAPWKRKDQSQVTWHEIARPQIHGYDLKCLAMINRFQFVSGADEKVLRVFSAPRNFVENFCAITGQSLNHVLCNQDSDLPEGATVPALGLSNKAVFQGDIASQPSDEEELLTSTGFEYQQVAFQPSILTEPPTEDHLLQNTLWPEVQKLYGHGYEIFCVTCNSSKTLLASACKAAKKEHAAIILWNTTSWKQVQNLVFHSLTVTQMAFSPNEKFLLAVSRDRTWSLWKKQDTISPEFGKTASDWESY

SEQ ID NO: 899765 - protein, 709 aa, Homo sapiens
MVAPVLETSHVFCCPNRVRGVLNWSSGPRGLLAFGTSCSVVLYDPLKRVVVTNLNGHTARVNCIQWICKQDGSPSTELVSGGSDNQVIHWEIEDNQLLKAVHLQGHEGPVYAVHAVYQRRTSDPALCTLIVSAAADSAVRLWSKKGPEVMCLQTLNFGNGFALALCLSFLPNTDVPILACGNDDCRIHIFAQQNDQFQKVLSLCGHEDWIRGVEWAAFGRDLFLASCSQDCLIRIWKLYIKSTSLETQDDDNIRLKENTFTIENESVKIAFAVTLETVLAGHENWVNAVHWQPVFYKDGVLQQPVRLLSASMDKTMILWAPDEESGVWLEQVRVGEVGGNTLGFYDCQFNEDGSMIIAHAFHGALHLWKQNTVNPREWTPEIVISGHFDGVQDLVWDPEGEFIITVGTDQTTRLFAPWKRKDQSQVTWHEIARPQIHGYDLKCLAMINRFQFVSGADEKVLRVFSAPRNFVENFCAITGQSLNHVLCNQDSDLPEGATVPALGLSNKAVFQGDIASQPSDEEELLTSTGFEYQQVAFQPSILTEPPTEDHLLQNTLWPEVQKLYGHGYEIFCVTCNSSKTLLASACKAAKKEHAAIILWNTTSWKQVQNLVFHSLTVTQMAFSPNEKFLLAVSRDRTWSLWKKQDTISPEFEPVFSLFAFTNKITSVHSRIIWSCDWSPDSKYFFTGSRDKKVCLGDATPPGLNDTTCI

SEQ ID NO: 899766 - protein, 654 aa, Homo sapiens
MVAPVLETSHVFCCPNRVRGVLNWSSGPRGLLAFGTSCSVVLYDPLKRVVVTNLNGHTARVNCIQWICKQDGSPSTELVSGGSDNQVIHWEIEDNQLLKAVHLQGHEGPVYAVHAVYQRRTSDPALCTLIVSAAADSAVRLWSKKGPEVMCLQTLNFGNGFALALCLSFLPNTDVPILACGNDDCRIHIFAQQNDQFQKVLSLCGHEDWIRGVEWAAFGRDLFLASCSQDCLIRIWKLYIKSTSLETQDDDNIRLKENTFTIENESVKIAFAVTLETVLAGHENWVNAVHWQPVFYKDGVLQQPVRLLSASMDKTMILWAPDEESGVWLEQVRVGEVGGNTLGFYDCQFNEDGSMIIAHAFHGALHLWKQNTVNPREWTPEIVISGHFDGVQDLVWDPEGEFIITVGTDQTTRLFAPWKRKDQSQVTWHEIARPQIHGYDLKCLAMINRFQFVSGADEKVLRVFSAPRNFVENFCAITGQSLNHVLCNQDSDLPEGATVPALGLSNKAVFQGDIASQPSDEEELLTSTGFEYQQVAFQPSILTVLDVGGAVTAVSVCPVLHPSQRYVVAVGLECGKICLYTWKKTDQVPEINDWTHCVETSQSQSHTLAIRKLCWKNCSGKTEQKEAEGAEWLHFASCGEDHTVKIHRVNKCAL

SEQ ID NO: 899767 - protein, 393 aa, Homo sapiens
MVAPVLETSHVFCCPNRVRGVLNWSSGPRGLLAFGTSCSVVLYDPLKRVVVTNLNGHTARVNCIQWICKQDGSPSTELVSGGSDNQVIHWEIEDNQLLKAVHLQGHEGPVYAVHAVYQRRTSDPALCTLIVSAAADSAVRLWSKKGPEVMCLQTLNFGNGFALALCLSFLPNTDVPILACGNDDCRIHIFAQQNDQFQKVLSLCGHEDWIRGVEWAAFGRDLFLASCSQDCLIRIWKLYIKSTSLETQDDDNIRLKENTFTIENESVKIAFAVTLETVLAGHENWVNAVHWQPVFYKDGVLQQPVRLLSASMDKTMILWAPDEESGVWLEQVRVGEVGGNTLGFYDCQFNEDGSMIIAHAFHGACTFGNRIQLTQESGLQRLSFQDTLMVSKT

SEQ ID NO: 899768 - protein, 393 aa, Homo sapiens; identical to SEQ ID NO: 899767

SEQ ID NO: 899769 - protein, 891 aa, Homo sapiens
MVAPVLETSHVFCCPNRVRGVLNWSSGPRGLLAFGTSCSVVLYDPLKRVVVTNLNGHTARVNCIQWICKQDGSPSTELVSGGSDNQVIHWEIEDNQLLKAVHLQGHEGPVYAVHAVYQRRTSDPALCTLIVSAAADSAVRLWSKKGPEVMCLQTLNFGNGFALALCLSFLPNTDVTWKTGQVERGRAWKPPASLALCSRSCDSMVSCYASILCKALWKEKLHTFWHHNRISFLPSAFRPIPILACGNDDCRIHIFAQQNDQFQKVLSLCGHEDWIRGVEWAAFGRDLFLASCSQDCLIRIWKLYIKSTSLETQDDDNIRLKENTFTIENESVKIAFAVTLETVLAGHENWVNAVHWQPVFYKDGVLQQPVRLLSASMDKTMILWAPDEESGVWLEQVRVGEVGGNTLGFYDCQFNEDGSMIIAHAFHGALHLWKQNTVNPREWTPEIVISGHFDGVQDLVWDPEGEFIITVGTDQTTRLFAPWKRKDQSQVTWHEIARPQIHGYDLKCLAMINRFQFVSGADEKVLRVFSAPRNFVENFCAITGQSLNHVLCNQDSDLPEGATVPALGLSNKAVFQGDIASQPSDEEELLTSTGFEYQQVAFQPSILTEPPTEDHLLQNTLWPEVQKLYGHGYEIFCVTCNSSKTLLASACKAAKKEHAAIILWNTTSWKQVQNLVFHSLTVTQMAFSPNEKFLLAVSRDRTWSLWKKQDTISPEFEPVFSLFAFTNKITSVHSRIIWSCDWSPDSKYFFTGSRDKKVVVWGECDSTDDCIEHNIGPCSSVLDVGGAVTAVSVCPVLHPSQRYVVAVGLECGKICLYTWKKTDQVPEINDWTHCVETSQSQSHTLAIRKLCWKNCSGKTEQKEAEGAEWLHFASCGEDHTVKIHRVNKCAL

SEQ ID NO: 899770 - protein, 705 aa, Homo sapiens; identical to SEQ ID NO: 899763

SEQ ID NO: 899771 - protein, 826 aa, Homo sapiens; identical to SEQ ID NO: 899757

SEQ ID NO: 899772 - protein, 661 aa, Homo sapiens; identical to SEQ ID NO: 899764

SEQ ID NO: 899773 - protein, 712 aa, Homo sapiens
MVAPVLETSHVFCCPNRVRGVLNWSSGPRGLLAFGTSCSVVLYDPLKRVVVTNLNGHTARVNCIQWICKQDGSPSTELVSGGSDNQVIHWEIEDNQLLKAVHLQGHEGPVYAVHAVYQRRTSDPALCTLIVSAAADSAVRLWSKKGPEVMCLQTLNFGNGFALALCLSFLPNTDVPILACGNDDCRIHIFAQQNDQFQKVLSLCGHEDWIRGVEWAAFGRDLFLASCSQDCLIRIWKLYIKSTSLETQDDDNIRLKENTFTIENESVKIAFAVTLETVLAGHENWVNAVHWQPVFYKDGVLQQPVRLLSASMDKTMILWAPDEESGVWLEQVRVGEVGGNTLGFYDCQFNEDGSMIIAHAFHGALHLWKQNTVNPREWTPEIVISGHFDGVQDLVWDPEGEFIITVGTDQTTRLFAPWKRKDQSQVTWHEIARPQIHGYDLKCLAMINRFQFVSGADEKVLRVFSAPRNFVENFCAITGQSLNHVLCNQDSDLPEGATVPALGLSNKAVFQGDIASQPSDEEELLTSTGFEYQQVAFQPSILTEPPTEDHLLQNTLWPEVQKLYGHGYEIFCVTCNSSKTLLASACKAAKKEHAAIILWNTTSWKQVQNLVFHSLTVTQMAFSPNEKFLLAVSRDRTWSLWKKQDTISPEFEPVFSLFAFTNKITSVHSRIIWSCDWSPDSKYFFTGSRDKKIRGCSRIGVWKDLLIYLEKD

SEQ ID NO: 899774 - protein, 712 aa, Homo sapiens; identical to SEQ ID NO: 899773

SEQ ID NO: 899775 - protein, 359 aa, Homo sapiens
GDLEDPLAVYYRTITESVLCNQDSDLPEGATVPALGLSNKAVFQGDIASQPSDEEELLTSTGFEYQQVAFQPSILTEPPTEDHLLQNTLWPEVQKLYGHGYEIFCVTCNSSKTLLASACKAAKKEHAAIILWNTTSWKQVQNLVFHSLTVTQMAFSPNEKFLLAVSRDRTWSLWKKQDTISPEFEPVFSLFAFTNKITSVHSRIIWSCDWSPDSKYFFTGSRDKKVVVWGECDSTDDCIEHNIGPCSSVLDVGGAVTAVSVCPVLHPSQRYVVAVGLECGKICLYTWKKTDQVPEINDWTHCVETSQSQSHTLAIRKLCWKNCSGKTEQKEAEGAEWLHFASCGEDHTVKIHRVNKCAL

SEQ ID NO: 899776 - protein, 207 aa, Homo sapiens
MAFSPNEKFLLAVSRDRTWSLWKKQDTISPEFEPVFSLFAFTNKITSVHSRIIWSCDWSPDSKYFFTGSRDKKVVVWGECDSTDDCIEHNIGPCSSVLDVGGAVTAVSVCPVLHPSQRYVVAVGLECGKICLYTWKKTDQVPEINDWTHCVETSQSQSHTLAIRKLCWKNCSGKTEQKEAEGAEWLHFASCGEDHTVKIHRVNKCAL

SEQ ID NO: 899777 - protein, 257 aa, Homo sapiens
RAYSGFAEMGLPQPGLWLKRLWVLLEVAVHVVVGKVLLILFPDRVKRNILAMGEKTGMTRNPHFSHDNWIPTFFSTQYFWFVLKVRWQRLEDTTELGGLAPNCPVVRLSGQRCNIWEFMQGNRPLVLNFGSCTSPSFMFKFDQFKRLIEDFSSIADFLVIYIEEAHASDGWAFKNNMDIRNHQNLQDRLQAAHLLLARSPQCPVVVDTMQNQSSQLYAALPERLYIIQEGRILYKGKSGPWNYNPEEVRAVLEKLHS

SEQ ID NO: 899778 - protein, 120 aa, Homo sapiens
MFKFDQFKRLIEDFSSIADFLVIYIEEAHASDGWAFKNNMDIRNHQNLQDRLQAAHLLLARSPQCPVVVDTMQNQSSQLYAALPERLYIIQEGRILYKGKSGPWNYNPEEVRAVLEKLHS

SEQ ID NO: 899779 - protein, 133 aa, Homo sapiens
RAYSGFAEMGLPQPGLWLKRLWVLLEVAVHVVVGKVLLILFPDRVKRNILAMGEKTGMTRNPHFSHDNWIPTFFSTQYFWFVLKVRWQRLEDTTELGGLAPNCPVVRLSGQRCNIWEFMQGNRPLVLNFGSCT

SEQ ID NO: 899780 - protein, 120 aa, Homo sapiens; identical to SEQ ID NO: 899778

SEQ ID NO: 899781 - protein, 136 aa, Homo sapiens
MFKFDQFKRLIEDFSSIADFLVIYIEEAHASDGWAFKNNMDIRNHQNLQDRLQAAHLLLARSPQCPVVVDTMQNQSSQLYAALPERLYIIQEGRILYKGKSGPWNYNPEEVRAVLEASQGLALPETQLAFTLDLCP

SEQ ID NO: 899782 - protein, 343 aa, Homo sapiens
AGVLLSPSGGEGRPSPGADWPITGRKMKVLWAALLVTFLAGCQAKVEQAVETEPEPELRQQTEWQSGQRWELALGRFWDYLRWVQTLSEQVQEELLSSQVTQELRALMDETMKELKAYKSELEEQLTPVAEETRARLSKELQAAQARLGADMEDVCGRLVQYRGEVQAMLGQSTEELRVRLASHLRKLRKRLLRDADDLQKRLAVYQAGAREGAERGLSAIRERLGPLVEQGRVRAATVGSLAGQPLQERAQAWGERLRARMEEMGSRTRDRLDEVKEQVAEVRAKLEEQAQQIRLQAEAFQARLKSWFEPLVEDMQRQWAGLVEKVQAAVGTSAAPVPSDNH

SEQ ID NO: 899783 - protein, 157 aa, Homo sapiens
  misc_feature (16)..(16): Xaa can be any naturally occurring amino acid
  misc_feature (20)..(21): Xaa can be any naturally occurring amino acid
  misc_feature (28)..(28): Xaa can be any naturally occurring amino acid
PVRKRLLRDADDLQKXPRVXXIMAGRRXGGGGGFPLSHRRRFPGKERVRAATVGSLAGQPLQERAQAWGERLRARMEEMGSRTRDRLDEVKEQVAEVRAKLEEQAQQIRLQAEAFQARLKSWFEPLVEDMQRQWAGLVEKVQAAVGTSAAPVPSDNH

SEQ ID NO: 899784 - protein, 122 aa, Homo sapiens
MDETMKELKAYKSELEEQLTPVAEETRARLSKELQAAQARLGADMEDVCGRLVQYRGEVQAMLGQSTEELRVRLASHLRKLRKRLLRDADDLQRLARTMTVYREVIERELSGMPERLGPLMQ

SEQ ID NO: 899785 - protein, 122 aa, Homo sapiens
MKVLWAALLVTFLAGCQAKVEQAVETEPEPELRQQTEWQSGQRWELALGRFWDYLRWVQTLSEQVQEELLSSQVTQELREGADGRDHEGVEGLQIGTGGTTLDFGPCLDFGPCLDSGPCLDS

SEQ ID NO: 899786 - protein, 191 aa, Homo sapiens
DGERIHSPSGGEGRPSPGADWPITGRKMKVLWAALLVTFLAGCQAKVEQAVETEPEPELRQQTEWQSGQRWELALGRFWDYLRWVQTLSEQVQEELLSSQVTQELREGADGRDHEGVEGLQIGTGGTTDPGGGGDAGTAVQGAAGGAGPAGRGHGGRVRPPGAVPRRGAGHARPEHRGAAGAPRLPPAQAA

SEQ ID NO: 899787 - protein, 201 aa, Homo sapiens
QRSPYVRPHRYRDMDVLPQETRLAWTTHRQEDEGSVGCVAGHIPGRMPGQGGASGGDRAGARAAPADRVAERPALGTGTGSLLGLPWDYLRWVQTLSEQVQEELLSSQVTQELREGADGRDHEGVEGLQIGTGGTTDPGGGVGCSQRGKEAGLDAVDCIQSRVTASNAAGVLRRAQGGQKPPVEQKGKSSVDLDFQYEYRP

SEQ ID NO: 899788 - protein, 101 aa, Homo sapiens
PAAQPRHRSAPECPSGLAMRLFLSLPVLVVVLSIVLEGPAPAQGTPDVSSALDKLKEFGNTLEDKARELISRIKQSELSAKMREWFSETFQKVKEKLKIDS

SEQ ID NO: 899789 - protein, 1123 aa, Homo sapiens
MLRRELALREGKLGWKPRSRRHSLLLPPPQFSETGRRVPTNGGQAETVSLYLLGQLQHLLVPLPILAPAHPELGAFPGTALITHVEEHPSPGDDSPGLSEEGKGQCAHRQGAWSAGPAADSPYVQELEQHPLRASVSPDVNERISISHISHLKNLNLEFSPLRIFFVFLRQCLAQSTTLECSSTIINHCSLQLKQPSCLNLLSSWGHRHPPPCLANSFFFEMESHSVAQAGVQWHHLGSPQPLPPGFKQFSCLSLLVARITGAHHHTRLIFVFLVETRFHHGGQVGLKLLTSGDPPASASQSTGITGVSHHAWPYFKLFCRDGVLLCCPGCSQTLGLKQILLPKLPKVVGLQVGATTPHQPMKMSKQTGCPISPHPQSDPEVGQGWEGGSRTKAGRESYGTGADPATIHRDILEPGKEKDKEPPFLNFFYVFETESHSVTQAGVQWHNLGSLQPPPHGFKRLSCLSLLSSWDHRCTPPCLDNFEFLVETEFHHVGQAGLELLTSSAPPTLASQSSGNTGVSHCNQPVAPIFAPAEPYWMFLVMRQFPHLLKRNPYSRGEDEVGKAGALLCYSCGVWEADIWVDVWGVLGLVGEVGGPLGLQGLEALSWPEGCCNPARVLSMLSFSQPSPYCQADTWLRGHKASQPESLRLGGGHPPHQLPGSLAVKGSWWGRHWTPALGDGCSDGGKQAWCQEGRQRVNKADRVFGGGSQPKGVRPGGREEGTYTQSFAAEGFEFFEMGSLSHQAGVQWHNHSSLQPRTPGLKQSSYLSLLSSWDYSMRHHARLIFEFFVEMRSPYIAQAGLELPGSSDPPSSASQSAGITGMSHHAWLMQVRFLQCHPAKATRSPPKKGRLRTMKLRAQRISRWSGVLQGLVWNKLEVARRVGAPGQLGDPANIKEKLLGLRRLAERGEVRERGDLGTGVNEGGMRSQGYYWETPEGRWPQGQDKAVFLREETTPHIVLCPISASKERKSKNYKGRNEIHKQTARATPWAWWLKIDPGPNPLGLSIDYRHCIEKHCENPYSVLFRSNYRCMQPPVTIPCLFNRSRPSHVHPLRVVSPEKEQGLLTRGARLLRQESCPFPERINPFLNSASEEFCLRLLLLHSEWGKGLRWSEDPTESGRLRA

SEQ ID NO: 899790 - protein, 1232 aa, Homo sapiens
MLRRELALREGKLGWKPRSRRHSLLLPPPQFSETGRRVPTNGGQAETVSLYLLGQLQHLLVPLPILAPAHPELGAFPGTALITHVEEHPSPGDDSPGLSEEGKGQCAHRQGAWSAGPAADSPYVQELEQHPLRASVSPDVNERISISHISHLKNLNLEFSPLRIFFVFLRQCLAQSTTLECSSTIINHCSLQLKQPSCLNLLSSWGHRHPPPCLANSFFFEMESHSVAQAGVQWHHLGSPQPLPPGFKQFSCLSLLVARITGAHHHTRLIFVFLVETRFHHGGQVGLKLLTSGDPPASASQSTGITGVSHHAWPYFKLFCRDGVLLCCPGCSQTLGLKQILLPKLPKVVGLQVGATTPHQPMKMSKQTGCPISPHPQSDPEVGQGWEGGSRTKAGRESYGTGADPATIHRDILEPGKEKDKEPPFLNFFYVFETESHSVTQAGVQWHNLGSLQPPPHGFKRLSCLSLLSSWDHRCTPPCLDNFEFLVETEFHHVGQAGLELLTSSAPPTLASQSSGNTGVSHCNQPVAPIFAPAEPYWMFLVMRQFPHLLKRNPYSRGEDEVGKAGALLCYSCGVWEADIWVDVWGVLGLVGEVGGPLGLQGLEALSWPEGCCNPARVLSMLSFSQPSPYCQADTWLRGHKASQPESLRLGGGHPPHQLPGSLAVKGSWWGRHWTPALGDGCSDGGKQAWCQEGRQRVNKADRVFGGGSQPKGVRPGGREEGTYTQSFAAEGFEFFEMGSLSHQAGVQWHNHSSLQPRTPGLKQSSYLSLLSSWDYSMRHHARLIFEFFVEMRSPYIAQAGLELPGSSDPPSSASQSAGITGMSHHAWLMQVRFLQCHPAKATRSPPKKGRLRTMKLRAQRISRWSGVLQGLVWNKLEVARRVGAPGQLGDPANIKEKLLGLRRLAERGEVRERGDLGTGVNEGGMRSQGYYWETPEGRWPQGQDKAVFLREETTPHIVLCPISASKERKSKNYKGRNEIHKQTARATPWAWWLKIDPGPNPLGLSIDYRHCIEKHCENPYSVLFRSNYRCMQPPVTIPCLFNRSRPSHVHPLRVVSPEKEQGLLTRGARLLRQESCPFPERINPFLNSASEEFCLRLLLLHSEWGKGLRWSEDPTESGRLRGESAERGGALGLREVPGTPPDPNAHGTGAEEKNVGGQREAGGQGKAQEEGDQHQPAPPPPQPDKGPAGRTGPPNQALQQGFRLVLSAWEGHPPTLCKKLKKGDEGIVGGR

SEQ ID NO: 899791 - protein, 1123 aa, Homo sapiens; identical to SEQ ID NO: 899789

SEQ ID NO: 899792 - protein, 343 aa, Homo sapiens; identical to SEQ ID NO: 899782

SEQ ID NO: 899793 - protein, 1123 aa, Homo sapiens; identical to SEQ ID NO: 899789

SEQ ID NO: 899794 - protein, 1213 aa, Homo sapiens
MLRRELALREGKLGWKPRSRRHSLLLPPPQFSETGRRVPTNGGQAETVSLYLLGQLQHLLVPLPILAPAHPELGAFPGTALITHVEEHPSPGDDSPGLSEEGKGQCAHRQGAWSAGPAADSPYVQELEQHPLRASVSPDVNERISISHISHLKNLNLEFSPLRIFFVFLRQCLAQSTTLECSSTIINHCSLQLKQPSCLNLLSSWGHRHPPPCLANSFFFEMESHSVAQAGVQWHHLGSPQPLPPGFKQFSCLSLLVARITGAHHHTRLIFVFLVETRFHHGGQVGLKLLTSGDPPASASQSTGITGVSHHAWPYFKLFCRDGVLLCCPGCSQTLGLKQILLPKLPKVVGLQVGATTPHQPMKMSKQTGCPISPHPQSDPEVGQGWEGGSRTKAGRESYGTGADPATIHRDILEPGKEKDKEPPFLNFFYVFETESHSVTQAGVQWHNLGSLQPPPHGFKRLSCLSLLSSWDHRCTPPCLDNFEFLVETEFHHVGQAGLELLTSSAPPTLASQSSGNTGVSHCNQPVAPIFAPAEPYWMFLVMRQFPHLLKRNPYSRGEDEVGKAGALLCYSCGVWEADIWVDVWGVLGLVGEVGGPLGLQGLEALSWPEGCCNPARVLSMLSFSQPSPYCQADTWLRGHKASQPESLRLGGGHPPHQLPGSLAVKGSWWGRHWTPALGDGCSDGGKQAWCQEGRQRVNKADRVFGGGSQPKGVRPGGREEGTYTQSFAAEGFEFFEMGSLSHQAGVQWHNHSSLQPRTPGLKQSSYLSLLSSWDYSMRHHARLIFEFFVEMRSPYIAQAGLELPGSSDPPSSASQSAGITGMSHHAWLMQVRFLQCHPAKATRSPPKKGRLRTMKLRAQRISRWSGVLQGLVWNKLEVARRVGAPGQLGDPANIKEKLLGLRRLAERGEVRERGDLGTGVNEGGMRSQGYYWETPEGRWPQGQDKAVFLREETTPHIVLCPISASKERKSKNYKGRNEIHKQTARATPWAWWLKIDPGPNPLGLSIDYRHCIEKHCENPYSVLFRSNYRCMQPPVTIPCLFNRSRPSHVHPLRVVSPEKEQGLLTRGARLLRQESCPFPERINPFLNSASEEFCLRLLLLHSEWGKGLRWSEDPTESGRLRGESAERGGALGLREVPGTPPDPNAHGTGAEEKNVGGQREAGGQGKAQEEGDQHQPAPPPPQPDKGPAGRTGPPNQALQQGFLKFPTPQRLC

SEQ ID NO: 899795 - protein, 380 aa, Homo sapiens
REPYNWTSLGAESYSAPAEVKDVLPQEPVRSAVGGTGMSSGASRKSWDPGKPWPPDWPITGRKMKVLWAALLVTFLAGCQAKVEQAVETEPEPELRQQTEWQSGQRWELALGRFWDYLRWVQTLSEQVQEELLSSQVTQELRALMDETMKELKAYKSELEEQLTPVAEETRARLSKELQAAQARLGADMEDVCGRLVQYRGEVQAMLGQSTEELRVRLASHLRKLRKRLLRDADDLQKRLAVYQAGAREGAERGLSAIRERLGPLVEQGRVRAATVGSLAGQPLQERAQAWGERLRARMEEMGSRTRDRLDEVKEQVAEVRAKLEEQAQQIRLQAEAFQARLKSWFEPLVEDMQRQWAGLVEKVQAAVGTSAAPVPSDNH

SEQ ID NO: 899796 - protein, 1231 aa, Homo sapiens
MLRRELALREGKLGWKPRSRRHSLLLPPPQFSETGRRVPTNGGQAETVSLYLLGQLQHLLVPLPILAPAHPELGAFPGTALITHVEEHPSPGDDSPGLSEEGKGQCAHRQGAWSAGPAADSPYVQELEQHPLRASVSPDVNERISISHISHLKNRTLVLTFKNFFFFLRQCLAQSTTLECSSTIINHCSLQLKQPSCLNLLSSWGHRHPPPCLANSFFFEMESHSVAQAGVQWHHLGSPQPLPPGFKQFSCLSLLVARITGAHHHTRLIFVFLVETRFHHGGQVGLKLLTSGDPPASASQSTGITGVSHHAWPYFKLFCRDGVLLCCPELISNSWAQADPPAKASQSSWITGVSHHAPPTYEDVKQTGCPISPHPQSDPEVGQGWEGGSRTKAGRESYGTGADPATIHRDILEPGKEKDKEPPFLNFFYVFETESHSVTQAGVQWHNLGSLQPPPHGFKRLSCLSLLSSWDHRCTPPCLDNFEFLVETEFHHVGQAGLELLTSSAPPTLASQSSGNTGVSHCNQPVAPIFAPAEPYWMFLVMRQFPHLLKRNPYSRGEDEVGKAGALLCYSCGVWEADIWVDVWGVLGLVGEVGGPLGLQGLEALSWPEGCCNPARVLSMLSFSQPSPYCQADTWLRGHKASQPESLRLGGGHPPHQLPGSLAVKGSWWGRHWTPALGDGCSDGGKQAWCQEGRQRVNKADRVFGGGSQPKGVRPGGREEGTYTQSFAAEGFEFFEMGSLSHQAGVQWHNHSSLQPRTPGLKQSSYLSLLSSWDYSMRHHARLIFEFFVEMRSPYIAQAGLELPGSSDPPSSASQSAGITGMSHHAWLMQVRFLQCHPAKATRSPPKKGRLRTMKLRAQRISRWSGVLQGLVWNKLEVARRVGAPGQLGDPANIKEKLLGLRRLAERGEVRERGDLGTGVNEGGMRSQGYYWETPEGRWPQGQDKAVFLREETTPHIVLCPISASKERKSKELKGRNEIHKQTARATPWAWWLKIDPGPNPLELSIDYRHCIEKHCENPYSVLFRSNYRCMQPPVTHPLLFNRSRPSHVHPLRVVSPEKEQGLLTRGARLLRQESCPFPERINPFLNSASEEFCLRLLLLHSEWGKGLRWSEDPTESGRLRGESAERGGALGLREVPGTPPDPNAHGTGAEEKNVGGQREAGGQGKAQEEGDQHQPAPPPPQPDKGPAGRTGPPNQALQQGFRLVLSAWEGHPPTLCKKLKKGDEGIVGGR

SEQ ID NO: 899797 - protein, 1231 aa, Homo sapiens
MLRRELALREGKLGWKPRSRRHSLLLPPPQFSETGRRVPTNGGQAETVSLYLLGQLQHLLVPLPILAPAHPELGAFPGTALITHVEEHPSPGDDSPGLSEEGKGQCAHRQGAWSAGPAADSPYVQELEQHPLRASVSPDVNERISISHISHLKNRTLVLTFKNFFFFLRQCLAQSTTLECSSTIINHCSLQLKQPSCLNLLSSWGHRHPPPCLANSFFFEMESHSVAQAGVQWHHLGSPQPLPPGFKQFSCLSLLVARITGAHHHTRLIFVFLVETRFHHGGQVGLKLLTSGDPPASASQSTGITGVSHHAWPYFKLFCRDGVLLCCPELISNSWAQADPPAKASQSSWITGVSHHAPPTYEDVKQTGCPISPHPQSDPEVGQGWEGGSRTKAGRESYGTGADPATIHRDILEPGKEKDKEPPFLNFFYVFETESHSVTQAGVQWHNLGSLQPPPHGFKRLSCLSLLSSWDHRCTPPCLDNFEFLVETEFHHVGQAGLELLTSSAPPTLASQSSGNTGVSHCNQPVAPIFAPAEPYWMFLVMRQFPHLLKRNPYSRGEDEVGKAGALLCYSCGVWEADIWVDVWGVLGLVGEVGGPLGLQGLEALSWPEGCCNPARVLSMLSFSQPSPYCQADTWLRGHKASQPESLRLGGGHPPHQLPGSLAVKGSWWGRHWTPALGDGCSDGGKQAWCQEGRQRVNKADRVFGGGSQPKGVRPGGREEGTYTQSFAAEGFEFFEMGSLSHQAGVQWHNHSSLQPRTPGLKQSSYLSLLSSWDYSMRHHARLIFEFFVEMRSPYIAQAGLELPGSSDPPSSASQSAGITGMSHHAWLMQVRFLQCHPAKATRSPPKKGRLRTMKLRAQRISRWSGVLQGLVWNKLEVARRVGAPGQLGDPANIKEKLLGLRRLAERGEVRERGDLGTGVNEGGMRSQGYYWETPEGRWPQGQDKAVFLREETTPHIVLCPISASKERKSKELKGRNEIHKQTARATPWAWWLKIDPGPNPLGLSIDYRHCIEKHCENPYSVLFRSNYRCMQPPVTIPCLFNRSRPSHVHPLRVVSPEKEQGLLTRGARLLRQESCPFPERINPFLNSASEEFCLRLLLLHSEWGKGLRWSEDPTESGRLRGESAERGGALGLREVPGTPPDPNAHGTGAEEKNVGGQREAGGQGKAQEEGDQHQPAPPPPQPDKGPAGRTGPPNQALQQGFRLVLSAWEGHPPTLCKKLKKGDEGIVGGR

SEQ ID NO: 899798 - protein, 332 aa, Homo sapiens
AGVLLSPSGGEGRPSPGADWPITGRKMKVLWAALLVTFLAGCQAKVEQAVETEPEPELRQQTEWQSGQRWELALGRFWDYLRWVQTLSEQVQEELLSSQVTQELRALMDETMKELKAYKSELEEQLTPVAEETRARLSKELQAAQARLGADMEDVCGRLVQYRGEVQAMLGQSTEELRVRLASHLRKLRKRLLRDADDLQKRLAVYQAGAREGAERGLSAIRVRAATVGSLAGQPLQERAQAWGERLRARMEEMGSRTRDRLDEVKEQVAEVRAKLEEQAQQIRLQAEAFQARLKSWFEPLVEDMQRQWAGLVEKVQAAVGTSAAPVPSDNH

SEQ ID NO: 899799 - protein, 1232 aa, Homo sapiens
MLRRELALREGKLGWKPRSRRHSLLLPPPQFSETGRRVPTNGGQAETVSLYLLGQLQHLLVPLPILAPAHPELGAFPGTALITHVEAAPSPGDDSPGLSEEGKGQCAHRQGAWSAGPAADSPYVQELEQHPLRASVSPDVNERISISHISHLKNLNLEFSPLRIFFLFLRQCLAQSTTLECSSTIINHCSLQLKQPSCLNLLSSWGHRHPPPCLANSFFFEMESHSVAQAGVQWHHLGSPQPLPPGFKQFSCLSLLVARITGAHHHTRLIFVFLVETRFHHGGQVGLKLLTSGDPPASASQSTGITGVSHHAWPYFKLFCRDGVLLCCPELISNSWAQADPPAKASQSSWITGVSHHAPPTYEDVKQTGCPISPHPQSDPEVGQGWEGGSRTKAGRESYGTGADPATIHRDILEPGKEKDKEPPFLNFFYVFETESHSVTQAGVQWHNLGSLQPPPHGFKRLSCLSLLSSWDHRCTPPCLDNFEFLVETEFHHVGQAGLELLTSSAPPTLASQSSGNTGVSHCNQPVAPIFAPPEPYWMFLVMRQFPHLLKRNPYSRGEDEVGKAGALLCYSCGVWEADIWVDVWGVLGLVGEVGGPLGLTGTGSSELARGMLQSCQGLVYAVLFYNHPPTARLTRGCGGTRPANLESEARRRTPSPPAARVTGGQRQLVGKALDSSLGGRMYDGGKQAWCQEGRQRVNKSRRVFGGGSQPKGVRPGGREEGTYTQSFAAEGFNFLEMGSLSHQAGVQWHNHSSLQPRTPGLKQSSYLSLLSSWDYSMRHHARLIFEFFVEMRSPYIAQAGLELPGSSDPPSSASQSAGITGMSHHAWLMQVRFLQCHPAKATRSPPKKGRLRTMKLRAQRISRWSGVLQGLVWNKLEVARRVGAPGQLGDPANIKEKLLGLRRLAERGEVRERGDLGTRVNEGGMRSQGYYWETPEGRWPQGQDKAVFLREETTPHIVLCPISASKERKSKELKGRNEIHKQTARATPWAWWLKIDPGPNPLGLSIDYRHCIEKHCENPYSVLFRSNYRCMQPPVTIPCLFNRSRPSHVHPLRVVSPEKEQGLLTRGARLLRQESCPFPERINPFLNSASEEFCLRLLLLHSEWGKGLRWSEDPTESGRLRGESAERGGALGLREVPGTPPDPNAHGTGAEEKNVGGQREAGGQGKAQEEGDQHQPAPPPPQPDKGPAGRTGPPNQALQQGFRLVLSAWEGHPPTLCKKLKKGDEGIVGGR

SEQ ID NO: 899800 - protein, 961 aa, Homo sapiens
MTHQELSEEGKGQCAHRQGAWSAGPAADSPYVQELEQHPLRASVSPDVNERISISHISHLKNLNLEFSPLRIFFSFLRQCLAQSTTLECSSTIINHCSLQLKQPSCLNLLSSWGHRHPPPCLANSFFFEMESHSVAQAGVQWHHLGSPQPLPPGFKQFSCLSLLVARITGAHHHTRLIFVFLVETRFHHGGQVGLKLLTSGDPPASASQSTGITGVSHHAWPYFKLFCRDGVLLCCPELISNSWAQADPPAKASQSSWITGVSHHAPPTYEDVKQTGCPISPHPQSDPEVGQGWEGGSRTKAGRESYGTGADPATIHRDILEPGKEKDKEPPFLNFFYVFETESHSVTQAGVQWHNLGSLQPPPHGFKRLSCLSLLSSWDHRCTPPCLDNFEFLVETEFHHVGQAGLELLTSSAPPTLASQSSGNTGVSHCNQPVAPIFAPAEPYWMFLVMRQFPHLLKRNPYSRGEDEVGKAGALLCYSCGVWEADIWVDVWGVLGLVGEVGGPLGLQGLEALSWPEGCCNPARVLSMLSFSQPSPYCQADTWLRGHKASQPESLRLGGGHPPHQLPGSLAVKGSWWGRHWTPALGDGCSDGGKQAWCQEGRQRVNKADRVFGGGSQPKGVRPGGREEGTYTQSFAAEGFEFFEMGSLSHQAGVQWHNHSSLQPRTPGLKQSSYLSLLSSWDYSMRHHARLIFEFFVEMRSPYIAQAGLELPGSSDPPSSASQSAGITGMSHHAWLMQVRFLQCHPAKATRSPPKKGRLRTMKLRAQRISRWSGVLQGLVWNKLEVARRVGAPGQLGDLSNIKEKLLGLRRLAERGEVRERGDLGTRVNEGGMRSQGYYWETPEGRWPQGQDKAVFLREETTPHIVLCPISASKERKSKELKGRNEIHKQTARATPWAWWLKIDPGPNPLGLSIDYRHCIEKHCENPYSVLFRSNYRCMQPPVTHPLLVQSITTLSRAPT

SEQ ID NO: 899801 - protein, 1011 aa, Homo sapiens
MESHSVAQAGVQWHHLGSPQPLPPGFKQFSCLSLLVARITGAHHHTRLIFVFLVETRFHHGGQVGLKLLTSGDPPASASQSTGITGVSHHAWPYFKLFCRDGVLLCCPELISNSWAQADPPAKASQSSWITGVSHHAPPTYEDVKQTGCPISPHPQSDPEVGQGWEGGSRTKAGRESYGTGADPATIHRDILEPGKEKDKEPPFLNFFYVFETESHSVTQAGVQWHNLGSLQPPPHGFKRLSCLSLLSSWDHRCTPPCLDNFEFLVETEFHHVGQAGLELLTSSAPPTLASQSSGNTGVSHCNQPVAPIFAPAEPYWMFLVMRQFPHLLKRNPYSRGEDEVGKAGALLCYSCGVWEADIWVDVWGVLGLVGEVGGPLGLQGLEALSWPEGCCNPARVLSMLSFSQPSPYCQADTWLRGHKASQPESLRLGGGHPPHQLPGSLAVKGSWWGRHWTPALGDGCSDGGKQAWCQEGRQRVNKADRVFGGGSQPKGVRPGGREEGTYTQSFAAEGFEFFEMGSLSHQAGVQWHNHSSLQPRTPGLKQSSYLSLLSSWDYSMRHHARLIFEFFVEMRSPYIAQAGLELPGSSDPPSSASQSAGITGMSHHAWLMQVRFLQCHPAKATRSPPKKGRLRTMKLRAQRISRWSGVLQGLVWNKLEVARRVGAPGQLGDPANIKEKLLGLRRLAERGEVRERGDLGTGVNEGGMRSQGYYWETPEGRWPQGQDKAVFLREETTPHIVLCPISASKERKSKELKGRNEIHKQTARATPWAWWLKIDPGPNPLGLSIDYRHCIEKHCENPYSVLFRSNYRCMQPPVTIPCLFNRSRPSHVHPLRVVSPEKEQGLLTRGARLLRQESCPFPERINPFLNSASEEFCLRLLLLHSEWGKGLRWSEDPTESGRLRGESAERGGALGLREVPGTPPDPNAHGTGAEEKNVGGQREAGGQGKAQEEGDQHQPAPPPPQPDKGPAGRTGPPNQALQQGFRLVLSAWEGHPPTLCKKLKKGDEGIVGGR

SEQ ID NO: 899802 - protein, 193 aa, Homo sapiens
LYGDRPKIAIPREKGWWCFSSTEPPVGGVVWPPVATLEGFLGPWLLQGRVRAATVGSLAGQPLQERAQAWGERLRARMEEMGSRTRDRLDEVKEQVAEGAGPADTPAGRGLPGPPQELVRAPGGRHAAPVGRAGGEGAGCRGHQRRPCAQRQSLNAEACSHATPRHPVPPASAQPAAGDPVPAPAVLLGWALV

SEQ ID NO: 899803 - protein, 115 aa, Homo sapiens
MKVLWAALLVTFLAGCQAKVEQAVETEPEPELRQQTEWQSGQRWELALGRFWDYLRAKLEEQAQQIRLQAEAFQARLKSWFEPLVEDMQRQWAGLVEKVQAAVGTSAAPVPSDNH

SEQ ID NO: 899804 - protein, 132 aa, Homo sapiens
MDETMKELKAYKSELEEQLTPVAEETRARLSKELQAAQARLGADMEDVCGRLVQYRGEVQAMLGQSTEELRVRLASHLRKLRKRLLRDADDLQKRLAVYQAGAREGAERGLSAIREALVALWARPPSAPPCA

SEQ ID NO: 899805 - protein, 120 aa, Homo sapiens
QRSPYVRPHRYRDMDVLPQETRLAWTTHRQEDEGSVGCVAGHIPGRMPGQGGASGGDRAGARAAPADRVAERPALGTGTGSLLGLPWDYLRWVQTLSEQVQEELLSSQVTQELRASRGPD

SEQ ID NO: 899806 - protein, 1232 aa, Homo sapiens; identical to SEQ ID NO: 899790

SEQ ID NO: 899807 - protein, 1232 aa, Homo sapiens; identical to SEQ ID NO: 899790

SEQ ID NO: 899808 - protein, 1164 aa, Homo sapiens
MLRRELALREGKLGWKPRSRRHSLLLPPPQFSETGRRVPTNGGQAETVSLYLLGQLQHLLVPLPILAPAHPELGAFPGTALITHVEEHPSPGDDSPGLSEEGKGQCAHRQGAWSAGPAADSPYVQELEQHPLRASVSPDVNERISISHISHLKNLNLEFSPLRIFFVFLRQCLAQSTTLECSSTIINHCSLQLKQPSCLNLLSSWGHRHPPPCLANSFFFEMESHSVAQAGVQWHHLGSPQPLPPGFKQFSCLSLLVARITGAHHHTRLIFVFLVETRFHHGGQVGLKLLTSGDPPASASQSTGITGVSHHAWPYFKLFCRDGVLLCCPGCSQTLGLKQILLPKLPKVVGLQVGATTPHQPMKMSKQTGCPISPHPQSDPEVGQGWEGGSRTKAGRESYGTGADPATIHRDILEPGKEKDKEPPFLNFFYVFETESHSVTQAGVQWHNLGSLQPPPHGFKRLSCLSLLSSWDHRCTPPCLDNFEFLVETEFHHVGQAGLELLTSSAPPTLASQSSGNTGVSHCNQPVAPIFAPAEPYWMFLVMRQFPHLLKRNPYSRGEDEVGKAGALLCYSCGVWEADIWVDVWGVLGLVGEVGGPLGLQGLEALSWPEGCCNPARVLSMLSFSQPSPYCQADTWLRGHKASQPESLRLGGGHPPHQLPGSLAVKGSWWGRHWTPALGDGCSDGGKQAWCQEGRQRVNKADRVFGGGSQPKGVRPGGREEGTYTQSFAAEGFEFFEMGSLSHQAGVQWHNHSSLQPRTPGLKQSSYLSLLSSWDYSMRHHARLIFEFFVEMRSPYIAQAGLELPGSSDPPSSASQSAGITGMSHHAWLMQVRFLQCHPAKATRSPPKKGRLRTMKLRAQRISRWSGVLQGLVWNKLEVARRVGAPGQLGDPANIKEKLLGLRRLAERGEVRERGDLGTGVNEGGMRSQGYYWETPEGRWPQGQDKAVFLREETTPHIVLCPISASKERKSKNYKGRNEIHKQTARATPWAWWLKIDPGPNPLGLSIDYRHCIEKHCENPYSVLFRSNYRCMQPPVTIPCLFNRSRPSHVHPLRVVSPEKEQGLLTRGARLLRQESCPFPERINPFLNSASEEFCLRLLLLHSEWGKGLRWSEDPTESGRLSRVPLRPRHEALPVAPGPGGGSVDRLGRPSPSPGDPRRLQCLG

SEQ ID NO: 899809 - protein, 1123 aa, Homo sapiens; identical to SEQ ID NO: 899789

SEQ ID NO: 899810 - protein, 343 aa, Homo sapiens; identical to SEQ ID NO: 899782

SEQ ID NO: 899811 - protein, 353 aa, Homo sapiens
REPYNVDKSGSGVLLSPSGGEGRPSPGADWPITGRKMKVLWAALLVTFLAGCQAKVEQAVETEPEPELRQQTEWQSGQRWELALGRFWDYLRWVQTLSEQVQEELLSSQVTQELRALMDETMKELKAYKSELEEQLTPVAEETRARLSKELQAAQARLGADMEDVCGRLVQYRGEVQAMLGQSTEELRVRLASHLRKLRKRLLRDADDLQKRLAVYQAGAREGAERGLSAIRERLGPLVEQGRVRAATVGSLAGQPLQERAQAWGERLRARMEEMGSRTRDRLDEVKEQVAEVRAKLEEQAQQIRLQAEAFQARLKSWFEPLVEDMQRQWAGLVEKVQAAVGTSAAPVPSDNH

SEQ ID NO: 899812 - protein, 1141 aa, Homo sapiens
MTHQELSEEGKGQCAHRQGAWSAGPAADSPYVQELEQHPLRASVSPDVNERISISHISHLKNRTLVLTFKNFFFFLRQCLAQSTTLECSSTIINHCSLQLKQPSCLNLLSSWGHRHPPPCLANSFFFEMESHSVAQAGVQWHHLGSPQPLPPGFKQFSCLSLLVARITGAHHHTRLIFVFLVETRFHHGGQVGLKLLTSGDPPASASQSTGITGVSHHAWPYFKLFCRDGVLLCCPELISNSWAQADPPAKASQSSWITGVSHHAPPTYEDVKQTGCPISPHPQSDPEVGQGWEGGSRTKAGRESYGTGADPATIHRDILEPGKEKDKEPPFLNFFYVFETESHSVTQAGVQWHNLGSLQPPPHGFKRLSCLSLLSSWDHRCTPPCLDNFWIFGRDGVSPCWPGRSRTPDLKCSAHLGLPKFWEYRREPLQPASEPPSLPLAEPYWMFLVMRQFPHLLKRNPYSRGEDEVGKAGALLCYSCGVWEADIWVDVWGVLGLVGEVGGPLGLQGLEALSWPEGCCNPARVLSMLSFSQPSPYCQADTWLRGHKASQPESLRLGGGHPPHQLPGSLAVKGSWWGRHWTPALGDGCSDGGKQAWCQEGRQRVNKADRVFGGGSQPKGVRPGGREEGTYTQSFAAEGFNFLEMGSLSHQAGVQWHNHSSLQPRTPGLKQSSYLSLLSSWDYRHAPPRSAEFLNFFVEMRSPYIAQAGLELPGSSDPPSSASQSAGITGMSHHAWLMQVRFLQCHPAKATRSPPKKGRLRTMKLRAQRISRWSGVLQGLVWNKLEVARRVGAPGQLGDPANIKEKLLGLRRLAERGEVRERGDLGTGVNEGGMRSQGYYWETPEGRWPQGQDKAVFLREETTPHIVLCPISASKERKSKELKGRNEIHKQTARATPWAWWLKIDPGPNPLGLSIDYRHCIEKHCENPYSVLFRSNYRCMQPPVTIPCLFNRSRPSHVHPLRVVSPEKEQGLLTRGARLLRQESCPFPERINPFLNSASEEFCLRLLLLHSEWGKGLRWSEDPTESGRLRGESAERGGALGLREVPGTPPDPNAHGTGAEEKNVGGQREAGGQGKAQEEGDQHQPAPPPPQPDKGPAGRTGPPNQALQQGFRLVLSAWEGHPPTLCKKLKKGDEGIVGGR

SEQ ID NO: 899813 - protein, 960 aa, Homo sapiens
MTHQELSEEGKGQCAHRQGAWSAGPAADSPYVQELEQHPLRASVSPDVNERISISHISHLKNRTLSSHLEEFFFFFETVPCSVTTLECSSTIINHCSLQLKQPSCLNLLSSWGHRHPPPCLANSFFFEMESHSVAQAGVQWHHLGSPQPLPPGFKQFSCLSLLVARITGAHHHTRLIFVFLVETRFHHGGQVGLKLLTSGDPPASASQSTGITGVSHHAWPYFKLFCRDGVLLCCPELISNSWAQADPPAKASQSSWITGVSHHAPPTYEDVKQTGCPISPHPQSDPEVGQGWEGGSRTKAGRESYGTGADPATIHRDILEPGKEKDKEPPFLNFFYVFETESHSVTQAGVQWHNLGSLQPPPHGFKRLSCLSLLSSWDHRCTPPCLDNFEFLVETEFHHVGQAGLELLTSSAPPTLASQSSGNTGVSHCNQPVAPIFAPAEPYWMFLVMRQFPHLLKRNPYSRGEDEVGKAGALLCYSCGVWEADIWVDVWGVLGLVGEVGGPLGLQGLEALSWPEGCCNPARVLSMLSFSQPSPYCQADTWLRGHKASQPESLRLGGGHPPHQLPGSLAVKGSWWGRHWTPALGDGCSDGGKQAWCQEGRQRVNKADRVFGGGSQPKGVRPGGREEGTYTQSFAAEGFEFFEMGSLSHQAGVQWHNHSSLQPRTPGLKQSSYLSLLSSWDYSMRHHARLIFEFFVEMRSPYIAQAGLELPGSSDPPSSASQSAGITGMSHHAWLMQVRFLQCHPAKATRSPPKKGRLRTMKLRAQRISRWSGVLQGLVWNKLEVARRVGAPGQLGDPANIKEKLLGLRRLAERGEVRERGDLGTRVNEGGMRSQGYYWETPEGRWPQGQDKAVFLREETTPHIVLCPISASKERKSKELKGRNEIHKQTARATPWAWWLKIDPGPNPLGLSIDYRHCIEKHCENPYSVLFRSNYRCMQPPVTHPLLVQSITTLSRAPT

SEQ ID NO: 899814 - protein, 209 aa, Homo sapiens
AGVLLSPSGGEGRPSPGADWPITGRKMKVLWAALLVTFLAGCQAKVEQAVETEPEPELRQQTEWQSGQRWELALGRFWDYLRWVQTLSEQVQEELLSSQVTQELRALMDETMKELKAYKSELEEQLTPVAEETRARLSKELQAAQARLGADMEDVCGRLVQYRGEVQAMLGQSTEELRVRLASHLRKLRKRLLRDADDLAAGPATAWTR

SEQ ID NO: 899815 - protein, 1232 aa, Homo sapiens
MLRRELALREGKLGWKPRSRRHSLLLPPPQFSETGRRVPTNGGQAETVSLYLLGQLQHLLVPLPILAPAHPELGAFPGTALITHVEEHPSPGDDSPGLSEEGKGQCAHRQGAWSAGPAADSPYVQELEQHPLRASVSPDVNERISISHISHLKNRTLSLTFKNFFFFLRQCLAQSTTLECSSTIINHCSLQLKQPSCLNLLSSWGHRHPPPCLANSFFFEMESHSVAQAGVQWHHLGSPQPLPPGFKQFSCLSLLVARITGAHHHTRLIFVFLVETRFHHGGQVGLKLLTSGDPPASASQSTGITGVSHHAWPYFKLFCRDGVLLCCPGCSQTLGLKQILLPKLPKVVGLQVGATTPHQPMKMSKQTGCPISPHPQSDPEVGQGWEGGSRTKAGRESYGTGADPATIHRDILEPGKEKDKEPPFLNFFYVFETESHSVTQAGVQWHNLGSLQPPPHGFKRLSCLSLLSSWDHRCTPPCLDNFEFLVETEFHHVGQAGLELLTSSAPPTLASQSSGNTGVSHCNQPVAPIFAPAEPYWMFLVMRQFPHLLKRNPYSRGEDEVGKAGALLCYSCGVWEADIWVDVWGVLGLVGEVGGPLGLQGLEALSWPEGCCNPARVLSMLSFSQPSPYCQADTWLRGHKASQPKSLRLGGGHPPHQLPGSLAVKGSWWGRHWTPALGDGCSDGGKQAWCQEGRQRVNKADRVFGGGSQPKGVRPGGREEGTYTQSFAAEGFEFFEMGSLSHQAGVQWHNHSSLQPRTPGLKQSSYLSLLSSWDYRHAPPRSAEFLNFFVEMRSPYIAQAGLELPGSSDPPSSASQSAGITGMSHHAWLMQVRFLQCHPAKATRSPPKKGRLRTMKLRAQRISRWSGVLQGLVWNKLEVARRVGAPGQLGDPANIKEKLLGLRRLAERGEVRERGDLGTGVNEGGMRSQGYYWETPEGRWPQGQDKAVFLREETTPHIVLCPISASKERKSKELKGRNEIHKQTARATPWAWWLKIDPGPNPLGLSIDYRHCIEKHCENPYSVLFRSNYRCMQPPVTIPCLFNRSRPSHVHPLRVVSPEKEQGLLTRGARLLRQESCPFPERINPFLNSASEEFCLRLLLLHSEWGKGLRWSEDPTESGRLRGESAERGGALGLREVPGTPPDPNAHGTGAEEKNVGGQREAGGQGKAQEEGDQHQPAPPPPQPDKGPAGRTGPPNQALQQGFRLVLSAWEGHPPTLCKKLKKGDEGIVGGR

SEQ ID NO: 899816 - protein, 276 aa, Homo sapiens
MDETMKELKAYKSELEEQLTPVAEETRARLSKELQAAQARLGADMEDVCGRLVQYRGEVQAMLGQSTEELRVRLASHLRKLRKRLLRDADDLQKRLAVYQAGAREGAERGLSAIRERLGPLVEQGLLRAATVGSLAGQPLQERAQAWGERLRARMEEMVGSRTRDRLDEVKEQVAEVRAKLGAGPADTPAGRGLPGPPQELVRAPGGRHAAPVGRAGGEGAGCRGHQRRPCAQRQSLNAEACSHATPRHPVPPASAQPAAGDPVPAPAVLLGWALV

SEQ ID NO: 899817 - protein, 137 aa, Homo sapiens
LKPCTSVRGRVELPLMPQLPHPYVGVMLARPPGRSGSKAAAVSCQVFTADETWSLNTAVPVLITRVSVMPPFPEGSPCSLRVPPSAMAARAASGSSLRPSFPFLESSTLAWPCRTKHNSEIPPQPSAVKLLRIRLFS

SEQ ID NO: 899818 - protein, 646 aa, Homo sapiens
MADNFVFDGSSLPADVHRYMKMIQLGKTVHYLPILFIDQLSNRVKDLMVINRSGGLRRAAHSFPRGGGGGARRLSSERRSPERRAGRRAGGGSRLRGGRAGGAGRGAAMWSGRSSFTSLVVGVFVVYVVHTCWVMYGIVYTRPCSGDANCIQPYLARRPKLQLSVYTTTRSHLGAENNIDLVLNVEDFDVESKFERTVNVSVPKKTRNNGTLYAYIFLHHAGVLPWHDGKQVHLVSPLTTYMVPKPEEINLLTGESDTQQIEAEKKPTSALDEPVSHWRPRLALNVMADNFVFDGSSLPADVHRYMKMIQLGKTVHYLPILFIDQLSNRVKDLMVINRSTTELPLTVSYDKVSLGRLRFWIHMQDAVYSLQQFGFSEKDADEVKGIFVDTNLYFLALTFFVAAFHLLFDFLAFKNDISFWKKKKSMIGMSTKAVLWRCFSTVVIFLFLLDEQTSLLVLVPAGVGAAIELWKVKKALKMTIFWRGLMPEFQFGTYSESERKTEEYDTQAMKYLSYLLYPLCVGGAVYSLLNIKYKSWYSWLINSFVNGVYAFGFLFMLPQLFVNYKLKSVAHLPWKAFTYKAFNTFIDDVFAFIITMPTSHRLACFRDDVVFLVYLYQRWLYPVDKRRVNEFGESYEEKATRAPHTD

SEQ ID NO: 899819 - protein, 538 aa, Homo sapiens
MWSGRSSFTSLVVGVFVVYVVHTCWVMYGIVYTRPCSGDANCIQPYLARRPKLQLSVYTTTRSHLGAENNIDLVLNVEDFDVESKFERTVNVSVPKKTRNNGTLYAYIFLHHAGVLPWHDGKQVHLVSPLTTYMVPKPEEINLLTGESDTQQIEAEKKPTSALDEPVSHWRPRLALNVMADNFVFDGSSLPADVHRYMKMIQLGKTVHYLPILFIDQLSNRVKDLMVINRSTTELPLTVSYDKVSLGRLRFWIHMQDAVYSLQQFGFSEKDADEVKGIFVDTNLYFLALTFFVAAFHLLFDFLAFKNDISFWKKKKSMIGMSTKAVLWRCFSTVVIFLFLLDEQTSLLVLVPAGVGAAIELWKVKKALKMTIFWRGLMPEFQFGTYSESERKTEEYDTQAMKYLSYLLYPLCVGGAVYSLLNIKYKSWYSWLINSFVNGVYAFGFLFMLPQLFVNYKLKSVAHLPWKAFTYKAFNTFIDDVFAFIITMPTSHRLACFRDDVVFLVYLYQRWLYPVDKRRVNEFGESYEEKATRAPHTD

SEQ ID NO: 899820 - protein, 538 aa, Homo sapiens; identical to SEQ ID NO: 899819

SEQ ID NO: 899821 - protein, 538 aa, Homo sapiens; identical to SEQ ID NO: 899819

SEQ ID NO: 899822 - protein, 393 aa, Homo sapiens
MLDVKWNISWRMKQIVRKVEPVSHWRPRLALNVMADNFVFDGSSLPADVHRYMKMIQLGKTVHYLPILFIDQLSNRVKDLMVINRSTTELPLTVSYDKVSLGRLRFWIHMQDAVYSLQQFGFSEKDADEVKGIFVDTNLYFLALTFFVAAFHLLFDFLAFKNDISFWKKKKSMIGMSTKAVLWRCFSTVVIFLFLLDEQTSLLVLVPAGVGAAIELWKVKKALKMTIFWRGLMPEFQFGTYSESERKTEEYDTQAMKYLSYLLYPLCVGGAVYSLLNIKYKSWYSWLINSFVNGVYAFGFLFMLPQLFVNYKLKSVAHLPWKAFTYKAFNTFIDDVFAFIITMPTSHRLACFRDDVVFLVYLYQRWLYPVDKRRVNEFGESYEEKATRAPHTD

SEQ ID NO: 899823 - protein, 554 aa, Homo sapiens
MWSGRSSFTSLVVGVFVVYVVHTCWVMYGIVYTRPCSGDANCIQPYLARRPKLQLSVYTTTRSHLGAENNIDLVLNVEDFDVESKFERTVNVSVPKKTRNNGTLYAYIFLHHAGVLPWHDGKQVHLVSPLTTYMVPKPEEINLLTGESDTQQIEAEKKPTSALDEPVSHWRPRLALNVMADNFVFDGSSLPADVHRYMKMIQLGKTVHYLPILFIDQLSNRVKDLMVINRSTTELPLTVSYDKVSLGRLRFWIHMQDAVYSLQQFGFSEKDADEVKGIFVDTNLYFLALTFFVAAFHLLFDFLAFKNDISFWKKKKSMIGMSTKAGGVCPAPPPSPTILSPVLWRCFSTVVIFLFLLDEQTSLLVLVPAGVGAAIELWKVKKALKMTIFWRGLMPEFQFGTYSESERKTEEYDTQAMKYLSYLLYPLCVGGAVYSLLNIKYKSWYSWLINSFVNGVYAFGFLFMLPQLFVNYKLKSVAHLPWKAFTYKAFNTFIDDVFAFIITMPTSHRLACFRDDVVFLVYLYQRWLYPVDKRRVNEFGESYEEKATRAPHTD

SEQ ID NO: 899824 - protein, 354 aa, Homo sapiens
MWSGRSSFTSLVVGVFVVYVVHTCWVMYGIVYTRPCSGDANCIQPYLARRPKLQLSVYTTTRSHLGAENNIDLVLNVEDFDVESKFERTVNVSVPKKTRNNGTLYAYIFLHHAGVLPWHDGKQVHLVSPLTTYMVPKPEEINLLTGESDTQQIEAEKKPTSALDEPVSHWRPRLALNVMADNFVFDGSSLPADVHRYMKMIQLGKTVHYLPILFIDQLSNRVKDLMVINRSTTELPLTVSYDKVSLGRLRFWIHMQDAVYSLQQFGFSEKDADEVKGIFVDTNLYFLALTFFVAAFHLLFDFLAFKNDISFWKKKKSMIGMSTKAAVESEEGIEDDYFLERPDARISVWHLQRI

SEQ ID NO: 899825 - protein, 538 aa, Homo sapiens; identical to SEQ ID NO: 899819

SEQ ID NO: 899826 - protein, 231 aa, Homo sapiens
  misc_feature (20)..(20): Xaa can be any naturally occurring amino acid
  misc_feature (46)..(46): Xaa can be any naturally occurring amino acid
TKAVLWRCFSTVVIFLFLLXRKANETRKGPPLAFVGWPWGFPRCRXVFGAAIELWKVKKALKMTIFWRGLMPEFQFGTYSESERKTEEYDTQAMKYLSYLLYPLCVGGAVYSLLNIKYKSWYSWLINSFVNGVYAFGFLFMLPQLFVNYKLKSVAHLPWKAFTYKAFNTFIDDVFAFIITMPTSHRLACFRDDVVFLVYLYQRWLYPVDKRRVNEFGESYEEKATRAPHTD

SEQ ID NO: 899827 - protein, 138 aa, Homo sapiens
MKYLSYLLYPLCVGGAVYSLLNIKYKSWYSWLINSFVNGVYAFGFLFMLPQLFVNYKLKSVAHLPWKAFTYKAFNTFIDDVFAFIITMPTSHRLACFRDDVVFLVYLYQRWLYPVDKRRVNEFGESYEEKATRAPHTD

SEQ ID NO: 899828 - protein, 166 aa, Homo sapiens
MKYLSYLLYPLCVGGAVYSLLNIKYKSWYSWLINSFVNGVYAFGFLFMLPQLFVNYKVRRCVLPAARPPSPVLPTADLGLSLLFQLKSVAHLPWKAFTYKAFNTFIDDVFAFIITMPTSHRLACFRDDVVFLVYLYQRWLYPVDKRRVNEFGESYEEKATRAPHTD

SEQ ID NO: 899829 - protein, 435 aa, Homo sapiens
MWSGRSSFTSLVVGVFVVYVVHTCWVMYGIVYTRPCSGDANCIQPYLARRPKLQLSVYTTTRSHLGAENNIDLVLNVEDFDVESKFERTVNVSVPKKTRNNGTLYAYIFLHHAGVLPWHDGKQVHLVSPLTTYMVPKPEEINLLTGESDTQQIEAEKKPTSALDEPVSHWRPRLALNVMADNFVFDGSSLPADVHRYMKMIQLGKTVHYLPILFIDQLSNRVKDLMVINRSTTELPLTVSYDKVSLGRLRFWIHMQDAVYSLQQFGFSEKDADEVKGIFVDTNLYFLALTFFVAAFHLLFDFLAFKNDISFWKKKKSMIGMSTKAVLWRCFSTVVIFLFLLDEQTSLLVLVPAGVGAAIELWKVKKALKMTIFWRGLMPEFQFGTYSESERKTEEYDTQAMKYLSYLLYPLCVCKRREDKRRGNAERTNAERFSR

SEQ ID NO: 899830 - protein, 137 aa, Homo sapiens; identical to SEQ ID NO: 899817

SEQ ID NO: 899831 - protein, 214 aa, Homo sapiens
MWSGRSSFTSLVVGVFVVYVVHTCWVMYGIVYTRPCSGDANCIQPYLARRPKLQLSVYTTTRSHLGAENNIDLVLNVEDFDVESKFERTVNVSVPKKTRNNGTLYAYIFLHHAGVLPWHDGKQVHLVSPLTTYMVPKPEEINLLTGESDTQQIEAEKKPTSALDEPVSHWRPRLALNVMADNFVFDGSSLPADVHRYMKMIQLGKTVRDPLDDL

SEQ ID NO: 899832 - protein, 538 aa, Homo sapiens; identical to SEQ ID NO: 899819

SEQ ID NO: 899833 - protein, 538 aa, Homo sapiens; identical to SEQ ID NO: 899819

SEQ ID NO: 899834 - protein, 590 aa, Homo sapiens
MADNFVFDGSSLPADVHRYMKMIQLGKTVHYLPILFIDQLSNRVKDLMVINRSAVCGARRIRSPAAVAVARGGSPVSGGARSGGLGAGRAGLAAERRAGRGRRARGRHVERPQLLHLGAENNIDLVLNVEDFDVESKFERTVNVSVPKKTRNNGTLYAYIFLHHAGVLPWHDGKQVHLVSPLTTYMVPKPEEINLLTGESDTQQIEAEKKPTSALDEPVSHWRPRLALNVMADNFVFDGSSLPADVHRYMKMIQLGKTVHYLPILFIDQLSNRVKDLMVINRSTTELPLTVSYDKVSLGRLRFWIHMQDAVYSLQQFGFSEKDADEVKGIFVDTNLYFLALTFFVAAFHLLFDFLAFKNDISFWKKKKSMIGMSTKAVLWRCFSTVVIFLFLLDEQTSLLVLVPAGVGAAIELWKVKKALKMTIFWRGLMPEFQFGTYSESERKTEEYDTQAMKYLSYLLYPLCVGGAVYSLLNIKYKSWYSWLINSFVNGVYAFGFLFMLPQLFVNYKLKSVAHLPWKAFTYKAFNTFIDDVFAFIITMPTSHRLACFRDDVVFLVYLYQRWLYPVDKRRVNEFGESYEEKATRAPHTD

SEQ ID NO: 899835 - protein, 566 aa, Homo sapiens
MWSGRSSFTSLVVGVFVVYVVHTCWVMYGIVYTRPCSGDANCIQPYLARRPKLQLSVYTTTRSHLGAENNIDLVLNVEDFDVESKFERTVNVSVPKKTRNNGTLYAYIFLHHAGVLPWHDGKQVHLVSPLTTYMVPKPEEINLLTGESDTQQIEAEKKPTSALDEPVSHWRPRLALNVMADNFVFDGSSLPADVHRYMKMIQLGKTVHYLPILFIDQLSNRVKDLMVINRSTTELPLTVSYDKVSLGRLRFWIHMQDAVYSLQQFGFSEKDADEVKGIFVDTNLYFLALTFFVAAFHLLFDFLAFKNDISFWKKKKSMIGMSTKAVLWRCFSTVVIFLFLLDEQTSLLVLVPAGVGAAIELWKVKKALKMTIFWRGLMPEFQFGTYSESERKTEEYDTQAMKYLSYLLYPLCVGGAVYSLLNIKYKSWYSWLINSFVNGVYAFGFLFMLPQLFVNYKVRRCVLPAARPPSPVLPTADLGLSLLFQLKSVAHLPWKAFTYKAFNTFIDDVFAFIITMPTSHRLACFRDDVVFLVYLYQRWLYPVDKRRVNEFGESYEEKATRAPHTD

SEQ ID NO: 899836 - protein, 538 aa, Homo sapiens; identical to SEQ ID NO: 899819

SEQ ID NO: 899837 - protein, 538 aa, Homo sapiens; identical to SEQ ID NO: 899819

SEQ ID NO: 899838 - protein, 169 aa, Homo sapiens [sequence omitted]

SEQ ID NO: 899839 - protein, 477 aa, Homo sapiens
MWSGRSSFTSLVVGVFVVYVVHTCWVMYGIVYTRPCSGDANCIQPYLARRPKLQLSVYTTTRSHLGAENNIDLVLNVEDFDVESKFERTVNVSVPKKTRNNGTLYAYIFLHHAGVLPWHDGKQVHLVSPLTTYMVPKPEEINLLTGESDTQQIEAEKKPTSALDEPVSHWRPRLALNVMADNFVFDGSSLPADVHRYMKMIQLGKTVHYLPILFIDQLSNRVKDLMVINRSTTELPLTVSYDKVSLGRLRFWIHMQDAVYSLQQFGFSEKDADEVKGIFVDTNLYFLALTFFVAAFHLLFDFLAFKNDISFWKKKKSMIGMSTKAVLWRCFSTVVIFLFLLDEQTSLLVLVPAGVGAAIELWKVKKALKMTIFWRGLMPEFQFGTYSESERKTEEYDTQAMKYLSYLLYPLCVGGAVYSLLNIKYKSWYSWLINSFVNGVYVYGIPPDAFQKYSSTSSVAPGWRQSRPAVQSRCGAP

SEQ ID NO: 899840 - protein, 357 aa, Homo sapiens
MWSGRSSFTSLVVGVFVVYVVHTCWVMYGIVYTRPCSGDANCIQPYLARRPKLQLSVYTTTRSHLGAENNIDLVLNVEDFDVESKFERTVNVSVPKKTRNNGTLYAYIFLHHAGVLPWHDGKQVHLVSPLTTYMVPKPEEINLLTGESDTQQIEAEKKPTSALDEPVSHWRPRLALNVMADNFVFDGSSLPADVHRYMKMIQLGKTVHYLPILFIDQLSNRVKDLMVINRSTTELPLTVSYDKVSLGRLRFWIHMQDAVYSLQQFGFSEKDADEVKGIFVDTNLYFLALTFFVAAFHLLFDFLAFKNDISLCCQNPFGHFSDISQVPITSDLELVALTMPPRVNICLGHRAGCCRSP

SEQ ID NO: 899841 - protein, 403 aa, Homo sapiens
MWSGRSSFTSLVVGVFVVYVVHTCWVMYGIVYTRPCSGDANCIQPYLARRPKLQLSVYTTTRSHLGAENNIDLVLNVEDFDVESKFERTVNVSVPKKTRNNGTLYAYIFLHHAGVLPWHDGKQVHLVSPLTTYMVPKPEEINLLTGESDTQQIEAEKKPTSALDEPVSHWRPRLALNVMADNFVFDGSSLPADVHRYMKMIQLGKTVHYLPILFIDQLSNRVKDLMVINRSTTELPLTVSYDKVSLGRLRFWIHMQDAVYSLQQFGFSEKDADEVKGIFVDTNLYFLALTFFVAAFHLLFDFLAFKNDISFWKKKKSMIGMSTKAVLWRCFSTVVIFLFLLDEQTSLLVLVPAGVGAAIELWKVKKALKMTIFWRGLMPEFQFGTYSESERKTEEYDTQVSHL

SEQ ID NO: 899842 - protein, 161 aa, Homo sapiens
MWSGRSSFTSLVVGVFVVYVVHTCWVMYGIVYTRPCSGDANCIQPYLARRPKLQLSVYTTTRSHLGAENNIDLVLNVEDFDVESKFERTVNVSVPKKTRNNGTLYAYIFLHHVLEEEEEHDRHVHQGSALALLQHRGHLSVPAGRADEPAGAGPGGCWSRH

SEQ ID NO: 899843 - protein, 125 aa, Homo sapiens
GRRRLMDPRIAWFQPEQLGPSNSLWMQIWETTQGLRNLYFNHHCHSSGGASGGGGSSSSSSTATGGSGSSTGSPGGAASAPAPAPAGMYRSGERLLGSHALPAEQRDFLPLETTNNNNNHHQPGA

SEQ ID NO: 899844 - protein, 285 aa, Homo sapiens
DIDLVVFGKWENLPLWTLEEALRKHKVADEDSVKVLDKATVPIIKLTDSFTEVKVDISFNVQNGVRAADLIKDFTKKYPVLPYLVLVLKQFLLQRDLNEVFTGGIGSYSLFLMAVSFLQLHPREDACIPNTNYGVLLIEFFELYGRHFNYLKTGIRIKDGGSYVAKDEVQKNMLDGYRPSMLYIEDPLQPGNDVGRSSYGAMQVKQAFDYAYVVLSHAVSPIAKYYPNNETESILGRIIRVTDEVATYRDWISKQWGLKNRPEPSCNVKLFIRSSVVLFCHTVQL

SEQ ID NO: 899845 - protein, 285 aa, Homo sapiens; identical to SEQ ID NO: 899844

SEQ ID NO: 899846 - protein, 443 aa, Homo sapiens
DIDLVVFGKWENLPLWTLEEALRKHKVADEDSVKVLDKATVPIIKLTDSFTEVKVDISFNVQNGVRAADLIKDFTKKYPVLPYLVLVLKQFLLQRDLNEVFTGGIGSYSLFLMAVSFLQLHPREDACIPNTNYGVLLIEFFELYGRHFNYLKTGIRIKDGGSYVAKDEVQKNMLDGYRPSMLYIEDPLQPGNDVGRSSYGAMQVKQAFDYAYVVLSHAVSPIAKYYPNNETESILGRIIRVTDEVATYRDWISKQWGLKNRPEPSCNGNGVTLIVDTQQLDKCNNNLSEENEALGKCRSKTSESLSKHSSNSSSGPVSSSSATQSSSSDVDSDATPCKTPKQLLCRPSTGNRVGSQDVSLESSQAVGKMQSTQTTNTSNSTNKSQHGSARLFRSSSKGFQGTTQTSHGSLMTNKQHQGKSNNQYYHGKKRKHKRDAPLSDLCR

SEQ ID NO: 899847 - protein, 285 aa, Homo sapiens; identical to SEQ ID NO: 899844

SEQ ID NO: 899848 - protein, 285 aa, Homo sapiens; identical to SEQ ID NO: 899844

SEQ ID NO: 899849 - protein, 70 aa, Homo sapiens
VTTSWLGEPLWPFGQPWPRFPNRGPDPQKKRSPMSGLIPVAVKLRVPQTLHAGFSNPVCCVCLFLISYSF

SEQ ID NO: 899850 - protein, 285 aa, Homo sapiens; identical to SEQ ID NO: 899844

SEQ ID NO: 899851 - protein, 285 aa, Homo sapiens; identical to SEQ ID NO: 899844

SEQ ID NO: 899852 - protein, 285 aa, Homo sapiens; identical to SEQ ID NO: 899844

SEQ ID NO: 899853 - protein, 285 aa, Homo sapiens; identical to SEQ ID NO: 899844

SEQ ID NO: 899854 - protein, 454 aa, Homo sapiens
  misc_feature (433)..(433): Xaa can be any naturally occurring amino acid
DIDLVVFGKWENLPLWTLEEALRKHKVADEDSVKVLDKATVPIIKLTDSFTEVKVDISFNVQNGVRAADLIKDFTKKYPVLPYLVLVLKQFLLQRDLNEVFTGGIGSYSLFLMAVSFLQLHPREDACIPNTNYGVLLIEFFELYGRHFNYLKTGIRIKDGGSYVAKDEVQKNMLDGYRPSMLYIEDPLQPGNDVGRSSYGAMQVKQAFDYAYVVLSHAVSPIAKYYPNNETESILGRIIRVTDEVATYRDWISKQWGLKNRPEPSCNGNGVTLIVDTQQLDKCNNNLSEENEALGKCRSKTSESLSKHSSNSSSGPVSSSSATQSSSSDVDSDATPCKTPKQLLCRPSTGNRVGSQDVSLESSQAVGKMQSTQTTNTSNSTNKSQHGSARLFRSSSKGFQGTTQTSHGSLMTNKQHQGKSNNQYYHGTEKTVXRAALTIYRGLRGARPSCVSSF

SEQ ID NO: 899855 - protein, 164 aa, Homo sapiens
QVEIAGLNTDLQQEYTRQREHLERNLATLKKKVVKEGELHRTDYVRIMQENVSLIKEINELRRELKFTRSQVYDLEAALKLTKKVRPQEVSETEPSRDMLSTAPTARLNEQEETGRIIEMQRLEIQRLRDQIQEQEQVTGFHTLAGVRLPSLSNSEVDLEVKTN

SEQ ID NO: 899856 - protein, 279 aa, Homo sapiens
MAALGRPFSGLPLSGGSDFLQPPQPAFPGRAFPPGADGAELAPRPGPRAVPSSPAGSAARGRVSVHCKKKHKREEEEDDDCPVRKKRITEAELCAGPNDWILCAHQDVEGHGVNPSVSGLSIPGILDVICEEMDQTTGEPQCEVARRKLQEIEDRIIDEDEEVEADRNVNHLPSLVLSDTMKTGLKREFDEVFTKKMIESMSRPSMELVLWKPLPELLSDKPKPSSNTKNYTGESQAKHVAAGTAFPQRTELFSEPRPTGMSLYNSLETATSTEEEMEL

SEQ ID NO: 899857 - protein, 279 aa, Homo sapiens; identical to SEQ ID NO: 899856

SEQ ID NO: 899858 - protein, 279 aa, Homo sapiens; identical to SEQ ID NO: 899856

SEQ ID NO: 899859 - protein, 279 aa, Homo sapiens; identical to SEQ ID NO: 899856

SEQ ID NO: 899860 - protein, 279 aa, Homo sapiens; identical to SEQ ID NO: 899856

SEQ ID NO: 899861 - protein, 279 aa, Homo sapiens; identical to SEQ ID NO: 899856

SEQ ID NO: 899862 - protein, 1829 aa, Homo sapiens
MREFGVGVVGVRCVEMDCRKQAAALRGAARRRVRLAAGPDQMQPGPGRAAPRACGPGASSGPGKLSTYIRLYGRKFSKEDHVLFIKLLYELVSIPKLEISMMQGFARLLINLLKKKELLSRADLELPWRPLYDMVERILYSKTEHLGLNWFPNSVENILKTLVKSCRPYFPADATAEMLEEWRPLMCPFDVTMQKAITYFEIFLPTSLPPELHHKGFKLWFDELIGLWVSVQNLPQWEGQLVNLFARLATDNIGYIDWDPYVPKIFTRILRSLNLPVGSSQVLVPRFLTNAYDIGHAVIWITAMMGGPSKLVQKHLAGLFNSITSFYHPSNNGRWLNKLMKLLQRLPNSVVRRLHRERYKKPSWLTPVPDSHKLTDQDVTDFVQCIIQPVLLAMFSKTGSLEAAQALQNLALMRPELVIPPVLERTYPALETLTEPHQLTATLSCVIGVARSLVSGGRWFPEGPTHMLPLLMRALPGVDPNDFSKCMITFQFIATFSTLVPLVDCSSVLQERNDLTEVERELCSATAEFEDFVLQFMDRCFGLIESSTLEQTREETETEKMTHLESLVELGLSSTFSTILTQCSKEIFMVALQKVFNFSTSHIFETRVAGRMVADMCRAAVKCCPEESLKLFVPHCCSVITQLTMNDDVLNDEELDKELLWNLQLLSEITRVDGRKLLLYREQLVKILQRTLHLTCKQGYTLSCNLLHHLLRSTTLIYPTEYCSVPGGFDKPPSEYFPIKDWGKPGDLWNLGIQWHVPSSEEVSFAFYLLDSFLQPELVKLQHCGDGKLEMSRDDILQSLTIVHNCLIGSGNLLPPLKGEPVTNLVPSMVSLEETKLYTGLEYDLSRENHREVIATVIRKLLNHILDNSEDDTKSLFLIIKIIGDLLQFQGSHKHEFDSRWKSFNLVKKSMENRLHGKKQHIRALLIDRVMLQHELRTLTVEGCEYKKIHQDMIRDLLRLSTSSYSQVRNKAQQTFFAALGAYNFCCRDIIPLVLEFLRPDRQGVTQQQFKGALYCLLGNHSGVCLANLHDWDCIVQTWPAIVSSGLSQAMSLEKPSIVRLFDDLAEKIHRQYETIGLDFTIPKSCVEIAELLQQSKNPSINQILLSPEKIKEGIKRQQEKNADALRNYENLVDTLLDGVEQRNLPWKFEHIGIGLLSLLLRDDRVLPLRAIRFFVENLNHDAIVVRKMAISAVAGILKQLKRTHKKLTINPCEISGCPKPTQIIAGDRPDNHWLHYDSKTIPRTKKEWESSCFVEKTHWGYYTWPKNMVVYAGVEEQPKLGRSREDMTEAEQIIFDHFSDPKFVEQLITFLSLEDRKGKDKFNPRRFCLFKGIFRNFDDAFLPVLKPHLEHLVADSHESTQRCVAEIIAGLIRGSKHWTFEKVEKLWELLCPLLRTALSNITVETYNDWGACIATSCESRDPRKLHWLFELLLESPLSGEGGSFVDACRLYVLQGGLAQQEWRVPELLHRLLKYLEPKLTQVYKNVRERIGSVLTYIFMIDVSLPNTTPTISPHVPEFTARILEKLKPLMDVDEEIQNHVMEENGIGEEDERTQGIKLLKTILKWLMASAGRSFSTAVTEQLQLLPLFFKIAPVENDNSYDELKRDAKLCLSLMSQGLLYPHQVPLVLQVLKQTARSSSWHARYTVLTYLQTMVFYNLFIFLNNEDAVKDIRWLVISLLEDEQLEVREMAATTLSGLLQCNFLTMDSPMQIHFEQLCKTKLPKKRKRDPGSVGDTIPSAELVKRHAGVLGLGACVLSSPYDVPTWMPQLLMNLSAHLNDPQPIEMTVKKTLSNFRRTHHDNWQEHKQQFTDDQLLVLTDLLVSPCYYA

SEQ ID NO: 899863 - protein, 1895 aa, Homo sapiens
MVALCPEGWSLSICPRRSCPRAGDPSGRDRACEVLNAVLPATFLRDFPGLYHPSTSLPREIGEPPEPGGRPEPGPRGFVPQKEIVYNKLLPYAERLDAESDLQLAQIKCNLGRAVQLQELWPGGLFWTRKLSTYIRLYGRKFSKEDHVLFIKLLYELVSIPKLEISMMQGFARLLINLLKKKELLSRADLELPWRPLYDMVERILYSKTEHLGLNWFPNSVENILKTLVKSCRPYFPADATAEMLEEWRPLMCPFDVTMQKAITYFEIFLPTSLPPELHHKGFKLWFDELIGLWVSVQNLPQWEGQLVNLFARLATDNIGYIDWDPYVPKIFTRILRSLNLPVGSSQVLVPRFLTNAYDIGHAVIWITAMMGGPSKLVQKHLAGLFNSITSFYHPSNNGRWLNKLMKLLQRLPNSVVRRLHRERYKKPSWLTPVPDSHKLTDQDVTDFVQCIIQPVLLAMFSKTGSLEAAQALQNLALMRPELVIPPVLERTYPALETLTEPHQLTATLSCVIGVARSLVSGGRWFPEGPTHMLPLLMRALPGVDPNDFSKCMITFQFIATFSTLVPLVDCSSVLQERNDLTEVERELCSATAEFEDFVLQFMDRCFGLIESSTLEQTREETETEKMTHLESLVELGLSSTFSTILTQCSKEIFMVALQKVFNFSTSHIFETRVAGRMVADMCRAAVKCCPEESLKLFVPHCCSVITQLTMNDDVLNDEELDKELLWNLQLLSEITRVDGRKLLLYREQLVKILQRTLHLTCKQGYTLSCNLLHHLLRSTTLIYPTEYCSVPGGFDKPPSEYFPIKDWGKPGDLWNLGIQWHVPSSEEVSFAFYLLDSFLQPELVKLQHCGDGKLEMSRDDILQSLTIVHNCLIGSGNLLPPLKGEPVTNLVPSMVSLEETKLYTGLEYDLSRENHREVIATVIRKLLNHILDNSEDDTKSLFLIIKIIGDLLQFQGSHKHEFDSRWKSFNLVKKSMENRLHGKKQHIRALLIDRVMLQHELRTLTVEGCEYKKIHQDMIRDLLRLSTSSYSQVRNKAQQTFFAALGAYNFCCRDIIPLVLEFLRPDRQGVTQQQFKGALYCLLGNHSGVCLANLHDWDCIVQTWPAIVSSGLSQAMSLEKPSIVRLFDDLAEKIHRQYETIGLDFTIPKSCVEIAELLQQSKNPSINQILLSPEKIKEGIKRQQEKNADALRNYENLVDTLLDGVEQRNLPWKFEHIGIGLLSLLLRDDRVLPLRAIRFFVENLNHDAIVVRKMAISAVAGILKQLKRTHKKLTINPCEISGCPKPTQIIAGDRPDNHWLHYDSKTIPRTKKEWESSCFVEKTHWGYYTWPKNMVVYAGVEEQPKLGRSREDMTEAEQIIFDHFSDPKFVEQLITFLSLEDRKGKDKFNPRRFCLFKGIFRNFDDAFLPVLKPHLEHLVADSHESTQRCVAEIIAGLIRGSKHWTFEKVEKLWELLCPLLRTALSNITVETYNDWGACIATSCESRDPRKLHWLFELLLESPLSGEGGSFVDACRLYVLQGGLAQQEWRVPELLHRLLKYLEPKLTQVYKNVRERIGSVLTYIFMIDVSLPNTTPTISPHVPEFTARILEKLKPLMDVDEEIQNHVMEENGIGEEDERTQGIKLLKTILKWLMASAGRSFSTAVTEQLQLLPLFFKIAPVENDNSYDELKRDAKLCLSLMSQGLLYPHQVPLVLQVLKQTARSSSWHARYTVLTYLQTMVFYNLFIFLNNEDAVKDIRWLVISLLEDEQLEVREMAATTLSGLLQCNFLTMDSPMQIHFEQLCKTKLPKKRKRDPGSVGDTIPSAELVKRHAGVLGLGACVLSSPYDVPTWMPQLLMNLSAHLNDPQPIEMTVKKTLSNFRRTHHDNWQEHKQQFTDDQLLVLTDLLVSPCYYA

SEQ ID NO: 899864 - protein, 1039 aa, Homo sapiens [sequence omitted]

SEQ ID NO: 899865 - protein, 1642 aa, Homo sapiens
MREFGVGVVGVRCVEMDCRKQAAALRGAARRRVRLAAGPDQMQPGPGRAAPRACGPGASSGPGKLSTYIRLYGRKFSKEDHVLFIKLLYELVSIPKLEISMMQGFARLLINLLKKKELLSRADLELPWRPLYDMVERILYSKTEHLGLNWFPNSVENILKTLVKSCRPYFPADATAEMLEEWRPLMCPFDVTMQKAITYFEIFLPTSLPPELHHKGFKLWFDELIGLWVSVQNLPQWEGQLVNLFARLATDNIGYIDWDPYVPKIFTRILRSLNLPVGSSQVLVPRFLTNAYDIGHAVIWITAMMGGPSKLVQKHLAGLFNSITSFYHPSNNGRWLNKLMKLLQRLPNSVVRRLHRERYKKPSWLTPVPDSHKLTDQDVTDFVQCIIQPVLLAMFSKTGSLEAAQALQNLALMRPELVIPPVLERTYPALETLTEPHQLTATLSCVIGVARSLVSGGRWFPEGPTHMLPLLMRALPGVDPNDFSKCMITFQFIATFSTLVPLVDCSSVLQERNDLTEVERELCSATAEFEDFVLQFMDRCFGLIESSTLEQTREETETEKMTHLESLVELGLSSTFSTILTQCSKEIFMVALQKVFNFSTSHIFETRVAGRMVADMCRAAVKCCPEESLKLFVPHCCSVITQLTMNDDVLNDEELDKELLWNLQLLSEITRVDGRKLLLYREQLVKILQRTLHLTCKQGYTLSCNLLHHLLRSTTLIYPTEYCSVPGGFDKPPSEYFPIKDWGKPGDLWNLGIQWHVPSSEEVSFAFYLLDSFLQPELVKLQHCGDGKLEMSRDDILQSLTIVHNCLIGSGNLLPPLKGEPVTNLVPSMVSLEETKLYTGLEYDLSRENHREVIATVIRKLLNHILDNSEDDTKSLFLIIKIIGDLLQFQGSHKHEFDSRWKSFNLVKKSMENRLHGKKQHIRALLIDRVMLQHELRTLTVEGCEYKKIHQDMIRDLLRLSTSSYSQVRNKAQQTFFAALGAYNFCCRDIIPLVLEFLRPDRQGVTQQQFKGALYCLLGNHSGVCLANLHDWDCIVQTWPAIVSSGLSQAMSLEKPSIVRLFDDLAEKIHRQYETIGLDFTIPKSCVEIAELLQQSKNPSINQILLSPEKIKEGIKRQQEKNADALRNYENLVDTLLDGVEQRNLPWKFEHIGIGLLSLLLRDDRVLPLRAIRFFVENLNHDAIVVRKMAISAVAGILKQLKRTHKKLTINPCEISGCPKPTQIIAGDRPDNHWLHYDSKTIPRTKKEWESSCFVEKTHWGYYTWPKNMVVYAGVEEQPKLGRSREDMTEAEQIIFDHFSDPKFVEQLITFLSLEDRKGKDKFNPRRFCLFKGIFRNFDDAFLPVLKPHLEHLVADSHESTQRCVAEIIAGLIRGSKHWTFEKVEKLWELLCPLLRTALSNITVETYNDWGACIATSCESRDPRKLHWLFELLLESPLSGEGGSFVDACRLYVLQGGLAQQEWRVPELLHRLLKYLEPKLTQVYKNVRERIGSVLTYIFMIDVSLPNTTPTISPHVPEFTARILEKLKPLMDVDEEIQNHVMEENGIGEEDERTQGIKLLKTILKWLMASAGRSFSTAVTEQLQLLPLFFKIAPVENDNSYDELKRDAKLCLSLMSQGLLYPHQVPLVLQVLKQLPPDHGIL

SEQ ID NO: 899866 - protein, 1829 aa, Homo sapiens; identical to SEQ ID NO: 899862

SEQ ID NO: 899867 - protein, 281 aa, Homo sapiens
MNGKDLLCIFVFKIVLKWLMASAGRSFSTAVTEQLQLLPLFFKIAPVENDNSYDELKRDAKLCLSLMSQGLLYPHQVPLVLQVLKQTARSSSWHARYTVLTYLQTMVFYNLFIFLNNEDAVKDIRWLVISLLEDEQLEVREMAATTLSGLLQCNFLTMDSPMQIHFEQLCKTKLPKKRKRDPGSVGDTIPSAELVKRHAGVLGLGACVLSSPYDVPTWMPQLLMNLSAHLNDPQPIEMTVKKTLSNFRRTHHDNWQEHKQQFTDDQLLVLTDLLVSPCYYA

SEQ ID NO: 899868 - protein, 215 aa, Homo sapiens
MSQGLLYPHQVPLVLQVLKQTARSSSWHARYTVLTYLQTMVFYNLFIFLNNEDAVKDIRWLVISLLEDEQLEVREMAATTLSGLLQCNFLTMDSPMQIHFEQLCKTKLPKKRKRDPGSVGDTIPSAELVKRHAGVLGLGACVLSSPYDVPTWMPQLLMNLSAHLNDPQPIEMTVKKTLSNFRRTHHDNWQEHKQQFTDDQLLVLTDLLVSPCYYA

SEQ ID NO: 899869 - protein, 1691 aa, Homo sapiens
MREFGVGVVGVRCVEMDCRKQAAALRGAARRRVRLAAGPDQMQPGPGRAAPRACGPGASSGPGKLSTYIRLYGRKFSKEDHVLFIKLLYELVSIPKLEISMMQGFARLLINLLKKKELLSRADLELPWRPLYDMVERILYSKTEHLGLNWFPNSVENILKTLVKSCRPYFPADATAEMLEEWRPLMCPFDVTMQKAITYFEIFLPTSLPPELHHKGFKLWFDELIGLWVSVQNLPQWEGQLVNLFARLATDNIGYIDWDPYVPKIFTRILRSLNLPVGSSQVLVPRFLTNAYDIGHAVIWITAMMGGPSKLVQKHLAGLFNSITSFYHPSNNGRWLNKLMKLLQRLPNSVVRRLHRERYKKPSWLTPVPDSHKLTDQDVTDFVQCIIQPVLLAMFSKTGSLEAAQALQNLALMRPELVIPPVLERTYPALETLTEPHQLTATLSCVIGVARSLVSGGRWFPEGPTHMLPLLMRALPGVDPNDFSKCMITFQFIATFSTLVPLVDCSSVLQERNDLTEVERELCSATAEFEDFVLQFMDRCFGLIESSTLEQTREETETEKMTHLESLVELGLSSTFSTILTQCSKEIFMVALQKVFNFSTSHIFETRVAGRMVADMCRAAVKCCPEESLKLFVPHCCSVITQLTMNDDVLNDEELDKELLWNLQLLSEITRVDGRKLLLYREQLVKILQRTLHLTCKQGYTLSCNLLHHLLRSTTLIYPTEYCSVPGGFDKPPSEYFPIKDWGKPGDLWNLGIQWHVPSSEEVSFAFYLLDSFLQPELVKLQHCGDGKLEMSRDDILQSLTIVHNCLIGSGNLLPPLKGEPVTNLVPSMVSLEETKLYTGLEYDLSRENHREVIATVIRKLLNHILDNSEDDTKSLFLIIKIIGDLLQFQGSHKHEFDSRWKSFNLVKKSMENRLHGKKQHIRALLIDRVMLQHELRTLTVEGCEYKKIHQDMIRDLLRLSTSSYSQVRNKAQQTFFAALGAYNFCCRDIIPLVLEFLRPDRQGVTQQQFKGALYCLLGNHSGVCLANLHDWDCIVQTWPAIVSSGLSQAMSLEKPSIVRLFDDLAEKIHRQYETIGLDFTIPKSCVEIAELLQQSKNPSINQILLSPEKIKEGIKRQQEKNADALRNYENLVDTLLDGVEQRNLPWKFEHIGIGLLSLLLRDDRVLPLRAIRFFVENLNHDAIVVRKMAISAVAGILKQLKRTHKKLTINPCEISGCPKPTQIIAGDRPDNHWLHYDSKTIPRTKKEWESSCFVEKTHWGYYTWPKNMVVYAGVEEQPKLGRSREDMTEAEQIIFDHFSDPKFVEQLITFLSLEDRKGKDKFNPRRFCLFKGIFRNFDDAFLPVLKPHLEHLVADSHESTQRCVAEIIAGLIRGSKHWTFEKVEKLWELLCPLLRTALSNITVETYNDWGACIATSCESRDPRKLHWLFELLLESPLSGEGGSFVDACRLYVLQGGLAQQEWRVPELLHRLLKYLEPKLTQVYKNVRERIGSVLTYIFMIDVSLPNTTPTISPHVPEFTARILEKLKPLMDVDEEIQNHVMEENGIGEEDERTQGIKLLKTILKWLMASAGRSFSTAVTEQLQLLPLFFKIAPVENDNSYDELKRDAKLCLSLMSQGLLYPHQVPLVLQVLKQTARSSSWHARYTVLTYLQTMVFYNLFIFLNNEDAVKDIRWLVISLLEDEQLEVKFKL

SEQ ID NO: 899870 - protein, 1333 aa, Homo sapiens
MREFGVGVVGVRCVEMDCRKQAAALRGAARRRVRLAAGPDQMQPGPGRAAPRACGPGASSGPGKLSTYIRLYGRKFSKEDHVLFIKLLYELVSIPKLEISMMQGFARLLINLLKKKELLSRADLELPWRPLYDMVERILYSKTEHLGLNWFPNSVENILKTLVKSCRPYFPADATAEMLEEWRPLMCPFDVTMQKAITYFEIFLPTSLPPELHHKGFKLWFDELIGLWVSVQNLPQWEGQLVNLFARLATDNIGYIDWDPYVPKIFTRILRSLNLPVGSSQVLVPRFLTNAYDIGHAVIWITAMMGGPSKLVQKHLAGLFNSITSFYHPSNNGRWLNKLMKLLQRLPNSVVRRLHRERYKKPSWLTPVPDSHKLTDQDVTDFVQCIIQPVLLAMFSKTGSLEAAQALQNLALMRPELVIPPVLERTYPALETLTEPHQLTATLSCVIGVARSLVSGGRWFPEGPTHMLPLLMRALPGVDPNDFSKCMITFQFIATFSTLVPLVDCSSVLQERNDLTEVERELCSATAEFEDFVLQFMDRCFGLIESSTLEQTREETETEKMTHLESLVELGLSSTFSTILTQCSKEIFMVALQKVFNFSTSHIFETRVAGRMVADMCRAAVKCCPEESLKLFVPHCCSVITQLTMNDDVLNDEELDKELLWNLQLLSEITRVDGRKLLLYREQLVKILQRTLHLTCKQGYTLSCNLLHHLLRSTTLIYPTEYCSVPGGFDKPPSEYFPIKDWGKPGDLWNLGIQWHVPSSEEVSFAFYLLDSFLQPELVKLQHCGDGKLEMSRDDILQSLTIVHNCLIGSGNLLPPLKGEPVTNLVPSMVSLEETKLYTGLEYDLSRENHREVIATVIRKLLNHILDNSEDDTKSLFLIIKIIGDLLQFQGSHKHEFDSRWKSFNLVKKSMENRLHGKKQHIRALLIDRVMLQHELRTLTVEGCEYKKIHQDMIRDLLRLSTSSYSQVRNKAQQTFFAALGAYNFCCRDIIPLVLEFLRPDRQGVTQQQFKGALYCLLGNHSGVCLANLHDWDCIVQTWPAIVSSGLSQAMSLEKPSIVRLFDDLAEKIHRQYETIGLDFTIPKSCVEIAELLQQSKNPSINQILLSPEKIKEGIKRQQEKNADALRNYENLVDTLLDGVEQRNLPWKFEHIGIGLLSLLLRDDRVLPLRAIRFFVENLNHDAIVVRKMAISAVAGILKQLKRTHKKLTINPCEISGCPKPTQIIAGDRPDNHWLHYDSKTIPRTKKEWESSCFVEKTHWGYYTWPKNMVVYAGVEEQPKLGRSREDMTEVSIPFHHGSNASCFGPLIYLNLTSVLLLLFFLNTICVFLYSTA

SEQ ID NO: 899871 - protein, 163 aa, Homo sapiens
MVAFVQRAGPLALSSLELSRAGDPSGRDRACEVLNAVLPATFLRDFPGLYHPSTSLPRESRRAPGAGRASRAGPAGLRPAEGDRLQQAAALRGAARRRVRLAAGPDQMQPGPGRAAPRAVARGPLLDQETLHVSVPGPAGRAGGKGSVRGVGDGCSLSRGLDP

SEQ ID NO: 899872 - protein, 67 aa, Homo sapiens
QVVAFLLISPHVPEFTARILEKLKPLMDVDEEIQNHVMEENGIGEEDERTQGIKLLKTSEWIKLVEP

SEQ ID NO: 899873 - protein, 2046 aa, Homo sapiens
MVAFVQRAGPLALSSLELSRAGDPSGRDRACEVLNAVLPATFLRDFPGLYHPSTSLPRESRRAPGAGRASRAGPAGLRPAEGDRLQQAAALRGAARRRVRLAAGPDQMQPGPGRAAPRAVARGPLLDQETLHVKCARACGPGRGERLSERCRGWLLFVQRAGPLALSSLELSPSGDPRVVTEPVKYSSRPPCHFPTGLPGSLPSLYVLPRGSWRARGTEREFGVGVVGVRCVEMDAVNKLLPYAERLDAESDLQLAQIKCNLGRAVQLQELWPGGLFWTRKLSTYIRLYGRKFSKEDHVLFIKLLYELVSIPKLEISMMQGFARLLINLLKKKELLSRADLELPWRPLYDMVERILYSKTEHLGLNWFPNSVENILKTLVKSCRPYFPADATAEMLEEWRPLMCPFDVTMQKAITYFEIFLPTSLPPELHHKGFKLWFDELIGLWVSVQNLPQWEGQLVNLFARLATDNIGYIDWDPYVPKIFTRILRSLNLPVGSSQVLVPRFLTNAYDIGHAVIWITAMMGGPSKLVQKHLAGLFNSITSFYHPSNNGRWLNKLMKLLQRLPNSVVRRLHRERYKKPSWLTPVPDSHKLTDQDVTDFVQCIIQPVLLAMFSKTGSLEAAQALQNLALMRPELVIPPVLERTYPALETLTEPHQLTATLSCVIGVARSLVSGGRWFPEGPTHMLPLLMRALPGVDPNDFSKCMITFQFIATFSTLVPLVDCSSVLQERNDLTEVERELCSATAEFEDFVLQFMDRCFGLIESSTLEQTREETETEKMTHLESLVELGLSSTFSTILTQCSKEIFMVALQKVFNFSTSHIFETRVAGRMVADMCRAAVKCCPEESLKLFVPHCCSVITQLTMNDDVLNDEELDKELLWNLQLLSEITRVDGRKLLLYREQLVKILQRTLHLTCKQGYTLSCNLLHHLLRSTTLIYPTEYCSVPGGFDKPPSEYFPIKDWGKPGDLWNLGIQWHVPSSEEVSFAFYLLDSFLQPELVKLQHCGDGKLEMSRDDILQSLTIVHNCLIGSGNLLPPLKGEPVTNLVPSMVSLEETKLYTGLEYDLSRENHREVIATVIRKLLNHILDNSEDDTKSLFLIIKIIGDLLQFQGSHKHEFDSRWKSFNLVKKSMENRLHGKKQHIRALLIDRVMLQHELRTLTVEGCEYKKIHQDMIRDLLRLSTSSYSQVRNKAQQTFFAALGAYNFCCRDIIPLVLEFLRPDRQGVTQQQFKGALYCLLGNHSGVCLANLHDWDCIVQTWPAIVSSGLSQAMSLEKPSIVRLFDDLAEKIHRQYETIGLDFTIPKSCVEIAELLQQSKNPSINQILLSPEKIKEGIKRQQEKNADALRNYENLVDTLLDGVEQRNLPWKFEHIGIGLLSLLLRDDRVLPLRAIRFFVENLNHDAIVVRKMAISAVAGILKQLKRTHKKLTINPCEISGCPKPTQIIAGDRPDNHWLHYDSKTIPRTKKEWESSCFVEKTHWGYYTWPKNMVVYAGVEEQPKLGRSREDMTEAEQIIFDHFSDPKFVEQLITFLSLEDRKGKDKFNPRRFCLFKGIFRNFDDAFLPVLKPHLEHLVADSHESTQRCVAEIIAGLIRGSKHWTFEKVEKLWELLCPLLRTALSNITVETYNDWGACIATSCESRDPRKLHWLFELLLESPLSGEGGSFVDACRLYVLQGGLAQQEWRVPELLHRLLKYLEPKLTQVYKNVRERIGSVLTYIFMIDVSLPNTTPTISPHVPEFTARILEKLKPLMDVDEEIQNHVMEENGIGEEDERTQGIKLLKTILKWLMASAGRSFSTAVTEQLQLLPLFFKIAPVENDNSYDELKRDAKLCLSLMSQGLLYPHQVPLVLQVLKQTARSSSWHARYTVLTYLQTMVFYNLFIFLNNEDAVKDIRWLVISLLEDEQLEVREMAATTLSGLLQCNFLTMDSPMQIHFEQLCKTKLPKKRKRDPGSVGDTIPSAELVKRHAGVLGLGACVLSSPYDVPTWMPQLLMNLSAHLNDPQPIEMTVKKTLSNFRRTHHDNWQEHKQQFTDDQLLVLTDLLVSPCYYA

SEQ ID NO: 899874 - protein, 1459 aa, Homo sapiens
MREFGVGVVGVRCVEMDCRKQAAALRGAARRRVRLAAGPDQMQPGPGRAAPRACGPGASSGPGKLSTYIRLYGRKFSKEDHVLFIKLLYELVSIPKLEISMMQGFARLLINLLKKKELLSRADLELPWRPLYDMVERILYSKTEHLGLNWFPNSVENILKTLVKSCRPYFPADATAEMLEEWRPLMCPFDVTMQKAITYFEIFLPTSLPPELHHKGFKLWFDELIGLWVSVQNLPQWEGQLVNLFARLATDNIGYIDWDPYVPKIFTRILRSLNLPVGSSQVLVPRFLTNAYDIGHAVIWITAMMGGPSKLVQKHLAGLFNSITSFYHPSNNGRWLNKLMKLLQRLPNSVVRRLHRERYKKPSWLTPVPDSHKLTDQDVTDFVQCIIQPVLLAMFSKTGSLEAAQALQNLALMRPELVIPPVLERTYPALETLTEPHQLTATLSCVIGVARSLVSGGRWFPEGPTHMLPLLMRALPGVDPNDFSKCMITFQFIATFSTLVPLVDCSSVLQERNDLTEVERELCSATAEFEDFVLQFMDRCFGLIESSTLEQTREETETEKMTHLESLVELGLSSTFSTILTQCSKEIFMVALQKVFNFSTSHIFETRVAGRMVADMCRAAVKCCPEESLKLFVPHCCSVITQLTMNDDVLNDEELDKELLWNLQLLSEITRVDGRKLLLYREQLVKILQRTLHLTCKQGYTLSCNLLHHLLRSTTLIYPTEYCSVPGGFDKPPSEYFPIKDWGKPGDLWNLGIQWHVPSSEEVSFAFYLLDSFLQPELVKLQHCGDGKLEMSRDDILQSLTIVHNCLIGSGNLLPPLKGEPVTNLVPSMVSLEETKLYTGLEYDLSRENHREVIATVIRKLLNHILDNSEDDTKSLFLIIKIIGDLLQFQGSHKHEFDSRWKSFNLVKKSMENRLHGKKQHIRALLIDRVMLQHELRTLTVEGCEYKKIHQDMIRDLLRLSTSSYSQVRNKAQQTFFAALGAYNFCCRDIIPLVLEFLRPDRQGVTQQQFKGALYCLLGNHSGVCLANLHDWDCIVQTWPAIVSSGLSQAMSLEKPSIVRLFDDLAEKIHRQYETIGLDFTIPKSCVEIAELLQQSKNPSINQILLSPEKIKEGIKRQQEKNADALRNYENLVDTLLDGVEQRNLPWKFEHIGIGLLSLLLRDDRVLPLRAIRFFVENLNHDAIVVRKMAISAVAGILKQLKRTHKKLTINPCEISGCPKPTQIIAGDRPDNHWLHYDSKTIPRTKKEWESSCFVEKTHWGYYTWPKNMVVYAGVEEQPKLGRSREDMTEAEQIIFDHFSDPKFVEQLITFLSLEDRKGKDKFNPRRFCLFKGIFRNFDDAFLPVLKPHLEHLVADSHESTQRCVAEIIAGLIRGSKHWTFEKVEKLWELLCPLLRTALSNITVETYNDWGACIATSCESRDPRKLHWLFELLLESPLSGEGGSFVDAWWPCPARMESA

SEQ ID NO: 899875 - protein, 1777 aa, Homo sapiens
MREFGVGVVGVRCVEMDCRKQAAALRGAARRRVRLAAGPDQMQPGPGRAAPRACGPGASSGPGKLSTYIRLYGRKFSKEDHVLFIKLLYELVSIPKLEISMMQGFARLLINLLKKKELLSRADLELPWRPLYDMVERILYSKTEHLGLNWFPNSVENILKTLVKSCRPYFPADATAEMLEEWRPLMCPFDVTMQKAITYFEIFLPTSLPPELHHKGFKLWFDELIGLWVSVQNLPQWEGQLVNLFARLATDNIGYIDWDPYVPKIFTRILRSLNLPVGSSQVLVPRFLTNAYDIGHAVIWITAMMGGPSKLVQKHLAGLFNSITSFYHPSNNGRWLNKLMKLLQRLPNSVVRRLHRERYKKPSWLTPVPDSHKLTDQDVTDFVQCIIQPVLLAMFSKTGSLEAAQALQNLALMRPELVIPPVLERTYPALETLTEPHQLTATLSCVIGVARSLVSGGRWFPEGPTHMLPLLMRALPGVDPNDFSKCMITFQFIATFSTLVPLVDCSSVLQERNDLTEVERELCSATAEFEDFVLQFMDRCFGLIESSTLEQTREETETEKMTHLESLVELGLSSTFSTILTQCSKEIFMVALQKVFNFSTSHIFETRVAGRMVADMCRAAVKCCPEESLKLFVPHCCSVITQLTMNDDVLNDEELDKELLWNLQLLSEITRVDGRKLLLYREQLVKILQRTLHLTCKQGYTLSCNLLHHLLRSTTLIYPTEYCSVPGGFDKPPSEYFPIKDWGKPGDLWNLGIQWHVPSSEEVSFAFYLLDSFLQPELVKLQHCGDGKLEMSRDDILQSLTIVHNCLIGSGNLLPPLKGEPVTNLVPSMVSLEETKLYTGLEYDLSRENHREVIATVIRKLLNHILDNSEDDTKSLFLIIKIIGDLLQFQGSHKHEFDSRWKSFNLVKKSMENRLHGKKQHIRALLIDRVMLQHELRTLTVEGCEYKKIHQDMIRDLLRLSTSSYSQVRNKAQQTFFAALGAYNFCCRDIIPLVLEFLRPDRQGVTQQQFKGALYCLLGNHSGVCLANLHDWDCIVQTWPAIVSSGLSQAMSLEKPSIVRLFDDLAEKIHRQYETIGLDFTIPKSCVEIAELLQQSKNPSINQILLSPEKIKEGIKRQQEKNADALRNYENLVDTLLDGVEQRNLPWKFEHIGIGLLSLLLRDDRVLPLRAIRFFVENLNHDAIVVRKMAISAVAGILKQLKRTHKKLTINPCEISGCPKPTQIIAGDRPDNHWLHYDSKTIPRTKKEWESSCFVEKTHWGYYTWPKNMVVYAGVEEQPKLGRSREDMTEAEQIIFDHFSDPKFVEQLITFLSLEDRKGKDKFNPRRFCLFKGIFRNFDDAFLPVLKPHLEHLVADSHESTQRCVAEIIAGLIRGSKHWTFEKVEKLWELLCPLLRTALSNITVETYNDWGACIATSCESRDPRKLHWLFELLLESPLSGEGGSFVDACRLYVLQGGLAQQEWRVPELLHRLLKYLEPKLTQVYKNVRERIGSVLTYIFMIDVSLPNTTPTISPHVPEFTARILEKLKPLMDVDEEIQNHVMEENGIGEEDERTQGIKLLKTILKWLMASAGRSFSTAVTEQLQLLPLFFKIAPVENDNSYDELKRDAKLCLSLMSQGLLYPHQVPLVLQVLKQVREMAATTLSGLLQCNFLTMDSPMQIHFEQLCKTKLPKKRKRDPGSVGDTIPSAELVKRHAGVLGLGACVLSSPYDVPTWMPQLLMNLSAHLNDPQPIEMTVKKTLSNFRRTHHDNWQEHKQQFTDDQLLVLTDLLVSPCYYA

SEQ ID NO: 899876 - protein, 1811 aa, Homo sapiens
MREFGVGVVGVRCVEMDCRKQAAALRGAARRRVRLAAGPDQMQPGPGRAAPRACGPGASSGPGKLSTYIRLYGRKFSKEDHVLFIKLLYELVSIPKLEISMMQGFARLLINLLKKKELLSRADLELPWRPLYDMVERILYSKTEHLGLNWFPNSVENILKTLVKSCRPYFPADATAEMLEEWRPLMCPFDVTMQKAITYFEIFLPTSLPPELHHKGFKLWFDELIGLWVSVQNLPQWEGQLVNLFARLATDNIGYIDWDPYVPKIFTRILRSLNLPVGSSQVLVPRFLTNAYDIGHAVIWITAMMGGPSKLVQKHLAGLFNSITSFYHPSNNGRWLNKLMKLLQRLPNSVVRRLHRERYKKPSWLTPVPDSHKLTDQDVTDFVQCIIQPVLLAMFSKTGSLEAAQALQNLALMRPELVIPPVLERTYPALETLTEPHQLTATLSCVIGVARSLVSGGRWFPEGPTHMLPLLMRALPGVDPNDFSKCMITFQFIATFSTLVPLVDCSSVLQERNDLTEVERELCSATAEFEDFVLQFMDRCFGLIESSTLEQTREETETEKMTHLESLVELGLSSTFSTILTQCSKEIFMVALQKVFNFSTSHIFETRVAGRMVADMCRAAVKCCPEESLKLFVPHCCSVITQLTMNDDVLNDEELDKELLWNLQLLSEITRVDGRKLLLYREQLVKILQRTLHLTCKQGYTLSCNLLHHLLRSTTLIYPTEYCSVPGGFDKPPSEYFPIKDWGKPGDLWNLGIQWHVPSSEEVSFAFYLLDSFLQPELVKLQHCGDGKLEMSRDDILQSLTIVHNCLIGSGNLLPPLKGEPVTNLVPSMVSLEETKLYTGLEYDLSRENHREVIATVIRKLLNHILDNSEDDTKSLFLIIKIIGDLLQFQGSHKHEFDSRWKSFNLVKKSMENRLHGKKQHIRALLIDRVMLQHELRTLTVEGCEYKKIHQDMIRDLLRLSTSSYSQVRNKAQQTFFAALGAYNFCCRDIIPLVLEFLRPDRQGVTQQQFKGALYCLLGNHSGVCLANLHDWDCIVQTWPAIVSSGLSQAMSLEKPSIVRLFDDLAEKIHRQYETIGLDFTIPKSCVEIAELLQQSKNPSINQILLSPEKIKEGIKRQQEKNADALRNYENLVDTLLDGVEQRNLPWKFEHIGIGLLSLLLRDDRVLPLRAIRFFVENLNHDAIVVRKMAISAVAGILKQLKRTHKKLTINPCEISGCPKPTQIIAGDRPDNHWLHYDSKTIPRTKKEWESSCFVEKTHWGYYTWPKNMVVYAGVEEQPKLGRSREDMTEAEQIIFDHFSDPKFVEQLITFLSLEDRKGKDKFNPRRFCLFKGIFRNFDDAFLPVLKPHLEHLVADSHESTQRCVAEIIAGLIRGSKHWTFEKVEKLWELLCPLLRTALSNITVETYNDWGACIATSCESRDPRKLHWLFELLLESPLSGEGGSFVDACRLYVLQGGLAQQEWRVPELLHRLLKYLEPKLTQVYKNVRERIGSVLTYIFMIDVSLPNTTPTISPHVPEFTARILEKLKPLMDVDEEIQNHVMEENGIGEEDERTQGIKLLKTILKWLMASAGRSFSTAVTEQLQLLPLFFKIAPVENDNSYDELKRDAKLCLSLMSQGLLYPHQVPLVLQVLKQTARSSSWHARYTVLTYLQTMVFYNLFIFLNNEDAVKDIRWLVISLLEDEQLEVREMAATTLSGLLQCNFLTMDSPMQIHFEQLCKTKLQLVKRHAGVLGLGACVLSSPYDVPTWMPQLLMNLSAHLNDPQPIEMTVKKTLSNFRRTHHDNWQEHKQQFTDDQLLVLTDLLVSPCYYA

SEQ ID NO: 899877 - protein, 200 aa, Homo sapiens
KVYTLNEDRQWDDRGTGHVSSTYVEELKGMSLLVRAESDGSLLLESKINPNTAYQKQVREMAATTLSGLLQCNFLTMDSPMQIHFEQLCKTKLPKKRKRDPGSVGDTIPSAELVKRHAGVLGLGACVLSSPYDVPTWMPQLLMNLSAHLNDPQPIEMTVKKTLSNFRRTHHDNWQEHKQQFTDDQLLVLTDLLVSPCYYA

SEQ ID NO: 899878 - protein, 1712 aa, Homo sapiens
MREFGVGVVGVRCVEMDCRKQAAALRGAARRRVRLAAGPDQMQPGPGRAAPRACGPGASSGPGKLSTYIRLYGRKFSKEDHVLFIKLLYELVSIPKLEISMMQGFARLLINLLKKKELLSRADLELPWRPLYDMVERILYSKTEHLGLNWFPNSVENILKTLVKSCRPYFPADATAEMLEEWRPLMCPFDVTMQKAITYFEIFLPTSLPPELHHKGFKLWFDELIGLWVSVQNLPQWEGQLVNLFARLATDNIGYIDWDPYVPKIFTRILRSLNLPVGSSQVLVPRFLTNAYDIGHAVIWITAMMGGPSKLVQKHLAGLFNSITSFYHPSNNGRWLNKLMKLLQRLPNSVVRRLHRERYKKPSWLTPVPDSHKLTDQDVTDFVQCIIQPVLLAMFSKTGSLEAAQALQNLALMRPELVIPPVLERTYPALETLTEPHQLTATLSCVIGVARSLVSGGRWFPEGPTHMLPLLMRALPGVDPNDFSKCMITFQFIATFSTLVPLVDCSSVLQERNDLTEVERELCSATAEFEDFVLQFMDRCFGLIESSTLEQTREETETEKMTHLESLVELGLSSTFSTILTQCSKEIFMVALQKVFNFSTSHIFETRVAGRMVADMCRAAVKCCPEESLKLFVPHCCSVITQLTMNDDVLNDEELDKELLWNLQLLSEITRVDGRKLLLYREQLVKILQRTLHLTCKQGYTLSCNLLHHLLRSTTLIYPTEYCSVPGGFDKPPSEYFPIKDWGKPGDLWNLGIQWHVPSSEEVSFAFYLLDSFLQPELVKLQHCGDGKLEMSRDDILQSLTIVHNCLIGSGNLLPPLKGEPVTNLVPSMVSLEETKLYTGLEYDLSRENHREVIATVIRKLLNHILDNSEDDTKSLFLIIKIIGDLLQFQGSHKHEFDSRWKSFNLVKKSMENRLHGKKQHIRALLIDRVMLQHELRTLTVEGCEYKKIHQDMIRDLLRLSTSSYSQVRNKAQQTFFAALGAYNFCCRDIIPLVLEFLRPDRQGVTQQQFKGALYCLLGNHSGVCLANLHDWDCIVQTWPAIVSSGLSQAMSLEKPSIVRLFDDLAEKIHRQYETIGLDFTIPKSCVEIAELLQQSKNPSINQILLSPEKIKEGIKRQQEKNADALRNYENLVDTLLDGVEQRNLPWKFEHIGIGLLSLLLRDDRVLPLRAIRFFVENLNHDAIVVRKMAISAVAGILKQLKRTHKKLTINPCEISGCPKPTQIIAGDRPDNHWLHYDSKTIPRTKKEWESSCFVEKTHWGYYTWPKNMVVYAGVEEQPKLGRSREDMTEAEQIIFDHFSDPKFVEQLITFLSLEDRKGKDKFNPRRFCLFKGIFRNFDDAFLPVLKPHLEHLVADSHESTQRCVAEIIAGLIRGSKHWTFEKVEKLWELLCPLLRTALSNITVETYNDWGACIATSCESRDPRKLHWLFELLLESPLSGEGGSFVDACRLYVLQGGLAQQEWRVPELLHRLLKYLEPKLTQVYKNVRERIGSVLTYIFMIDVSLPNTTPTISPHVPEFTARILEKLKPLMDVDEEIQNHVMEENGIGEEDERTQGIKLLKTILKWLMASAGRSFSTAVTEQLQLLPLFFKIAPVENDNSYDELKRDAKLCLSLMSQGLLYPHQVPLVLQVLKQTARSSSWHARYTVLTYLQTMVFYNLFIFLNNEDAVKDIRWLVISLLEDEQLEKIYCRPGTEAYACNPSTLGGQGRRIA

SEQ ID NO: 899879 - protein, 919 aa, Homo sapiens
MREFGVGVVGVRCVEMDCRKQAAALRGAARRRVRLAAGPDQMQPGPGRAAPRACGPGASSGPGKLSTYIRLYGRKFSKEDHVLFIKLLYELVSIPKLEISMMQGFARLLINLLKKKELLSRADLELPWRPLYDMVERILYSKTEHLGLNWFPNSVENILKTLVKSCRPYFPADATAEMLEEWRPLMCPFDVTMQKAITYFEIFLPTSLPPELHHKGFKLWFDELIGLWVSVQNLPQWEGQLVNLFARLATDNIGYIDWDPYVPKIFTRILRSLNLPVGSSQVLVPRFLTNAYDIGHAVIWITAMMGGPSKLVQKHLAGLFNSITSFYHPSNNGRWLNKLMKLLQRLPNSVVRRLHRERYKKPSWLTPVPDSHKLTDQDVTDFVQCIIQPVLLAMFSKTGSLEAAQALQNLALMRPELVIPPVLERTYPALETLTEPHQLTATLSCVIGVARSLVSGGRWFPEGPTHMLPLLMRALPGVDPNDFSKCMITFQFIATFSTLVPLVDCSSVLQERNDLTEVERELCSATAEFEDFVLQFMDRCFGLIESSTLEQTREETETEKMTHLESLVELGLSSTFSTILTQCSKEIFMVALQKVFNFSTSHIFETRVAGRMVADMCRAAVKCCPEESLKLFVPHCCSVITQLTMNDDVLNDEELDKELLWNLQLLSEITRVDGRKLLLYREQLVKILQRTLHLTCKQGYTLSCNLLHHLLRSTTLIYPTEYCSVPGGFDKPPSEYFPIKDWGKPGDLWNLGIQWHVPSSEEVSFAFYLLDSFLQPELVKLQHCGDGKLEMSRDDILQSLTIVHNCLIGSGNLLPPLKGEPVTNLVPSMVSLEETKLYTGLEYDLSRENHREVIATVIRKLLNHILDNSEDDTKSLFLIIKIIGDLLQFQGSHKHEFDSRWKSFNLVKKSMENRVSIFT

SEQ ID NO: 899880 - protein, 325 aa, Homo sapiens
MAASCVLLHTGQKMPLIGLGTWKSEPGQVKAAVKYALSVGYRHIDCAAIYGNEPEIGEALKEDVGPGKAVPREELFVTSKLWNTKHHPEDVEPALRKTLADLQLEYLDLYLMHWPYAFERGDNPFPKNADGTICYDSTHYKETWKALEALVAKGLVQALGLSNFNSRQIDDILSVASVRPAVLQVECHPYLAQNELIAHCQARGLEVTAYSPLGSSDRAWRDPDEPVLLEEPVVLALAEKYGRSPAQILLRWQVQRKVICIPKSITPSRILQNIKVFDFTFSPEEMKQLNALNKNWRYIVPMLTVDGKRVPRDAGHPLYPFNDPY

SEQ ID NO: 899881 - protein, 325 aa, Homo sapiens; identical to SEQ ID NO: 899880

SEQ ID NO: 899882 - protein, 325 aa, Homo sapiens; identical to SEQ ID NO: 899880

SEQ ID NO: 899883 - protein, 325 aa, Homo sapiens; identical to SEQ ID NO: 899880

SEQ ID NO: 899884 - protein, 325 aa, Homo sapiens; identical to SEQ ID NO: 899880

SEQ ID NO: 899885 - protein, 283 aa, Homo sapiens
MAASCVLLHTGQKMPLIGLGTWKSEPGQVKAAVKYALSVGYRHIDCAAIYGNEPEIGEALKEDVGPGKAVPREELFVTSKLWNTKHHPEDVEPALRKTLADLQLEYLDLYLMHWPYAFERGDNPFPKNADGTICYDSTHYKETWKALEALVAKGLVQALGLSNFNSRQIDDILSVASVRPAVLQVECHPYLAQNELIAHCQARGLEVTAYSPLGSSDRAWRDPDEPVLLEEPVVLALAEKYGRSPAQILLRYGAVLGRGPWVGRQGLRDFLFQCLGEAEDLAL

SEQ ID NO: 899886 - protein, 214 aa, Homo sapiens
MHWPYAFERGDNPFPKNADGTICYDSTHYKETWKALEALVAKGLVQALGLSNFNSRQIDDILSVASVRPAVLQVECHPYLAQNELIAHCQARGLEVTAYSPLGSSDRAWRDPDEPVLLEEPVVLALAEKYGRSPAQILLRWQVQRKVICIPKSITPSRILQNIKVFDFTFSPEEMKQLNALNKNWRYIVPMLTVDGKRVPRDAGHPLYPFNDPY

SEQ ID NO: 899887 - protein, 210 aa, Homo sapiens
MAASCVLLHTGQKMPLIGLGTWKSEPGQVKAAVKYALSVGYRHIDCAAIYGNEPEIGEALKEDVGPGKAVPREELFVTSKLWNTKHHPEDVEPALRKTLADLQLEYLDLYLMHWPYAFERGDNPFPKNADGTICYDSTHYKETWKALEALVAKGLVQALGLSNFNSRQIDDILSVASVRPAVLQVAGPAESDLHPQKYHSFSNPSEHQGV

SEQ ID NO: 899888 - protein, 302 aa, Homo sapiens
MAASCVLLHTGQKMPLIGLGTWKSEPGQVKAAVKYALSVGYRHIDCAAIYGNEPEIGEALKEDVGPGKAVPREELFVTSKLWNTKHHPEDVEPALRKTLADLQLEYLDLYLMHWPYAFETWKALEALVAKGLVQALGLSNFNSRQIDDILSVASVRPAVLQVECHPYLAQNELIAHCQARGLEVTAYSPLGSSDRAWRDPDEPVLLEEPVVLALAEKYGRSPAQILLRWQVQRKVICIPKSITPSRILQNIKVFDFTFSPEEMKQLNALNKNWRYIVPMLTVDGKRVPRDAGHPLYPFNDPY

SEQ ID NO: 899889 - protein, 214 aa, Homo sapiens; identical to SEQ ID NO: 899886

SEQ ID NO: 899890 - protein, 210 aa, Homo sapiens; identical to SEQ ID NO: 899887

SEQ ID NO: 899891 - protein, 143 aa, Homo sapiens
MPLSGETTPSPRMLMGLYATTPPTTRRLGRLWRHWWLRGWCRRWACPTSTVGRLMTYSVWPPCVQLSCRWQVQRKVICIPKSITPSRILQNIKVFDFTFSPEEMKQLNALNKNWRYIVPMLTVDGKRVPRDAGHPLYPFNDPY

SEQ ID NO: 899892 - protein, 122 aa, Homo sapiens
MHWPYAFERGDNPFPKNADGTICYDSTHYKETWKALEALVAKGLVQALGLSNFNSRQIDDILSVASVRPAVLQVECHPYLAQNELIAHCQARGLEVTAYSPLGSSLIRITPCSRRGREFSSS

SEQ ID NO: 899893 - protein, 129 aa, Homo sapiens
MGLYATTPPTTRRLGRLWRHWWLRGWCRRWACPTSTVGRLMTYSVWPPCVQLSCRWQVQRKVICIPKSITPSRILQNIKVFDFTFSPEEMKQLNALNKNWRYIVPMLTVDGKRVPRDAGHPLYPFNDPY

SEQ ID NO: 899894 - protein, 127 aa, Homo sapiens
GWSRHACLGWAKQAGCHHFMVMGYSLAQVECHPYLAQNELIAHCQARGLEVTAYSPLGSSDRAWRDPDEPVLLEEPVVLALAEKYGRSPAQILLRYGAVLGRGPWVGRQGLRDFLFQCLGEAEDLAL

SEQ ID NO: 899895 - protein, 325 aa, Homo sapiens; identical to SEQ ID NO: 899880

SEQ ID NO: 899896 - protein, 325 aa, Homo sapiens; identical to SEQ ID NO: 899880

SEQ ID NO: 899897 - protein, 325 aa, Homo sapiens; identical to SEQ ID NO: 899880

SEQ ID NO: 899898 - protein, 325 aa, Homo sapiens; identical to SEQ ID NO: 899880

SEQ ID NO: 899899 - protein, 233 aa, Homo sapiens
MAASCVLLHTGQKMPLIGLGTWKSEPGQVKAAVKYALSVGYRHIDCAAIYGNEPEIGEALKEDVGPGKAVPREELFVTSKLWNTKHHPEDVEPALRKTLADLQLEYLDLYLMHWPYAFERGDNPFPKNADGTICYDSTHYKETWKALEALVAKGLVQALGLSNFNSRQIDDILSVASVRPAVLQVECHPYLAQNELIAHCQARGLEVTAYSPLGSSLIRITPCSRRGREFSSS

SEQ ID NO: 899900 - protein, 214 aa, Homo sapiens; identical to SEQ ID NO: 899886

SEQ ID NO: 899901 - protein, 214 aa, Homo sapiens; identical to SEQ ID NO: 899886

SEQ ID NO: 899902 - protein, 164 aa, Homo sapiens
MAASCVLLHTGQKMPLIGLGTWKSEPGQVKAAVKYALSVGYRHIDCAAIYGNEPEIGEALKEDVGPGKAVPREELFVTSKLWNTKHHPEDVEPALRKTLADLQLEYLDLYLMHWPYAFERGDNPFPKNADGTICYDSTHYKETWKALEALVAKGLVQGGRSSGK

SEQ ID NO: 899903 - protein, 119 aa, Homo sapiens
MAASCVLLHTGQKMPLIGLGTWKSEPGQVKAAVKYALSVGYRHIDCAAIYGNEPEIGEALKEDVGPGKAVPREELFVTSKLWNTKHHPEDVEPALRKTLADLQLEYLDLYLMHWPYAFE

SEQ ID NO: 899904 - protein, 129 aa, Homo sapiens
AAAYYYYYCSEFKLLTMYGDDRAWRDPDEPVLLEEPVVLALAEKYGRSPAQILLRWQVQRKVICIPKSITPSRILQNIKVFDFTFSPEEMKQLNALNKNWRYIVPMLTVDGKRVPRDAGHPLYPFNDPY

SEQ ID NO: 899905 - protein, 99 aa, Homo sapiens
PAKGEAGPAPCTAHVASATCLIVPRSSPNPRCGVSDQVPASSTSRIQRWRRYYLPALFSIPFRSFLGRRRRRSTLRVILYARPLPLPPGGTSPSPPDLS

SEQ ID NO: 899906 - protein, 99 aa, Homo sapiens; identical to SEQ ID NO: 899905

SEQ ID NO: 899907 - protein, 443 aa, Homo sapiens
MRRQVMAALVVSGAAEQGGRDGPGRGRAPRGRVANQIPPEILKNPQLQAAIRVLPSNYNFEIPKTIWRIQQAQAKKVALQMPEGLLLFACTIVDILERFTEAEVMVMGDVTYGACCVDDFTARALGADFLVHYGHSCLIPMDTSAQDFRVLYVFVDIRIDTTHLLDSLRLTFPPATALALVSTIQFVSTLQAAAQELKAEYRVSVPQCKPLSPGEILGCTSPRLSKEVEAVVYLGDGRFHLESVMIANPNVPAYRYDPYSKVLSREHYDHQRMQAARQEAIATARSAKSWGLILGTLGRQGSPKILEHLESRLRALGLSFVRLLLSEIFPSKLSLLPEVDVWVQVACPRLSIDWGTAFPKPLLTPYEAAVALRDISWQQPYPMDFYAGSSLGPWTVNHGQDRRPHAPGRPARGKVQEGSARPPSAVACEDCSCRDEKVAPLAP

SEQ ID NO: 899908 - protein, 443 aa, Homo sapiens; identical to SEQ ID NO: 899907

SEQ ID NO: 899909 - protein, 443 aa, Homo sapiens; identical to SEQ ID NO: 899907

SEQ ID NO: 899910 - protein, 443 aa, Homo sapiens; identical to SEQ ID NO: 899907

SEQ ID NO: 899911 - protein, 443 aa, Homo sapiens; identical to SEQ ID NO: 899907

SEQ ID NO: 899912 - protein, 772 aa, Homo sapiens
MRRQVMAALVVSGAAEQGGRDGPGRGRAPRGRVANQIPPEILKNPQLQAAIRVLPSNYNFEIPKTIWRIQQAQAKKVALQMPEGLLLFACTIVDILERFTEAEVMVMGDVTYGACCVDDFTARALGADFLVHYGHSCLIPMDTSAQDFRVLYVFVDIRIDTTHLLDSLRLTFPPATALALAAAQELKAEYRVSVPQCKPLSPGEILGCTSPRLSKEVEAVVYLGDGRFHLESVMIANPNVPAYRYDPYSKVLSREHYDHQRMQAARQEAIATARSAKSWGLILGTLGRQGSPKILEHLESRLRALGLSFVRLLLSEIFPSKLSLLPEVDVWVQVACPRLSIDWGTAFPKPLLTPYEAAVALRDISWQQPYPMDFYAGSSLGPWTVNHGQDRRPHAPGRPARGKVGGGFQEGGETAPGHWPPPCDRDGKRTGAERRETQGRRSETLTKVCDLRCRRGPRVPLRPWLARTAAAGTRRWRRWLLDALPGLRYQPPLWVRPAFCRCHGNALALRGPPSGRCCRSVPPRALCFRSGKDRFRCFRRSLPGIMAAQRPLRVLCLAGFRQSERGFREKTGALRKALRGRAELVCLSGPHPVPDPPGPEGARSDFGSCPPEEQPRGWWFSEQEADVFSALEEPAVCRGLEESLGMVAQALNRLGPFDGLLGFSQGAALAALVCALGQAGDPRFPLPRFILLVSGFCPRGIGFKESILQRPLSLPSLHVFGDTDKVIPSQESVQLASQFPGAITLTHSGGHFIPAAAPQRQAYLKFLDQFAE

SEQ ID NO: 899913 - protein, 539 aa, Homo sapiens
MIANPNVPAYRYDPYSKVLSREHYDHQRMQAARQEAIATARSAKSWGLILGTLGRQGSPKILEHLESRLRALGLSFVRLLLSEIFPSKLSLLPEVDVWVQVACPRLSIDWGTAFPKPLLTPYEAAVALRDISWQQPYPMDFYAGSSLGPWTVNHGQDRRPHAPGRPARGKVGGGFQEGGETAPGHWPPPCDRDGKRTGAERRETQGRRSETLTKVCDLRCRRGPRVPLRPWLARTAAAGTRRWRRWLLDALPGLRYQPPLWVRPAFCRCHGNALALRGPPSGRCCRSVPPRALCFRSGKDRFRCFRRSLPGIMAAQRPLRVLCLAGFRQSERGFREKTGALRKALRGRAELVCLSGPHPVPDPPGPEGARSDFGSCPPEEQPRGWWFSEQEADVFSALEEPAVCRGLEESLGMVAQALNRLGPFDGLLGFSQGAALAALVCALGQAGDPRFPLPRFILLVSGFCPRGIGFKESILQRPLSLPSLHVFGDTDKVIPSQESVQLASQFPGAITLTHSGGHFIPAAAPQRQAYLKFLDQFAE

SEQ ID NO: 899914 - protein, 252 aa, Homo sapiens
  misc_feature (9)..(9): Xaa can be any naturally occurring amino acid
AGWYGPRLXSGKDRFRCFRRSLPGIMAAQRPLRVLCLAGFRQSERGFREKTGALRKALRGRAELVCLSGPHPVPDPPGPEGARSDFGSCPPEEQPRGWWFSEQEADVFSALEEPAVCRGLEESLGMVAQALNRLGPFDGLLGFSQGAALAALVCALGQAGDPRFPLPRFILLVSGFCPRGIGFKESILQRPLSLPSLHVFGDTDKVIPSQESVQLASQFPGAITLTHSGGHFIPAAAPQRQAYLKFLDQFAE

SEQ ID NO: 899915 - protein, 573 aa, Homo sapiens
MRRQVMAALVVSGAAEQGGRDGPGRGRAPRGRVANQIPPEILKNPQLQAAIRVLPSNYNFEIPKTIWRIQQAQAKKVALQMPEGLLLFACTIVDILERFTEAEVMVMGDVTYGACCVDDFTARALGADFLVHYGHSCLIPMDTSAQDFRVLYVFVDIRIDTTHLLDSLRLTFPPATALALVSTIQFVSTLQAAAQELKAEYRVSVPQCKPLSPGEILGCTSPRLSKEVEAVVYLGDGRFHLESVMIANPNVPAYRYDPYSKVLSREHYDHQRMQAARQEAIATARSAKSWGLILGTLGRQGSPKILEHLESRLRALGLSFVRLLLSEIFPSKLSLLPEVDVWVQVACPRLSIDWGTAFPKPLLTPYEAAVALRDISWQQPYPMDFYAGSSLGPWTVNHGQDRRPHAPGRPARGKVGGGFQEGGETAPGHWPPPCDRDGKRTGAERRETQGRRSETLTKVCDLRCRRGPRVPLRPWLARTAAAGTRRWRRWLLDALPGLSRRVCNWPANFPEPSPSPTLVATSFQQLHPSVRPTSSSWTSLQSERSRNVSAPTSSSSRGSLRHPCPPRTLHSLL

SEQ ID NO: 899916 - protein, 443 aa, Homo sapiens; identical to SEQ ID NO: 899907

SEQ ID NO: 899917 - protein, 228 aa, Homo sapiens
MRRQVMAALVVSGAAEQGGRDGPGRGRAPRGRVANQIPPEILKNPQLQAAIRVLPSNYNFEIPKTIWRIQQAQAKKVALQMPEGLLLFACTIVDILERFTEAEVMVMGDVTYGACCVDDFTARALGADFLVHYGHSCLSMVGPGHLDGGGAGREAGCTFIFPMAVPSCPAWRHKVPPGFWGGLCLPALQVDLSFGFGCLGNGALSQMQVFERLLVVEQAGPRPGDREV

SEQ ID NO: 899918 - protein, 132 aa, Homo sapiens
MRRQVMAALVVSGAAEQGGRDGPGRGRAPRGRVANQIPPEILKNPQLQAAIRVLPSNYNFEIPKTIWRIQQAQAKKVALQMPEGLLLFACTIVDILERFTEAEVMVMGDVTYGACCGSLVFHIGFCHLVIYV

SEQ ID NO: 899919 - protein, 443 aa, Homo sapiens; identical to SEQ ID NO: 899907

SEQ ID NO: 899920 - protein, 239 aa, Homo sapiens
QAVLVRIFRWQVMAALVVSGAAEQGGRDGPGRGRAPRGRVANQIPPEILKNPQLQAAIRVLPSNYNFEIPKTIWRIQQAQAKKVALQMPEGLLLFACTIVDILERFTEAEVMVMGDVTYGACCVDDFTARALGADFLVHYGHSCLIPMDTSAQDFRVLYVFVDIRIDTTHLLDSLRLTFPPATALALVSTIQFVSTLQAAAQELKAEYRVSVPQCKPLSPGEILGCTSPRLSKEVEAVV

SEQ ID NO: 899921 - protein, 450 aa, Homo sapiens
QAVLVRIFRWQVMAALVVSGAAEQGGRDGPGRGRAPRGRVANQIPPEILKNPQLQAAIRVLPSNYNFEIPKTIWRIQQAQAKKVALQMPEGLLLFACTIVDILERFTEAEVMVMGDVTYGACCVDDFTARALGADFLVHYGHSCLIPMDTSAQDFRVLYVFVDIRIDTTHLLDSLRLTFPPATALALVSTIQFVSTLQAAAQELKAEYRVSVPQCKPLSPGEILGCTSPRLSKEVEAVVYLGDGRFHLESVMIANPNVPAYRYDPYSKVLSREHYDHQRMQAARQEAIATARSAKSWGLILGTLGRQGSPKILEHLESRLRALGLSFVRLLLSEIFPSKLSLLPEVDVWVQVACPRLSIDWGTAFPKPLLTPYEAAVALRDISWQQPYPMDFYAGSSLGPWTVNHGQDRRPHAPGRPARGKVQEGSARPPSAVACEDCSCRDEKVAPLAP

SEQ ID NO: 899922 - protein, 443 aa, Homo sapiens; identical to SEQ ID NO: 899907

SEQ ID NO: 899923 - protein, 664 aa, Homo sapiens
MRRQVMAALVVSGAAEQGGRDGPGRGRAPRGRVANQIPPEILKNPQLQAAIRVLPSNYNFEIPKTIWRIQQAQAKKVALQMPEGLLLFACTIVDILERFTEAEVMVMGDVTYGACCVDDFTARALGADFLVHYGHSCLIPMDTSAQDFRVLYVFVDIRIDTTHLLDSLRLTFPPATALALVSTIQFVSTLQAAAQELKAEYRVSVPQCKPLSPGEILGCTSPRLSKEVEAVVYLGDGRFHLESVMIANPNVPAYRYDPYSKVLSREHYDHQRMQAARQEAIATARSAKSWGLILGTLGRQGSPKILEHLESRLRALGLSFVRLLLSEIFPSKLSLLPEVDVWVQVACPRLSIDWGTAFPKPLLTPYEAAVALRDISWQQPYPMDFYAGSSLGPWTVNHGQDRRPHAPGRPARGKVGGGFQEGGETAPGHWPPPCDRDGKRTGAERRETQGRRSETLPKSATSGAGGVRASPFGRGLRGLQLQGREGGAAGSLTRSRASGSCPPEEQPRGWWFSEQEADVFSALEEPAVCRGLEESLGMVAQALNRLGPFDGLLGFSQGAALAALVCALGQAGDPRFPLPRFILLVSGFCPRGIGFKESILQRPLSLPSLHVFGDTDKVIPSQESVQLASQFPGAITLTHSGGHFIPAAAPQRQAYLKFLDQFAE

SEQ ID NO: 899924 - protein, 401 aa, Homo sapiens
MDFYAGSSLGPWTVNHGQDRRPHAPGRPARGKVGGGFQEGGETAPGHWPPPCDRDGKRTGAERRETQGRRSETLTKVCDLRCRRGPRVPLRPWLARTAAAGTRRWRRWLLDALPGLRYQPPLWVRPAFCRCHGNALALRGPPSGRCCRSVPPRALCFRSGKDRFRCFRRSLPGIMAAQRPLRVLCLAGFRQSERGFREKTGALRKALRGRAELVCLSGPHPVPDPPGPEGARSDFGSCPPEEQPRGWWFSEQEADVFSALEEPAVCRGLEESLGMVAQALNRLGPFDGLLGFSQGAALAALVCALGQAGDPRFPLPRFILLVSGFCPRGIGFKESILQRPLSLPSLHVFGDTDKVIPSQESVQLASQFPGAITLTHSGGHFIPAAAPQRQAYLKFLDQFAE

SEQ ID NO: 899925 - protein, 443 aa, Homo sapiens; identical to SEQ ID NO: 899907

SEQ ID NO: 899926 - protein, 443 aa, Homo sapiens; identical to SEQ ID NO: 899907

SEQ ID NO: 899927 - protein, 232 aa, Homo sapiens [sequence omitted]

SEQ ID NO: 899928 - protein, 1544 aa, Homo sapiens
MSGTQSTITDRFPLKKPIRHGSILNRESPTDKKQKVERIASHDFDPTDSSSKKTKSSSEESRSEIYGLVQRCVIIQKDDNGFGLTVSGDNPVFVQSVKEDGAAMRAGVQTGDRIIKVNGTLVTHSNHLEVVKLIKSGSYVALTVQGRPPGSPQIPLADSEVEPSVIGHMSPIMTSPHSPGASGNMERITSPVLMGEENNVVHNQKVEILRKMLQKEQERLQLLQEDYNRTPAQRLLKEIQEAKKHIPQLQEQLSKATGSAQDGAVVTPSRPLGDTLTVSEAETDPGDVLGRTDCSSGDASRPSSDNADSPKSGPKERIYLEENPEKSETIQDTDTQSLVGSPSTRIAPHIIGAEDDDFGTEHEQINGQCSCFQSIELLKSRPAHLAVFLHHVVSQFDPATLLCYLYSDLYKHTNSKETRRIFLEFHQFFLDRSAHLKVSVPDEMSADLEKRRPELIPEDLHRHYIQTMQERVHPEVQRHLEDFRQKRSMGLTLAESELTKLDAERDKDRLTLEKERTCAEQIVAKIEEVLMTAQAVEEDKSSTMQYVILMYMKHLGVKVKEPRNLEHKRGRIGFLPKIKQSMKKDKEGEEKGKRRGFPSILGPPRRPSRHDNSAIGRAMELQKARHPKHLSTPSSVSPEPQDSAKLRQSGLANEGTDAGYLPANSMSSVASGASFSQEGGKENDTGSKQVGETSAPGDTLDGTPRTLNTVFDFPPPPLDQVQEEECEVERVTEHGTPKPFRKFDSVAFGESQSEDEQFENDLETDPPNWQQLVSREVLLGLKPCEIKRQEVINELFYTERAHVRTLKVLDQVFYQRVSREGILSPSELRKIFSNLEDILQLHIGLNEQMKAVRKRNETSVIDQIGEDLLTWFSGPGEEKLKHAAATFCSNQPFALEMIKSRQKKDSRFQTFVQDAESNPLCRRLQLKDIIPTQMQRLTKYPLLLDNIAKYTEWPTEREKVKKAADHCRQILNYVNQAVKEAENKQRLEDYQRRLDTSSLKLSEYPNVEELRNLDLTKRKMIHEGPLVWKVNRDKTIDLYTLLLEDILVLLQKQDDRLVLRCHSKILASTADSKHTFSPVIKLSTVLVRQVATDNKALFVISMSDNGAQIYELVAQTVSEKTVWQDLICRMAASVKEQSTKPIPLPQSTPGEGDNDEEDPSKLKEEQHGISVTGLQSPDRDLGLESTLISSKPQSHSLSTSGKSEVRDLFVAERQFAKEQHTDGTLKEVGEDYQIAIPDSHLPVSEERWALDALRNLGLLKQLLVQQLGLTEKSVQEDWQHFPRYRTASQGPQTDSVIQNSENIKAYHSGEGHMPFRTGTGDIATCYSPRTSTESFAPRDSVGLAPQDSQASNILVMDHMIMTPEMPTMEPEGGLDDSGEHFFDAREAHSDENPSEGDGAVNKEEKDVNLRISGNYLILDGYDPVQESSTDEEVASSLTLQPMTGIPAVESTHQQQHSPQNTHSDGAISPFTPEFLVQQRWGAMEYSCFEIQSPSSCADSQSQIMEYIHKIEADLEHLKKVEESYTILCQRLAGSALTDKHSDKS

SEQ ID NO: 899929 - protein, 696 aa, Homo sapiens
MKAVRKRNETSVIDQIGEDLLTWFSGPGEEKLKHAAATFCSNQPFALEMIKSRQKKDSRFQTFVQDAESNPLCRRLQLKDIIPTQMQRLTKYPLLLDNIAKYTEWPTEREKVKKAADHCRQILNYVNQAVKEAENKQRLEDYQRRLDTSSLKLSEYPNVEELRNLDLTKRKMIHEGPLVWKVNRDKTIDLYTLLLEDILVLLQKQDDRLVLRCHSKILASTADSKHTFSPVIKLSTVLVRQVATDNKALFVISMSDNGAQIYELVAQTVSEKTVWQDLICRMAASVKEQSTKPIPLPQSTPGEGDNDEEDPSKLKEEQHGISVTGLQSPDRDLGLESTLISSKPQSHSLSTSGKSEVRDLFVAERQFAKEQHTDGTLKEVGEDYQIAIPDSHLPVSEERWALDALRNLGLLKQLLVQQLGLTEKSVQEDWQHFPRYRTASQGPQTDSVIQNSENIKAYHSGEGHMPFRTGTGDIATCYSPRTSTESFAPRDSVGLAPQDSQASNILVMDHMIMTPEMPTMEPEGGLDDSGEHFFDAREAHSDENPSEGDGAVNKEEKDVNLRISGNYLILDGYDPVQESSTDEEVASSLTLQPMTGIPAVESTHQQQHSPQNTHSDGAISPFTPEFLVQQRWGAMEYSCFEIQSPSSCADSQSQIMEYIHKIEADLEHLKKVEESYTILCQRLAGSALTDKHSDKS

SEQ ID NO: 899930 - protein, 696 aa, Homo sapiens; identical to SEQ ID NO: 899929

SEQ ID NO: 899931 - protein, 696 aa, Homo sapiens; identical to SEQ ID NO: 899929

SEQ ID NO: 899932 - protein, 857 aa, Homo sapiens
FFPQQLPMKDEIPFLKSCCCCCVFDFPPPPLDQVQEEECEVERVTEHGTPKPFRKFDSVAFGESQSEDEQFENDLETDPPNWQQLVSREVLLGLKPCEIKRQEVINELFYTERAHVRTLKVLDQVFYQRVSREGILSPSELRKIFSNLEDILQLHIGLNEQMKAVRKRNETSVIDQIGEDLLTWFSGPGEEKLKHAAATFCSNQPFALEMIKSRQKKDSRFQTFVQDAESNPLCRRLQLKDIIPTQMQRLTKYPLLLDNIAKYTEWPTEREKVKKAADHCRQILNYVNQAVKEAENKQRLEDYQRRLDTSSLKLSEYPNVEELRNLDLTKRKMIHEGPLVWKVNRDKTIDLYTLLLEDILVLLQKQDDRLVLRCHSKILASTADSKHTFSPVIKLSTVLVRQVATDNKALFVISMSDNGAQIYELVAQTVSEKTVWQDLICRMAASVKEQSTKPIPLPQSTPGEGDNDEEDPSKLKEEQHGISVTGLQSPDRDLGLESTLISSKPQSHSLSTSGKSEVRDLFVAERQFAKEQHTDGTLKEVGEDYQIAIPDSHLPVSEERWALDALRNLGLLKQLLVQQLGLTEKSVQEDWQHFPRYRTASQGPQTDSVIQNSENIKAYHSGEGHMPFRTGTGDIATCYSPRTSTESFAPRDSVGLAPQDSQASNILVMDHMIMTPEMPTMEPEGGLDDSGEHFFDAREAHSDENPSEGDGAVNKEEKDVNLRISGNYLILDGYDPVQESSTDEEVASSLTLQPMTGIPAVESTHQQQHSPQNTHSDGAISPFTPEFLVQQRWGAMEYSCFEIQSPSSCADSQSQIMEYIHKIEADLEHLKKVEESYTILCQRLAGSALTDKHSDKS

SEQ ID NO: 899933 - protein, 525 aa, Homo sapiens
MIHEGPLVWKVNRDKTIDLYTLLLEDILVLLQKQDDRLVLRCHSKILASTADSKHTFSPVIKLSTVLVRQVATDNKALFVISMSDNGAQIYELVAQTVSEKTVWQDLICRMAASVKEQSTKPIPLPQSTPGEGDNDEEDPSKLKEEQHGISVTGLQSPDRDLGLESTLISSKPQSHSLSTSGKSEVRDLFVAERQFAKEQHTDGTLKEVGEDYQIAIPDSHLPVSEERWALDALRNLGLLKQLLVQQLGLTEKSVQEDWQHFPRYRTASQGPQTDSVIQNSENIKAYHSGEGHMPFRTGTGDIATCYSPRTSTESFAPRDSVGLAPQDSQASNILVMDHMIMTPEMPTMEPEGGLDDSGEHFFDAREAHSDENPSEGDGAVNKEEKDVNLRISGNYLILDGYDPVQESSTDEEVASSLTLQPMTGIPAVESTHQQQHSPQNTHSDGAISPFTPEFLVQQRWGAMEYSCFEIQSPSSCADSQSQIMEYIHKIEADLEHLKKVEESYTILCQRLAGSALTDKHSDKS

SEQ ID NO: 899934 - protein, 209 aa, Homo sapiens
  misc_feature (153)..(153): Xaa can be any naturally occurring amino acid
ALPPVWRCGIGRAATAWRMAPLLLQLAVLGAALAAAALVLKRDPAFTYEVIVVDDGSKDQTSKVAFKYCQKYGSDKVRVITLVKNRGKGGAIRMGIFSSRGEKILMADADGATKFPDVEKLEKGLNDLQPWPNQMAIACGSRAHLEKESIAQXAFLTSVPSSQWYGGSHLFWVVVSPLVVQRDIRGTTPVGGFPNYFYFGRKQLSPDRF

SEQ ID NO: 899935 - protein, 261 aa, Homo sapiens
ALPPVWRCGIGRAATAWRMAPLLLQLAVLGAALAAAALVLISIVAFTTATKMPALHRHEEEKFFLNAKGQKETLPSIWDSPTKQLSVVVPSYNEEKRLPVMMDEALSYLEKRQKRDPAFTYEVIVVDDGSKDQTSKVAFKYCQKYGSDKVRVITLVKNRGKGGAIRMGIFSSRGEKILMADADGATKFPDVEKLEKGLNDLQPWPNQMAIACGSRAHLEKESIAQPLSGVVPLCQRNQGHTVWVQIIYSRSSFTDVFISTR

SEQ ID NO: 899936 - protein, 261 aa, Homo sapiens
MPKARKKLYPAYGTHLPNNFLSLCLHTMKKNGKRDPAFTYEVIVVDDGSKDQTSKVAFKYCQKYGSDKVRVITLVKNRGKGGAIRMGIFSSRGEKILMADADGATKFPDVEKLEKGLNDLQPWPNQMAIACGSRAHLEKESIAQRSYFRTLLMYGFHFLVWFLCVKGIRDTQCGFKLFTREAASRTFSSLHVERWAFDVELLYIAQFFKIPIAEIAVNWTEIEGSKLVPFWSWLQMGKDLLFIRLRYLTGAWRLEQTRKMN

SEQ ID NO: 899937 - protein, 227 aa, Homo sapiens
ALPPVWRCGIGRAATAWRMAPLLLQLAVLGAALAAAALVLISIVAFTTATKMPALHRHEEEKFFLNAKGQKETLPSIWDSPTKQLSVVVPSYNEEKRLPVMMDEALSYLEKRQKRDPAFTYEVIVVDDGSKDQTSKVAFKYCQKYGSDKVRVITLVKNRGKGGAIRMGIFSSRGEKILMADADGATKFPDVEKLEKGLNDLQPWPNQMAIACGSRAHLEKESIAQGI

SEQ ID NO: 899938 - protein, 189 aa, Homo sapiens
MAPLLLQLAVLGAALAAAALVLISIVAFTTATKMPALHRHEEEKFFLNAKGQKETLPSIWDSPTKQLSVVVPSYNEEKRLPVMMDEALSYLEKRQKRDPAFTYEVIVVDDGSKDQTSKVAFKYCQKYGSDKVRVITLVKNRGKGGAIRMGIFSSRGEKILMADADGATKFPDVEKLEKGLNDLQPWPGI

SEQ ID NO: 899939 - protein, 324 aa, Homo sapiens
MAPLLLQLAVLGAALAAAALVLISIVAFTTATKMPALHRHEEEKFFLNAKGQKETLPSIWDSPTKQLSVVVPSYNEEKRLPVMMDEALSYLEKRQKRDPAFTYEVIVVDDGSKDQTSKVAFKYCQKYGSDKVRVITLVKNRGKGGAIRMGIFSSRGEKILMADADGATKFPDVEKLEKGLNDLQPWPNQMAIACGSRAHLEKESIAQRSYFRTLLMYGFHFLVWFLCVKGIRDTQCGFKLFTREAASRTFSSLHVERWAFDVELLYIAQFFKIPIAEIAVNWTEIEGSKLVPFWSWLQMGKDLLFIRLRYLTGAWRLEQTRKMN

SEQ ID NO: 899940 - protein, 324 aa, Homo sapiens; identical to SEQ ID NO: 899939

SEQ ID NO: 899941 - protein, 224 aa, Homo sapiens
RFRKLLVVMLAVNDQTSKVAFKYCQKYGSDKVRVITLVKNRGKGGAIRMGIFSSRGEKILMADADGATKFPDVEKLEKGLNDLQPWPNQMAIACGSRAHLEKESIAQRSYFRTLLMYGFHFLVWFLCVKGIRDTQCGFKLFTREAASRTFSSLHVERWAFDVELLYIAQFFKIPIAEIAVNWTEIEGSKLVPFWSWLQMGKDLLFIRLRYLTGAWRLEQTRKMN

SEQ ID NO: 899942 - protein, 286 aa, Homo sapiens
MAPLLLQLAVLGAALAAAALVLISIVAFTTATKMPALHRHEEEKFFLNAKGQKETLPSIWDSPTKQLSVVVPSYNEEKRLPVMMDEALSYLEKRQKRDPAFTYEVIVVDDGSKDQTSKVAFKYCQKYGSDKVRVITLVKNRGKGGAIRMNQMAIACGSRAHLEKESIAQRSYFRTLLMYGFHFLVWFLCVKGIRDTQCGFKLFTREAASRTFSSLHVERWAFDVELLYIAQFFKIPIAEIAVNWTEIEGSKLVPFWSWLQMGKDLLFIRLRYLTGAWRLEQTRKMN

SEQ ID NO: 899943 - protein, 110 aa, Homo sapiens
ALPPVWRCGIGRAATAWRMAPLLLQLAVLGAALAAAALVLISIVAFTTATKMPALHRHEEEKFFLNAKGQKETLPSIWDSPTKQLSVVVPSYNEEKRLPVMMDEALSYAR

SEQ ID NO: 899944 - protein, 158 aa, Homo sapiens
MKLKGLGKRCKRREDLEIRFILIQNRAGKTRLAKWYMQFDDDEKQKLIEEVHAVVTVRDAKHTNFVEFRNFKIIYRRYAGLYFCICVDVNDNNLAYLEAIHNFVEVLNEYFHNVCELDLVFNFYKVYTVVDEMFLAGEIRETSQTKVLKQLLMLQSLE

SEQ ID NO: 899945 - protein, 95 aa, Homo sapiens
VMVGVSVLLIIQSVMLVVLFPQSSDSISAPRTQDSGIAPGCGSRFPFPGPWPTQQSFPQLPRRKGPSWVWATREETAPHCLWALAVGRGHRVCPE

SEQ ID NO: 899946 - protein, 142 aa, Homo sapiens
MIRFILIQNRAGKTRLAKWYMQFDDDEKQKLIEEVHAVVTVRDAKHTNFVEFRNFKIIYRRYAGLYFCICVDVNDNNLAYLEAIHNFVEVLNEYFHNVCELDLVFNFYKVYTVVDEMFLAGEIRETSQTKVLKQLLMLQSLE

SEQ ID NO: 899947 - protein, 144 aa, Homo sapiens
MVWIRFILIQNRAGKTRLAKWYMQFDDDEKQKLIEEVHAVVTVRDAKHTNFVEFRNFKIIYRRYAGLYFCICVDVNDNNLAYLEAIHNFVEVLNEYFHNVCELDLVFNFYKVYTVVDEMFLAGEIRETSQTKVLKQLLMLQSLE

SEQ ID NO: 899948 - protein, 122 aa, Homo sapiens
MVVGEEVLLPHIEEVHAVVTVRDAKHTNFVEFRNFKIIYRRYAGLYFCICVDVNDNNLAYLEAIHNFVEVLNEYFHNVCELDLVFNFYKVYTVVDEMFLAGEIRETSQTKVLKQLLMLQSLE

SEQ ID NO: 899949 - protein, 142 aa, Homo sapiens; identical to SEQ ID NO: 899946

SEQ ID NO: 899950 - protein, 163 aa, Homo sapiens
GPWARAAKGQPARQWEEVRARAHPRGLLPQPLPEAGVQWHDLGSLQPPSPGFKCFSCLSLPSSWYYRLAPLVKLQLPGVCAREGRRVFLPEVRSSSGPYNCTLSRSCPVAAGPGPLGSGRGSPCSGTLRSFTAAMLASTSASVWMSMTTTWLTWRPFTTSWRS

SEQ ID NO: 899951 - protein, 104 aa, Homo sapiens
MIRFILIQNRAGKTRLAKWYMQFDDDEKQKLIEEVHAVVTVRDAKHTNFVEVLNEYFHNVCELDLVFNFYKVYTVVDEMFLAGEIRETSQTKVLKQLLMLQSLE

SEQ ID NO: 899952 - protein, 142 aa, Homo sapiens; identical to SEQ ID NO: 899946

SEQ ID NO: 899953 - protein, 142 aa, Homo sapiens; identical to SEQ ID NO: 899946

SEQ ID NO: 899954 - protein, 120 aa, Homo sapiens
RHETRTTKRIEEVHAVVTVRDAKHTNFVEFRNFKIIYRRYAGLYFCICVDVNDNNLAYLEAIHNFVEVLNEYFHNVCELDLVFNFYKVYTVVDEMFLAGEIRETSQTKVLKQLLMLQSLE

SEQ ID NO: 899955 - protein, 156 aa, Homo sapiens
MIRFILIQNRAGKTRLAKWYMQFDDDEKQKLIEEVHAVVTVRDAKHTNFVEVLASSVADSLSVLQFRNFKIIYRRYAGLYFCICVDVNDNNLAYLEAIHNFVEVLNEYFHNVCELDLVFNFYKVYTVVDEMFLAGEIRETSQTKVLKQLLMLQSLE

SEQ ID NO: 899956 - protein, 106 aa, Homo sapiens
MVLASSVADSLSVLQFRNFKIIYRRYAGLYFCICVDVNDNNLAYLEAIHNFVEVLNEYFHNVCELDLVFNFYKVYTVVDEMFLAGEIRETSQTKVLKQLLMLQSLE

SEQ ID NO: 899957 - protein, 153 aa, Homo sapiens
MIRFILIQNRAGKTRLAKWYMQFDDDEKQKLIEEVHAVVTVRDAKHTNFVEFRNFKIIYRRYAGLYFCICVDVNDNNLAYLEAIHNFVEVLNEYFHNVCELDLVFNFYKVYTVVDEMFLAGEIRETSQTKVLKQLSLPLPRPVANPAVLPSAA

SEQ ID NO: 899958 - protein, 553 aa, Homo sapiens
MATDTSQGELVHPKALPLIVGAQLIHADKLGEKVEDSTMPIRRTVNSTRETPPKSKLAEGEEEKPEPDISSEESVSTVEEQENETPPATSSEAEQPKGEPENEEKEENKSSEETKKDEKDQSKEKEKKVKKTIPSWATLSASQLARAQKQTPMASSPRPKMDAILTEAIKACFQKSGASVVAIRKYIIHKYPSLELERRGYLLKQALKRELNRGVIKQVKGKGASGSFVVVQKSRKTPQKSRNRKNRSSAVDPEPQVKLEDVLPLAFTRLCEPKEASYSLIRKYVSQYYPKLRVDIRPQLLKNALQRAVERGQLEQITGKGASGTFQLKKSGEKPLLGGSLMEYAILSAIAAMNEPKTCSTTALKKYVLENHPGTNSNYQMHLLKKTLQKCEKNGWMEQISGKGFSGTFQLCFPYYPSPGVLFPKKEPDDSRDEDEDEDESSEEDSEDEEPPPKRRLQKKTPAKSPGKAASVKQRGSKPAPKVSAAQRGKARPLPKKAPPKAKTPAKKTRPSSTVIKKPSGGSSKKPATSARKEVKLPGKGKSTMKKSFRVKK

SEQ ID NO: 899959 - protein, 553 aa, Homo sapiens; identical to SEQ ID NO: 899958

SEQ ID NO: 899960 - protein, 560 aa, Homo sapiens
AESSAAGTGGQRWRRRLAAAGAAPRGRAGRGRQDRPNAEKVEDSTMPIRRTVNSTRETPPKSKLAEGEEEKPEPDISSEESVSTVEEQENETPPATSSEAEQPKGEPENEEKEENKSSEETKKDEKDQSKEKEKKVKKTIPSWATLSASQLARAQKQTPMASSPRPKMDAILTEAIKACFQKSGASVVAIRKYIIHKYPSLELERRGYLLKQALKRELNRGVIKQVKGKGASGSFVVVQKSRKTPQKSRNRKNRSSAVDPEPQVKLEDVLPLAFTRLCEPKEASYSLIRKYVSQYYPKLRVDIRPQLLKNALQRAVERGQLEQITGKGASGTFQLKKSGEKPLLGGSLMEYAILSAIAAMNEPKTCSTTALKKYVLENHPGTNSNYQMHLLKKTLQKCEKNGWMEQISGKGFSGTFQLCFPYYPSPGVLFPKKEPDDSRDEDEDEDESSEEDSEDEEPPPKRRLQKKTPAKSPGKAASVKQRGSKPAPKVSAAQRGKARPLPKKAPPKAKTPAKKTRPSSTVIKKPSGGSSKKPATSARKEVKLPGKGKSTMKKSFRVKK

SEQ ID NO: 899961 - protein, 457 aa, Homo sapiens
QSGTRHKPYRLGRAVLIGRGSEKDQSKEKEKKVKKTIPSWATLSASQLARAQKQTPMASSPRPKMDAILTEAIKACFQKSGASVVAIRKYIIHKYPSLELERRGYLLKQALKRELNRGVIKQVKGKGASGSFVVVQKSRKTPQKSRNRKNRSSAVDPEPQVKLEDVLPLAFTRLCEPKEASYSLIRKYVSQYYPKLRVDIRPQLLKNALQRAVERGQLEQITGKGASGTFQLKKSGEKPLLGGSLMEYAILSAIAAMNEPKTCSTTALKKYVLENHPGTNSNYQMHLLKKTLQKCEKNGWMEQISGKGFSGTFQLCFPYYPSPGVLFPKKEPDDSRDEDEDEDESSEEDSEDEEPPPKRRLQKKTPAKSPGKAASVKQRGSKPAPKVSAAQRGKARPLPKKAPPKAKTPAKKTRPSSTVIKKPSGGSSKKPATSARKEVKLPGKGKSTMKKSFRVKK

SEQ ID NO: 899962 - protein, 526 aa, Homo sapiens
MATDTSQGELVHPKALPLIVGAQLIHADKLGEKVEDSTMPIRRTVNSTRETPPKSKLAEGEEEKPEPDISSEESVSTVEEQENETPPATSSEAEQPKGEPENEEKEENKSSEETKKDEKDQSKEKEKKVKKTIPSWATLSASQLARAQKQTPMASSPRPKMDAILTEAIKACFQKSGASVVAIRKYIIHKYPSLELERRGYLLKQALKRELNRGVIKQNRSSAVDPEPQVKLEDVLPLAFTRLCEPKEASYSLIRKYVSQYYPKLRVDIRPQLLKNALQRAVERGQLEQITGKGASGTFQLKKSGEKPLLGGSLMEYAILSAIAAMNEPKTCSTTALKKYVLENHPGTNSNYQMHLLKKTLQKCEKNGWMEQISGKGFSGTFQLCFPYYPSPGVLFPKKEPDDSRDEDEDEDESSEEDSEDEEPPPKRRLQKKTPAKSPGKAASVKQRGSKPAPKVSAAQRGKARPLPKKAPPKAKTPAKKTRPSSTVIKKPSGGSSKKPATSARKEVKLPGKGKSTMKKSFRVKK

SEQ ID NO: 899963 - protein, 289 aa, Homo sapiens
AESSAAGTGGQRWRRRLAAAGAAPRGRAGRGRQDRPNAEKVEDSTMPIRRTVNSTRETPPKSKLAEGEEEKPEPDISSEESVSTVEEQENETPPATSSEAEQPKGEPENEEKEENKSSEETKKDEKDQSKEKEKKVKKTIPSWATLSASQLARAQKQTPMASSPRPKMDAILTEAIKACFQKSGASVVAIRKYIIHKYPSLELERRGYLLKQALKRELNRGVIKQVKGKGASGSFVVVQKSRKTPQKSRNRKNRSSAVDPEPQKLPTVSSGNMCLSIILSLEWTSGLSC

SEQ ID NO: 899964 - protein, 212 aa, Homo sapiens
MEYAILSAIAAMNEPKTCSTTALKKYVLENHPGTNSNYQMHLLKKTLQKCEKNGWMEQISGKGFSGTFQLCFPYYPSPGVLFPKKEPDDSRDEDEDEDESSEEDSEDEEPPPKRRLQKKTPAKSPGKAASVKQRGSKPAPKVSAAQRGKARPLPKKAPPKAKTPAKKTRPSSTVIKKPSGGSSKKPATSARKEVKLPGKGKSTMKKSFRVKK

SEQ ID NO: 899965 - protein, 102 aa, Homo sapiens
AESSAAGTGGQRWRRRLAAAGAAPRGRAGRGRQDRPNAEKVEDSTMPIRRTVNSTRETPPKSKLAEGEEEKPEPDISSEESVSTVEGCRRKPQPSPQGRPHL

SEQ ID NO: 899966 - protein, 553 aa, Homo sapiens; identical to SEQ ID NO: 899958

SEQ ID NO: 899967 - protein, 553 aa, Homo sapiens; identical to SEQ ID NO: 899958

SEQ ID NO: 899968 - protein, 553 aa, Homo sapiens; identical to SEQ ID NO: 899958

SEQ ID NO: 899969 - protein, 553 aa, Homo sapiens; identical to SEQ ID NO: 899958

SEQ ID NO: 899970 - protein, 282 aa, Homo sapiens
MATDTSQGELVHPKALPLIVGAQLIHADKLGEKVEDSTMPIRRTVNSTRETPPKSKLAEGEEEKPEPDISSEESVSTVEEQENETPPATSSEAEQPKGEPENEEKEENKSSEETKKDEKDQSKEKEKKVKKTIPSWATLSASQLARAQKQTPMASSPRPKMDAILTEAIKACFQKSGASVVAIRKYIIHKYPSLELERRGYLLKQALKRELNRGVIKQVKGKGASGSFVVVQKSRKTPQKSRNRKNRSSAVDPEPQKLPTVSSGNMCLSIILSLEWTSGLSC

SEQ ID NO: 899971 - protein, 133 aa, Homo sapiens
MATDTSQGELVHPKALPLIVGAQLIHADKLGEKVEDSTMPIRRTVNSTRETPPKSKLAEGEEEKPEPDISSEESVSTVEEQENETPPATSSEAEQPKGEPENEEKEENKSSEETKKERADSIHSTLFIIGQNS

SEQ ID NO: 899972 - protein, 133 aa, Homo sapiens; identical to SEQ ID NO: 899971

SEQ ID NO: 899973 - protein, 221 aa, Homo sapiens
MATDTSQGELVHPKALPLIVGAQLIHADKLGEKVEDSTMPIRRTVNSTRETPPKSKLAEGEEEKPEPDISSEESVSTVEEQENETPPATSSEAEQPKGEPENEEKEENKSSEETKKDEKDQSKEKEKKVKKTIPSWATLSASQLARAQKQTPMASSPRPKMDAILTEAIKACFQKSGASVVAIRKYIIHKYPSLELERRGYLLKQALKRELNRGVIKQVFS

SEQ ID NO: 899974 - protein, 133 aa, Homo sapiens; identical to SEQ ID NO: 899971

SEQ ID NO: 899975 - protein, 553 aa, Homo sapiens; identical to SEQ ID NO: 899958

SEQ ID NO: 899976 - protein, 401 aa, Homo sapiens
MASSPRPKMDAILTEAIKACFQKSGASVVAIRKYIIHKYPSLELERRGYLLKQALKRELNRGVIKQVKGKGASGSFVVVQKSRKTPQKSRNRKNRSSAVDPEPQVKLEDVLPLAFTRLCEPKEASYSLIRKYVSQYYPKLRVDIRPQLLKNALQRAVERGQLEQITGKGASGTFQLKKSGEKPLLGGSLMEYAILSAIAAMNEPKTCSTTALKKYVLENHPGTNSNYQMHLLKKTLQKCEKNGWMEQISGKGFSGTFQLCFPYYPSPGVLFPKKEPDDSRDEDEDEDESSEEDSEDEEPPPKRRLQKKTPAKSPGKAASVKQRGSKPAPKVSAAQRGKARPLPKKAPPKAKTPAKKTRPSSTVIKKPSGGSSKKPATSARKEVKLPGKGKSTMKKSFRVKK

SEQ ID NO: 899977 - protein, 408 aa, Homo sapiens
MKSLPMPMASSPRPKMDAILTEAIKACFQKSGASVVAIRKYIIHKYPSLELERRGYLLKQALKRELNRGVIKQVKGKGASGSFVVVQKSRKTPQKSRNRKNRSSAVDPEPQVKLEDVLPLAFTRLCEPKEASYSLIRKYVSQYYPKLRVDIRPQLLKNALQRAVERGQLEQITGKGASGTFQLKKSGEKPLLGGSLMEYAILSAIAAMNEPKTCSTTALKKYVLENHPGTNSNYQMHLLKKTLQKCEKNGWMEQISGKGFSGTFQLCFPYYPSPGVLFPKKEPDDSRDEDEDEDESSEEDSEDEEPPPKRRLQKKTPAKSPGKAASVKQRGSKPAPKVSAAQRGKARPLPKKAPPKAKTPAKKTRPSSTVIKKPSGGSSKKPATSARKEVKLPGKGKSTMKKSFRVKK

SEQ ID NO: 899978 - protein, 584 aa, Homo sapiens
MATDTSQGELVHPKALPLIVGAQLIHADKLGEKVEDSTMPIRRTVNSTRETPPKSKLAEGEEEKPEPDISSEESVSTVEEQENETPPATSSEAEQPKGEPENEEKEENKSSEETKKDEKDQSKEKEKKVKKTIPSWATLSASQLARAQKQTPMASSPRPKMDAILTEAIKACFQKSGASVVAIRKYIIHKYPSLELERRGYLLKQALKRELNRGVIKQVKGKGASGSFVVVQKSRKTPQKSRNRKNRSSAVDPEPQVKLEDVLPLAFTRLCEPKEASYSLIRKYVSQYYPKLRVDIRPQLLKNALQRAVERGQLEQITGKGASGTFQELRPTWCRGVLSWPALGECCLDAFLFLLGKQLKKSGEKPLLGGSLMEYAILSAIAAMNEPKTCSTTALKKYVLENHPGTNSNYQMHLLKKTLQKCEKNGWMEQISGKGFSGTFQLCFPYYPSPGVLFPKKEPDDSRDEDEDEDESSEEDSEDEEPPPKRRLQKKTPAKSPGKAASVKQRGSKPAPKVSAAQRGKARPLPKKAPPKAKTPAKKTRPSSTVIKKPSGGSSKKPATSARKEVKLPGKGKSTMKKSFRVKK

SEQ ID NO: 899979 - protein, 127 aa, Homo sapiens
  misc_feature (8)..(9): Xaa can be any naturally occurring amino acid
AGWYRPRXXGYRRPRRSSKTLRMKSRHLRELQKKTPAKSPGKAASVKQRGSKPAPKVSAAQRGKARPLPKKAPPKAKTPAKKTRPSSTVIKKPSGGSSKKPATSARKEVKLPGKGKSTMKKSFRVKK

SEQ ID NO: 899980 - protein, 553 aa, Homo sapiens; identical to SEQ ID NO: 899958

SEQ ID NO: 899981 - protein, 344 aa, Homo sapiens
MATDTSQGELVHPKALPLIVGAQLIHADKLGEKVEDSTMPIRRTVNSTRETPPKSKLAEGEEEKPEPDISSEESVSTVEEQENETPPATSSEAEQPKGEPENEEKEENKSSEETKKDEKDQSKEKEKKVKKTIPSWATLSASQLARAQKQTPMASSPRPKMDAILTEAIKACFQKSGASVVAIRKYIIHKYPSLELERRGYLLKQALKRELNRGVIKQVKGKGASGSFVVVQKSRKTPQKSRNRKNRSSAVDPEPQVKLEDVLPLAFTRLCEPKEASYSLIRKYVSQYYPKLRVDIRPQLLKNALQRAVERGQLEQITGKGASGTFQKWGFAVLPRLLLNSWVQ

SEQ ID NO: 899982 - protein, 344 aa, Homo sapiens; identical to SEQ ID NO: 899981

SEQ ID NO: 899983 - protein, 344 aa, Homo sapiens; identical to SEQ ID NO: 899981

SEQ ID NO: 899984 - protein, 180 aa, Homo sapiens
MATDTSQGELVHPKALPLIVGAQLIHADKLGEKVEDSTMPIRRTVNSTRETPPKSKLAEGEEEKPEPDISSEESVSTVEEQENETPPATSSEAEQPKGEPENEEKEENKSSEETKKDEKDQSKEKEKKVKKTIPSWATLSAILFFVWRQSFALVAQAGVQWHDLGSPQPPSPGFKQFFCL

SEQ ID NO: 899985 - protein, 71 aa, Homo sapiens
TVHIRGGRGRKEEEGFQRESSSEDARVHGFLEDKFSTADTNIRTSMYLLGDTRTVLRTQNLEAKPPAFYAS

SEQ ID NO: 899986 - protein, 418 aa, Homo sapiens
MAGRLPACVVDCGTGYTKLGYAGNTEPQFIIPSCIAIKESAKVGDQAQRRVMKGVDDLDFFIGDEAIEKPTYATKWPIRHGIVEDWDLMERFMEQVIFKYLRAEPEDHYFLLTEPPLNTPENREYTAEIMFESFNVPGLYIAVQAVLALAASWTSRQVGERTLTGTVIDSGDGVTHVIPVAEGYVIGSCIKHIPIAGRDITYFIQQLLRDREVGIPPEQSLETAKAVKERYSYVCPDLVKEFNKYDTDGSKWIKQYTGINAISKKEFSIDVGYERFLGPEIFFHPEFANPDFTQPISEVVDEVIQNCPIDVRRPLYKNIVLSGGSTMFRDFGRRLQRDLKRTVDARLKLSEELSGGRLKPKPIDVQVITHHMQRYAVWFGGSMLASTPEFYQVCHTKKDYEEIGPSICRHNPVFGVMS

SEQ ID NO: 899987 - protein, 418 aa, Homo sapiens; identical to SEQ ID NO: 899986

SEQ ID NO: 899988 - protein, 418 aa, Homo sapiens; identical to SEQ ID NO: 899986

SEQ ID NO: 899989 - protein, 159 aa, Homo sapiens
MAGRLPACVVDCGTGYTKLGYAGNTEPQFIIPSCIAIKESAKVGDQAQRRVMKGVDDLDFFIGDEAIEKPTYATKWPIRHGIVEDWDLMERFMEQVIFKYLRAEPEDHYFLLTEPPLNTPENSCSCLSCILDLKTSRRTDVDRYGNRQWRWCHSCHSCG

SEQ ID NO: 899990 - protein, 356 aa, Homo sapiens
MLEIQNHSLSSLPWPIRHGIVEDWDLMERFMEQVIFKYLRAEPEDHYFLLTEPPLNTPENREYTAEIMFESFNVPGLYIAVQAVLALAASWTSRQVGERTLTGTVIDSGDGVTHVIPVAEGYVIGSCIKHIPIAGRDITYFIQQLLRDREVGIPPEQSLETAKAVKERYSYVCPDLVKEFNKYDTDGSKWIKQYTGINAISKKEFSIDVGYERFLGPEIFFHPEFANPDFTQPISEVVDEVIQNCPIDVRRPLYKNIVLSGGSTMFRDFGRRLQRDLKRTVDARLKLSEELSGGRLKPKPIDVQVITHHMQRYAVWFGGSMLASTPEFYQVCHTKKDYEEIGPSICRHNPVFGVMS

SEQ ID NO: 899991 - protein, 327 aa, Homo sapiens
LGTRLGVESAEAELKTIIFFVTEPPLNTPENREYTAEIMFESFNVPGLYIAVQAVLALAASWTSRQVGERTLTGTVIDSGDGVTHVIPVAEGYVIGSCIKHIPIAGRDITYFIQQLLRDREVGIPPEQSLETAKAVKERYSYVCPDLVKEFNKYDTDGSKWIKQYTGINAISKKEFSIDVGYERFLGPEIFFHPEFANPDFTQPISEVVDEVIQNCPIDVRRPLYKNIVLSGGSTMFRDFGRRLQRDLKRTVDARLKLSEELSGGRLKPKPIDVQVITHHMQRYAVWFGGSMLASTPEFYQVCHTKKDYEEIGPSICRHNPVFGVMS

SEQ ID NO: 899992 - protein, 420 aa, Homo sapiens
MAGRLPACVVDCGTGYTKLGYAGNTEPQFIIPSCIAIKESAKVGDQAQRRVMKGVDDLDFFIGDEAIEKPTYATKWPIRHGIVEDWDLMERFMEQVIFKYLRAEPEDHYFLLTEPPLNTPENREYTAEIMFESFNVPGLYIAVQAVLALAASWTSRQVGERTLTGTVIDSGDGVTHVIPVAEGYVIGSCIKHIPIAGRDITYFIQQLLRDREVGIPPEQSLETAKAVKERYSYVCPDLVKEFNKYDTDGSKWIKQYTGINAISKKEFSIDVGYERFLGPEIFFHPEFANPDFTQPISEVVDEVIQNCPIDVRRPLYKNIVLSGGSTMFRDFGRRLQRDLKRTVDARLKLSEELSGGRLKPKPIDVQVITHHMQRYAVWFGGSMLASTPEFYQVCHTKKDYEEIGPSICRHNPVFGVMSQQ

SEQ ID NO: 899993 - protein, 399 aa, Homo sapiens
MAGRLPACVVDCGTGYTKLGYAGNTEPQFIIPSCIAIKESAKVGDQAQRRVMKGVDDLDFFIGDEAIEKPTYATKWPIRHGIVEDWDLMERFMEQVIFKYLRAEPEDHYFLLTEPPLNTPENREYTAEIMFESFNVPGLYIAVQAVLALAASWTSRQVGERTLTGTVIDSGDGVTHVIPVAEGYVIGSCIKHIPIAGRDITYFIQQLLRDREVGIPPEQSLETAKAVKERYSYVCPDLVKEFNKYDTDGSKWIKQYTGINAISKKEFSIDVGYERFLGPEIFFHPEFANPDFTQPISEVVDEVIQNCPIDVRRPLYKNIVLSGGSTMFRDFGRRLQRDLKRTVDARLKLSEELSGGRLKPKPIDVQVITHHMQRYAVWFGGSMLASTLEVSKVATQKGL

SEQ ID NO: 899994 - protein, 366 aa, Homo sapiens
MAGRLPACVVDCGTGYTKLGYAGNTEPQFIIPSCIAIKESAKVGDQAQRRVMKGVDDLDFFIGDEAIEKPTYATKWPIRHGIVEDWDLMERFMEQVIFKYLRAEPEDHYFLLTEPPLNTPENREYTAEIMFESFNVPGLYIAVQAVLALAASWTSRQVGERTLTGTVIDSGDGVTHVIPVAEGYVIGSCIKHIPIAGRDITYFIQQLLRDREVGIPPEQSLETAKAVKERYSYVCPDLVKEFNKYDTDGSKWIKQYTGINAISKKEFSIDVGYERFLGPEIFFHPEFANPDFTQPISEVVDEVIQNCPIDVRRPLYKNIVLSGGSTMFRDFGRRLQRDLKRTVDARLKLSEELSGGRLKVGFPNYW

SEQ ID NO: 899995 - protein, 250 aa, Homo sapiens
MAGRLPACVVDCGTGYTKLGYAGNTEPQFIIPSCIAIKESAKVGDQAQRRVMKGVDDLDFFIGDEAIEKPTYATKWPIRHGIVEDWDLMERFMEQVIFKYLRAEPEDHYFLLTEPPLNTPENREYTAEIMFESFNVPGLYIAVQAVLALAASWTSRQVGERTLTGTVIDSGDGVTHVIPVAEGYVIGSCIKHIPIAGRDITYFIQQLLRDREVGIPPEQSLETAKAVKERYSYVCPDLVKEFNNAFGTKS

SEQ ID NO: 899996 - protein, 119 aa, Homo sapiens
MHIASCKKSDCCAVFYPLWPRSRDNAGIRAPTGFCEPLSAPRPDSEARSRLQFEAPCAAPWWPEAVTVAAEGASRCIRSAPWPPSGGRRPLLSRLRGRPGVSAARPGRPLVAGGRYCRG

SEQ ID NO: 899997 - protein, 119 aa, Homo sapiens; identical to SEQ ID NO: 899996

SEQ ID NO: 899998 - protein, 125 aa, Homo sapiens
MAGRLPACVVDCGTGYTKLGYAGNTEPQFIIPSCIAIKESAKVGDQAQRRVMKGVDDLDFFIGDEAIEKPTYATKWPIRHGIVEDWDLMERFMEQVIFKYLRAEPEDHYFLLIVKLISFENFWLT

SEQ ID NO: 899999 - protein, 109 aa, Homo sapiens
MHIASCKKSDCCAVFYPLWPRSRDNAGIRAPTGFCEPLSAPRPDSEARSRLQFEAPCAAPWWPEAVTVAAEGASRCIRSAPCPAIYIPCFSNTRRGLSMGPTWGGDTRR

SEQ ID NO: 900000 - protein, 135 aa, Homo sapiens [sequence omitted]

SEQ ID NO: 900001 - protein, 418 aa, Homo sapiens; identical to SEQ ID NO: 899986

SEQ ID NO: 900002 - protein, 418 aa, Homo sapiens; identical to SEQ ID NO: 899986

SEQ ID NO: 900003 - protein, 418 aa, Homo sapiens; identical to SEQ ID NO: 899986

SEQ ID NO: 900004 - protein, 418 aa, Homo sapiens; identical to SEQ ID NO: 899986

SEQ ID NO: 900005 - protein, 418 aa, Homo sapiens; identical to SEQ ID NO: 899986

SEQ ID NO: 900006 - protein, 418 aa, Homo sapiens; identical to SEQ ID NO: 899986

SEQ ID NO: 900007 - protein, 84 aa, Homo sapiens
VDVQVITHHMQRYAVGLEINAGRLKPKPIDVQVITHHMQRYAVWFGGSMLASTPEFYQVCHTKKDYEEIGPSICRHNPVFGVMS

SEQ ID NO: 900008 - protein, 235 aa, Homo sapiens [sequence omitted]

SEQ ID NO: 900009 - protein, 119 aa, Homo sapiens; identical to SEQ ID NO: 899996

SEQ ID NO: 900010 - protein, 125 aa, Homo sapiens
MAGRLPACVVDCGTGYTKLGYAGNTEPQFIIPSCIAIKESAKVGDQAQRRVMKGVDDLDFFIGDEAIEKPTYATKWPIRHGIVEDWDLMERFMEQVIFKYLRAEPEDHYFLLTEPPWSSGLLGAS

SEQ ID NO: 900011 - protein, 119 aa, Homo sapiens; identical to SEQ ID NO: 899996

SEQ ID NO: 900012 - protein, 1264 aa, Homo sapiens
MEAKDQKKHRKKNSGPKAAKKKKRLLQDLQLGDEEDARKRNPKAFAVQSAVRMARSFHRTQDLKTKKHHIPVVDRTPLEPPPIVVVVMGPPKVGKSTLIQCLIRNFTRQKLTEIRGPVTIVSGKKRRLTIIECGCDINMMIDLAKVADLVLMLIDASFGFEMETFEFLNICQVHGFPKIMGVLTHLDSFKHNKQLKKTKKRLKHRFWTEVYPGAKLFYLSGMVHGEYQNQEIHNLGRFITVMKFRPLTWQTSHPYILADRMEDLTNPEDIRTNIKCDRKVSLYGYLRGAHLKNKSQIHMPGVGDFAVSDISFLPDPCALPEQQKKRCLNEKEKLVYAPLSGVGGVLYDKDAVYVDLGGSHVFQDEVGPTHELVQSLISTHSTIDAKMASSRVTLFSDSKPLGSEDIDNQGLMMPKEEKQMDLNTGRMRRKAIFGDEDESGDSDDEEDDEMSEDDGLENGSSDEEAEEEENAEMTDQYMAVKGIKRRKLELEEDSEMDLPAFADSDDDLERSSAEEGEAEEADESSEEEDCTAGEKGISGSKAAGEGSKAGLSPANCQSDRVNLEKSLLMKKAALPTFDSGHCTAEEVFASEDESEESSSLSAEEEDSENEEAIRKKLSKPSQVSSGQKLGPQNFIDETSDIENLLKEEEDYKEENNDSKETSGALKWKEDLSRKAAEAFLRQQQAAPNLRKLIYGTVTEDNEEEDDDTLEELGGLFRVNQPDRECKHKADSLDCSRFLVEAPHDWDLEEVMNSIRDCFVTGKWEDDKDAAKVLAEDEELYGDFEDLETGDVHKGKSGPNTQNEDIEKEVKEEIDPDEEESAKKKHLDKKRKLKEMFDAEYDEGESTYFDDLKGEMQKQAQLNRAEFEDQDDEARVQYEGFRPGMYVRIEIENVPCEFVQNFDPHYPIILGGLGNSEGNVGYVQMRLKKHRWYKKILKSRDPIIFSVGWRRFQTIPLYYIEDHNGRQRLLKYTPQHMHCGAAFWGPITPQGTGFLAIQSVSGIMPDFRIAATGVVLDLDKSIKIVKKLKLTGFPYKIFKNTSFIKGMFNSALEVAKFEGAVIRTVSGIRGQIKKALRAPEGAFRASFEDKLLMSDIVFMRTWYPVSIPAFYNPVTSLLKPVGEKDTWSGMRTTGQLRLAHGVRLKANKDSLYKPILRQKKHFNSLHIPAGKVPKDRRRPAVIREPHERKILALLDALSTVHSQKMKKAKEQRHLHNKEHFRAKQKEEEEKLKRQKDLRKKLFRIQGQKERRNQKSSLKGAEGQLQ

SEQ ID NO: 900013 - protein, 1282 aa, Homo sapiens
MEAKDQKKHRKKNSGPKAAKKKKRLLQDLQLGDEEDARKRNPKAFAVQSAVRMARSFHRTQDLKTKKHHIPVVDRTPLEPPPIVVVVMGPPKVGKSTLIQCLIRNFTRQKLTEIRGPVTIVSGKKRRLTIIECGCDINMMIDLAKVADLVLMLIDASFGFEMETFEFLNICQVHGFPKIMGVLTHLDSFKHNKQLKKTKKRLKHRFWTEVYPGAKLFYLSGMVHGEYQNQEIHNLGRFITVMKFRPLTWQTSHPYILADRMEDLTNPEDIRTNIKCDRKVSLYGYLRGAHLKNKSQIHMPGVGDFAVSDISFLPDPCALPEQQKKRCLNEKEKLVYAPLSGVGGVLYDKDAVYVDLGGSHVFQDEVGPTHELVQSLISTHSTIDAKMASSRVTLFSDSKPLGSEDIDNQGLMMPKEEKQMDLNTGRMRRKAIFGDEDESGDSDDEEDDEMSEDDGLENGSSDEEAEEEENAEMTDQYMAVKGIKRRKLELEEDSEMDLPAFADSDDDLERSSAEEGEAEEADESSEEEDCTAGEKGISGSKAAGEGSKAGLSPANCQSDRVNLEKSLLMKKAALPTFDSGHCTAEEVFASEDESEESSSLSAEEEDSENEEAIRKKLSKPSQVSSGQKLGPQNFIDETSDIENLLKEEEDYKEENNDSKETSGALKWKEDLSRKAAEAFLRQQQAAPNLRKLIYGTVTEDNEEEDDDTLEELGGLFRVNQPDRECKHKADSLDCSRFLVEAPHDWDLEEVMNSIRDCFVTGKWEDDKDAAKVLAEDEELYGDFEDLETGDVHKGKSGPNTQNEDIEKEVKEEIDPDEEESAKKKHLDKKRKLKEMFDAEYDEGESTYFDDLKGEMQKQAQLNRAEFEDQDDEARVQYEGFRPGMYVRIEIENVPCEFVQNFDPHYPIILGGLGNSEGNVGYVQMRLKKHRWYKKILKSRDPIIFSVGWRRFQTIPLYYIEDHNGRQRLLKYTPQHMHCGAAFWGPITPQGTGFLAIQSVSGIMPDFRIAATGVVLDLDKSIKIVKKLKLTGFPYKIFKNTSFIKGMFNSALEVAKFEGAVIRTVSGIRGQIKKALRAPEGAFRASFEDKLLMSDIVFMRTWYPVSIPAFYNPVTSLLKPVGEKDTWSGMRTTGQLRLAHGVRLKANKDSLYKPILRQKKHFNSLHIPKALQKALPFKNKPKTQAKAGKVPKDRRRPAVIREPHERKILALLDALSTVHSQKMKKAKEQRHLHNKEHFRAKQKEEEEKLKRQKDLRKKLFRIQGQKERRNQKSSLKGAEGQLQ

SEQ ID NO: 900014 - protein, 1195 aa, Homo sapiens
MEAKDQKKHRKKNSGPKAAKKKKRLLQDLQLGDEEDARKRNPKAFAVQSAVRMARSFHRTQDLKTKKHHIPVVDRTPLEPPPIVVVVMGPPKVGKSTLIQCLIRNFTRQKLTEIRGPVTIVSGKKRRLTIIECGCDINMMIDLAKVADLVLMLIDASFGFEMETFEFLNICQVHGFPKIMGVLTHLDSFKHNKQLKKTKKRLKHRFWTEVYPGAKLFYLSGMVHGEYQNQEIHNLGRFITVMKFRPLTWQTSHPYILADRMEDLTNPEDIRTNIKCDRKVSLYGYLRGAHLKNKSQIHMPGVGDFAVSDISFLPDPCALPEQQKKRCLNEKEKLVYAPLSGVGGVLYDKDAVYVDLGGSHVFQDEVGPTHELVQSLISTHSTIDAKMASSRVTLFSDSKPLGSEDIDNQGLMMPKEEKQMDLNTGRMRRKAIFGDEDESGDSDDEEDDEMSEDDGLENGSSDEEAEEEENAEMTDQYMAVKGIKRRKLELEEDSEMDLPAFADSDDDLERSSAEEGEAEEADESSEEEDCTAGEKGISGSKAAGEGSKAGLSPANCQSDRVNLEKSLLMKKAALPTFDSGHCTAEEVFASEDESEESSSLSAEEEDSENEEAIRKKLSKPSQVSSGQKLGPQNFIDETSDIENLLKEEEDYKEENNDSKETSGALKWKEDLSRKAAEAFLRQQQAAPNLRKLIYGTVTEDNEEEDDDTLEELGGLFRVNQPDRECKHKADSLDCSRFLVEAPHDWDLEEVMNSIRDCFVTGKWEDDKDAAKVLAEDEELYGDFEDLETGDVHKGKSGPNTQNEDIEKEVKEEIDPDEEESAKKKHLDKKRKLKEMFDAEYDEGESTYFDDLKGEMQKQAQLNRAEFEDQDDEARVQYEGFRPGMYVRIEIENVPCEFVQNFDPHYPIILGGLGNSEGNVGYVQMRLKKHRWYKKILKSRDPIIFSVGWRRFQTIPLYYIEDHNGRQRLLKYTPQHMHCGAAFWGPITPQGTGFLAIQSVSGIMPDFRIAATGVVLDLDKSIKIVKKLKLTGFPYKIFKNTSFIKGMFNSALEVAKFEGAVIRTVSGIRGQIKKALRAPEGAFRASFEDKLLMSDIVFMRTWYPVSIPAFYNPVTSLLKPVGEKDTWSGMRTTGQLRLAHGVRLKANKDSLYKPILRQKKHFNSLHIPKALQKALPFKNKPKTQAKAGKVPKDRRR

SEQ ID NO: 900015 - protein, 385 aa, Homo sapiens
MEAKDQKKHRKKNSGPKAAKKKKRLLQDLQLGDEEDARKRNPKAFAVQSAVRMARSFHRTQDLKTKKHHIPVVDRTPLEPPPIVVVVMGPPKVGKSTLIQCLIRNFTRQKLTEIRGPVTIVSGKKRRLTIIECGCDINMMIDLAKVADLVLMLIDASFGFEMETFEFLNICQVHGFPKIMGVLTHLDSFKHNKQLKKTKKRLKHRFWTEVYPGAKLFYLSGMVHGEYQNQEIHNLGRFITVMKFRPLTWQTSHPYILADRMEDLTNPEDIRTNIKCDRKVSLYGYLRGAHLKNKSQIHMPGVGDFAVSDISFLPDPCALPEQQKKRCLNEKEKLVYAPLSGVGGVLYDKDAVYVDLGGSHVFQDEVGPTHELVQSLMTWGCRDLK

SEQ ID NO: 900016 - protein, 1282 aa, Homo sapiens; identical to SEQ ID NO: 900013

SEQ ID NO: 900017 - protein, 225 aa, Homo sapiens
SESDSHGGIGARRSDQQSGLRTARASSSLVDNLVLSDIVFMRTWYPVSIPAFYNPVTSLLKPVGEKDTWSGMRTTGQLRLAHGVRLKANKDSLYKPILRQKKHFNSLHIPKALQKALPFKNKPKTQAKAGKVPKDRRRPAVIREPHERKILALLDALSTVHSQKMKKAKEQRHLHNKEHFRAKQKEEEEKLKRQKDLRKKLFRIQGQKERRNQKSSLKGAEGQLQ

SEQ ID NO: 900018 - protein, 1226 aa, Homo sapiens
MEAKDQKKHRKKNSGPKAAKKKKRLLQDLQLGDEEDARKRNPKAFAVQSAVRMARSFHRTQDLKTKKHHIPVVDRTPLEPPPIVVVVMGPPKVGKSTLIQCLIRNFTRQKLTEIRGPVTIVSGKKRRLTIIECGCDINMMIDLAKVADLVLMLIDASFGFEMETFEFLNICQVHGFPKIMGVLTHLDSFKHNKQLKKTKKRLKHRFWTEVYPGAKLFYLSGMVHGEYQNQEIHNLGRFITVMKFRPLTWQTSHPYILADRMEDLTNPEDIRTNIKCDRKVSLYGYLRGAHLKNKSQIHMPGVGDFAVSDISFLPDPCALPEQQKKRCLNEKEKLVYAPLSGVGGVLYDKDAVYVDLGGSHVFQDEVGPTHELVQSLISTHSTIDAKMASSRVTLFSDSKPLGSEDIDNQGLMMPKEEKQMDLNTGRMRRKAIFGDEDESGDSDDEEDDEMSEDDGLENGSSDEEAEEEENAEMTDQYMAVKGIKRRKLELEEDSEMDLPAFADSDDDLERSSAEEGEAEEADESSEEEDCTAGEKGISGSKAAGEGSKAGLSPANCQSDRVNLEKSLLMKKAALPTFDSGHCTAEEVFASEDESEESSSLSAEEEDSENEEAIRKKLSKPSQVSSGQKLGPQNFIDETSDIENLLKEEEDYKEENNDSKETSGALKWKEDLSRKAAEAFLRQQQAAPNLRKLIYGTVTEDNEEEDDDTLEELGGLFRVNQPDRECKHKADSLDCSRFLVEAPHDWDLEEVMNSIRDCFVTGKWEDDKDAAKVLAEDEELYGDFEDLETGDVHKGKSGPNTQNEDIEKEVKEEIDPDEEESAKKKHLDKKRKLKEMFDAEYDEGESTYFDDLKGEMQKQAQLNRAEFEDQDDEARVQYEGFRPGMYVRIEIENVPCEFVQNFDPHYPIILGGLGNSEGNVGYVQMRLKKHRWYKKILKSRDPIIFSVGWRRFQTIPLYYIEDHNGRQRLLKYTPQHMHCGAAFWGPITPQGTGFLAIQSVSGIMPDFRIAATGVVLDLDKSIKIVKKLKLTGFPYKIFKNTSFIKGMFNSALEVAKFEGAVIRTVSGIRGQIKKALRAPEGAFRASFEDKLLMSDIVFMRTWYPVSIPAFYNPVTSLLKPVGEKDTWSGMRTTGQLRLAHGVRLKANKDSLYKPILRQKKHFNSLHIPKALQKALPFKNKPKTQAKAGKVPKDRRRPAVIREPHERKLGCWDWVHSHDLGLSRFKVM

SEQ ID NO: 900019 - protein, 2442 aa, Homo sapiens
MAENLLDGPPNPKRAKLSSPGFSANDSTDFGSLFDLENDLPDELIPNGGELGLLNSGNLVPDAASKHKQLSELLRGGSGSSINPGIGNVSASSPVQQGLGGQAQGQPNSANMASLSAMGKSPLSQGDSSAPSLPKQAASTSGPTPAASQALNPQAQKQVGLATSSPATSQTGPGICMNANFNQTHPGLLNSNSGHSLINQASQGQAQVMNGSLGAAGRGRGAGMPYPTPAMQGASSSVLAETLTQVSPQMTGHAGLNTAQAGGMAKMGITGNTSPFGQPFSQAGGQPMGATGVNPQLASKQSMVNSLPTFPTDIKNTSVTNVPNMSQMQTSVGIVPTQAIATGPTADPEKRKLIQQQLVLLLHAHKCQRREQANGEVRACSLPHCRTMKNVLNHMTHCQAGKACQVAHCASSRQIISHWKNCTRHDCPVCLPLKNASDKRNQQTILGSPASGIQNTIGSVGTGQQNATSLSNPNPIDPSSMQRAYAALGLPYMNQPQTQLQPQVPGQQPAQPQTHQQMRTLNPLGNNPMNIPAGGITTDQQPPNLISESALPTSLGATNPLMNDGSNSGNIGTLSTIPTAAPPSSTGVRKGWHEHVTQDLRSHLVHKLVQAIFPTPDPAALKDRRMENLVAYAKKVEGDMYESANSRDEYYHLLAEKIYKIQKELEEKRRSRLHKQGILGNQPALPAPGAQPPVIPQAQPVRPPNGPLSLPVNRMQVSQGMNSFNPMSLGNVQLPQAPMGPRAASPMNHSVQMNSMGSVPGMAISPSRMPQPPNMMGAHTNNMMAQAPAQSQFLPQNQFPSSSGAMSVGMGQPPAQTGVSQGQVPGAALPNPLNMLGPQASQLPCPPVTQSPLHPTPPPASTAAGMPSLQHTTPPGMTPPQPAAPTQPSTPVSSSGQTPTPTPGSVPSATQTQSTPTVQAAAQAQVTPQPQTPVQPPSVATPQSSQQQPTPVHAQPPGTPLSQAAASIDNRVPTPSSVASAETNSQQPGPDVPVLEMKTETQAEDTEPDPGESKGEPRSEMMEEDLQGASQVKEETDIAEQKSEPMEVDEKKPEVKVEVKEEEESSSNGTASQSTSPSQPRKKIFKPEELRQALMPTLEALYRQDPESLPFRQPVDPQLLGIPDYFDIVKNPMDLSTIKRKLDTGQYQEPWQYVDDVWLMFNNAWLYNRKTSRVYKFCSKLAEVFEQEIDPVMQSLGYCCGRKYEFSPQTLCCYGKQLCTIPRDAAYYSYQNRYHFCEKCFTEIQGENVTLGDDPSQPQTTISKDQFEKKKNDTLDPEPFVDCKECGRKMHQICVLHYDIIWPSGFVCDNCLKKTGRPRKENKFSAKRLQTTRLGNHLEDRVNKFLRRQNHPEAGEVFVRVVASSDKTVEVKPGMKSRFVDSGEMSESFPYRTKALFAFEEIDGVDVCFFGMHVQEYGSDCPPPNTRRVYISYLDSIHFFRPRCLRTAVYHEILIGYLEYVKKLGYVTGHIWACPPSEGDDYIFHCHPPDQKIPKPKRLQEWYKKMLDKAFAERIIHDYKDIFKQATEDRLTSAKELPYFEGDFWPNVLEESIKELEQEEEERKKEESTAASETTEGSQGDSKNAKKKNNKKTNKNKSSISRANKKKPSMPNVSNDLSQKLYATMEKHKEVFFVIHLHAGPVINTLPPIVDPDPLLSCDLMDGRDAFLTLARDKHWEFSSLRRSKWSTLCMLVELHTQGQDRFVYTCNECKHHVETRWHCTVCEDYDLCINCYNTKSHAHKMVKWGLGLDDEGSSQGEPQSKSPQESRRLSIQRCIQSLVHACQCRNANCSLPSCQKMKRVVQHTKGCKRKTNGGCPVCKQLIALCCYHAKHCQENKCPVPFCLNIKHKLRQQQIQHRLQQAQLMRRRMATMNTRNVPQQSLPSPTSAPPGTPTQQPSTPQTPQPPAQPQPSPVSMSPAGFPSVARTQPPTTVSTGKPTSQVPAPPPPAQPPPAAVEAARQIEREAQQQQHLYRVNINNSMPPGRTGMGTPGSQMAPVSLNVPRPNQVSGPVMPSMPPGQWQQAPLPQQQPMPGLPRPVISMQAQAAVAGPRMPSVQPPRSISPSALQDLLRTLKSPSSPQQQQQVLNILKSNPQLMAAFIKQRTAKYVANQPGMQPQPGLQSQPGMQPQPGMHQQPSLQNLNAMQAGVPRPGVPPQQQAMGGLNPQGQALNIMNPGHNPNMASMNPQYREMLRRQLLQQQQQQQQQQQQQQQQQQGSAGMAGGMAGHGQFQQPQGPGGYPPAMQQQQRMQQHLPLQGSSMGQMAAQMGQLGQMGQPGLGADSTPNIQQALQQRILQQQQMKQQIGSPGQPNPMSPQQHMLSGQPQASHLPGQQIATSLSNQVRSPAPVQSPRPQSQPPHSSPSPRIQPQPSPHHVSPQTGSPHPGLAVTMASSIDQGHLGNPEQSAMLPQLNTPSRSALSSELSLVGDTTGDTLEKFVEGL

SEQ ID NO: 900020 - protein, 2442 aa, Homo sapiens; identical to SEQ ID NO: 900019

SEQ ID NO: 900021 - protein, 2780 aa, Homo sapiens
RPMPRLEPTFEIDEEEEEEDENELFPREYFRRLSSQDVLRCQSSSKRKSKDEEEDEESDDADDFGSLFDLENDLPDELIPNGGELGLLNSGNLVPDAASKHKQLSELLRGGSGSSINPGIGNVSASSPVQQGLGGQAQGQPNSANMASLSAMGKSPLSQGDSSAPSLPKQAASTSGPTPAASQALNPQAQKQVGLATSSPATSQTGPGICMNANFNQTHPGLLNSNSGHSLINQASQGQAQVMNGSLGAAGRGRGAGMPYPTPAMQGASSSVLAETLTQVSPQMTGHAGLNTAQAGGMAKMGITGNTSPFGQPFSQAGGQPMGATGVNPQLASKQSMVNSLPTFPTDIKNTSVTNVPNMSQMQTSVGIVPTQAIATGPTADPEKRKLIQQQLVLLLHAHKCQRREQANGEVRACSLPHCRTMKNVLNHMTHCQAGKACQVAHCASSRQIISHWKNCTRHDCPVCLPLKNASDKRNQQTILGSPASGIQNTIGSVGTGQQNATSLSNPNPIDPSSMQRAYAALGLPYMNQPQTQLQPQVPGQQPAQPQTHQQMRTLNPLGNNPMNIPAGGITTDQQPPNLISESALPTSLGATNPLMNDGSNSGNIGTLSTIPTAAPPSSTGVRKGWHEHVTQDLRSHLVHKLVQAIFPTPDPAALKDRRMENLVAYAKKVEGDMYESANSRDEYYHLLAEKIYKIQKELEEKRRSRLHKQGILGNQPALPAPGAQPPVIPQAQPVRPPNGPLSLPVNRMQVSQGMNSFNPMSLGNVQLPQAPMGPRAASPMNHSVQMNSMGSVPGMAISPSRMPQPPNMMGAHTNNMMAQAPAQSQFLPQNQFPSSSGAMSVGMGQPPAQTGVSQGQVPGAALPNPLNMLGPQASQLPCPPVTQSPLHPTPPPASTAAGMPSLQHTTPPGMTPPQPAAPTQPSTPVSSSGQTPTPTPGSVPSATQTQSTPTVQAAAQAQVTPQPQTPVQPPSVATPQSSQQQPTPVHAQPPGTPLSQAAASIDNRVPTPSSVASAETNSQQPGPDVPVLEMKTETQAEDTEPDPGESKGEPRSEMMEEDLQGASQVKEETDIAEQKSEPMEVDEKKPEVKVEVKEEEESSSNGTASQSTSPSQPRKKIFKPEELRQALMPTLEALYRQDPESLPFRQPVDPQLLGIPDYFDIVKNPMDLSTIKRKLDTGQYQEPWQYVDDVWLMFNNAWLYNRKTSRVYKFCSKLAEVFEQEIDPVMQSLGYCCGRKYEFSPQTLCCYGKQLCTIPRDAAYYSYQNRYHFCEKCFTEIQGENVTLGDDPSQPQTTISKDQFEKKKNDTLDPEPFVDCKECGRKMHQICVLHYDIIWPSGFVCDNCLKKTGRPRKENKFSAKRLQTTRLGNHLEDRVNKFLRRQNHPEAGEVFVRVVASSDKTVEVKPGMKSRFVDSGEMSESFPYRTKALFAFEEIDGVDVCFFGMHVQEYGSDCPPPNTRKFSSSFQGVSFSEPCEDRPGLLSVPEEPVSLHRGLKKMKPQLTNQSSLVLFSIKLAGNEAVEMTAVSVFCVASLCGTPLLPNAGKPGELGLGQPGTCTRGSKLCHEGFMCSQESGQEGTKSGFSQFALTVALCAEWCHSSFCSVTKTEFHLTDWQQVGDWLVFGFWFVCLFITSCLVASVNTIKRKTGQSQHCGRPRWEDNWTTGVCDKSEQQSETLALQKNKLSGHDGTCLVILTMWESEAGGLLEPMRLRLQGAVTASPHCSLNDRARPCLKSKLPGCCLLLVFDFRFEGYPEFKHVPPSHRRVYISYLDSIHFFRPRCLRTAVYHEILIGYLEYVKKLGYVTGHIWACPPSEGDDYIFHCHPPDQKIPKPKRLQEWYKKMLDKAFAERIIHDYKDIFKQATEDRLTSAKELPYFEGDFWPNVLEESIKELEQEEEERKKEESTAASETTEGSQGDSKNAKKKNNKKTNKNKSSISRANKKKPSMPNVSNDLSQKLYATMEKHKEVFFVIHLHAGPVINTLPPIVDPDPLLSCDLMDGRDAFLTLARDKHWEFSSLRRSKWSTLCMLVELHTQGQDRFVYTCNECKHHVETRWHCTVCEDYDLCINCYNTKSHAHKMVKWGLGLDDEGSSQGEPQSKSPQESRRLSIQRCIQSLVHACQCRNANCSLPSCQKMKRVVQHTKGCKRKTNGGCPVCKQLIALCCYHAKHCQENKCPVPFCLNIKHKLRQQQIQHRLQQAQLMRRRMATMNTRNVPQQSLPSPTSAPPGTPTQQPSTPQTPQPPAQPQPSPVSMSPAGFPSVARTQPPTTVSTGKPTSQVPAPPPPAQPPPAAVEAARQIEREAQQQQHLYRVNINNSMPPGRTGMGTPGSQMAPVSLNVPRPNQVSGPVMPSMPPGQWQQAPLPQQQPMPGLPRPVISMQAQAAVAGPRMPSVQPPRSISPSALQDLLRTLKSPSSPQQQQQVLNILKSNPQLMAAFIKQRTAKYVANQPGMQPQPGLQSQPGMQPQPGMHQQPSLQNLNAMQAGVPRPGVPPQQQAMGGLNPQGQALNIMNPGHNPNMASMNPQYREMLRRQLLQQQQQQQQQQQQQQQQQQGSAGMAGGMAGHGQFQQPQGPGGYPPAMQQQQRMQQHLPLQGSSMGQMAAQMGQLGQMGQPGLGADSTPNIQQALQQRILQQQQMKQQIGSPGQPNPMSPQQHMLSGQPQASHLPGQQIATSLSNQVRSPAPVQSPRPQSQPPHSSPSPRIQPQPSPHHVSPQTGSPHPGLAVTMASSIDQGHLGNPEQSAMLPQLNTPSRSALSSELSLVGDTTGDTLEKFVEGL

SEQ ID NO: 900022 - protein, 2397 aa, Homo sapiens
RPMPRLEPTFEIDEEEEEEDENELFPREYFRRLSSQDVLRCQSSSKRKSKDEEEDEESDDADDFGSLFDLENDLPDELIPNGGELGLLNSGNLVPDAASKHKQLSELLRGGSGSSINPGIGNVSASSPVQQGLGGQAQGQPNSANMASLSAMGKSPLSQGDSSAPSLPKQAASTSGPTPAASQALNPQAQKQVGLATSSPATSQTGPGICMNANFNQTHPGLLNSNSGHSLINQASQGQAQVMNGSLGAAGRGRGAGMPYPTPAMQGASSSVLAETLTQVSPQMTGHAGLNTAQAGGMAKMGITGNTSPFGQPFSQAGGQPMGATGVNPQLASKQSMVNSLPTFPTDIKNTSVTNVPNMSQMQTSVGIVPTQAIATGPTADPEKRKLIQQQLVLLLHAHKCQRREQANGEVRACSLPHCRTMKNVLNHMTHCQAGKACQVAHCASSRQIISHWKNCTRHDCPVCLPLKNASDKRNQQTILGSPASGIQNTIGSVGTGQQNATSLSNPNPIDPSSMQRAYAALGLPYMNQPQTQLQPQVPGQQPAQPQTHQQMRTLNPLGNNPMNIPAGGITTDQQPPNLISESALPTSLGATNPLMNDGSNSGNIGTLSTIPTAAPPSSTGVRKGWHEHVTQDLRSHLVHKLVQAIFPTPDPAALKDRRMENLVAYAKKVEGDMYESANSRDEYYHLLAEKIYKIQKELEEKRRSRLHKQGILGNQPALPAPGAQPPVIPQAQPVRPPNGPLSLPVNRMQVSQGMNSFNPMSLGNVQLPQAPMGPRAASPMNHSVQMNSMGSVPGMAISPSRMPQPPNMMGAHTNNMMAQAPAQSQFLPQNQFPSSSGAMSVGMGQPPAQTGVSQGQVPGAALPNPLNMLGPQASQLPCPPVTQSPLHPTPPPASTAAGMPSLQHTTPPGMTPPQPAAPTQPSTPVSSSGQTPTPTPGSVPSATQTQSTPTVQAAAQAQVTPQPQTPVQPPSVATPQSSQQQPTPVHAQPPGTPLSQAAASIDNRVPTPSSVASAETNSQQPGPDVPVLEMKTETQAEDTEPDPGESKGEPRSEMMEEDLQGASQVKEETDIAEQKSEPMEVDEKKPEVKVEVKEEEESSSNGTASQSTSPSQPRKKIFKPEELRQALMPTLEALYRQDPESLPFRQPVDPQLLGIPDYFDIVKNPMDLSTIKRKLDTGQYQEPWQYVDDVWLMFNNAWLYNRKTSRVYKFCSKLTISKDQFEKKKNDTLDPEPFVDCKECGRKMHQICVLHYDIIWPSGFVCDNCLKKTGRPRKENKFSAKRLQTTRLGNHLEDRVNKFLRRQNHPEAGEVFVRVVASSDKTVEVKPGMKSRFVDSGEMSESFPYRTKALFAFEEIDGVDVCFFGMHVQEYGSDCPPPNTRRVYISYLDSIHFFRPRCLRTAVYHEILIGYLEYVKKLGYVTGHIWACPPSEGDDYIFHCHPPDQKIPKPKRLQEWYKKMLDKAFAERIIHDYKDIFKQATEDRLTSAKELPYFEGDFWPNVLEESIKELEQEEEERKKEESTAASETTEGSQGDSKNAKKKNNKKTNKNKSSISRANKKKPSMPNVSNDLSQKLYATMEKHKEVFFVIHLHAGPVINTLPPIVDPDPLLSCDLMDGRDAFLTLARDKHWEFSSLRRSKWSTLCMLVELHTQGQDRFVYTCNECKHHVETRWHCTVCEDYDLCINCYNTKSHAHKMVKWGLGLDDEGSSQGEPQSKSPQESRRLSIQRCIQSLVHACQCRNANCSLPSCQKMKRVVQHTKGCKRKTNGGCPVCKQLIALCCYHAKHCQENKCPVPFCLNIKHKLRQQQIQHRLQQAQLMRRRMATMNTRNVPQQSLPSPTSAPPGTPTQQPSTPQTPQPPAQPQPSPVSMSPAGFPSVARTQPPTTVSTGKPTSQVPAPPPPAQPPPAAVEAARQIEREAQQQQHLYRVNINNSMPPGRTGMGTPGSQMAPVSLNVPRPNQVSGPVMPSMPPGQWQQAPLPQQQPMPGLPRPVISMQAQAAVAGPRMPSVQPPRSISPSALQDLLRTLKSPSSPQQQQQVLNILKSNPQLMAAFIKQRTAKYVANQPGMQPQPGLQSQPGMQPQPGMHQQPSLQNLNAMQAGVPRPGVPPQQQAMGGLNPQGQALNIMNPGHNPNMASMNPQYREMLRRQLLQQQQQQQQQQQQQQQQQQGSAGMAGGMAGHGQFQQPQGPGGYPPAMQQQQRMQQHLPLQGSSMGQMAAQMGQLGQMGQPGLGADSTPNIQQALQQRILQQQQMKQQIGSPGQPNPMSPQQHMLSGQPQASHLPGQQIATSLSNQVRSPAPVQSPRPQSQPPHSSPSPRIQPQPSPHHVSPQTGSPHPGLAVTMASSIDQGHLGNPEQSAMLPQLNTPSRSALSSELSLVGDTTGDTLEKFVEGL

SEQ ID NO: 900023 - protein, 2226 aa, Homo sapiens
MKKRRKRMKMNFSLENTSVVCLRRMYSGVSPLLRGSLKMKKKMKSQMMLMMGITGNTSPFGQPFSQAGGQPMGATGVNPQLASKQSMVNSLPTFPTDIKNTSVTNVPNMSQMQTSVGIVPTQAIATGPTADPEKRKLIQQQLVLLLHAHKCQRREQANGEVRACSLPHCRTMKNVLNHMTHCQAGKACQVAHCASSRQIISHWKNCTRHDCPVCLPLKNASDKRNQQTILGSPASGIQNTIGSVGTGQQNATSLSNPNPIDPSSMQRAYAALGLPYMNQPQTQLQPQVPGQQPAQPQTHQQMRTLNPLGNNPMNIPAGGITTDQQPPNLISESALPTSLGATNPLMNDGSNSGNIGTLSTIPTAAPPSSTGVRKGWHEHVTQDLRSHLVHKLVQAIFPTPDPAALKDRRMENLVAYAKKVEGDMYESANSRDEYYHLLAEKIYKIQKELEEKRRSRLHKQGILGNQPALPAPGAQPPVIPQAQPVRPPNGPLSLPVNRMQVSQGMNSFNPMSLGNVQLPQAPMGPRAASPMNHSVQMNSMGSVPGMAISPSRMPQPPNMMGAHTNNMMAQAPAQSQFLPQNQFPSSSGAMSVGMGQPPAQTGVSQGQVPGAALPNPLNMLGPQASQLPCPPVTQSPLHPTPPPASTAAGMPSLQHTTPPGMTPPQPAAPTQPSTPVSSSGQTPTPTPGSVPSATQTQSTPTVQAAAQAQVTPQPQTPVQPPSVATPQSSQQQPTPVHAQPPGTPLSQAAASIDNRVPTPSSVASAETNSQQPGPDVPVLEMKTETQAEDTEPDPGESKGEPRSEMMEEDLQGASQVKEETDIAEQKSEPMEVDEKKPEVKVEVKEEEESSSNGTASQSTSPSQPRKKIFKPEELRQALMPTLEALYRQDPESLPFRQPVDPQLLGIPDYFDIVKNPMDLSTIKRKLDTGQYQEPWQYVDDVWLMFNNAWLYNRKTSRVYKFCSKLAEVFEQEIDPVMQSLGYCCGRKYEFSPQTLCCYGKQLCTIPRDAAYYSYQNRYHFCEKCFTEIQGENVTLGDDPSQPQTTISKDQFEKKKNDTLDPEPFVDCKECGRKMHQICVLHYDIIWPSGFVCDNCLKKTGRPRKENKFSAKRLQTTRLGNHLEDRVNKFLRRQNHPEAGEVFVRVVASSDKTVEVKPGMKSRFVDSGEMSESFPYRTKALFAFEEIDGVDVCFFGMHVQEYGSDCPPPNTRRVYISYLDSIHFFRPRCLRTAVYHEILIGYLEYVKKLGYVTGHIWACPPSEGDDYIFHCHPPDQKIPKPKRLQEWYKKMLDKAFAERIIHDYKDIFKQATEDRLTSAKELPYFEGDFWPNVLEESIKELEQEEEERKKEESTAASETTEGSQGDSKNAKKKNNKKTNKNKSSISRANKKKPSMPNVSNDLSQKLYATMEKHKEVFFVIHLHAGPVINTLPPIVDPDPLLSCDLMDGRDAFLTLARDKHWEFSSLRRSKWSTLCMLVELHTQGQDRFVYTCNECKHHVETRWHCTVCEDYDLCINCYNTKSHAHKMVKWGLGLDDEGSSQGEPQSKSPQESRRLSIQRCIQSLVHACQCRNANCSLPSCQKMKRVVQHTKGCKRKTNGGCPVCKQLIALCCYHAKHCQENKCPVPFCLNIKHKLRQQQIQHRLQQAQLMRRRMATMNTRNVPQQSLPSPTSAPPGTPTQQPSTPQTPQPPAQPQPSPVSMSPAGFPSVARTQPPTTVSTGKPTSQVPAPPPPAQPPPAAVEAARQIEREAQQQQHLYRVNINNSMPPGRTGMGTPGSQMAPVSLNVPRPNQVSGPVMPSMPPGQWQQAPLPQQQPMPGLPRPVISMQAQAAVAGPRMPSVQPPRSISPSALQDLLRTLKSPSSPQQQQQVLNILKSNPQLMAAFIKQRTAKYVANQPGMQPQPGLQSQPGMQPQPGMHQQPSLQNLNAMQAGVPRPGVPPQQQAMGGLNPQGQALNIMNPGHNPNMASMNPQYREMLRRQLLQQQQQQQQQQQQQQQQQQGSAGMAGGMAGHGQFQQPQGPGGYPPAMQQQQRMQQHLPLQGSSMGQMAAQMGQLGQMGQPGLGADSTPNIQQALQQRILQQQQMKQQIGSPGQPNPMSPQQHMLSGQPQASHLPGQQIATSLSNQVRSPAPVQSPRPQSQPPHSSPSPRIQPQPSPHHVSPQTGSPHPGLAVTMASSIDQGHLGNPEQSAMLPQLNTPSRSALSSELSLVGDTTGDTLEKFVEGL

SEQ ID NO: 900024 - protein, 2012 aa, Homo sapiens
ATEPVPVIQRGDECGHVGSRQPKQACHRDRCLVLLFLTLSTCWGLRPPSSMQRAYAALGLPYMNQPQTQLQPQVPGQQPAQPQTHQQMRTLNPLGNNPMNIPAGGITTDQQPPNLISESALPTSLGATNPLMNDGSNSGNIGTLSTIPTAAPPSSTGVRKGWHEHVTQDLRSHLVHKLVQAIFPTPDPAALKDRRMENLVAYAKKVEGDMYESANSRDEYYHLLAEKIYKIQKELEEKRRSRLHKQGILGNQPALPAPGAQPPVIPQAQPVRPPNGPLSLPVNRMQVSQGMNSFNPMSLGNVQLPQAPMGPRAASPMNHSVQMNSMGSVPGMAISPSRMPQPPNMMGAHTNNMMAQAPAQSQFLPQNQFPSSSGAMSVGMGQPPAQTGVSQGQVPGAALPNPLNMLGPQASQLPCPPVTQSPLHPTPPPASTAAGMPSLQHTTPPGMTPPQPAAPTQPSTPVSSSGQTPTPTPGSVPSATQTQSTPTVQAAAQAQVTPQPQTPVQPPSVATPQSSQQQPTPVHAQPPGTPLSQAAASIDNRVPTPSSVASAETNSQQPGPDVPVLEMKTETQAEDTEPDPGESKGEPRSEMMEEDLQGASQVKEETDIAEQKSEPMEVDEKKPEVKVEVKEEEESSSNGTASQSTSPSQPRKKIFKPEELRQALMPTLEALYRQDPESLPFRQPVDPQLLGIPDYFDIVKNPMDLSTIKRKLDTGQYQEPWQYVDDVWLMFNNAWLYNRKTSRVYKFCSKLAEVFEQEIDPVMQSLGYCCGRKYEFSPQTLCCYGKQLCTIPRDAAYYSYQNRYHFCEKCFTEIQGENVTLGDDPSQPQTTISKDQFEKKKNDTLDPEPFVDCKECGRKMHQICVLHYDIIWPSGFVCDNCLKKTGRPRKENKFSAKRLQTTRLGNHLEDRVNKFLRRQNHPEAGEVFVRVVASSDKTVEVKPGMKSRFVDSGEMSESFPYRTKALFAFEEIDGVDVCFFGMHVQEYGSDCPPPNTRRVYISYLDSIHFFRPRCLRTAVYHEILIGYLEYVKKLGYVTGHIWACPPSEGDDYIFHCHPPDQKIPKPKRLQEWYKKMLDKAFAERIIHDYKDIFKQATEDRLTSAKELPYFEGDFWPNVLEESIKELEQEEEERKKEESTAASETTEGSQGDSKNAKKKNNKKTNKNKSSISRANKKKPSMPNVSNDLSQKLYATMEKHKEVFFVIHLHAGPVINTLPPIVDPDPLLSCDLMDGRDAFLTLARDKHWEFSSLRRSKWSTLCMLVELHTQGQDRFVYTCNECKHHVETRWHCTVCEDYDLCINCYNTKSHAHKMVKWGLGLDDEGSSQGEPQSKSPQESRRLSIQRCIQSLVHACQCRNANCSLPSCQKMKRVVQHTKGCKRKTNGGCPVCKQLIALCCYHAKHCQENKCPVPFCLNIKHKLRQQQIQHRLQQAQLMRRRMATMNTRNVPQQSLPSPTSAPPGTPTQQPSTPQTPQPPAQPQPSPVSMSPAGFPSVARTQPPTTVSTGKPTSQVPAPPPPAQPPPAAVEAARQIEREAQQQQHLYRVNINNSMPPGRTGMGTPGSQMAPVSLNVPRPNQVSGPVMPSMPPGQWQQAPLPQQQPMPGLPRPVISMQAQAAVAGPRMPSVQPPRSISPSALQDLLRTLKSPSSPQQQQQVLNILKSNPQLMAAFIKQRTAKYVANQPGMQPQPGLQSQPGMQPQPGMHQQPSLQNLNAMQAGVPRPGVPPQQQAMGGLNPQGQALNIMNPGHNPNMASMNPQYREMLRRQLLQQQQQQQQQQQQQQQQQQGSAGMAGGMAGHGQFQQPQGPGGYPPAMQQQQRMQQHLPLQGSSMGQMAAQMGQLGQMGQPGLGADSTPNIQQALQQRILQQQQMKQQIGSPGQPNPMSPQQHMLSGQPQASHLPGQQIATSLSNQVRSPAPVQSPRPQSQPPHSSPSPRIQPQPSPHHVSPQTGSPHPGLAVTMASSIDQGHLGNPEQSAMLPQLNTPSRSALSSELSLVGDTTGDTLEKFVEGL

SEQ ID NO: 900025 - protein, 1894 aa, Homo sapiens
RPMPRLEPTFEIDEEEEEEDENELFPREYFRRLSSQDVLRCQSSSKRKSKDEEEDEESDDADDFGSLFDLENDLPDELIPNGGELGLLNSGNLVPDAASKHKQLSELLRGGSGSSINPGIGNVSASSPVQQGLGGQAQGQPNSANMASLSAMGKSPLSQGDSSAPSLPKQAASTSGPTPAASQALNPQAPMGPRAASPMNHSVQMNSMGSVPGMAISPSRMPQPPNMMGAHTNNMMAQAPAQSQFLPQNQFPSSSGAMSVGMGQPPAQTGVSQGQVPGAALPNPLNMLGPQASQLPCPPVTQSPLHPTPPPASTAAGMPSLQHTTPPGMTPPQPAAPTQPSTPVSSSGQTPTPTPGSVPSATQTQSTPTVQAAAQAQVTPQPQTPVQPPSVATPQSSQQQPTPVHAQPPGTPLSQAAASIDNRVPTPSSVASAETNSQQPGPDVPVLEMKTETQAEDTEPDPGESKGEPRSEMMEEDLQGASQVKEETDIAEQKSEPMEVDEKKPEVKVEVKEEEESSSNGTASQSTSPSQPRKKIFKPEELRQALMPTLEALYRQDPESLPFRQPVDPQLLGIPDYFDIVKNPMDLSTIKRKLDTGQYQEPWQYVDDVWLMFNNAWLYNRKTSRVYKFCSKLAEVFEQEIDPVMQSLGYCCGRKYEFSPQTLCCYGKQLCTIPRDAAYYSYQNRYHFCEKCFTEIQGENVTLGDDPSQPQTTISKDQFEKKKNDTLDPEPFVDCKECGRKMHQICVLHYDIIWPSGFVCDNCLKKTGRPRKENKFSAKRLQTTRLGNHLEDRVNKFLRRQNHPEAGEVFVRVVASSDKTVEVKPGMKSRFVDSGEMSESFPYRTKALFAFEEIDGVDVCFFGMHVQEYGSDCPPPNTRRVYISYLDSIHFFRPRCLRTAVYHEILIGYLEYVKKLGYVTGHIWACPPSEGDDYIFHCHPPDQKIPKPKRLQEWYKKMLDKAFAERIIHDYKDIFKQATEDRLTSAKELPYFEGDFWPNVLEESIKELEQEEEERKKEESTAASETTEGSQGDSKNAKKKNNKKTNKNKSSISRANKKKPSMPNVSNDLSQKLYATMEKHKEVFFVIHLHAGPVINTLPPIVDPDPLLSCDLMDGRDAFLTLARDKHWEFSSLRRSKWSTLCMLVELHTQGQDRFVYTCNECKHHVETRWHCTVCEDYDLCINCYNTKSHAHKMVKWGLGLDDEGSSQGEPQSKSPQESRRLSIQRCIQSLVHACQCRNANCSLPSCQKMKRVVQHTKGCKRKTNGGCPVCKQLIALCCYHAKHCQENKCPVPFCLNIKHKLRQQQIQHRLQQAQLMRRRMATMNTRNVPQQSLPSPTSAPPGTPTQQPSTPQTPQPPAQPQPSPVSMSPAGFPSVARTQPPTTVSTGKPTSQVPAPPPPAQPPPAAVEAARQIEREAQQQQHLYRVNINNSMPPGRTGMGTPGSQMAPVSLNVPRPNQVSGPVMPSMPPGQWQQAPLPQQQPMPGLPRPVISMQAQAAVAGPRMPSVQPPRSISPSALQDLLRTLKSPSSPQQQQQVLNILKSNPQLMAAFIKQRTAKYVANQPGMQPQPGLQSQPGMQPQPGMHQQPSLQNLNAMQAGVPRPGVPPQQQAMGGLNPQGQALNIMNPGHNPNMASMNPQYREMLRRQLLQQQQQQQQQQQQQQQQQQGSAGMAGGMAGHGQFQQPQGPGGYPPAMQQQQRMQQHLPLQGSSMGQMAAQMGQLGQMGQPGLGADSTPNIQQALQQRILQQQQMKQQIGSPGQPNPMSPQQHMLSGQPQASHLPGQQIATSLSNQVRSPAPVQSPRPQSQPPHSSPSPRIQPQPSPHHVSPQTGSPHPGLAVTMASSIDQGHLGNPEQSAMLPQLNTPSRSALSSELSLVGDTTGDTLEKFVEGL

SEQ ID NO: 900026 - protein, 2442 aa, Homo sapiens; identical to SEQ ID NO: 900019

SEQ ID NO: 900027 - protein, 1490 aa, Homo sapiens
SVLSDHSQLSQAAASIDNRVPTPSSVASAETNSQQPGPDVPVLEMKTETQAEDTEPDPGESKGEPRSEMMEEDLQGASQVKEETDIAEQKSEPMEVDEKKPEVKVEVKEEEESSSNGTASQSTSPSQPRKKIFKPEELRQALMPTLEALYRQDPESLPFRQPVDPQLLGIPDYFDIVKNPMDLSTIKRKLDTGQYQEPWQYVDDVWLMFNNAWLYNRKTSRVYKFCSKLAEVFEQEIDPVMQSLGYCCGRKYEFSPQTLCCYGKQLCTIPRDAAYYSYQNRYHFCEKCFTEIQGENVTLGDDPSQPQTTISKDQFEKKKNDTLDPEPFVDCKECGRKMHQICVLHYDIIWPSGFVCDNCLKKTGRPRKENKFSAKRLQTTRLGNHLEDRVNKFLRRQNHPEAGEVFVRVVASSDKTVEVKPGMKSRFVDSGEMSESFPYRTKALFAFEEIDGVDVCFFGMHVQEYGSDCPPPNTRRVYISYLDSIHFFRPRCLRTAVYHEILIGYLEYVKKLGYVTGHIWACPPSEGDDYIFHCHPPDQKIPKPKRLQEWYKKMLDKAFAERIIHDYKDIFKQATEDRLTSAKELPYFEGDFWPNVLEESIKELEQEEEERKKEESTAASETTEGSQGDSKNAKKKNNKKTNKNKSSISRANKKKPSMPNVSNDLSQKLYATMEKHKEVFFVIHLHAGPVINTLPPIVDPDPLLSCDLMDGRDAFLTLARDKHWEFSSLRRSKWSTLCMLVELHTQGQDRFVYTCNECKHHVETRWHCTVCEDYDLCINCYNTKSHAHKMVKWGLGLDDEGSSQGEPQSKSPQESRRLSIQRCIQSLVHACQCRNANCSLPSCQKMKRVVQHTKGCKRKTNGGCPVCKQLIALCCYHAKHCQENKCPVPFCLNIKHKLRQQQIQHRLQQAQLMRRRMATMNTRNVPQQSLPSPTSAPPGTPTQQPSTPQTPQPPAQPQPSPVSMSPAGFPSVARTQPPTTVSTGKPTSQVPAPPPPAQPPPAAVEAARQIEREAQQQQHLYRVNINNSMPPGRTGMGTPGSQMAPVSLNVPRPNQVSGPVMPSMPPGQWQQAPLPQQQPMPGLPRPVISMQAQAAVAGPRMPSVQPPRSISPSALQDLLRTLKSPSSPQQQQQVLNILKSNPQLMAAFIKQRTAKYVANQPGMQPQPGLQSQPGMQPQPGMHQQPSLQNLNAMQAGVPRPGVPPQQQAMGGLNPQGQALNIMNPGHNPNMASMNPQYREMLRRQLLQQQQQQQQQQQQQQQQQQGSAGMAGGMAGHGQFQQPQGPGGYPPAMQQQQRMQQHLPLQGSSMGQMAAQMGQLGQMGQPGLGADSTPNIQQALQQRILQQQQMKQQIGSPGQPNPMSPQQHMLSGQPQASHLPGQQIATSLSNQVRSPAPVQSPRPQSQPPHSSPSPRIQPQPSPHHVSPQTGSPHPGLAVTMASSIDQGHLGNPEQSAMLPQLNTPSRSALSSELSLVGDTTGDTLEKFVEGL

SEQ ID NO: 900028 - protein, 1153 aa, Homo sapiens
MHQICVLHYDIIWPSGFVCDNCLKKTGRPRKENKFSAKRLQTTRLGNHLEDRVNKFLRRQNHPEAGEVFVRVVASSDKTVEVKPGMKSRFVDSGEMSESFPYRTKALFAFEEIDGVDVCFFGMHVQEYGSDCPPPNTRRVYISYLDSIHFFRPRCLRTAVYHEILIGYLEYVKKLGYVTGHIWACPPSEGDDYIFHCHPPDQKIPKPKRLQEWYKKMLDKAFAERIIHDYKDIFKQATEDRLTSAKELPYFEGDFWPNVLEESIKELEQEEEERKKEESTAASETTEGSQGDSKNAKKKNNKKTNKNKSSISRANKKKPSMPNVSNDLSQKLYATMEKHKEVFFVIHLHAGPVINTLPPIVDPDPLLSCDLMDGRDAFLTLARDKHWEFSSLRRSKWSTLCMLVELHTQGQDRFVYTCNECKHHVETRWHCTVCEDYDLCINCYNTKSHAHKMVKWGLGLDDEGSSQGEPQSKSPQESRRLSIQRCIQSLVHACQCRNANCSLPSCQKMKRVVQHTKGCKRKTNGGCPVCKQLIALCCYHAKHCQENKCPVPFCLNIKHKLRQQQIQHRLQQAQLMRRRMATMNTRNVPQQSLPSPTSAPPGTPTQQPSTPQTPQPPAQPQPSPVSMSPAGFPSVARTQPPTTVSTGKPTSQVPAPPPPAQPPPAAVEAARQIEREAQQQQHLYRVNINNSMPPGRTGMGTPGSQMAPVSLNVPRPNQVSGPVMPSMPPGQWQQAPLPQQQPMPGLPRPVISMQAQAAVAGPRMPSVQPPRSISPSALQDLLRTLKSPSSPQQQQQVLNILKSNPQLMAAFIKQRTAKYVANQPGMQPQPGLQSQPGMQPQPGMHQQPSLQNLNAMQAGVPRPGVPPQQQAMGGLNPQGQALNIMNPGHNPNMASMNPQYREMLRRQLLQQQQQQQQQQQQQQQQQQGSAGMAGGMAGHGQFQQPQGPGGYPPAMQQQQRMQQHLPLQGSSMGQMAAQMGQLGQMGQPGLGADSTPNIQQALQQRILQQQQMKQQIGSPGQPNPMSPQQHMLSGQPQASHLPGQQIATSLSNQVRSPAPVQSPRPQSQPPHSSPSPRIQPQPSPHHVSPQTGSPHPGLAVTMASSIDQGHLGNPEQSAMLPQLNTPSRSALSSELSLVGDTTGDTLEKFVEGL

SEQ ID NO: 900029 - protein, 1269 aa, Homo sapiens
RPMPRLEPTFEIDEEEEEEDENELFPREYFRRLSSQDVLRCQSSSKRKSKDEEEDEESDDADDFGSLFDLENDLPDELIPNGGELGLLNSGNLVPDAASKHKQLSELLRGGSGSSINPGIGNVSASSPVQQGLGGQAQGQPNSANMASLSAMGKSPLSQGDSSAPSLPKQAASTSGPTPAASQALNPQAQKQVGLATSSPATSQTGPGICMNANFNQTHPGLLNSNSGHSLINQASQGQAQVMNGSLGAAGRGRGAGMPYPTPAMQGASSSVLAETLTQVSPQMTGHAGLNTAQAGGMAKVSELKHFQYFLPNRGLSLRVMRKMGPRGPLLFFLLGSPRATHAWKRQISFQDKDLCPISVFKMRILKEVGQLAGQAVYSVRAVYSVRAVYSVRAVYSVRAVYRGSQGDSKNAKKKNNKKTNKNKSSISRANKKKPSMPNVSNDLSQKLYATMEKHKEVFFVIHLHAGPVINTLPPIVDPDPLLSCDLMDGRDAFLTLARDKHWEFSSLRRSKWSTLCMLVELHTQGQDRFVYTCNECKHHVETRWHCTVCEDYDLCINCYNTKSHAHKMVKWGLGLDDEGSSQGEPQSKSPQESRRLSIQRCIQSLVHACQCRNANCSLPSCQKMKRVVQHTKGCKRKTNGGCPVCKQLIALCCYHAKHCQENKCPVPFCLNIKHKLRQQQIQHRLQQAQLMRRRMATMNTRNVPQQSLPSPTSAPPGTPTQQPSTPQTPQPPAQPQPSPVSMSPAGFPSVARTQPPTTVSTGKPTSQVPAPPPPAQPPPAAVEAARQIEREAQQQQHLYRVNINNSMPPGRTGMGTPGSQMAPVSLNVPRPNQVSGPVMPSMPPGQWQQAPLPQQQPMPGLPRPVISMQAQAAVAGPRMPSVQPPRSISPSALQDLLRTLKSPSSPQQQQQVLNILKSNPQLMAAFIKQRTAKYVANQPGMQPQPGLQSQPGMQPQPGMHQQPSLQNLNAMQAGVPRPGVPPQQQAMGGLNPQGQALNIMNPGHNPNMASMNPQYREMLRRQLLQQQQQQQQQQQQQQQQQQGSAGMAGGMAGHGQFQQPQGPGGYPPAMQQQQRMQQHLPLQGSSMGQMAAQMGQLGQMGQPGLGADSTPNIQQALQQRILQQQQMKQQIGSPGQPNPMSPQQHMLSGQPQASHLPGQQIATSLSNQVRSPAPVQSPRPQSQPPHSSPSPRIQPQPSPHHVSPQTGSPHPGLAVTMASSIDQGHLGNPEQSAMLPQLNTPSRSALSSELSLVGDTTGDTLEKFVEGL

SEQ ID NO: 900030 - protein, 1461 aa, Homo sapiens
RPMPRLEPTFEIDEEEEEEDENELFPREYFRRLSSQDVLRCQSSSKRKSKDEEEDEESDDADDFGSLFDLENDLPDELIPNGGELGLLNSGNLVPDAASKHKQLSELLRGGSGSSINPGIGNVSASSPVQQGLGGQAQGQPNSANMASLSAMGKSPLSQGDSSAPSLPKQAASTSGPTPAASQALNPQAQKQVGLATSSPATSQTGPGICMNANFNQTHPGLLNSNSGHSLINQASQGQAQVMNGSLGAAGRGRGAGMPYPTPAMQGASSSVLAETLTQVSPQMTGHAGLNTAQAGGMAKMGITGNTSPFGQPFSQAGGQPMGATGVNPQLASKQSMVNSLPTFPTDIKNTSVTNVPNMSQMQTSVGIVPTQAIATGPTADPEKRKLIQQQLVLLLHAHKCQRREQANGEVRACSLPHCRTMKNVLNHMTHCQAGKACQVAHCASSRQIISHWKNCTRHDCPVCLPLKNASDKRNQQTILGSPASGIQNTIGSVGTGQQNATSLSNPNPIDPSSMQRAYAALGLPYMNQPQTQLQPQVPGQQPAQPQTHQQMRTLNPLGNNPMNIPAGGITTDQQPPNLISESALPTSLGATNPLMNDGSNSGNIGTLSTIPTAAPPSSTGVRKGWHEHVTQDLRSHLVHKLVQAIFPTPDPAALKDRRMENLVAYAKKVEGDMYESANSRDEYYHLLAEKIYKIQKELEEKRRSRLHKQGILGNQPALPAPGAQPPVIPQAQPVRPPNGPLSLPVNRMQVSQGMNSFNPMSLGNVQLPQAPMGPRAASPMNHSVQMNSMGSVPGMAISPSRMPQPPNMMGAHTNNMMAQAPAQSQFLPQNQFPSSSGAMSVGMGQPPAQTGVSQGQVPGAALPNPLNMLGPQASQLPCPPVTQSPLHPTPPPASTAAGMPSLQHTTPPGMTPPQPAAPTQPSTPVSSSGQTPTPTPGSVPSATQTQSTPTVQAAAQAQVTPQPQTPVQPPSVATPQSSQQQPTPVHAQPPGTPLSQAAASIDNRVPTPSSVASAETNSQQPGPDVPVLEMKTETQAEDTEPDPGESKGEPRSEMMEEDLQGASQVKEETDIAEQKSEPMEVDEKKPEVKVEVKEEEESSSNGTASQSTSPSQPRKKIFKPEELRQALMPTLEALYRQDPESLPFRQPVDPQLLGIPDYFDIVKNPMDLSTIKRKLDTGQYQEPWQYVDDVWLMFNNAWLYNRKTSRVYKFCSKLAEVFEQEIDPVMQSLGYCCGRKYEFSPQTLCCYGKQLCTIPRDAAYYSYQNRYHFCEKCFTEIQGENVTLGDDPSQPQTTISKDQFEKKKNDTLDPEPFVDCKECGRKMHQICVLHYDIIWPSGFVCDNCLKKTGRPRKENKFSAKRLQTTRLGNHLEDRVNKFLRRQNHPEAGEVFVRVVASSDKTVEVKPGMKSRFVDSGEMSESFPYRTKALFAFEEIDGVDVCFFGMHVQEYGSDCPPPNTR

SEQ ID NO: 900031 - protein, 1461 aa, Homo sapiens; identical to SEQ ID NO: 900030

SEQ ID NO: 900032 - protein, 1240 aa, Homo sapiens
RPMPRLEPTFEIDEEEEEEDENELFPREYFRRLSSQDVLRCQSSSKRKSKDEEEDEESDDADDFGSLFDLENDLPDELIPNGGELGLLNSGNLVPDAASKHKQLSELLRGGSGSSINPGIGNVSASSPVQQGLGGQAQGQPNSANMASLSAMGKSPLSQGDSSAPSLPKQAASTSGPTPAASQALNPQAQKQVGLATSSPATSQTGPGICMNANFNQTHPGLLNSNSGHSLINQASQGQAQVMNGSLGAAGRGRGAGMPYPTPAMQGASSSVLAETLTQVSPQMTGHAGLNTAQAGGMAKMGITGNTSPFGQPFSQAGGQPMGATGVNPQLASKQSMVNSLPTFPTDIKNTSVTNVPNMSQMQTSVGIVPTQAIATGPTADPEKRKLIQQQLVLLLHAHKCQRREQANGEVRACSLPHCRTMKNVLNHMTHCQAGKACQVAHCASSRQIISHWKNCTRHDCPVCLPLKNASDKRNQQTILGSPASGIQNTIGSVGTGQQNATSLSNPNPIDPSSMQRAYAALGLPYMNQPQTQLQPQVPGQQPAQPQTHQQMRTLNPLGNNPMNIPAGGITTDQQPPNLISESALPTSLGATNPLMNDGSNSGNIGTLSTIPTAAPPSSTGVRKGWHEHVTQDLRSHLVHKLVQAIFPTPDPAALKDRRMENLVAYAKKVEGDMYESANSRDEYYHLLAEKIYKIQKELEEKRRSRLHKQGILGNQPALPAPGAQPPVIPQAQPVRPPNGPLSLPVNRMQVSQGMNSFNPMSLGNVQLPQAPMGPRAASPMNHSVQMNSMGSVPGMAISPSRMPQPPNMMGAHTNNMMAQAPAQSQFLPQNQFPSSSGAMSVGMGQPPAQTGVSQGQVPGAALPNPLNMLGPQASQLPCPPVTQSPLHPTPPPASTAAGMPSLQHTTPPGMTPPQPAAPTQPSTPVSSSGQTPTPTPGSVPSATQTQSTPTVQAAAQAQVTPQPQTPVQPPSVATPQSSQQQPTPVHAQPPGTPLSQAAASIDNRVPTPSSVASAETNSQQPGPDVPVLEMKTETQAEDTEPDPGESKGEPRSEMMEEDLQGASQVKEETDIAEQKSEPMEVDEKKPEVKVEVKEEEESSSNGTASQSTSPSQPRKKIFKPEELRQALMPTLEALYRQDPESLPFRQPVDPQLLGIPDYFDIVKNPMDLSTIKRKLDTGQYQEPWQYVDDVWLMFNNAWLYNRKTSRVYKFCSKLAEVFEQEIDPVMQSLGYCCGRKVQF

SEQ ID NO: 900033 - protein, 103 aa, Homo sapiens [sequence omitted]

SEQ ID NO: 900034 - protein, 865 aa, Homo sapiens
RPMPRLEPTFEIDEEEEEEDENELFPREYFRRLSSQDVLRCQSSSKRKSKDEEEDEESDDADDFGSLFDLENDLPDELIPNGGELGLLNSGNLVPDAASKHKQLSELLRGGSGSSINPGIGNVSASSPVQQGLGGQAQGQPNSANMASLSAMGKSPLSQGDSSAPSLPKQAASTSGPTPAASQALNPQAQKQVGLATSSPATSQTGPGICMNANFNQTHPGLLNSNSGHSLINQASQGQAQVMNGSLGAAGRGRGAGMPYPTPAMQGASSSVLAETLTQVSPQMTGHAGLNTAQAGGMAKMGITGNTSPFGQPFSQAGGQPMGATGVNPQLASKQSMVNSLPTFPTDIKNTSVTNVPNMSQMQTSVGIVPTQAIATGPTADPEKRKLIQQQLVLLLHAHKCQRREQANGEVRACSLPHCRTMKNVLNHMTHCQAGKACQVAHCASSRQIISHWKNCTRHDCPVCLPLKNASDKRNQQTILGSPASGIQNTIGSVGTGQQNATSLSNPNPIDPSSMQRAYAALGLPYMNQPQTQLQPQVPGQQPAQPQTHQQMRTLNPLGNNPMNIPAGGITTDQQPPNLISESALPTSLGATNPLMNDGSNSGNIGTLSTIPTAAPPSSTGVRKGWHEHVTQDLRSHLVHKLVQAIFPTPDPAALKDRRMENLVAYAKKVEGDMYESANSRDEYYHLLAEKIYKIQKELEEKRRSRLHKQGILGNQPALPAPGAQPPVIPQAQPVRPPNGPLSLPVNRMQVSQGMNSFNPMSLGNVQLPQAPMGPRAASPMNHSVQMNSMGSVPGMAISPSRMPQPPNMMGAHTNNMMAQAPAQSQFLPQNQFPSSSGAMSVGMGQPPAQTGVSQVLCPTGTVAP

SEQ ID NO: 900035 - protein, 850 aa, Homo sapiens
RPMPRLEPTFEIDEEEEEEDENELFPREYFRRLSSQDVLRCQSSSKRKSKDEEEDEESDDADDFGSLFDLENDLPDELIPNGGELGLLNSGNLVPDAASKHKQLSELLRGGSGSSINPGIGNVSASSPVQQGLGGQAQGQPNSANMASLSAMGKSPLSQGDSSAPSLPKQAASTSGPTPAASQALNPQAQKQVGLATSSPATSQTGPGICMNANFNQTHPGLLNSNSGHSLINQASQGQAQVMNGSLGAAGRGRGAGMPYPTPAMQGASSSVLAETLTQVSPQMTGHAGLNTAQAGGMAKMGITGNTSPFGQPFSQAGGQPMGATGVNPQLASKQSMVNSLPTFPTDIKNTSVTNVPNMSQMQTSVGIVPTQAIATGPTADPEKRKLIQQQLVLLLHAHKCQRREQANGEVRACSLPHCRTMKNVLNHMTHCQAGKACQVAHCASSRQIISHWKNCTRHDCPVCLPLKNASDKRNQQTILGSPASGIQNTIGSVGTGQQNATSLSNPNPIDPSSMQRAYAALGLPYMNQPQTQLQPQVPGQQPAQPQTHQQMRTLNPLGNNPMNIPAGGITTDQQPPNLISESALPTSLGATNPLMNDGSNSGNIGTLSTIPTAAPPSSTGVRKGWHEHVTQDLRSHLVHKLVQAIFPTPDPAALKDRRMENLVAYAKKVEGDMYESANSRDEYYHLLAEKIYKIQKELEEKRRSRLHKQGILGNQPALPAPGAQPPVIPQAQPVRPPRMNSFNPMSLGNVQLPQAPMGPRAASPMNHSVQMNSMGSVPGMAISPSRMPQPPNMMGAHTNNMMAQAPAQSQFLPQNQFPSSSGAMSVGMGQPPAQTGVSQVLCPTGTVAP

SEQ ID NO: 900036 - protein, 439 aa, Homo sapiens
RPMPRLEPTFEIDEEEEEEDENELFPREYFRRLSSQDVLRCQSSSKRKSKDEEEDEESDDADDFGSLFDLENDLPDELIPNGGELGLLNSGNLVPDAASKHKQLSELLRGGSGSSINPGIGNVSASSPVQQGLGGQAQGQPNSANMASLSAMGKSPLSQGDSSAPSLPKQAASTSGPTPAASQALNPQAQKQVGLATSSPATSQTGPGICMNANFNQTHPGLLNSNSGHSLINQASQGQAQVMNGSLGAAGRGRGAGMPYPTPAMQGASSSVLAETLTQVSPQMTGHAGLNTAQAGGMAKMGITGNTSPFGQPFSQAGGQPMGATGVNPQLASKQSMVNSLPTFPTDIKNTSVTNVPNMSQMQTSVGIVPTQAIATGPTADPEKRKLIQQQLVLLLHAHKCQRREPLELNPQLASKQSMVNSLPTFPTDIKNTSVTNVP

SEQ ID NO: 900037 - protein, 94 aa, Homo sapiens
MAENLLDGPPNPKRAKLSSPGFSANDSTDNMNDDSSNLKEGSKDNPEPLKCKQVWPKGTKRGLSKWRQNKERKTGFKLNLYTPPETPMEPDEQV

SEQ ID NO: 900038 - protein, 68 aa, Homo sapiens
MAENLLDGPPNPKRAKLSSPGFSANDSTDTPILKPVSLLRKRDVKNSPLEPDTSTPLKKKKGWPKGKS

SEQ ID NO: 900039 - protein, 2442 aa, Homo sapiens; identical to SEQ ID NO: 900019

SEQ ID NO: 900040 - protein, 2476 aa, Homo sapiens
RPMPRLEPTFEIDEEEEEEDENELFPREYFRRLSSQDVLRCQSSSKRKSKDEEEDEESDDADDFGSLFDLENDLPDELIPNGGELGLLNSGNLVPDAASKHKQLSELLRGGSGSSINPGIGNVSASSPVQQGLGGQAQGQPNSANMASLSAMGKSPLSQGDSSAPSLPKQAASTSGPTPAASQALNPQAQKQVGLATSSPATSQTGPGICMNANFNQTHPGLLNSNSGHSLINQASQGQAQVMNGSLGAAGRGRGAGMPYPTPAMQGASSSVLAETLTQVSPQMTGHAGLNTAQAGGMAKMGITGNTSPFGQPFSQAGGQPMGATGVNPQLASKQSMVNSLPTFPTDIKNTSVTNVPNMSQMQTSVGIVPTQAIATGPTADPEKRKLIQQQLVLLLHAHKCQRREQANGEVRACSLPHCRTMKNVLNHMTHCQAGKACQVAHCASSRQIISHWKNCTRHDCPVCLPLKNASDKRNQQTILGSPASGIQNTIGSVGTGQQNATSLSNPNPIDPSSMQRAYAALGLPYMNQPQTQLQPQVPGQQPAQPQTHQQMRTLNPLGNNPMNIPAGGITTDQQPPNLISESALPTSLGATNPLMNDGSNSGNIGTLSTIPTAAPPSSTGVRKGWHEHVTQDLRSHLVHKLVQAIFPTPDPAALKDRRMENLVAYAKKVEGDMYESANSRDEYYHLLAEKIYKIQKELEEKRRSRLHKQGILGNQPALPAPGAQPPVIPQAQPVRPPNGPLSLPVNRMQVSQGMNSFNPMSLGNVQLPQAPMGPRAASPMNHSVQMNSMGSVPGMAISPSRMPQPPNMMGAHTNNMMAQAPAQSQFLPQNQFPSSSGAMSVGMGQPPAQTGVSQGQVPGAALPNPLNMLGPQASQLPCPPVTQSPLHPTPPPASTAAGMPSLQHTTPPGMTPPQPAAPTQPSTPVSSSGQTPTPTPGSVPSATQTQSTPTVQAAAQAQVTPQPQTPVQPPSVATPQSSQQQPTPVHAQPPGTPLSQAAASIDNRVPTPSSVASAETNSQQPGPDVPVLEMKTETQAEDTEPDPGESKGEPRSEMMEEDLQGASQVKEETDIAEQKSEPMEVDEKKPEVKVEVKEEEESSSNGTASQSTSPSQPRKKIFKPEELRQALMPTLEALYRQDPESLPFRQPVDPQLLGIPDYFDIVKNPMDLSTIKRKLDTGQYQEPWQYVDDVWLMFNNAWLYNRKTSRVYKFCSKLAEVFEQEIDPVMQSLGYCCGRKYEFSPQTLCCYGKQLCTIPRDAAYYSYQNRYHFCEKCFTEIQGENVTLGDDPSQPQTTISKDQFEKKKNDTLDPEPFVDCKECGRKMHQICVLHYDIIWPSGFVCDNCLKKTGRPRKENKFSAKRLQTTRLGNHLEDRVNKFLRRQNHPEAGEVFVRVVASSDKTVEVKPGMKSRFVDSGEMSESFPYRTKALFAFEEIDGVDVCFFGMHVQEYGSDCPPPNTRRVYISYLDSIHFFRPRCLRTAVYHEILIGYLEYVKKLGYVTGHIWACPPSEGDDYIFHCHPPDQKIPKPKRLQEWYKKMLDKAFAERIIHDYKDIFKQATEDRLTSAKELPYFEGDFWPNVLEESIKELEQEEEERKKEESTAASETTEGSQGDSKNAKKKNNKKTNKNKSSISRANKKKPSMPNVSNDLSQKLYATMEKHKEVFFVIHLHAGPVINTLPPIVDPDPLLSCDLMDGRDAFLTLARDKHWEFSSLRRSKWSTLCMLVELHTQGQDRFVYTCNECKHHVETRWHCTVCEDYDLCINCYNTKSHAHKMVKWGLGLDDEGSSQGEPQSKSPQESRRLSIQRCIQSLVHACQCRNANCSLPSCQKMKRVVQHTKGCKRKTNGGCPVCKQLIALCCYHAKHCQENKCPVPFCLNIKHKLRQQQIQHRLQQAQLMRRRMATMNTRNVPQQSLPSPTSAPPGTPTQQPSTPQTPQPPAQPQPSPVSMSPAGFPSVARTQPPTTVSTGKPTSQVPAPPPPAQPPPAAVEAARQIEREAQQQQHLYRVNINNSMPPGRTGMGTPGSQMAPVSLNVPRPNQVSGPVMPSMPPGQWQQAPLPQQQPMPGLPRPVISMQAQAAVAGPRMPSVQPPRSISPSALQDLLRTLKSPSSPQQQQQVLNILKSNPQLMAAFIKQRTAKYVANQPGMQPQPGLQSQPGMQPQPGMHQQPSLQNLNAMQAGVPRPGVPPQQQAMGGLNPQGQALNIMNPGHNPNMASMNPQYREMLRRQLLQQQQQQQQQQQQQQQQQQGSAGMAGGMAGHGQFQQPQGPGGYPPAMQQQQRMQQHLPLQGSSMGQMAAQMGQLGQMGQPGLGADSTPNIQQALQQRILQQQQMKQQIGSPGQPNPMSPQQHMLSGQPQASHLPGQQIATSLSNQVRSPAPVQSPRPQSQPPHSSPSPRIQPQPSPHHVSPQTGSPHPGLAVTMASSIDQGHLGNPEQSAMLPQLNTPSRSALSSELSLVGDTTGDTLEKFVEGL

SEQ ID NO: 900041 - protein, 2438 aa, Homo sapiens
RPMPRLEPTFEIDEEEEEEDENELFPREYFRRLSSQDVLRCQSSSKRKSKDEEEDEESDDADDFGSLFDLENDLPDELIPNGGELGLLNSGNLVPDAASKHKQLSELLRGGSGSSINPGIGNVSASSPVQQGLGGQAQGQPNSANMASLSAMGKSPLSQGDSSAPSLPKQAASTSGPTPAASQALNPQAQKQVGLATSSPATSQTGPGICMNANFNQTHPGLLNSNSGHSLINQASQGQAQVMNGSLGAAGRGRGAGMPYPTPAMQGASSSVLAETLTQVSPQMTGHAGLNTAQAGGMAKMGITGNTSPFGQPFSQAGGQPMGATGVNPQLASKQSMVNSLPTFPTDIKNTSVTNVPNMSQMQTSVGIVPTQAIATGPTADPEKRKLIQQQLVLLLHAHKCQRREQANGEVRACSLPHCRTMKNVLNHMTHCQAGKACQAILGSPASGIQNTIGSVGTGQQNATSLSNPNPIDPSSMQRAYAALGLPYMNQPQTQLQPQVPGQQPAQPQTHQQMRTLNPLGNNPMNIPAGGITTDQQPPNLISESALPTSLGATNPLMNDGSNSGNIGTLSTIPTAAPPSSTGVRKGWHEHVTQDLRSHLVHKLVQAIFPTPDPAALKDRRMENLVAYAKKVEGDMYESANSRDEYYHLLAEKIYKIQKELEEKRRSRLHKQGILGNQPALPAPGAQPPVIPQAQPVRPPNGPLSLPVNRMQVSQGMNSFNPMSLGNVQLPQAPMGPRAASPMNHSVQMNSMGSVPGMAISPSRMPQPPNMMGAHTNNMMAQAPAQSQFLPQNQFPSSSGAMSVGMGQPPAQTGVSQGQVPGAALPNPLNMLGPQASQLPCPPVTQSPLHPTPPPASTAAGMPSLQHTTPPGMTPPQPAAPTQPSTPVSSSGQTPTPTPGSVPSATQTQSTPTVQAAAQAQVTPQPQTPVQPPSVATPQSSQQQPTPVHAQPPGTPLSQAAASIDNRVPTPSSVASAETNSQQPGPDVPVLEMKTETQAEDTEPDPGESKGEPRSEMMEEDLQGASQVKEETDIAEQKSEPMEVDEKKPEVKVEVKEEEESSSNGTASQSTSPSQPRKKIFKPEELRQALMPTLEALYRQDPESLPFRQPVDPQLLGIPDYFDIVKNPMDLSTIKRKLDTGQYQEPWQYVDDVWLMFNNAWLYNRKTSRVYKFCSKLAEVFEQEIDPVMQSLGYCCGRKYEFSPQTLCCYGKQLCTIPRDAAYYSYQNRYHFCEKCFTEIQGENVTLGDDPSQPQTTISKDQFEKKKNDTLDPEPFVDCKECGRKMHQICVLHYDIIWPSGFVCDNCLKKTGRPRKENKFSAKRLQTTRLGNHLEDRVNKFLRRQNHPEAGEVFVRVVASSDKTVEVKPGMKSRFVDSGEMSESFPYRTKALFAFEEIDGVDVCFFGMHVQEYGSDCPPPNTRRVYISYLDSIHFFRPRCLRTAVYHEILIGYLEYVKKLGYVTGHIWACPPSEGDDYIFHCHPPDQKIPKPKRLQEWYKKMLDKAFAERIIHDYKDIFKQATEDRLTSAKELPYFEGDFWPNVLEESIKELEQEEEERKKEESTAASETTEGSQGDSKNAKKKNNKKTNKNKSSISRANKKKPSMPNVSNDLSQKLYATMEKHKEVFFVIHLHAGPVINTLPPIVDPDPLLSCDLMDGRDAFLTLARDKHWEFSSLRRSKWSTLCMLVELHTQGQDRFVYTCNECKHHVETRWHCTVCEDYDLCINCYNTKSHAHKMVKWGLGLDDEGSSQGEPQSKSPQESRRLSIQRCIQSLVHACQCRNANCSLPSCQKMKRVVQHTKGCKRKTNGGCPVCKQLIALCCYHAKHCQENKCPVPFCLNIKHKLRQQQIQHRLQQAQLMRRRMATMNTRNVPQQSLPSPTSAPPGTPTQQPSTPQTPQPPAQPQPSPVSMSPAGFPSVARTQPPTTVSTGKPTSQVPAPPPPAQPPPAAVEAARQIEREAQQQQHLYRVNINNSMPPGRTGMGTPGSQMAPVSLNVPRPNQVSGPVMPSMPPGQWQQAPLPQQQPMPGLPRPVISMQAQAAVAGPRMPSVQPPRSISPSALQDLLRTLKSPSSPQQQQQVLNILKSNPQLMAAFIKQRTAKYVANQPGMQPQPGLQSQPGMQPQPGMHQQPSLQNLNAMQAGVPRPGVPPQQQAMGGLNPQGQALNIMNPGHNPNMASMNPQYREMLRRQLLQQQQQQQQQQQQQQQQQQGSAGMAGGMAGHGQFQQPQGPGGYPPAMQQQQRMQQHLPLQGSSMGQMAAQMGQLGQMGQPGLGADSTPNIQQALQQRILQQQQMKQQIGSPGQPNPMSPQQHMLSGQPQASHLPGQQIATSLSNQVRSPAPVQSPRPQSQPPHSSPSPRIQPQPSPHHVSPQTGSPHPGLAVTMASSIDQGHLGNPEQSAMLPQLNTPSRSALSSELSLVGDTTGDTLEKFVEGL

SEQ ID NO: 900042 - protein, 2442 aa, Homo sapiens; identical to SEQ ID NO: 900019

SEQ ID NO: 900043 - protein, 1722 aa, Homo sapiens
MNSFNPMSLGNVQLPQAPMGPRAASPMNHSVQMNSMGSVPGMAISPSRMPQPPNMMGAHTNNMMAQAPAQSQFLPQNQFPSSSGAMSVGMGQPPAQTGVSQGQVPGAALPNPLNMLGPQASQLPCPPVTQSPLHPTPPPASTAAGMPSLQHTTPPGMTPPQPAAPTQPSTPVSSSGQTPTPTPGSVPSATQTQSTPTVQAAAQAQVTPQPQTPVQPPSVATPQSSQQQPTPVHAQPPGTPLSQAAASIDNRVPTPSSVASAETNSQQPGPDVPVLEMKTETQAEDTEPDPGESKGEPRSEMMEEDLQGASQVKEETDIAEQKSEPMEVDEKKPEVKVEVKEEEESSSNGTASQSTSPSQPRKKIFKPEELRQALMPTLEALYRQDPESLPFRQPVDPQLLGIPDYFDIVKNPMDLSTIKRKLDTGQYQEPWQYVDDVWLMFNNAWLYNRKTSRVYKFCSKLAEVFEQEIDPVMQSLGYCCGRKYEFSPQTLCCYGKQLCTIPRDAAYYSYQNRYHFCEKCFTEIQGENVTLGDDPSQPQTTISKDQFEKKKNDTLDPEPFVDCKECGRKMHQICVLHYDIIWPSGFVCDNCLKKTGRPRKENKFSAKRLQTTRLGNHLEDRVNKFLRRQNHPEAGEVFVRVVASSDKTVEVKPGMKSRFVDSGEMSESFPYRTKALFAFEEIDGVDVCFFGMHVQEYGSDCPPPNTRRVYISYLDSIHFFRPRCLRTAVYHEILIGYLEYVKKLGYVTGHIWACPPSEGDDYIFHCHPPDQKIPKPKRLQEWYKKMLDKAFAERIIHDYKDIFKQATEDRLTSAKELPYFEGDFWPNVLEESIKELEQEEEERKKEESTAASETTEGSQGDSKNAKKKNNKKTNKNKSSISRANKKKPSMPNVSNDLSQKLYATMEKHKEVFFVIHLHAGPVINTLPPIVDPDPLLSCDLMDGRDAFLTLARDKHWEFSSLRRSKWSTLCMLVELHTQGQDRFVYTCNECKHHVETRWHCTVCEDYDLCINCYNTKSHAHKMVKWGLGLDDEGSSQGEPQSKSPQESRRLSIQRCIQSLVHACQCRNANCSLPSCQKMKRVVQHTKGCKRKTNGGCPVCKQLIALCCYHAKHCQENKCPVPFCLNIKHKLRQQQIQHRLQQAQLMRRRMATMNTRNVPQQSLPSPTSAPPGTPTQQPSTPQTPQPPAQPQPSPVSMSPAGFPSVARTQPPTTVSTGKPTSQVPAPPPPAQPPPAAVEAARQIEREAQQQQHLYRVNINNSMPPGRTGMGTPGSQMAPVSLNVPRPNQVSGPVMPSMPPGQWQQAPLPQQQPMPGLPRPVISMQAQAAVAGPRMPSVQPPRSISPSALQDLLRTLKSPSSPQQQQQVLNILKSNPQLMAAFIKQRTAKYVANQPGMQPQPGLQSQPGMQPQPGMHQQPSLQNLNAMQAGVPRPGVPPQQQAMGGLNPQGQALNIMNPGHNPNMASMNPQYREMLRRQLLQQQQQQQQQQQQQQQQQQGSAGMAGGMAGHGQFQQPQGPGGYPPAMQQQQRMQQHLPLQGSSMGQMAAQMGQLGQMGQPGLGADSTPNIQQALQQRILQQQQMKQQIGSPGQPNPMSPQQHMLSGQPQASHLPGQQIATSLSNQVRSPAPVQSPRPQSQPPHSSPSPRIQPQPSPHHVSPQTGSPHPGLAVTMASSIDQGHLGNPEQSAMLPQLNTPSRSALSSELSLVGDTTGDTLEKFVEGL

SEQ ID NO: 900044 - protein, 2442 aa, Homo sapiens; identical to SEQ ID NO: 900019

SEQ ID NO: 900045 - protein, 1422 aa, Homo sapiens
MMEEDLQGASQVKEETDIAEQKSEPMEVDEKKPEVKVEVKEEEESSSNGTASQSTSPSQPRKKIFKPEELRQALMPTLEALYRQDPESLPFRQPVDPQLLGIPDYFDIVKNPMDLSTIKRKLDTGQYQEPWQYVDDVWLMFNNAWLYNRKTSRVYKFCSKLAEVFEQEIDPVMQSLGYCCGRKYEFSPQTLCCYGKQLCTIPRDAAYYSYQNRYHFCEKCFTEIQGENVTLGDDPSQPQTTISKDQFEKKKNDTLDPEPFVDCKECGRKMHQICVLHYDIIWPSGFVCDNCLKKTGRPRKENKFSAKRLQTTRLGNHLEDRVNKFLRRQNHPEAGEVFVRVVASSDKTVEVKPGMKSRFVDSGEMSESFPYRTKALFAFEEIDGVDVCFFGMHVQEYGSDCPPPNTRRVYISYLDSIHFFRPRCLRTAVYHEILIGYLEYVKKLGYVTGHIWACPPSEGDDYIFHCHPPDQKIPKPKRLQEWYKKMLDKAFAERIIHDYKDIFKQATEDRLTSAKELPYFEGDFWPNVLEESIKELEQEEEERKKEESTAASETTEGSQGDSKNAKKKNNKKTNKNKSSISRANKKKPSMPNVSNDLSQKLYATMEKHKEVFFVIHLHAGPVINTLPPIVDPDPLLSCDLMDGRDAFLTLARDKHWEFSSLRRSKWSTLCMLVELHTQGQDRFVYTCNECKHHVETRWHCTVCEDYDLCINCYNTKSHAHKMVKWGLGLDDEGSSQGEPQSKSPQESRRLSIQRCIQSLVHACQCRNANCSLPSCQKMKRVVQHTKGCKRKTNGGCPVCKQLIALCCYHAKHCQENKCPVPFCLNIKHKLRQQQIQHRLQQAQLMRRRMATMNTRNVPQQSLPSPTSAPPGTPTQQPSTPQTPQPPAQPQPSPVSMSPAGFPSVARTQPPTTVSTGKPTSQVPAPPPPAQPPPAAVEAARQIEREAQQQQHLYRVNINNSMPPGRTGMGTPGSQMAPVSLNVPRPNQVSGPVMPSMPPGQWQQAPLPQQQPMPGLPRPVISMQAQAAVAGPRMPSVQPPRSISPSALQDLLRTLKSPSSPQQQQQVLNILKSNPQLMAAFIKQRTAKYVANQPGMQPQPGLQSQPGMQPQPGMHQQPSLQNLNAMQAGVPRPGVPPQQQAMGGLNPQGQALNIMNPGHNPNMASMNPQYREMLRRQLLQQQQQQQQQQQQQQQQQQGSAGMAGGMAGHGQFQQPQGPGGYPPAMQQQQRMQQHLPLQGSSMGQMAAQMGQLGQMGQPGLGADSTPNIQQALQQRILQQQQMKQQIGSPGQPNPMSPQQHMLSGQPQASHLPGQQIATSLSNQVRSPAPVQSPRPQSQPPHSSPSPRIQPQPSPHHVSPQTGSPHPGLAVTMASSIDQGHLGNPEQSAMLPQLNTPSRSALSSELSLVGDTTGDTLEKFVEGL

SEQ ID NO: 900046 - protein, 937 aa, Homo sapiens [sequence omitted]

SEQ ID NO: 900047 - protein, 675 aa, Homo sapiens
LGKRENWLSEWWLKTASCRNANCSLPSCQKMKRVVQHTKGCKRKTNGGCPVCKQLIALCCYHAKHCQENKCPVPFCLNIKHKLRQQQIQHRLQQAQLMRRRMATMNTRNVPQQSLPSPTSAPPGTPTQQPSTPQTPQPPAQPQPSPVSMSPAGFPSVARTQPPTTVSTGKPTSQVPAPPPPAQPPPAAVEAARQIEREAQQQQHLYRVNINNSMPPGRTGMGTPGSQMAPVSLNVPRPNQVSGPVMPSMPPGQWQQAPLPQQQPMPGLPRPVISMQAQAAVAGPRMPSVQPPRSISPSALQDLLRTLKSPSSPQQQQQVLNILKSNPQLMAAFIKQRTAKYVANQPGMQPQPGLQSQPGMQPQPGMHQQPSLQNLNAMQAGVPRPGVPPQQQAMGGLNPQGQALNIMNPGHNPNMASMNPQYREMLRRQLLQQQQQQQQQQQQQQQQQQGSAGMAGGMAGHGQFQQPQGPGGYPPAMQQQQRMQQHLPLQGSSMGQMAAQMGQLGQMGQPGLGADSTPNIQQALQQRILQQQQMKQQIGSPGQPNPMSPQQHMLSGQPQASHLPGQQIATSLSNQVRSPAPVQSPRPQSQPPHSSPSPRIQPQPSPHHVSPQTGSPHPGLAVTMASSIDQGHLGNPEQSAMLPQLNTPSRSALSSELSLVGDTTGDTLEKFVEGL

SEQ ID NO: 900048 - protein, 1496 aa, Homo sapiens
RPMPRLEPTFEIDEEEEEEDENELFPREYFRRLSSQDVLRCQSSSKRKSKDEEEDEESDDADDFGSLFDLENDLPDELIPNGGELGLLNSGNLVPDAASKHKQLSELLRGGSGSSINPGIGNVSASSPVQQGLGGQAQGQPNSANMASLSAMGKSPLSQGDSSAPSLPKQAASTSGPTPAASQALNPQAQKQVGLATSSPATSQTGPGICMNANFNQTHPGLLNSNSGHSLINQASQGQAQVMNGSLGAAGRGRGAGMPYPTPAMQGASSSVLAETLTQVSPQMTGHAGLNTAQAGGMAKMGITGNTSPFGQPFSQAGGQPMGATGVNPQLASKQSMVNSLPTFPTDIKNTSVTNVPNMSQMQTSVGIVPTQAIATGPTADPEKRKLIQQQLVLLLHAHKCQRREQANGEVRACSLPHCRTMKNVLNHMTHCQAGKACQVAHCASSRQIISHWKNCTRHDCPVCLPLKNASDKRNQQTILGSPASGIQNTIGSVGTGQQNATSLSNPNPIDPSSMQRAYAALGLPYMNQPQTQLQPQVPGQQPAQPQTHQQMRTLNPLGNNPMNIPAGGITTDQQPPNLISESALPTSLGATNPLMNDGSNSGNIGTLSTIPTAAPPSSTGVRKGWHEHVTQDLRSHLVHKLVQAIFPTPDPAALKDRRMENLVAYAKKVEGDMYESANSRDEYYHLLAEKIYKIQKELEEKRRSRLHKQGILGNQPALPAPGAQPPVIPQAQPVRPPNGPLSLPVNRMQVSQGMNSFNPMSLGNVQLPQAPMGPRAASPMNHSVQMNSMGSVPGMAISPSRMPQPPNMMGAHTNNMMAQAPAQSQFLPQNQFPSSSGAMSVGMGQPPAQTGVSQGQVPGAALPNPLNMLGPQASQLPCPPVTQSPLHPTPPPASTAAGMPSLQHTTPPGMTPPQPAAPTQPSTPVSSSGQTPTPTPGSVPSATQTQSTPTVQAAAQAQVTPQPQTPVQPPSVATPQSSQQQPTPVHAQPPGTPLSQAAASIDNRVPTPSSVASAETNSQQPGPDVPVLEMKTETQAEDTEPDPGESKGEPRSEMMEEDLQGASQVKEETDIAEQKSEPMEVDEKKPEVKVEVKEEEESSSNGTASQSTSPSQPRKKIFKPEELRQALMPTLEALYRQDPESLPFRQPVDPQLLGIPDYFDIVKNPMDLSTIKRKLDTGQYQEPWQYVDDVWLMFNNAWLYNRKTSRVYKFCSKLAEVFEQEIDPVMQSLGYCCGRKYEFSPQTLCCYGKQLCTIPRDAAYYSYQNRYHFCEKCFTEIQGENVTLGDDPSQPQTTISKDQFEKKKNDTLDPEPFVDCKECGRKMHQICVLHYDIIWPSGFVCDNCLKKTGRPRKENKFSAKRLQTTRLGNHLEDRVNKFLRRQNHPEAGEVFVRVVASSDKTVEVKPGMKSRYVTGHIWACPPSEGDDYIFHCHPPDQKIPKPKRLQEWYKKMLDKAFAERIIHDYKVPGAEGRWWLLSQLRGGYLCAFFLHSHTC

SEQ ID NO: 900049 - protein, 1237 aa, Homo sapiens
RPMPRLEPTFEIDEEEEEEDENELFPREYFRRLSSQDVLRCQSSSKRKSKDEEEDEESDDADDFGSLFDLENDLPDELIPNGGELGLLNSGNLVPDAASKHKQLSELLRGGSGSSINPGIGNVSASSPVQQGLGGQAQGQPNSANMASLSAMGKSPLSQGDSSAPSLPKQAASTSGPTPAASQALNPQAQKQVGLATSSPATSQTGPGICMNANFNQTHPGLLNSNSGHSLINQASQGQAQVMNGSLGAAGRGRGAGMPYPTPAMQGASSSVLAETLTQVSPQMTGHAGLNTAQAGGMAKMGITGNTSPFGQPFSQAGGQPMGATGVNPQLASKQSMVNSLPTFPTDIKNTSVTNVPNMSQMQTSVGIVPTQAIATGPTADPEKRKLIQQQLVLLLHAHKCQRREQANGEVRACSLPHCRTMKNVLNHMTHCQAGKACQVAHCASSRQIISHWKNCTRHDCPVCLPLKNASDKRNQQTILGSPASGIQNTIGSVGTGQQNATSLSNPNPIDPSSMQRAYAALGLPYMNQPQTQLQPQVPGQQPAQPQTHQQMRTLNPLGNNPMNIPAGGITTDQQPPNLISESALPTSLGATNPLMNDGSNSGNIGTLSTIPTAAPPSSTGVRKGWHEHVTQDLRSHLVHKLVQAIFPTPDPAALKDRRMENLVAYAKKVEGDMYESANSRDEYYHLLAEKIYKIQKELEEKRRSRLHKQGILGNQPALPAPGAQPPVIPQAQPVRPPNGPLSLPVNRMQVSQGMNSFNPMSLGNVQLPQAPMGPRAASPMNHSVQMNSMGSVPGMAISPSRMPQPPNMMGAHTNNMMAQAPAQSQFLPQNQFPSSSGAMSVGMGQPPAQTGVSQGQVPGAALPNPLNMLGPQASQLPCPPVTQSPLHPTPPPASTAAGMPSLQHTTPPGMTPPQPAAPTQPSTPVSSSGQTPTPTPGSVPSATQTQSTPTVQAAAQAQVTPQPQTPVQPPSVATPQSSQQQPTPVHAQPPGTPLSQAAASIDNRVPTPSSVASAETNSQQPGPDVPVLEMKTETQAEDTEPDPGESKGEPRSEMMEEDLQGASQVKEETDIAEQKSEPMEVDEKKPEVKVEVKEEEESSSNGTASQSTSPSQPRKKIFKPEELRQALMPTLEALYRQDPESLPFRQPVDPQLLGIPDYFDIVKNPMDLSTIKRKLDTGQYQEPWQYVDDVWLMFNNAWLYNRKTSRVYKFCSKLNIQGTADRVNFLLKDLCKLTGR

SEQ ID NO: 900050 - protein, 1027 aa, Homo sapiens
RPMPRLEPTFEIDEEEEEEDENELFPREYFRRLSSQDVLRCQSSSKRKSKDEEEDEESDDADDFGSLFDLENDLPDELIPNGGELGLLNSGNLVPDAASKHKQLSELLRGGSGSSINPGIGNVSASSPVQQGLGGQAQGQPNSANMASLSAMGKSPLSQGDSSAPSLPKQAASTSGPTPAASQALNPQAQKQVGLATSSPATSQTGPGICMNANFNQTHPGLLNSNSGHSLINQASQGQAQVMNGSLGAAGRGRGAGMPYPTPAMQGASSSVLAETLTQVSPQMTGHAGLNTAQAGGMAKMGITGNTSPFGQPFSQAGGQPMGATGVNPQLASKQSMVNSLPTFPTDIKNTSVTNVPNMSQMQTSVGIVPTQAIATGPTADPEKRKLIQQQLVLLLHAHKCQRREQANGEVRACSLPHCRTMKNVLNHMTHCQAGKACQVAHCASSRQIISHWKNCTRHDCPVCLPLKNASDKRNQQTILGSPASGIQNTIGSVGTGQQNATSLSNPNPIDPSSMQRAYAALGLPYMNQPQTQLQPQVPGQQPAQPQTHQQMRTLNPLGNNPMNIPAGGITTDQQPPNLISESALPTSLGATNPLMNDGSNSGNIGTLSTIPTAAPPSSTGVRKGWHEHVTQDLRSHLVHKLVQAIFPTPDPAALKDRRMENLVAYAKKVEGDMYESANSRDEYYHLLAEKIYKIQKELEEKRRSRLHKQGILGNQPALPAPGAQPPVIPQAQPVRPPNGPLSLPVNRMQVSQGMNSFNPMSLGNVQLPQAPMGPRAASPMNHSVQMNSMGSVPGMAISPSRMPQPPNMMGAHTNNMMAQAPAQSQFLPQNQFPSSSGAMSVGMGQPPAQTGVSQGQVPGAALPNPLNMLGPQASQLPCPPVTQSPLHPTPPPASTAAGMPSLQHTTPPGMTPPQPAAPTQPSTPVSSSGQTPTPTPGSVPSATQTQSTPTVQAAAQAQVTPQPQTPVQPPSVATPQSSQQQPTPVHAQPPGTPVSLSVSAVFGPRLLEDNFPIKIVCQARRGGSHL

SEQ ID NO: 900051 - protein, 765 aa, Homo sapiens
RPMPRLEPTFEIDEEEEEEDENELFPREYFRRLSSQDVLRCQSSSKRKSKDEEEDEESDDADDFGSLFDLENDLPDELIPNGGELGLLNSGNLVPDAASKHKQLSELLRGGSGSSINPGIGNVSASSPVQQGLGGQAQGQPNSANMASLSAMGKSPLSQGDSSAPSLPKQAASTSGPTPAASQALNPQAQKQVGLATSSPATSQTGPGICMNANFNQTHPGLLNSNSGHSLINQASQGQAQVMNGSLGAAGRGRGAGMPYPTPAMQGASSSVLAETLTQVSPQMTGHAGLNTAQAGGMAKMGITGNTSPFGQPFSQAGGQPMGATGVNPQLASKQSMVNSLPTFPTDIKNTSVTNVPNMSQMQTSVGIVPTQAIATGPTADPEKRKLIQQQLVLLLHAHKCQRREQANGEVRACSLPHCRTMKNVLNHMTHCQAGKACQVAHCASSRQIISHWKNCTRHDCPVCLPLKNASDKRNQQTILGSPASGIQNTIGSVGTGQQNATSLSNPNPIDPSSMQRAYAALGLPYMNQPQTQLQPQVPGQQPAQPQTHQQMRTLNPLGNNPMNIPAGGITTDQQPPNLISESALPTSLGATNPLMNDGSNSGNIGTLSTIPTAAPPSSTGVRKGWHEHVTQDLRSHLVHKLVQAIFPTPDPAALKDRRMENLVAYAKKVEGDMYESANSRDEYYHLLAEKIYKIQKELEEKRRSRLHKQGILGNQPALPAPGAQPPVIPQAQPVRPPSKDFISYCHPLACFLGFPSCWGVFLRT

SEQ ID NO: 900052 - protein, 283 aa, Homo sapiens
RPMPRLEPTFEIDEEEEEEDENELFPREYFRRLSSQDVLRCQSSSKRKSKDEEEDEESDDADDFGSLFDLENDLPDELIPNGGELGLLNSGNLVPDAASKHKQLSELLRGGSGSSINPGIGNVSASSPVQQGLGGQAQGQPNSANMASLSAMGKSPLSQGDSSAPSLPKQAASTSGPTPAASQALNPQAPMGPRAASPMNHSVQMNSMGSVPGMAISPSRMPQPPNMMGAHTNNMMAQAPAQSQFLPQNQFPSSSGAMSVGMGQPPAQTGVSQVLCPTGTVAP

SEQ ID NO: 900053 - protein, 350 aa, Homo sapiens
RPMPRLEPTFEIDEEEEEEDENELFPREYFRRLSSQDVLRCQSSSKRKSKDEEEDEESDDADDFGSLFDLENDLPDELIPNGGELGLLNSGNLVPDAASKHKQLSELLRGGSGSSINPGIGNVSASSPVQQGLGGQAQGQPNSANMASLSAMGKSPLSQGDSSAPSLPKQAASTSGPTPAASQALNPQAQKQVGLATSSPATSQTGPGICMNANFNQTHPGLLNSNSGHSLINQASQGQAQVMNGSLGAAGRGRGAGMPYPTPAMQGASSSVLAETLTQVSPQMTGHAGLNTAQAGGMAKVSELKHFQYFLPNRGLSLRVMRKMGPRGPLLFFLLGSPRATHAWKRQISF

SEQ ID NO: 900054 - protein, 167 aa, Homo sapiens
MPIRPDLQQLEKCIDDALRKNDFKPLKTLLQIDICEDVKIKCSKQFFHKVDNLICRELNKEDIHNVSAILVSVGRCGKNISVLGQAGLLTMIKQGLIQKMVAWFEKSKDIIQSQGNSKDEAVLNMIEDLVDLLLGHTMMSGMKVTKPVCGKGLGPRHLVPVVIGLQE

SEQ ID NO: 900055 - protein, 993 aa, Homo sapiens
MSEASMIVSGADRYTMRSPVLFSNTSIPPRRRRIKPPLQMTSSAEKPSVSQTSENRVDNAASLKSRSSEGRHRRDNIDKHIKTAKCVENTENKNVEFPNQNFSELQDVIPDSQAAEKRDHTILPGVLDNICGNKIHSKWACWTPVTNIELCNNQRASTSSGDTLNQDIVINKKLTKQKSSSSISDHNSEGTGKVKYKKEQTDHIKIDKAEVEVCKKHNQQQNHPKYSGQKNTENAKQSDWPVESETTFKSVLLNKTIEESLIYRKKYILSKDVNTATCDKNPSASKNVQSHRKAEKELTSELNSWDSKQKKMREKSKGKEFTNVAESLISQINKRYKTKDDIKSTRKLKESLINSGFSNKPVVQLSKEKVQKKSYRKLKTTFVNVTSECPVNDVYNFNLNGADDPIIKLGIQEFQATAKEACADRSIRLVGPRNHDELKSSVKTKDKKIITNHQKKNLFSDTETEYRCDDSKTDISWLREPKSKPQLIDYSRNKNVKNHKSGKSRSSLEKGQPSSKMTPSKNITKKMDKTIPEGRIRLPRKATKTKKNYKDLSNSESECEQEFSHSFKENIPVKEENIHSRMKTVKLPKKQQKVFCAETEKELSKQWKNSSLLKDAIRDNCLDLSPRSLSGSPSSIEVTRCIEKITEKDFTQDYDCITKSISPYPKTSSLESLNSNSGVGGTIKSPKNNEKNFLCASESCSPTPRPLFLARHTPTKSNTIVNRKKISSLVLTQETQNSNSYSDVSRYSSEERFMEIESPHINENYIQSKREESHLASSLSKSSEGREKTWFDMPCDATHVSGPTQHLSRKRIYIEDNLSNSNEVEMEEKGERRANLLPKKLCKIEDADHHIHKMSESVSSLSTNDFSIPWETWQNEFAGIEMTYETYERLNSEFKRRNNIRHKMLSYFTTQSWKTAQQHLRTMNHQSQDSRIKKLDKFQFIIIEELENFEKDSQSLKDLEKEFVDFWEKIFQKFSALSKKRTTEASSFENFIG

SEQ ID NO: 900056 - protein, 993 aa, Homo sapiens; identical to SEQ ID NO: 900055

SEQ ID NO: 900057 - protein, 1469 aa, Homo sapiens
MPIRPDLQQLEKCIDDALRKNDFKPLKTLLQIDICEDVKIKCSKQFFHKVDNLICRELNKEDIHNVSAILVSVGRCGKNISVLGQAGLLTMIKQGLIQKMVAWFEKSKDIIQSQGNSKDEAVLNMIEDLVDLLLVIHDVSDEGKKQVVESFVPRICSLVIDSRVNICIQQEIIKKMNAMLDKMPQDARKILSNQEMLILMSSMGERILDAGDYDLQVAIVEALCRMTTEKQRQELAHQWFSMDFIAKAFKRIKDSEFETDCRIFLNLVNGMLGDKRRVFTFPCLSAFLDKYELQIPSDEKLEEFWIDFNLGSQTLSFYIAGDNDDHQWEAVTVPEEKVQIYSIEVRESKKLLTIILKNTVKISKREGKELLLYFDASLEITNVTQKIFGATKHRESIRKQGISVAKTSLHILFDASGSQILVPESQISPVGEELVSLKEKSKSPKEFAKPSKYIKNSDKGNRNNSQLEKTTPSKRKMSEASMIVSGADRYTMRSPVLFSNTSIPPRRRRIKPPLQMTSSAEKPSVSQTSENRVDNAASLKSRSSEGRHRRDNIDKHIKTAKCVENTENKNVEFPNQNFSELQDVIPDSQAAEKRDHTILPGVLDNICGNKIHSKWACWTPVTNIELCNNQRASTSSGDTLNQDIVINKKLTKQKSSSSISDHNSEGTGKVKYKKEQTDHIKIDKAEVEVCKKHNQQQNHPKYSGQKNTENAKQSDWPVESETTFKSVLLNKTIEESLIYRKKYILSKDVNTATCDKNPSASKNVQSHRKAEKELTSELNSWDSKQKKMREKSKGKEFTNVAESLISQINKRYKTKDDIKSTRKLKESLINSGFSNKPVVQLSKEKVQKKSYRKLKTTFVNVTSECPVNDVYNFNLNGADDPIIKLGIQEFQATAKEACADRSIRLVGPRNHDELKSSVKTKDKKIITNHQKKNLFSDTETEYRCDDSKTDISWLREPKSKPQLIDYSRNKNVKNHKSGKSRSSLEKGQPSSKMTPSKNITKKMDKTIPEGRIRLPRKATKTKKNYKDLSNSESECEQEFSHSFKENIPVKEENIHSRMKTVKLPKKQQKVFCAETEKELSKQWKNSSLLKDAIRDNCLDLSPRSLSGSPSSIEVTRCIEKITEKDFTQDYDCITKSISPYPKTSSLESLNSNSGVGGTIKSPKNNEKNFLCASESCSPTPRPLFLARHTPTKSNTIVNRKKISSLVLTQETQNSNSYSDVSRYSSEERFMEIESPHINENYIQSKREESHLASSLSKSSEGREKTWFDMPCDATHVSGPTQHLSRKRIYIEDNLSNSNEVEMEEKGERRANLLPKKLCKIEDADHHIHKMSESVSSLSTNDFSIPWETWQNEFAGIEMTYETYERLNSEFKRRNNIRHKMLSYFTTQSWKTAQQHLRTMNHQSQDSRIKKLDKFQFIIIEELENFEKDSQSLKDLEKEFVDFWEKIFQKFSALSKKRTTEASSFENFIG

SEQ ID NO: 900058 - protein, 1469 aa, Homo sapiens; identical to SEQ ID NO: 900057

SEQ ID NO: 900059 - protein, 200 aa, Homo sapiens
MPIRPDLQQLEKCIDDALRKNDFKPLKTLLQIDICEDVKIKCSKQFFHKVDNLICRELNKEDIHNVSAILVSVGRCGKNISVLGQAGLLTMIKQGLIQKMVAWFEKSKDIIQSQGNSKDEAVLNMIEDLVDLLLVIHDVSDEGKKQVVESFVPRICSLVIDSRVNICIQQEIIKKMNAMLDKMPQDARKILSNQEMLILM

SEQ ID NO: 900060 - protein, 134 aa, Homo sapiens
NTAISRNPSGLPTPTIKWMKNEEALDTESSERLVLLAGGSLEISDVTEDDAGTYFCIADNGNETIEAQAELTVQAQPEFLKQPTNIYAHESMDIVFECEVTGKPTPTVKWVKNGDMVIPSDYFKIVVFGDPLDQ

SEQ ID NO: 900061 - protein, 1481 aa, Homo sapiens
GPGRAGLEQRRRGSRACSEGPAEARGREGGKGSAALSPPLPLTLGEEMAAERGARRLLSTPSFWLYCLLLLGRRAPGAAAARSGSAPQSPGASIRTFTPFYFLVEPVDTLSVRGSSVILNCSAYSEPSPKIEWKKDGTFLNLVSDDRRQLLPDGSLFISNVVHSKHNKPDEGYYQCVATVESLGTIISRTAKLIVAGLPRFTSQPEPSSVYAGNNAILNCEVNADLVPFVRWEQNRQPLLLDDRVIKLPSGMLVISNATEGDGGLYRCVVESGGPPKYSDEVELKVLPDPEVISDLVFLKQPSPLVRVIGQDVVLPCVASGLPTPTIKWMKNEEALDTESSERLVLLAGGSLEISDVTEDDAGTYFCIADNGNETIEAQAELTVQAQPEFLKQPTNIYAHESMDIVFECEVTGKPTPTVKWVKNGDMVIPSDYFKIVKEHNLQVLGLVKSDEGFYQCIAENDVGNAQAGAQLIILEHAPATTGPLPSAPRDVVASLVSTRFIKLTWRTPASDPHGDNLTYSVFYTKEGIARERVENTSHPGEMQVTIQNLMPATVYIFRVMAQNKHGSGESSAPLRVETQPEVQLPGPAPNLRAYAASPTSITVTWETPVSGNGEIQNYKLYYMEKGTDKEQDVDVSSHSYTINGLKKYTEYSFRVVAYNKHGPGVSTPDVAVRTLSDVPSAAPQNLSLEVRNSKSIMIHWQPPAPATQNGQITGYKIRYRKASRKSDVTETLVSGTQLSQLIEGLDRGTEYNFRVAALTINGTGPATDWLSAETFESDLDETRVPEVPSSLHVRPLVTSIVVSWTPPENQNIVVRGYAIGYGIGSPHAQTIKVDYKQRYYTIENLDPSSHYVITLKAFNNVGEGIPLYESAVTRPHTVPDPTPMMPPVGVQASILSHDTIRITWADNSLPKHQKITDSRYYTVRWKTNIPANTKYKNANATTLSYLVTGLKPNTLYEFSVMVTKGRRSSTWSMTAHGTTFELVPTSPPKDVTVVSKEGKPKTIIVNWQPPSEANGKITGYIIYYSTDVNAEIHDWVIEPVVGNRLTHQIQELTLDTPYYFKIQARNSKGMGPMSEAVQFRTPKASGSGGKGSRLPDLGSDYKPPMSGSNSPHGSPTSPLDSNMLLVIIVSVGVITIVVVVIIAVFCTRRTTSHQKKKRAACKSVNGSHKYKGNSKDVKPPDLWIHHERLELKPIDKSPDPNPIMTDTPIPRNSQDITPVDNSMDSNIHQRRNSYRGHESEDSMSTLAGRRGMRPKMMMPFDSQPPQPVISAHPIHSLDNPHHHFHSSSLASPARSHLYHPGSPWPIGTSMSLSDRANSTESVRNTPSTDTMPASSSQTCCTDHQDPEGATSSSYLASSQEEDSGQSLPTAHVRPSHPLKSFAVPAIPPPGPPTYDPALPSTPLLSQQALNHHIHSVKTASIGTLGRSRPPMPVVVPSAPEVQETTRMLEDSESSYEPDELTKEMAHLEGLMKDLNAITTA

SEQ ID NO: 900062 - protein, 1473 aa, Homo sapiens
GPGRAGLEQRRRGSRACSEGPAEARGREGGKGSAALSPPLPLTLGEEMAAERGARRLLSTPSFWLYCLLLLGRRAPGAAAARSGSAPQSPGASIRTFTPFYFLVEPVDTLSVRGSSVILNCSAYSEPSPKIEWKKDGTFLNLVSDDRRQLLPDGSLFISNVVHSKHNKPDEGYYQCVATVESLGTIISRTAKLIVAGLPRFTSQPEPSSVYAGNNAILNCEVNADLVPFVRWEQNRQPLLLDDRVIKLPSGMLVISNATEGDGGLYRCVVESGGPPKYSDEVELKVLPDPEVISDLVFLKQPSPLVRVIGQDVVLPCVASGLPTPTIKWMKNEEALDTESSERLVLLAGGSLEISDVTEDDAGTYFCIADNGNETIEAQAELTVQAQPEFLKQPTNIYAHESMDIVFECEVTGKPTPTVKWVKNGDMVIPSDYFKIVKEHNLQVLGLVKSDEGFYQCIAENDVGNAQAGAQLIILEHAPATTGPLPSAPRDVVASLVSTRFIKLTWRTPASDPHGDNLTYSVFYTKEGIARERVENTSHPGEMQVTIQNLMPATVYIFRVMAQNKHGSGESSAPLRVETQPEVQLPGPAPNLRAYAASPTSITVTWETPVSGNGEIQNYKLYYMEKGTDKEQDVDVSSHSYTINGLKKYTEYSFRVVAYNKHGPGVSTQTYEHDDVSVYMLEVRNSKSIMIHWQPPAPATQNGQITGYKIRYRKASRKSDVTETLVSGTQLSQLIEGLDRGTEYNFRVAALTINGTGPATDWLSAETFESDLDETRVPEVPSSLHVRPLVTSIVVSWTPPENQNIVVRGYAIGYGIGSPHAQTIKVDYKQRYYTIENLDPSSHYVITLKAFNNVGEGIPLYESAVTRPHTVPDPTPMMPPVGVQASILSHDTIRITWADNSLPKHQKITDSRYYTVRWKTNIPANTKYKNANATTLSYLVTGLKPNTLYEFSVMVTKGRRSSTWSMTAHGTTFELVPTSPPKDVTVVSKEGKPKTIIVNWQPPSEANGKITGYIIYYSTDVNAEIHDWVIEPVVGNRLTHQIQELTLDTPYYFKIQARNSKGMGPMSEAVQFRTPKASGSGGKGSRLPDLGSDYKPPMSGSNSPHGSPTSPLDSNMLLVIIVSVGVITIVVVVIIAVFCTRRTTSHQKKKRAACKSVNGSHKYKGNSKDVKPPDLWIHHERLELKPIDKSPDPNPIMTDTPIPRNSQDITPVDNSMDSNIHQRRNSYRGHESEDSMSTLAGRRGMRPKMMMPFDSQPPQPVISAHPIHSLDNPHHHFHSSSLASPARSHLYHPGSPWPIGTSMSLSDRANSTESVRNTPSTDTMPASSSQTCCTDHQDPEGATSSSYLASSQEEDSGQSLPTAHVRPSHPLKSFAVPAIPPPGPPTYDPALPSTPLLSQQALNHHIHSVKTASIGTLGRSRPPMPVVVPSAPEVQETTRMLEDSESSYEPDELTKEMAHLEGLMKDLNAITTA

SEQ ID NO: 900063 - protein, 160 aa, Homo sapiens
GLTVACGLTVACGLTVASCCTDHQDPEGATSSSYLASSQEEDSGQSLPTAHVRPSHPLKSFAVPAIPPPGPPTYDPALPSTPLLSQQALNHHIHSVKTASIGTLGRSRPPMPVVVPSAPEVQETTRMLEDSESSYEPDELTKEMAHLEGLMKDLNAITTA

SEQ ID NO: 900064 - protein, 1508 aa, Homo sapiens
GPGRAGLEQRRRGSRACSEGPAEARGREGGKGSAALSPPLPLTLGEEMAAERGARRLLSTPSFWLYCLLLLGRRAPGAAAARSGSAPQSPGASIRTFTPFYFLVEPVDTLSVRGSSVILNCSAYSEPSPKIEWKKDGTFLNLVSDDRRQLLPDGSLFISNVVHSKHNKPDEGYYQCVATVESLGTIISRTAKLIVAGLPRFTSQPEPSSVYAGNNAILNCEVNADLVPFVRWEQNRQPLLLDDRVIKLPSGMLVISNATEGDGGLYRCVVESGGPPKYSDEVELKVLPDPEVISDLVFLKQPSPLVRVIGQDVVLPCVASGLPTPTIKWMKNEEALDTESSERLVLLAGGSLEISDVTEDDAGTYFCIADNGNETIEAQAELTVQAQPEFLKQPTNIYAHESMDIVFECEVTGKPTPTVKWVKNGDMVIPSDYFKIVKEHNLQVLGLVKSDEGFYQCIAENDVGNAQAGAQLIILEHAPATTGPLPSAPRDVVASLVSTRFIKLTWRTPASDPHGDNLTYSVFYTKEGIARERVENTSHPGEMQVTIQNLMPATVYIFRVMAQNKHGSGESSAPLRVETQPEVQLPGPAPNLRAYAASPTSITVTWETPVSGNGEIQNYKLYYMEKGTDKEQDVDVSSHSYTINGLKKYTEYSFRVVAYNKHGPGVSTPDVAVRTLSDVPSAAPQNLSLEVRNSKSIMIHWQPPAPATQNGQITGYKIRYRKASRKSDVTETLVSGTQLSQLIEGLDRGTEYNFRVAALTINGTGPATDWLSAETFESDLDETRVPEVPSSLHVRPLVTSIVVSWTPPENQNIVVRGYAIGYGIGSPHAQTIKVDYKQRYYTIENLDPSSHYVITLKAFNNVGEGIPLYESAVTRPHTDTSEVDLFVINAPYTPVPDPTPMMPPVGVQASILSHDTIRITWADNSLPKHQKITDSRYYTVRWKTNIPANTKYKNANATTLSYLVTGLKPNTLYEFSVMVTKGRRSSTWSMTAHGTTFELVPTSPPKDVTVVSKEGKPKTIIVNWQPPSEANGKITGYIIYYSTDVNAEIHDWVIEPVVGNRLTHQIQELTLDTPYYFKIQARNSKGMGPMSEAVQFRTPKADSSDKMPNDQASGSGGKGSRLPDLGSDYKPPMSGSNSPHGSPTSPLDSNMLLVIIVSVGVITIVVVVIIAVFCTRRTTSHQKKKRAACKSVNGSHKYKGNSKDVKPPDLWIHHERLELKPIDKSPDPNPIMTDTPIPRNSQDITPVDNSMDSNIHQRRNSYRGHESEDSMSTLAGRRGMRPKMMMPFDSQPPQPVISAHPIHSLDNPHHHFHSSSLASPARSHLYHPGSPWPIGTSMSLSDRANSTESVRNTPSTDTMPASSSQTCCTDHQDPEGATSSSYLASSQEEDSGQSLPTAHVRPSHPLKSFAVPAIPPPGPPTYDPALPSTPLLSQQALNHHIHSVKTASIGTLGRSRPPMPVVVPSAPEVQETTRMLEDSESSYEPDELTKEMAHLEGLMKDLNAITTA

SEQ ID NO: 900065 - protein, 1508 aa, Homo sapiens; identical to SEQ ID NO: 900064

SEQ ID NO: 900066 - protein, 1475 aa, Homo sapiens
  misc_feature (1470)..(1470): Xaa can be any naturally occurring amino acid
GPGRAGLEQRRRGSRACSEGPAEARGREGGKGSAALSPPLPLTLGEEMAAERGARRLLSTPSFWLYCLLLLGRRAPGAAAARSGSAPQSPGASIRTFTPFYFLVEPVDTLSVRGSSVILNCSAYSEPSPKIEWKKDGTFLNLVSDDRRQLLPDGSLFISNVVHSKHNKPDEGYYQCVATVESLGTIISRTAKLIVAGLPRFTSQPEPSSVYAGNNAILNCEVNADLVPFVRWEQNRQPLLLDDRVIKLPSGMLVISNATEGDGGLYRCVVESGGPPKYSDEVELKVLPDPEVISDLVFLKQPSPLVRVIGQDVVLPCVASGLPTPTIKWMKNEEALDTESSERLVLLAGGSLEISDVTEDDAGTYFCIADNGNETIEAQAELTVQAQPEFLKQPTNIYAHESMDIVFECEVTGKPTPTVKWVKNGDMVIPSDYFKIVKEHNLQVLGLVKSDEGFYQCIAENDVGNAQAGAQLIILEHAPATTGPLPSAPRDVVASLVSTRFIKLTWRTPASDPHGDNLTYSVFYTKEGIARERVENTSHPGEMQVTIQNLMPATVYIFRVMAQNKHGSGESSAPLRVETQPEVQLPGPAPNLRAYAASPTSITVTWETPVSGNGEIQNYKLYYMEKGTDKEQDVDVSSHSYTINGLKKYTEYSFRVVAYNKHGPGVSTPDVAVRTLSDVPSAAPQNLSLEVRNSKSIMIHWQPPAPATQNGQITGYKIRYRKASRKSDVTETLVSGTQLSQLIEGLDRGTEYNFRVAALTINGTGPATDWLSAETFESDLDETRVPEVPSSLHVRPLVTSIVVSWTPPENQNIVVRGYAIGYGIGSPHAQTIKVDYKQRYYTIENLDPSSHYVITLKAFNNVGEGIPLYESAVTRPHTVPDPTPMMPPVGVQASILSHDTIRITWADNSLPKHQKITDSRYYTVRWKTNIPANTKYKNANATTLSYLVTGLKPNTLYEFSVMVTKGRRSSTWSMTAHGTTFELVPTSPPKDVTVVSKEGKPKTIIVNWQPPSEANGKITGYIIYYSTDVNAEIHDWVIEPVVGNRLTHQIQELTLDTPYYFKIQARNSKGMGPMSEAVQFRTPKASGSGGKGSRLPDLGSDYKPPMSGSNSPHGSPTSPLDSNMLLVIIVSVGVITIVVVVIIAVFCTRRTTSHQKKKRAACKSVNGSHKYKGNSKDVKPPDLWIHHERLELKPIDKSPDPNPIMTDTPIPRNSQDITPVDNSMDSNIHQRRNSYRGHESEDSMSTLAGRRGMRPKMMMPFDSQPPQPVISAHPIHSLDNPHHHFHSSSLASPARSHLYHPGSPWPIGTSMSLSDRANSTESVRNTPSTDTMPASSSQTCCTDHQDPEGATSSSYLASSQEEDSGQSLPTAHVRPSHPLKSFAVPAIPPPGPPTYDPALPSTPLLSQQALNHHIHSVKTASIGTLGRSRPPMPVVVPSAPEVQETTRMLEDSESRLLEPGGGLTKGDWAXGGGIN

SEQ ID NO: 900067 - protein, 896 aa, Homo sapiens
GPGRAGLEQRRRGSRACSEGPAEARGREGGKGSAALSPPLPLTLGEEMAAERGARRLLSTPSFWLYCLLLLGRRAPGAAAARSGSAPQSPGASIRTFTPFYFLVEPVDTLSVRGSSVILNCSAYSEPSPKIEWKKDGTFLNLVSDDRRQLLPDGSLFISNVVHSKHNKPDEGYYQCVATVESLGTIISRTAKLIVAGLPRFTSQPEPSSVYAGNNAILNCEVNADLVPFVRWEQNRQPLLLDDRVIKLPSGMLVISNATEGDGGLYRCVVESGGPPKYSDEVELKVLPDPEVISDLVFLKQPSPLVRVIGQDVVLPCVASGLPTPTIKWMKNEEALDTESSERLVLLAGGSLEISDVTEDDAGTYFCIADNGNETIEAQAELTVQAQPEFLKQPTNIYAHESMDIVFECEVTGKPTPTVKWVKNGDMVIPSDYFKIVKEHNLQVLGLVKSDEGFYQCIAENDVGNAQAGAQLIILEHAPATTGPLPSAPRDVVASLVSTRFIKLTWRTPASDPHGDNLTYSVFYTKEGIARERVENTSHPGEMQVTIQNLMPATVYIFRVMAQNKHGSGESSAPLRVETQPEVQLPGPAPNLRAYAASPTSITVTWETPVSGNGEIQNYKLYYMEKGTDKEQDVDVSSHSYTINGLKKYTEYSFRVVAYNKHGPGVSTPDVAVRTLSDVPSAAPQNLSLEVRNSKSIMIHWQPPAPATQNGQITGYKIRYRKASRKSDVTETLVSGTQLSQLIEGLDRGTEYNFRVAALTINGTGPATDWLSAETFESDLDETRVPEVPSSLHVRPLVTSIVVSWTPPENQNIVVRGYAIGYGIGSPHAQTIKVDYKQRYYTIENLDPSSHYVITLKAFNNVGEGIPLYESAVTRPHTVPDPTPMMPPITPHPKKK

SEQ ID NO: 900068 - protein, 551 aa, Homo sapiens
GPGRAGLEQRRRGSRACSEGPAEARGREGGKGSAALSPPLPLTLGEEMAAERGARRLLSTPSFWLYCLLLLGRRAPGAAAARSGSAPQSPGASIRTFTPFYFLVEPVDTLSVRGSSVILNCSAYSEPSPKIEWKKDGTFLNLVSDDRRQLLPDGSLFISNVVHSKHNKPDEGYYQCVATVESLGTIISRTAKLIVAGLPRFTSQPEPSSVYAGNNAILNCEVNADLVPFVRWEQNRQPLLLDDRVIKLPSGMLVISNATEGDGGLYRCVVESGGPPKYSDEVELKVLPDPEVISDLVFLKQPSPLVRVIGQDVVLPCVASGLPTPTIKWMKNEEALDTESSERLVLLAGGSLEISDVTEDDAGTYFCIADNGNETIEAQAELTVQAQPEFLKQPTNIYAHESMDIVFECEVTGKPTPTVKWVKNGDMVIPSDYFKIVKEHNLQVLGLVKSDEGFYQCIAENDVGNAQAGAQLIILEHDVAIPTLPPTSLTSATTDHLAPATTGPLPSAPRDVVASLVSTRFIKLTWRTPASDPHGDNLTYSVFYTKEGIAR

SEQ ID NO: 900069 - protein, 301 aa, Homo sapiens
GPGRAGLEQRRRGSRACSEGPAEARGREGGKGSAALSPPLPLTLGEEMAAERGARRLLSTPSFWLYCLLLLGRRAPGAAAARSGSAPQSPGASIRTFTPFYFLVEPVDTLSVRGSSVILNCSAYSEPSPKIEWKKDGTFLNLVSDDRRQLLPDGSLFISNVVHSKHNKPDEGYYQCVATVESLGTIISRTAKLIVAGLPRFTSQPEPSSVYAGNNAILNCEVNADLVPFVRWEQNRQPLLLDDRVIKLPSGMLVISNATEGDGGLYRCVVESGGPPKYSDEVELKVLPDPEVISEWKHLCR

SEQ ID NO: 900070 - protein, 1508 aa, Homo sapiens; identical to SEQ ID NO: 900064

SEQ ID NO: 900071 - protein, 1508 aa, Homo sapiens; identical to SEQ ID NO: 900064

SEQ ID NO: 900072 - protein, 267 aa, Homo sapiens
DWYRPGFMGWTAISIKGETSYRGHESEDSMSTLAGRRGMRPKMMMPFDSQPPQPVISAHPIHSLDNPHHHFHSSSLASPARSHLYHPGSPWPIGTSMSLSDRANSTESVRNTPSTDTMPASSSQTCCTDHQDPEGATSSSYLASSQEEDSGQSLPTAHVRPSHPLKSFAVPAIPPPGPPTYDPALPSTPLLSQQALNHHIHSVKTASIGTLGRSRPPMPVVVPSAPEVQETTRMLEDSESSYEPDELTKEMAHLEGLMKDLNAITTA

SEQ ID NO: 900073 - protein, 1508 aa, Homo sapiens; identical to SEQ ID NO: 900064

SEQ ID NO: 900074 - protein, 1508 aa, Homo sapiens; identical to SEQ ID NO: 900064

SEQ ID NO: 900075 - protein, 1163 aa, Homo sapiens
GPGRAGLEQRRRGSRACSEGPAEARGREGGKGSAALSPPLPLTLGEEMAAERGARRLLSTPSFWLYCLLLLGRRAPGAAAARSGSAPQSPGASIRTFTPFYFLVEPVDTLSVRGSSVILNCSAYSEPSPKIEWKKDGTFLNLVSDDRRQLLPDGSLFISNVVHSKHNKPDEGYYQCVATVESLGTIISRTAKLIVAGLPRFTSQPEPSSVYAGNNAILNCEVNADLVPFVRWEQNRQPLLLDDRVIKLPSGMLVISNATEGDGGLYRCVVESGGPPKYSDEVELKVLPDPEVISDLVFLKQPSPLVRVIGQDVVLPCVASGLPTPTIKWMKNEEALDTESSERLVLLAGGSLEISDVTEDDAGTYFCIADNGNETIEAQAELTVQAQPEFLKQPTNIYAHESMDIVFECEVTGKPTPTVKWVKNGDMVIPSDYFKIVKEHNLQVLGLVKSDEGFYQCIAENDVGNAQAGAQLIILEHAPATTGPLPSAPRDVVASLVSTRFIKLTWRTPASDPHGDNLTYSVFYTKEGIARERVENTSHPGEMQVTIQNLMPATVYIFRVMAQNKHGSGESSAPLRVETQPEVQLPGPAPNLRAYAASPTSITVTWETPVSGNGEIQNYKLYYMEKGTDKEQDVDVSSHSYTINGLKKYTEYSFRVVAYNKHGPGVSTPDVAVRTLSDVPSAAPQNLSLEVRNSKSIMIHWQPPAPATQNGQITGYKIRYRKASRKSDVTETLVSGTQLSQLIEGLDRGTEYNFRVAALTINGTGPATDWLSAETFESDLDETRVPEVPSSLHVRPLVTSIVVSWTPPENQNIVVRGYAIGYGIGSPHAQTIKVDYKQRYYTIENLDPSSHYVITLKAFNNVGEGIPLYESAVTRPHTVPDPTPMMPPVGVQASILSHDTIRITWADNSLPKHQKITDSRYYTVRWKTNIPANTKYKNANATTLSYLVTGLKPNTLYEFSVMVTKGRRSSTWSMTAHGTTFELVPTSPPKDVTVVSKEGKPKTIIVNWQPPSEANGKITGYIIYYSTDVNAEIHDWVIEPVVGNRLTHQIQELTLDTPYYFKIQARNSKGMGPMSEAVQFRTPKASGSGGKGSRLPDLGSDYKPPMSGSNSPHGSPTSPLDSNMLLVIIVSVGVITIVVVVIIAVFCTRRTTSHQKKEEAPDA

SEQ ID NO: 900076 - protein, 808 aa, Homo sapiens
GPGRAGLEQRRRGSRACSEGPAEARGREGGKGSAALSPPLPLTLGEEMAAERGARRLLSTPSFWLYCLLLLGRRAPGAAAARSGSAPQSPGASIRTFTPFYFLVEPVDTLSVRGSSVILNCSAYSEPSPKIEWKKDGTFLNLVSDDRRQLLPDGSLFISNVVHSKHNKPDEGYYQCVATVESLGTIISRTAKLIVAGLPRFTSQPEPSSVYAGNNAILNCEVNADLVPFVRWEQNRQPLLLDDRVIKLPSGMLVISNATEGDGGLYRCVVESGGPPKYSDEVELKVLPDPEVISDLVFLKQPSPLVRVIGQDVVLPCVASGLPTPTIKWMKNEEALDTESSERLVLLAGGSLEISDVTEDDAGTYFCIADNGNETIEAQAELTVQAQPEFLKQPTNIYAHESMDIVFECEVTGKPTPTVKWVKNGDMVIPSDYFKIVKEHNLQVLGLVKSDEGFYQCIAENDVGNAQAGAQLIILEHAPATTGPLPSAPRDVVASLVSTRFIKLTWRTPASDPHGDNLTYSVFYTKEGIARERVENTSHPGEMQVTIQNLMPATVYIFRVMAQNKHGSGESSAPLRVETQPEVQLPGPAPNLRAYAASPTSITVTWETPVSGNGEIQNYKLYYMEKGTDKEQDVDVSSHSYTINGLKKYTEYSFRVVAYNKHGPGVSTQTYEHDDVSVYMLEVRNSKSIMIHWQPPAPATQNGQITGYKIRYRKASRKSDVTETLVSGTQLSQLIEGLDRGTEYNFRVAALTINGTGPATDWLSAETFESDLDGKNNNWQDWNTIDTSCSQMSQTGKPQTWGGYGSSL

SEQ ID NO: 900077 - protein, 340 aa, Homo sapiens
GPGRAGLEQRRRGSRACSEGPAEARGREGGKGSAALSPPLPLTLGEEMAAERGARRLLSTPSFWLYCLLLLGRRAPGAAAARSGSAPQSPGASIRTFTPFYFLVEPVDTLSVRGSSVILNCSAYSEPSPKIEWKKDGTFLNLVSDDRRQLLPDGSLFISNVVHSKHNKPDEGYYQCVATVESLGTIISRTAKLIVAGLPRFTSQPEPSSVYAGNNAILNCEVNADLVPFVRWEQNRQPLLLDDRVIKLPSGMLVISNATEGDGGLYRCVVESGGPPKYSDEVELKVLPDPEVISDLVFLKQPSPLVRVIGQDVVLPCVASGLPTPTIKWMKNEEALDTER

SEQ ID NO: 900078 - protein, 213 aa, Homo sapiens
MSKSESPKEPEQLRKLFIGGLSFETTDESLRSHFEQWGTLTDCVVMRDPNTKRSRGFGFVTYATVEEVDAAMNARPHKVDGRVVEPKRAVSREDSQRPGAHLTVKKIFVGGIKEDTEEHHLRDYFEQYGKIEVIEIMTDRGSGKKRGFAFVTFDDHDSVDKIVIQKYHTVNGHNCEVRKALSKQEMASASSSQRGRSGSGNFGGGRGGWFRWE

SEQ ID NO: 900079 - protein, 197 aa, Homo sapiens
FQCRAGLNAEIAVTWAFQMQWGTLTDCVVMRDPNTKRSRGFGFVTYATVEEVDAAMNARPHKVDGRVVEPKRAVSREDSQRPGAHLTVKKIFVGGIKEDTEEHHLRDYFEQYGKIEVIEIMTDRGSGKKRGFAFVTFDDHDSVDKIVIQKYHTVNGHNCEVRKALSKQEMASASSSQRGRSGSGNFGGGRGGWFRWE

SEQ ID NO: 900080 - protein, 240 aa, Homo sapiens
RQHHNTHDEAVGLNRQRISARGRRRRSIVKVSLHPAVMSKSESPKEPEHFETTDESLRSHFEQWGTLTDCVVMRDPNTKRSRGFGFVTYATVEEVDAAMNARPHKVDGRVVEPKRAVSREDSQRPGAHLTVKKIFVGGIKEDTEEHHLRDYFEQYGKIEVIEIMTDRGSGKKRGFAFVTFDDHDSVDKIVIQKYHTVNGHNCEVRKALSKQEMASASSSQRGRSGSGNFGGGRGGWFRWE

SEQ ID NO: 900081 - protein, 208 aa, Homo sapiens
MSKSESPKEPEQLRKLFIGGLSFETTDESLRSHFEQWGTLTDCVVMRDPNTKRSRGFGFVTYATVEEVDAAMNARPHKVDGRVVEPKRAVSREDSQRPGAHLTVKKIFVGGIKEDTEEHHLRDYFEQYGKIEVIEIMTDRGSGKKRGFAFVTFDDHDSVDKIVIQKYHTVNGHNCEVRKALSKQEMASASSSQRGRSGSGNFGGGRGR

SEQ ID NO: 900082 - protein, 586 aa, Homo sapiens
ESIQRSGSSMKEEPLGSGMNAVRTWMQGAGVLDANTAAQSGVGLARAHFEKQPPSNLRKSNFFHFVLALYDRQGQPVEIERTAFVGFVEKEKEANSEKTNNGIHYRIQLLYSNGIRTEQDFYVRLIDSMTKQAIVYEGQDKSPEMCRVLLTHEIMCSRCCDKKSCGNRNETPSDPVIIDRFFLKFFLKCNQNCLKNAGNPRDMRRFQVVVSTTVNVDGHVLAVSDNMFVHNNSKHGRRARRLDPSEGTPSYLEHATPCIKAISPSEGWTTGGATVIIIGDNFFDGLQVIFGTMLVWSELITPHAIRVQTPPRHIPGVVEVTLSYKSKQFCKGTPGRFIYTALNEPTIDYGFQRLQKVIPRHPGDPERLPKEVILKRAADLVEALYGMPHNNQEIILKRAADIAEALYSVPRNHNQLPALANTSVHAGMMGVNSFSGQLAVNVSEASQATNQGFTRNSSSVSPHGYVPSTTPQQTNYNSVTTSMNGYGSAAMSNLGGSPTFLNGSAANSPYAIVPSSPTMASSTSLPSNCSSSSGIFSFSPANMVSAVKQKSAFAPVVRPQTSPPPTCTSTNGNSLQAISGMIVPPM

SEQ ID NO: 900083 - protein, 94 aa, Homo sapiens
  misc_feature (21)..(21): Xaa can be any naturally occurring amino acid
  misc_feature (24)..(24): Xaa can be any naturally occurring amino acid
  misc_feature (27)..(27): Xaa can be any naturally occurring amino acid
SAALLKSFANAFYLAQHLDPXGGXNSXCSYCDKSFRQLSHLQQHTRIHTGDRPYKCPHPGCEKAFTQLSNLQSHQRQHNGNSLQAISGMIVPPM

SEQ ID NO: 900084 - protein, 187 aa, Homo sapiens
AFPFVFLRFCVGGGPGISRVYALFYGECNPTREWAVSSELSPSFQEQNKMNKVEQKSQESVSFKDVTVGFTQEEWQHLDPSQRALYRDVMLENYSNLVSVGYCVHKPEVIFRLQQGEEPWKQEEEFPSQSFPEVWTADHLKERSQENQSKHLWEVVFINNEMLTKEQGDVIGIPFNVDAPEMLMPLD

SEQ ID NO: 900085 - protein, 150 aa, Homo sapiens
AFPFVFLRFCVGGGPGISRVYALFYGECNPTREWAVSSELSPSFQEQNKMNKVEQKSQESVSFKDVTVGFTQEEWQHLDPSQRALYRDVMLENYSNLVSVGYCVHKPEVIFRLQQGEEPWKQEEEFPSQSFPGELICTAQIHIRGFVVSQ

SEQ ID NO: 900086 - protein, 811 aa, Homo sapiens
MFQVEQKSQESVSFKDVTVGFTQEEWQHLDPSQRALYRDVMLENYSNLVSVGYCVHKPEVIFRLQQGEEPWKQEEEFPSQSFPEVWTADHLKERSQENQSKHLWEVVFINNEMLTKEQGDVIGIPFNVDVSSFPSRKMFCQCDSCGMSFNTVSELVISKINYLGKKSDEFNACGKLLLNIKHDETHTQEKNEVLKNRNTLSHHEETLQHEKIQTLEHNFEYSICQETLLEKAVFNTQKRENAEENNCDYNEFGRTLCDSSSLLFHQISPSRDNHYEFSDCEKFLCVKSTLSKPHGVSMKHYDCGESGNNFRRKLCLSHLQKGDKGEKHFECNECGKAFWEKSHLTRHQRVHTGQKPFQCNECEKAFWDKSNLTKHQRSHTGEKPFECNECGKAFSHKSALTLHQRTHTGEKPYQCNACGKTFCQKSDLTKHQRTHTGLKPYECYECGKSFRVTSHLKVHQRTHTGEKPFECLECGKSFSEKSNLTQHQRIHIGDKSYECNACGKTFYHKSLLTRHQIIHTGWKPYECYECGKTFCLKSDLTVHQRTHTGQKPFACPECGKFFSHKSTLSQHYRTHTGEKPYECHECGKIFYNKSYLTKHNRTHTGEKPYECNECGKAFYQKSQLTQHQRIHIGEKPYKCNECGKAFCHKSALIVHQRTHTQEKPYKCNECGKSFCVKSGLIFHERKHTGEKPYECNECGKFFRHKSSLTVHHRAHTGEKSCQCNECGKIFYRKSELAQHQRSHTGEKPYECNTCRKTFSQKSNLIVHQRRHIGENLMNEMDIRNFQPQVSLHNASEYSHCGESPDDILNVQ

SEQ ID NO: 900087 - protein, 699 aa, Homo sapiens
MLTKEQGDVIGIPFNVDVSSFPSRKMFCQCDSCGMSFNTVSELVISKINYLGKKSDEFNACGKLLLNIKHDETHTQEKNEVLKNRNTLSHHEETLQHEKIQTLEHNFEYSICQETLLEKAVFNTQKRENAEENNCDYNEFGRTLCDSSSLLFHQISPSRDNHYEFSDCEKFLCVKSTLSKPHGVSMKHYDCGESGNNFRRKLCLSHLQKGDKGEKHFECNECGKAFWEKSHLTRHQRVHTGQKPFQCNECEKAFWDKSNLTKHQRSHTGEKPFECNECGKAFSHKSALTLHQRTHTGEKPYQCNACGKTFCQKSDLTKHQRTHTGLKPYECYECGKSFRVTSHLKVHQRTHTGEKPFECLECGKSFSEKSNLTQHQRIHIGDKSYECNACGKTFYHKSLLTRHQIIHTGWKPYECYECGKTFCLKSDLTVHQRTHTGQKPFACPECGKFFSHKSTLSQHYRTHTGEKPYECHECGKIFYNKSYLTKHNRTHTGEKPYECNECGKAFYQKSQLTQHQRIHIGEKPYKCNECGKAFCHKSALIVHQRTHTQEKPYKCNECGKSFCVKSGLIFHERKHTGEKPYECNECGKFFRHKSSLTVHHRAHTGEKSCQCNECGKIFYRKSELAQHQRSHTGEKPYECNTCRKTFSQKSNLIVHQRRHIGENLMNEMDIRNFQPQVSLHNASEYSHCGESPDDILNVQ

SEQ ID NO: 900088 - protein, 860 aa, Homo sapiens
AFPFVFLRFCVGGGPGISRVYALFYGECNPTREWAVSSELSPSFQEQNKMNKVEQKSQESVSFKDVTVGFTQEEWQHLDPSQRALYRDVMLENYSNLVSVGYCVHKPEVIFRLQQGEEPWKQEEEFPSQSFPEVWTADHLKERSQENQSKHLWEVVFINNEMLTKEQGDVIGIPFNVDVSSFPSRKMFCQCDSCGMSFNTVSELVISKINYLGKKSDEFNACGKLLLNIKHDETHTQEKNEVLKNRNTLSHHEETLQHEKIQTLEHNFEYSICQETLLEKAVFNTQKRENAEENNCDYNEFGRTLCDSSSLLFHQISPSRDNHYEFSDCEKFLCVKSTLSKPHGVSMKHYDCGESGNNFRRKLCLSHLQKGDKGEKHFECNECGKAFWEKSHLTRHQRVHTGQKPFQCNECEKAFWDKSNLTKHQRSHTGEKPFECNECGKAFSHKSALTLHQRTHTGEKPYQCNACGKTFCQKSDLTKHQRTHTGLKPYECYECGKSFRVTSHLKVHQRTHTGEKPFECLECGKSFSEKSNLTQHQRIHIGDKSYECNACGKTFYHKSLLTRHQIIHTGWKPYECYECGKTFCLKSDLTVHQRTHTGQKPFACPECGKFFSHKSTLSQHYRTHTGEKPYECHECGKIFYNKSYLTKHNRTHTGEKPYECNECGKAFYQKSQLTQHQRIHIGEKPYKCNECGKAFCHKSALIVHQRTHTQEKPYKCNECGKSFCVKSGLIFHERKHTGEKPYECNECGKFFRHKSSLTVHHRAHTGEKSCQCNECGKIFYRKSELAQHQRSHTGEKPYECNTCRKTFSQKSNLIVHQRRHIGENLMNEMDIRNFQPQVSLHNASEYSHCGESPDDILNVQ

SEQ ID NO: 900089 - protein, 111 aa, Homo sapiens [sequence omitted]

SEQ ID NO: 900090 - protein, 860 aa, Homo sapiens; identical to SEQ ID NO: 900088

SEQ ID NO: 900091 - protein, 139 aa, Homo sapiens
AFPFVFLRFCVGGGPGISRVYALFYGECNPTREWAVSSELSPSFQEQNKMNKVEQKSQESVSFKDVTVGFTQEEWQHLDPSQRALYRDVMLENYSNLVSVGYCVHKPEVIFRLQQGEEPWKQEEEFPSQSFPESGQLIT

SEQ ID NO: 900092 - protein, 860 aa, Homo sapiens; identical to SEQ ID NO: 900088

SEQ ID NO: 900093 - protein, 860 aa, Homo sapiens; identical to SEQ ID NO: 900088

SEQ ID NO: 900094 - protein, 146 aa, Homo sapiens
AFPFVFLRFCVGGGPGISRVYALFYGECNPTREWAVSSELSPSFQEQNKMNKVEQKSQESVSFKDVTVGFTQEEWQHLDPSQRALYRDVMLENYSNLVSVGYCVHKPEVIFRLQQGEEPWKQEEEFPSQSFPEMGFHHVPGLVLNS

SEQ ID NO: 900095 - protein, 111 aa, Homo sapiens [sequence omitted]

SEQ ID NO: 900096 - protein, 244 aa, Homo sapiens
MRFRIYKRKVLILTLVVAACGFVLWSSNGRQRKNEALAPPLLDAEPARGAGGRGGDHPSVAVGIRRVSNVSAASLVPAVPQPEADNLTLRYRSLVYQLNFDQTLRNVDKAGTWAPRELVLVVQVHNRPEYLRLLLDSLRKAQGIDNVLVIFSHDFWSTEINQLIAGVNFCPVLQVFFPFSIQLYPNEFPGSDPRDCPRDLPKNAALKLGCINAEYPDSFGHYREAKFSQTKHHWWWKLHLCGKE

SEQ ID NO: 900097 - protein, 244 aa, Homo sapiens; identical to SEQ ID NO: 900096

SEQ ID NO: 900098 - protein, 226 aa, Homo sapiens
MRFRIYKRKVLILTLVVAACGFVLWSSNGRQRKNEALAPPLLDAEPARGAGGRGGDHPSVAVGIRRVSNVSAASLVPAVPQPEADNLTLRYRSLVYQLNFDQTLRNVDKAGTWAPRELVLVVQVHNRPEYLRLLLDSLRTEINQLIAGVNFCPVLQVFFPFSIQLYPNEFPGSDPRDCPRDLPKNAALKLGCINAEYPDSFGHYREAKFSQTKHHWWWKLHLCGKE

SEQ ID NO: 900099 - protein, 244 aa, Homo sapiens; identical to SEQ ID NO: 900096

SEQ ID NO: 900100 - protein, 284 aa, Homo sapiens
AGGPRCAAGQLRVVITVPAGVRRGRVAQFWPSRAPVRMRTMRFRIYKRKVLILTLVVAACGFVLWSSNGRQRKNEALAPPLLDAEPARGAGGRGGDHPSVAVGIRRVSNVSAASLVPAVPQPEADNLTLRYRSLVYQLNFDQTLRNVDKAGTWAPRELVLVVQVHNRPEYLRLLLDSLRKAQGIDNVLVIFSHDFWSTEINQLIAGVNFCPVLQVFFPFSIQLYPNEFPGSDPRDCPRDLPKNAALKLGCINAEYPDSFGHYREAKFSQTKHHWWWKLHLCGKE

SEQ ID NO: 900101 - protein, 244 aa, Homo sapiens; identical to SEQ ID NO: 900096

SEQ ID NO: 900102 - protein, 244 aa, Homo sapiens; identical to SEQ ID NO: 900096

SEQ ID NO: 900103 - protein, 199 aa, Homo sapiens
MGDGAGGRGGDHPSVAVGIRRVSNVSAASLVPAVPQPEADNLTLRYRSLVYQLNFDQTLRNVDKAGTWAPRELVLVVQVHNRPEYLRLLLDSLRKAQGIDNVLVIFSHDFWSTEINQLIAGVNFCPVLQVFFPFSIQLYPNEFPGSDPRDCPRDLPKNAALKLGCINAEYPDSFGHYREAKFSQTKHHWWWKLHLCGKE

SEQ ID NO: 900104 - protein, 129 aa, Homo sapiens [sequence omitted]

SEQ ID NO: 900105 - protein, 532 aa, Homo sapiens
RLRRGPSAAAVAPSGGPQRFKRFSCFSLRSSWDYRHVPTHPATKMPEEMDKPLISLHLVDSDSSLAKVPDEAPKVGILGSGDFARSLATRLVGSGFKVVVGSRNPKRTARLFPSAAQVTFQEEAVSSPEVIFVAVFREHYSSLCSLSDQLAGKILVDVSNPTEQEHLQHRESNAEYLASLFPTCTVVKAFNVISAWTLQAGPRDGNRQVPICGDQPEAKRAVSEMALAMGFMPVDMGSLASAWEVEAMPLRLLPAWKVPTLLALGLFVCFYAYNFVRDVLQPYVQESQNKFFKLPVSVVNTTLPCVAYVLLSLVYLPGVLAAALQLRRGTKYQRFPDWLDHWLQHRKQIGLLSFFCAALHALYSFCLPLRRAHRYDLVNLAVKQVLANKSHLWVEEEVWRMEIYLSLGVLALGTLSLLAVTSLPSIANSLNWREFSFVQSSLGFVALVLSTLHTLTYGWTRAFEESRYKFYLPPTFTLTLLVPCVVILAKALFLLPCISRRLARIRRGWERESTIKFTLPTDHALAEKTSHV

SEQ ID NO: 900106 - protein, 532 aa, Homo sapiens; identical to SEQ ID NO: 900105

SEQ ID NO: 900107 - protein, 532 aa, Homo sapiens; identical to SEQ ID NO: 900105

SEQ ID NO: 900108 - protein, 532 aa, Homo sapiens; identical to SEQ ID NO: 900105

SEQ ID NO: 900109 - protein, 540 aa, Homo sapiens
TAFAADLQLPRSLRAAGRRATKMPEEMDKPLISLHLVDSDSSLAKVPDEAPKVGILGSGDFARSLATRLVGSGFKVVVGSRNPKRTARLFPSAAQVTFQEEAVSSPEVIFVAVFREHYSSLCSLSDQLAGKILVDVSNPTEQEHLQHRESNAEYLASLFPTCTVVKAFNVISAWTLQAGPRDGNRQVPICGDQPEAKRAVSEMALAMGFMPVDMGSLASAWEVEAMPLRLLPAWKVPTLLALGLFVCFYAYNFVRDVLQPYVQESQNKFFKLPVSVVNTTLPCVAYVLLSLVYLPGVLAAALQLRRGTKYQRFPDWLDHWLQHRKQIGLLSFFCAALHALYSFCLPLRRAHRYDLVNLAVKQVLANKSHLWVEEEVWRMEIYLSLGVLALGTLSLLAVTSLPSIANSLNWREFSFVQSSLGFVALVLSTLHTLTYGWTRAFEESRYKFYLPPTFTLTLLVPCVVILAKALFLLPCISRRLARIRRGWERESTIKFTLPTDHAPEPVRFSFLGGAKWYNCVQIGGLRSKFLGLKCMQYYSE

SEQ ID NO: 900110 - protein, 532 aa, Homo sapiens; identical to SEQ ID NO: 900105

SEQ ID NO: 900111 - protein, 532 aa, Homo sapiens; identical to SEQ ID NO: 900105

SEQ ID NO: 900112 - protein, 128 aa, Homo sapiens
GCAREPESRLPKLGSWENLGPGLTEKRRGKEAGQEEGAWRTPAGGRGAAGLSVTPLSPPRPAPPAGEGPRCPPGRPAPARRRKGWRVERRGGRGSAWDAPGHRARSLRPGAGQVRGQDVGRTWCMAAS

SEQ ID NO: 900113 - protein, 445 aa, Homo sapiens
MLKKQSAGLVLWGAILFVAWNALLLLFFWTRPAPGRPPSVSALDGDPASLTREVIRLAQDAEVELERQRGLLQQIGDALSSQRGRVPTAAPPAQPRVPVTPAPAVIPILVIACDRSTVRRCLDKLLHYRPSAELFPIIVSQDCGHEETAQAIASYGSAVTHIRQPDLSSIAVPPDHRKFQGYYKIARHYRWALGQVFRQFRFPAAVVVEDDLEVAPDFFEYFRATYPLLKADPSLWCVSAWNDNGKEQMVDASRPELLYRTDFFPGLGWLLLAELWAELEPKWPKAFWDDWMRRPEQRQGRACIRPEISRTMTFGRKGVSHGQFFDQHLKFIKLNQQFVHFTQLDLSYLQREAYDRDFLARVYGAPQLQVEKVRTNDRKELGEVRVQYTGRDSFKAFAKALGVMDDLKSGVPRAGYRGIVTFQFRGRRVHLAPPPTWEGYDPSWN

SEQ ID NO: 900114 - protein, 83 aa, Homo sapiens
GPALGIGPGAWIATRGGPRLLAETGRAGTRLTQKSASWAMPLLRPVSSHEPQHKTDGPVLTVDNFPCLSKRWDSIWDLSITRL

SEQ ID NO: 900115 - protein, 445 aa, Homo sapiens; identical to SEQ ID NO: 900113

SEQ ID NO: 900116 - protein, 445 aa, Homo sapiens; identical to SEQ ID NO: 900113

SEQ ID NO: 900117 - protein, 445 aa, Homo sapiens; identical to SEQ ID NO: 900113

SEQ ID NO: 900118 - protein, 445 aa, Homo sapiens; identical to SEQ ID NO: 900113

SEQ ID NO: 900119 - protein, 445 aa, Homo sapiens; identical to SEQ ID NO: 900113

SEQ ID NO: 900120 - protein, 445 aa, Homo sapiens; identical to SEQ ID NO: 900113

SEQ ID NO: 900121 - protein, 445 aa, Homo sapiens; identical to SEQ ID NO: 900113

SEQ ID NO: 900122 - protein, 445 aa, Homo sapiens; identical to SEQ ID NO: 900113

SEQ ID NO: 900123 - protein, 266 aa, Homo sapiens
MLKKQSAGLVLWGAILFVAWNALLLLFFWTRPAPGRPPSVSALDGDPASLTREVIRLAQDAEVELERQRGLLQQIGDALSSQRGRVPTAAPPAQPRVPVTPAPAVIPILVIACDRSTVRRCLDKLLHYRPSAELFPIIVSQDCGHEETAQAIASYGSAVTHIRQPDLSSIAVPPDHRKFQGYYKIARHYRWALGQVFRQFRFPAAVVVEDDLEVAPDFFEYFRATYPLLKADPSLWCVSAWNDNGKEQMVDAMAGWRGLGGFLFLA

SEQ ID NO: 900124 - protein, 169 aa, Homo sapiens
MLKKQSAGLVLWGAILFVAWNALLLLFFWTRPAPGRPPSVSALDGDPASLTREVIRLAQDAEVELERQRGLLQQIGDALSSQRGRVPTAAPPAQPRVPVTPAPAVIPILVIACDRSTVRRCLDKLLHYRPSAELFPIIVSQAPCPHRPGRHGRMERTWWIFVSCLTSVS

SEQ ID NO: 900125 - protein, 122 aa, Homo sapiens
GCAREPESRLPKLGSWENLGPGLTEKRRGKEAGQEEGAWRTPAGGRGAAGLSVTPLSPPRPAPPAGEGPRCPPGRPAPARRRKGWRVERRGGRGSAWDAPGHRARSLRPGAGQVRGQDVGRT

SEQ ID NO: 900126 - protein, 445 aa, Homo sapiens; identical to SEQ ID NO: 900113

SEQ ID NO: 900127 - protein, 445 aa, Homo sapiens; identical to SEQ ID NO: 900113

SEQ ID NO: 900128 - protein, 445 aa, Homo sapiens; identical to SEQ ID NO: 900113

SEQ ID NO: 900129 - protein, 445 aa, Homo sapiens; identical to SEQ ID NO: 900113

SEQ ID NO: 900130 - protein, 445 aa, Homo sapiens; identical to SEQ ID NO: 900113

SEQ ID NO: 900131 - protein, 445 aa, Homo sapiens; identical to SEQ ID NO: 900113

SEQ ID NO: 900132 - protein, 445 aa, Homo sapiens; identical to SEQ ID NO: 900113

SEQ ID NO: 900133 - protein, 169 aa, Homo sapiens; identical to SEQ ID NO: 900124

SEQ ID NO: 900134 - protein, 232 aa, Homo sapiens
RTTFPRGLRDCREEWGRCLTSGTVITSLFGGTVMAREMTILGSAVLTLLLAGYLAQQYLPLPTPKVIGIDLGTTYCSVGVFFPGTGKVKVIPDENGHISIPSMVSFTDNDVYVGYESVELADSNPQNTIYDAKRFIGKIFTAEELEAEIGRYPFKVLNKNGMVEFSVTSNETITVSPEYVGSRLLLKLKEMAEAYLGMPVANAVISVPAEFDLKQRNSTIEAANLAGNSTLD

SEQ ID NO: 900135 - protein, 504 aa, Homo sapiens
RTTFPRGLRDCREEWGRCLTSGTVITSLFGGTVMAREMTILGSAVLTLLLAGYLAQQYLPLPTPKVIGIDLGTTYCSVGVFFPGTGKVKVIPDENGHISIPSMVSFTDNDVYVGYESVELADSNPQNTIYDAKRFIGKIFTAEELEAEIGRYPFKVLNKNGMVEFSVTSNETITVSPEYVGSRLLLKLKEMAEAYLGMPVANAVISVPAEFDLKQRNSTIEAANLAGLKILRVINEPTAAAMAYGLHKADVFHVLVIDLGGGTLDVSLLNKQGGMFLTRAMSGNNKLGGQDFNQRLLQYLYKQIYQTYGFVPSRKEEIHRLRQAVEMVKLNLTLHQSAQLSVLLTVEEQDRKEPHSSDTELPKDKLSSADDHRVNSGFGRGLSDKKSGESQVLFETEISRKLFDTLNEDLFQKILVPIQQVLKEGHLEKTEIDEVVLVGGSTRIPRIRQVIQEFFGKDPNTSVDPDLAVVTGVAIQAGIDGGSWPLQVSALEIPNKHLQKTNFN

SEQ ID NO: 900136 - protein, 517 aa, Homo sapiens
RTTFPRGLRDCREEWGRCLTSGTVITSLFGGTVMAREMTILGSAVLTLLLAGYLAQQYLPLPTPKVIGIDLGTTYCSVGVFFPGTGKVKVIPDENGHISIPSMVSFTDNDVYVGYESVELADSNPQNTIYDAKRFIGKIFTAEELEAEIGRYPFKKRGFCLREAENKKFGEKLWGGSFSVTSNETITVSPEYVGSRLLLKLKEMAEAYLGMPVANAVISVPAEFDLKQRNSTIEAANLAGLKILRVINEPTAAAMAYGLHKADVFHVLVIDLGGGTLDVSLLNKQGGMFLTRAMSGNNKLGGQDFNQRLLQYLYKQIYQTYGFVPSRKEEIHRLRQAVEMVKLNLTLHQSAQLSVLLTVEEQDRKEPHSSDTELPKDKLSSADDHRVNSGFGRGLSDKKSGESQVLFETEISRKLFDTLNEDLFQKILVPIQQVLKEGHLEKTEIDEVVLVGGSTRIPRIRQVIQEFFGKDPNTSVDPDLAVVTGVAIQAGIDGGSWPLQVSALEIPNKHLQKTNFN

SEQ ID NO: 900137 - protein, 504 aa, Homo sapiens; identical to SEQ ID NO: 900135

SEQ ID NO: 900138 - protein, 402 aa, Homo sapiens
MVSFTDNDVYVGYESVELADSNPQNTIYDAKRFIGKIFTAEELEAEIGRYPFKVLNKNGMVEFSVTSNETITVSPEYVGSRLLLKLKEMAEAYLGMPVANAVISVPAEFDLKQRNSTIEAANLAGLKILRVINEPTAAAMAYGLHKADVFHVLVIDLGGGTLDVSLLNKQGGMFLTRAMSGNNKLGGQDFNQRLLQYLYKQIYQTYGFVPSRKEEIHRLRQAVEMVKLNLTLHQSAQLSVLLTVEEQDRKEPHSSDTELPKDKLSSADDHRVNSGFGRGLSDKKSGESQVLFETEISRKLFDTLNEDLFQKILVPIQQVLKEGHLEKTEIDEVVLVGGSTRIPRIRQVIQEFFGKDPNTSVDPDLAVVTGVAIQAGIDGGSWPLQVSALEIPNKHLQKTNFN

SEQ ID NO: 900139 - protein, 307 aa, Homo sapiens
RTTFPRGLRDCREEWGRCLTSGTVITSLFGGTVMAREMTILGSAVLTLLLAGYLAQQYLPLPTPKVIGIDLGTTYCSVGVFFPGTGKVKVIPDENGHISIPSMVSFTDNDVYVGYESVELADSNPQNTIYDAKRFIGKIFTAEELEAEIGRYPFKVLNKNGMVEFSVTSNETITVSPEYVGSRLLLKLKEMAEAYLGMPVANAVISVPAEFDLKQRNSTIEAANLAGLKILRVINEPTAAAMAYGLHKADVFHVLVIDLGGGTLDVSLLNKQGGMFLTRAMSGNNKLGGQDFNQRLLQYLYKQIGIL

SEQ ID NO: 900140 - protein, 361 aa, Homo sapiens
EPSRPPRAPIGRPATQPSPPLPSLLTIVCGEGSERVENQGTCALTSRLRLGAEGPRRAWPAGGYKEAVVRARPAQCCRAPGRRVGLRCARRTSEAAGSGAGPPGPLQGRSGSSWAPRPGRRTEERRKGAGGTRPRPAAAMNSNVENLPPHIIRLVYKEVTTLTADPPDGIKVFPNEEDLTDLQVTIEGPEGTPYAGGLFRMKLLLGKDFPASPPKGYFLTKIFHPNVGANGEICVNVLKRDWTAELGIRHVLLTIKCLLIHPNPESALNEEAGRLLLENYEEYAARARLLTEIHGGAGGPSGRAEAGRALASGTEASSTDPGAPGGPGGAEGPMAKKHAGERDKKLAAKKKTDKKRALRRL

SEQ ID NO: 900141 - protein, 229 aa, Homo sapiens
MNSNVENLPPHIIRLVYKEVTTLTADPPDGIKVFPNEEDLTDLQVTIEGPEGTPYAGGLFRMKLLLGKDFPASPPKGYFLTKIFHPNVGANGEICVNVLKRDWTAELGIRHVLLTIKCLLIHPNPESALNEEAGRLLLENYEEYAARARLLTEIHGGAGGPSGRAEAGRALASGTEASSTDPGAPGGPGGAEGPMAKKHAGERDRVGQKRAEGLCVDGSLFTDHFVSHC

SEQ ID NO: 900142 - protein, 386 aa, Homo sapiens
EPSRPPRAPIGRPATQPSPPLPSLLTIVCGEGSERVENQGTCALTSRLRLGAEGPRRAWPAGGYKEAVVRARPAQCCRAPGRRVGLRCARRTSEAAGSGAGPPGPLQGRSGSSWAPRPGRRTEERRKGAGGTRPRPAAAMNSNVENLPPHIIRLVYKEVTTLTADPPDGIKVFPNEEDLTDLQVTIEGPEGTPYAGGLFRMKLLLGKDFPASPPKGYFLTKIFHPNVGANGEICVNVLKRDWTAELGIRHVLLTIKCLLIHPNPDGPVCSQRSTGAPAGPAAGPKPVGPWPVALKLPPPTLGPQGAREGLRVPWPRSMLASAIRSWRPRKRRTRSGRCGGCSGLSSSFHRDPNLSCPLPPTLSLSYLNYGWGRGGYRGHWDLDLFF

SEQ ID NO: 900143 - protein, 361 aa, Homo sapiens; identical to SEQ ID NO: 900140

SEQ ID NO: 900144 - protein, 393 aa, Homo sapiens
EPSRPPRAPIGRPATQPSPPLPSLLTIVCGEGSERVENQGTCALTSRLRLGAEGPRRAWPAGGYKEAVVRARPAQCCRAPGRRVGLRCARRTSEAAGSGAGPPGPLQGRSGSSWAPRPGRRTEERRKGAGGTRPRPAAAMNSNVENLPPHIIRLVYKEVTTLTADPPDGIKVFPNEEDLTDLQVTIEGPEGTPYAGGLFRMKLLLGKDFPASPPKGYFLTKIFHPNVGANGEICVNVLKRDWTAELGIRHVLLTIKCLLIHPNPESALNEEAGRLLLENYEEYAARARLLTEIHGGAGGPSGRAEAGRALASGTEASSTDPGAPGGPGGAEGPMAKKHAGERDKKLAAKKLLADQAEARRSKTKEARKRREERLQAKKEEIIKTLSKEEETKK

SEQ ID NO: 900145 - protein, 279 aa, Homo sapiens
QLQQQVYKEAVLYGSKVARRGGGLVYAVRGGRRRQRGAERGRRGLSRAAAAAVGPPAPAGGPKNLPPHIIRLVYKEVTTLTADPPDGIKVFPNEEDLTDLQVTIEGPEGTPYAGGLFRMKLLLGKDFPASPPKGYFLTKIFHPNVGANGEICVNVLKRDWTAELGIRHVLLTIKCLLIHPNPESALNEEAGRLLLENYEEYAARARLLTEIHGGAGGPSGRAEAGRALASGTEASSTDPGAPGGPGGAEGPMAKKHAGERDKKLAAKKKTDKKRALRRL

SEQ ID NO: 900146 - protein, 279 aa, Homo sapiens; identical to SEQ ID NO: 900145

SEQ ID NO: 900147 - protein, 161 aa, Homo sapiens [sequence omitted]

SEQ ID NO: 900148 - protein, 189 aa, Homo sapiens
EPSRPPRAPIGRPATQPSPPLPSLLTIVCGEGSERVENQGTCALTSRLRLGAEGPRRAWPAGGYERGSGARAAGSVLPGTGAAGWSTLCAADVGGSGERSGAAGASPGPQRQQLGPPPRPADRRTQEGGRGDPPPAGRSHELQRGEPTPAHHPPGVQGGDDTDRRPTRWHQGLSQRGGPHRPPGHHRGP

SEQ ID NO: 900149 - protein, 155 aa, Homo sapiens
  misc_feature (22)..(22): Xaa can be any naturally occurring amino acid
  misc_feature (26)..(26): Xaa can be any naturally occurring amino acid
  misc_feature (33)..(33): Xaa can be any naturally occurring amino acid
  misc_feature (35)..(36): Xaa can be any naturally occurring amino acid
  misc_feature (38)..(38): Xaa can be any naturally occurring amino acid
PSTLMSTVRVPRSCPPERWVPXAKFXLTGVNIXVXXVXRDHSTRTCVTIKCLLIHPNPESALNEEAGRLLLENYEEYAARARLLTEIHGGAGGPSGRAEAGRALASGTEASSTDPGAPGGPGGAEGPMAKKHAGERDKKLAAKKKTDKKRALRRL

SEQ ID NO: 900150 - protein, 173 aa, Homo sapiens
MRLVGPVVNLAEVTLLLGKDFPASPPKGYFLTKIFHPNVGANGEICVNVLKRDWTAELGIRHVLLTIKCLLIHPNPESALNEEAGRLLLENYEEYAARARLLTEIHGGAGGPSGRAEAGRALASGTEASSTDPGAPGGPGGAEGPMAKKHAGERDKKLAAKKKTDKKRALRRL

SEQ ID NO: 900151 - protein, 361 aa, Homo sapiens; identical to SEQ ID NO: 900140

SEQ ID NO: 900152 - protein, 367 aa, Homo sapiens
EPSRPPRAPIGRPATQPSPPLPSLLTIVCGEGSERVENQGTCALTSRLRLGAEGPRRAWPAGGYKEAVVRARPAQCCRAPGRRVGLRCARRTSEAAGSGAGPPGPLQGRSGSSWAPRPGRRTEERRKGAGGTRPRPAAAMNSNVENLPPHIIRLVYKEVTTLTADPPDGIKVFPNEEDLTDLQVTIEGPEGTPYAGGLFRMKLLLGKDFPASPPKGYFLTKIFHPNVGANGEICVNVLKRDWTAELGIRHVLLTIKCLLIHPNPESALNEEAGRLLLENYEEYAARARLLTEIHGGAGGPSGRAEAGRALASGTEASSTDPGAPGGPGGAEGPMAKKHAGERDKKLAAKKKTDKKRALRGEGSLLFT

SEQ ID NO: 900153 - protein, 224 aa, Homo sapiens
DAWVDPRVRLPPHIIRLVYKEVTTLTADPPDGIKVFPNEEDLTDLQVTIEGPEGTPYAGGLFRMKLLLGKDFPASPPKGYFLTKIFHPNVGANGEICVNVLKRDWTAELGIRHVLLTIKCLLIHPNPESALNEEAGRLLLENYEEYAARARLLTEIHGGAGGPSGRAEAGRALASGTEASSTDPGAPGGPGGAEGPMAKKHAGERDKKLAAKKKTDKKRALRRL

SEQ ID NO: 900154 - protein, 279 aa, Homo sapiens
VPARSLWGESWAWRAPLGVLQGRLQTPFSTAGSWRLFSHWREGSVGLNSLVAENFGVYKRGGELTPNDACFAGEVGEMTLTADPPDGIKVFPNEEDLTDLQVTIEGPEGTPYAGGLFRMKLLLGKDFPASPPKGYFLTKIFHPNVGANGEICVNVLKRDWTAELGIRHVLLTIKCLLIHPNPESALNEEAGRLLLENYEEYAARARLLTEIHGGAGGPSGRAEAGRALASGTEASSTDPGAPGGPGGAEGPMAKKHAGERDKKLAAKKKTDKKRALRRL

SEQ ID NO: 900155 - protein, 390 aa, Homo sapiens
EPSRPPRAPIGRPATQPSPPLPSLLTIVCGEGSERVENQGTCALTSRLRLGAEGPRRAWPAGGYKEAVVRARPAQCCRAPGRRVGLRCARRTSEAAGSGAGPPGPLQGRSGSSWAPRPGRRTEERRKGAGGTRPRPAAAMNSNVENLPPHIIRLVYKEVTTLTADPPDGIKVFPNEEDLTDLQVTIEGPEGTPYAGGLFRMKLLLGKDFPASPPKGYFLTKIFHPNVGANGEICVNVLKRDWTAELGIRHVLLLSWKDKQCQTQDTQVLLRSAQEHLTMQRVTIKCLLIHPNPESALNEEAGRLLLENYEEYAARARLLTEIHGGAGGPSGRAEAGRALASGTEASSTDPGAPGGPGGAEGPMAKKHAGERDKKLAAKKKTDKKRALRRL

SEQ ID NO: 900156 - protein, 342 aa, Homo sapiens
METTFYDDALNASFLPSESGPYGYSNPKILKQSMTLNLADPVGSLKPHLRAKNSDLLTSPDVGLLKLASPELERLIIQSSNGHITTTPTPTQFLCPKNVTDEQEGFAEGFVRALAELHSQNTLPSVTSAAQPVNGAGMVAPAVASVAGGSGSGGFSASLHSEPPVYANLSNFNPGALSSGGGAPSYGAAGLAFPAQPQQQQQPPHHLPQQMPVQHPRLQALKEEPQTVPEMPGETPPLSPIDMESQERIKAERKRMRNRIAASKCRKRKLERIARLEEKVKTLKAQNSELASTANMLREQVAQLKQKVMNHVNSGCQLHANAAVANILKRDRRGLRGNEEKK

SEQ ID NO: 900157 - protein, 342 aa, Homo sapiens; identical to SEQ ID NO: 900156

SEQ ID NO: 900158 - protein, 342 aa, Homo sapiens; identical to SEQ ID NO: 900156

SEQ ID NO: 900159 - protein, 354 aa, Homo sapiens
MTAKMETTFYDDALNASFLPSESGPYGYSNPKILKQSMTLNLADPVGSLKPHLRAKNSDLLTSPDVGLLKLASPELERLIIQSSNGHITTTPTPTQFLCPKNVTDEQEGFAEGFVRALAELHSQNTLPSVTSAAQPVNGAGMVAPAVASVAGGSGSGGFSASLHSEPPVYANLSNFNPGALSSGGGAPSYGAAGLAFPAQPQQQQQPPHHLPQQMPVQHPRLQALKEEPQTVPEMPGETPPLSPIDMESQERIKAERKRMRNRIAASKCRKRKLERIARLEEKVKTLKAQNSELASTANMLREQVAQLKQKVMNHVNSGCQLHANAAVANILKRDRRGQGLLQFRRRGREFSSS

SEQ ID NO: 900160 - protein, 223 aa, Homo sapiens
MTAKMETTFYDDALNASFLPSESGPYGYSNPKILKQSMTLNLADPVGSLKPHLRAKNSDLLTSPDVGLLKLASPELERLIIQSSNGHITTTPTPTQFLCPKNVTDEQEGFAEGFVRALAELHSQNTLPSVTSAAQPVNGAGMVAPAVASVAGGSGSGGFSASLHSEPPVYANLSNFNPGALSSGGGAPSYGAAGLAFPAQPQQERERDTARDAVSTGVRPERS

SEQ ID NO: 900161 - protein, 342 aa, Homo sapiens; identical to SEQ ID NO: 900156

SEQ ID NO: 900162 - protein, 132 aa, Homo sapiens
MPVQHPRLQALKEEPQTVPEMPGETPPLSPIDMESQERIKAERKRMRNRIAASKCRKRKLERIARLEEKVKTLKAQNSELASTANMLREQVAQLKQKVMNHVNSGCQLHANAAVANILKRDRRGLRGNEEKK

SEQ ID NO: 900163 - protein, 319 aa, Homo sapiens
MTAKMETTFYDDALNASFLPSESGPYGYSNPKILKQSMTLNLADPVGSLKPHLRAKNSDLLTSPDVGLLKLASPELERLIIQSSNGHITTTPTPTQFLCPKNVTDEQEGFAEGFVRALAELHSQNTLPSVTSAAQPVNGAGMVAPAVASVAGGSGSGGFSASLHSEPPVYANLSNFNPGALSSGGGAPSYGAAGLAFPAQPQQQQQPPHHLPQQMPVQHPRLQALKEEPQTVPEMPGETPPLSPIDMESQERIKAERKRMRNRIAASKCRKRKLERIARLEQCLATMHAPQSELIPLSQQCQGTRSTEFCTSHIPMTIS

SEQ ID NO: 900164 - protein, 57 aa, Homo sapiens
MPTGKQLADIGYKTFSTSMMLLTVYGGYLCSVRVYHYFQWRRAQRQAAEEQKTSGIM

SEQ ID NO: 900165 - protein, 57 aa, Homo sapiens; identical to SEQ ID NO: 900164

SEQ ID NO: 900166 - protein, 57 aa, Homo sapiens; identical to SEQ ID NO: 900164

SEQ ID NO: 900167 - protein, 133 aa, Homo sapiens
MRRSCSIQVRCRLGPSRGCQSHCLRAHLGQSPLAASSHPLVCRPGALEFTRFCCVADRELHCFLPKPKLLAAVGDKMPTGKQLADIGYKTFSTSMMLLTVYGGYLCSVRVYHYFQWRRAQRQAAEEQKTSGIM

SEQ ID NO: 900168 - protein, 57 aa, Homo sapiens; identical to SEQ ID NO: 900164

SEQ ID NO: 900169 - protein, 57 aa, Homo sapiens; identical to SEQ ID NO: 900164

SEQ ID NO: 900170 - protein, 57 aa, Homo sapiens; identical to SEQ ID NO: 900164

SEQ ID NO: 900171 - protein, 392 aa, Homo sapiens
MSTRESFNPESYELDKSFRLTRFTELKGTGCKVPQDVLQKLLESLQENHFQEDEQFLGAVMPRLGIGMDTCVIPLRHGGLSLVQTTDYIYPIVDDPYMMGRIACANVLSDLYAMGVTECDNMLMLLGVSNKMTDRERDKVMPLIIQGFKDAAEEAGTSVTGGQTVLNPWIVLGGVATTVCQPNEFIMPDNAVPGDVLVLTKPLGTQVAVAVHQWLDIPEKWNKIKLVVTQEDVELAYQEAMMNMARLNRTAAGLMHTFNAHAATDITGFGILGHAQNLAKQQRNEVSFVIHNLPVLAKMAAVSKACGNMFGLMHGTCPETSGGLLICLPREQAARFCAEIKSPKYGEGHQAWIIGIVEKGNRTARIIDKPRIIEVAPQVATQNVNPTPGATS

SEQ ID NO: 900172 - protein, 392 aa, Homo sapiens; identical to SEQ ID NO: 900171

SEQ ID NO: 900173 - protein, 392 aa, Homo sapiens; identical to SEQ ID NO: 900171

SEQ ID NO: 900174 - protein, 321 aa, Homo sapiens
MSTRESFNPESYELDKSFRLTRFTELKGTGCKVPQDVLQKLLESLQENHFQEDEQFLGAVMPRLGIGMDTCVIPLRHGGLSLVQTTDYIYPIVDDPYMMGRIACANVLSDLYAMGVTECDNMLMLLGVSNKMTDRERDKVMPLIIQGFKDAAEEAGTSVTGGQTVLNPWIVLGGVATTVCQPNEFIMPDNAVPGDVLVLTKPLGTQVAVAVHQWLDIPEKWNKIKLVVTQEDVELAYQEAMMNMARLNRTGGLLICLPREQAARFCAEIKSPKYGEGHQAWIIGIVEKGNRTARIIDKPRIIEVAPQVATQNVNPTPGATS

SEQ ID NO: 900175 - protein, 200 aa, Homo sapiens
MSTRESFNPESYELDKSFRLTRFTELKGTGCKVPQDVLQKLLESLQENHFQEDEQFLGAVMPRLGIGMDTCVIPLRHGGLSLVQTTDYIYPIVDDPYMMGRIACANVLSDLYAMGVTECDNMLMLLGVSNKMTDRERDKVMPLIIQGFKDAAEEAGTSVTGGQTVLNPWIVLGGVATTVCQPNEFIMPDNAVPGDVLVLT

SEQ ID NO: 900176 - protein, 195 aa, Homo sapiens
MSTRESFNPESYELDKSFRLTRFTELKGTGCKVPQDVLQKLLESLQENHFQEDEQFLGAVMPRLGIGMDTCVIPLRHGGLSLVQTTDYIYPIVDDPYMMGRIACANVLSDLYAMGVTECDNMLMLLGVSNKMTDRERDKVMPLIIQGFKDAAEEAGTSVTGGQTVLNPWIVLGGVATTVCQPNEFIILRNGIRLN

SEQ ID NO: 900177 - protein, 152 aa, Homo sapiens
MMNMARLNRTAAGLMHTFNAHAATDITGFGILGHAQNLAKQQRNEVSFVIHNLPVLAKMAAVSKACGNMFGLMHGTCPETSGGLLICLPREQAARFCAEIKSPKYGEGHQAWIIGIVEKGNRTARIIDKPRIIEVAPQVATQNVNPTPGATS

SEQ ID NO: 900178 - protein, 321 aa, Homo sapiens; identical to SEQ ID NO: 900174

SEQ ID NO: 900179 - protein, 51 aa, Homo sapiens
MHTFNAHAATDITGFGILGHAQNLAKQQRNEVSFVIHNLPVLAKMAAVSKA

SEQ ID NO: 900180 - protein, 392 aa, Homo sapiens; identical to SEQ ID NO: 900171

SEQ ID NO: 900181 - protein, 392 aa, Homo sapiens; identical to SEQ ID NO: 900171

SEQ ID NO: 900182 - protein, 325 aa, Homo sapiens
MDTCVIPLRHGGLSLVQTTDYIYPIVDDPYMMGRIACANVLSDLYAMGVTECDNMLMLLGVSNKMTDRERDKVMPLIIQGFKDAAEEAGTSVTGGQTVLNPWIVLGGVATTVCQPNEFIMPDNAVPGDVLVLTKPLGTQVAVAVHQWLDIPEKWNKIKLVVTQEDVELAYQEAMMNMARLNRTAAGLMHTFNAHAATDITGFGILGHAQNLAKQQRNEVSFVIHNLPVLAKMAAVSKACGNMFGLMHGTCPETSGGLLICLPREQAARFCAEIKSPKYGEGHQAWIIGIVEKGNRTARIIDKPRIIEVAPQVATQNVNPTPGATS

SEQ ID NO: 900183 - protein, 392 aa, Homo sapiens; identical to SEQ ID NO: 900171

SEQ ID NO: 900184 - protein, 392 aa, Homo sapiens; identical to SEQ ID NO: 900171

SEQ ID NO: 900185 - protein, 200 aa, Homo sapiens; identical to SEQ ID NO: 900175

SEQ ID NO: 900186 - protein, 102 aa, Homo sapiens
  misc_feature (1)..(1): Xaa can be any naturally occurring amino acid
XPHAATQQPVPPLKGRWPALKDPRAPSRRERGGPAPAAAPRQASPRGAQARARAPAAAGAAGRGIFIQATLKGARPRPVHCGSGPRPVFGRRRRAQSEPVDP

SEQ ID NO: 900187 - protein, 105 aa, Homo sapiens
PPAKGPARGAAKKRRLPAPPPRTAQPRRPAPTLPTTSTFSLLNCFPCPPALVVGEDGDLKPASSLRLQGDSKPPPAHPLWRWQMGGPAVPEPPGLKFWGINMDES

SEQ ID NO: 900188 - protein, 105 aa, Homo sapiens; identical to SEQ ID NO: 900187

SEQ ID NO: 900189 - protein, 105 aa, Homo sapiens; identical to SEQ ID NO: 900187

SEQ ID NO: 900190 - protein, 77 aa, Homo sapiens
EAICFRVCGARSVVLLLVAVRLHTLLSCPLEQPAGTEWILEEGVTTGPPRKPRADIYNLRSPDEFIVGQNQALIEPG

SEQ ID NO: 900191 - protein, 77 aa, Homo sapiens; identical to SEQ ID NO: 900190

SEQ ID NO: 900192 - protein, 77 aa, Homo sapiens; identical to SEQ ID NO: 900190

SEQ ID NO: 900193 - protein, 107 aa, Homo sapiens [sequence omitted]

SEQ ID NO: 900194 - protein, 69 aa, Homo sapiens
ADSRGFSTSTTFRLHTAMVLPLEQPAGTEWILEEGVTTGPPRKPRADIYNLRSPDEFIVGQNQALIEPG

SEQ ID NO: 900195 - protein, 77 aa, Homo sapiens; identical to SEQ ID NO: 900190

SEQ ID NO: 900196 - protein, 47 aa, Homo sapiens
MSFWSWKSHCLLHGPEKPLAGVNDDFTFFPIRSTMLTSYILPVSSDT

SEQ ID NO: 900197 - protein, 79 aa, Homo sapiens
LEDPLALIAFRTDNIHTVFLMRRFIRYGPVPLEQPAGTEWILEEGVTTGPPRKPRADIYNLRSPDEFIVGQNQALIEPG

SEQ ID NO: 900198 - protein, 77 aa, Homo sapiens; identical to SEQ ID NO: 900190

SEQ ID NO: 900199 - protein, 107 aa, Homo sapiens [sequence omitted]

SEQ ID NO: 900200 - protein, 77 aa, Homo sapiens; identical to SEQ ID NO: 900190

SEQ ID NO: 900201 - protein, 112 aa, Homo sapiens
MASFDLLTFYRWRPFPRRCGKWGEHNWPLKEKRRETCADHAQFPRAPQPPRVQRGKKSLPCAGKNSGEHSETAPKCAIVGVLLQQEYNLRLSLFCLLYTSILEKRREEREKR

SEQ ID NO: 900202 - protein, 77 aa, Homo sapiens; identical to SEQ ID NO: 900190

SEQ ID NO: 900203 - protein, 77 aa, Homo sapiens; identical to SEQ ID NO: 900190

SEQ ID NO: 900204 - protein, 102 aa, Homo sapiens
EAICFRVCGARSVVLLLVAVRLHTLLSCPLEQPAGTEWILEEGVTTGPPRKPRADIYNLRSPDENWRWNMRGALWKEKDRPCAFMKVKIWLNQFHKVTVYIA

SEQ ID NO: 900205 - protein, 77 aa, Homo sapiens; identical to SEQ ID NO: 900190

SEQ ID NO: 900206 - protein, 102 aa, Homo sapiens; identical to SEQ ID NO: 900204

SEQ ID NO: 900207 - protein, 69 aa, Homo sapiens; identical to SEQ ID NO: 900194

SEQ ID NO: 900208 - protein, 77 aa, Homo sapiens; identical to SEQ ID NO: 900190

SEQ ID NO: 900209 - protein, 79 aa, Homo sapiens; identical to SEQ ID NO: 900197

SEQ ID NO: 900210 - protein, 593 aa, Homo sapiens
MKLQAVMETLLQRQQRARQELEARQQLPPDPPAAPPGRARAAPDEDREPESARMQRAQMAALAAMRAAAAGLGHPASPGGSEDGPPGSEEEDAAREGTPGSPGRGREGPGEEHFEDMASDEDMKPKWEEEEMEEDLGEDEEEEEEDYEDEEEEEDEEGLGPPGPASLGTTALFPRKAQPPQAFRGDGVPRVLGGQERPGPGPAHPGGAAHVAPQLQPPDHGDWTYEEQFKQLYELDGDPKRKEFLDDLFSFMQKRGTPVNRIPIMAKQVLDLFMLYVLVTEKGGLVEVINKKLWREITKGLNLPTSITSAAFTLRTQYMKYLYPYECEKRGLSNPNELQAAIDSNRREGRRQSFGGSLFAYSPGGAHGMLSSPKLPVSSLGLAASTNGSSITPAPKIKKEEDSAIPITVPGRLPVSLAGHPVVAAQAAAVQAAAAQAAVAAQAAALEQLREKLESAEPPEKKMALVADEQQRLMQRALQQNFLAMAAQLPMSIRINSQASESRQDSAVNLTGTNGSNSISMSVEINGIMYTGVLFAQPPAPTPTSAPNKGGGGGGGSSSNAGGRGGNTGTSGGQAGPAGLSTPSTSTSNNSLP

SEQ ID NO: 900211 - protein, 368 aa, Homo sapiens
MSHPTWLYELDGDPKRKEFLDDLFSFMQKRGTPVNRIPIMAKQVLDLFMLYVLVTEKGGLVEVINKKLWREITKGLNLPTSITSAAFTLRTQYMKYLYPYECEKRGLSNPNELQAAIDSNRREGRRQSFGGSLFAYSPGGAHGMLSSPKLPVSSLGLAASTNGSSITPAPKIKKEEDSAIPITVPGRLPVSLAGHPVVAAQAAAVQAAAAQAAVAAQAAALEQLREKLESAEPPEKKMALVADEQQRLMQRALQQNFLAMAAQLPMSIRINSQASESRQDSAVNLTGTNGSNSISMSVEINGIMYTGVLFAQPPAPTPTSAPNKGGGGGGGSSSNAGGRGGNTGTSGGQAGPAGLSTPSTSTSNNSLP

SEQ ID NO: 900212 - protein, 108 aa, Homo sapiens
MPPLHSSLGDRVREKFIPRSTPLGLPCGPPRIFLNSAWHMSSVLALGVLFAQPPAPTPTSAPNKGGGGGGGSSSNAGGRGGNTGTSGGQAGPAGLSTPSTSTSNNSLP

SEQ ID NO: 900213 - protein, 553 aa, Homo sapiens
MKLQAVMETLLQRQQRARQELEARQQLPPDPPAAPPGRARAAPDEDREPESARMQRAQMAALAAMRAAAAGLGHPASPGGSEDGPPGSEEEDAAREGTPGSPGRGREGPGEEHFEDMASDEDMKPKWEEEEMEEDLGEDEEEEEEDYEDEEEEEDEEGLGPPGPASLGTTALFPRKAQPPQAFRGDGVPRVLGGQERPGPGPAHPGGAAHVAPQLQPPDHGDWTYEEQFKQLYELDGDPKRKEFLDDLFSFMQKRGTPVNRIPIMAKQVLDLFMLYVLVTEKGGLVEVINKKLWREITKGLNLPTSITSAAFTLRTQYMKYLYPYECEKRGLSNPNELQAAIDSNRREGRRQSFGGSLFAYSPGGAHGMLSSPKLPVSSLGLAASTNGSSITPAPKIKKEEDSAIPITVPGRLPVSLAGHPVVAAQAAAVQAAAAQAAVAAQAAALEQLREKLESAEPPEKKMALVADEQQRLMQRALQQNFLAMAAQLPMSIRINSQASESRQDSAVNLTGTNGSNSISMSVEINGIMYTGRTPEATPCLDLASPAAVNSGP

SEQ ID NO: 900214 - protein, 1099 aa, Homo sapiens
VGACARGAQARAFFPFLSFLCYPRFRCLFCLQFAIPASRMEQLNELELLMEKSFWEEAELPAELFQKKVVASFPRTVLSTGMDNRYLVLAVNTVQNKEGNCEKRLVITASQSLENKELCILRNDWCSVPVEPGDIIHLEGDCTSDTWIIDKDFGYLILYPDMLISGTSIASSIRCMRRAVLSETFRSSDPATRQMLIGTVLHEVFQKAINNSFAPEKLQELAFQTIQEIRHLKEMYRLNLSQDEIKQEVEDYLPSFCKWAGDFMHKNTSTDFPQMQLSLPSDNSKDNSTCNIEVVKPMDIEESIWSPRFGLKGKIDVTVGVKIHRGYKTKYKIMPLELKTGKESNSIEHRSQVVLYTLLSQERRADPEAGLLLYLKTGQMYPVPANHLDKRELLKLRNQMAFSLFHRISKSATRQKTQLASLPQIIEEEKTCKYCSQIGNCALYSRAVEQQMDCSSVPIVMLPKIEEETQHLKQTHLEYFSLWCLMLTLESQSKDNKKNHQNIWLMPASEMEKSGSCIGNLIRMEHVKIVCDGQYLHNFQCKHGAIPVTNLMAGDRVIVSGEERSLFALSRGYVKEINMTTVTCLLDRNLSVLPESTLFRLDQEEKNCDIDTPLGNLSKLMENTFVSKKLRDLIIDFREPQFISYLSSVLPHDAKDTVACILKGLNKPQRQAMKKVLLSKDYTLIVGMPGTGKTTTICTLVRILYACGFSVLLTSYTHSAVDNILLKLAKFKIGFLRLGQIQKVHPAIQQFTEQEICRSKSIKSLALLEELYNSQLIVATTCMGINHPIFSRKIFDFCIVDEASQISQPICLGPLFFSRRFVLVGDHQQLPPLVLNREARALGMSESLFKRLEQNKSAVVQLTVQYRMNSKIMSLSNKLTYEGKLECGSDKVANAVINLRHFKDVKLELEFYADYSDNPWLMGVFEPNNPVCFLNTDKVPAPEQVEKGGVSNVTEAKLIVFLTSIFVKAGCSPSDIGIIAPYRQQLKIINDLLARSIGMVEVNTVDKYQGRDKSIVLVSFVRSNKDGTVGELLKDWRRLNVAITRAKHKLILLGCVPSLNCYPPLEKLLNHLNSEKLIIDLPSREHESLCHILGDFQRE

SEQ ID NO: 900215 - protein, 872 aa, Homo sapiens
VGACARGAQARAFFPFLSFLCYPRFRCLFCLQFAIPASRMEQLNELELLMEKSFWEEAELPAELFQKKVVASFPRTVLSTGMDNRYLVLAVNTVQNKEGNCEKRLVITASQSLENKELCILRNDWCSVPVEPGDIIHLEGDCTSDTWIIDKDFGYLILYPDMLISGTSIASSIRCMRRAVLSETFRSSDPATRQMLIGTVLHEVFQKAINNSFAPEKLQELAFQTIQEIRHLKEMYRLNLSQDEIKQEVEDYLPSFCKWAGDFMHKNTSTDFPQMQLSLPSDNSKDNSTCNIEVVKPMDIEESIWSPRFGLKGKIDVTVGVKIHRGYKTKYKIMPLELKTGKESNSIEHRSQVVLYTLLSQERRADPEAGLLLYLKTGQMYPVPANHLDKRELLKLRNQMAFSLFHRISKSATRQKTQLASLPQIIEEEKTCKYCSQIGNCALYSRAVEQQMDCSSVPIVMLPKIEEETQHLKQTHLEYFSLWCLMLTLESQSKDNKKNHQNIWLMPASEMEKSGSCIGNLIRMEHVKIVCDGQYLHNFQCKHGAIPVTNLMAGDRVIVSGEERSLFALSRGYVKEINMTTVTCLLDRNLSVLPESTLFRLDQEEKNCDIDTPLGNLSKLMENTFVSKKLRDLIIDFREPQFISYLSSVLPHDAKDTVACILKGLNKPQRQAMKKVLLSKDYTLIVGMPGTGKTTTICTLVRILYACGFSVLLTSYTHSAVDNILLKLAKFKIGFLRLGQIQKVHPAIQQFTEQEICRSKSIKSLALLEELYNSQLIVATTCMGINHPIFSRKIFDFCIVDEASQISQPICLGPLFFSRRFVLVGDHQQLPPLVLNREARALGMSESLFKRLEQNKSAVVQLTVQYRMNRYL

SEQ ID NO: 900216 - protein, 227 aa, Homo sapiens [sequence omitted]

SEQ ID NO: 900217 - protein, 443 aa, Homo sapiens
LFLNLNVGLNKPQRQAMKKVLLSKDYTLIVGMPGTGKTTTICTLVRILYACGFSVLLTSYTHSAVDNILLKLAKFKIGFLRLGQIQKVHPAIQQFTEQEICRSKSIKSLALLEELYNSQLIVATTCMGINHPIFSRKIFDFCIVDEASQISQPICLGPLFFSRRFVLVGDHQQLPPLVLNREARALGMSESLFKRLEQNKSAVVQLTVQYRMNSKIMSLSNKLTYEGKLECGSDKVANAVINLRHFKDVKLELEFYADYSDNPWLMGVFEPNNPVCFLNTDKVPAPEQVEKGGVSNVTEAKLIVFLTSIFVKAGCSPSDIGIIAPYRQQLKIINDLLARSIGMVEVNTVDKYQGRDKSIVLVSFVRSNKDGTVGELLKDWRRLNVAITRAKHKLILLGCVPSLNCYPPLEKLLNHLNSEKLIIDLPSREHESLCHILGDFQRE

SEQ ID NO: 900218 - protein, 588 aa, Homo sapiens
VGACARGAQARAFFPFLSFLCYPRFRCLFCLQFAIPASRMEQLNELELLMEKSFWEEAELPAELFQKKVVASFPRTVLSTGMDNRYLVLAVNTVQNKEGNCEKRLVITASQSLENKELCILRNDWCSVPVEPGDIIHLEGDCTSDTWIIDKDFGYLILYPDMLISGTSIASSIRCMRRAVLSETFRSSDPATRQMLIGTVLHEVFQKAINNSFAPEKLQELAFQTIQEIRHLKEMYRLNLSQDEIKQEVEDYLPSFCKWAGDFMHKNTSTDFPQMQLSLPSDNSKDNSTCNIEVVKPMDIEESIWSPRFGLKGKIDVTVGVKIHRGYKTKYKIMPLELKTGKESNSIEHRSQVVLYTLLSQERRADPEAGLLLYLKTGQMYPVPANHLDKRELLKLRNQMAFSLFHRISKSATRQKTQLASLPQIIEEEKTCKYCSQIGNCALYSRAVEQQMDCSSVPIVMLPKIEEETQHLKQTHLEYFSLWCLMLTLESQSKDNKKNHQNIWLMPASEMEKSGSCIGNLIRMEHVKIVCDGQYLHNFQCKHGAIPVTNLMAGDRVIVSGEERSLFALSRGYVKEINMTTVTCLLDR

SEQ ID NO: 900219 - protein, 840 aa, Homo sapiens
VGACARGAQARAFFPFLSFLCYPRFRCLFCLQFAIPASRMEQLNELELLMEKSFWEEAELPAELFQKKVVASFPRTVLSTGMDNRYLVLAVNTVQNKEGNCEKRLVITASQSLENKELCILRNDWCSVPVEPGDIIHLEGDCTSDTWIIDKDFGYLILYPDMLISGTSIASSIRCMRRAVLSETFRSSDPATRQMLIGTVLHEVFQKAINNSFAPEKLQELAFQTIQEIRHLKEMYRLNLSQDEIKQEVEDYLPSFCKWAGDFMHKNTSTDFPQMQLSLPSDNSKDNSTCNIEVVKPMDIEESIWSPRFGLKGKIDVTVGVKIHRGYKTKYKIMPLELKTGKESNSIEHRSQVVLYTLLSQERRADPEAGLLLYLKTGQMYPVPANHLDKRELLKLRNQMAFSLFHRISKSATRQKTQLASLPQIIEEEKTCKYCSQIGNCALYSRAVEQQMDCSSVPIVMLPKIEEETQHLKQTHLEYFSLWCLMLTLESQSKDNKKNHQNIWLMPASEMEKSGSCIGNLIRMEHVKIVCDGQYLHNFQCKHGAIPVTNLMAGDRVIVSGEERSLFALSRGYVKEINMTTVTCLLDRNLSVLPESTLFRLDQEEKNCDIDTPLGNLSKLMENTFVSKKLRDLIIDFREPQFISYLSSVLPHDAKDTVACILKGLNKPQRQAMKKVLLSKDYTLIVGMPGTGKTTTICTLVRILYACGFSVLLTSYTHSAVDNILLKLAKFKIGFLRLGQIQKVHPAIQQFTEQEICRSKSIKSLALLEELYNSQLIVATTCMGINHPIFSRKIFDFCIVDEASQISQPICLGPLFFSRRFVLVGDHQQLPPLVLNREAR

SEQ ID NO: 900220 - protein, 840 aa, Homo sapiens; identical to SEQ ID NO: 900219

SEQ ID NO: 900221 - protein, 840 aa, Homo sapiens; identical to SEQ ID NO: 900219

SEQ ID NO: 900222 - protein, 477 aa, Homo sapiens
VGACARGAQARAFFPFLSFLCYPRFRCLFCLQFAIPASRMEQLNELELLMEKSFWEEAELPAELFQKKVVASFPRTVLSTGMDNRYLVLAVNTVQNKEGNCEKRLVITASQSLENKELCILRNDWCSVPVEPGDIIHLEGDCTSDTWIIDKDFGYLILYPDMLISGTSIASSIRCMRRAVLSETFRSSDPATRQMLIGTVLHEVFQKAINNSFAPEKLQELAFQTIQEIRHLKEMYRLNLSQDEIKQEVEDYLPSFCKWAGDFMHKNTSTDFPQMQLSLPSDNSKDNSTCNIEVVKPMDIEESIWSPRFGLKGKIDVTVGVKIHRGYKTKYKIMPLELKTGKESNSIEHRSQVVLYTLLSQERRADPEAGLLLYLKTGQMYPVPANHLDKRELLKLRNQMAFSLFHRISKSATRQKTQLASLPQIIEEEKTCKYCSQIGNCALYSRAVEQQMDCSSVPIVMLPKIEEETQIYTGAGS

SEQ ID NO: 900223 - protein, 111 aa, Homo sapiens
MSLLPRRAPPVSMRLLAAALLLLLLALYTARVDGSKCKCSRKGPKIRYSDVKKLEMKPKYPHCEEKMVIITTKSVSRYRGQEHCLHPKLQSTKRFIKWYNAWNEKRRVYEE

SEQ ID NO: 900224 - protein, 111 aa, Homo sapiens; identical to SEQ ID NO: 900223

SEQ ID NO: 900225 - protein, 111 aa, Homo sapiens; identical to SEQ ID NO: 900223

SEQ ID NO: 900226 - protein, 111 aa, Homo sapiens; identical to SEQ ID NO: 900223

SEQ ID NO: 900227 - protein, 111 aa, Homo sapiens; identical to SEQ ID NO: 900223

SEQ ID NO: 900228 - protein, 111 aa, Homo sapiens; identical to SEQ ID NO: 900223

SEQ ID NO: 900229 - protein, 77 aa, Homo sapiens
HQDDSSSIPLVCATLNNHVNEANTIRCSVRDTIVIITTKSVSRYRGQEHCLHPKLQSTKRFIKWYNAWNEKRRVYEE

SEQ ID NO: 900230 - protein, 111 aa, Homo sapiens; identical to SEQ ID NO: 900223

SEQ ID NO: 900231 - protein, 111 aa, Homo sapiens; identical to SEQ ID NO: 900223

SEQ ID NO: 900232 - protein, 112 aa, Homo sapiens
MSAEVPEAASAEEQKEMEDKVTSPEKAEEAKLKARYPHLGQKPGGSDFLRKRLQKGQKYFDSGDYNMAKAKMKNKQLPTAAPDKTEVTGDHIPTPQDLPQRKPSLVASKLAG

SEQ ID NO: 900233 - protein, 112 aa, Homo sapiens; identical to SEQ ID NO: 900232

SEQ ID NO: 900234 - protein, 112 aa, Homo sapiens; identical to SEQ ID NO: 900232

SEQ ID NO: 900235 - protein, 131 aa, Homo sapiens
MSAEVPEAASAEEQKSEHNMLPWSLQPSIPNSLEEMEDKVTSPEKAEEAKLKARYPHLGQKPGGSDFLRKRLQKGQKYFDSGDYNMAKAKMKNKQLPTAAPDKTEVTGDHIPTPQDLPQRKPSLVASKLAG

SEQ ID NO: 900236 - protein, 106 aa, Homo sapiens
YGICDQASEEMEDKVTSPEKAEEAKLKARYPHLGQKPGGSDFLRKRLQKGQKYFDSGDYNMAKAKMKNKQLPTAAPDKTEVTGDHIPTPQDLPQRKPSLVASKLAG

SEQ ID NO: 900237 - protein, 164 aa, Homo sapiens
EWYQRRVAITAGGRKKGSVWTTASGRSGVKGSTMSAEVPEAASAEEQKSEHNMLPWSLQPSIPNSLEEMEDKVTSPEKAEEAKLKARYPHLGQKPGGSDFLRKRLQKGQKYFDSGDYNMAKAKMKNKQLPTAAPDKTEVTGDHIPTPQDLPQRKPSLVASKLAG

SEQ ID NO: 900238 - protein, 90 aa, Homo sapiens
RVVSTQSRHYGRGKEKRKCLDDSEREKRGQVGRGAVREGQAGSGVRGPWPAERFAAPCRHKAAAIFAGGGGPAGPGRAGTGGGRVASATR

SEQ ID NO: 900239 - protein, 88 aa, Homo sapiens
IMAGTTASWIFGVKGSTMSAEVPEAASAEEQKEMEDKVTSPEKAEEAKLKARYPHLGQKPGGSDFLRKRLQKGQKYFDSGDYNMAKAW

SEQ ID NO: 900240 - protein, 112 aa, Homo sapiens; identical to SEQ ID NO: 900232

SEQ ID NO: 900241 - protein, 112 aa, Homo sapiens; identical to SEQ ID NO: 900232

SEQ ID NO: 900242 - protein, 90 aa, Homo sapiens; identical to SEQ ID NO: 900238

SEQ ID NO: 900243 - protein, 112 aa, Homo sapiens; identical to SEQ ID NO: 900232

SEQ ID NO: 900244 - protein, 145 aa, Homo sapiens
EWYQRRVAITAGGRKKGSVWTTASGRSGVKGSTMSAEVPEAASAEEQKEMEDKVTSPEKAEEAKLKARYPHLGQKPGGSDFLRKRLQKGQKYFDSGDYNMAKAKMKNKQLPTAAPDKTEVTGDHIPTPQDLPQRKPSLVASKLAG

SEQ ID NO: 900245 - protein, 130 aa, Homo sapiens
AAATNGCEVRQERRPLKEKRKCLDDSEREKRGQEMEDKVTSPEKAEEAKLKARYPHLGQKPGGSDFLRKRLQKGQKYFDSGDYNMAKAKMKNKQLPTAAPDKTEVTGDHIPTPQDLPQRKPSLVASKLAG

SEQ ID NO: 900246 - protein, 142 aa, Homo sapiens
MWARIGISGPTLVTMVSEESPAFSVFTCKGRILVLASHGGVRPEEEMEDKVTSPEKAEEAKLKARYPHLGQKPGGSDFLRKRLQKGQKYFDSGDYNMAKAKMKNKQLPTAAPDKTEVTGDHIPTPQDLPQRKPSLVASKLAG

SEQ ID NO: 900247 - protein, 146 aa, Homo sapiens
RVVSTQSRHYGRGKEKRKCLDDSEREKRGQSEHNMLPWSLQPSIPNSLEEMEDKVTSPEKAEEAKLKARYPHLGQKPGGSDFLRKRLQKGQKYFDSGDYNMAKAKMKNKQLPTAAPDKTEVTGDHIPTPQDLPQRKPSLVASKLAG

SEQ ID NO: 900248 - protein, 112 aa, Homo sapiens; identical to SEQ ID NO: 900232

SEQ ID NO: 900249 - protein, 112 aa, Homo sapiens; identical to SEQ ID NO: 900232

SEQ ID NO: 900250 - protein, 112 aa, Homo sapiens; identical to SEQ ID NO: 900232

SEQ ID NO: 900251 - protein, 67 aa, Homo sapiens
  misc_feature (7)..(7): Xaa can be any naturally occurring amino acid
SRVLLEXACDVSRRIIHIQIIGQFCKEAELILHFYHSIPAVANRGLDISHSVIVNLRIKTLTLIRFY

SEQ ID NO: 900252 - protein, 105 aa, Homo sapiens
WVSGEGQGLGLSFKMVPTCPSLSPPWPGTRGWGCFRLSGAAGLALEWGSLLAWNSLTLGASSPGGGARKLPPSLWGISPFKQVELCSGAASCSQCADVRGQNDFY

SEQ ID NO: 900253 - protein, 515 aa, Homo sapiens
MAAPEPARAAPPPPPPPPPPPGADRVVKAVPFPPTHRLTSEEVFDLDGIPRVDVLKNHLVKEGRVDEEIALRIINEGAAILRREKTMIEVEAPITVCGDIHGQFFDLMKLFEVGGSPANTRYLFLGDYVDRGYFSIEHVLGTEDISINPHNNINECVLYLWVLKILYPSTLFLLRGNHECRHLTEYFTFKQECKIKYSERVYEACMEAFDSLPLAALLNQQFLCVHGGLSPEIHTLDDIRRLDRFKEPPAFGPMCDLLWSDPSEDFGNEKSQEHFSHNTVRGCSYFYNYPAVCEFLQNNNLLSIIRAHEAQDAGYRMYRKSQTTGFPSLITIFSAPNYLDVYNNKAAVLKYENNVMNIRQFNCSPHPYWLPNFMDVFTWSLPFVGEKVTEMLVNVLSICSDDELMTEGEDQFDVGSAAARKEIIRNKIRAIGKMARVFSVLREESESVLTLKGLTPTGMLPSGVLAGGRQTLQSGNDVMQLAVPQMDWGTPHSFANNSHNACREFLLFFSSCLSS

SEQ ID NO: 900254 - protein, 525 aa, Homo sapiens
MAAPEPARAAPPPPPPPPPPPGADRVVKAVPFPPTHRLTSEEVFDLDGIPRVDVLKNHLVKEGRVDEEIALRIINEGAAILRREKTMIEVEAPITVCGDIHGQFFDLMKLFEVGGSPANTRYLFLGDYVDRGYFSIECVLYLWVLKILYPSTLFLLRGNHECRHLTEYFTFKQECKIKYSERVYEACMEAFDSLPLAALLNQQFLCVHGGLSPEIHTLDDIRRLDRFKEPPAFGPMCDLLWSDPSEDFGNEKSQEHFSHNTVRGCSYFYNYPAVCEFLQNNNLLSIIRAHEAQDAGYRMYRKSQTTGFPSLITIFSAPNYLDVYNNKAAVLKYENNVMNIRQFNCSPHPYWLPNFMDVFTWSLPFVGEKVTEMLVNVLSICSDDELMTEGEDQFDVGSAAARKEIIRNKIRAIGKMARVFSVLREESESVLTLKGLTPTGMLPSGVLAGGRQTLQSATVEAIEAEKAIRGFSPPHRICSFEEAKGLDRINERMPPRKDAVQQDGFNSLNTAHATENHGTGNHTAQ

SEQ ID NO: 900255 - protein, 525 aa, Homo sapiens; identical to SEQ ID NO: 900254

SEQ ID NO: 900256 - protein, 283 aa, Homo sapiens
AEVALEYPGYHIIHFSHNTVRGCSYFYNYPAVCEFLQNNNLLSIIRAHEAQDAGYRMYRKSQTTGFPSLITIFSAPNYLDVYNNKAAVLKYENNVMNIRQFNCSPHPYWLPNFMDVFTWSLPFVGEKVTEMLVNVLSICSDDELMTEGEDQFDVGSAAARKEIIRNKIRAIGKMARVFSVLREESESVLTLKGLTPTGMLPSGVLAGGRQTLQSATVEAIEAEKAIRGFSPPHRICSFEEAKGLDRINERMPPRKDAVQQDGFNSLNTAHATENHGTGNHTAQ

SEQ ID NO: 900257 - protein, 391 aa, Homo sapiens
MAAPEPARAAPPPPPPPPPPPGADRVVKAVPFPPTHRLTSEEVFDLDGIPRVDVLKNHLVKEGRVDEEIALRIINEGAAILRREKTMIEVEAPITVCGDIHGQFFDLMKLFEVGGSPANTRYLFLGDYVDRGYFSIECVLYLWVLKILYPSTLFLLRGNHECRHLTEYFTFKQECKIKYSERVYEACMEAFDSLPLAALLNQQFLCVHGGLSPEIHTLDDIRRLDRFKEPPAFGPMCDLLWSDPSEDFGNEKSQEHFSHNTVRGCSYFYNYPAVCEFLQNNNLLSIIRAHEAQDAGYRMYRKSQTTGFPSLITIFSAPNYLDVYNNKAAVLKYENNVMNIRQFNCSPHPYWLPNFMDVFTWSLPFVGEKGIIFIFKKNLFYYCYIYSSLLS

SEQ ID NO: 900258 - protein, 415 aa, Homo sapiens
MAAPEPARAAPPPPPPPPPPPGADRVVKAVPFPPTHRLTSEEVFDLDGIPRVDVLKNHLVKEGRVDEEIALRIINEGAAILRREKTMIEVEAPITVCGDIHGQFFDLMKLFEVGGSPANTRYLFLGDYVDRGYFSIECVLYLWVLKILYPSTLFLLRGNHECRHLTEYFTFKQECKIKYSERVYEACMEAFDSLPLAALLNQQFLCVHGGLSPEIHTLDDIRRLDRFKEPPAFGPMCDLLWSDPSEDFGNEKSQEHFSHNTVRGCSYFYNYPAVCEFLQNNNLLSIIRAHEAQDAGYRMYRKSQTTGFPSLITIFSAPNYLDVYNNKAAVLKYENNVMNIRQFNCSPHPYWLPNFMDVFTWSLPFVGEKVTEMLVNVLSICSDDELMTEGEDQFDGMIIHLTIFFFTVKWYFFTA

SEQ ID NO: 900259 - protein, 525 aa, Homo sapiens; identical to SEQ ID NO: 900254

SEQ ID NO: 900260 - protein, 534 aa, Homo sapiens
MAAPEPARAAPPPPPPPPPPPGADRVVKAVPFPPTHRLTSEEVFDLDGIPRVDVLKNHLVKEGRVDEEIALRIINEGAAILRREKTMIEVEAPITVCGDIHGQFFDLMKLFEVGGSPANTRYLFLGDYVDRGYFSIECVLYLWVLKILYPSTLFLLRGNHECRHLTEYFTFKQECKIKYSERVYEACMEAFDSLPLAALLNQQFLCVHGGLSPEIHTLDDIRRLDRFKEPPAFGPMCDLLWSDPSEDFGNEKSQEHFSHNTVRGCSYFYNYPAVCEFLQNNNLLSIIRAHEAQDAGYRMYRKSQTTGFPSLITIFSAPNYLDVYNNKAAVLKYENNVMNIRQFNCSPHPYWLPNFMDVFTWSLPFVGEKVTEMLVNVLSICSDDELMTEGEDQFDERLIYGNKKVGSAAARKEIIRNKIRAIGKMARVFSVLREESESVLTLKGLTPTGMLPSGVLAGGRQTLQSATVEAIEAEKAIRGFSPPHRICSFEEAKGLDRINERMPPRKDAVQQDGFNSLNTAHATENHGTGNHTAQ

SEQ ID NO: 900261 - protein, 497 aa, Homo sapiens
MAAPEPARAAPPPPPPPPPPPGADRVVKAVPFPPTHRLTSEEVFDLDGIPRVDVLKNHLVKEGRVDEEIALRIINEGAAILRREKTMIEVEAPITVCGDIHGQFFDLMKLFEVGGSPANTRYLFLGDYVDRGYFSIECVLYLWVLKILYPSTLFLLRGNHECRHLTEYFTFKQECKIKYSERVYEACMEAFDSLPLAALLNQQFLCVHGGLSPEIHTLDDIRRLDRFKEPPAFGPMCDLLWSDPSEDFGNEKSQEHFSHNTVRGCSYFYNYPAVCEFLQNNNLLSIIRAHEAQDAGYRMYRKSQTTGFPSLITIFSAPNYLDVYNNKAAVLKYENNVMNIRQFNCSPHPYWLPNFMDVFTWSLPFVGEKVTEMLVNVLSICSDDELMTEGEDQFDVGSAAARKEIIRNKIRAIGKMARVFSVLREESESVLTLKGLTPTGMLPSGVLAGGRQTLQSGNDVMQLAVPQMDWGTPHSFANNSHNACREFLLFFSSCLSS

SEQ ID NO: 900262 - protein, 270 aa, Homo sapiens
MAAPEPARAAPPPPPPPPPPPGADRVVKAVPFPPTHRLTSEEVFDLDGIPRVDVLKNHLVKEGRVDEEIALRIINEGAAILRREKTMIEVEAPITVCGDIHGQFFDLMKLFEVGGSPANTRYLFLGDYVDRGYFSIECVLYLWVLKILYPSTLFLLRGNHECRHLTEYFTFKQECKIKYSERVYEACMEAFDSLPLAALLNQQFLCVHGGLSPEIHTLDDIRRLDRFKEPPAFGPMCDLLWSDPSEDFGNEKSQEHFSHNTVRGCSYFYN

SEQ ID NO: 900263 - protein, 222 aa, Homo sapiens
MTDVADCLKVFMTGTKNIAMWVGSKDCSFRPQIHMLIEDHIGALNKWYKYNHDLPARIIVYRAGVGDGQLKTLIEYEVPQLLSSVAESSSNTSSRLSVIVVRKKCMPRFFTEMNRTVQNPPLGTVVDSEATRNEWYDFYLISQVACRGTVSPTYYNVIYDDNGLKPDHMQRLTFKLCHLYYNWPGIVSVPAPCQYAHKLTFLVAQSIHKEPSLELANHLFYL

SEQ ID NO: 900264 - protein, 194 aa, Homo sapiens [sequence omitted]

SEQ ID NO: 900265 - protein, 221 aa, Homo sapiens
  misc_feature (13)..(14): Xaa can be any naturally occurring amino acid
HLYSVIFNQHKNXXNFEWFSRCIFQRTMTDVADCLKVFMTGALNKWYKYNHDLPARIIVYRAGVGDGQLKTLIEYEVPQLLSSVAESSSNTSSRLSVIVVRKKCMPRFFTEMNRTVQNPPLGTVVDSEATRNEWYDFYLISQVACRGTVSPTYYNVIYDDNGLKPDHMQRLTFKLCHLYYNWPGIVSVPAPCQYAHKLTFLVAQSIHKEPSLELANHLFYL

SEQ ID NO: 900266 - protein, 220 aa, Homo sapiens
  misc_feature (18)..(18): Xaa can be any naturally occurring amino acid
  misc_feature (23)..(23): Xaa can be any naturally occurring amino acid
NIQHDIVVQSKNTKPKLXWNSAXLSETRLMLQIAESFFTGALNKWYKYNHDLPARIIVYRAGVGDGQLKTLIEYEVPQLLSSVAESSSNTSSRLSVIVVRKKCMPRFFTEMNRTVQNPPLGTVVDSEATRNEWYDFYLISQVACRGTVSPTYYNVIYDDNGLKPDHMQRLTFKLCHLYYNWPGIVSVPAPCQYAHKLTFLVAQSIHKEPSLELANHLFYL

SEQ ID NO: 900267 - protein, 222 aa, Homo sapiens; identical to SEQ ID NO: 900263

SEQ ID NO: 900268 - protein, 266 aa, Homo sapiens [sequence omitted]

SEQ ID NO: 900269 - protein, 164 aa, Homo sapiens
MKSFPAWLLFFHERGLSQDLVATGSATAENVLPCGFLSSCPWPEVPALMAAPHLQLLCSPLPKPYGLLCICTHPVPQTHYIIKCFSKMELNIIWSIWLQRQKMKRKEKKKGRLFPNKKKIKQLKLKIFKIKLPYNFITIPILSSGFNLGNFYIPPIIGLLGDFP

SEQ ID NO: 900270 - protein, 95 aa, Homo sapiens
RIHKCTVFDTLRCTGERISPTPYLCLQYVSTPAQPPRQESFLPAALAPGPVLFSSMVCLRLPGGSCMAASDSDTDGAELPTGFGWGHQTTFLGGG

SEQ ID NO: 900271 - protein, 266 aa, Homo sapiens [sequence omitted]

SEQ ID NO: 900272 - protein, 266 aa, Homo sapiens [sequence omitted]

SEQ ID NO: 900273 - protein, 164 aa, Homo sapiens; identical to SEQ ID NO: 900269

SEQ ID NO: 900274 - protein, 116 aa, Homo sapiens
MAAPHLQLLCSPLPKPYGLLCICTHPVPQTHYIIKCFSKMELNIIWSIWLQRQKMKRKEKKKGRLFPNKKKIKQLKLKIFKIKLPYNFITIPILSSGFNLGNFYIPPIIGLLGDFP

SEQ ID NO: 900275 - protein, 164 aa, Homo sapiens
THASADAWVTHACGPTRPLPAALAPGPVLFSSMVCLRLPGGSCMAASDSDTDGAELPTGFGWGHQTEAACVTGSFVSPQHVSWSYSTSECHFFNGTERVRFLDRYFHNQEEYVRFDSDVGEFRAVTELGRPDRRVLEQPEGPPGRHESAGRWWTPTADTTTGLV

SEQ ID NO: 900276 - protein, 176 aa, Homo sapiens
MPGRQDTKARAAGGHLLQTQLRGWCESFTVQRRVHPKVTVYPSKTQPLQHHNLLVCSVSGFYPGSIEVRWFRNGQEEKTGVVSTGLIHNGDWTFQTLVMLETVPRSGEVYTCQVEHPSVTSPLTVEWRARSESAQSKMLSGVGGFVLGLLFLGAGLFIYFRNQKGHSGLQPRGFLS

SEQ ID NO: 900277 - protein, 166 aa, Homo sapiens
MEMKSFPAWLLFFHERGLSQDLVATGSATAENVLPCGFLSSCPWPEVPALMAAPHLQLLCSPLPKPYGLLCICTHPVPQTHYIIKCFSKMELNIIWSIWLQRQKMKRKEKKKGRLFPNKKKIKQLKLKIFKIKLPYNFITIPILSSGFNLGNFYIPPIIGLLGDFP

SEQ ID NO: 900278 - protein, 198 aa, Homo sapiens
IVSSLFIQRVGLKEWDTGESGRCGAGKAKDFWKGEGRGDTIETHTGCGEFTVQLGVHPKVTVYPSKTQPLQHHNLLVCSVSGFYPGSIEVRWFRNGQEEKTGVVSTGLIHNGDWTFQTLVMLETVPRSGEVYTCQVEHPSVTSPLTVEWRARSESAQSKMLSGVGGFVLGLLFLGAGLFIYFRNQKGHSGLQPRGFLS

SEQ ID NO: 900279 - protein, 96 aa, Homo sapiens
TRFNSIFEKHLIMNVFVVQGEYRCTGGHRYTCQVEHPSVTSPLTVEWRARSESAQSKMLSGVGGFVLGLLFLGAGLFIYFRNQKGHSGLQPRGFLS

SEQ ID NO: 900280 - protein, 164 aa, Homo sapiens; identical to SEQ ID NO: 900269

SEQ ID NO: 900281 - protein, 155 aa, Homo sapiens
MLETVPRSGEVYTCQVEHPSVTSPLTVEWSEQLSDFPALMAAPHLQLLCSPLPKPYGLLCICTHPVPQTHYIIKCFSKMELNIIWSIWLQRQKMKRKEKKKGRLFPNKKKIKQLKLKIFKIKLPYNFITIPILSSGFNLGNFYIPPIIGLLGDFP

SEQ ID NO: 900282 - protein, 253 aa, Homo sapiens
MVCLKLPGGSSLAALTVTLMVLSSRLAFAGDTRPRFLELRKSECHFFNGTERVRYLDRYFHNQEEFLRFDSDVGEYRAVTELGRPVAESWNSQKDLLEQKRGQVDNYCRHNYGVGESFTVQRRVHPQVTVYPAKTQPLQHHNLLVCSVSGFYPGSIEVRWFRNGQNGDWTFQTLVMLETVPRSGEVYTCQVEHPSVTSPLTVEWRARSESAQSKMLSGVGGFVLGLLFLGAGLFIYFRNQKGHSGLQPTGFLS

SEQ ID NO: 900283 - protein, 172 aa, Homo sapiens
MVCLKLPGGSSLAALTVTLMVLSSRLAFAGDTRPRFLELRKSECHFFNGTERVRYLDRYFHNQEEFLRFDSDVGEYRAVTELGRPVAESWNSQKDLLEQKRGQVDNYCRHNYGVGESFTVQRRGARSESAQSKMLSGVGGFVLGLLFLGAGLFIYFRNQKGHSGLQPTGFLS

SEQ ID NO: 900284 - protein, 164 aa, Homo sapiens; identical to SEQ ID NO: 900269

SEQ ID NO: 900285 - protein, 148 aa, Homo sapiens
VYRCHLEDTKARAAGGHLLQTQLRGWCESFTVQRRVHPKVTVYPSKTQPLQHHNLLVCSVSGFYPGSIEVRWFRNGQEEKTGVVSTGLIHNGDWTFQTLVMLETVPRSGEVYTCQVEHPSVTSPLTVEWKPPESAQSKMLSGIETPDG

SEQ ID NO: 900286 - protein, 111 aa, Homo sapiens
PTRPRTRGSTHACGPTRPLPAALAPGPVLFSSMVCLRLPGGSCMAASDSDTDGAELPTGFGWGHQTTFLGATLRLSVISSMGRSGCGSWTDTSITRRSTCASTATWGSSGR

SEQ ID NO: 900287 - protein, 164 aa, Homo sapiens; identical to SEQ ID NO: 900269

SEQ ID NO: 900288 - protein, 164 aa, Homo sapiens; identical to SEQ ID NO: 900269

SEQ ID NO: 900289 - protein, 129 aa, Homo sapiens
MLETVPRSGEVYTCQVEHPSVTSPLTVEWSEQLSDFINFSPTKKGTVLIPECQVSPLRHPIFICSMFSSPSAQVTGGSPVGVSRNTCTSWRSSLACQAGEAVPLLNLPMMSQVRVTHPPRAPGTASGSE

SEQ ID NO: 900290 - protein, 116 aa, Homo sapiens; identical to SEQ ID NO: 900274

SEQ ID NO: 900291 - protein, 164 aa, Homo sapiens; identical to SEQ ID NO: 900269

SEQ ID NO: 900292 - protein, 124 aa, Homo sapiens
MVCLKLPGGSSLAALTVTLMVLSSRLAFAGDTRPRFLELRKSECHFFNGTERVRYLDRYFHNQEEFLRFDSDVGEYRAVTELGRPVAESWNSQKDLLEQKRGQVDNYCRHNYGVGESFTVQRRG

SEQ ID NO: 900293 - protein, 164 aa, Homo sapiens; identical to SEQ ID NO: 900269

SEQ ID NO: 900294 - protein, 72 aa, Homo sapiens
MAASLSVSSQEAACVTGSFVSPQHVSWSYSTSECHFFNGTERVRFLDRYFHNQEEYVRFDSDVGEFRAVTEL

SEQ ID NO: 900295 - protein, 266 aa, Homo sapiens [sequence omitted]

SEQ ID NO: 900296 - protein, 825 aa, Homo sapiens
MAAGKFASLPRNMPVNHQFPLASSMDLLSSRSPLAEHRPDAYQDVSIHGTLPRKKKGPPPIRSCDDFSHMGTLPHSKSPRQNSPVTQDGIQESPWQDRHGETFTFRDPHLLDPTVEYVKFSKERHIMDRTPEKLKKELEEELLLSSEDLRSHAWYHGRIPRQVSENLVQRDGDFLVRDSLSSPGNFVLTCQWKNLAQHFKINRTVLRLSEAYSRVQYQFEMESFDSIPGLVRCYVGNRRPISQQSGAIIFQPINRTVPLRCLEEHYGTSPGQAREGSLTKGRPDVAKRLSLTMGGVQAREQNLPRGNLLRNKEKSGSQPACLDHMQDRRALSLKAHQSESYLPIGCKLPPQSSGVDTSPCPNSPVFRTGSEPALSPAVVRRVSSDARAGEALRGSDSQLCPKPPPKPCKVPFLKVPSSPSAWLNSEANYCELNPAFATGCGRGAKLPSCAQGSHTELLTAKQNEAPGPRNSGVNYLILDDDDRERPWEPAAAQMEKGQWDKGEFVTPLLETVSSFRPNEFESKFLPPENKPLETAMLKRAKELFTNNDPKVIAQHVLSMDCRVARILGVSEEMRRNMGVSSGLELITLPHGHQLRLDIIERHNTMAIGIAVDILGCTGTLEDRAATLSKIIQVAVELKDSMGDLYSFSALMKALEMPQITRLEKTWTALRHQYTQTAILYEKQLKPFSKLLHEGRESTCVPPNNVSVPLLMPLVTLMERQAVTFEGTDMWEKNDQSCEIMLNHLATARFMAEAADSYRMNAERILAGFQPDEEMNEICKTEFQMRLLWGSKGAQVNQTERYEKFNQILTALSRKLEPPPVKQAEL

SEQ ID NO: 900297 - protein, 66 aa, Homo sapiens
MNEICKTEFQMRLLWGSKGAQVNQTERYEKFNQILTALSRLAEEDKPREDKRREVLVLTKEYSCLL

SEQ ID NO: 900298 - protein, 699 aa, Homo sapiens
MDRTPEKLKKELEEELLLSSEDLRSHAWYHGRIPRQVSENLVQRDGDFLVRDSLSSPGNFVLTCQWKNLAQHFKINRTVLRLSEAYSRVQYQFEMESFDSIPGLVRCYVGNRRPISQQSGAIIFQPINRTVPLRCLEEHYGTSPGQAREGSLTKGRPDVAKRLSLTMGGVQAREQNLPRGNLLRNKEKSGSQPACLDHMQDRRALSLKAHQSESYLPIGCKLPPQSSGVDTSPCPNSPVFRTGSEPALSPAVVRRVSSDARAGEALRGSDSQLCPKPPPKPCKVPFLKVPSSPSAWLNSEANYCELNPAFATGCGRGAKLPSCAQGSHTELLTAKQNEAPGPRNSGVNYLILDDDDRERPWEPAAAQMEKGQWDKGEFVTPLLETVSSFRPNEFESKFLPPENKPLETAMLKRAKELFTNNDPKVIAQHVLSMDCRVARILGVSEEMRRNMGVSSGLELITLPHGHQLRLDIIERHNTMAIGIAVDILGCTGTLEDRAATLSKIIQVAVELKDSMGDLYSFSALMKALEMPQITRLEKTWTALRHQYTQTAILYEKQLKPFSKLLHEGRESTCVPPNNVSVPLLMPLVTLMERQAVTFEGTDMWEKNDQSCEIMLNHLATARFMAEAADSYRMNAERILAGFQPDEEMNEICKTEFQMRLLWGSKGAQVNQTERYEKFNQILTALSRKLEPPPVKQAEL

SEQ ID NO: 900299 - protein, 813 aa, Homo sapiens [sequence omitted]

SEQ ID NO: 900300 - protein, 280 aa, Homo sapiens
IPRQAVLHRQVVLHRQVVLHRQVVLHRQVVLMGVSSGLELITLPHGHQLRLDIIERHNTMAIGIAVDILGCTGTLEDRAATLSKIIQVAVELKDSMGDLYSFSALMKALEMPQITRLEKTWTALRHQYTQTAILYEKQLKPFSKLLHEGRESTCVPPNNVSVPLLMPLVTLMERQAVTFEGTDMWEKNDQSCEIMLNHLATARFMAEAADSYRMNAERILAGFQPDEEMNEICKTEFQMRLLWGSKGAQVNQTERYEKFNQILTALSRKLEPPPVKQAEL

SEQ ID NO: 900301 - protein, 873 aa, Homo sapiens
  misc_feature (839)..(839): Xaa can be any naturally occurring amino acid
  misc_feature (845)..(848): Xaa can be any naturally occurring amino acid
  misc_feature (851)..(851): Xaa can be any naturally occurring amino acid
  misc_feature (853)..(853): Xaa can be any naturally occurring amino acid
MAAGKFASLPRNMPVNHQFPLASSMDLLSSRSPLAEHRPDAYQDVSIHGTLPRKKKGPPPIRSCDDFSHMGTLPHSKSPRQNSPVTQDGIQESPWQDRHGETFTFRDPHLLDPTVEYVKFSKERHIMDRTPEKLKKELEEELLLSSEDLRSHAWYHGRIPRQVSENLVQRDGDFLVRDSLSSPGNFVLTCQWKNLAQHFKINRTVLRLSEAYSRVQYQFEMESFDSIPGLVRCYVGNRRPISQQSGAIIFQPINRTVPLRCLEEHYGTSPGQAREGSLTKGRPDVAKRLSLTMGGVQAREQNLPRGNLLRNKEKSGSQPACLDHMQDRRALSLKAHQSESYLPIGCKLPPQSSGVDTSPCPNSPVFRTGSEPALSPAVVRRVSSDARAGEALRGSDSQLCPKPPPKPCKVPFLKVPSSPSAWLNSEANYCELNPAFATGCGRGAKLPSCAQGSHTELLTAKQNEAPGPRNSGVNYLILDDDDRERPWEPAAAQMEKGQWDKGEFVTPLLETVSSFRPNEFESKFLPPENKPLETAMLKRAKELFTNNDPKVIAQHVLSMDCRVARILGVSEEMRRNMGVSSGLELITLPHGHQLRLDIIERHNTMAIGIAVDILGCTGTLEDRAATLSKIIQVAVELKDSMGDLYSFSALMKALEMPQITRLEKTWTALRHQYTQTAILYEKQLKPFSKLLHEGRESTCVPPNNVSVPLLMPLVTLMERQAVTFEGTDMWEKNDQSCEIMLNHLATARFMAEAADSYRMNAERILAGFQPDEEMNEICKTEFQMRLLWGSKGAQVNQTERYEKFNQILTALSRKLEPPPVKQADAPLPPPRPPRLPSPXPPAPPXXXXPAXAXVIMCKSDNIQAFSIHRILNV

SEQ ID NO: 900302 - protein, 508 aa, Homo sapiens
MPVNHQFPLASSMDLLSSRSPLAEHRPDAYQDVSIHGTLPRKKKGPPPIRSCDDFSHMGTLPHSKSPRQNSPVTQDGIQESPWQDRHGETFTFRDPHLLDPTVEYVKFSKERHIMDRTPEKLKKELEEELLLSSEDLRSHAWYHGRIPRQVSENLVQRDGDFLVRDSLSSPGNFVLTCQWKNLAQHFKINRTVLRLSEAYSRVQYQFEMESFDSIPGLVRCYVGNRRPISQQSGAIIFQPINRTVPLRCLEEHYGTSPGQAREGSLTKGRPDVAKRLSLTMGGVQAREQNLPRGNLLRNKEKSGSQPACLDHMQDRRALSLKAHQSESYLPIGCKLPPQSSGVDTSPCPNSPVFRTGSEPALSPAVVRRVSSDARAGEALRGSDSQLCPKPPPKPCKVPFLKVPSSPSAWLNSEANYCELNPAFATGCGRGAKLPSCAQGSHTELLTAKQNEAPGPRNSGVNYLILDDDDRERPWEPAAAQMEKGQWDKGEFVTPLLETVSSFRPNEL

SEQ ID NO: 900303 - protein, 169 aa, Homo sapiens
MPVNHQFPLASSMDLLSSRSPLAEHRPDAYQDVSIHGTLPRKKKGPPPIRSCDDFSHMGTLPHSKSPRQNSPVTQDGIQESPWQDRHGETFTFRDPHLLDPTVEYVKFSKERHIMDRTPEKLKKELEEELLLSSEDLRSHAWYHGRIPRQVPGLVPSRAYTAALRQCTD

SEQ ID NO: 900304 - protein, 813 aa, Homo sapiens [sequence omitted]

SEQ ID NO: 900305 - protein, 706 aa, Homo sapiens
DISEPQGDYDNLSRVIQLSQDANPGGQATGTARLHHIINSPVAVSENLVQRDGDFLVRDSLSSPGNFVLTCQWKNLAQHFKINRTVLRLSEAYSRVQYQFEMESFDSIPGLVRCYVGNRRPISQQSGAIIFQPINRTVPLRCLEEHYGTSPGQAREGSLTKGRPDVAKRLSLTMGGVQAREQNLPRGNLLRNKEKSGSQPACLDHMQDRRALSLKAHQSESYLPIGCKLPPQSSGVDTSPCPNSPVFRTGSEPALSPAVVRRVSSDARAGEALRGSDSQLCPKPPPKPCKVPFLKVPSSPSAWLNSEANYCELNPAFATGCGRGAKLPSCAQGSHTELLTAKQNEAPGPRNSGVNYLILDDDDRERPWEPAAAQMEKGQWDKGEFVTPLLETVSSFRPNEFESKFLPPENKPLETAMLKRAKELFTNNDPKVIAQHVLSMDCRVARILGVSEEMRRNMGVSSGLELITLPHGHQLRLDIIERHNTMAIGIAVDILGCTGTLEDRAATLSKIIQVAVELKDSMGDLYSFSALMKALEMPQITRLEKTWTALRHQYTQTAILYEKQLKPFSKLLHEGRESTCVPPNNVSVPLLMPLVTLMERQAVTFEGTDMWEKNDQSCEIMLNHLATARFMAEAADSYRMNAERILAGFQPDEEMNEICKTEFQMRLLWGSKGAQVNQTERYEKFNQILTALSRKLEPPPVKQAEL

SEQ ID NO: 900306 - protein, 592 aa, Homo sapiens
MPVNHQFPLASSMDLLSSRSPLAEHRPDAYQDVSIHGTLPRKKKGPPPIRSCDDFSHMGTLPHSKSPRQNSPVTQDGIQESPWQDRHGETFTFRDPHLLDPTVEYVKFSKERHIMDRTPEKLKKELEEELLLSSEDLRSHAWYHGRIPRQVSENLVQRDGDFLVRDSLSSPGNFVLTCQWKNLAQHFKINRTVLRLSEAYSRVQYQFEMESFDSIPGLVRCYVGNRRPISQQSGAIIFQPINRTVPLRCLEEHYGTSPGQAREGSLTKGRPDVAKRLSLTMGGVQAREQNLPRGNLLRNKEKSGSQPACLDHMQDRRALSLKAHQSESYLPIGCKLPPQSSGVDTSPCPNSPVFRTGSEPALSPAVVRRVSSDARAGEALRGSDSQLCPKPPPKPCKVPFLKVPSSPSAWLNSEANYCELNPAFATGCGRGAKLPSCAQGSHTELLTAKQNEAPGPRNSGVNYLILDDDDRERPWEPAAAQMEKGQWDKGEFVTPLLETVSSFRPNEFESKFLPPENKPLETAMLKRAKELFTNNDPKVIAQHVLSMDCRVARILGVSEEMRRNMGVSSGLELITLPHGHQLRLDIIERSQG

SEQ ID NO: 900307 - protein, 227 aa, Homo sapiens
MKEHNTMAIGIAVDILGCTGTLEDRAATLSKIIQVAVELKDSMGDLYSFSALMKALEMPQITRLEKTWTALRHQYTQTAILYEKQLKPFSKLLHEGRESTCVPPNNVSVPLLMPLVTLMERQAVTFEGTDMWEKNDQSCEIMLNHLATARFMAEAADSYRMNAERILAGFQPDEEMNEICKTEFQMRLLWGSKGAQVNQTERYEKFNQILTALSRKLEPPPVKQAEL

SEQ ID NO: 900308 - protein, 196 aa, Homo sapiens
MQDRRALSLKAHQSESYLPIGCKLPPQSSGVDTSPCPNSPVFRTGSEPALSPAVVRRVSSDARAGEALRGSDSQLCPKPPPKPCKVPFLKVPSSPSAWLNSEANYCELNPAFATGCGRGAKLPSCAQGSHTELLTAKQNEAPGPRNSGVNYLILDDDDRERPWEPAAAQMEKGQWDKGEFVTPLLETVSSFRPNEL

SEQ ID NO: 900309 - protein, 51 aa, Homo sapiens
MAQKQPCSWLIWFSFLLVPLALNLTADLLAFRHNTMAIGIAVDILGCTGTL

SEQ ID NO: 900310 - protein, 35 aa, Homo sapiens
DEQLTVFSKIPPGETARSWKSSQERSQPGVGDPSR

SEQ ID NO: 900311 - protein, 846 aa, Homo sapiens
MSSSHFASRHRKDISTEMIRTKIAHRKSLSQKENRHKEYERNRHFGLKDVNIPTLEGRILVELDETSQGLVPEKTNVKPRAMKTILGDQRKQMLQKYKEEKQLQKLKEQREKAKRGIFKVGRYRPDMPCFLLSNQNAVKAEPKKAIPSSVRITRSKAKDQMEQTKIDNESDVRAIRPGPRQTSEKKVSDKEKKVVQPVMPTSLRMTRSATQAAKQVPRTVSSTTARKPVTRAANENEPEGKVPSKGRPAKNVETKPDKGISCKVDSEENTLNSQTNATSGMNPDGVLSKMENLPEINTAKIKGKNSFAPKDFMFQPLDGLKTYQVTPMTPRSANAFLTPSYTWTPLKTEVDESQATKEILAQKCKTYSTKTIQQDSNKLPCPLGPLTVWHEEHVLNKNEATTKNLNGLPIKEVPSLERNEGRIAQPHHGVPYFRNILQSETEKLTSHCFEWDRKLELDIPDDAKDLIRTAVGQTRLLMKERFKQFEGLVDDCEYKRGIKETTCTDLDGFWDMVSFQIEDVIHKFNNLIKLEESGWQVNNNMNHNMNKNVFRKKVVSGIASKPKQDDAGRIAARNRLAAIKNAMRERIRQEECAETAVSVIPKEVDKIVFDAGFFRVESPVKLFSGLSVSSEGPSQRLGTPKSVNKAVSQSRNEMGIPQQTTSPENAGPQNTKSEHVKKTLFLSIPESRSSIEDAQCPGLPDLIEENHVVNKTDLKVDCLSSERMSLPLLAGGVADDINTNKKEGISDVVEGMELNSSITSQDVLMSSPEKNTASQNSILEEGETKISQSELFDNKSLTTECHLLDSPGLNCSNPFTQLERRHQEHARHISFGGNLITFSPLQPGEF

SEQ ID NO: 900312 - protein, 870 aa, Homo sapiens
MNCNLNFLNNENSCKLGFVLFLDRMSSSHFASRHRKDISTEMIRTKIAHRKSLSQKENRHKEYERNRHFGLKDVNIPTLEGRILVELDETSQGLVPEKTNVKPRAMKTILGDQRKQMLQKYKEEKQLQKLKEQREKAKRGIFKVGRYRPDMPCFLLSNQNAVKAEPKKAIPSSVRITRSKAKDQMEQTKIDNESDVRAIRPGPRQTSEKKVSDKEKKVVQPVMPTSLRMTRSATQAAKQVPRTVSSTTARKPVTRAANENEPEGKVPSKGRPAKNVETKPDKGISCKVDSEENTLNSQTNATSGMNPDGVLSKMENLPEINTAKIKGKNSFAPKDFMFQPLDGLKTYQVTPMTPRSANAFLTPSYTWTPLKTEVDESQATKEILAQKCKTYSTKTIQQDSNKLPCPLGPLTVWHEEHVLNKNEATTKNLNGLPIKEVPSLERNEGRIAQPHHGVPYFRNILQSETEKLTSHCFEWDRKLELDIPDDAKDLIRTAVGQTRLLMKERFKQFEGLVDDCEYKRGIKETTCTDLDGFWDMVSFQIEDVIHKFNNLIKLEESGWQVNNNMNHNMNKNVFRKKVVSGIASKPKQDDAGRIAARNRLAAIKNAMRERIRQEECAETAVSVIPKEVDKIVFDAGFFRVESPVKLFSGLSVSSEGPSQRLGTPKSVNKAVSQSRNEMGIPQQTTSPENAGPQNTKSEHVKKTLFLSIPESRSSIEDAQCPGLPDLIEENHVVNKTDLKVDCLSSERMSLPLLAGGVADDINTNKKEGISDVVEGMELNSSITSQDVLMSSPEKNTASQNSILEEGETKISQSELFDNKSLTTECHLLDSPGLNCSNPFTQLERRHQEHARHISFGGNLITFSPLQPGEF

SEQ ID NO: 900313 - protein, 633 aa, Homo sapiens
MITQRSLSITVMHNEPGRELKENEPEGKVPSKGRPAKNVETKPDKGISCKVDSEENTLNSQTNATSGMNPDGVLSKMENLPEINTAKIKGKNSFAPKDFMFQPLDGLKTYQVTPMTPRSANAFLTPSYTWTPLKTEVDESQATKEILAQKCKTYSTKTIQQDSNKLPCPLGPLTVWHEEHVLNKNEATTKNLNGLPIKEVPSLERNEGRIAQPHHGVPYFRNILQSETEKLTSHCFEWDRKLELDIPDDAKDLIRTAVGQTRLLMKERFKQFEGLVDDCEYKRGIKETTCTDLDGFWDMVSFQIEDVIHKFNNLIKLEESGWQVNNNMNHNMNKNVFRKKVVSGIASKPKQDDAGRIAARNRLAAIKNAMRERIRQEECAETAVSVIPKEVDKIVFDAGFFRVESPVKLFSGLSVSSEGPSQRLGTPKSVNKAVSQSRNEMGIPQQTTSPENAGPQNTKSEHVKKTLFLSIPESRSSIEDAQCPGLPDLIEENHVVNKTDLKVDCLSSERMSLPLLAGGVADDINTNKKEGISDVVEGMELNSSITSQDVLMSSPEKNTASQNSILEEGETKISQSELFDNKSLTTECHLLDSPGLNCSNPFTQLERRHQEHARHISFGGNLITFSPLQPGEF

SEQ ID NO: 900314 - protein, 842 aa, Homo sapiens
MSSSHFASRHRKDISTEMIRTKIAHRKSLSQKENRHKEYERNRHFGLKDVNIPTLEGRILVELDETSQGLVPEKTNVKPRAMKTILGDQRKQMLQKYKEEKQLQKLKEQREKAKRGIFKVGRYRPDMPCFLLSNQNAVKAEPKKAIPSSVRITRSKAKDQMEQTKIDNESDVRAIRPGPRQTSEKKVSDKEKKVVQPVMPTSLRMTRSATQAAKQVPRTVSSTTARKPVTRAANENEPEGKVPSKGRPAKNVETKPDKGISCKVDSEENTLNSQTNATSGMNPDGVLSKMENLPEINTAKIKGKNSFAPKDFMFQPLDGLKTYQVTPMTPRSANAFLTPSYTWTPLKTEVDESQATKEILAQKCKTYSTKTIQQDSNKLPCPLGPLTVWHEEHVLNKNEATTKNLNGLPIKEVPSLERNEGRIAQPHHGVPYFRNILQSETEKLTSHCFEWDRKLELDIPDDAKDLIRTAVGQTRLLMKERFKQFEGLVDDCEYKRGIKETTCTDLDGFWDMVSFQIEDVIHKFNNLIKLEESGWQVNNNMNHNMNKNVFRKKVVSGIASKPKQDDAGRIAARNRLAAIKNAMRERIRQEECAETAVSVIPKEVDKIVFDAGFFRVESPVKLFSGLSVSSEGPSQRLGTPKSVNKAVSQSRNEMGIPQQTTSPENAGPQNTKSEHVKKTLFLSIPESRSSIEDAQCPGLPDLIEENHVVNKTDLKVDCLSSERMSLPLLAGGVADDINTNKKEGISDVVEGMELNSSITSQDVLMSSPEKNTASQNSILEEGETKISQSELFDNKSLTTECHLLDSVGSCYVARAGLEVLGSSDPTTSASRVAGTTARSKLQ

SEQ ID NO: 900315 - protein, 849 aa, Homo sapiens
MSSSHFASRHRKDISTEMIRTKIAHRKSLSQKENRHKEYERNRHFGLKDVNIPTLEGRILVELDETSQGLVPEKTNVKPRAMKTILGDQRKQMLQKYKEEKQLQKLKEQREKAKRGIFKVGRYRPDMPCFLLSNQNAVKAEPKKAIPSSVRITRSKAKDQMEQTKIDNESDVRAIRPGPRQTSEKKVSDKEKKVVQPVMPTSLRMTRSATQAAKQVPRTVSSTTARKPVTRAANENEPEGKVPSKGRPAKNVETKPDKGISCKVDSEENTLNSQTNATSGMNPDGVLSKMENLPEINTAKIKGKNSFAPKDFMFQPLDGLKTYQVTPMTPRSANAFLTPSYTWTPLKTEVDESQATKEILAQKCKTYSTKTIQQDSNKLPCPLGPLTVWHEEHVLNKNEATTKNLNGLPIKEVPSLERNEGRIAQPHHGVPYFRNILQSETEKLTSHCFEWDRKLELDIPDDAKDLIRTAVGQTRLLMKERFKQFEGLVDDCEYKRGIKETTCTDLDGFWDMVSFQIEDVIHKFNNLIKLEESGWQVNNNMNHNMNKNVFRKKVVSGIASKPKQDDAGRIAARNRLAAIKNAMRERIRQEECAETAVSVIPKEVDKIVFDAGFFRVESPVKLFSGLSVSSEGPSQRLGTPKSVNKAVSQSRNEMGIPQQTTSPENAGPQNTKSEHVKKTLFLSIPESRSSIEDAQCPGLPDLIEENHVVNKTDLKVDCLSSERMSLPLLAGGVADDINTNKKEGISDVVEGMELNSSITSQDVLMSSPEKNTASQNSILEEGETKISQSELFDNKSLTTECHLLDSVGSCYVARAGLEVLGSSDPTTSASRVAGTTGVHHRTRFIFVIN

SEQ ID NO: 900316 - protein, 148 aa, Homo sapiens
NVCHNFRNILQSETEKLTSHCFEWDRKLELDIPDDAKDLIRTAVGQTRLLMKERFKQFEGLVDDCEYKRGIKETTCTDLDGFWDMVSFQIEDVIHKFNNLIKLEESGWQVNNNMNHNMNKNVFRVSLWVLYPIFFFLVKELLYIHPNF

SEQ ID NO: 900317 - protein, 846 aa, Homo sapiens; identical to SEQ ID NO: 900311

SEQ ID NO: 900318 - protein, 344 aa, Homo sapiens [sequence omitted]

SEQ ID NO: 900319 - protein, 320 aa, Homo sapiens
MPRLRVHGACLPTKSVLFLFYHRLTMLREASDEIVAEKEAEVKLPEDSSCTEDLSSCTSVPEMNEDGNRKESNCAKDLRSQPPTRIPTLVDKETNTDEAANDNMAVRPKERSSLSSRQHPFVRSSVIVRSQTFSPGERNQYICRLNRSDSDSSTLAKKSLFVRNSTERRSLRVKRTVCQSVLRRTTQECPVRTSLDLELDLQASLTRQSRLNDELQALRDLRQKLEELKAQGETDLPPGVLEDERFQRLLKQAEKQAEQSKEEQKQGLNAEKLMRQVSKDVCRLREQSQKVPRQVQSFREKIAYFTRAKISIPSLPADDV

SEQ ID NO: 900320 - protein, 344 aa, Homo sapiens [sequence omitted]

SEQ ID NO: 900321 - protein, 580 aa, Homo sapiens
ASQSLSEDKDLNECAREPLYEGTADVEKSLPKRRVIHLLGEKTTCVSAAVSDESVAGDSGVYEAFVKQPSEMEDVTYSEEDVAIVETAQVQIGLRYNAKSSSFMVIIAQLRNLHAFLIPHTSKVYFRVAVLPSSTDVSCLFRTKVHPPTESILFNDVFRVAISQTALQQKTLRVDLCSVSKHRREECLAGTQISLADLPFSSEVFTLWYNLLPSKQMPCKKNEENEDSVFQPNQPLVDSIDLDAVSALLARTSAELLAVEQELAQEEEEESGQEEPRGPDGDWLTMLREASDEIVAEKEAEVKLPEDSSCTEDLSSCTSVPEMNEDGNRKESNCAKDLRSQPPTRIPTLVDKETNTDEAANDNMAVRPKERSSLSSRQHPFVRSSVIVRSQTFSPGERNQYICRLNRSDSDSSTLAKKSLFVRNSTERRSLRVKRTVCQSVLRRTTQECPVRTSLDLELDLQASLTRQSRLNDELQALRDLRQKLEELKAQGETDLPPGVLEDERFQRLLKQAEKQAEQSKEEQKQGLNAEKLMRQVSKDVCRLREQSQKVPRQVQSFREKIAYFTRAKISIPSLPADDV

SEQ ID NO: 900322 - protein, 344 aa, Homo sapiens [sequence omitted]

SEQ ID NO: 900323 - protein, 109 aa, Homo sapiens
LRPWLLGCKEAPSIMRQEGGEVEVTTACITRVFVIPFLTIQTVCQSVLRRTTQECPVRTSLDLELDLQASLTRQSRLNDELQALRDLRQKLEELKAQGETDLPPGVLED

SEQ ID NO: 900324 - protein, 772 aa, Homo sapiens
MGDEDDDESCAVELRITEANLTGHEEKVSVENFELLKVLGTGAYGKVFLVRKAGGHDAGKLYAMKVLRKAALVQRAKTQEHTRTERSVLELVRQAPFLVTLHYAFQTDAKLHLILDYVSGGEMFTHLYQRQYFKEAEVRVYGGEIVLALEHLHKLGIIYRDLKLENVLLDSEGHIVLTDFGLSKEFLTEEKERTFSFCGTIEYMAPEIIRSKTGHGKAVDWWSLGILLFELLTGASPFTLEGERNTQAEVSRRILKCSPPFPPRIGPVAQDLLQRLLCKDPKKRLGAGPQGAQEVRNHPFFQGLDWVALAARKIPAPFRPQIRSELDVGNFAEEFTRLEPVYSPPGSPPPGDPRIFQGYSFVAPSILFDHNNAVMTDGLEAPGAGDRPGRAAVARSAMMQDSPFFQQYELDLREPALGQGSFSVCRRCRQRQSGQEFAVKILSRRLEANTQREVAALRLCQSHPNVVNLHEVHHDQLHTYLVLELLRGGELLEHIRKKRHFSESEASQILRSLVSAVSFMHEEAGVVHRDLKPENILYADDTPGAPVKIIDFGFARLRPQSPGVPMQTPCFTLQYAAPELLAQQGYDESCDLWSLGVILYMMLSGQVPFQGASGQGGQSQAAEIMCKIREGRFSLDGEAWQGVSEEAKELVRGLLTVDPAKRLKLEGLRGSSWLQDGSARSSPPLRTPDVLESSGPAVRSGLNATFMAFNRGKREGFFLKSVENAPLAKRRKQKLRSATASRRGSPAPANPGRAPVASKGAPRRANGPLPPS

SEQ ID NO: 900325 - protein, 766 aa, Homo sapiens
MGDEDDDESCAVELRITEANLTGHEEKVSVENFELLKVLGTGAYGKVFLVRKAGGHDAGKLYAMKVLRKAALVQRAKTQEHTRTERSVLELVRQAPFLVTLHYAFQTDAKLHLILDYVSGGEMFTHLYQRQYFKEAEVRVYGGEIVLALEHLHKLGIIYRDLKLENVLLDSEGHIVLTDFGLSKEFLTEEKERTFSFCGTIEYMAPEIIRSKTGHGKAVDWWSLGILLFELLTGASPFTLEGERNTQAEVSRRILKCSPPFPPRIGPVAQDLLQRLLCKDPKKRLGAGPQGAQEVRNHPFFQGLDWVALAARKIPAPFRPQIRSELDVGNFAEEFTRLEPVYSPPGSPPPGDPRIFQGYSFVAPSILFDHNNAVMTDGLEAPGAGDRPGRAAVARSAMMQQYELDLREPALGQGSFSVCRRCRQRQSGQEFAVKILSRRLEANTQREVAALRLCQSHPNVVNLHEVHHDQLHTYLVLELLRGGELLEHIRKKRHFSESEASQILRSLVSAVSFMHEEAGVVHRDLKPENILYADDTPGAPVKIIDFGFARLRPQSPGVPMQTPCFTLQYAAPELLAQQGYDESCDLWSLGVILYMMLSGQVPFQGASGQGGQSQAAEIMCKIREGRFSLDGEAWQGVSEEAKELVRGLLTVDPAKRLKLEGLRGSSWLQDGSARSSPPLRTPDVLESSGPAVRSGLNATFMAFNRGKREGFFLKSVENAPLAKRRKQKLRSATASRRGSPAPANPGRAPVASKGAPRRANGPLPPS

SEQ ID NO: 900326 - protein, 666 aa, Homo sapiens
IQWLCPGDPLYRQMTFSGGSPYPEQGQELEELGRVSGRKPQHPSCSYQLGIIYRDLKLENVLLDSEGHIVLTDFGLSKEFLTEEKERTFSFCGTIEYMAPEIIRSKTGHGKAVDWWSLGILLFELLTGASPFTLEGERNTQAEVSRRILKCSPPFPPRIGPVAQDLLQRLLCKDPKKRLGAGPQGAQEVRNHPFFQGLDWVALAARKIPAPFRPQIRSELDVGNFAEEFTRLEPVYSPPGSPPPGDPRIFQGYSFVAPSILFDHNNAVMTDGLEAPGAGDRPGRAAVARSAMMQDSPFFQQYELDLREPALGQGSFSVCRRCRQRQSGQEFAVKILSRRLEANTQREVAALRLCQSHPNVVNLHEVHHDQLHTYLVLELLRGGELLEHIRKKRHFSESEASQILRSLVSAVSFMHEEAGVVHRDLKPENILYADDTPGAPVKIIDFGFARLRPQSPGVPMQTPCFTLQYAAPELLAQQGYDESCDLWSLGVILYMMLSGQVPFQGASGQGGQSQAAEIMCKIREGRFSLDGEAWQGVSEEAKELVRGLLTVDPAKRLKLEGLRGSSWLQDGSARSSPPLRTPDVLESSGPAVRSGLNATFMAFNRGKREGFFLKSVENAPLAKRRKQKLRSATASRRGSPAPANPGRAPVASKGAPRRANGPLPPS

SEQ ID NO: 900327 - protein, 109 aa, Homo sapiens
LHTYLVLELLRGGELLEHIRKKRHFSESEASQILRSLVSAVSFMHEEAGVVHRDLKPEVGELPRRRGGAVAPGAASDHYPAALANILYADDTPGAPVKIIDFGFARLRP

SEQ ID NO: 900328 - protein, 766 aa, Homo sapiens; identical to SEQ ID NO: 900325

SEQ ID NO: 900329 - protein, 740 aa, Homo sapiens
ARPGRSRHVTGAARSPSRAGPSDPPAMGDEDDDESCAVELRITEANLTGHEEKVSVENFELLKVLGTGAYGKVFLVRKAGGHDAGKLYAMKVLRKAALVQRAKTQEHTRTERSVLELVRQAPFLVTLHYAFQTDAKLHLILDYVSGGEMFTHLYQRQYFKEAEVRVYGGEIVLALEHLHKLGIIYRDLKLENVLLDSEGHIVLTDFGLSKEFLTEEKERTFSFCGTIEYMAPEIIRSKTGHGKAVDWWSLGILLFELLTGASPFTLEGERNTQAEVSRRILKCSPPFPPRIGPVAQDLLQRLLCKDPKKRLGAGPQGAQEVRNHPFFQGLDWVALAARKIPAPFRPQIRSELDVGNFAEEFTRLEPVYSPPGSPPPGDPRIFQGYSFVAPSILFDHNNAVMTDGLEAPGAGDRPGRAAVARSAMMQDSPFFQQYELDLREPALGQGSFSVCRRCRQRQSGQEFAVKILSRRLEANTQREVAALRLCQSHPNVVNLHEVHHDQNILYADDTPGAPVKIIDFGFARLRPQSPGVPMQTPCFTLQYAAPELLAQQGYDESCDLWSLGVILYMMLSGQVPFQGASGQGGQSQAAEIMCKIREGRFSLDGEAWQGVSEEAKELVRGLLTVDPAKRLKLEGLRGSSWLQDGSARSSPPLRTPDVLESSGPAVRSGLNATFMAFNRGKREGFFLKSVENAPLAKRRKQKLRSATASRRGSPAPANPGRAPVASKGAPRRANGPLPPS

SEQ ID NO: 900330 - protein, 621 aa, Homo sapiens
  misc_feature (61)..(61): Xaa can be any naturally occurring amino acid
  misc_feature (86)..(86): Xaa can be any naturally occurring amino acid
MARQKAMSFGKKVKSTSKDGLYHFTRSLSQGPLLIKTEIAGIALSLLIGMEDLQTEQSSSXCHCGKNQGHLLKGQDRMRGLYSPSXFFSPGFFLIQTEVSRRILKCSPPFPPRIGPVAQDLLQRLLCKDPKKRLGAGPQGAQEVRNHPFFQGLDWVALAARKIPAPFRPQIRSELDVGNFAEEFTRLEPVYSPPGSPPPGDPRIFQGYSFVAPSILFDHNNAVMTDGLEAPGAGDRPGRAAVARSAMMQDSPFFQQYELDLREPALGQGSFSVCRRCRQRQSGQEFAVKILSRRLEANTQREVAALRLCQSHPNVVNLHEVHHDQLHTYLVLELLRGGELLEHIRKKRHFSESEASQILRSLVSAVSFMHEEAGVVHRDLKPENILYADDTPGAPVKIIDFGFARLRPQSPGVPMQTPCFTLQYAAPELLAQQGYDESCDLWSLGVILYMMLSGQVPFQGASGQGGQSQAAEIMCKIREGRFSLDGEAWQGVSEEAKELVRGLLTVDPAKRLKLEGLRGSSWLQDGSARSSPPLRTPDVLESSGPAVRSGLNATFMAFNRGKREGFFLKSVENAPLAKRRKQKLRSATASRRGSPAPANPGRAPVASKGAPRRANGPLPPS

SEQ ID NO: 900331 - protein, 1582 aa, Homo sapiens
ARGPTGCLLSQRRPLITVAMPGGLLLGDVAPNFEANTTVGRIRFHDFLGDSWGILFSHPRDFTPVCTTELGRAAKLAPEFAKRNVKLIALSIDSVEDHLAWSKDINAYNCEEPTEKLPFPIIDDRNRELAILLGMLDPAEKDEKGMPVTARVVFVFGPDKKLKLSILYPATTGRNFDEILRVVISLQLTAEKRVATPVDWKDGDSVMVLPTIPEEEAKKTFPERSLHQRAPIWQEIPPLHTPALSLLEKLVLLSQRMSAANCVFLQQFHKHILVSSQPRFLGCYTNGLLNENGKKKKKKKKKKKKKIGEKEPLKLEDGRCGEYFELFEDKSMSSLPGCIGLDAATATVESEEIAELQQAVVEELGISMEELRHFIDEELEKMDCVQQRKKQLAELETWVIQKESEVAHVDQLFDDASRAVTNCESLVKDFYSKLGLQYRDSSSEDESSRPTEIIEIPDEDDDVLSIDSGDAGSRTPKDQKLREAMAALRKSAQDVQKFMDAVNKKSSSQDLHKGTLSQMSGELSKDGDLIVSMRILGKKRTKTWHKGTLIAIQTVGPGKKYKVKFDNKGKSLLSGNHIAYDYHPPADKLYVGSRVVAKYKDGNQVWLYAGIVAETPNVKNKLRFLIFFDDGYASYVTQSELYPICRPLKKTWEDIEDISCRDFIEEYVTAYPNRPMVLLKSGQLIKTEWEGTWWKSRVEEVDGSLVRILFLDDKRCEWIYRGSTRLEPMFSMKTSSASALEKKQGQLRTRPNMGAVRSKGPVVQYTQDLTGTGTQFKPVEPPQPTAPPAPPFPPAPPLSPQAGDSDLESQLAQSRKQVAKKSTSFRPGSVGSGHSSPTSPALSENVSGGKPGINQTYRSPLGSTASAPAPSALPAPPAPPVFHGMLERAPAEPSYRAPMEKLFYLPHVCSYTCLSRVRPMRNEQYRGKNPLLVPLLYDFRRMTARRRVNRKMGFHVIYKTPCGLCLRTMQEIERYLFETGCDFLFLEMFCLDPYVLVDRKFQPYKPFYYILDITYGKEDVPLSCVNEIDTTPPPQVAYSKERIPGKGVFINTGPEFLVGCDCKDGCRDKSKCACHQLTIQATACTPGGQINPNSGYQYKRLEECLPTGVYECNKRCKCDPNMCTNRLVQHGLQVRLQLFKTQNKGWGIRCLDDIAKGSFVCIYAGKILTDDFADKEGLEMGDEYFANLDHIESVENFKEGYESDAPCSSDSSGVDLKDQEDGNSGTEDPEESNDDSSDDNFCKDEDFSTSSVWRSYATRRQTRGQKENGLSETTSKDSHPPDLGPPHIPVPPSIPVGGCNPPSSEETPKNKVASWLSCNSVSEGGFADSDSHSSFKTNEGGEGRAGGSRMEAEKASTSGLGIKDEGDIKQAKKEDTDDRNKMSVVTESSRNYGYNPSPVKPEGLRRPPSKTSMHQSRRLMASAQSNPDDVLTLSSSTESEGESGTSRKPTAGQTSATAVDSDDIQTISSGSEGDDFEDKKNMTGPMKRQVAVKSTRGFALKSTHGIAIKSTNMASVDKGESAPVRKNTRQFYDGEESCYIIDAKLEGNLGRYLNVRPLSPPLDAGLSHGPQISFNILYKPFS

SEQ ID NO: 900332 - protein, 397 aa, Homo sapiens
MSSLPGCIGLDAATATVESEEIAELQQAVVEELGISMEELRHFIDEELEKMDCVQQRKKQLAELETWVIQKESEVAHVDQLFDDASRAVTNCESLVKDFYSKLGLQYRDSSSEDESSRPTEIIEIPDEDDDVLSIDSGDAGSRTPKDQKLREAMAALRKSAQDVQKFMDAVNKKSSSQDLHKGTLSQMSGELSKDGDLIVSMRILGKKRTKTWHKGTLIAIQTVGPGKKYKVKFDNKGKSLLSGNHIAYDYHPPADKLYVGSRVVAKYKDGNQVWLYAGIVAETPNVKNKLRFLIFFDDGYASYVTQSELYPICRPLKKTWEDIEDISCRDFIEEYVTAYPNRPMVLLKSGQLIKTEWEGTWWKSRVEEVDGSLVRILFLVLFFSTILEAEVGGGGT

SEQ ID NO: 900333 - protein, 1291 aa, Homo sapiens
MSSLPGCIGLDAATATVESEEIAELQQAVVEELGISMEELRHFIDEELEKMDCVQQRKKQLAELETWVIQKESEVAHVDQLFDDASRAVTNCESLVKDFYSKLGLQYRDSSSEDESSRPTEIIEIPDEDDDVLSIDSGDAGSRTPKDQKLREAMAALRKSAQDVQKFMDAVNKKSSSQDLHKGTLSQMSGELSKDGDLIVSMRILGKKRTKTWHKGTLIAIQTVGPGKKYKVKFDNKGKSLLSGNHIAYDYHPPADKLYVGSRVVAKYKDGNQVWLYAGIVAETPNVKNKLRFLIFFDDGYASYVTQSELYPICRPLKKTWEDIEDISCRDFIEEYVTAYPNRPMVLLKSGQLIKTEWEGTWWKSRVEEVDGSLVRILFLDDKRCEWIYRGSTRLEPMFSMKTSSASALEKKQGQLRTRPNMGAVRSKGPVVQYTQDLTGTGTQFKPVEPPQPTAPPAPPFPPAPPLSPQAGDSDLESQLAQSRKQVAKKSTSFRPGSVGSGHSSPTSPALSENVSGGKPGINQTYRSPLGSTASAPAPSALPAPPAPPVFHGMLERAPAEPSYRAPMEKLFYLPHVCSYTCLSRVRPMRNEQYRGKNPLLVPLLYDFRRMTARRRVNRKMGFHVIYKTPCGLCLRTMQEIERYLFETGCDFLFLEMFCLDPYVLVDRKFQPYKPFYYILDITYGKEDVPLSCVNEIDTTPPPQVAYSKERIPGKGVFINTGPEFLVGCDCKDGCRDKSKCACHQLTIQATACTPGGQINPNSGYQYKRLEECLPTGVYECNKRCKCDPNMCTNRLVQHGLQVRLQLFKTQNKGWGIRCLDDIAKGSFVCIYAGKILTDDFADKEGLEMGDEYFANLDHIESVENFKEGYESDAPCSSDSSGVDLKDQEDGNSGTEDPEESNDDSSDDNFCKDEDFSTSSVWRSYATRRQTRGQKENGLSETTSKDSHPPDLGPPHIPVPPSIPVGGCNPPSSEETPKNKVASWLSCNSVSEGGFADSDSHSSFKTNEGGEGRAGGSRMEAEKASTSGLGIKDEGDIKQAKKEDTDDRNKMSVVTESSRNYGYNPSPVKPEGLRRPPSKTSMHQSRRLMASAQSNPDDVLTLSSSTESEGESGTSRKPTAGQTSATAVDSDDIQTISSGSEGDDFEDKKNMTGPMKRQVAVKSTRGFALKSTHGIAIKSTNMASVDKGESAPVRKNTRQFYDGEESCYIIDAKLEGNLGRYLNHSCSPNLFVQNVFVDTHDLRFPWVAFFASKRIRAGTELTWDYNYEVGSVEGKELLCCCGAIECRGRLL

SEQ ID NO: 900334 - protein, 1276 aa, Homo sapiens
MSSLPGCIGLDAATATVESEEIAELQQAVVEELGISMEELRHFIDEELEKMDCVQQRKKQLAELETWVIQKESEVAHVDQLFDDASRAVTNCESLVKDFYSKLGLQYRDSSSEDESSRPTEIIEIPDEDDDVLSIDSGDAGSRTPKDQKLREAMAALRKSAQDVQKFMDAVNKKSSSQDLHKGTLSQMSGELSKDGDLIVSMRILGKKRTKTWHKGTLIAIQTVGPGKKYKVKFDNKGKSLLSGNHIAYDYHPPADKLYVGSRVVAKYKDGNQVWLYAGIVAETPNVKNKLRFLIFFDDGYASYVTQSELYPICRPLKKTWEDIEDISCRDFIEEYVTAYPNRPMVLLKSGQLIKTEWEGTWWKSRVEEVDGSLVRILFLDDKRCEWIYRGSTRLEPMFSMKTSSASALEKKQGQLRTRPNMGAVRSKGPVVQYTQDLTGTGTQFKPVEPPQPTAPPAPPFPPAPPLSPQAGDSDLESQLAQSRKQVAKKSTSFRPGSVGSGHSSPTSPALSENVSGGKPGINQTYRSPLGSTASAPAPSALPAPPAPPVFHGMLERAPAEPSYRAPMEKLFYLPHVCSYTCLSRVRPMRNEQYRGKNPLLVPLLYDFRRMTARRRVNRKWTMQEIERYLFETGCDFLFLEMFCLDPYVLVDRKFQPYKPFYYILDITYGKEDVPLSCVNEIDTTPPPQVAYSKERIPGKGVFINTGPEFLVGCDCKDGCRDKSKCACHQLTIQATACTPGGQINPNSGYQYKRLEECLPTGVYECNKRCKCDPNMCTNRLVQHGLQVRLQLFKTQNKGWGIRCLDDIAKGSFVCIYAGKILTDDFADKEGLEMGDEYFANLDHIESVENFKEGYESDAPCSSDSSGVDLKDQEDGNSGTEDPEESNDDSSDDNFCKDEDFSTSSVWRSYATRRQTRGQKENGLSETTSKDSHPPDLGPPHIPVPPSIPVGGCNPPSSEETPKNKVASWLSCNSVSEGGFADSDSHSSFKTNEGGEGRAGGSRMEAEKASTSGLGIKDEGDIKQAKKEDTDDRNKMSVVTESSRNYGYNPSPVKPEGLRRPPSKTSMHQSRRLMASAQSNPDDVLTLSSSTESEGESGTSRKPTAGQTSATAVDSDDIQTISSGSEGDDFEDKKNMTGPMKRQVAVKSTRGFALKSTHGIAIKSTNMASVDKGESAPVRKNTRQFYDGEESCYIIDAKLEGNLGRYLNHSCSPNLFVQNVFVDTHDLRFPWVAFFASKRIRAGTELTWDYNYEVGSVEGKELLCCCGAIECRGRLL

SEQ ID NO: 900335 - protein, 1164 aa, Homo sapiens
MSSLPGCIGLDAATATVESEEIAELQQAVVEELGISMEELRHFIDEELEKMDCVQQRKKQLAELETWVIQKESEVAHVDQLFDDASRAVTNCESLVKDFYSKLGLQYRDSSSEDESSRPTEIIEIPDEDDDVLSIDSGDAGSRTPKDQKLREAMAALRKSAQDVQKFMDAVNKKSSSQDLHKGTLSQMSGELSKDGDLIVSMRILGKKRTKTWHKGTLIAIQTVGPGKKYKVKFDNKGKSLLSGNHIAYDYHPPADKLYVGSRVVAKYKDGNQVWLYAGIVAETPNVKNKLRFLIFFDDGYASYVTQSELYPICRPLKKTWEDIEDISCRDFIEEYVTAYPNRPMVLLKSGQLIKTEWEGTWWKSRVEEVDGSLVRILFLDDKRCEWIYRGSTRLEPMFSMKTSSASALEKKQGQLRTRPNMGAVRSKGPVVQYTQDLTGTGTQFKPVEPPQPTAPPAPPFPPAPPLSPQAGDSDLESQLAQSRKQVAKKSTSFRPGSVGSGHSSPTSPALSENVSGGKPGINQTYRSPLGSTASAPAPSALPAPPAPPVFHGMLERAPAEPSYRAPMEKLFYLPHVCSYTCLSRVRPMRNEQYRGKNPLLVPLLYDFRRMTARRRVNRKMGFHVIYKTPCGLCLRTMQEIERYLFETGCDFLFLEMFCLDPYVLVDRKFQPYKPFYYILDITYGKEDVPLSCVNEIDTTPPPQVAYSKERIPGKGVFINTGPEFLVGCDCKDGCRDKSKCACHQLTIQATACTPGGQINPNSGYQYKRLEECLPTGVYECNKRCKCDPNMCTNRLVQHGLQVRLQLFKTQNKGWGIRCLDDIAKGSFVCIYAGKILTDDFADKEGLEMGDEYFANLDHIESVENFKEGYESDAPCSSDSSGVDLKDQEDGNSGTEDPEESNDDSSDDNFCKDEDFSTSSVWRSYATRRQTRGQKENGLSETTSKDSHPPDLGPPHIPVPPSIPVGGCNPPSSEETPKNKVASWLSCNSVSEGGFADSDSHSSFKTNEGGEGRAGGSRMEAEKASTSGLGIKDEGDIKQAKKEDTDDRNKMSVVTESSRNYGYNPSPVKPEGLRRPPSKTSMHQSRRLMASAQSNPDVSHLKLIQSLIKENGHCHLIKSFTIITVRSSPTSSSLDCAALFSFIQHLIFLLPPPFPAKPWVTART

SEQ ID NO: 900336 - protein, 1291 aa, Homo sapiens; identical to SEQ ID NO: 900333

SEQ ID NO: 900337 - protein, 822 aa, Homo sapiens
LFITGGVLCLVAAPGLNVAKKSTSFRPGSVGSGHSSPTSPALSENVSGGKPGINQTYRSPLGSTASAPAPSALPAPPAPPVFHGMLERAPAEPSYRAPMEKLFYLPHVCSYTCLSRVRPMRNEQYRGKNPLLVPLLYDFRRMTARRRVNRKMGFHVIYKTPCGLCLRTMQEIERYLFETGCDFLFLEMFCLDPYVLVDRKFQPYKPFYYILDITYGKEDVPLSCVNEIDTTPPPQVAYSKERIPGKGVFINTGPEFLVGCDCKDGCRDKSKCACHQLTIQATACTPGGQINPNSGYQYKRLEECLPTGVYECNKRCKCDPNMCTNRLVQHGLQVRLQLFKTQNKGWGIRCLDDIAKGSFVCIYAGKILTDDFADKEGLEMGDEYFANLDHIESVENFKEGYESDAPCSSDSSGVDLKDQEDGNSGTEDPEESNDDSSDDNFCKDEDFSTSSVWRSYATRRQTRGQKENGLSETTSKDSHPPDLGPPHIPVPPSIPVGGCNPPSSEETPKNKVASWLSCNSVSEGGFADSDSHSSFKTNEGGEGRAGGSRMEAEKASTSGLGIKDEGDIKQAKKEDTDDRNKMSVVTESSRNYGYNPSPVKPEGLRRPPSKTSMHQSRRLMASAQSNPDDVLTLSSSTESEGESGTSRKPTAGQTSATAVDSDDIQTISSGSEGDDFEDKKNMTGPMKRQVAVKSTRGFALKSTHGIAIKSTNMASVDKGESAPVRKNTRQFYDGEESCYIIDAKLEGNLGRYLNHSCSPNLFVQNVFVDTHDLRFPWVAFFASKRIRAGTELTWDYNYEVGSVEGKELLCCCGAIECRGRLL

SEQ ID NO: 900338 - protein, 1164 aa, Homo sapiens; identical to SEQ ID NO: 900335

SEQ ID NO: 900339 - protein, 1050 aa, Homo sapiens
MSSLPGCIGLDAATATVESEEIAELQQAVVEELGISMEELRHFIDEELEKMDCVQQRKKQLAELETWVIQKESEVAHVDQLFDDASRAVTNCESLVKDFYSKLGLQYRDSSSEDESSRPTEIIEIPDEDDDVLSIDSGDAGSRTPKDQKLREAMAALRKSAQDVQKFMDAVNKKSSSQDLHKGTLSQMSGELSKDGDLIVSMRILGKKRTKTWHKGTLIAIQTVGPGKKYKVKFDNKGKSLLSGNHIAYDYHPPADKLYVGSRVVAKYKDGNQVWLYAGIVAETPNVKNKLRFLIFFDDGYASYVTQSELYPICRPLKKTWEDIEDISCRDFIEEYVTAYPNRPMVLLKSGQLIKTEWEGTWWKSRVEEVDGSLVRILFLDDKRCEWIYRGSTRLEPMFSMKTSSASALEKKQGQLRTRPNMGAVRSKGPVVQYTQDLTGTGTQFKPVEPPQPTAPPAPPFPPAPPLSPQAGDSDLESQLAQSRKQVAKKSTSFRPGSVGSGHSSPTSPALSENVSGGKPGINQTYRSPLGSTASAPAPSALPAPPAPPVFHGMLERAPAEPSYRAPMEKLFYLPHVCSYTCLSRVRPMRNEQYRGKNPLLVPLLYDFRRMTARRRVNRKMGFHVIYKTPCGLCLRTMQEIERYLFETGCDFLFLEMFCLDPYVLVDRKFQPYKPFYYILDITYGKEDVPLSCVNEIDTTPPPQVAYSKERIPGKGVFINTGPEFLVGCDCKDGCRDKSKCACHQLTIQATACTPGGQINPNSGYQYKRLEECLPTGVYECNKRCKCDPNMCTNRLVQHGLQVRLQLFKTQNKGWGIRCLDDIAKGSFVCIYAGKILTDDFADKEGLEMGDEYFANLDHIESVENFKEGYESDAPCSSDSSGVDLKDQEDGNSGTEDPEESNDDSSDDNFCKDEDFSTSSVWRSYATRRQTRGQKENGLSETTSKDSHPPDLGPPHIPVPPSIPVGGCNPPSSEETPKNKVASWLSCNSVSEGGFADSDSHSSFKTNEGGEGRAGGSRMEAEKASTSGLGIKDEGDIKQAKKEVSSGRTL

SEQ ID NO: 900340 - protein, 1050 aa, Homo sapiens; identical to SEQ ID NO: 900339

SEQ ID NO: 900341 - protein, 80 aa, Homo sapiens
PGSYLILSLNLQHSCSPNLFVQNVFVDTHDLRFPWVAFFASKRIRAGTELTWDYNYEVGSVEGKELLCCCGAIECRGRLL

SEQ ID NO: 900342 - protein, 1291 aa, Homo sapiens; identical to SEQ ID NO: 900333

SEQ ID NO: 900343 - protein, 1291 aa, Homo sapiens; identical to SEQ ID NO: 900333

SEQ ID NO: 900344 - protein, 1376 aa, Homo sapiens
MSSLPGCIGLDAATATVESEEIAELQQAVVEELGISMEELRHFIDEELEKMDCVQQRKKQLAELETWVIQKESEVAHVDQLFDDASRAVTNCESLVKDFYSKLGLQYRDSSSEDESSRPTEIIEIPDEDDDVLSIDSGDAGSRTPKDQKLREAMAALRKSAQDVQKFMDAVNKKSSSQDLHKGTLSQMSGELSKDGDLIVSMRILGKKRTKTWHKGTLIAIQTVGPGKKYKVKFDNKGKSLLSGNHIAYDYHPPADKLYVGSRVVAKYKDGNQVWLYAGIVAETPNVKNKLRFLIFFDDGYASYVTQSELYPICRPLKKTWEDIEDISCRDFIEEYVTAYPNRPMVLLKSGQLIKTEWEGTWWKSRVEEVDGSLVRILFLDDKRCEWIYRGSTRLEPMFSMKTSSASALEKKQGQLRTRPNMGAVRSKGPVVQYTQDLTGTGTQFKPVEPPQPTAPPAPPFPPAPPLSPQAGDSDLESQLAQSRKQVAKKSTSFRPGSVGSGHSSPTSPALSENVSGGKPGINQTYRSPLGSTASAPAPSALPAPPAPPVFHGMLERAPAEPSYRAPMEKLFYLPHVCSYTCLSRVRPMRNEQYRGKNPLLVPLLYDFRRMTARRRVNRKMGFHVIYKTPCGLCLRTMQEIERYLFETGCDFLFLEMFCLDPYVLVDRKFQPYKPFYYILDITYGKEDVPLSCVNEIDTTPPPQVAYSKERIPGKGVFINTGPEFLVGCDCKDGCRDKSKCACHQLTIQATACTPGGQINPNSGYQYKRLEECLPTGVYECNKRCKCDPNMCTNRLVQHGLQVRLQLFKTQNKGWGIRCLDDIAKGSFVCIYAGKILTDDFADKEGLEMGDEYFANLDHIESVENFKEGYESDAPCSSDSSGVDLKDQEDGNSGTEDPEESNDDSSDDNFCKDEDFSTSSVWRSYATRRQTRGQKENGLSETTSKDSHPPDLGPPHIPVPPSIPVGGCNPPSSEETPKNKVASWLSCNSVSEGGFADSDSHSSFKTNEGGEGRAGGSRMEAEKASTSGLGIKDEGDIKQAKKEDTDDRNKMSVVTESSRNYGYNPSPVKPEGLRRPPSKTSMHQSRRLMASAQSNPDVSHLKLIQSLIKENGHCHLIKSFTIITVRSSPTSSSLDCAALFSFIQHLIFLLPPPFPAKPWVTARTERSPSHLLLLLLTLLLPQDVLTLSSSTESEGESGTSRKPTAGQTSATAVDSDDIQTISSGSEGDDFEDKKNMTGPMKRQVAVKSTRGFALKSTHGIAIKSTNMASVDKGESAPVRKNTRQFYDGEESCYIIDAKLEGNLGRYLNHSCSPNLFVQNVFVDTHDLRFPWVAFFASKRIRAGTELTWDYNYEVGSVEGKELLCCCGAIECRGRLL

SEQ ID NO: 900345 - protein, 971 aa, Homo sapiens
MPYLPSQFYFFLETEYVTAYPNRPMVLLKSGQLIKTEWEGTWWKSRVEEVDGSLVRILFLDDKRCEWIYRGSTRLEPMFSMKTSSASALEKKQGQLRTRPNMGAVRSKGPVVQYTQDLTGTGTQFKPVEPPQPTAPPAPPFPPAPPLSPQAGDSDLESQLAQSRKQVAKKSTSFRPGSVGSGHSSPTSPALSENVSGGKPGINQTYRSPLGSTASAPAPSALPAPPAPPVFHGMLERAPAEPSYRAPMEKLFYLPHVCSYTCLSRVRPMRNEQYRGKNPLLVPLLYDFRRMTARRRVNRKMGFHVIYKTPCGLCLRTMQEIERYLFETGCDFLFLEMFCLDPYVLVDRKFQPYKPFYYILDITYGKEDVPLSCVNEIDTTPPPQVAYSKERIPGKGVFINTGPEFLVGCDCKDGCRDKSKCACHQLTIQATACTPGGQINPNSGYQYKRLEECLPTGVYECNKRCKCDPNMCTNRLVQHGLQVRLQLFKTQNKGWGIRCLDDIAKGSFVCIYAGKILTDDFADKEGLEMGDEYFANLDHIESVENFKEGYESDAPCSSDSSGVDLKDQEDGNSGTEDPEESNDDSSDDNFCKDEDFSTSSVWRSYATRRQTRGQKENGLSETTSKDSHPPDLGPPHIPVPPSIPVGGCNPPSSEETPKNKVASWLSCNSVSEGGFADSDSHSSFKTNEGGEGRAGGSRMEAEKASTSGLGIKDEGDIKQAKKEDTDDRNKMSVVTESSRNYGYNPSPVKPEGLRRPPSKTSMHQSRRLMASAQSNPDDVLTLSSSTESEGESGTSRKPTAGQTSATAVDSDDIQTISSGSEGDDFEDKKNMTGPMKRQVAVKSTRGFALKSTHGIAIKSTNMASVDKGESAPVRKNTRQFYDGEESCYIIDAKLEGNLGRYLNHSCSPNLFVQNVFVDTHDLRFPWVAFFASKRIRAGTELTWDYNYEVGSVEGKELLCCCGAIECRGRLL

SEQ ID NO: 900346 - protein, 443 aa, Homo sapiens
MGDEYFANLDHIESVENFKEGYESDAPCSSDSSGVDLKDQEDGNSGTEDPEESNDDSSDDNFCKDEDFSTSSVWRSYATRRQTRGQKENGLSETTSKDSHPPDLGPPHIPVPPSIPVGGCNPPSSEETPKNKVASWLSCNSVSEGGFADSDSHSSFKTNEGGEGRAGGSRMEAEKASTSGLGIKDEGDIKQAKKEDTDDRNKMSVVTESSRNYGYNPSPVKPEGLRRPPSKTSMHQSRRLMASAQSNPDDVLTLSSSTESEGESGTSRKPTAGQTSATAVDSDDIQTISSGSEGDDFEDKKNMTGPMKRQVAVKSTRGFALKSTHGIAIKSTNMASVDKGESAPVRKNTRQFYDGEESCYIIDAKLEGNLGRYLNHSCSPNLFVQNVFVDTHDLRFPWVAFFASKRIRAGTELTWDYNYEVGSVEGKELLCCCGAIECRGRLL

SEQ ID NO: 900347 - protein, 188 aa, Homo sapiens
MEGPDSSYSCLLIHICWKVDSEARMEPPIHTEYLRSGGADDLEDKKDMTGPMKRQVAVKSTRGFALKSTHGIAIKSTNMASVDKGESAPVRKNTRQFYDGEESCYIIDAKLEGNLGRYLNHSCSPNLFVQNVFVDTHDLRFPWVAFFASKRIRAGTELTWDYNYEVGSVEGKELLCCCGAIECRGRLL

SEQ ID NO: 900348 - protein, 397 aa, Homo sapiens; identical to SEQ ID NO: 900332

SEQ ID NO: 900349 - protein, 183 aa, Homo sapiens
MSSLPGCIGLDAATATVESEEIAELQQAVVEELGISMEELRHFIDEELEKMDCVQQRKKQLAELETWVIQKESEVAHVDQLFDDASRAVTNCESLVKDFYSKLGLQYRDSSSEDESSRPTEIIEIPDEDDDVLSIDSGDAGSRTPKDQKLREAMAALRKSAQDVQKFMDAVNKKSSSQDLHKG

SEQ ID NO: 900350 - protein, 255 aa, Homo sapiens
QESGRGDVIAARRQEVRSWPVQLGFPSFCLRHLRDLLSPPILSVMDDAHESPSDKGGETGESDETAAVPGDPGATDTDGIPEETDGDADVDLKEAAAEEGELESQDVSDLTTVEREDSSLLNPAAKKLKIDTKEKKEKKQKVDEDEIQKMQILVSSFSEEQLNRYEMYRRSAFPKAAIKRLIQSITGTSVSQNVVIAMSGISKVFVGEVVEEALDVCEKWGEMPPLQPKHMREAVRRLKSKGQIPNSKHKKIIFF

SEQ ID NO: 900351 - protein, 244 aa, Homo sapiens
ARYEAGVNRQRLGFPSFCLRHLRDLLSPPILSVMDDAHESPSDKGGETGESDETAAVPGDPGATDTDGIPEETDGDADVDLKEAAAEEGELESQDVSDLTTVEREDSSLLNPAAKKLKIDTKEKKEKKQKVDEDEIQKMQILVSSFSEEQLNRYEMYRRSAFPKAAIKRLIQSITGTSVSQNVVIAMSGISKVFVGEVVEEALDVCEKWGEMPPLQPKHMREAVRRLKSKGQIPNSKHKKIIFF

SEQ ID NO: 900352 - protein, 198 aa, Homo sapiens
QESGRGDVIAARRQEVRSWPVQLGFPSFCLRHLRDLLSPPILSVMDDAHESPSDKGGETGESDETAAVPGDPGATDTDGIPEETDGDADVDLKEAAAEEGELESQDVSDLTTVEREDSSLLNPAAKKLKIDTKEKKEKKQKVDEDEIQKMQILVSSFSEEQLNRYEMYRRSAFPKAAIKRHWMCVRSGEKCHHYNPNI

SEQ ID NO: 900353 - protein, 115 aa, Homo sapiens
ARYEAGVNRQRLGFPSFCLRHLRDLLSPPILSVMDDAHESPSDKGGETGESDETAAVPGDPGATDTDGIPEETDGDADVDLKEAAAEEGEAGRDVLMRLKEYPEIVLLAARRASG

SEQ ID NO: 900354 - protein, 255 aa, Homo sapiens; identical to SEQ ID NO: 900350

SEQ ID NO: 900355 - protein, 214 aa, Homo sapiens
QESGRGDVIAARRQEVRSWPVQLGFPSFCLRHLRDLLSPPILSVMDDAHESPSDKGGETGESDETAAVPGDPGATDTDGIPEETDGDADVDLKEAAAEEGELESQDVSDLTTVEREDSSLLNPAAKKLKIDTKEKKEKKQKVDEDEIQKMQILVSSFSEEQLNRYEMYRRSAFPKAAIKRLIQSITGTSVSQNVVIAMSGISKVFVGEVVEEGE

SEQ ID NO: 900356 - protein, 187 aa, Homo sapiens
QESGRGDVIAARRQEVRSWPVQLGFPSFCLRHLRDLLSPPILSVMDDAHESPSDKGGETGESDETAAVPGDPGATDTDGIPEETDGDADVDLKEAAAEEGELESQDVSDLTTVEREDSSLLNPAAKKLKIDTKEKKEKKQKVDEDEIQKMQILVSSFSEEQLNRYEMYRRSAFPKAAIKRTFSLPSV

SEQ ID NO: 900357 - protein, 1452 aa, Homo sapiens
MRTLGTCLATLAGLLLTAAGETFSGGCLFDEPYSTCGYSQSEGDDFNWEQVNTLTKPTSDPWMPSGSFMLVNASGRPEGQRAHLLLPQLKENDTHCIDFHYFVSSKSNSPPGLLNVYVKVNNGPLGNPIWNISGDPTRTWNRAELAISTFWPNFYQVIFEVITSGHQGYLAIDEVKVLGHPCTRTPHFLRIQNVEVNAGQFATFQCSAIGRTVAGDRLWLQGIDVRDAPLKEIKVTSSRRFIASFNVVNTTKRDAGKYRCMIRTEGGVGISNYAELVVKEPPVPIAPPQLASVGATYLWIQLNANSINGDGPIVAREVEYCTASGSWNDRQPVDSTSYKIGHLDPDTEYEISVLLTRPGEGGTGSPGPALRTRTKCADPMRGPRKLEVVEVKSRQITIRWEPFGYNVTRCHSYNLTVHYCYQVGGQEQVREEVSWDTENSHPQHTITNLSPYTNVSVKLILMNPEGRKESQELIVQTDEDLPGAVPTESIQGSTFEEKIFLQWREPTQTYGVITLYEITYKAVSSFDPEIDLSNQSGRVSKLGNETHFLFFGLYPGTTYSFTIRASTAKGFGPPATNQFTTKISAPSMPAYELETPLNQTDNTVTVMLKPAHSRGAPVSVYQIVVEEERPRRTKKTTEILKCYPVPIHFQNASLLNSQYYFAAEFPADSLQAAQPFTIGDNKTYNGYWNTPLLPYKSYRIYFQAASRANGETKIDCVQVATKGAATPKPVPEPEKQTDHTVKIAGVIAGILLFVIIFLGVVLVMKKRKLAKKRKETMSSTRQEMTVMVNSMDKSYAEQGTNCDEAFSFMDTHNLNGRSVSSPSSFTMKTNTLSTSVPNSYYPDETHTMASDTSSLVQSHTYKKREPADVPYQTGQLHPAIRVADLLQHITQMKCAEGYGFKEEYESFFEGQSAPWDSAKKDENRMKNRYGNIIAYDHSRVRLQTIEGDTNSDYINGNYIDGYHRPNHYIATQGPMQETIYDFWRMVWHENTASIIMVTNLVEVGRVKCCKYWPDDTEIYKDIKVTLIETELLAEYVIRTFAVEKRGVHEIREIRQFHFTGWPDHGVPYHATGLLGFVRQVKSKSPPSAGPLVVHCSAGAGRTGCFIVIDIMLDMAEREGVVDIYNCVRELRSRRVNMVQTEEQYVFIHDAILEACLCGDTSVPASQVRSLYYDMNKLDPQTNSSQIKEEFRTLNMVTPTLRVEDCSIALLPRNHEKNRCMDILPPDRCLPFLITIDGESSNYINAALMDSYKQPSAFIVTQHPLPNTVKDFWRLVLDYHCTSVVMLNDVDPAQLCPQYWPENGVHRHGPIQVEFVSADLEEDIISRIFRIYNAARPQDGYRMVQQFQFLGWPMYRDTPVSKRSFLKLIRQVDKWQEEYNGGEGRTVVHCLNGGGRSGTFCAISIVCEMLRHQRTVDVFHAVKTLRNNKPNMVDLLDQYKFCYEVALEYLNSG

SEQ ID NO: 900358 - protein, 1535 aa, Homo sapiens
RVLWPNPVRVSSSGLLPEHASLILPFITDPSVKTLFCLNLPGTLCNTWDQEFEDSNQTNQTTSSSGETRSPTGRGRIIIKNTDKTRDCLKNMIPDELERIQSRLYGPGGCLFDEPYSTCGYSQSEGDDFNWEQVNTLTKPTSDPWMPSGSFMLVNASGRPEGQRAHLLLPQLKENDTHCIDFHYFVSSKSNSPPGLLNVYVKVNNGPLGNPIWNISGDPTRTWNRAELAISTFWPNFYQVIFEVITSGHQGYLAIDEVKVLGHPCTRTPHFLRIQNVEVNAGQFATFQCSAIGRTVAGDRLWLQGIDVRDAPLKEIKVTSSRRFIASFNVVNTTKRDAGKYRCMIRTEGGVGISNYAELVVKEPPVPIAPPQLASVGATYLWIQLNANSINGDGPIVAREVEYCTASGSWNDRQPVDSTSYKIGHLDPDTEYEISVLLTRPGEGGTGSPGPALRTRTKCADPMRGPRKLEVVEVKSRQITIRWEPFGYNVTRCHSYNLTVHYCYQVGGQEQVREEVSWDTENSHPQHTITNLSPYTNVSVKLILMNPEGRKESQELIVQTDEDLPGAVPTESIQGSTFEEKIFLQWREPTQTYGVITLYEITYKAVSSFDPEIDLSNQSGRVSKLGNETHFLFFGLYPGTTYSFTIRASTAKGFGPPATNQFTTKISAPSMPAYELETPLNQTDNTVTVMLKPAHSRGAPVSVYQIVVEEERPRRTKKTTEILKCYPVPIHFQNASLLNSQYYFAAEFPADSLQAAQPFTIGDNKTYNGYWNTPLLPYKSYRIYFQAASRANGETKIDCVQVATKGAATPKPVPEPEKQTDHTVKIAGVIAGILLFVIIFLGVVLVMKKRKLAKKRKETMSSTRQEMTVMVNSMDKSYAEQGTNCDEAFSFMDTHNLNGRSVSSPSSFTMKTNTLSTSVPNSYYPDETHTMASDTSSLVQSHTYKKREPADVPYQTGQLHPAIRVADLLQHITQMKCAEGYGFKEEYESFFEGQSAPWDSAKKDENRMKNRYGNIIAYDHSRVRLQTIEGDTNSDYINGNYIDGYHRPNHYIATQGPMQETIYDFWRMVWHENTASIIMVTNLVEVGRVKCCKYWPDDTEIYKDIKVTLIETELLAEYVIRTFAVEKRGVHEIREIRQFHFTGWPDHGVPYHATGLLGFVRQVKSKSPPSAGPLVVHCSAGAGRTGCFIVIDIMLDMAEREGVVDIYNCVRELRSRRVNMVQTEEQYVFIHDAILEACLCGDTSVPASQVRSLYYDMNKLDPQTNSSQIKEEFRTLNMVTPTLRVEDCSIALLPRNHEKNRCMDILPPDRCLPFLITIDGESSNYINAALMDSYKQPSAFIVTQHPLPNTVKDFWRLVLDYHCTSVVMLNDVDPAQLCPQYWPENGVHRHGPIQVEFVSADLEEDIISRIFRIYNAARPQDGYRMVQQFQFLGWPMYRDTPVSKRSFLKLIRQVDKWQEEYNGGEGRTVVHCLNGGGRSGTFCAISIVCEMLRHQRTVDVFHAVKTLRNNKPNMVDLLDQYKFCYEVALEYLNSG

SEQ ID NO: 900359 - protein, 1552 aa, Homo sapiens
RVLWPNPVRVSSSGLLPEHASLILPFITDPSVKTLFCLNLPGTLCNTWDQEFEDSNQTNQTTSSSGETRSPTGRGRIIIKNTDKTRDCLKNMIPDELERIQSRLYGPGGCLFDEPYSTCGYSQSEGDDFNWEQVNTLTKPTSDPWMPSGSFMLVNASGRPEGQRAHLLLPQLKENDTHCIDFHYFVSSKSNSPPGLLNVYVKVNNGPLGNPIWNISGDPTRTWNRAELAISTFWPNFYQVIFEVITSGHQGYLAIDEVKVLGHPCTRTPHFLRIQNVEVNAGQFATFQCSAIGRTVAGDRLWLQGIDVRDAPLKEIKVTSSRRFIASFNVVNTTKRDAGKYRCMIRTEGGVGISNYAELVVKEPPVPIAPPQLASVGATYLWIQLNANSINGDGPIVAREVEYCTASGSWNDRQPVDSTSYKIGHLDPDTEYEISVLLTRPGEGGTGSPGPALRTRTKCADPMRGPRKLEVVEVKSRQITIRWEPFGYNVTRCHSYNLTVHYCYQVGGQEQVREEVSWDTENSHPQHTITNLSPYTNVSVKLILMNPEGRKESQELIVQTDEDLPGAVPTESIQGSTFEEKIFLQWREPTQTYGVITLYEITYKAVSSFDPEIDLSNQSGRVSKLGNETHFLFFGLYPGTTYSFTIRASTAKGFGPPATNQFTTKISAPSMPAYELETPLNQTDNTVTVMLKPAHSRGAPVSVYQIVVEEERPRRTKKTTEILKCYPVPIHFQNASLLNSQYYFAAEFPADSLQAAQPFTIGDNKTYNGYWNTPLLPYKSYRIYFQAASRANGETKIDCVQVATKGAATPKPVPEPEKQTDHTVKIAGVIAGILLFVIIFLGVVLVMKKRKLAKKRKETMSSTRQEMTVMVNSMDKSYAEQGTNCDEAFSFMDTHNLNGRSVSSPSSFTMKTNTLSTSVPNSYYPDETHTMASDTSSLVQSHTYKKREPADVPYQTGQLHPAIRVADLLQHITQMKCAEGYGFKEEYESFFEGQSAPWDSAKKDENRMKNRYGNIIAYDHSRVRLQTIEGDTNSDYINGNYIDGYHRPNHYIATQGPMQETIYDFWRMVWHENTASIIMVTNLVEVGRVKCCKYWPDDTEIYKDIKVTLIETELLAEYVIRTFAVEKGGAGGEANCSPSREVSQRGVHEIREIRQFHFTGWPDHGVPYHATGLLGFVRQVKSKSPPSAGPLVVHCSAGAGRTGCFIVIDIMLDMAEREGVVDIYNCVRELRSRRVNMVQTEEQYVFIHDAILEACLCGDTSVPASQVRSLYYDMNKLDPQTNSSQIKEEFRTLNMVTPTLRVEDCSIALLPRNHEKNRCMDILPPDRCLPFLITIDGESSNYINAALMDSYKQPSAFIVTQHPLPNTVKDFWRLVLDYHCTSVVMLNDVDPAQLCPQYWPENGVHRHGPIQVEFVSADLEEDIISRIFRIYNAARPQDGYRMVQQFQFLGWPMYRDTPVSKRSFLKLIRQVDKWQEEYNGGEGRTVVHCLNGGGRSGTFCAISIVCEMLRHQRTVDVFHAVKTLRNNKPNMVDLLDQYKFCYEVALEYLNSG

SEQ ID NO: 900360 - protein, 765 aa, Homo sapiens
MLTWKSSFALAAIIVTQLTTPYIRIAPAAGDGQLTGAATPKPVPEPEKQTDHTVKIAGVIAGILLFVIIFLGVVLVMKKRKLAKKRKETMSSTRQEMTVMVNSMDKSYAEQGTNCDEAFSFMDTHNLNGRSVSSPSSFTMKTNTLSTSVPNSYYPDETHTMASDTSSLVQSHTYKKREPADVPYQTGQLHPAIRVADLLQHITQMKCAEGYGFKEEYESFFEGQSAPWDSAKKDENRMKNRYGNIIAYDHSRVRLQTIEGDTNSDYINGNYIDGYHRPNHYIATQGPMQETIYDFWRMVWHENTASIIMVTNLVEVGRVKCCKYWPDDTEIYKDIKVTLIETELLAEYVIRTFAVEKRGVHEIREIRQFHFTGWPDHGVPYHATGLLGFVRQVKSKSPPSAGPLVVHCSAGAGRTGCFIVIDIMLDMAEREGVVDIYNCVRELRSRRVNMVQTEEQYVFIHDAILEACLCGDTSVPASQVRSLYYDMNKLDPQTNSSQIKEEFRTLNMVTPTLRVEDCSIALLPRNHEKNRCMDILPPDRCLPFLITIDGESSNYINAALMDSYKQPSAFIVTQHPLPNTVKDFWRLVLDYHCTSVVMLNDVDPAQLCPQYWPENGVHRHGPIQVEFVSADLEEDIISRIFRIYNAARPQDGYRMVQQFQFLGWPMYRDTPVSKRSFLKLIRQVDKWQEEYNGGEGRTVVHCLNGGGRSGTFCAISIVCEMLRHQRTVDVFHAVKTLRNNKPNMVDLLDQYKFCYEVALEYLNSG

SEQ ID NO: 900361 - protein, 449 aa, Homo sapiens
YCPQKHTLRCNNNEGHGPQNITLIETELLAEYVIRTFAVEKRGVHEIREIRQFHFTGWPDHGVPYHATGLLGFVRQVKSKSPPSAGPLVVHCSAGAGRTGCFIVIDIMLDMAEREGVVDIYNCVRELRSRRVNMVQTEEQYVFIHDAILEACLCGDTSVPASQVRSLYYDMNKLDPQTNSSQIKEEFRTLNMVTPTLRVEDCSIALLPRNHEKNRCMDILPPDRCLPFLITIDGESSNYINAALMDSYKQPSAFIVTQHPLPNTVKDFWRLVLDYHCTSVVMLNDVDPAQLCPQYWPENGVHRHGPIQVEFVSADLEEDIISRIFRIYNAARPQDGYRMVQQFQFLGWPMYRDTPVSKRSFLKLIRQVDKWQEEYNGGEGRTVVHCLNGGGRSGTFCAISIVCEMLRHQRTVDVFHAVKTLRNNKPNMVDLLDQYKFCYEVALEYLNSG

SEQ ID NO: 900362 - protein, 1535 aa, Homo sapiens; identical to SEQ ID NO: 900358

SEQ ID NO: 900363 - protein, 279 aa, Homo sapiens
MNKLDPQTNSSQIKEEFRTLNMVTPTLRVEDCSIALLPRNHEKNRCMDILPPDRCLPFLITIDGESSNYINAALMDSYKQPSAFIVTQHPLPNTVKDFWRLVLDYHCTSVVMLNDVDPAQLCPQYWPENGVHRHGPIQVEFVSADLEEDIISRIFRIYNAARPQDGYRMVQQFQFLGWPMYRDTPVSKRSFLKLIRQVDKWQEEYNGGEGRTVVHCLNGGGRSGTFCAISIVCEMLRHQRTVDVFHAVKTLRNNKPNMVDLLDQYKFCYEVALEYLNSG

SEQ ID NO: 900364 - protein, 1452 aa, Homo sapiens; identical to SEQ ID NO: 900357

SEQ ID NO: 900365 - protein, 1239 aa, Homo sapiens
MGTLSLHPGIDVRDAPLKEIKVTSSRRFIASFNVVNTTKRDAGKYRCMIRTEGGVGISNYAELVVKEPPVPIAPPQLASVGATYLWIQLNANSINGDGPIVAREVEYCTASGSWNDRQPVDSTSYKIGHLDPDTEYEISVLLTRPGEGGTGSPGPALRTRTKCADPMRGPRKLEVVEVKSRQITIRWEPFGYNVTRCHSYNLTVHYCYQVGGQEQVREEVSWDTENSHPQHTITNLSPYTNVSVKLILMNPEGRKESQELIVQTDEDLPGAVPTESIQGSTFEEKIFLQWREPTQTYGVITLYEITYKAVSSFDPEIDLSNQSGRVSKLGNETHFLFFGLYPGTTYSFTIRASTAKGFGPPATNQFTTKISAPSMPAYELETPLNQTDNTVTVMLKPAHSRGAPVSVYQIVVEEERPRRTKKTTEILKCYPVPIHFQNASLLNSQYYFAAEFPADSLQAAQPFTIGDNKTYNGYWNTPLLPYKSYRIYFQAASRANGETKIDCVQVATKGAATPKPVPEPEKQTDHTVKIAGVIAGILLFVIIFLGVVLVMKKRKLAKKRKETMSSTRQEMTVMVNSMDKSYAEQGTNCDEAFSFMDTHNLNGRSVSSPSSFTMKTNTLSTSVPNSYYPDETHTMASDTSSLVQSHTYKKREPADVPYQTGQLHPAIRVADLLQHITQMKCAEGYGFKEEYESFFEGQSAPWDSAKKDENRMKNRYGNIIAYDHSRVRLQTIEGDTNSDYINGNYIDGYHRPNHYIATQGPMQETIYDFWRMVWHENTASIIMVTNLVEVGRVKCCKYWPDDTEIYKDIKVTLIETELLAEYVIRTFAVEKRGVHEIREIRQFHFTGWPDHGVPYHATGLLGFVRQVKSKSPPSAGPLVVHCSAGAGRTGCFIVIDIMLDMAEREGVVDIYNCVRELRSRRVNMVQTEEQYVFIHDAILEACLCGDTSVPASQVRSLYYDMNKLDPQTNSSQIKEEFRTLNMVTPTLRVEDCSIALLPRNHEKNRCMDILPPDRCLPFLITIDGESSNYINAALMDSYKQPSAFIVTQHPLPNTVKDFWRLVLDYHCTSVVMLNDVDPAQLCPQYWPENGVHRHGPIQVEFVSADLEEDIISRIFRIYNAARPQDGYRMVQQFQFLGWPMYRDTPVSKRSFLKLIRQVDKWQEEYNGGEGRTVVHCLNGGGRSGTFCAISIVCEMLRHQRTVDVFHAVKTLRNNKPNMVDLLDQYKFCYEVALEYLNSG

SEQ ID NO: 900366 - protein, 524 aa, Homo sapiens
MINQLVPDINLPIESQEATEITAHINGIYSPAFIIDPNITLCTQGPMQETIYDFWRMVWHENTASIIMVTNLVEVGRVKCCKYWPDDTEIYKDIKVTLIETELLAEYVIRTFAVEKRGVHEIREIRQFHFTGWPDHGVPYHATGLLGFVRQVKSKSPPSAGPLVVHCSAGAGRTGCFIVIDIMLDMAEREGVVDIYNCVRELRSRRVNMVQTEEQYVFIHDAILEACLCGDTSVPASQVRSLYYDMNKLDPQTNSSQIKEEFRTLNMVTPTLRVEDCSIALLPRNHEKNRCMDILPPDRCLPFLITIDGESSNYINAALMDSYKQPSAFIVTQHPLPNTVKDFWRLVLDYHCTSVVMLNDVDPAQLCPQYWPENGVHRHGPIQVEFVSADLEEDIISRIFRIYNAARPQDGYRMVQQFQFLGWPMYRDTPVSKRSFLKLIRQVDKWQEEYNGGEGRTVVHCLNGGGRSGTFCAISIVCEMLRHQRTVDVFHAVKTLRNNKPNMVDLLDQYKFCYEVALEYLNSG

SEQ ID NO: 900367 - protein, 1535 aa, Homo sapiens; identical to SEQ ID NO: 900358

SEQ ID NO: 900368 - protein, 1230 aa, Homo sapiens
RVLWPNPVRVSSSGLLPEHASLILPFITDPSVKTLFCLNLPGTLCNTWDQEFEDSNQTNQTTSSSGETRSPTGRGRIIIKNTDKTRDCLKNMIPDELERIQSRLYGPGGCLFDEPYSTCGYSQSEGDDFNWEQVNTLTKPTSDPWMPSGSFMLVNASGRPEGQRAHLLLPQLKENDTHCIDFHYFVSSKSNSPPGLLNVYVKVNNGPLGNPIWNISGDPTRTWNRAELAISTFWPNFYQVIFEVITSGHQGYLAIDEVKVLGHPCTRTPHFLRIQNVEVNAGQFATFQCSAIGRTVAGDRLWLQGIDVRDAPLKEIKVTSSRRFIASFNVVNTTKRDAGKYRCMIRTEGGVGISNYAELVVKEPPVPIAPPQLASVGATYLWIQLNANSINGDGPIVAREVEYCTASGSWNDRQPVDSTSYKIGHLDPDTEYEISVLLTRPGEGGTGSPGPALRTRTKCADPMRGPRKLEVVEVKSRQITIRWEPFGYNVTRCHSYNLTVHYCYQVGGQEQVREEVSWDTENSHPQHTITNLSPYTNVSVKLILMNPEGRKESQELIVQTDEDLPGAVPTESIQGSTFEEKIFLQWREPTQTYGVITLYEITYKAVSSFDPEIDLSNQSGRVSKLGNETHFLFFGLYPGTTYSFTIRASTAKGFGPPATNQFTTKISAPSMPAYELETPLNQTDNTVTVMLKPAHSRGAPVSVYQIVVEEERPRRTKKTTEILKCYPVPIHFQNASLLNSQYYFAAEFPADSLQAAQPFTIGDNKTYNGYWNTPLLPYKSYRIYFQAASRANGETKIDCVQVATKGAATPKPVPEPEKQTDHTVKIAGVIAGILLFVIIFLGVVLVMKKRKLAKKRKETMSSTRQEMTVMVNSMDKSYAEQGTNCDEAFSFMDTHNLNGRSVSSPSSFTMKTNTLSTSVPNSYYPDETHTMASDTSSLVQSHTYKKREPADVPYQTGQLHPAIRVADLLQHITQMKCAEGYGFKEEYESFFEGQSAPWDSAKKDENRMKNRYGNIIAYDHSRVRLQTIEGDTNSDYINGNYIDGYHRPNHYIATQGPMQETIYDFWRMVWHENTASIIMVTNLVEVGRVKCCKYWPDDTEIYKDIKVTLIETELLAEYVIRTFAVEKRGVHEIREIRQFHFTGWPDHGVPYHATGLLGFVRQVKSKSPPSAGPLVVHCSAGAGRTGCFIVIDIMLDMAEREGVVDIYNCVRELRSRRVNMVQTEVLPLIT

SEQ ID NO: 900369 - protein, 396 aa, Homo sapiens
MERSGQRVTTWDCDQGKHSDSDYREDGMDLGSDAGSSSSSSRASSQSNSTKVTPCSECKSSSSPGGSLDLVSALEDYEEPFPVYQKKVIDEWAPEEDGEEEEEEDERDQRGYRDDRSPAREPGDVSARTRSGGGGGRSATTAMPPPVPNGNLHQHDPQDLRHNGNVVVAGRPSCSRGPRRAIQKPQPAGGRRSGRGPAAGGLCLQPPDGGTCVPEEPPVPPMDWEALEKHLAGLQFREQEVRNQGQARTNSTSAQKNERESIRQKLALGSFFDDGPGIYTSCSKSGKPSLSSRLQSGMNLQICFVNDSGSDKDSDADDSKTETSLDTPLSPMSKQSSSYSDRDTTEEESESLDDMDFLTRQKKLQAEAKMALAMAKPMAKMQVEVEKQNRKKVSRR

SEQ ID NO: 900370 - protein, 383 aa, Homo sapiens
MERSGQRVTTWDCDQGKHSDSDYREDGMDLGSDAGSSSSSSRASSQSNSTKVTPCSECKSSSSPGGSLDLVSALEDYEEPFPVYQKKVIDEWAPEEDGEEEEEEDERDQRGYRDDRSPAREPGDVSARTRSGGGGGRSATTAMPPPVPNGNLHQHDPQDLRHNGNVVVAGRPSCSRGPRRAIQKPQPAGGRRSGRGPAAGGLCLQPPDGGTCVPEEPPVPPMDWEALEKHLAGLQFREQEAQKNERESIRQKLALGSFFDDGPGIYTSCSKSGKPSLSSRLQSGMNLQICFVNDSGSDKDSDADDSKTETSLDTPLSPMSKQSSSYSDRDTTEEESESLDDMDFLTRQKKLQAEAKMALAMAKPMAKMQVEVEKQNRKKVSRR

SEQ ID NO: 900371 - protein, 153 aa, Homo sapiens
MVHQDNCSYQAQKNERESIRQKLALGSFFDDGPGIYTSCSKSGKPSLSSRLQSGMNLQICFVNDSGSDKDSDADDSKTETSLDTPLSPMSKQSSSYSDRDTTEEESESLDDMDFLTRQKKLQAEAKMALAMAKPMAKMQVEVEKQNRKKVSRR

SEQ ID NO: 900372 - protein, 369 aa, Homo sapiens
MDLGSDAGSSSSSSRASSQSNSTKVTPCSECKSSSSPGGSLDLVSALEDYEEPFPVYQKKVIDEWAPEEDGEEEEEEDERDQRGYRDDRSPAREPGDVSARTRSGGGGGRSATTAMPPPVPNGNLHQHDPQDLRHNGNVVVAGRPSCSRGPRRAIQKPQPAGGRRSGRGPAAGGLCLQPPDGGTCVPEEPPVPPMDWEALEKHLAGLQFREQEVRNQGQARTNSTSAQKNERESIRQKLALGSFFDDGPGIYTSCSKSGKPSLSSRLQSGMNLQICFVNDSGSDKDSDADDSKTETSLDTPLSPMSKQSSSYSDRDTTEEESESLDDMDFLTRQKKLQAEAKMALAMAKPMAKMQVEVEKQNRKKVSRR

SEQ ID NO: 900373 - protein, 472 aa, Homo sapiens
MRLEELKRLQNPLEQVNDGKYSFENHQLAMDAENNIEKYPLNLQPLESKVKIIQRAWREYLQRQEPLGKRSPSPPSVSSEKLSSSVSMNTFSDSSTPDYREDGMDLGSDAGSSSSSSRASSQSNSTKVTPCSECKSSSSPGGSLDLVSALEDYEEPFPVYQKKVIDEWAPEEDGEEEEEEDERDQRGYRDDRSPAREPGDVSARTRSGGGGGRSATTAMPPPVPNGNLHQHDPQDLRHNGNVVVAGRPSCSRGPRRAIQKPQPAGGRRSGRGPAAGGLCLQPPDGGTCVPEEPPVPPMDWEALEKHLAGLQFREQEVRNQGQARTNSTSAQKNERESIRQKLALGSFFDDGPGIYTSCSKSGKPSLSSRLQSGMNLQICFVNDSGSDKDSDADDSKTETSLDTPLSPMSKQSSSYSDRDTTEEESESLDDMDFLTRQKKLQAEAKMALAMAKPMAKMQVEVEKQNRKKVSRR

SEQ ID NO: 900374 - protein, 169 aa, Homo sapiens
MNLDSDGMDDIISQESSLDMEGNYKKAQKNERESIRQKLALGSFFDDGPGIYTSCSKSGKPSLSSRLQSGMNLQICFVNDSGSDKDSDADDSKTETSLDTPLSPMSKQSSSYSDRDTTEEESESLDDMDFLTRQKKLQAEAKMALAMAKPMAKMQVEVEKQNRKKVSRR

SEQ ID NO: 900375 - protein, 268 aa, Homo sapiens [sequence omitted]

SEQ ID NO: 900376 - protein, 153 aa, Homo sapiens; identical to SEQ ID NO: 900371

SEQ ID NO: 900377 - protein, 174 aa, Homo sapiens
MDLGSDAGSSSSSSRASSQSNSTKVTPCSECKSSSSPGGSLDLVSALEDYEEPFPVYQKKVIDEWAPEEDGEEEEEEDERDQRGYRDDRSPAREPGDVSARTRSGGGGGRSATTAMPPPVPNGNLHQHDPQDLRHNGNVVVAGRPSCSRGPRRAIQKPQPAGGRRSGRGPAAGG

SEQ ID NO: 900378 - protein, 153 aa, Homo sapiens; identical to SEQ ID NO: 900371

SEQ ID NO: 900379 - protein, 164 aa, Homo sapiens
MERSGQRVTTWDCDQGKHSDSAQKNERESIRQKLALGSFFDDGPGIYTSCSKSGKPSLSSRLQSGMNLQICFVNDSGSDKDSDADDSKTETSLDTPLSPMSKQSSSYSDRDTTEEESESLDDMDFLTRQKKLQAEAKMALAMAKPMAKMQVEVEKQNRKKVSRR

SEQ ID NO: 900380 - protein, 369 aa, Homo sapiens; identical to SEQ ID NO: 900372

SEQ ID NO: 900381 - protein, 386 aa, Homo sapiens
DPVSDALLAVQDYREDGMDLGSDAGSSSSSSRASSQSNSTKVTPCSECKSSSSPGGSLDLVSALEDYEEPFPVYQKKVIDEWAPEEDGEEEEEEDERDQRGYRDDRSPAREPGDVSARTRSGGGGGRSATTAMPPPVPNGNLHQHDPQDLRHNGNVVVAGRPSCSRGPRRAIQKPQPAGGRRSGRGPAAGGLCLQPPDGGTCVPEEPPVPPMDWEALEKHLAGLQFREQEVRNQGQARTNSTSAQKNERESIRQKLALGSFFDDGPGIYTSCSKSGKPSLSSRLQSGMNLQICFVNDSGSDKDSDADDSKTETSLDTPLSPMSKQSSSYSDRDTTEEESESLDDMDFLTRQKKLQAEAKMALAMAKPMAKMQVEVEKQNRKKVSRR

SEQ ID NO: 900382 - protein, 147 aa, Homo sapiens
MVHQDNCSYQAQKNERESIRQKLALGSFFDDGPGIYTSCSKSGKPSLSSRLQSGMNLQICFVNDSGSDKDSDADDSKTETSLDTPLSPMSKQSSSYSDRDTTEEESESLDDMDFLTRQKKLQAEAKMALAMAKPMAKMQVEVEKQNR

SEQ ID NO: 900383 - protein, 106 aa, Homo sapiens
DAWVDPRVRKKSPVADLLPHMPHISECLMKRSLKPTDLRDMTIGQLQVIVNDLHSQIESLNEELVQLLLIRDELHTEQDAMLVDIEDLTRHAESQQKHMAEKMPAK

SEQ ID NO: 900384 - protein, 340 aa, Homo sapiens [sequence omitted]

SEQ ID NO: 900385 - protein, 340 aa, Homo sapiens [sequence omitted]

SEQ ID NO: 900386 - protein, 291 aa, Homo sapiens
MGEMEQLRQEAEQLKKQIADARKACADVTLAELVSGLEVVGRVQMRTRRTLRGHLAKIYAMHWATDSKLLVSASQDGKLIVWDSYTTNKVHAIPLRSSWVMTCAYAPSGNFVACGGLDNMCSIYNLKSREGNVKVSRELSAHTGYLSCCRFLDDNNIVTSSGDTTCALWDIETGQQKTVFVGHTGDCMSLAVSPDFNLFISGACDASAKLWDVREGTCRQTFTGHESDINAICDPIQKRALPFLAISFSSPPLNWNCFPTFVFYVIDVFEEYKPVFCRLSLRLSLSDICSP

SEQ ID NO: 900387 - protein, 258 aa, Homo sapiens
MGEMEQLRQEAEQLKKQIADARKACADVTLAELVSGLEVVGRVQMRTRRTLRGHLAKIYAMHWATDSKLLVSASQDGKLIVWDSYTTNKVHAIPLRSSWVMTCAYAPSGNFVACGGLDNMCSIYNLKSREGNVKVSRELSAHTGYLSCCRFLDDNNIVTSSGDTTCALWDIETGQQKTVFVGHTGDCMSLAVSPDFNLFISGACDASAKLWDVREGTCRQTFTGHESDINAICLLPQWPPTIRWLRRLQLQCLGLHEV

SEQ ID NO: 900388 - protein, 291 aa, Homo sapiens; identical to SEQ ID NO: 900386

SEQ ID NO: 900389 - protein, 454 aa, Homo sapiens
GAGLGSALLGWGAGRAQAGWGWTQRTSNLEGLAGERVQPPSRFPVSWSLVWARRAEAQPGGGFLNTDPMFLAGARVTPRPVSHGGDGATASGSGAAQEADCSNSRALPLGPQKTAGDMRSVAQGEGAGFALEGLEVTRDFLNLVRIFETPKPQSPKTNLPWRPMHLPPPPRPCSPDVCFSLQDARKACADVTLAELVSGLEVVGRVQMRTRRTLRGHLAKIYAMHWATDSKLLVSASQDGKLIVWDSYTTNKVHAIPLRSSWVMTCAYAPSGNFVACGGLDNMCSIYNLKSREGNVKVSRELSAHTGYLSCCRFLDDNNIVTSSGDTTCALWDIETGQQKTVFVGHTGDCMSLAVSPDFNLFISGACDASAKLWDVREGTCRQTFTGHESDINAICDPIQKRALPFLAISFSSPPLNWNCFPTFVFYVIDVFEEYKPVFCRLSLRLSLSDICSP

SEQ ID NO: 900390 - protein, 340 aa, Homo sapiens [sequence omitted]

SEQ ID NO: 900391 - protein, 367 aa, Homo sapiens
MGEMEQLRQEAEQLKKQIADARKACADVTLAELVSGLEVVGRVQMRTRRTLRGHLAKIYAMHWATDSKLLVSASQDGKLIVWDSYTTNKVHAIPLRSSWVMTCAYAPSGNFVACGGLDNMCSIYNLKSREGNVKVSRELSAHTGYLSCCRFLDDNNIVTSSGDTTCALWDIETGQQKTVFVGHTGDCMSLAVSPDFNLFISGACDASAKLWDVREGTCRQTFTGHESDINAICFFPNGEAICTGSDDASCRLFDLRADQELICFSHESIICGITSVAFSLSGRLLFAGYDDFNCNVWDSMKSERVGLSSGPDNRLSGWDPVTVGGPRSGEVPIWPGVGTAVGALPRPPPLPGSLGPPPGRRAPATPG

SEQ ID NO: 900392 - protein, 360 aa, Homo sapiens
MGEMEQLRQEAEQLKKQIADARKACADVTLAELVSGLEVVGRVQMRTRRTLRGHLAKIYAMHWATDSKLLVSASQDGKLIVWDSYTTNKVHAIPLRSSWVMTCAYAPSGNFVACGGLDNMCSIYNLKSREGNVKVSRELSAHTGYLSCCRFLDDNNIVTSSGDTTCALWDIETGQQKTVFVGHTGDCMSLAVSPDFNLFISGACDASAKLWDVREGTCRQTFTGHESDINAICFFPNGEAICTGSDDASCRLFDLRADQELICFSHESIICGITSVAFSLSGRLLFAGYDDFNCNVWDSMKSERVGKGQPWLLLPQLEGPSPALPPHSVPPISSHFGLSYCCPLSLGDSTPGIQYPLVPN

SEQ ID NO: 900393 - protein, 340 aa, Homo sapiens [sequence omitted]

SEQ ID NO: 900394 - protein, 218 aa, Homo sapiens
MGEMEQLRQEAEQLKKQIADARKACADVTLAELVSGLEVVGRVQMRTRRTLRGHLAKIYAMHWATDSKLLVSASQDGKLIVWDSYTTNKVHAIPLRSSWVMTCAYAPSGNFVACGGLDNMCSIYNLKSREGNVKVSRELSAHTGYLSCCRFLDDNNIVTSSGDTTCLWDIETGSRDWIGGPPVNADQVGSKLNLIGADAMQLGIEGRRNLAQGITWFQ

SEQ ID NO: 900395 - protein, 327 aa, Homo sapiens
SVPLRSVSLSGTLQGAGTTTKMAVARLAAVAAWVPCRSWGWAAVPFGPHRGLSVLLARIPQRAPRWLPACRQKTSLSFLNRPDLPNLAYKKLKGKSPGIIFIPGYLSYMNGTKALAIEEFCKSLGHACIRFDYSGVGSSDGNSEESTLGKWRKDVLSIIDDLADGPQILVGSSLGGWLMLHAAIARPEKVVALIGVATAADTLVTKFNQLPVELKKEVEMKGVWSMPSKYSEEGVYNVQYSFIKEAEHHCLLHSPIPVNCPIRLLHGMKDDIVPWHTSMQVADRVLSTDVDVILRKHSDHRMREKADIQLLVYTIDDLIDKLSTIVN

SEQ ID NO: 900396 - protein, 229 aa, Homo sapiens
PRFRCVACPSVGHCRVRGQLRRWRLRAWQLWRPGYLVGAGAGQPSPSVPTVASACCLHGYLSGRHGGSQILVGSSLGGWLMLHAAIARPEKVVALIGVATAADTLVTKFNQLPVELKKEVEMKGVWSMPSKYSEEGVYNVQYSFIKEAEHHCLLHSPIPVNCPIRLLHGMKDDIVPWHTSMQVADRVLSTDVDVILRKHSDHRMREKADIQLLVYTIDDLIDKLSTIVN

SEQ ID NO: 900397 - protein, 327 aa, Homo sapiens; identical to SEQ ID NO: 900395

SEQ ID NO: 900398 - protein, 327 aa, Homo sapiens; identical to SEQ ID NO: 900395

SEQ ID NO: 900399 - protein, 327 aa, Homo sapiens; identical to SEQ ID NO: 900395

SEQ ID NO: 900400 - protein, 347 aa, Homo sapiens
SGGRIAPAQCPRPPQSLCVEAGDRGGLSEDPPPRSRRPEPQPLPQRPRHLSPPPPPPPEPPRALWGMAVNVYSTSVTSENLSRHDMLAWVNDSLHLNYTKIEQLCSGAAYCQFMDMLFPGCVHLRKVKFQAKLEHEYIHNFKVLQAAFKKMGVDKIIPVEKLVKGKFQDNFEFIQWFKKFFDANYDGKDYNPLLARQGQDVAPPPNPGDQIFNKSKKLIGTAVPQRTSPTGPKNMQTSGRLSNVAPPCILRKNPPSARNGGHETDAQILELNQQLVDLKLTVDGLEKERDFYFSKLRDIELICQEHESENSPVISGIIGILYATEEGFAPPEDDEIEEHQQEDQDEY

SEQ ID NO: 900401 - protein, 347 aa, Homo sapiens; identical to SEQ ID NO: 900400

SEQ ID NO: 900402 - protein, 154 aa, Homo sapiens
MAVNVYSTSVTSENLSRHDMLAWVNDSLHLNYTKIEQLCSGAAYCQFMDMLFPGCVHLRKVKFQAKLEHEYIHNFKVLQAAFKKMGVDKVGACALGGPEEQCDPGEEEDPPAQATGAAGVIPVLVPPSTSRLSRGNFPPAQGTMEKPTTLAMPS

SEQ ID NO: 900403 - protein, 281 aa, Homo sapiens
MAVNVYSTSVTSENLSRHDMLAWVNDSLHLNYTKIEQLCSGAAYCQFMDMLFPGCVHLRKVKFQAKLEHEYIHNFKVLQAAFKKMGVDKIIPVEKLVKGKFQDNFEFIQWFKKFFDANYDGKDYNPLLARQGQDVAPPPNPGDQIFNKSKKLIGTAVPQRTSPTGPKNMQTSGRLSNVAPPCILRKNPPSARNGGHETDAQILELNQQLVDLKLTVDGLEKERDFYFSKLRDIELICQEHESENSPVISGIIGILYATEEGFAPPEDDEIEEHQQEDQDEY

SEQ ID NO: 900404 - protein, 156 aa, Homo sapiens [sequence omitted]

SEQ ID NO: 900405 - protein, 234 aa, Homo sapiens
SGGRIAPAQCPRPPQSLCVEAGDRGGLSEDPPPRSRRPEPQPLPQRPRHLSPPPPPPPEPPRALWGMAVNVYSTSVTSENLSRHDMLAWVNDSLHLNYTKIEQLCSGAAYCQFMDMLFPGCVHLRKVKFQAKLEHEYIHNFKVLQAAFKKMGVDKIIPVEKLVKGKFQDNFEFIQWFKKFFDANYDGKDYNPLLARQGQDVAPPPNPVPQRTSPTGPPPLHSPEESSISPKWRP

SEQ ID NO: 900406 - protein, 76 aa, Homo sapiens
TAAAASRLRSALVPRSLCALKPETAAASARTLRPGAAGRSRSLCRSAPATCPLPLRLRRSRLVHSGVWPSMCTPHL

SEQ ID NO: 900407 - protein, 220 aa, Homo sapiens
SGGRIAPAQCPRPPQSLCVEAGDRGGLSEDPPPRSRRPEPQPLPQRPRHLSPPPPPPPEPPRALWGMAVNVYSTSVTSENLSRHDMLAWVNDSLHLNYTKIEQLCSGAAYCQFMDMLFPGCVHLRKVKFQAKLEHEYIHNFKVLQAAFKKMGVDKVGACALGGPEEQCDPGEEEDPPAQATGAAGVIPVLVPPSTSRLSRGNFPPAQGTMEKPTTLAMPS

SEQ ID NO: 900408 - protein, 332 aa, Homo sapiens
SGGRIAPAQCPRPPQSLCVEAGDRGGLSEDPPPRSRRPEPQPLPQRPRHLSPPPPPPPEPPRALWGMAVNVYSTSVTSENLSRHDMLAWVNDSLHLNYTKIEQLCSGAAYCQFMDMLFPGCVHLRKVKFQAKLEHEYIHNFKVLQAAFKKMGVDKIIPVEKLVKGKFQDNFEFIQWFKKFFDANYDGKDYNPLLARQGQDVAPPPNPVPQRTSPTGPKNMQTSGRLSNVAPPCILRKNPPSARNGGHETDAQILELNQQLVDLKLTVDGLEKERDFYFSKLRDIELICQEHESENSPVISGIIGILYATEEGFAPPEDDEIEEHQQEDQDEY

SEQ ID NO: 900409 - protein, 347 aa, Homo sapiens; identical to SEQ ID NO: 900400

SEQ ID NO: 900410 - protein, 76 aa, Homo sapiens; identical to SEQ ID NO: 900406

SEQ ID NO: 900411 - protein, 1574 aa, Homo sapiens
MRLLWGLIWASSFFTLSLQKPRLLLFSPSVVHLGVPLSVGVQLQDVPRGQVVKGSVFLRNPSRNNVPCSPKVDFTLSSERDFALLSLQVPLKDAKSCGLHQLLRGPEVQLVAHSPWLKDSLSRTTNIQGINLLFSSRRGHLFLQTDQPIYNPGQRVRYRVFALDQKMRPSTDTITVMVENSHGLRVRKKEVYMPSSIFQDDFVIPDISEPGTWKISARFSDGLESNSSTQFEVKKYVLPNFEVKITPGKPYILTVPGHLDEMQLDIQARYIYGKPVQGVAYVRFGLLDEDGKKTFFRGLESQTKLVNGQSHISLSKAEFQDALEKLNMGITDLQGLRLYVAAAIIEYPGGEMEEAELTSWYFVSSPFSLDLSKTKRHLVPGAPFLLQALVREMSGSPASGIPVKVSATVSSPGSVPEVQDIQQNTDGSGQVSIPIIIPQTISELQLSVSAGSPHPAIARLTVAAPPSGGPGFLSIERPDSRPPRVGDTLNLNLRAVGSGATFSHYYYMILSRGQIVFMNREPKRTLTSVSVFVDHHLAPSFYFVAFYYHGDHPVANSLRVDVQAGACEGKLELSVDGAKQYRNGESVKLHLETDSLALVALGALDTALYAAGSKSHKPLNMGKVFEAMNSYDLGCGPGGGDSALQVFQAAGLAFSDGDQWTLSRKRLSCPKEKTTRKKRNVNFQKAINEKLGQYASPTAKRCCQDGVTRLPMMRSCEQRAARVQQPDCREPFLSCCQFAESLRKKSRDKGQAGLQRALEILQEEDLIDEDDIPVRSFFPENWLWRVETVDRFQILTLWLPDSLTTWEIHGLSLSKTKGLCVATPVQLRVFREFHLHLRLPMSVRRFEQLELRPVLYNYLDKNLTVSVHVSPVEGLCLAGGGGLAQQVLVPAGSARPVAFSVVPTAAAAVSLKVVARGSFEFPVGDAVSKVLQIEKEGAIHREELVYELNPLDHRGRTLEIPGNSDPNMIPDGDFNSYVRVTASDPLDTLGSEGALSPGGVASLLRLPRGCGEQTMIYLAPTLAASRYLDKTEQWSTLPPETKDHAVDLIQKGYMRIQQFRKADGSYAAWLSRDSSTWLTAFVLKVLSLAQEQVGGSPEKLQETSNWLLSQQQADGSFQDLSPVIHRSMQGGLVGNDETVALTAFVTIALHHGLAVFQDEGAEPLKQRVEASISKANSFLGEKASAGLLGAHAAAITAYALTLTKAPVDLLGVAHNNLMAMAQETGDNLYWGSVTGSQSNAVSPTPAPRNPSDPMPQAPALWIETTAYALLHLLLHEGKAEMADQAAAWLTRQGSFQGGFRSTQDTVIALDALSAYWIASHTTEERGLNVTLSSTGRNGFKSHALQLNNRQIRGLEEELQFSLGSKINVKVGGNSKGTLKVLRTYNVLDMKNTTCQDLQIEVTVKGHVEYTMEANEDYEDYEYDELPAKDDPDAPLQPVTPLQLFEGRRNRRRREAPKVVEEQESRVHYTVCIWRNGKVGLSGMAIADVTLLSGFHALRADLEKLTSLSDRYVSHFETEGPHVLLYFDSVPTSRECVGFEAVQEVPVGLVQAGQRNPVRLLQPRAQMFCVLRGTK

SEQ ID NO: 900412 - protein, 1587 aa, Homo sapiens
TRSAPRAASWLEDPREVRSVCLSATFFTLSLQKPRLLLFSPSVVHLGVPLSVGVQLQDVPRGQVVKGSVFLRNPSRNNVPCSPKVDFTLSSERDFALLSLQVPLKDAKSCGLHQLLRGPEVQLVAHSPWLKDSLSRTTNIQGINLLFSSRRGHLFLQTDQPIYNPGQRVRYRVFALDQKMRPSTDTITVMVENSHGLRVRKKEVYMPSSIFQDDFVIPDISEPGTWKISARFSDGLESNSSTQFEVKKYVLPNFEVKITPGKPYILTVPGHLDEMQLDIQARYIYGKPVQGVAYVRFGLLDEDGKKTFFRGLESQTKLVNGQSHISLSKAEFQDALEKLNMGITDLQGLRLYVAAAIIEYPGGEMEEAELTSWYFVSSPFSLDLSKTKRHLVPGAPFLLQALVREMSGSPASGIPVKVSATVSSPGSVPEVQDIQQNTDGSGQVSIPIIIPQTISELQLSVSAGSPHPAIARLTVAAPPSGGPGFLSIERPDSRPPRVGDTLNLNLRAVGSGATFSHYYYMILSRGQIVFMNREPKRTLTSVSVFVDHHLAPSFYFVAFYYHGDHPVANSLRVDVQAGACEGKLELSVDGAKQYRNGESVKLHLETDSLALVALGALDTALYAAGSKSHKPLNMGKVFEAMNSYDLGCGPGGGDSALQVFQAAGLAFSDGDQWTLSRKRLSCPKEKTTRKKRNVNFQKAINEKLGQYASPTAKRCCQDGVTRLPMMRSCEQRAARVQQPDCREPFLSCCQFAESLRKKSRDKGQAGLQRALEILQEEDLIDEDDIPVRSFFPENWLWRVETVDRFQILTLWLPDSLTTWEIHGLSLSKTKGLCVATPVQLRVFREFHLHLRLPMSVRRFEQLELRPVLYNYLDKNLTVSVHVSPVEGLCLAGGGGLAQQVLVPAGSARPVAFSVVPTAAAAVSLKVVARGSFEFPVGDAVSKVLQIEKEGAIHREELVYELNPLDHRGRTLEIPGNSDPNMIPDGDFNSYVRVTASDPLDTLGSEGALSPGGVASLLRLPRGCGEQTMIYLAPTLAASRYLDKTEQWSTLPPETKDHAVDLIQKGYMRIQQFRKADGSYAAWLSRDSSTWLTAFVLKVLSLAQEQVGGSPEKLQETSNWLLSQQQADGSFQDLSPVIHRSMQGGLVGNDETVALTAFVTIALHHGLAVFQDEGAEPLKQRVEASISKANSFLGEKASAGLLGAHAAAITAYALTLTKAPADLLGVAHNNLMAMAQETGDNLYWGSVTGSQSNAVSPTPAPRNPSDPMPQAPALWIETTAYALLHLLLHEGKAEMADQAAAWLTRQGSFQGGFRSTQDTVIALDALSAYWIASHTTEERGLNVTLSSTGRNGFKSHALQLNNRQIRGLEEELQFSLGSKINVKVGGNSKGTLKVLRTYNVLDMKNTTCQDLQIEVTVKGHVEYTMEANEDYEDYEYDELPAKDDPDAPLQPVTPLQLFEGRRNRRRREAPKVVEEQESRVHYTVCIWRNGKVGLSGMAIADVTLLSGFHALRADLEKLTSLSDRYVSHFETEGPHVLLYFDSVPTSRECVGFEAVQEVPVGLVQAGQRNPVRLLQPRAQMFCVLRGTK

SEQ ID NO: 900413 - protein, 1612 aa, Homo sapiens
MRLLWGLIWASSFFTLSLQKPRLLLFSPSVVHLGVPLSVGVQLQDVPRGQVVKGSVFLRNPSRNNVPCSPKVDFTLSSERDFALLSLQVPLKDAKSCGLHQLLRGPEVQLVAHSPWLKDSLSRTTNIQGINLLFSSRRGHLFLQTDQPIYNPGQRVRYRVFALDQKMRPSTDTITVMVENSHGLRVRKKEVYMPSSIFQDDFVIPDISEPGTWKISARFSDGLESNSSTQFEVKKYVLPNFEVKITPGKPYILTVPGHLDEMQLDIQARYIYGKPVQGVAYVRFGLLDEDGKKTFFRGLESQTKLVNGQSHISLSKAEFQDALEKLNMGITDLQGLRLYVAAAIIEYPGGEMEEAELTSWYFVSSPFSLDLSKTKRHLVPGAPFLLQALVREMSGSPASGIPVKVSATVSSPGSVPEVQDIQQNTDGSGQVSIPIIIPQTISELQLSVSAGSPHPAIARLTVAAPPSGGPGFLSIERPDSRPPRVGDTLNLNLRAVGSGATFSHYYYMILSRGQIVFMNREPKRTLTSVSVFVDHHLAPSFYFVAFYYHGDHPVANSLRVDVQAGACEGKLELSVDGAKQYRNGESVKLHLETDSLALVALGALDTALYAAGSKSHKPLNMGKVFEAMNSYDLGCGPGGGDSALQVFQAAGLAFSDGDQWTLSRKRLSCPKEKTTRKKRNVNFQKAINEKLGQYASPTAKRCCQDGVTRLPMMRSCEQRAARVQQPDCREPFLSCCQFAESLRKKSRDKGQAGLQRALEILQEEDLIDEDDIPVRSFFPENWLWRVETVDRFQILTLWLPDSLTTWEIHGLSLSKTKGLCVATPVQLRVFREFHLHLRLPMSVRRFEQLELRPVLYNYLDKNLTVRPHGSLSIQELGEPGPSEGWGGYTGPGLWPSSFSCPQVSVHVSPVEGLCLAGGGGLAQQVLVPAGSARPVAFSVVPTAAAAVSLKVVARGSFEFPVGDAVSKVLQIEKEGAIHREELVYELNPLDHRGRTLEIPGNSDPNMIPDGDFNSYVRVTASDPLDTLGSEGALSPGGVASLLRLPRGCGEQTMIYLAPTLAASRYLDKTEQWSTLPPETKDHAVDLIQKGYMRIQQFRKADGSYAAWLSRDSSTWLTAFVLKVLSLAQEQVGGSPEKLQETSNWLLSQQQADGSFQDLSPVIHRSMQGGLVGNDETVALTAFVTIALHHGLAVFQDEGAEPLKQRVEASISKANSFLGEKASAGLLGAHAAAITAYALTLTKAPVDLLGVAHNNLMAMAQETGDNLYWGSVTGSQSNAVSPTPAPRNPSDPMPQAPALWIETTAYALLHLLLHEGKAEMADQAAAWLTRQGSFQGGFRSTQDTVIALDALSAYWIASHTTEERGLNVTLSSTGRNGFKSHALQLNNRQIRGLEEELQFSLGSKINVKVGGNSKGTLKVLRTYNVLDMKNTTCQDLQIEVTVKGHVEYTMEANEDYEDYEYDELPAKDDPDAPLQPVTPLQLFEGRRNRRRREAPKVVEEQESRVHYTVCIWRNGKVGLSGMAIADVTLLSGFHALRADLEKLTSLSDRYVSHFETEGPHVLLYFDSVPTSRECVGFEAVQEVPVGLVQAGQRNPVRLLQPRAQMFCVLRGTK

SEQ ID NO: 900414 - protein, 1375 aa, Homo sapiens
MTLVIPDISEPGTWKISARFSDGLESNSSTQFEVKKYVLPNFEVKITPGKPYILTVPGHLDEMQLDIQARYIYGKPVQGVAYVRFGLLDEDGKKTFFRGLESQTKLVNGQSHISLSKAEFQDALEKLNMGITDLQGLRLYVAAAIIEYPGGEMEEAELTSWYFVSSPFSLDLSKTKRHLVPGAPFLLQALVREMSGSPASGIPVKVSATVSSPGSVPEVQDIQQNTDGSGQVSIPIIIPQTISELQLSVSAGSPHPAIARLTVAAPPSGGPGFLSIERPDSRPPRVGDTLNLNLRAVGSGATFSHYYYMILSRGQIVFMNREPKRTLTSVSVFVDHHLAPSFYFVAFYYHGDHPVANSLRVDVQAGACEGKLELSVDGAKQYRNGESVKLHLETDSLALVALGALDTALYAAGSKSHKPLNMGKVFEAMNSYDLGCGPGGGDSALQVFQAAGLAFSDGDQWTLSRKRLSCPKEKTTRKKRNVNFQKAINEKLGQYASPTAKRCCQDGVTRLPMMRSCEQRAARVQQPDCREPFLSCCQFAESLRKKSRDKGQAGLQRALEILQEEDLIDEDDIPVRSFFPENWLWRVETVDRFQILTLWLPDSLTTWEIHGLSLSKTKGLCVATPVQLRVFREFHLHLRLPMSVRRFEQLELRPVLYNYLDKNLTVSVHVSPVEGLCLAGGGGLAQQVLVPAGSARPVAFSVVPTAAAAVSLKVVARGSFEFPVGDAVSKVLQIEKEGAIHREELVYELNPLDHRGRTLEIPGNSDPNMIPDGDFNSYVRVTASDPLDTLGSEGALSPGGVASLLRLPRGCGEQTMIYLAPTLAASRYLDKTEQWSTLPPETKDHAVDLIQKGYMRIQQFRKADGSYAAWLSRDSSTWLTAFVLKVLSLAQEQVGGSPEKLQETSNWLLSQQQADGSFQDLSPVIHRSMQGGLVGNDETVALTAFVTIALHHGLAVFQDEGAEPLKQRVEASISKANSFLGEKASAGLLGAHAAAITAYALTLTKAPVDLLGVAHNNLMAMAQETGDNLYWGSVTGSQSNAVSPTPAPRNPSDPMPQAPALWIETTAYALLHLLLHEGKAEMADQAAAWLTRQGSFQGGFRSTQDTVIALDALSAYWIASHTTEERGLNVTLSSTGRNGFKSHALQLNNRQIRGLEEELQFSLGSKINVKVGGNSKGTLKVLRTYNVLDMKNTTCQDLQIEVTVKGHVEYTMEANEDYEDYEYDELPAKDDPDAPLQPVTPLQLFEGRRNRRRREAPKVVEEQESRVHYTVCIWRNGKVGLSGMAIADVTLLSGFHALRADLEKLTSLSDRYVSHFETEGPHVLLYFDSVPTSRECVGFEAVQEVPVGLVQAGQRNPVRLLQPRAQMFCVLRGTK

SEQ ID NO: 900415 - protein, 633 aa, Homo sapiens
YPRSPNTRAKAEMAVPVSALLNRQGSFQGGFRSTQDTVIALDALSAYWIASHTTEERGLNVTLSSTGRNGFKSHALQLNNRQIRGLEEELQFSLGSKINVKVGGNSKGTLKVLRTYNVLDMKNTTCQDLQIEVTVKGHVEYTMEANEDYEDYEYDELPAKETSNWLLSQQQADGSFQDLSPVIHRSMQGGLVGNDETVALTAFVTIALHHGLAVFQDEGAEPLKQRVEASISKANSFLGEKASAGLLGAHAAAITAYALTLTKAPVDLLGVAHNNLMAMAQETGDNLYWGSVTGSQSNAVSPTPAPRNPSDPMPQAPALWIETTAYALLHLLLHEGKAEMADQAAAWLTRQGSFQGGFRSTQDTVIALDALSAYWIASHTTEERGLNVTLSSTGRNGFKSHALQLNNRQIRGLEEELQFSLGSKINVKVGGNSKGTLKVLRTYNVLDMKNTTCQDLQIEVTVKGHVEYTMEANEDYEDYEYDELPAKDDPDAPLQPVTPLQLFEGRRNRRRREAPKVVEEQESRVHYTVCIWRNGKVGLSGMAIADVTLLSGFHALRADLEKLTSLSDRYVSHFETEGPHVLLYFDSVPTSRECVGFEAVQEVPVGLVQAGQRNPVRLLQPRAQMFCVLRGTK

SEQ ID NO: 900416 - protein, 1473 aa, Homo sapiens
MRLLWGLIWASSFFTLSLQKPRLLLFSPSVVHLGVPLSVGVQLQDVPRGQVVKGSVFLRNPSRNNVPCSPKVDFTLSSERDFALLSLQVPLKDAKSCGLHQLLRGPEVQLVAHSPWLKDSLSRTTNIQGINLLFSSRRGHLFLQTDQPIYNPGQRVRYRVFALDQKMRPSTDTITVMVENSHGLRVRKKEVYMPSSIFQDDFVIPDISEPGTWKISARFSDGLESNSSTQFEVKKYVLPNFEVKITPGKPYILTVPGHLDEMQLDIQARYIYGKPVQGVAYVRFGLLDEDGKKTFFRGLESQTKLVNGQSHISLSKAEFQDALEKLNMGITDLQGLRLYVAAAIIEYPGGEMEEAELTSWYFVSSPFSLDLSKTKRHLVPGAPFLLQALVREMSGSPASGIPVKVSATVSSPGSVPEVQDIQQNTDGSGQVSIPIIIPQTISELQLSVSAGSPHPAIARLTVAAPPSGGPGFLSIERPDSRPPRVGDTLNLNLRAVGSGATFSHYYYMILSRGQIVFMNREPKRTLTSVSVFVDHHLAPSFYFVAFYYHGDHPVANSLRVDVQAGACEGKLELSVDGAKQYRNGESVKLHLETDSLALVALGALDTALYAAGSKSHKPLNMGKVFEAMNSYDLGCGPGGGDSALQVFQAAGLAFSDGDQWTLSRKRLSCPKEKTTRKKRNVNFQKAINEKLGQYASPTAKRCCQDGVTRLPMMRSCEQRAARVQQPDCREPFLSCCQFAESLRKKSRDKGQAGLQRALEILQEEDLIDEDDIPVRSFFPENWLWRVETVDRFQILTLWLPDSLTTWEIHGLSLSKTKGLCVATPVQLRVFREFHLHLRLPMSVRRFEQLELRPVLYNYLDKNLTVSVHVSPVEGLCLAGGGGLAQQVLVPAGSARPVAFSVVPTAAAAVSLKVVARGSFEFPVGDAVSKVLQIEKEGAIHREELVYELNPLDHRGRTLEIPGNSDPNMIPDGDFNSYVRVTASDPLDTLGSEGALSPGGVASLLRLPRGCGEQTMIYLAPTLAASRYLDKTEQWSTLPPETKDHAVDLIQKGYMRIQQFRKADGSYAAWLSRDSSTWLTAFVLKVLSLAQEQVGGSPEKLQETSNWLLSQQQADGSFQDLSPVIHRSMQGGLVGNDETVALTAFVTIALHHGLAVFQDEGAEPLKQRVEASISKANSFLGEKASAGLLGAHAAAITAYALTLTKAPVDLLGVAHNNLMAMAQETGDNLYWGSVTGSQSNAVSPTPAPRNPSDPMPQAPALWIETTAYALLHLLLHEGKAEMADQAAAWLTRQGSFQGGFRSTQDTVIALDALSAYWIASHTTEERGLNVTLSSTGRNGFKSHALQLNNRQIRGLEEELQFSLGSKINVKVGGNSKGTLKVLRTYNVLDMKNTTCQDLQIEVTVKGHVEYTMEANEDYEDYEYDELPAKDDPDAPLQPVTPLQLFEGRRNRRRREARGTARWGCLAWPSRTSPS

SEQ ID NO: 900417 - protein, 1117 aa, Homo sapiens
MRLLWGLIWASSFFTLSLQKPRLLLFSPSVVHLGVPLSVGVQLQDVPRGQVVKGSVFLRNPSRNNVPCSPKVDFTLSSERDFALLSLQVPLKDAKSCGLHQLLRGPEVQLVAHSPWLKDSLSRTTNIQGINLLFSSRRGHLFLQTDQPIYNPGQRVRYRVFALDQKMRPSTDTITVMVENSHGLRVRKKEVYMPSSIFQDDFVIPDISEPGTWKISARFSDGLESNSSTQFEVKKYVLPNFEVKITPGKPYILTVPGHLDEMQLDIQARYIYGKPVQGVAYVRFGLLDEDGKKTFFRGLESQTKLVNGQSHISLSKAEFQDALEKLNMGITDLQGLRLYVAAAIIEYPGGEMEEAELTSWYFVSSPFSLDLSKTKRHLVPGAPFLLQALVREMSGSPASGIPVKVSATVSSPGSVPEVQDIQQNTDGSGQVSIPIIIPQTISELQLSVSAGSPHPAIARLTVAAPPSGGPGFLSIERPDSRPPRVGDTLNLNLRAVGSGATFSHYYYMILSRGQIVFMNREPKRTLTSVSVFVDHHLAPSFYFVAFYYHGDHPVANSLRVDVQAGACEGKLELSVDGAKQYRNGESVKLHLETDSLALVALGALDTALYAAGSKSHKPLNMGKVFEAMNSYDLGCGPGGGDSALQVFQAAGLAFSDGDQWTLSRKRLSCPKEKTTRKKRNVNFQKAINEKLGQYASPTAKRCCQDGVTRLPMMRSCEQRAARVQQPDCREPFLSCCQFAESLRKKSRDKGQAGLQRALEILQEEDLIDEDDIPVRSFFPENWLWRVETVDRFQILTLWLPDSLTTWEIHGLSLSKTKGLCVATPVQLRVFREFHLHLRLPMSVRRFEQLELRPVLYNYLDKNLTVSVHVSPVEGLCLAGGGGLAQQVLVPAGSARPVAFSVVPTAAAAVSLKVVARGSFEFPVGDAVSKVLQIEKEGAIHREELVYELNPLDHRGRTLEIPGNSDPNMIPDGDFNSYVRVTASDPLDTLGSEGALSPGAKVVEEQESRVHYTVCIWRNGKVGLSGMAIADVTLLSGFHALRADLEKLTSLSDRYVSHFETEGPHVLLYFDSVPTSRECVGFEAVQEVPVGLVQAGQRNPVRLLQPRAQMFCVLRGTK

SEQ ID NO: 900418 - protein, 1574 aa, Homo sapiens; identical to SEQ ID NO: 900411

SEQ ID NO: 900419 - protein, 136 aa, Homo sapiens
GAALGQGREGRTQAGAGLLEPAQAEPGRQLTRLHRRNGKVGLSGMAIADVTLLSGFHALRADLEKLTSLSDRYVSHFETEGPHVLLYFDSVPTSRECVGFEAVQEVPVGLVQAGQRNPVRLLQPRAQMFCVLRGTK

SEQ ID NO: 900420 - protein, 1574 aa, Homo sapiens; identical to SEQ ID NO: 900411

SEQ ID NO: 900421 - protein, 1574 aa, Homo sapiens; identical to SEQ ID NO: 900411

SEQ ID NO: 900422 - protein, 1574 aa, Homo sapiens; identical to SEQ ID NO: 900411

SEQ ID NO: 900423 - protein, 172 aa, Homo sapiens
MQTSPTLPSGRCTRCSDPGLLLLHHLGRLPPAAVPPTLKQLQGCHGLEEGDLVKSRLLATLCSAEVCQCAEGKCPRQRRALERGLQDEDGYRMKFACYYPRVEYGFQVKVLREDSRAAFRLFETKITQVLHFTKDVKAAANQMRNFLVRASLPPSLGTWERIFDHGSGWGHL

SEQ ID NO: 900424 - protein, 120 aa, Homo sapiens
MASRLRFSEKTAELLSASLRPRSPKSCTSPRMSRPLLIRCATSWFEPPCRLRLEPGKEYLIMGLDGATYDLEGHPQYLLDSNSWIEEMPSERLCRSTRQRAACAQLNDFLQEYGTQGCQV

SEQ ID NO: 900425 - protein, 1334 aa, Homo sapiens
MRLLWGLIWASSFFTLSLQKPRLLLFSPSVVHLGVPLSVGVQLQDVPRGQVVKGSVFLRNPSRNNVPCSPKVDFTLSSERDFALLSLQVPLKDAKSCGLHQLLRGPEVQLVAHSPWLKDSLSRTTNIQGINLLFSSRRGHLFLQTDQPIYNPGQRVRYRVFALDQKMRPSTDTITVMVENSHGLRVRKKEVYMPSSIFQDDFVIPDISEPGTWKISARFSDGLESNSSTQFEVKKYVLPNFEVKITPGKPYILTVPGHLDEMQLDIQARYIYGKPVQGVAYVRFGLLDEDGKKTFFRGLESQTKLVNGQSHISLSKAEFQDALEKLNMGITDLQGLRLYVAAAIIEYPGGEMEEAELTSWYFVSSPFSLDLSKTKRHLVPGAPFLLQALVREMSGSPASGIPVKVSATVSSPGSVPEVQDIQQNTDGSGQVSIPIIIPQTISELQLSVSAGSPHPAIARLTVAAPPSGGPGFLSIERPDSRPPRVGDTLNLNLRAVGSGATFSHYYYMILSRGQIVFMNREPKRTLTSVSVFVDHHLAPSFYFVAFYYHGDHPVANSLRVDVQAGACEGKLELSVDGAKQYRNGESVKLHLETDSLALVALGALDTALYAAGSKSHKPLNMGKVFEAMNSYDLGCGPGGGDSALQVFQAAGLAFSDGDQWTLSRKRLSCPKEKTTRKKRNVNFQKAINEKLGQYASPTAKRCCQDGVTRLPMMRSCEQRAARVQQPDCREPFLSCCQFAESLRKKSRDKGQAGLQRALEILQEEDLIDEDDIPVRSFFPENWLWRVETVDRFQILTLWLPDSLTTWEIHGLSLSKTKGLCVATPVQLRVFREFHLHLRLPMSVRRFEQLELRPVLYNYLDKNLTVSVHVSPVEGLCLAGGGGLAQQVLVPAGSARPVAFSVVPTAAAAVSLKVVARGSFEFPVGDAVSKVLQIEKEGAIHREELVYELNPLDHRGRTLEIPGNSDPNMIPDGDFNSYVRVTASDPLDTLGSEGALSPGGVASLLRLPRGCGEQTMIYLAPTLAASRYLDKTEQWSTLPPETKDHAVDLIQKGYMRIQQFRKADGSYAAWLSRDSSTWLTAFVLKVLSLAQEQVGGSPEKLQETSNWLLSQQQADGSFQDLSPVIHRSMQGGLVGNDETVALTAFVTIALHHGLAVFQDEGAEPLKQRVEASISKANSFLGEKASAGLLGAHAAAITAYALTLTKAPVDLLGVAHNNLMAMAQETGDNLYWGSVTGSQSNAVSPTPAPRNPSDPMPQAPALWIETTAYALLHLLLHEGKAEMADQAAAWLTRQGSFQGGFRSTQVGAVPGCPPTSAGRNLNLGTMKLEALLCPLS

SEQ ID NO: 900426 - protein, 360 aa, Homo sapiens
MRLLWGLIWASSFFTLSLQKPRLLLFSPSVVHLGVPLSVGVQLQDVPRGQVVKGSVFLRNPSRNNVPCSPKVDFTLSSERDFALLSLQVPLKDAKSCGLHQLLRGPEVQLVAHSPWLKDSLSRTTNIQGINLLFSSRRGHLFLQTDQPIYNPGQRVRYRVFALDQKMRPSTDTITVMVENSHGLRVRKKEVYMPSSIFQDDFVIPDISEPGTWKISARFSDGLESNSSTQFEVKKYVLPNFEVKITPGKPYILTVPGHLDEMQLDIQARYIYGKPVQGVAYVRFGLLDEDGKKTFFRGLESQTKLVNGQSHISLSKAEFQDALEKLNMGITDLQGLRLYVAAAIIEYPAGDMYKAELTSR

SEQ ID NO: 900427 - protein, 137 aa, Homo sapiens
DSWPPCVLLKSASVLRVRLRAWGGAVEAGWPGPPPHCLMGSPTSGKCPRQRRALERGLQDEDGYRMKFACYYPRVEYGQSSHRGPGLTLPRGPAVLVSLGVACSSYRSCTQPVCSDTNFLPSQPQSNSPFPLLLTPS

SEQ ID NO: 900428 - protein, 75 aa, Homo sapiens
AAGPREWVPHLSSPRLARSPPPGSAWALRLCRKCRWGWCKPASATLYDYYNPERRCSVFYGAPSKEQTLGHLVFC

SEQ ID NO: 900429 - protein, 1506 aa, Homo sapiens
MRLLWGLIWASSFFTLSLQKPRLLLFSPSVVHLGVPLSVGVQLQDVPRGQVVKGSVFLRNPSRNNVPCSPKVDFTLSSERDFALLSLQVPLKDAKSCGLHQLLRGPEVQLVAHSPWLKDSLSRTTNIQGINLLFSSRRGHLFLQTDQPIYNPGQRVRYRVFALDQKMRPSTDTITVMVENSHGLRVRKKEVYMPSSIFQDDFVIPDISEPGTWKISARFSDGLESNSSTQFEVKKYAGEWQSHISLSKAEFQDALEKLNMGITDLQGLRLYVAAAIIEYPGGEMEEAELTSWYFVSSPFSLDLSKTKRHLVPGAPFLLQALVREMSGSPASGIPVKVSATVSSPGSVPEVQDIQQNTDGSGQVSIPIIIPQTISELQLSVSAGSPHPAIARLTVAAPPSGGPGFLSIERPDSRPPRVGDTLNLNLRAVGSGATFSHYYYMILSRGQIVFMNREPKRTLTSVSVFVDHHLAPSFYFVAFYYHGDHPVANSLRVDVQAGACEGKLELSVDGAKQYRNGESVKLHLETDSLALVALGALDTALYAAGSKSHKPLNMGKVFEAMNSYDLGCGPGGGDSALQVFQAAGLAFSDGDQWTLSRKRLSCPKEKTTRKKRNVNFQKAINEKLGQYASPTAKRCCQDGVTRLPMMRSCEQRAARVQQPDCREPFLSCCQFAESLRKKSRDKGQAGLQRALEILQEEDLIDEDDIPVRSFFPENWLWRVETVDRFQILTLWLPDSLTTWEIHGLSLSKTKGLCVATPVQLRVFREFHLHLRLPMSVRRFEQLELRPVLYNYLDKNLTVSVHVSPVEGLCLAGGGGLAQQVLVPAGSARPVAFSVVPTAAAAVSLKVVARGSFEFPVGDAVSKVLQIEKEGAIHREELVYELNPLDHRGRTLEIPGNSDPNMIPDGDFNSYVRVTASDPLDTLGSEGALSPGGVASLLRLPRGCGEQTMIYLAPTLAASRYLDKTEQWSTLPPETKDHAVDLIQKGYMRIQQFRKADGSYAAWLSRDSSTWLTAFVLKVLSLAQEQVGGSPEKLQETSNWLLSQQQADGSFQDLSPVIHRSMQGGLVGNDETVALTAFVTIALHHGLAVFQDEGAEPLKQRVEASISKANSFLGEKASAGLLGAHAAAITAYALTLTKAPVDLLGVAHNNLMAMAQETGDNLYWGSVTGSQSNAVSPTPAPRNPSDPMPQAPALWIETTAYALLHLLLHEGKAEMADQAAAWLTRQGSFQGGFRSTQDTVIALDALSAYWIASHTTEERGLNVTLSSTGRNGFKSHALQLNNRQIRGLEEELQFSLGSKINVKVGGNSKGTLKVLRTYNVLDMKNTTCQDLQIEVTVKGHVEYTMEANEDYEDYEYDELPAKDDPDAPLQPVTPLQLFEGRRNRRRREAPKVVEEQESRVHYTVCIWRNGKVGLSGMAIADVTLLSGFHALRADLEKLTSLSDRYVSHFETEGPHVLLYFDSVPTSRECVGFEAVQEVPVGLVQAGQRNPVRLLQPRAQMFCVLRGTK

SEQ ID NO: 900430 - protein, 1324 aa, Homo sapiens
MSASLRPSSMKCSYYIQARYIYGKPVQGVAYVRFGLLDEDGKKTFFRGLESQTKLVNGQSHISLSKAEFQDALEKLNMGITDLQGLRLYVAAAIIEYPGGEMEEAELTSWYFVSSPFSLDLSKTKRHLVPGAPFLLQALVREMSGSPASGIPVKVSATVSSPGSVPEVQDIQQNTDGSGQVSIPIIIPQTISELQLSVSAGSPHPAIARLTVAAPPSGGPGFLSIERPDSRPPRVGDTLNLNLRAVGSGATFSHYYYMILSRGQIVFMNREPKRTLTSVSVFVDHHLAPSFYFVAFYYHGDHPVANSLRVDVQAGACEGKLELSVDGAKQYRNGESVKLHLETDSLALVALGALDTALYAAGSKSHKPLNMGKVFEAMNSYDLGCGPGGGDSALQVFQAAGLAFSDGDQWTLSRKRLSCPKEKTTRKKRNVNFQKAINEKLGQYASPTAKRCCQDGVTRLPMMRSCEQRAARVQQPDCREPFLSCCQFAESLRKKSRDKGQAGLQRALEILQEEDLIDEDDIPVRSFFPENWLWRVETVDRFQILTLWLPDSLTTWEIHGLSLSKTKGLCVATPVQLRVFREFHLHLRLPMSVRRFEQLELRPVLYNYLDKNLTVSVHVSPVEGLCLAGGGGLAQQVLVPAGSARPVAFSVVPTAAAAVSLKVVARGSFEFPVGDAVSKVLQIEKEGAIHREELVYELNPLDHRGRTLEIPGNSDPNMIPDGDFNSYVRVTASDPLDTLGSEGALSPGGVASLLRLPRGCGEQTMIYLAPTLAASRYLDKTEQWSTLPPETKDHAVDLIQKGYMRIQQFRKADGSYAAWLSRDSSTWLTAFVLKVLSLAQEQVGGSPEKLQETSNWLLSQQQADGSFQDLSPVIHRSMQGGLVGNDETVALTAFVTIALHHGLAVFQDEGAEPLKQRVEASISKANSFLGEKASAGLLGAHAAAITAYALTLTKAPVDLLGVAHNNLMAMAQETGDNLYWGSVTGSQSNAVSPTPAPRNPSDPMPQAPALWIETTAYALLHLLLHEGKAEMADQAAAWLTRQGSFQGGFRSTQDTVIALDALSAYWIASHTTEERGLNVTLSSTGRNGFKSHALQLNNRQIRGLEEELQFSLGSKINVKVGGNSKGTLKVLRTYNVLDMKNTTCQDLQIEVTVKGHVEYTMEANEDYEDYEYDELPAKDDPDAPLQPVTPLQLFEGRRNRRRREAPKVVEEQESRVHYTVCIWRNGKVGLSGMAIADVTLLSGFHALRADLEKLTSLSDRYVSHFETEGPHVLLYFDSVPTSRECVGFEAVQEVPVGLVQAGQRNPVRLLQPRAQMFCVLRGTK

SEQ ID NO: 900431 - protein, 1568 aa, Homo sapiens
MRLLWGLIWASSFFTLSLQKPRLLLFSPSVVHLGVPLSVGVQLQDVPRGQVVKGSVFLRNPSRNNVPCSPKVDFTLSSERDFALLSLQVPLKDAKSCGLHQLLRGPEVQLVAHSPWLKDSLSRTTNIQGINLLFSSRRGHLFLQTDQPIYNPGQRVRYRVFALDQKMRPSTDTITVMVENSHGLRVRKKEVYMPSSIFQDDFVIPDISEPGTWKISARFSDGLESNSSTQFEVKKYVLPNFEVKITPGKPYILTVPGHLDEMQLDIQARYIYGKPVQGVAYVRFGLLDEDGKKTFFRGLESQTKLVNGQSHISLSKAEFQDALEKLNMGITDLQGLRLYVAAAIIEYPGGEMEEAELTSWYFVSSPFSLDLSKTKRHLVPGAPFLLQALVREMSGSPASGIPVKVSATVSSPGSVPEVQDIQQNTDGSGQVSIPIIIPQTISELQLSVSAGSPHPAIARLTVAAPPSGGPGFLSIERPDSRPPRVGDTLNLNLRAVGSGATFSHYYYMILSRGQIVFMNREPKRTLTSVSVFVDHHLAPSFYFVAFYYHGDHPVANSLRVDVQAGACEGKLELSVDGAKQYRNGESVKLHLETDSLALVALGALDTALYAAGSKSHKPLNMGKVFEAMNSYDLGCGPGGGDSALQVFQAAGLAFSDGDQWTLSRKRLSCPKEKTTRKKRNVNFQKAINEKLGQYASPTAKRCCQDGVTRLPMMRSCEQRAARVQQPDCREPFLSCCQFAESLRKKSRDKGQAGLQRALEILQEEDLIDEDDIPVRSFFPENWLWRVETVDRFQILTLWLPDSLTTWEIHGLSLSKTKGLCVATPVQLRVFREFHLHLRLPMSVRRFEQLELRPVLYNYLDKNLTVSVHVSPVEGLCLAGGGGLAQQVLVPAGSARPVAFSVVPTAAAAVSLKVVARGSFEFPVGDAVSKVLQIEKEGAIHREELVYELNPLDHRGRTLEIPGNSDPNMIPDGDFNSYVRVTASDPLDTLGSEGALSPGGVASLLRLPRGCGEQTMIYLAPTLAASRYLDKTEQWSTLPPETKDHAVDLIQKGYMRIQQFRKADGSYAAWLSRDSSTWLTAFVLKVLSLAQEQVGGSPEKLQETSNWLLSQQQADGSFQDLSPVIHRSMQGGLVGNDETVALTAFVTIALHHGLAVFQDEGAEPLKQRVEASISKANSFLGEKASAGLLGAHAAAITAYALTLTKAPVDLLGVAHNNLMAMAQETGDNLYWGSVTGSQSNAVSPTPAPRNPSDPMPQAPALWIETTAYALLHLLLHEGKAEMADQAAAWLTRQGSFQGGFRSTQDTVIALDALSAYWIASHTTEERGLNVTLSSTGRNGFKSHALQLNNRQIRGLEEELQFSLGSKINVKVGGNSKGTLKVLRTYNVLDMKNTTCQDLQIEVTVKGHVEYTMEANEDYEDYEYDELPAKDDPDAPLQPVTPLQLFEGRRNRRRREAPKVVEEQESRVHYTVCIWRNGKVGLSGMAIADVTLLSGFHALRADLEKLSSPRLARSPPPGSAWALRLCRKCRWGWCKPASATLYDYYNPERRCSVFYGAPSKEQTLGHLVFC

SEQ ID NO: 900432 - protein, 1574 aa, Homo sapiens; identical to SEQ ID NO: 900411

SEQ ID NO: 900433 - protein, 1339 aa, Homo sapiens
MRLLWGLIWASSFFTLSLQKPRLLLFSPSVVHLGVPLSVGVQLQDVPRGQVVKGSVFLRNPSRNNVPCSPKVDFTLSSERDFALLSLQVPLKDAKSCGLHQLLRGPEVQLVAHSPWLKDSLSRTTNIQGINLLFSSRRGHLFLQTDQPIYNPGQRVRYRVFALDQKMRPSTDTITVMVENSHGLRVRKKEVYMPSSIFQDDFVIPDISEPGTWKISARFSDGLESNSSTQFEVKKYVLPNFEVKITPGKPYILTVPGHLDEMQLDIQARYIYGKPVQGVAYVRFGLLDEDGKKTFFRGLESQTKLVNGQSHISLSKAEFQDALEKLNMGITDLQGLRLYVAAAIIEYPGGEMEEAELTSWYFVSSPFSLDLSKTKRHLVPGAPFLLQALVREMSGSPASGIPVKVSATVSSPGSVPEVQDIQQNTDGSGQVSIPIIIPQTISELQLSVSAGSPHPAIARLTVAAPPSGGPGFLSIERPDSRPPRVGDTLNLNLRAVGSGATFSHYYYMILSRGQIVFMNREPKRTLTSVSVFVDHHLAPSFYFVAFYYHGDHPVANSLRVDVQAGACEGKLELSVDGAKQYRNGESVKLHLETDSLALVALGALDTALYAAGSKSHKPLNMGKVFEAMNSYDLGCGPGGGDSALQVFQAAGLAFSDGDQWTLSRKRLSCPKEKTTRKKRNVNFQKAINEKLGQYASPTAKRCCQDGVTRLPMMRSCEQRAARVQQPDCREPFLSCCQFAESLRKKSRDKGQAGLQRALEILQEEDLIDEDDIPVRSFFPENWLWRVETVDRFQILTLWLPDSLTTWEIHGLSLSKTKGLCVATPVQLRVFREFHLHLRLPMSVRRFEQLELRPVLYNYLDKNLTVSVHVSPVEGLCLAGGGGLAQQVLVPAGSARPVAFSVVPTAAAAVSLKVVARGSFEFPVGDAVSKVLQIEKEGAIHREELVYELNPLDHRGRTLEIPGNSDPNMIPDGDFNSYVRVTASDPLDTLGSEGALSPGGVASLLRLPRGCGEQTMIYLAPTLAASRYLDKTEQWSTLPPETKDHAVDLIQKGYMRIQQFRKADGSYAAWLSRDSSTWLTAFVLKVLSLAQEQVGGSPEKLQETSNWLLSQQQADGSFQDLSPVIHRSMQGGLVGNDETVALTAFVTIALHHGLAVFQDEGAEPLKQRVEASISKANSFLGEKASAGLLGAHAAAITAYALTLTKAPVDLLGVAHNNLMAMAQETGDNLYWGSVTGSQSNAVSPTPAPRNPSDPMPQAPALWIETTAYALLHLLLHEGKAEMADQAAAWLTRQGSFQGGFRSTQDTVIALDALSAYWIASHTTEERGLNVTLSSTGRNGL

SEQ ID NO: 900434 - protein, 1574 aa, Homo sapiens; identical to SEQ ID NO: 900411

SEQ ID NO: 900435 - protein, 1574 aa, Homo sapiens; identical to SEQ ID NO: 900411

SEQ ID NO: 900436 - protein, 156 aa, Homo sapiens
YRYKLNVGTRMCCRPAQPCTTTTTPSADVLCFTGHQVKSRLLATLCSAEVCQCAEGKCPRQRRALERGLQDEDGYRMKFACYYPRVEYGFQVKVLREDSRAAFRLFETKITQVLHFTKDVKAAANQMRNFLVRASLPPSLGTWERIFDHGSGWGHL

SEQ ID NO: 900437 - protein, 118 aa, Homo sapiens
RLCAVCSCVCCVCVCAVGKCPRQRRALERGLQDEDGYRMKFACYYPRVEYGFQVKVLREDSRAAFRLFETKITQVLHFTKDVKAAANQMRNFLVRASLPPSLGTWERIFDHGSGWGHL

SEQ ID NO: 900438 - protein, 1084 aa, Homo sapiens
MRLLWGLIWASSFFTLSLQKPRLLLFSPSVVHLGVPLSVGVQLQDVPRGQVVKGSVFLRNPSRNNVPCSPKVDFTLSSERDFALLSLQVPLKDAKSCGLHQLLRGPEVQLVAHSPWLKDSLSRTTNIQGINLLFSSRRGHLFLQTDQPIYNPGQRVRYRVFALDQKMRPSTDTITVMVENSHGLRVRKKEVYMPSSIFQDDFVIPDISEPGTWKISARFSDGLESNSSTQFEVKKYVLPNFEVKITPGKPYILTVPGHLDEMQLDIQARYIYGKPVQGVAYVRFGLLDEDGKKTFFRGLESQTKLVNGQSHISLSKAEFQDALEKLNMGITDLQGLRLYVAAAIIEYPGGEMEEAELTSWYFVSSPFSLDLSKTKRHLVPGAPFLLQALVREMSGSPASGIPVKVSATVSSPGSVPEVQDIQQNTDGSGQVSIPIIIPQTISELQLSVSAGSPHPAIARLTVAAPPSGGPGFLSIERPDSRPPRVGDTLNLNLRAVGSGATFSHYYYMILSRGQIVFMNREPKRTLTSVSVFVDHHLAPSFYFVAFYYHGDHPVANSLRVDVQAGACEGKLELSVDGAKQYRNGESVKLHLETDSLALVALGALDTALYAAGSKSHKPLNMGKVFEAMNSYDLGCGPGGGDSALQVFQAAGLAFSDGDQWTLSRKRLSCPKEKTTRKKRNVNFQKAINEKLGQYASPTAKRCCQDGVTRLPMMRSCEQRAARVQQPDCREPFLSCCQFAESLRKKSRDKGQAGLQRALEILQEEDLIDEDDIPVRSFFPENWLWRVETVDRFQILTLWLPDSLTTWEIHGLSLSKTKGLCVATPVQLRVFREFHLHLRLPMSVRRFEQLELRPVLYNYLDKNLTVSVHVSPVEGLCLAGGGGLAQQVLVPAGSARPVAFSVVPTAAAAVSLKVVARGSFEFPVGDAVSKVLQIEKEGAIHREELVYELNPLDHRGRTLEIPGNSDPNMIPDGDFNSYVRVTASDPLDTLGSEGALSPGGVASLLRLPRGCGEQTMIYLAPTLAASRYLDKTEQWSTLPPETKDHAVDLIQKGSGCKGKQEGGQERTVTGRWTAQEATEGKKGGP

SEQ ID NO: 900439 - protein, 244 aa, Homo sapiens
MRLLWGLIWASSFFTLSLQKPRLLLFSPSVVHLGVPLSVGVQLQDVPRGQVVKGSVFLRNPSRNNVPCSPKVDFTLSSERDFALLSLQVPLKDAKSCGLHQLLRGPEVQLVAHSPWLKDSLSRTTNIQGINLLFSSRRGHLFLQTDQPIYNPGQRVRYRVFALDQKMRPSTDTITVMVENSHGLRVRKKEVYMPSSIFQDDFVIPDISEPGTWKISARFSDGLESNSSTQFEVKKYGESWKLEG

SEQ ID NO: 900440 - protein, 600 aa, Homo sapiens
CTPVFVRGLSSPSAAMALLSEGLDELPAACLSPCGPPNPTELFSESRRLALEELVAGGPEAFAAFLRRERLARFLNPDEVHAILRAAERPGEEGAAAAAAAEDSFGSSHDCSSGTYFPEQSDLEPPLLELGWPAFYQGAYRGATRVETHFQPRGAGEGGPYGCKDALRQQLRSAREVIAVVMDVFTDIDIFRDLQEICRKQGVAVYILLDQALLSQFLDMCMDLKVHPEQEKLMTVRTITGNIYYARSGTKIIGKVHEKFTLIDGIRVATGSYSFTWTDGKLNSSNLVILSGQVVEHFDLEFRILYAQSKPISPKLLSHFQSSNKFDHLTNRKPQSKELTLGNLLRMRLARLSSTPRKADLDPEMPAEGKAERKPHDCESSTVSEEDYFSSHRDELQSRKAIDAATQTEPGEEMPGLSVSEVGTQTSITTACAGTQTAVITRIASSQTTIWSRSTTTQTDMDENILFPRGTQSTEGSPVSKMSVSRSSSLKSSSSVSSQGSVASSTGSPASIRTTDFHNPGYPKYLGTPHLELYLSDSLRNLNKERQFHFAGIRSRLNHMLAMLSRRTLFTENHLGLHSGNFSRVNLLAVRDVALYPSYQ

SEQ ID NO: 900441 - protein, 586 aa, Homo sapiens
  misc_feature (578)..(578): Xaa can be any naturally occurring amino acid
  misc_feature (580)..(580): Xaa can be any naturally occurring amino acid
CTPVFVRGLSSPSAAMALLSEGLDELPAACLSPCGPPNPTELFSESRRLALEELVAGGPEAFAAFLRRERLARFLNPDEVHAILRAAERPGEEGAAAAAAAEDSFGSSHDCSSGTYFPEQSDLEPPLLELGWPAFYQGAYRGATRVETHFQPRGAGEGGPYGCKDALRQQLRSAREVIAVVMDVFTDIDIFRDLQEICRKQGVAVYILLDQALLSQFLDMCMDLKVHPEQEKLMTVRTITGNIYYARSGTKIIGKVHEKFTLIDGIRVATGSYSFTWTDGKLNSSNLVILSGQVVEHFDLEFRILYAQSKPISPKLLSHFQSSNKFDHLTNRKPQSKELTLGNLLRMRLARLSSTPRKADLDPEMPAEGKAERKPHDCESSTVSEEDYFSSHRDELQSRKAIDAATQTEPGEEMPGLSVSEVGTQTSITTACAGTQTAVITRIASSQTTIWSRSTTTQTDMDENILFPRGTQSTEGSPVSKMSVSRSSSLKSSSSVSSQGSVASSTGSPASIRTTDFHNPGYPKYLGTPHLELYLSDSLRNLNKERQFHFAGIRSRLNHMLAMLSRRTLFTENHLGRXSXKGSKKN

SEQ ID NO: 900442 - protein, 217 aa, Homo sapiens
RILRTELELRDELQSRKAIDAATQTEPGEEMPGLSVSEVGTQTSITTACAGTQTAVITRIASSQTTIWSRSTTTQTDMDENILFPRGTQSTEGSPVSKMSVSRSSSLKSSSSVSSQGSVASSTGSPASIRTTDFHNPGYPKYLGTPHLELYLSDSLRNLNKERQFHFAGIRSRLNHMLAMLSRRTLFTENHLGLHSGNFSRVNLLAVRDVALYPSYQ

SEQ ID NO: 900443 - protein, 600 aa, Homo sapiens; identical to SEQ ID NO: 900440

SEQ ID NO: 900444 - protein, 650 aa, Homo sapiens
CTPVFVRGLSSPSAAMALLSEGLDELPAACLSPCGPPNPTELFSESRRLALEELVAGGPEAFAAFLADLLMLPCASGFTGAPPGLMCCTGQYSCCRCAVTDGPVEDGMGGCCACAVLCCAVPDVTICICASSGTDVASICGTVLTPDATSVTLVKHTMRSFGCFVIGPALLTMWLPYLLGCRRCCTMDCDSRMTLSAGTGWADRVVALPGCNGLLLLPGSSARVREVIAVVMDVFTDIDIFRDLQEICRKQGVAVYILLDQALLSQFLDMCMDLKVHPEQEKLMTVRTITGNIYYARSGTKIIGKVHEKFTLIDGIRVATGSYSFTWTDGKLNSSNLVILSGQVVEHFDLEFRILYAQSKPISPKLLSHFQSSNKFDHLTNRKPQSKELTLGNLLRMRLARLSSTPRKADLDPEMPAEGKAERKPHDCESSTVSEEDYFSSHRDELQSRKAIDAATQTEPGEEMPGLSVSEVGTQTSITTACAGTQTAVITRIASSQTTIWSRSTTTQTDMDENILFPRGTQSTEGSPVSKMSVSRSSSLKSSSSVSSQGSVASSTGSPASIRTTDFHNPGYPKYLGTPHLELYLSDSLRNLNKERQFHFAGIRSRLNHMLAMLSRRTLFTENHLGLHSGNFSRVNLLAVRDVALYPSYQ

SEQ ID NO: 900445 - protein, 359 aa, Homo sapiens
MTLESIMACCLSEEAKEARRINDEIERQLRRDKRDARRELKLLLLGTGESGKSTFIKQMRIIHGSGYSDEDKRGFTKLVYQNIFTAMQAMIRAMDTLKIPYKYEHNKAHAQLVREVDVEKVSAFENPYVDAIKSLWNDPGIQECYDRRREYQLSDSTKYYLNDLDRVADPAYLPTQQDVLRVRVPTTGIIEYPFDLQSVIFRMVDVGGQRSERRKWIHCFENVTSIMFLVALSEYDQVLVESDNENRMEESKALFRTIITYPWFQNSSVILFLNKKDLLEEKIMYSHLVDYFPEYDGPQRDAQAAREFILKMFVDLNPDSDKINYSHFTCATDTENIRFVFAAVKDTILQLNLKEYNLV

SEQ ID NO: 900446 - protein, 359 aa, Homo sapiens; identical to SEQ ID NO: 900445

SEQ ID NO: 900447 - protein, 353 aa, Homo sapiens
MACCLSEEAKEARRINDEIERQLRRDKRDARRELKLLLLGTGESGKSTFIKQMRIIHGSGYSDEDKRGFTKLVYQNIFTAMQAMIRAMDTLKIPYKYEHNKAHAQLVREVDVEKVSAFENPYVDAIKSLWNDPGIQECYDRRREYQLSDSTKYYLNDLDRVADPAYLPTQQDVLRVRVPTTGIIEYPFDLQSVIFRMVDVGGQRSERRKWIHCFENVTSIMFLVALSEYDQVLVESDNENRMEESKALFRTIITYPWFQNSSVILFLNKKDLLEEKIMYSHLVDYFPEYDGPQRDAQAAREFILKMFVDLNPDSDKIIYSHFTCATDTENIRFVFAAVKDTILQLNLKEYNLV

SEQ ID NO: 900448 - protein, 353 aa, Homo sapiens; identical to SEQ ID NO: 900447

SEQ ID NO: 900449 - protein, 353 aa, Homo sapiens; identical to SEQ ID NO: 900447

SEQ ID NO: 900450 - protein, 353 aa, Homo sapiens; identical to SEQ ID NO: 900447

SEQ ID NO: 900451 - protein, 122 aa, Homo sapiens
RQSLGSLTSPGGTSLCLTRPSIPEARGSALPDTGMCVCVSGLSSLHCWGFRNTGNVAGLAEVSVVPPLLPCLWSYCMCQGRLHPVTSQSILMHFRKLFPFLARALRILVPHKECHCLKQNIL

SEQ ID NO: 900452 - protein, 432 aa, Homo sapiens
TLLVEIHPVNNVKVLKAVDSYIWVQFLYPHIESHPLPENHLLLISEEKYIEQFRIHVAQEDGNRVVIKNSGHLPRDRIAEDFVWAQWDMSEQRLYYIDLKKSRSILKCIQFYADESYNLMFEVPLDISLSNSGFKLVNFGCDYHQYRDKFSKHLTLCVFTNHTGSLCVCYSPKCASWGQITYSVFYIHKGHSKTFTTSLENVGSHMTKGITFLNLDYYVAVYLPGHFFHLLNVQHPDLICHNLFLTGNNEMIDMLPHCPLQSLSGSLVLDCCSGKLYRALLSQSSLLQLLQNTCLDCEKMAALHCALYCGQGAQFLEAQIIQWISENVSACHSFDLIQEFIIASSYWSVYSETSNMDKLLPHSSVLTWNTEIPGITLVTEDIALPLMKVLSFKGYWEKLNSNLEYVKYAKPHFHYNNSVVRREWHNLISEEV

SEQ ID NO: 900453 - protein, 122 aa, Homo sapiens; identical to SEQ ID NO: 900451

SEQ ID NO: 900454 - protein, 432 aa, Homo sapiens; identical to SEQ ID NO: 900452

SEQ ID NO: 900455 - protein, 411 aa, Homo sapiens
TLLVEIHPVNNVKVLKAVDSYIWVQFLYPHIESHPLPENHLLLISEEKYIEQFRIHVAQEDGNRVVIKNSGHLPRDRIAEDFVWAQWDMSEQRLYYIDLKKSRSILKCIQFYADESYNLMFEVPLDISLSNSGFKLVNFGCDYHQYRDKFSKHLTLCVFTNHTGSLCVCYSPKCASWGQITYSVFYIHKGHSKTFTTSLENVGSHMTKGITFLNLDYYVAVYLPGHFFHLLNVQHPDLICHNLFLTGNNEMIDMLPHCPLQSLSGSLVLDCCSGKLYRALLSQSSLLQLLQNTCLDCEKMAALHCALYCGQGAQFLEAQWRQRADLNTNRVLSDFLKIIQWISENVSACHSFDLIQEFIIASSYWSVYSETSNMDKLLPHSSVLTWNTIVQGGAAIVDTHRVTSGSPRRAI

SEQ ID NO: 900456 - protein, 248 aa, Homo sapiens
MGLMVSELKDHFLRHLQGVEKKKIEQMVLDYISKLLDLICHIVETNWRKHNLHSWVLHFNSRGSAAEFAVFHIMTRILEATNSLFLPLPPGFHTLHTILGVQCLPLHNLLHCIDSGVLLLTETAVIRLMKDLDNTEKNEKLKFSIIVRLPPLIGQKICRLWDHPMSSNIISRNHVTRLLQNYKKQPRNSMINKSSFSVEFLPLNYFIEILTDIESSNQALYPFEGHDNVDAEFVEEAALKHTAMLLGL

SEQ ID NO: 900457 - protein, 245 aa, Homo sapiens [sequence omitted]

SEQ ID NO: 900458 - protein, 248 aa, Homo sapiens; identical to SEQ ID NO: 900456

SEQ ID NO: 900459 - protein, 451 aa, Homo sapiens
TLLVEIHPVNNVKVLKAVDSYIWVQFLYPHIESHPLPENHLLLISEEKYIEQFRIHVAQEDGNRVVIKNSGHLPRDRIAEDFVWAQWDMSEQRLYYIDLKKSRSILKCIQFYADESYNLMFEVPLDISLSNSGFKLVNFGCDYHQYRDKFSKHLTLCVFTNHTGSLCVCYSPKCASWGQITYSVFYIHKGHSKTFTTSLENVGSHMTKGITFLNLDYYVAVYLPGHFFHLLNVQHPDLICHNLFLTGNNEMIDMLPHCPLQSLSGSLVLDCCSGKLYRALLSQSSLLQLLQNTCLDCEKMAALHCALYCGQGAQFLEAQIIQWISENVSACHSFDLIQEFIIASSYWSVYSETSNMDKLLPHSSVLTWNTEIPGITLVTEDIALPLMKVLSFKGYWEKLNSNLEYVKYAKPHFHYNNSVVRREWHNLISEEKTGKRRSAAYVRNILDNAVK

SEQ ID NO: 900460 - protein, 1099 aa, Homo sapiens
MFGYAPPNSQYWLCLSKKQNPLELEEVNISVTSASGRLELPRASGRHKCLLLGDRSPQNLPVSQLGGLVLELSRGPHWPPPGMINRAVWSPNVWKLMELRIPLSRKSSRGVWLGLSPWGPPGRPVFTWSMGATTLLKTCITVEGRNRGPGPFLSEGHGEGWEREERQWPRPILAVAHGTLAVWPWPPVSLKQGFKLTLERVTNPKRSIEVRCHGLIDPCHGITCKTLSCHCSLVLFENLTKKKFQVWNMGVICTSWGIKKKSMVGNYKEVTKEVTSSANKLGNFFFFQFRISLEDIDGITLWHYCIIYHLSVLTLECTLFNVNAVVDISKAALKKYMHLSVFLFLIVFSYGLYTFVSKGDRFLFEIFISVILQKHSEKVREALSLSYLRKTWMSLATEELCFNQVMCISTSTELFIVTVISVVPLTLFLEGFLSLGNSAFNSWYSGLHACLVKPMRFIQLKIQMANDQQIQIYGGLTFRELLYVACFNTDPPRALLPSFRGGFLMAVLQGLPEMQWCLRSTKKAGNLWYEARPPRRASGNRMIRPLNDSNFEAKYYFMKGLHCQSDEYGISNPVLLSCQNHFNGVSLQYAPRGKILQAALEVTMKNVDVFEYKACFVFCCCSNGIHRVFEKCIYIKRSRGLIAGWLPFAVGFCYLVLITVNVPSLLAPELYSIVAALALRVVDVAFSFIVKNMLEAMNVYKSLNYVIFFSSSFFSLYLIILQLGNREPSLFCIEEGFTSASELLFMNEKTVLCMYSSLHWPGSELNRVYALSNIGDKGSKKSPKRRRTSENLLGPPSPSLHKYSAREARMTADRVYGHRVVSEDLAGAENSGRLKIWNKVTELRKHLNLVQTRRQHSLQQLTYLSVFRCGLPFICDLCFISKCLSSKDVALAQWEKLGSDYKSRGVIIIKIKCKSSGQSQHMSSFHLQDLLSEQNCKESLFVIELILKQIVYKCELKLYINSNCTFKAVAVFRLSYHFIVSNVHLLYQRKTGKARNTSHSKEIRESVEILFGSYSVVSFAAQTNVVTHFLRNTILHCQAYEGSNQIFIVIQFGSFRDFFFKLLWDKGHLLEGWEGGRIFKCKTFPSLDQGVGSFQNNQN

SEQ ID NO: 900461 - protein, 68 aa, Homo sapiens
  misc_feature (19)..(19): Xaa can be any naturally occurring amino acid
  misc_feature (36)..(36): Xaa can be any naturally occurring amino acid
  misc_feature (39)..(39): Xaa can be any naturally occurring amino acid
MQLKGTKEKRSEGIAMAQXTRTIRTIRIGPNIRSSXTVXRVEPRTELRVKLNSEKSETGGSKSNRSHR

SEQ ID NO: 900462 - protein, 239 aa, Homo sapiens
MAHAGRTGYDNREIVMKYIHYKLSQRGYEWDAGDVGAAPPGAAPAPGIFSSQPGHTPHPAASRDPVARTSPLQTPAAPGAAAGPALSPVPPVVHLTLRQAGDDFSRRYRRDFAEMSSQLHLTPFTARGRFATVVEELFRDGVNWGRIVAFFEFGGVMCVESVNREMSPLVDNIALWMTEYLNRHLHTWIQDNGGWDAFVELYGPSMRPLFDFSWLSLKTLLSLALVGACITLGAYLGHK

SEQ ID NO: 900463 - protein, 1099 aa, Homo sapiens
MFGYAPPNSQYWLCLSKKQNPLELEEVNISVTSASGRLELPRASGRHKCLLLGDRSPQNLPVSQLGGLVLELSRGPHWPPPGMINRAVWSPNVWKLMELRIPLSRKSSRGVWLGLSPWGPPGRPVFTWSMGATTLLKTCITVEGRNRGPGPFLSEGHGEGWEREERQWPRPILAVAHGTLAVWPWPPVSLKQGFKMTLERVTNPKRSIEVRCHGLLTPVYGITCKTLSCHCSLVLFENLTKKKFQVWNMGVICTSWGIKKKSMVGNYKEVTKEVTSSANKLGNFFFFQFRISLETLMENSVALLHYIPFICINFGMYSVQCLMLWLIFQKAALKKYMHLSVFLFLIVFSYGLYTFVSKGDRFLFEIFISVILQKHSEKVREALSLSYLRKTWMSLATEELCFNQVMCISTSTELFIVTVISVVPLTLFLEGFLSLGNSAFNSWYSGLHACLVKPMRFIQLKIQMANDQQIQIYGGLTFRELLYVACFNTDPPRALLPSFRGGFLMAVLQGLPEMQWCLRSTKKAGNLWYEARPPRRASGNRMIRPLNDSNFEAKYYFMKGLHCQSDEYGISNPVLLSCQNHFNGVSLQYAPRGKILQAALEVTMKNVDVFEYKACFVFCCCSNGIHRVFEKCIYIKRSRGLIAGWLPFAVGFCYLVLITVNVPSLLAPELYSIVAALALRVVDVAFSFIVKNMLEAMNVYKSLNYVIFFSSSFFSLYLIILQLGNREPSLFCIEEGFTSASYLLFMNEKTVLCMYSSLHWPGSELNRVYALSNIGDKGSKKSPKRRRTSENLLGPPSPSLHKYSAREARMTADRVYGHRVVSEDLAGAENSGRLKIWNKVTELRKHLNLVQTRRQHSLQQLTYLSVFRCGLPFICDLCFISKCLSSKDVALAQWEKLGSDYKSRGVIIIKIKCKSSGQSQHMSSFHLQDLLSEQNCKYSLFVIELILKQIVYKCELKLYINSNCTFKAVAVFRLSYHFIVSNVHLLYQRKTGKARNTSHSKEIRESVEILFGSYSVVSFAAQTNVVTHFLRNTILHCQAYEGSNQIFIVIQFGSFRDFFFKLLWDKGHLLEGWEGGRIFKCKTFPSLDQGVGSFQNNQN

SEQ ID NO: 900464 - protein, 205 aa, Homo sapiens
MAHAGRTGYDNREIVMKYIHYKLSQRGYEWDAGDVGAAPPGAAPAPGIFSSQPGHTPHPAASRDPVARTSPLQTPAAPGAAAGPALSPVPPVVHLTLRQAGDDFSRRYRRDFAEMSSQLHLTPFTARGRFATVVEELFRDGVNWGRIVAFFEFGGVMCVESVNREMSPLVDNIALWMTEYLNRHLHTWIQDNGGWVGALGDVSLG

SEQ ID NO: 900465 - protein, 1053 aa, Homo sapiens
EIDEEHVEDDGLSLDIQESEYMCNEETEIKEAQSYQNSPVSSATNQDAGYGSPFSESSDQLAHFKGSSSREEKEDPQCPDSVSYPQDSLAQIKAVYANLFSESCWSSLALDLKKSGSTTSTNDASQKESSAPTPTPPTCPVSTTGPTTSTPSTSCSSSTSHSSTTSTSSSSGYDWHQAALAKTLQQTSSYGLLPEPSLFSTVQLYRQNNKLYGSVFTGASKFRCKDCSAAYDTLVELTVHMNETGHYRDDNRDKDSEKTKRWSKPRKRSLMEMEGKEDAQKVLKCMYCGHSFESLQDLSVHMIKTKHYQKVPLKEPVPAITKLVPSTKKRALQDLAPPCSPEPAGMAAEVALSESAKDQKAANPYVTPNNRYGYQNGASYTWQFEARKAQILKCMECGSSHDTLQQLTAHMMVTGHFLKVTTSASKKGKQLVLDPVVEEKIQSIPLPPTTHTRLPASSIKKQPDSPAGSTTSEEKKEPEKEKPPVAGDAEKIKEESEDSLEKFEPSTLYPYLREEDLDDSPKGGLDILKSLENTVSTAISKAQNGAPSWGGYPSIHAAYQLPGTVKPLPAAVQSVQVQPSYAGGVKSLSSAEHNALLHSPGSLTPPPHKSNVSAMEELVEKVTGKVNIKKEERPPEKEKSSLAKAASPIAKENKDFPKTEEVSGKPQKKGPEAETGKAKKEGPLDVHTPNGTEPLKAKVTNGCNNLGIIMDHSPEPSFINPLSALQSIMNTHLGKVSKPVSPSLDPLAMLYKISNSMLDKPVYPATPVKQADAIDRYYYENSDQPIDLTKSKNKPLVSSVADSVASPLRESALMDISDMVKNLTGRLTPKSSTPSTVSEKSDADGSSFEEALDELSPVHKRKGRQSNWNPQHLLILQAQFASSLRETTEGKYIMSDLGPQERVHISKFTGLSMTTISHWLANVKYQLRRTGGTKFLKNLDTGHPVFFCNDCASQFRTASTYISHLETHLGFSLKDLSKLPLNQIQEQQNVSKVLTNKTLGPLGATEEDLGSTFQCKLCNRTFASKHAVKLHLSKTHGKSPEDHLIYVTELEKQ

SEQ ID NO: 900466 - protein, 1045 aa, Homo sapiens
EIDEEHVEDDGLSLDIQESEYMCNEETEIKEAQSYQNSPVSSATNQDAGYGSPFSESSDQLAHFKGSSSREEKEDPQCPDSVSYPQDSLAQIKAVYANLFSESCWSSLALDLKKSGSTTSTNDASQKESSAPTPTPPTCPVSTTGPTTSTPSTSCSSSTSHSSTTSTSSSSGYDWHQAALAKTLQQTSSYGLLPEPSLFSTVQLYRQNNKLYGSVFTGASKFRCKDCSAAYDTLVELTVHMNETGHYRDDNRDKDSEKTKRWSKPRKRSLMEMEGKEDAQKVLKCMYCGHSFESLQDLSVHMIKTKHYQKVPLKEPVPAITKLVPSTKKRALQDLAPPCSPEPAGMAAEVALSESAKDQKAANPYVTPNNRYGYQNGASYTWQFEARKAQILKCMECGSSHDTLQQLTAHMMVTGHFLKVTTSASKKGKQLVLDPVVEEKIQSIPLPPTTHTRLPASSIKKQPDSPAGSTTSEEKKEPEKEKPPVAGDAEKIKEESEDSLEKFEPSTLYPYLREEELDILKSLENTVSTAISKAQNGAPSWGGYPSIHAAYQLPGTVKPLPAAVQSVQVQPSYAGGVKSLSSAEHNALLHSPGSLTPPPHKSNVSAMEELVEKVTGKVNIKKEERPPEKEKSSLAKAASPIAKENKDFPKTEEVSGKPQKKGPEAETGKAKKEGPLDVHTPNGTEPLKAKVTNGCNNLGIIMDHSPEPSFINPLSALQSIMNTHLGKVSKPVSPSLDPLAMLYKISNSMLDKPVYPATPVKQADAIDRYYYENSDQPIDLTKSKNKPLVSSVADSVASPLRESALMDISDMVKNLTGRLTPKSSTPSTVSEKSDADGSSFEEALDELSPVHKRKGRQSNWNPQHLLILQAQFASSLRETTEGKYIMSDLGPQERVHISKFTGLSMTTISHWLANVKYQLRRTGGTKFLKNLDTGHPVFFCNDCASQFRTASTYISHLETHLGFSLKDLSKLPLNQIQEQQNVSKVLTNKTLGPLGATEEDLGSTFQCKLCNRTFASKHAVKLHLSKTHGKSPEDHLIYVTELEKQ

SEQ ID NO: 900467 - protein, 921 aa, Homo sapiens
NGASYTWQFEARKAQILKCMECGSSSTSHSSTTSTSSSSGYDWHQAALAKTLQQTSSYGLLPEPSLFSTVQLYRQNNKLYGSVFTGASKFRCKDCSAAYDTLVELTVHMNETGHYRDDNRDKDSEKTKRWSKPRKRSLMEMEGKEDAQKVLKCMYCGHSFESLQDLSVHMIKTKHYQKVPLKEPVPAITKLVPSTKKRALQDLAPPCSPEPAGMAAEVALSESAKDQKAANPYVTPNNRYGYQNGASYTWQFEARKAQILKCMECGSSHDTLQQLTAHMMVTGHFLKVTTSASKKGKQLVLDPVVEEKIQSIPLPPTTHTRLPASSIKKQPDSPAGSTTSEEKKEPEKEKPPVAGDAEKIKEESEDSLEKFEPSTLYPYLREEDLDDSPKGGLDILKSLENTVSTAISKAQNGAPSWGGYPSIHAAYQLPGTVKPLPAAVQSVQVQPSYAGGVKSLSSAEHNALLHSPGSLTPPPHKSNVSAMEELVEKVTGKVNIKKEERPPEKEKSSLAKAASPIAKENKDFPKTEEVSGKPQKKGPEAETGKAKKEGPLDVHTPNGTEPLKAKVTNGCNNLGIIMDHSPEPSFINPLSALQSIMNTHLGKVSKPVSPSLDPLAMLYKISNSMLDKPVYPATPVKQADAIDRYYYENSDQPIDLTKSKNKPLVSSVADSVASPLRESALMDISDMVKNLTGRLTPKSSTPSTVSEKSDADGSSFEEALDELSPVHKRKGRQSNWNPQHLLILQAQFASSLRETTEGKYIMSDLGPQERVHISKFTGLSMTTISHWLANVKYQLRRTGGTKFLKNLDTGHPVFFCNDCASQFRTASTYISHLETHLGFSLKDLSKLPLNQIQEQQNVSKVLTNKTLGPLGATEEDLGSTFQCKLCNRTFASKHAVKLHLSKTHGKSPEDHLIYVTELEKQ

SEQ ID NO: 900468 - protein, 632 aa, Homo sapiens
RLSCSKIQSFVTVTNREGPGGPECPMRTPQLALLQVFFLVFPDGVRPQPSSSPSGAVPTSLELQRGTDGGTLQSPSEATATRPAVPGLPTVVPTLVTPSAPGNRTVDLFPVLPICVCDLTPGACDINCCCDRDCYLLHPRTVFSFCLPGSVRSSSWVCVDNSVIFRSNSPFPSRVFMDSNGIRQFCVHVNNSNLNYFQKLQKVNATNFQALAAEFGGESFTSTFQTQSPPSFYRAGDPILTYFPKWSVISLLRQPAGVGAGGLCAESNPAGFLESKSTTCTRFFKNLASSCTLDSALNAASYYNFTVLKVPRSMTDPQNMEFQVPVILTSQANAPLLAGNTCQNVVSQVTYEIETNGTFGIQKVSVSLGQTNLTVEPGASLQQHFILRFRAFQQSTAASLTSPRSGNPGYIVGKPLLALTDDISYSMTLLQSQGNGSCSVKRHEVQFGVNAISGCKLRLKKADCSHLQQEIYQTLHGRPRPEYVAIFGNADPAQKGGWTRILNRHCSISAINCTSCCLIPVSLEIQVLWAYVGLLSNPQAHVSGVRFLYQCQSIQDSQQVTEVSLTTLVNFVDITQKPQPPRGQPKMDWKWPFDFFPFKVAFSRGVFSQKCSVSPILILCLLLLGVLNLETM

SEQ ID NO: 900469 - protein, 625 aa, Homo sapiens
MRLETAEAYVGPGGPECPMRTPQLALLQVFFLVFPDGVRPQPSSSPSGAVPTSLELQRGTDGGTLQSPSEATATRPAVPGLPTVVPTLVTPSAPGNRTVDLFPVLPICVCDLTPGACDINCCCDRDCYLLHPRTVFSFCLPGSVRSSSWVCVDNSVIFRSNSPFPSRVFMDSNGIRQFCVHVNNSNLNYFQKLQKVNATNFQALAAEFGGESFTSTFQTQSPPSFYRAGDPILTYFPKWSVISLLRQPAGVGAGGLCAESNPAGFLESKSTTCTRFFKNLASSCTLDSALNAASYYNFTVLKVPRSMTDPQNMEFQVPVILTSQANAPLLAGNTCQNVVSQVTYEIETNGTFGIQKVSVSLGQTNLTVEPGASLQQHFILRFRAFQQSTAASLTSPRSGNPGYIVGKPLLALTDDISYSMTLLQSQGNGSCSVKRHEVQFGVNAISGCKLRLKKADCSHLQQEIYQTLHGRPRPEYVAIFGNADPAQKGGWTRILNRHCSISAINCTSCCLIPVSLEIQVLWAYVGLLSNPQAHVSGVRFLYQCQSIQDSQQVTEVSLTTLVNFVDITQKPQPPRGQPKMDWKWPFDFFPFKVAFSRGVFSQKCSVSPILILCLLLLGVLNLETM

SEQ ID NO: 900470 - protein, 625 aa, Homo sapiens; identical to SEQ ID NO: 900469

SEQ ID NO: 900471 - protein, 598 aa, Homo sapiens
MRLETAEAYVGPGGPECPMRTPQLALLQVFFLVFPDGVRPQPSSSPSGAVPTSLELQRGTDGGTLQSPSEATATRPAVPGLPTVVPTLVTPSAPGNRTVDLFPVLPICVCDLTPGACDINCCCDRDCYLLHPRTVFSFCLPGSVRSSSWVCVDNSVIFRSNSPFPSRVFMDSNGIRQFCVHVNNSNLNYFQKLQKVNATNFQALAAEFGGESFTSTFQTQSPPSFYRAGDPILTYFPKWSVISLLRQPAGVGAGGLCAESNPAGFLESKSTTCTRFFKNLASSCTLDSALNAASYYNFTVLKVPRSMTDPQNMEVTYEIETNGTFGIQKVSVSLGQTNLTVEPGASLQQHFILRFRAFQQSTAASLTSPRSGNPGYIVGKPLLALTDDISYSMTLLQSQGNGSCSVKRHEVQFGVNAISGCKLRLKKADCSHLQQEIYQTLHGRPRPEYVAIFGNADPAQKGGWTRILNRHCSISAINCTSCCLIPVSLEIQVLWAYVGLLSNPQAHVSGVRFLYQCQSIQDSQQVTEVSLTTLVNFVDITQKPQPPRGQPKMDWKWPFDFFPFKVAFSRGVFSQKCSVSPILILCLLLLGVLNLETM

SEQ ID NO: 900472 - protein, 456 aa, Homo sapiens [sequence omitted]

SEQ ID NO: 900473 - protein, 522 aa, Homo sapiens
MRLETAEAYVGPGGPECPMRTPQLALLQVFFLVFPDGVRPQPSSSPSGAVPTSLELQRGTDGGTLQSPSEATATRPAVPGLPTVVPTLVTPSAPGNRTVDLFPVLPICVCDLTPGACDINCCCDRDCYLLHPRTVFSFCLPGSVRSSSWVCVDNSVIFRSNSPFPSRVFMDSNGIRQFCVHVNNSNLNYFQKLQKVNATNFQALAAEFGGESFTSTFQTQSPPSFYRAGDPILTYFPKWSVISLLRQPAGVGAGGLCAESNPAGFLESKSTTCTRFFKNLASSCTLDSALNAASYYNFTVLKVPRSMTDPQNMEFQVPVILTSQANAPLLAGNTCQNVVSQVTYEIETNGTFGIQKVSVSLGQTNLTVEPGASLQQHFILRFRAFQQSTAASLTSPRSGNPGYIVGKPLLALTDDISYSMTLLQSQGNGSCSVKRHEVQFGVNAISGCKLRLKKADCSHLQQEIYQTLHGRPRPEYVAIFGNADPAQKGGWTRILNRHCSISVRREIYFLMKTHFYPFVNLG

SEQ ID NO: 900474 - protein, 391 aa, Homo sapiens
MRLETAEAYVGPGGPECPMRTPQLALLQVFFLVFPDGVRPQPSSSPSGAVPTSLELQRGTDGGTLQSPSEATATRPAVPGLPTVVPTLVTPSAPGNRTVDLFPVLPICVCDLTPGACDINCCCDRDCYLLHPRTVFSFCLPGSVRSSSWVCVDNSVIFRSNSPFPSRVFMDSNGIRQFCVHVNNSNLNYFQKLQKVNATNFQALAAEFGGESFTSTFQTQSPPSFYRAGDPILTYFPKWSVISLLRQPAGVGAGGLCAESNPAGFLESKSTTCTRFFKNLASSCTLDSALNAASYYNFTVLKVPRSMTDPQNMEDSQQVTEVSLTTLVNFVDITQKPQPPRGQPKMDWKWPFDFFPFKVAFSRGVFSQKCSVSPILILCLLLLGVLNLETM

SEQ ID NO: 900475 - protein, 461 aa, Homo sapiens
MRLETAEAYVGPGGPECPMRTPQLALLQVFFLVFPDGVRPQPSSSPSGAVPTSLELQRGTDGGTLQSPSEATATRPAVPGLPTVVPTLVTPSAPGNRTVDLFPVLPICVCDLTPGACDINCCCDRDCYLLHPRTVFSFCLPGSVRSSSWVCVDNSVIFRSNSPFPSRVFMDSNGIRQFCVHVNNSNLNYFQKLQKVNATNFQALAAEFGGESFTSTFQTQSPPSFYRAGDPILTYFPKWSVISLLRQPAGVGAGGLCAESNPAGFLESKSTTCTRFFKNLASSCTLDSALNAASYYNFTVLKVPRSMTDPQNMEFQVPVILTSQANAPLLAGNTCQNVVSQVTYEIETNGTFGIQKVSVSLGQTNLTVEPGASLQQHFILRFRAFQQSTAASLTSPRSGNPGYIVGKPLLALTDDISYSVSFLELGGLLQPNEKSCKGFQTYVRLAKGEEFFVHYNEVLIY

SEQ ID NO: 900476 - protein, 433 aa, Homo sapiens
MDSNGIRQFCVHVNNSNLNYFQKLQKVNATNFQALAAEFGGESFTSTFQTQSPPSFYRAGDPILTYFPKWSVISLLRQPAGVGAGGLCAESNPADSALNAASYYNFTVLKVPRSMTDPQNMEFQVPVILTSQANAPLLAGNTCQNVVSQVTYEIETNGTFGIQKVSVSLGQTNLTVEPGASLQQHFILRFRAFQQSTAASLTSPRSGNPGYIVGKPLLALTDDISYSMTLLQSQGNGSCSVKRHEVQFGVNAISGCKLRLKKADCSHLQQEIYQTLHGRPRPEYVAIFGNADPAQKGGWTRILNRHCSISAINCTSCCLIPVSLEIQVLWAYVGLLSNPQAHVSGVRFLYQCQSIQDSQQVTEVSLTTLVNFVDITQKPQPPRGQPKMDWKWPFDFFPFKVAFSRGVFSQKCSVSPILILCLLLLGVLNLETM

SEQ ID NO: 900477 - protein, 160 aa, Homo sapiens
MTLLQSQGNGSCSVKRHEVQFGVNAISGCKLRLKKADCSHLQQEIYQTLHGRPRPEYVAIFGNADPAQKGGWTRILNRHCSISDSQQVTEVSLTTLVNFVDITQKPQPPRGQPKMDWKWPFDFFPFKVAFSRGVFSQKCSVSPILILCLLLLGVLNLETM

SEQ ID NO: 900478 - protein, 186 aa, Homo sapiens
MRLETAEAYVGPGGPECPMRTPQLALLQVFFLVFPDGVRPQPSSSPSGAVPTSLELQRGTDGGTLQSPSEATATRPAVPGLPTVVPTLVTPSAPGNRTVDLFPVLPICVCDLTPGACDINCCCDRDCYLLHPRTVFSFCLPGSVRSSSWVCVDNSVIFRSNSPFPSRVFMDSNGIRQFCVHVNNCE

SEQ ID NO: 900479 - protein, 625 aa, Homo sapiens; identical to SEQ ID NO: 900469

SEQ ID NO: 900480 - protein, 625 aa, Homo sapiens; identical to SEQ ID NO: 900469

SEQ ID NO: 900481 - protein, 579 aa, Homo sapiens
MRLETAEAYVGPGGPECPMRTPQLALLQVFFLVFPDGVRPQPSSSPSGAVPTSLELQRGTDGGTLQSPSEATATRPAVPGLPTVVPTLVTPSAPGNRTVDLFPVLPICVCDLTPGACDINCCCDRDCYLLHPRTVFSFCLPGSVRSSSWVCVDNSVIFRSNSPFPSRVFMDSNGIRQFCVHVNNSNLNYFQKLQKVNATNFQALAAEFGGESFTSTFQTQSPPSFYRAGDPILTYFPKWSVISLLRQPAGVGAGGLCAESNPAGFLESKSTTCTRFFKNLASSCTLDSALNAASYYNFTVLKVPRSMTDPQNMEFQVPVILTSQANAPLLAGNTCQNVVSQVTYEIETNGTFGIQKVSVSLGQTNLTVEPGASLQQHFILRFRAFQQSTAASLTSPRSGNPGYIVGKPLLALTDDISYSMTLLQSQGNGSCSVKRHEVQFGVNAISGCKLRLKKADCSHLQQEIYQTLHGRPRPEYVAIFGNADPAQKGGWTRILNRHCSISDSQQVTEVSLTTLVNFVDITQKPQPPRGQPKMDWKWPFDFFPFKVAFSRGVFSQKCSVSPILILCLLLLGVLNLETM

SEQ ID NO: 900482 - protein, 662 aa, Homo sapiens
MRLETAEAYVGPGGPECPMRTPQLALLQVFFLVFPDGVRPQPSSSPSGAVPTSLELQRGTDGGTLQSPSEATATRPAVPGLPTVVPTLVTPSAPGNRTVDLFPVLPICVCDLTPGACDINCCCDRDCYLLHPRTVFSFCLPGSVRSSSWVCVDNSVIFRSNSPFPSRVFMDSNGIRQFCVHVNNSNLNYFQKLQKVNATNFQALAAEFGGESFTSTFQTQSPPSFYRAGDPILTYFPKWSVISLLRQPAGVGAGGLCAESNPAGFLESKSTTCTRFFKNLASSCTLDSALNAASYYNFTVLKVPRSMTDPQNMEFQVPVILTSQANAPLLAGNTCQNVVSQVTYEIETNGTFGIQKVSVSLGQTNLTVEPGASLQQHFILRFRAFQQSTAASLTSPRSGNPGYIVGKPLLALTDDISYSMTLLQSQGNGSCSVKRHEVQFGVNAISGCKLRLKKADCSHLQQEIYQTLHGRPRPEYVAIFGNADPAQKGGWTRILNRHCSISAINCTSCCLIPVSLEIQVLWAYVGLLSNPQAHVSGVRFLYQCQSIQVGYFPPTPPLLCQCICIRLLNQYSMFHHDVYVNMHAADSQQVTEVSLTTLVNFVDITQKPQPPRGQPKMDWKWPFDFFPFKVAFSRGVFSQKCSVSPILILCLLLLGVLNLETM

SEQ ID NO: 900483 - protein, 408 aa, Homo sapiens
MRLETAEAYVGPGGPECPMRTPQLALLQVFFLVFPDGVRPQPSSSPSGAVPTSLELQRGTDGGTLQSPSEATATRPAVPGLPTVVPTLVTPSAPGNRTVDLFPVLPICVCDLTPGACDINCCCDRDCYLLHPRTVFSFCLPGSVRSSSWVCVDNSVIFRSNSPFPSRVFMDSNGIRQFCVHVNNSNLNYFQKLQKVNATNFQALAAEFGGESFTSTFQTQSPPSFYRAGDPILTYFPKWSVISLLRQPAGVGAGGLCAESNPAGFLESKSTTCTRFFKNLASSCTLDSALNAASYYNFTVLKVPRSMTDPQNMEFQVPVILTSQANGFSASYRSIFDNSCELCGHYPEATASKGPTQNGLEMAIRLLSLQSGIQQRSILSKMLSLSHPYPVPLTTWSSQPRDYVKKRK

SEQ ID NO: 900484 - protein, 389 aa, Homo sapiens
MRLETAEAYVGPGGPECPMRTPQLALLQVFFLVFPDGVRPQPSSSPSGAVPTSLELQRGTDGGTLQSPSEATATRPAVPGLPTVVPTLVTPSAPGNRTVDLFPVLPICVCDLTPGACDINCCCDRDCYLLHPRTVFSFCLPGSVRSSSWVCVDNSVIFRSNSPFPSRVFMDSNGIRQFCVHVNNSNLNYFQKLQKVNATNFQALAAEFGGESFTSTFQTQSPPSFYRAGDPILTYFPKWSVISLLRQPAGVGAGGLCAESNPAGFLESKSTTCTRFFKNLASSCTLDSALNAASYYNFTVLKVPRSMTDPQNMEFQVPVILTSQANAPLLAGNTCQNVVSQVTYEIETNGTFGIQKVSVSLGQTNLTVEPGASLQQHFILRFRVRALLL

SEQ ID NO: 900485 - protein, 319 aa, Homo sapiens [sequence omitted]

SEQ ID NO: 900486 - protein, 332 aa, Homo sapiens
MRLETAEAYVGPGGPECPMRTPQLALLQVFFLVFPDGVRPQPSSSPSGAVPTSLELQRGTDGGTLQSPSEATATRPAVPGLPTVVPTLVTPSAPGNRTVDLFPVLPICVCDLTPGACDINCCCDRDCYLLHPRTVFSFCLPGSVRSSSWVCVDNSVIFRSNSPFPSRVFMDSNGIRQFCVHVNNSNLNYFQKLQKVNATNFQALAAEFGGESFTSTFQTQSPPSFYRAGDPILTYFPKWSVISLLRQPAGVGAGGLCAESNPAGFLESKSTTCTRFFKNLASSCTLDSALNAASYYNFTVLKVPRSMTDPQNMEFQVPVILTSHGHSIPGTE

SEQ ID NO: 900487 - protein, 291 aa, Homo sapiens
  misc_feature (271)..(271): Xaa can be any naturally occurring amino acid
  misc_feature (274)..(274): Xaa can be any naturally occurring amino acid
MRLETAEAYVGPGGPECPMRTPQLALLQVFFLVFPDGVRPQPSSSPSGAVPTSLELQRGTDGGTLQSPSEATATRPAVPGLPTVVPTLVTPSAPGNRTVDLFPVLPICVCDLTPGACDINCCCDRDCYLLHPRTVFSFCLPGSVRSSSWVCVDNSVIFRSNSPFPSRVFMDSNGIRQFCVHVNNSNLNYFQKLQKVNATNFQALAAEFGGESFTSTFQTQSPPSFYRAGDPILTYFPKWSVISLLRQPAGVGAGGELLCLKSQILARVFPXKKXKSSQTFGTFGFFFKKNP

SEQ ID NO: 900488 - protein, 319 aa, Homo sapiens
MLGRSLREVSAALKQGQITPTELCQKCLSLIKKTKFLNAYITVSEEVALKQAEESEKRYKNGQSLGDLDGIPIAVKDNFSTSGIETTCASNMLKGYIPPYNATVVQKLLDQGALLMGKTNLDEFAMGSGSTDGVFGPVKNPWSYSKQYREKRKQNPHSENEDSDWLITGGSSGGSAAAVSAFTCYAALGSDTGGSTRNPAAHCGLVGFKPSYGLVSRHGLIPLVNSMDVPGILTRCVDDAAIVLGALAGPDPRDSTTVHEPINKPFMLPSLADVSKLCIGIPKVTFSFHYFTEILSSPIESTDLGGGLGGFESLLCHFY

SEQ ID NO: 900489 - protein, 528 aa, Homo sapiens
MLGRSLREVSAALKQGQITPTELCQKCLSLIKKTKFLNAYITVSEEVALKQAEESEKRYKNGQSLGDLDGIPIAVKDNFSTSGIETTCASNMLKGYIPPYNATVVQKLLDQGALLMGKTNLDEFAMGSGSTDGVFGPVKNPWSYSKQYREKRKQNPHSENEDSDWLITGGSSGGSAAAVSAFTCYAALGSDTGGSTRNPAAHCGLVGFKPSYGLVSRHGLIPLVNSMDVPGILTRCVDDAAIVLGALAGPDPRDSTTVHEPINKPFMLPSLADVSKLCIGIPKEYLVPELSSEVQSLWSKAADLFESEGAKVIEVSLPHTSYSIVCYHVLCTSEVASNMARFDGLQYGHRCDIDVSTEAMYAATRREGFNDVVRGRILSGNFFLLKENYENYFVKAQKVRRLIANDFVNAFNSGVDVLLTPTTLSEAVPYLEFIKEDNRTRSAQDDIFTQAVNMAGLPAVSIPVALSNQGLPIGLQFIGRAFCDQQLLTVAKWFEKQVQFPVIQLQELMDDCSAVLENEKLASVSLKQ

SEQ ID NO: 900490 - protein, 528 aa, Homo sapiens; identical to SEQ ID NO: 900489

SEQ ID NO: 900491 - protein, 444 aa, Homo sapiens
LSSTLECNGAISARCSLRLPASSDSPDSASQVAGTTGMPHHSQSGSTDGVFGPVKNPWSYSKQYREKRKQNPHSENEDSDWLITGGSSGGSAAAVSAFTCYAALGSDTGGSTRNPAAHCGLVGFKPSYGLVSRHGLIPLVNSMDVPGILTRCVDDAAIVLGALAGPDPRDSTTVHEPINKPFMLPSLADVSKLCIGIPKEYLVPELSSEVQSLWSKAADLFESEGAKVIEVSLPHTSYSIVCYHVLCTSEVASNMARFDGLQYGHRCDIDVSTEAMYAATRREGFNDVVRGRILSGNFFLLKENYENYFVKAQKVRRLIANDFVNAFNSGVDVLLTPTTLSEAVPYLEFIKEDNRTRSAQDDIFTQAVNMAGLPAVSIPVALSNQGLPIGLQFIGRAFCDQQLLTVAKWFEKQVQFPVIQLQELMDDCSAVLENEKLASVSLKQ

SEQ ID NO: 900492 - protein, 262 aa, Homo sapiens
MLPSLADVSKLCIGIPKEYLVPELSSEVQSLWSKAADLFESEGAKVIEVSLPHTSYSIVCYHVLCTSEVASNMARFDGLQYGHRCDIDVSTEAMYAATRREGFNDVVRGRILSGNFFLLKENYENYFVKAQKVRRLIANDFVNAFNSGVDVLLTPTTLSEAVPYLEFIKEDNRTRSAQDDIFTQAVNMAGLPAVSIPVALSNQGLPIGLQFIGRAFCDQQLLTVAKWFEKQVQFPVIQLQELMDDCSAVLENEKLASVSLKQ

SEQ ID NO: 900493 - protein, 154 aa, Homo sapiens
LVGTDSLNFHRYTNYENYFVKAQKVRRLIANDFVNAFNSGVDVLLTPTTLSEAVPYLEFIKEDNRTRSAQDDIFTQAVNMAGLPAVSIPVALSNQGLPIGLQFIGRAFCDQQLLTVAKWFEKQVQFPVIQLQELMDDCSAVLENEKLASVSLKQ

SEQ ID NO: 900494 - protein, 387 aa, Homo sapiens
MLGRSLREVSAALKQGQITPTELCQKCLSLIKKTKFLNAYITVSEEVALKQAEESEKRYKNGQSLGDLDGIPIAVKDNFSTSGIETTCASNMLKGYIPPYNATVVQKLLDQGALLMGKTNLDEFAMGSGSTDGVFGPVKNPWSYSKQYREKRKQNPHSENEDSDWLITGGSSGGSAAAVSAFTCYAALGSDTGGSTRNPAAHCGLVGFKPSYGLVSRHGLIPLVNSMDVPGILTRCVDDAAIVLGALAGPDPRDSTTVHEPINKPFMLPSLADVSKLCIGIPKEYLVPELSSEVQSLWSKAADLFESEGAKVIEVSLPHTSYSIVCYHVLCTSEVASNMARFDGLQYGHRCDIDVSTEAMYAATRREGFNDVVRGRILSGNFFLLKE

SEQ ID NO: 900495 - protein, 528 aa, Homo sapiens; identical to SEQ ID NO: 900489

SEQ ID NO: 900496 - protein, 154 aa, Homo sapiens; identical to SEQ ID NO: 900493

SEQ ID NO: 900497 - protein, 563 aa, Homo sapiens
MLGRSLREPDFETKSWLRRRMSCPPPVLKLISASPFITTLSVEVSAALKQGQITPTELCQKCLSLIKKTKFLNAYITVSEEVALKQAEESEKRYKNGQSLGDLDGIPIAVKDNFSTSGIETTCASNMLKGYIPPYNATVVQKLLDQGALLMGKTNLDEFAMGSGSTDGVFGPVKNPWSYSKQYREKRKQNPHSENEDSDWLITGGSSGGSAAAVSAFTCYAALGSDTGGSTRNPAAHCGLVGFKPSYGLVSRHGLIPLVNSMDVPGILTRCVDDAAIVLGALAGPDPRDSTTVHEPINKPFMLPSLADVSKLCIGIPKEYLVPELSSEVQSLWSKAADLFESEGAKVIEVSLPHTSYSIVCYHVLCTSEVASNMARFDGLQYGHRCDIDVSTEAMYAATRREGFNDVVRGRILSGNFFLLKENYENYFVKAQKVRRLIANDFVNAFNSGVDVLLTPTTLSEAVPYLEFIKEDNRTRSAQDDIFTQAVNMAGLPAVSIPVALSNQGLPIGLQFIGRAFCDQQLLTVAKWFEKQVQFPVIQLQELMDDCSAVLENEKLASVSLKQ

SEQ ID NO: 900498 - protein, 378 aa, Homo sapiens
TLPHQPTGLASYAHLFNTARGMEVQTACIGRTHDYAALGSDTGGSTRNPAAHCGLVGFKPSYGLVSRHGLIPLVNSMDVPGILTRCVDDAAIVLGALAGPDPRDSTTVHEPINKPFMLPSLADVSKLCIGIPKEYLVPELSSEVQSLWSKAADLFESEGAKVIEVSLPHTSYSIVCYHVLCTSEVASNMARFDGLQYGHRCDIDVSTEAMYAATRREGFNDVVRGRILSGNFFLLKENYENYFVKAQKVRRLIANDFVNAFNSGVDVLLTPTTLSEAVPYLEFIKEDNRTRSAQDDIFTQAVNMAGLPAVSIPVALSNQGLPIGLQFIGRAFCDQQLLTVAKWFEKQVQFPVIQLQELMDDCSAVLENEKLASVSLKQ

SEQ ID NO: 900499 - protein, 190 aa, Homo sapiens
MARFDGLQYGHRCDIDVSTEAMYAATRREGFNDVVRGRILSGNFFLLKENYENYFVKAQKVRRLIANDFVNAFNSGVDVLLTPTTLSEAVPYLEFIKEDNRTRSAQDDIFTQAVNMAGLPAVSIPVALSNQGLPIGLQFIGRAFCDQQLLTVAKWFEKQVQFPVIQLQELMDDCSAVLENEKLASVSLKQ

SEQ ID NO: 900500 - protein, 356 aa, Homo sapiens [sequence omitted]

SEQ ID NO: 900501 - protein, 47 aa, Homo sapiens
MGDHRRYSHTEYSQLHYLNHHHRDPITQYSQLHFFDYHHRDPLKQYS

SEQ ID NO: 900502 - protein, 238 aa, Homo sapiens
MLCFLRGMAFVPFLLVTWSSAAFIISYVVAVLSGHVNPFLPYISDTGTTPPESGIFGFMINFSAFLGAATMYTRYKIVQKQNQTCYFSTPVFNLVSLVLGLVGCFGMGIVANFQELAVPVVHDGGALLAFVCGVVYTLLQSIISYKSCPQWNSLSTCHIRMVISAVSCAAVIPMIVCASLISITKLEWNPREKDYVYHVVSAICEWTVAFGFIFYFLTFIQDFQSVTLRISTEINGDI

SEQ ID NO: 900503 - protein, 238 aa, Homo sapiens; identical to SEQ ID NO: 900502

SEQ ID NO: 900504 - protein, 185 aa, Homo sapiens
MLCFLRGMAFVPFLLVTWSSAAFIISYVVAVLSGHVNPFLPYISDTGTTPPESGIFGFMINFSAFLGAATMYTRYKIVQKQNQTCYFSTPVFNLVSLVLGLVGCFGMGIVANFQELAVPVVHDGGALLAFVCGVVYTLLQSIISYKSCPQWNSLSTCHIRMVISAVSCAAVIPSILFHICALLKE

SEQ ID NO: 900505 - protein, 209 aa, Homo sapiens
MLCFLRGMAFVPFLLVTWSSAAFIISYVVAVLSGHVNPFLPYISDTGTTPPESGIFGFMINFSAFLGAATMYTRYKIVQKQNQTCYFSTPVFNLVSLVLGLVGCFGMGIVANFQELAVPVVHDGGALLAFVCGVVYTLLQSIISYKSCPQWNSLSTCHIRMVISAVSCAAVIPMIVCASLISITKLEWNPREKVIQELMATMVTHYEPH

SEQ ID NO: 900506 - protein, 238 aa, Homo sapiens; identical to SEQ ID NO: 900502

SEQ ID NO: 900507 - protein, 238 aa, Homo sapiens; identical to SEQ ID NO: 900502

SEQ ID NO: 900508 - protein, 195 aa, Homo sapiens
GKARAGVPASDPTPPVRAQPGLRRVSKPKAKGTRPRVPSGGSVVASAWSSPGASDPAGPLCDFTRFATSPGSPRPTHSGPAASPPAASLRSSRFPSLRGWACPGRRGASPPTVRECTRPAAASRQPGATRRPAPLGAALRRRRRRRDAVLPEGNGFRPLPLGDLVVSRLHYLLRGRRALRARQPLPPVYQTLSQK

SEQ ID NO: 900509 - protein, 115 aa, Homo sapiens
MLCFLRGMAFVPFLLVTWSSAAFIISYVVAVLSGHVNPFLPYISDTGTTPPESGIFGFMINFSAFLGAATMYTRYKIVQKQNQTCYFSTPVFNLVSLVLGLVGCFGMGIVANFQV

SEQ ID NO: 900510 - protein, 149 aa, Homo sapiens
WGNYFWISRGPAPQAFLRGAPGLRVRDEADGPEAVPLPQNTVLQPLTLGFTSFCWNRLFWSQRKITKAREWFHRTVKIDSDLGDAWAFFYKFELQHGTEEQQEEVRKRCESAEPRHGELWCAVSKDIANWQKKIGDILRLVAGRIKNTF

SEQ ID NO: 900511 - protein, 98 aa, Homo sapiens
GNQKWAGRVRTERSASGARVTRRRRHFATECIGRRSLESLRLSLFRCLIPFLPSLGRRRHHEQEEETVPRDARAPRLRAGAGPGRHWLHHAVRHWARP

SEQ ID NO: 900512 - protein, 114 aa, Homo sapiens
SNRARTPAARWRLGVAGWYWGVLCQTRSRHRCEWALRDLGMPTVALDGFRPGVRLGVNTSEALFSVCTPDCISLLVANDTPTRGGQEVSWLLSLLVEMIHLREEDRKSHGFFLC

SEQ ID NO: 900513 - protein, 79 aa, Homo sapiens
PEGLGHPLQMRSWAWLCPVLHRHHLSCSLTCWLQLKKCPHSTPLWLLLSRLEEKIGQLTRARAILEKSRLKNPKNPGLW

SEQ ID NO: 900514 - protein, 941 aa, Homo sapiens
MNKKKKPFLGMPAPLGYVPGLGRGATGFTTRSDIGPARDANDPVDDRHAPPGKRTVGDQMKKNQAADDDDEDLNDTNYDEFNGYAGSLFSSGPYEKDDEEADAIYAALDKRMDERRKERREQREKEEIEKYRMERPKIQQQFSDLKRKLAEVTEEEWLSIPEVGDARNKRQRNPRYEKLTPVPDSFFAKHLQTGENHTSVDPRQTQFGGLNTPYPGGLNTPYPGGMTPGLMTPGTGELDMRKIGQARNTLMDMRLSQVSDSVSGQTVVDPKGYLTDLNSMIPTHGGDINDIKKARLLLKSVRETNPHHPPAWIASARLEEVTGKLQVARNLIMKGTEMCPKSEDVWLEAARLQPGDTAKAVVAQAVRHLPQSVRIYIRAAELETDIRAKKRVLRKALEHVPNSVRLWKAAVELEEPEDARIMLSRAVECCPTSVELWLALARLETYENARKVLNKARENIPTDRHIWITAAKLEEANGNTQMVEKIIDRAITSLRANGVEINREQWIQDAEECDRAGSVATCQAVMRAVIGIGIEEEDRKHTWMEDADSCVAHNALECARAIYAYALQVFPSKKSVWLRAAYFEKNHGTRESLEALLQRAVAHCPKAEVLWLMGAKSKWLAGDVPAARSILALAFQANPNSEEIWLAAVKLESENDEYERARRLLAKARSSAPTARVFMKSVKLEWVQDNIRAAQDLCEEALRHYEDFPKLWMMKGQIEEQKEMMEKAREAYNQGLKKCPHSTPLWLLLSRLEEKIGQLTRARAILEKSRLKNPKNPGLWLESVRLEYRAGLKNIANTLMAKALQECPNSGILWSEAIFLEARPQRRTKSVDALKKCEHDPHVLLAVAKLFWSQRKITKAREWFHRTVKIDSDLGDAWAFFYKFELQHGTEEQQEEVRKRCESAEPRHGELWCAVSKDIANWQKKIGDILRLVAGRIKNTF

SEQ ID NO: 900515 - protein, 941 aa, Homo sapiens; identical to SEQ ID NO: 900514

SEQ ID NO: 900516 - protein, 882 aa, Homo sapiens
MKKNQAADDDDEDLNDTNYDEFNGYAGSLFSSGPYEKDDEEADAIYAALDKRMDERRKERREQREKEEIEKYRMERPKIQQQFSDLKRKLAEVTEEEWLSIPEVGDARNKRQRNPRYEKLTPVPDSFFAKHLQTGENHTSVDPRQTQFGGLNTPYPGGLNTPYPGGMTPGLMTPGTGELDMRKIGQARNTLMDMRLSQVSDSVSGQTVVDPKGYLTDLNSMIPTHGGDINDIKKARLLLKSVRETNPHHPPAWIASARLEEVTGKLQVARNLIMKGTEMCPKSEDVWLEAARLQPGDTAKAVVAQAVRHLPQSVRIYIRAAELETDIRAKKRVLRKALEHVPNSVRLWKAAVELEEPEDARIMLSRAVECCPTSVELWLALARLETYENARKVLNKARENIPTDRHIWITAAKLEEANGNTQMVEKIIDRAITSLRANGVEINREQWIQDAEECDRAGSVATCQAVMRAVIGIGIEEEDRKHTWMEDADSCVAHNALECARAIYAYALQVFPSKKSVWLRAAYFEKNHGTRESLEALLQRAVAHCPKAEVLWLMGAKSKWLAGDVPAARSILALAFQANPNSEEIWLAAVKLESENDEYERARRLLAKARSSAPTARVFMKSVKLEWVQDNIRAAQDLCEEALRHYEDFPKLWMMKGQIEEQKEMMEKAREAYNQGLKKCPHSTPLWLLLSRLEEKIGQLTRARAILEKSRLKNPKNPGLWLESVRLEYRAGLKNIANTLMAKALQECPNSGILWSEAIFLEARPQRRTKSVDALKKCEHDPHVLLAVAKLFWSQRKITKAREWFHRTVKIDSDLGDAWAFFYKFELQHGTEEQQEEVRKRCESAEPRHGELWCAVSKDIANWQKKIGDILRLVAGRIKNTF

SEQ ID NO: 900517 - protein, 898 aa, Homo sapiens
MNKKKKPFLGMPAPLGYVPGLGRGATGFTTRSDIGPARDANDPVDDRHAPPGKRTVGDQMKKNQAADDDDEDLNDTNYDEFNGYAGSLFSSGPYEKDDEEADAIYAALDKRMDERRKERREQREKEEIEKYRMERPKIQQQFSDLKRKLAEVTEEEWLSIPEVGDARNKRQRNPRYEKLTPVPDSFFAKHLQTGENHTSVDPRQTQFGGLNTPYPGGLNTPYPGGMTPGLMTPGTGELDMRKIGQARNTLMDMRLSQVSDSVSGQTVVDPKGYLTDLNSMIPTHGGDINDIKKARLLLKSVRETNPHHPPAWIASARLEEVTGKLQVARNLIMKGTEMCPKSEDVWLEAARLQPGDTAKAVVAQAVRHLPQSVRIYIRAAELETDIRAKKRVLRKALEHVPNSVRLWKAAVELEEPEDARIMLSRAVECCPTSVELWLALARLETYENARKVLNKARENIPTDRHIWITAAKLEEANGNTQMVEKIIDRAITSLRANGVEINREQWIQDAEECDRAGSVATCQAVMRAVIGIGIEEEDRKHTWMEDADSCVAHNALECARAIYAYALQVFPSKKSVWLRAAYFEKNHGTRESLEALLQRAVAHCPKAEVLWLMGAKSKWLAGDVPAARSILALAFQANPNSEEIWLAAVKLESENDEYERARRLLAKARSSAPTARVFMKSVKLEWVQDNIRAAQDLCEEALRHYEDFPKLWMMKGQIEEQKEMMEKAREAYNQGLKKCPHSTPLWLLLSRLEEKIGQLTRARAILEKSRLKNPKNPGLWLESVRLEYRAGLKNIANTLMAKALQECPNSGILWSEAIFLEARPQRRTKSVDALKKCEHDPHVLLAVAKLFWSQRKITKAREWFHRTVKIDSDLGDAWAFFYKFELQHGTEEEDRGHP

SEQ ID NO: 900518 - protein, 779 aa, Homo sapiens
MNKKKKPFLGMPAPLGYVPGLGRGATGFTTRSDIGPARDANDPVDDRHAPPGKRTVGDQMKKNQAADDDDEDLNDTNYDEFNGYAGSLFSSGPYEKDDEEADAIYAALDKRMDERRKERREQREKEEIEKYRMERPKIQQQFSDLKRKLAEVTEEEWLSIPEVGDARNKRQRNPRYEKLTPVPDSFFAKHLQTGENHTSVDPRQTQFGGLNTPYPGGLNTPYPGGMTPGLMTPGTGELDMRKIGQARNTLMDMRLSQVSDSVSGQTVVDPKGYLTDLNSMIPTHGGDINDIKKARLLLKSVRETNPHHPPAWIASARLEEVTGKLQVARNLIMKGTEMCPKSEDVWLEAARLQPGDTAKAVVAQAVRHLPQSVRIYIRAAELETDIRAKKRVLRKALEHVPNSVRLWKAAVELEEPEDARIMLSRAVECCPTSVELWLALARLETYENARKVLNKARENIPTDRHIWITAAKLEEANGNTQMVEKIIDRAITSLRANGVEINREQWIQDAEECDRAGSVATCQAVMRAVIGIGIEEEDRKHTWMEDADSCVAHNALECARAIYAYALQVFPSKKSVWLRAAYFEKNHGTRESLEALLQRAVAHCPKAEVLWLMGAKSKWLAGDVPAARSILALAFQANPNSEEIWLAAVKLESENDEYERARRLLAKARSSAPTARVFMKSVKLEWVQDNIRAAQDLCEEALRHYEDFPKLWMMKGQIEEQKEMMEKAREAYNQGLKKCPHSTPLWLLLSRLEEKIGQLTRARAILEKSRLKNPKNPGL

SEQ ID NO: 900519 - protein, 569 aa, Homo sapiens
YHKMLRLSLFVSAPDLKEATERAALEHVPNSVRLWKAAVELEEPEDARIMLSRAVECCPTSVELWLALARLETYENARKVLNKARENIPTDRHIWITAAKLEEANGNTQMVEKIIDRAITSLRANGVEINREQWIQDAEECDRAGSVATCQAVMRAVIGIGIEEEDRKHTWMEDADSCVAHNALECARAIYAYALQVFPSKKSVWLRAAYFEKNHGTRESLEALLQRAVAHCPKAEVLWLMGAKSKWLAGDVPAARSILALAFQANPNSEEIWLAAVKLESENDEYERARRLLAKARSSAPTARVFMKSVKLEWVQDNIRAAQDLCEEALRHYEDFPKLWMMKGQIEEQKEMMEKAREAYNQGLKKCPHSTPLWLLLSRLEEKIGQLTRARAILEKSRLKNPKNPGLWLESVRLEYRAGLKNIANTLMAKALQECPNSGILWSEAIFLEARPQRRTKSVDALKKCEHDPHVLLAVAKLFWSQRKITKAREWFHRTVKIDSDLGDAWAFFYKFELQHGTEEQQEEVRKRCESAEPRHGELWCAVSKDIANWQKKIGDILRLVAGRIKNTF

SEQ ID NO: 900520 - protein, 213 aa, Homo sapiens
MNKKKKPFLGMPAPLGYVPGLGRGATGFTTRSDIGPARDANDPVDDRHAPPGKRTVGDQMKKNQAADDDDEDLNDTNYDEFNGYAGSLFSSGPYEKDDEEADAIYAALDKRMDERRKERREQREKEEIEKYRMERPKIQQQFSDLKRKLAEVTEEEWLSIPEVGDARNKRQRNPRYEKLTPVPDSFFAKHLQTGENHTSVDPRQTVSFQKRAH

SEQ ID NO: 900521 - protein, 69 aa, Homo sapiens
VSGEVGGVGLVRAGSVCLQEQQEEVRKRCESAEPRHGELWCAVSKDIANWQKKIGDILRLVAGRIKNTF

SEQ ID NO: 900522 - protein, 91 aa, Homo sapiens
KKNRLGEPVFNPTECIGRRSLESLRLSLFRCLIPFLPSLGRRRHHEQEEETVPRDARAPRLRAGAGPGEATGFGVRTYLCVHPACRLDVTH

SEQ ID NO: 900523 - protein, 901 aa, Homo sapiens
MNKKKKPFLGMPAPLGYVPGLGRGATGFTTRSDIGPARDANDPVDDRHAPPGKRTVGDQMKKNQAADDDDEDLNDTNYDEFNGYAGSLFSSGPYEKDDEEADAIYAALDKRMDERRKERREQREKEEIEKYRMERPKIQQQFSDLKRKLAEVTEEEWLSIPEVGDARNKRQRNPRYEKLTPVPDSFFAKHLQTGENHTSVDPRQTQFGGLNTPYPGGLNTPYPGGMTPGLMTPGTGELDMRKIGQARNTLMDMRLSQVSDSVSGQTVVDPKGYLTDLNSMIPTHGGDINDIKKARLLLKSVRETNPHHPPAWIASARLEEVTGKLQVARNLIMKGTEMCPKSEDVWLEAARLQPGDTAKAVVAQAVRHLPQSVRIYIRAAELETDIRAKKRVLRKALEHVPNSVRLWKAAVELEEPEDARIMLSRAVECCPTSVELWLALARLETYENARKVLNKARENIPTDRHIWITAAKLEEANGNTQMVEKIIDRAITSLRANGVEINREQWIQDAEECDRAGSVATCQAVMRAVIGIGIEEEDRKHTWMEDADSCVAHNALECARAIYAYALQVFPSKKSVWLRAAYFEKNHGTRESLEALLQRAVAHCPKAEVLWLMGAKSKWLAGDVPAARSILALAFQVFMKSVKLEWVQDNIRAAQDLCEEALRHYEDFPKLWMMKGQIEEQKEMMEKAREAYNQGLKKCPHSTPLWLLLSRLEEKIGQLTRARAILEKSRLKNPKNPGLWLESVRLEYRAGLKNIANTLMAKALQECPNSGILWSEAIFLEARPQRRTKSVDALKKCEHDPHVLLAVAKLFWSQRKITKAREWFHRTVKIDSDLGDAWAFFYKFELQHGTEEQQEEVRKRCESAEPRHGELWCAVSKDIANWQKKIGDILRLVAGRIKNTF

SEQ ID NO: 900524 - protein, 74 aa, Homo sapiens
DARIMLSRAVECCPTSVELWLALARLETYEKPRRRHHEQEEETVPRDARAPRLRAGAGPGRHWLHHAVRHWARP

SEQ ID NO: 900525 - protein, 941 aa, Homo sapiens; identical to SEQ ID NO: 900514

SEQ ID NO: 900526 - protein, 941 aa, Homo sapiens; identical to SEQ ID NO: 900514

SEQ ID NO: 900527 - protein, 935 aa, Homo sapiens
MNKKKKPFLGMPAPLGYVPGLGRGATGFTTRSDIGPARDANDPVDDRHAPPGKRTVGDQMKKNQAADDDDEDLNDTNYDEFNGYAGSLFSSGPYEKDDEEADAIYAALDKRMDERRKERREQREKEEIEKYRMERPKIQQQFSDLKRKLAEVTEEEWLSIPEVGDARNKRQRNPRYEKLTPVPDSFFAKHLQTGENHTSVDPRQTQFGGLNTPYPGGLNTPYPGGMTPGLMTPGTGELDMRKIGQARNTLMDMRLSQVSDSVSGQTVVDPKGYLTDLNSMIPTHGGDINDIKKARLLLKSVRETNPHHPPAWIASARLEEVTGKLQVARNLIMKGTEMCPKSEDVWLEAARLQPGDTAKAVVAQAVRHLPQSVRIYIRAAELETDIRAKKRVLRKALEHVPNSVRLWKAAVELEEPEDARIMLSRAVECCPTSVELWLALARLETYENARKVLNKARENIPTDRHIWITAAKLEEANGNTQMVEKIIDRAITSLRANGVEINREQWIQDAEECDRAGSVATCQAVMRAVIGIGIEEEDRKHTWMEDADSCVAHNALECARAIYAYALQVFPSKKSVWLRAAYFEKNHGTRESLEALLQRAVAHCPKAEVLWLMGAKSKWLAGDVPAARSILALAFQANPNSEEIWLAAVKLESENDEYERARRLLAKARSSAPTARVFMKSVKLEWVQDNIRAAQDLCEEALRHYEDFPKLWMMKGQIEEQKEMMEKAREAYNQGLKKCPHSTPLWLLLSRLEEKIGQLTRARAILEKSRLKNPKNPGLWLESVRLEYRAGLKNIANTLMAKALQECPNSGILWSEAIFLEARPQRRTKSVDALKKCEHDPHVLLAVAKLFWSQRKITKAREWFHRTVKIDSDLGDAWAFFYKFELQHGTEEQQEEVRKRCESAEPRHGELWCAVSKDIANWHIFEGSSRTPQRW

SEQ ID NO: 900528 - protein, 845 aa, Homo sapiens
MNKKKKPFLGMPAPLGYVPGLGRGEQREKEEIEKYRMERPKIQQQFSDLKRKLAEVTEEEWLSIPEVGDARNKRQRNPRYEKLTPVPDSFFAKHLQTGENHTSVDPRQTQFGGLNTPYPGGLNTPYPGGMTPGLMTPGTGELDMRKIGQARNTLMDMRLSQVSDSVSGQTVVDPKGYLTDLNSMIPTHGGDINDIKKARLLLKSVRETNPHHPPAWIASARLEEVTGKLQVARNLIMKGTEMCPKSEDVWLEAARLQPGDTAKAVVAQAVRHLPQSVRIYIRAAELETDIRAKKRVLRKALEHVPNSVRLWKAAVELEEPEDARIMLSRAVECCPTSVELWLALARLETYENARKVLNKARENIPTDRHIWITAAKLEEANGNTQMVEKIIDRAITSLRANGVEINREQWIQDAEECDRAGSVATCQAVMRAVIGIGIEEEDRKHTWMEDADSCVAHNALECARAIYAYALQVFPSKKSVWLRAAYFEKNHGTRESLEALLQRAVAHCPKAEVLWLMGAKSKWLAGDVPAARSILALAFQANPNSEEIWLAAVKLESENDEYERARRLLAKARSSAPTARVFMKSVKLEWVQDNIRAAQDLCEEALRHYEDFPKLWMMKGQIEEQKEMMEKAREAYNQGLKKCPHSTPLWLLLSRLEEKIGQLTRARAILEKSRLKNPKNPGLWLESVRLEYRAGLKNIANTLMAKALQECPNSGILWSEAIFLEARPQRRTKSVDALKKCEHDPHVLLAVAKLFWSQRKITKAREWFHRTVKIDSDLGDAWAFFYKFELQHGTEEQQEEVRKRCESAEPRHGELWCAVSKDIANWQKKIGDILRLVAGRIKNTF

SEQ ID NO: 900529 - protein, 815 aa, Homo sapiens
MNKKKKPFLGMPAPLGYVPGLGRGATGFTTRSDIGPARDANDPVDDRHAPPGKRTVGDQMKKNQAADDDDEDLNDTNYDEFNGYAGSLFSSGPYEKDDEEADAIYAALDKRMDERRKERREQREKEEIEKYRMERPKIQQQFSDLKRKLAEVTEEEWLSIPEVGDARNKRQRNPRYEKLTPVPDSFFAKHLQTGENHTSVDPRQTQFGGLNTPYPGGLNTPYPGGMTPGLMTPGTGELDMRKIGQARNTLMDMRLSQVSDSVSGQTVVDPKGYLTDLNSMIPTHGGDINDIKKARLLLKSVRETNPHHPPAWIASARLEEVTGKLQVARNLIMKGTEMCPKSEDVWLEAARLQPGDTAKAVVAQAVRHLPQSVRIYIRAAELETDIRAKKRVLRKALEHVPNSVRLWKAAVELEEPEDARIMLSRAVECCPTSVELWLALARLETYENARKVLNKARENIPTDRHIWITAAKLEEANGNTQMVEKIIDRAITSLRANGVEINREQWIQDAEECDRAGSVATCQAVMRAVIGIGIEEEDRKHTWMEDADSCVAHNALECARAIYAYALQVFPSKKSVWLRAAYFEKNHGTRESLEALLQRAVAHCPKAEVLWLMGAKSKWLAGDVPAARSILALAFQANPNSEEIWLAAVKLESENDEYERARRLLAKARSSAPTARVFMKSVKLEWVQDNIRAAQDLCEEALRHYEDFPKLWMMKGQIEEQKEMMEKAREAYNQGLKKCPHSTPLWLLLSRLEEKIGQLTRARAILEKSRLKNPKNPGLWLESVRLEYRAGLKNIANTLMAKALQECPNSGILWS

SEQ ID NO: 900530 - protein, 635 aa, Homo sapiens
DFFQGGLMQSRLEEVTGKLQVARNLIMKGTEMCPKSEDVWLEAARLQPGDTAKAVVAQAVRHLPQSVRIYIRAAELETDIRAKKRVLRKALEHVPNSVRLWKAAVELEEPEDARIMLSRAVECCPTSVELWLALARLETYENARKVLNKARENIPTDRHIWITAAKLEEANGNTQMVEKIIDRAITSLRANGVEINREQWIQDAEECDRAGSVATCQAVMRAVIGIGIEEEDRKHTWMEDADSCVAHNALECARAIYAYALQVFPSKKSVWLRAAYFEKNHGTRESLEALLQRAVAHCPKAEVLWLMGAKSKWLAGDVPAARSILALAFQANPNSEEIWLAAVKLESENDEYERARRLLAKARSSAPTARVFMKSVKLEWVQDNIRAAQDLCEEALRHYEDFPKLWMMKGQIEEQKEMMEKAREAYNQGLKKCPHSTPLWLLLSRLEEKIGQLTRARAILEKSRLKNPKNPGLWLESVRLEYRAGLKNIANTLMAKALQECPNSGILWSEAIFLEARPQRRTKSVDALKKCEHDPHVLLAVAKLFWSQRKITKAREWFHRTVKIDSDLGDAWAFFYKFELQHGTEEQQEEVRKRCESAEPRHGELWCAVSKDIANWQKKIGDILRLVAGRIKNTF

SEQ ID NO: 900531 - protein, 381 aa, Homo sapiens
MNKKKKPFLGMPAPLGYVPGLGRGATGFTTRSDIGPARDANDPVDDRHAPPGKRTVGDQMKKNQAADDDDEDLNDTNYDEFNGYAGSLFSSGPYEKDDEEADAIYAALDKRMDERRKERREQREKEEIEKYRMERPKIQQQFSDLKRKLAEVTEEEWLSIPEVGDARNKRQRNPRYEKLTPVPDSFFAKHLQTGENHTSVDPRQTQFGGLNTPYPGGLNTPYPGGMTPGLMTPGTGELDMRKIGQARNTLMDMRLSQVSDSVSGQTVVDPKGYLTDLNSMIPTHGGDINDIKKARLLLKSVRETNPHHPPAWIASARLEEVTGKLQVARNLIMKGTEMCPKSEDVWLEAARLQPGDTAKAVVAQAVRHLPQSVRIYIKNTF

SEQ ID NO: 900532 - protein, 91 aa, Homo sapiens; identical to SEQ ID NO: 900522

SEQ ID NO: 900533 - protein, 95 aa, Homo sapiens
RSGEEHRNRVIQTPGVLGVSCSATGFTTRSDIGPARDANDPVDDRHAPPGKRTVGDQMKKNQAADDDDEDLNDTNYDEVRCVRLSWLLQPVSGSS

SEQ ID NO: 900534 - protein, 97 aa, Homo sapiens
  misc_feature (11)..(11): Xaa can be any naturally occurring amino acid
  misc_feature (20)..(20): Xaa can be any naturally occurring amino acid
  misc_feature (36)..(37): Xaa can be any naturally occurring amino acid
SGLLLKFNPPXFQGEPQMAXQPSTWGSHKELTFAGXXQACGVLQLMENQIGAVERGAFDDMKELERLRLNRNQLHMLPELLFQNNQALSRLIYGSER

SEQ ID NO: 900535 - protein, 1616 aa, Homo sapiens
GRRRRRNGRGAEPPPPKAPSLRPRTGAVAWRSKVPPSPQGRRAQARGLFGGSAPGLHLEAAPDGDGQRLLPSGSRAGRCEGTMALTPGWGSSAGPVRPELWLLLWAAAWRLGASACPALCTCTGTTVDCHGTGLQAIPKNIPRNTERLELNGNNITRIHKNDFAGLKQLRVLQLMENQIGAVERGAFDDMKELERLRLNRNQLHMLPELLFQNNQALSRLDLSENAIQAIPRKAFRGATDLKNLRLDKNQISCIEEGAFRALRGLEVLTLNNNNITTIPVSSFNHMPKLRTFRLHSNHLFCDCHLAWLSQWLRQRPTIGLFTQCSGPASLRGLNVAEVQKSEFSCSGQGEAGRVPTCTLSSGSCPAMCTCSNGIVDCRGKGLTAIPANLPETMTEIRLELNGIKSIPPGAFSPYRKLRRIDLSNNQIAEIAPDAFQGLRSLNSLVLYGNKITDLPRGVFGGLYTLQLLLLNANKINCIRPDAFQDLQNLSLLSLYDNKIQSLAKGTFTSLRAIQTLHLAQNPFICDCNLKWLADFLRTNPIETSGARCASPRRLANKRIGQIKSKKFRCSAKEQYFIPGTEDYQLNSECNSDVVCPHKCRCEANVVECSSLKLTKIPERIPQSTAELRLNNNEISILEATGMFKKLTHLKKINLSNNKVSEIEDGAFEGAASVSELHLTANQLESIRSGMFRGLDGLRTLMLRNNRISCIHNDSFTGLRNVRLLSLYDNQITTVSPGAFDTLQSLSTLNLLANPFNCNCQLAWLGGWLRKRKIVTGNPRCQNPDFLRQIPLQDVAFPDFRCEEGQEEGGCLPRPQCPQECACLDTVVRCSNKHLRALPKGIPKNVTELYLDGNQFTLVPGQLSTFKYLQLVDLSNNKISSLSNSSFTNMSQLTTLILSYNALQCIPPLAFQGLRSLRLLSLHGNDISTLQEGIFADVTSLSHLAIGANPLYCDCHLRWLSSWVKTGYKEPGIARCAGPQDMEGKLLLTTPAKKFECQGPPTLAVQAKCDLCLSSPCQNQGTCHNDPLEVYRCACPSGYKGRDCEVSLDSCSSGPCENGGTCHAQEGEDAPFTCSCPTGFEGPTCGVNTDDCVDHACANGGVCVDGVGNYTCQCPLQYEGKACEQLVDLCSPDLNPCQHEAQCVGTPDGPRCECMPGYAGDNCSENQDDCRDHRCQNGAQCMDEVNSYSCLCAEGYSGQLCEIPPHLPAPKSPCEGTECQNGANCVDQGNRPVCQCLPGFGGPECEKLLSVNFVDRDTYLQFTDLQNWPRANITLQVSTAEDNGILLYNGDNDHIAVELYQGHVRVSYDPGSYPSSAIYSAETINDGQFHTVELVAFDQMVNLSIDGGSPMTMDNFGKHYTLNSEAPLYVGGMPVDVNSAAFRLWQILNGTGFHGCIRNLYINNELQDFTKTQMKPGVVPGCEPCRKLYCLHGICQPNATPGPMCHCEAGWVGLHCDQPADGPCHGHKCVHGQCVPLDALSYSCQCQDGYSGALCNQAGALAEPCRGLQCLHGHCQASGTKGAHCVCDPGFSGELCEQESECRGDPVRDFHQVQRGYAICQTTRPLSWVECRGSCPGQGCCQGLRLKRRKFTFECSDGTSFAEEVEKPTKCGCALCA

SEQ ID NO: 900536 - protein, 1616 aa, Homo sapiens; identical to SEQ ID NO: 900535

SEQ ID NO: 900537 - protein, 353 aa, Homo sapiens
MSFPLSGQLCEIPPHLPAPKSPCEGTECQNGANCVDQGNRPVCQCLPGFGGPECEKLLSVNFVDRDTYLQFTDLQNWPRANITLQVSTAEDNGILLYNGDNDHIAVELYQGHVRVSYDPGSYPSSAIYSAETINDGQFHTVELVAFDQMVNLSIDGGSPMTMDNFGKHYTLNSEAPLYVGGMPVDVNSAAFRLWQILNGTGFHGCIRNLYINNELQDFTKTQMKPGVVPGCEPCRKLYCLHGICQPNATPGPMCHCEAGWVGLHCDQPADGPCHGHKCVHGQCVPLDALSYSCQCQDGYSGALCNQAGALAEPCRGLQCLHGHCQASGTKGAHCVCDPGFSGELCEQGQGPPS

SEQ ID NO: 900538 - protein, 226 aa, Homo sapiens
GRRRRRNGRGAEPPPPKAPSLRPRTGAVAWRSKVPPSPQGRRAQARGLFGGSAPGLHLEAAPDGDGQRLLPSGSRAGRCEGTMALTPGWGSSAGPVRPELWLLLWAAAWRLGASACPALCTCTGTTVDCHGTGLQAIPKNIPRNTERLELNGNNITRIHKNDFAGLKQLRVLQLMENQIGAVERGAFDDMKELERLRLNRNQLHMLPELLFQNNQALSRLIYGSER

SEQ ID NO: 900539 - protein, 1616 aa, Homo sapiens; identical to SEQ ID NO: 900535

SEQ ID NO: 900540 - protein, 1543 aa, Homo sapiens
GRRRRRNGRGAEPPPPKAPSLRPRTGAVAWRSKVPPSPQGRRAQARGLFGGSAPGLHLEAAPDGDGQRLLPSGSRAGRCEGTMALTPGWGSSAGPVRPELWLLLWAAAWRLGASACPALCTCTGTTVDCHGTGLQAIPKNIPRNTERLELNGNNITRIHKNDFAGLKQLRVLQLMENQIGAVERGAFDDMKELERLRLNRNQLHMLPELLFQNNQALSRLDLSENAIQAIPRKAFRGATDLKNLRLDKNQISCIEEGAFRALRGLEVLTLNNNNITTIPVSSFNHMPKLRTFRLHSNHLFCDCHLAWLSQWLRQRPTIGLFTQCSGPASLRGLNVAEVQKSEFSCSGQGEAGRVPTCTLSSGSCPAMCTCSNGIVDCRGKGLTAIPANLPETMTEIRLELNGIKSIPPGAFSPYRKLRRIDLSNNQIAEIAPDAFQGLRSLNSLVLYGNKITDLPRGVFGGLYTLQLLLLNANKINCIRPDAFQDLQNLSLLSLYDNKIQSLAKGTFTSLRAIQTLHLAQNPFICDCNLKWLADFLRTNPIETSGARCASPRRLANKRIGQIKSKKFRCSAKEQYFIPGTEDYQLNSECNSDVVCPHKCRCEANVVECSSLKLTKIPERIPQSTAELRLNNNEISILEATGMFKKLTHLKKINLSNNKVSEIEDGAFEGAASVSELHLTANQLESIRSGMFRGLDGLRTLMLRNNRISCIHNDSFTGLRNVRLLSLYDNQITTVSPGAFDTLQSLSTLNLLANPFNCNCQLAWLGGWLRKRKIVTGNPRCQNPDFLRQIPLQDVAFPDFRCEEGQEEGGCLPRPQCPQECACLDTVVRCSNKHLRALPKGIPKNVTELYLDGNQFTLVPGQLSTFKYLQLVDLSNNKISSLSNSSFTNMSQLTTLILSYNALQCIPPLAFQGLRSLRLLSLHGNDISTLQEGIFADVTSLSHLAIGANPLYCDCHLRWLSSWVKTGYKEPGIARCAGPQDMEGKLLLTTPAKKFECQGPPTLAVQAKCDLCLSSPCQNQGTCHNDPLEVYRCACPSGYKGRDCEVSLDSCSSGPCENGGTCHAQEGEDAPFTCSCPTGFEGPTCGVNTDDCVDHACANGGVCVDGVGNYTCQCPLQYEGKACEQLVDLCSPDLNPCQHEAQCVGTPDGPRCECMPGYAGDNCSENQDDCRDHRCQNGAQCMDEVNSYSCLCAEGYSGQLCEIPPHLPAPKSPCEGTECQNGANCVDQGNRPVCQCLPGFGGPECEKLLSVNFVDRDTYLQFTDLQNWPRANITLQVSTAEDNGILLYNGDNDHIAVELYQGHVRVSYDPGSYPSSAIYSAETINDGQFHTVELVAFDQMVNLSIDGGSPMTMDNFGKHYTLNSEAPLYVGGMPVDVNSAAFRLWQILNGTGFHGCIRNLYINNELQDFTKTQMKPGVVPGCEPCRKLYCLHGICQPNATPGPMCHCEAGWVGLHCDQPADGPCHGHKCVHGQCVPLDALSYSCQCQDGYSGALCNQAGALAEPCRGLQCLHGHCQASGTKGAHCVCDPGFSGELCEQGQGPPS

SEQ ID NO: 900541 - protein, 1273 aa, Homo sapiens
GRRRRRNGRGAEPPPPKAPSLRPRTGAVAWRSKVPPSPQGRRAQARGLFGGSAPGLHLEAAPDGDGQRLLPSGSRAGRCEGTMALTPGWGSSAGPVRPELWLLLWAAAWRLGASACPALCTCTGTTVDCHGTGLQAIPKNIPRNTERLELNGNNITRIHKNDFAGLKQLRVLQLMENQIGAVERGAFDDMKELERLRLNRNQLHMLPELLFQNNQALSRLDLSENAIQAIPRKAFRGATDLKNLRLDKNQISCIEEGAFRALRGLEVLTLNNNNITTIPVSSFNHMPKLRTFRLHSNHLFCDCHLAWLSQWLRQRPTIGLFTQCSGPASLRGLNVAEVQKSEFSCSGQGEAGRVPTCTLSSGSCPAMCTCSNGIVDCRGKGLTAIPANLPETMTEIRLELNGIKSIPPGAFSPYRKLRRIDLSNNQIAEIAPDAFQGLRSLNSLVLYGNKITDLPRGVFGGLYTLQLLLLNANKINCIRPDAFQDLQNLSLLSLYDNKIQSLAKGTFTSLRAIQTLHLAQNPFICDCNLKWLADFLRTNPIETSGARCASPRRLANKRIGQIKSKKFRCSAKEQYFIPGTEDYQLNSECNSDVVCPHKCRCEANVVECSSLKLTKIPERIPQSTAELRLNNNEISILEATGMFKKLTHLKKINLSNNKVSEIEDGAFEGAASVSELHLTANQLESIRSGMFRGLDGLRTLMLRNNRISCIHNDSFTGLRNVRLLSLYDNQITTVSPGAFDTLQSLSTLNLLANPFNCNCQLAWLGGWLRKRKIVTGNPRCQNPDFLRQIPLQDVAFPDFRCEEGQEEGGCLPRPQCPQECACLDTVVRCSNKHLRALPKGIPKNVTELYLDGNQFTLVPGQLSTFKYLQLVDLSNNKISSLSNSSFTNMSQLTTLILSYNALQCIPPLAFQGLRSLRLLSLHGNDISTLQEGIFADVTSLSHLAIGANPLYCDCHLRWLSSWVKTGYKEPGIARCAGPQDMEGKLLLTTPAKKFECQGPPTLAVQAKCDLCLSSPCQNQGTCHNDPLEVYRCACPSGYKGRDCEVSLDSCSSGPCENGGTCHAQEGEDAPFTCSCPTGFEGPTCGVNTDDCVDHACANGGVCVDGVGNYTCQCPLQYEGKACEQLVDLCSPDLNPCQHEAQCVGTPDGPRCECMPGYAGDNCSENQDDCRDHRCQNGAQCMDEVNSYSCLCAEGYSGQLCEIPPHLPAPKSPGVSACQVMQVTTAVRTRMTAGTTAARMGPSVWMKSTATPASVLRATVDSSVRSLPICLPPE

SEQ ID NO: 900542 - protein, 456 aa, Homo sapiens
MASALSLGNKCDPFLRCVLCRGGGALQGPRGRGPDDFESQLSPPGSARRLVRSKRACGNPPDAFGLSRASVHPPLPRVSIGCSSGPGRAKRERVGGAAWRQRKMAASAAVFSRLRSGLRLGSRGLCTRLATPPRRAPDQAAEIGSRGSTKAQGPQQQPGSEGPSYAKKVALWLAGLLGAGGTVSVVYIFGNNPVDENGAKIPDEFDNDPILVQQLRRTYKYFKDYRQMIIEPTSPCLLPDPLQEPYYQPPYTLVLELTGVLLHPEWSLATGWRFKKRPGIETLFQQLAPLYEIVIFTSETGMTAFPLIDSVDPHGFISYRLFRDATRYMDGHHVKDISCLNRDPARVVVVDCKKEAFRLQPYNGVALRPWDGNSDDRVLLDLSAFLKTIALNGVEDVRTVLEHYALEDDPLAAFKQRQSRLEQEEQQRLAELSKSNKQNLFLGSLTSRLWPRSKQP

SEQ ID NO: 900543 - protein, 456 aa, Homo sapiens; identical to SEQ ID NO: 900542

SEQ ID NO: 900544 - protein, 456 aa, Homo sapiens; identical to SEQ ID NO: 900542

SEQ ID NO: 900545 - protein, 456 aa, Homo sapiens; identical to SEQ ID NO: 900542

SEQ ID NO: 900546 - protein, 456 aa, Homo sapiens; identical to SEQ ID NO: 900542

SEQ ID NO: 900547 - protein, 364 aa, Homo sapiens
NYRLGTRPGFKSAEAAAVFSRLRSGLRLGSRGLCTRLATPPRRAPDQAAEIGSRGSTKAQGPQQQPGSEGPSYAKKVALWLAGLLGAGGTVSVVYIFGNNPVDENGAKIPDEFDNDPILVQQLRRTYKYFKDYRQMIIEPTSPCLLPDPLQEPYYQPPYTLVLELTGVLLHPEWSLATGWRFKKRPGIETLFQQLAPLYEIVIFTSETGMTAFPLIDSVDPHGFISYRLFRDATRYMDGHHVKDISCLNRDPARVVVVDCKKEAFRLQPYNGVALRPWDGNSDDRVLLDLSAFLKTIALNGVEDVRTVLEHYALEDDPLAAFKQRQSRLEQEEQQRLAELSKSNKQNLFLGSLTSRLWPRSKQP

SEQ ID NO: 900548 - protein, 298 aa, Homo sapiens
MRAEMPNGLRPLLWLAGLLGAGGTVSVVYIFGNNPVDENGAKIPDEFDNDPILVQQLRRTYKYFKDYRQMIIEPTSPCLLPDPLQEPYYQPPYTLVLELTGVLLHPEWSLATGWRFKKRPGIETLFQQLAPLYEIVIFTSETGMTAFPLIDSVDPHGFISYRLFRDATRYMDGHHVKDISCLNRDPARVVVVDCKKEAFRLQPYNGVALRPWDGNSDDRVLLDLSAFLKTIALNGVEDVRTVLEHYALEDDPLAAFKQRQSRLEQEEQQRLAELSKSNKQNLFLGSLTSRLWPRSKQP

SEQ ID NO: 900549 - protein, 240 aa, Homo sapiens
MVPRFLMSSTMMIIEPTSPCLLPDPLQEPYYQPPYTLVLELTGVLLHPEWSLATGWRFKKRPGIETLFQQLAPLYEIVIFTSETGMTAFPLIDSVDPHGFISYRLFRDATRYMDGHHVKDISCLNRDPARVVVVDCKKEAFRLQPYNGVALRPWDGNSDDRVLLDLSAFLKTIALNGVEDVRTVLEHYALEDDPLAAFKQRQSRLEQEEQQRLAELSKSNKQNLFLGSLTSRLWPRSKQP

SEQ ID NO: 900550 - protein, 229 aa, Homo sapiens
MIIEPTSPCLLPDPLQEPYYQPPYTLVLELTGVLLHPEWSLATGWRFKKRPGIETLFQQLAPLYEIVIFTSETGMTAFPLIDSVDPHGFISYRLFRDATRYMDGHHVKDISCLNRDPARVVVVDCKKEAFRLQPYNGVALRPWDGNSDDRVLLDLSAFLKTIALNGVEDVRTVLEHYALEDDPLAAFKQRQSRLEQEEQQRLAELSKSNKQNLFLGSLTSRLWPRSKQP

SEQ ID NO: 900551 - protein, 229 aa, Homo sapiens; identical to SEQ ID NO: 900550

SEQ ID NO: 900552 - protein, 244 aa, Homo sapiens
GRVGRPTRSRSETGMMIIEPTSPCLLPDPLQEPYYQPPYTLVLELTGVLLHPEWSLATGWRFKKRPGIETLFQQLAPLYEIVIFTSETGMTAFPLIDSVDPHGFISYRLFRDATRYMDGHHVKDISCLNRDPARVVVVDCKKEAFRLQPYNGVALRPWDGNSDDRVLLDLSAFLKTIALNGVEDVRTVLEHYALEDDPLAAFKQRQSRLEQEEQQRLAELSKSNKQNLFLGSLTSRLWPRSKQP

SEQ ID NO: 900553 - protein, 465 aa, Homo sapiens
  misc_feature (398)..(399): Xaa can be any naturally occurring amino acid
  misc_feature (402)..(402): Xaa can be any naturally occurring amino acid
  misc_feature (405)..(405): Xaa can be any naturally occurring amino acid
  misc_feature (408)..(409): Xaa can be any naturally occurring amino acid
  misc_feature (412)..(412): Xaa can be any naturally occurring amino acid
  misc_feature (416)..(416): Xaa can be any naturally occurring amino acid
  misc_feature (419)..(419): Xaa can be any naturally occurring amino acid
  misc_feature (422)..(422): Xaa can be any naturally occurring amino acid
  misc_feature (441)..(442): Xaa can be any naturally occurring amino acid
  misc_feature (451)..(451): Xaa can be any naturally occurring amino acid
  misc_feature (454)..(454): Xaa can be any naturally occurring amino acid
  misc_feature (456)..(456): Xaa can be any naturally occurring amino acid
  misc_feature (460)..(460): Xaa can be any naturally occurring amino acid
MASALSLGNKCDPFLRCVLCRGGGALQGPRGRGPDDFESQLSPPGSARRLVRSKRACGNPPDAFGLSRASVHPPLPRVSIGCSSGPGRAKRERVGGAAWRQRKMAASAAVFSRLRSGLRLGSRGLCTRLATPPRRAPDQAAEIGSRGSTKAQGPQQQPGSEGPSYAKKVALWLAGLLGAGGTVSVVYIFGNNPVDENGAKIPDEFDNDPILVQQLRRTYKYFKDYRQMIIEPTSPCLLPDPLQEPYYQPPYTLVLELTGVLLHPEWSLATGWRFKKRPGIETLFQQLAPLYEIVIFTSETGMTAFPLIDSVDPHGFISYRLFRDATRYMDGHHVKDISCLNRDPARVVVVDCKKEAFRLQPYNGVALRPWDGNSDDRVLLDLSAFLKTNCTGNGVEAXXSPXPVXGGXXFAXGRNXPRXAGXFKTSAQKPGIKARKEASKXXGRSLSKDPXKKXNXSLAXKKTRL

SEQ ID NO: 900554 - protein, 228 aa, Homo sapiens
MSLKACKTQLRKSFNKSNNINKNSDNYWWLPNWANAPWSLATGWRFKKRPGIETLFQQLAPLYEIVIFTSETGMTAFPLIDSVDPHGFISYRLFRDATRYMDGHHVKDISCLNRDPARVVVVDCKKEAFRLQPYNGVALRPWDGNSDDRVLLDLSAFLKTIALNGVEDVRTVLEHYALEDDPLAAFKQRQSRLEQEEQQRLAELSKSNKQNLFLGSLTSRLWPRSKQP

SEQ ID NO: 900555 - protein, 169 aa, Homo sapiens
GRVGRPTRSRSETGMTAFPLIDSVDPHGFISYRLFRDATRYMDGHHVKDISCLNRDPARVVVVDCKKEAFRLQPYNGVALRPWDGNSDDRVLLDLSAFLKTIALNGVEDVRTVLEHYALEDDPLAAFKQRQSRLEQEEQQRLAELSKSNKQNLFLGSLTSRLWPRSKQP

SEQ ID NO: 900556 - protein, 139 aa, Homo sapiens
MGGELGTDVDLICHSLPEDISCLNRDPARVVVVDCKKEAFRLQPYNGVALRPWDGNSDDRVLLDLSAFLKTIALNGVEDVRTVLEHYALEDDPLAAFKQRQSRLEQEEQQRLAELSKSNKQNLFLGSLTSRLWPRSKQP

SEQ ID NO: 900557 - protein, 383 aa, Homo sapiens
MASALSLGNKCDPFLRCVLCRGGGALQGPRGRGPDDFESQLSPPGSARRLVRSKRACGNPPDAFGLSRASVHPPLPRVSIGCSSGPGRAKRERVGGAAWRQRKMAASAAVFSRLRSGLRLGSRGLCTRLATPPRRAPDQAAEIGSRGSTKAQGPQQQPGSEGPSYAKKVALWLAGLLGAGGTVSVVYIFGNNPVDENGAKIPDEFDNDPILVQQLRRTYKYFKDYRQMIIEPTSPCLLPDPLQEPYYQPPYTLVLELTGVLLHPEWSLATGWRFKKRPGIETLFQQLAPLYEIVIFTSETGMTAFPLIDSVDPHGFISYRLFRDATRYMDGHHVKVPWVHGWASGIWRSWHHLREGGPSSDPSLTWLMVLPRFDSCWQAHACL

SEQ ID NO: 900558 - protein, 456 aa, Homo sapiens; identical to SEQ ID NO: 900542

SEQ ID NO: 900559 - protein, 456 aa, Homo sapiens; identical to SEQ ID NO: 900542

SEQ ID NO: 900560 - protein, 456 aa, Homo sapiens; identical to SEQ ID NO: 900542

SEQ ID NO: 900561 - protein, 456 aa, Homo sapiens; identical to SEQ ID NO: 900542

SEQ ID NO: 900562 - protein, 347 aa, Homo sapiens
QVILEQEGPGTLESQSGRGSYFLCGVGGGEAAEIGSRGSTKAQGPQQQPGSEGPSYAKKVALWLAGLLGAGGTVSVVYIFGNNPVDENGAKIPDEFDNDPILVQQLRRTYKYFKDYRQMIIEPTSPCLLPDPLQEPYYQPPYTLVLELTGVLLHPEWSLATGWRFKKRPGIETLFQQLAPLYEIVIFTSETGMTAFPLIDSVDPHGFISYRLFRDATRYMDGHHVKDISCLNRDPARVVVVDCKKEAFRLQPYNGVALRPWDGNSDDRVLLDLSAFLKTIALNGVEDVRTVLEHYALEDDPLAAFKQRQSRLEQEEQQRLAELSKSNKQNLFLGSLTSRLWPRSKQP

SEQ ID NO: 900563 - protein, 472 aa, Homo sapiens
MASALSLGNKCDPFLRCVLCRGGGALQGPRGRGPDDFESQLSPPGSARRLVRSKRACGNPPDAFGLSRASVHPPLPRVSIGCSSGPGRAKRERVGGAAWRQRKMAASAAVFSRLRSGLRLGSRGLCTRLATPPRRAPDQAAEIGSRGSTKAQGPQQQPGSEGPSYAKKVALWLAGLLGAGGTVSVVYIFGNNPVDENGAKVRGKETEALPGVLVCWIPDEFDNDPILVQQLRRTYKYFKDYRQMIIEPTSPCLLPDPLQEPYYQPPYTLVLELTGVLLHPEWSLATGWRFKKRPGIETLFQQLAPLYEIVIFTSETGMTAFPLIDSVDPHGFISYRLFRDATRYMDGHHVKDISCLNRDPARVVVVDCKKEAFRLQPYNGVALRPWDGNSDDRVLLDLSAFLKTIALNGVEDVRTVLEHYALEDDPLAAFKQRQSRLEQEEQQRLAELSKSNKQNLFLGSLTSRLWPRSKQP

SEQ ID NO: 900564 - protein, 229 aa, Homo sapiens; identical to SEQ ID NO: 900550

SEQ ID NO: 900565 - protein, 429 aa, Homo sapiens
MASALSLGNKCDPFLRCVLCRGGGALQGPRGRGPDDFESQLSPPGSARRLVRSKRACGNPPDAFGLSRASVHPPLPRVSIGCSSGPGRAKRERVGGAAWRQRKMAASAAVFSRLRSGLRLGSRGLCTRLATPPRRAPDQAAEIGSRGSTKAQGPQQQPGSEGPSYAKKVALWLAGLLGAGGTVSVVYIFGNNPVDENGAKMIIEPTSPCLLPDPLQEPYYQPPYTLVLELTGVLLHPEWSLATGWRFKKRPGIETLFQQLAPLYEIVIFTSETGMTAFPLIDSVDPHGFISYRLFRDATRYMDGHHVKDISCLNRDPARVVVVDCKKEAFRLQPYNGVALRPWDGNSDDRVLLDLSAFLKTIALNGVEDVRTVLEHYALEDDPLAAFKQRQSRLEQEEQQRLAELSKSNKQNLFLGSLTSRLWPRSKQP

SEQ ID NO: 900566 - protein, 239 aa, Homo sapiens
MHAMIDRMAPMIIEPTSPCLLPDPLQEPYYQPPYTLVLELTGVLLHPEWSLATGWRFKKRPGIETLFQQLAPLYEIVIFTSETGMTAFPLIDSVDPHGFISYRLFRDATRYMDGHHVKDISCLNRDPARVVVVDCKKEAFRLQPYNGVALRPWDGNSDDRVLLDLSAFLKTIALNGVEDVRTVLEHYALEDDPLAAFKQRQSRLEQEEQQRLAELSKSNKQNLFLGSLTSRLWPRSKQP

SEQ ID NO: 900567 - protein, 155 aa, Homo sapiens [sequence omitted]

SEQ ID NO: 900568 - protein, 260 aa, Homo sapiens
MASALSLGNKCDPFLRCVLCRGGGALQGPRGRGPDDFESQLSPPGSARRLVRSKRACGNPPDAFGLSRASVHPPLPRVSIGCSSGPGRAKRERVGGAAWRQRKMAASAAVFSRLRSGLRLGSRGLCTRLATPPRRAPDQDISCLNRDPARVVVVDCKKEAFRLQPYNGVALRPWDGNSDDRVLLDLSAFLKTIALNGVEDVRTVLEHYALEDDPLAAFKQRQSRLEQEEQQRLAELSKSNKQNLFLGSLTSRLWPRSKQP

SEQ ID NO: 900569 - protein, 242 aa, Homo sapiens
MVFTITFPLTAPVGMLVPVTECFNGSCQYGCTAPRRDCGLRLRWGLQQAVAGSGAVAGVGAGQLVALLAAGCPLPVVVAAVAVAAAGVVGAAAGAGVAGPRPAAVPSADQPEPFSLLQIRSDISCLNRDPARVVVVDCKKEAFRLQPYNGVALRPWDGNSDDRVLLDLSAFLKTIALNGVEDVRTVLEHYALEDDPLAAFKQRQSRLEQEEQQRLAELSKSNKQNLFLGSLTSRLWPRSKQP

SEQ ID NO: 900570 - protein, 141 aa, Homo sapiens
MAELDPFGAPAGAPGGPALGNGVAGAGEEDPAAAFLAQQESEIAGIENDEAFAILDGGAPGPQPHGEPPGGPDAVDGVMNGEYYQESNGPTDSYAAISQVDRLQSEPESIRKWREEQMERLEALDANSRKQEAEWTHEHRQ

SEQ ID NO: 900571 - protein, 194 aa, Homo sapiens
WLVRGLVLNRPSLPPGACPPLPVGTTAVAAGRGVGGSVGFCLTVGVRAVQLPAMAELDPFGAPAGAPGGPALGNGVAGAGEEDPAAAFLAQQESEIAGIENDEAFAILDGGAPGPQPHGEPPGGPDAVDGVMNGEYYQESNGPTDSYAAISQVDRLQSEPESIRKWREEQMERLEALDANSRKQEAEWTHEHRQ

SEQ ID NO: 900572 - protein, 197 aa, Homo sapiens
GQEKRNRLGTRLGVGLPPGACPPLPVGTTAVAAGRGVGGSVGFCLTVGVRAVQLPAMAELDPFGAPAGAPGGPALGNGVAGAGEEDPAAAFLAQQESEIAGIENDEAFAILDGGAPGPQPHGEPPGGPDAVDGVMNGEYYQESNGPTDSYAAISQVDRLQSEPESIRKWREEQMERLEALDANSRKQEAEWTHEHRQ

SEQ ID NO: 900573 - protein, 183 aa, Homo sapiens
GQEKRNRLGTRLGVAAVAAGRGVGGSVGFCLTVGVRAVQLPAMAELDPFGAPAGAPGGPALGNGVAGAGEEDPAAAFLAQQESEIAGIENDEAFAILDGGAPGPQPHGEPPGGPDAVDGVMNGEYYQESNGPTDSYAAISQVDRLQSEPESIRKWREEQMERLEALDANSRKQEAEWTHEHRQ

SEQ ID NO: 900574 - protein, 141 aa, Homo sapiens; identical to SEQ ID NO: 900570

SEQ ID NO: 900575 - protein, 197 aa, Homo sapiens; identical to SEQ ID NO: 900572

SEQ ID NO: 900576 - protein, 141 aa, Homo sapiens; identical to SEQ ID NO: 900570

SEQ ID NO: 900577 - protein, 141 aa, Homo sapiens; identical to SEQ ID NO: 900570

SEQ ID NO: 900578 - protein, 180 aa, Homo sapiens
WLVRGLVLNRPTAVAAGRGVGGSVGFCLTVGVRAVQLPAMAELDPFGAPAGAPGGPALGNGVAGAGEEDPAAAFLAQQESEIAGIENDEAFAILDGGAPGPQPHGEPPGGPDAVDGVMNGEYYQESNGPTDSYAAISQVDRLQSEPESIRKWREEQMERLEALDANSRKQEAEWTHEHRQ

SEQ ID NO: 900579 - protein, 141 aa, Homo sapiens; identical to SEQ ID NO: 900570

SEQ ID NO: 900580 - protein, 141 aa, Homo sapiens; identical to SEQ ID NO: 900570

SEQ ID NO: 900581 - protein, 141 aa, Homo sapiens; identical to SEQ ID NO: 900570

SEQ ID NO: 900582 - protein, 195 aa, Homo sapiens
AGCSLFGSATPPRPTGYTGRASALPVSLLALVLLSQSAPQRWLPGVVSVGRLVFVSPLVSVPFSCPPWLSWIRSAPLPAPLAVPRWGTEWPAPAKKTRLRPSWRSKRARLRASRTTRPSPSWTAAPPGPSRTASRRGVRESNGPTDSYAAISQVDRLQSEPESIRKWREEQMERLEALDANSRKQEAEWTHEHRQ

SEQ ID NO: 900583 - protein, 141 aa, Homo sapiens; identical to SEQ ID NO: 900570

SEQ ID NO: 900584 - protein, 141 aa, Homo sapiens; identical to SEQ ID NO: 900570

SEQ ID NO: 900585 - protein, 141 aa, Homo sapiens; identical to SEQ ID NO: 900570

SEQ ID NO: 900586 - protein, 141 aa, Homo sapiens; identical to SEQ ID NO: 900570

SEQ ID NO: 900587 - protein, 141 aa, Homo sapiens; identical to SEQ ID NO: 900570

SEQ ID NO: 900588 - protein, 181 aa, Homo sapiens
AGCSLFGSATPPRPTGYTGRASALPVSLLALVLLSQSAPQRWLPGVVSVGRLVFVSPLVSVPFSCPPWLSWIRSAPLPAPLAVPRWGTEWPAPAKKTRLRPSWRSKRARLRASRTTRPSPSWTAAPPGPSRTASRRGVRMPILGSKKQSGHTNTGNKGARRMVCKTGRAATENKSKQQGGR

SEQ ID NO: 900589 - protein, 195 aa, Homo sapiens; identical to SEQ ID NO: 900582

SEQ ID NO: 900590 - protein, 141 aa, Homo sapiens; identical to SEQ ID NO: 900570

SEQ ID NO: 900591 - protein, 113 aa, Homo sapiens
MAELDPFGAPAGAPGGPALGNGVAGAGEEDPAAAFLAQQESEIAGIENDEAFAILDGGAPGPQPHGEPPGGPDAVDGVMNGEYYQESNGPTDSYAAISQVDRLQSEPSNSLNQ

SEQ ID NO: 900592 - protein, 189 aa, Homo sapiens
RCLSPRLSPRRLVRSGLPGLAAVAAGRGVGGSVGFCLTVGVRAVQLPAMAELDPFGAPAGAPGGPALGNGVAGAGEEDPAAAFLAQQESEIAGIENDEAFAILDGGAPGPQPHGEPPGGPDAVDGVMNGEYYQESNGPTDSYAAISQVDRLQSEPESIRKWREEQMERLEALDANSRKQEAEWTHEHRQ

SEQ ID NO: 900593 - protein, 197 aa, Homo sapiens; identical to SEQ ID NO: 900572

SEQ ID NO: 900594 - protein, 197 aa, Homo sapiens; identical to SEQ ID NO: 900572

SEQ ID NO: 900595 - protein, 194 aa, Homo sapiens; identical to SEQ ID NO: 900571

SEQ ID NO: 900596 - protein, 141 aa, Homo sapiens; identical to SEQ ID NO: 900570

SEQ ID NO: 900597 - protein, 179 aa, Homo sapiens
GCEPGVIGRGTAVAAGRGVGGSVGFCLTVGVRAVQLPAMAELDPFGAPAGAPGGPALGNGVAGAGEEDPAAAFLAQQESEIAGIENDEAFAILDGGAPGPQPHGEPPGGPDAVDGVMNGEYYQESNGPTDSYAAISQVDRLQSEPESIRKWREEQMERLEALDANSRKQEAEWTHEHRQ

SEQ ID NO: 900598 - protein, 183 aa, Homo sapiens; identical to SEQ ID NO: 900573

SEQ ID NO: 900599 - protein, 141 aa, Homo sapiens; identical to SEQ ID NO: 900570

SEQ ID NO: 900600 - protein, 141 aa, Homo sapiens; identical to SEQ ID NO: 900570

SEQ ID NO: 900601 - protein, 158 aa, Homo sapiens
MAELDPFGAPAGAPGGPALGNGVAGAGEEDPAAAFLAQQESEIAGIENDEAFAIPGDRAGGRATPPGWHPPKGPGQTGGPERPAPGGVRDAVDGVMKGEYYQESNGPTDSYAAISQVDRLQSEPESIRKWREEQMERLEALDANSRKQEAEWTHEHRQ

SEQ ID NO: 900602 - protein, 181 aa, Homo sapiens; identical to SEQ ID NO: 900588

SEQ ID NO: 900603 - protein, 186 aa, Homo sapiens
AGCSLFGSATPPRPTGYTGRASALPVSLLALVLLSQSAPQRWLPGVVSVGRLVFVSPLVSVPFSCPPWLSWIRSAPLPAPLAVPRWGTEWPAPAKKTRLRPSWRSKRARLRASRTTRPSPSWTAAPPGPSRTASRRGVRMPILGSKKQSGHTNTGNKGARRMVCKTGRAATENKSKQQGSRRSLCK

SEQ ID NO: 900604 - protein, 141 aa, Homo sapiens; identical to SEQ ID NO: 900570

SEQ ID NO: 900605 - protein, 141 aa, Homo sapiens; identical to SEQ ID NO: 900570

SEQ ID NO: 900606 - protein, 141 aa, Homo sapiens; identical to SEQ ID NO: 900570

SEQ ID NO: 900607 - protein, 119 aa, Homo sapiens
MAELDPFGAPAGAPGGPALGNGVAGAGEEDPAAAFLAQQESEIAGIENDEAFAILDGGAPGPQPHGEPPGGPDAVDGVMNGEYYQESNGPTDSYAAISQVDRLQSEPESIRKWREASQE

SEQ ID NO: 900608 - protein, 91 aa, Homo sapiens
AGCSLFGSATPPRPTGYTGRASALPVSLLALVLLSQSAPQRWLPGVVSVGRLVFVSPLVSVPFSCPPWLSWIRSAPLPAPLCCVPAAVCEL

SEQ ID NO: 900609 - protein, 318 aa, Homo sapiens
MGHESDVVWGGSDRAQWAMEFPFDVDALFPERITVLDQHLRPPARRPGTTTPARVDLQQQIMTIIDELGKASAKAQNLSAPITSASRMQSNRHVVYILKDSSARPAGKGAIIGFIKVGYKKLFVLDDREAHNEVEPLCILDFYIHESVQRHGHGRELFQYMLQKERVEPHQLAIDRPSQKLLKFLNKHYNLETTVPQVNNFVIFEGFFAHQHPPARKLPPKRAEGDIKPYSSSDREFLKVAVEPPWPLNRAPRRATPPAHPPPRSSSLGNSPERGPLRPFVPEQELLRSLRLCPPHPTARLLLAADPGGSPAQRRRTR

SEQ ID NO: 900610 - protein, 210 aa, Homo sapiens
MSPPLPAPARKLPPKRAEGDIKPYSSSDREFLKVAVEPPWPLNRAPRRATPPAHPPPRSSSLGNSPERGPLRPFVPEQELLRSLRLCPPHPTARLLLAADPGGSPAQRRRTRGTPPGLVAQSCCYSRHGGVNSSSPNTGNQDSKQGEQETKNRSASEEQALSQDGSGEKPMHTAPPQAPAPPAQSWTVGGDILNARFIRNLQERRSTRPW

SEQ ID NO: 900611 - protein, 351 aa, Homo sapiens
MGHESDVVWGGSDRAQWAMEFPFDVDALFPERITVLDQHLRPPARRPGTTTPARVDLQQQIMTIIDELGKASAKAQNLSAPITSASRMQSNRHVVYILKDSSARPAGKGAIIGFIKVGYKKLFVLDDREAHNEVEPLCILDFYIHESVQRHGHGRELFQYMLQKERVEPHQLAIDRPSQKLLKFLNKHYNLETTVPQVNNFVIFEGFFAHQHRPPAPSLRATRHSRAAAVDPTPAAPARKLPPKRAEGDIKPYSSSDREFLKVAVEPPWPLNRAPRRATPPAHPPPRSSSLGNSPERGPLRPFVPEQELLRSLRLCPPHPTARLLLAADPGGSPAQRRRTSSLPRSEESRY

SEQ ID NO: 900612 - protein, 328 aa, Homo sapiens
MGHESDVVWGGSDRAQWAMEFPFDVDALFPERITVLDQHLRPPARRPGTTTPARVDLQQQIMTIIDELGKASAKAQNLSAPITSASRMQSNRHVVYILKDSSARPAGKGAIIGFIKVGYKKLFVLDDREAHNEVEPLCILDFYIHESVQRHGHGRELFQYMLQKERVEPHQLAIDRPSQKLLKFLNKHYNLETTVPQVNNFVIFEGFFAHQHPPARKLPPKRAEGDIKPYSSSDREFLKVAVEPPWPLNRAPRRATPPAHPPPRSSSLGNSPERGPLRPFVPEQELLRSLRLCPPHPTARLLLAADPGGSPAQRRRTSSLPRSEESRY

SEQ ID NO: 900613 - protein, 122 aa, Homo sapiens
MSPPLPAPARKLPPKRAEGDIKPYSSSDREFLKVAVEPPWPLNRAPRRATPPAHPPPRSSSLGNSPERGPLRPFVPEQELLRSLRLCPPHPTARLLLAADPGGSPAQRRRTSSLPRSEESRY

SEQ ID NO: 900614 - protein, 439 aa, Homo sapiens
MGHESDVVWGGSDRAQWAMEFPFDVDALFPERITVLDQHLRPPARRPGTTTPARVDLQQQIMTIIDELGKASAKAQNLSAPITSASRMQSNRHVVYILKDSSARPAGKGAIIGFIKVGYKKLFVLDDREAHNEVEPLCILDFYIHESVQRHGHGRELFQYMLQKERVEPHQLAIDRPSQKLLKFLNKHYNLETTVPQVNNFVIFEGFFAHQHRPPAPSLRATRHSRAAAVDPTPAAPARKLPPKRAEGDIKPYSSSDREFLKVAVEPPWPLNRAPRRATPPAHPPPRSSSLGNSPERGPLRPFVPEQELLRSLRLCPPHPTARLLLAADPGGSPAQRRRTRGTPPGLVAQSCCYSRHGGVNSSSPNTGNQDSKQGEQETKNRSASEEQALSQDGSGEKPMHTAPPQAPAPPAQSWTVGGDILNARFIRNLQERRSTRPW

SEQ ID NO: 900615 - protein, 273 aa, Homo sapiens
MGHESDVVWGGSDRAQWAMEFPFDVDALFPERITVLDQHLRPPARRPGTTTPARVDLQQQIMTIIDELGKASAKAQNLSAPITSASRMQSNRHVVYILKDSSARPAGKGAIIGFIKVGYKKLFVLDDREAHNEVEPLCILDFYIHESVQRHGHGRELFQYMLQKERVEPHQLAIDRPSQKLLKFLNKHYNLETTVPQVNNFVIFEGFFAHQHRPPAPSLRATRHSRAAAVDPTPAAPARKLPPKRAEGDIKPYSSSDRECKRGKGGVSGPGVP

SEQ ID NO: 900616 - protein, 341 aa, Homo sapiens
MGHESDVVWGGSDRAQWAMEFPFDVDALFPERITVLDQHLRPPARRPGTTTPARVDLQQQIMTIIDELGKASAKAQNLSAPITSASRMQSNRHVVYILKDSSARPAGKGAIIGFIKVGYKKLFVLDDREAHNEVEPLCILDFYIHESVQRHGHGRELFQYMLQKERVEPHQLAIDRPSQKLLKFLNKHYNLETTVPQVNNFVIFEGFFAHQHRPPAPSLRATRHSRAAAVDPTPAAPARKLPPKRAEGDIKPYSSSDREFLKVAVEPPWPLNRAPRRATPPAHPPPRSSSLGNSPERGPLRPFVPEQELLRSLRLCPPHPTARLLLAADPGGSPAQRRRTR

SEQ ID NO: 900617 - protein, 245 aa, Homo sapiens
MGHESDVVWGGSDRAQWAMEFPFDVDALFPERITVLDQHLRPPARRPGTTTPARVDLQQQIMTIIDELGKASAKAQNLSAPITSASRMQSNRHVVYILKDSSARPAGKGAIIGFIKVGYKKLFVLDDREAHNEVEPLCILDFYIHESVQRHGHGRELFQYMLQKERVEPHQLAIDRPSQKLLKFLNKHYNLETTVPQVNNFVIFEGFFAHQHRPPAPSLRATRHSRAAAVDPTPAGQACIEGVEL

SEQ ID NO: 900618 - protein, 93 aa, Homo sapiens
KSSRPHSLSTPAFPHMPDISTGNQDSKQGEQETKNRSASEEQALSQDGSGEKPMHTAPPQAPAPPAQSWTVGGDILNARFIRNLQERRSTRPW

SEQ ID NO: 900619 - protein, 298 aa, Homo sapiens
MWLTWPFCFLTITLREEGVCHLESVDLQQQIMTIIDELGKASAKAQNLSAPITSASRMQSNRHVVYILKDSSARPAGKGAIIGFIKVGYKKLFVLDDREAHNEVEPLCILDFYIHESVQRHGHGRELFQYMLQKERVEPHQLAIDRPSQKLLKFLNKHYNLETTVPQVNNFVIFEGFFAHQHPPARKLPPKRAEGDIKPYSSSDREFLKVAVEPPWPLNRAPRRATPPAHPPPRSSSLGNSPERGPLRPFVPEQELLRSLRLCPPHPTARLLLAADPGGSPAQRRRTSSLPRSEESRY

SEQ ID NO: 900620 - protein, 382 aa, Homo sapiens
MGHESDVVWGGSDRAQWAMEFPFDVDALFPERITVLDQHLRPPARRPGTTTPARVDLQQQIMTIIDELGKASAKAQNLSAPITSASRMQSNRHVVYILKDSSARPAGKGAIIGFIKVGYKKLFVLDDREAHNEVEPLCILDFYIHESVQRHGHGRELFQYMLQKERVEPHQLAIDRPSQKLLKFLNKHYNLETTVPQVNNFVIFEGFFAHQHRPPAPSLRATRHSRAAAVDPTPAAPARKLPPKRAEGDIKPYSSSDREFLKVAVEPPWPLNRAPRRATPPAHPPPRSSSLGNSPERGPLRPFVPEQELLRSLRLCPPHPTARLLLAADPGGSPAQRRRTRGTPPGLVAQSCCYSRHGGVNSSSPNTGNQDSKQGEQETKNR

SEQ ID NO: 900621 - protein, 243 aa, Homo sapiens
MGHESDVVWGGSDRAQWAMEFPFDVDALFPERITVLDQHLRPPARRPGTTTPARVDLQQQIMTIIDELGKASAKAQNLSAPITSASRMQSNRHVVYILKDSSARPAGKGAIIGFIKVGYKKLFVLDDREAHNEVEPLCILDFYIHESVQRHGHGRELFQYMLQKERVEPHQLAIDRPSQKLLKFLNKHYNLETTVPQVNNFVIFEGFFAHQHPPARKLPPKRAEGDIKPYSSSDREWGLPQVW

SEQ ID NO: 900622 - protein, 234 aa, Homo sapiens
MAAGIVASRRLRDLLTRRLTGSNYPGLSISLRLTGSSAQEAASGVALGEAPDHSYESLRVTSAQKHVLHVQLNRPNKRNAMNKVFWREMVECFNKISRDADCRAVVISGAGKMFTAGIDLMDMASDILQPKGDDVARISWYLRDIITRYQETFNVIERCPKPVIAAVHGGCIGGGVDLVTACDIRYCAQDAFFQVNGGGRGFGCRCRNTAAPAQGHREPEPGQRAGLHRPQDDG

SEQ ID NO: 900623 - protein, 139 aa, Homo sapiens
LRLGTRLGGLNRPRAFFQVKEVDVGLAADVGTLQRLPKVIGNQSLVNELAFTARKMMADEALGSGLVSRVFPDKEVMLDAALALAAEISSKSPVAVQSTKVNLLYSRDHSVAESLNYVGVLEHEHAADPRPREVGPGHD

SEQ ID NO: 900624 - protein, 86 aa, Homo sapiens
MMADEALGSGLVSRVFPDKEVMLDAALALAAEISSKSPVAVQSTKVNLLYSRDHSVAESLNYVASWNMSMLQTQKSKDPKRGIFYI

SEQ ID NO: 900625 - protein, 134 aa, Homo sapiens
YSRCRTGRAIRGHEGPESPKFRGLTGSNYPGLSISLRLTGSSAQEAASGVALGEAPDHSYESLRVTSAQKHVLHVQLNRPNKRNAMNKVFWREMVECFNKISRDADCRAVVISGAGKMFTAEVPDALHTPCQPS

SEQ ID NO: 900626 - protein, 234 aa, Homo sapiens; identical to SEQ ID NO: 900622

SEQ ID NO: 900627 - protein, 154 aa, Homo sapiens
MNKVFWREMVECFNKISRDADCRAVVISGAGKMFTAGIDLMDMASDILQPKGDDVARISWYLRDIITRYQETFNVIERCPKPVIAAVHGGCIGGGVDLVTACDIRYCAQDAFFQVNGGGRGFGCRCRNTAAPAQGHREPEPGQRAGLHRPQDDG

SEQ ID NO: 900628 - protein, 234 aa, Homo sapiens; identical to SEQ ID NO: 900622

SEQ ID NO: 900629 - protein, 146 aa, Homo sapiens
MVECFNKISRDADCRAVVISGAGKMFTAGIDLMDMASDILQPKGDDVARISWYLRDIITRYQETFNVIERCPKPVIAAVHGGCIGGGVDLVTACDIRYCAQDAFFQVNGGGRGFGCRCRNTAAPAQGHREPEPGQRAGLHRPQDDG

SEQ ID NO: 900630 - protein, 120 aa, Homo sapiens
MAAGIVASRRLRDLLTRRLTGSNYPGLSISLRLTGSSAQEAASGVALGEAPDHSYESLRVTSAQKHVLHVQLNRPNKRNAMNKVFWREMVECFNKISRDADCRAVVISGAGKMFTAAQRR

SEQ ID NO: 900631 - protein, 325 aa, Homo sapiens
MAAGIVASRRLRDLLTRRLTGSNYPGLSISLRLTGSSAQEAASGVALGEAPDHSYESLRVTSAQKHVLHVQLNRPNKRNAMNKVFWREMVECFNKISRDADCRAVVISGAGKMFTAGIDLMDMASDILQPKGDDVARISWYLRDIITRYQETFNVIERVTLGVWRGSFSIRASPGPALTPLFLFPPQCPKPVIAAVHGGCIGGGESAAILLLGCSPGGAAAPMPRPLASSLSSVMGQTVSQEAAPPPGSQGWFWWSFSIPGLYLLGVDLVTACDIRYCAQDAFFQVNGGGRGFGCRCRNTAAPAQGHREPEPGQRAGLHRPQDDG

SEQ ID NO: 900632 - protein, 234 aa, Homo sapiens; identical to SEQ ID NO: 900622

SEQ ID NO: 900633 - protein, 243 aa, Homo sapiens
MAAGIVASRRLRDLLTRRLTGSNYPGLSISLRLTGSSAQEAASGVALGEAPDHSYESLRVTSAQKHVLHVQLNRPNKRNAMNKVFWREMVECFNKISRDADCRAVVISGAGKMFTAGIDLMDMASDILQPKGDDVARISWYLRDIITRYQETFNVIERCPKPVIAAVHGGCIGGGVDLVTACDIRYCAQDAFFQVNGGGRGFGCRCRNTAAPAQGHREPEPAQLAGLYRPYTYRSLAFCHLYP

SEQ ID NO: 900634 - protein, 188 aa, Homo sapiens
MAAGIVASRRLRDLLTRRLTGSNYPGLSISLRLTGSSAQEAASGVALGEAPDHSYESLRVTSAQKHVLHVQLNRPNKRNAMNKVFWREMVECFNKISRDADCRAVVISGAGKMFTAGIDLMDMASDILQPKGDDVARISWYLRDIITRYQETFNVIERCPKPVIAAVHGGCIGGGPCPASSTEREDGR

SEQ ID NO: 900635 - protein, 108 aa, Homo sapiens
MNKVFWREMVECFNKISRDADCRAVVISGAGKMFTAGIDLMDMASDILQPKGDDVARISWYLRDIITRYQETFNVIERCPKPVIAAVHGGCIGGGPCPASSTEREDGR

SEQ ID NO: 900636 - protein, 91 aa, Homo sapiens
KASRGWVNRTRVIERCPKPVIAAVHGGCIGGGVDLVTACDIRYCAQDAFFQVNGGGRGFGCRCRNTAAPAQGHREPEPGQRAGLHRPQDDG

SEQ ID NO: 900637 - protein, 163 aa, Homo sapiens
MAAGIVASRRLRDLLTRRLTGSNYPGLSISLRLTGSSAQEAASGVALGEAPDHSYESLRVTSAQKHVLHVQLNRPNKRNAMNKVFWREMVECFNKISRDADCRAVVISGAGKMFTAGIDLMDMASDILQASWNMSMLQTQDLVKSVQATTENKELKTVTFSKL

SEQ ID NO: 900638 - protein, 234 aa, Homo sapiens; identical to SEQ ID NO: 900622

SEQ ID NO: 900639 - protein, 154 aa, Homo sapiens; identical to SEQ ID NO: 900627

SEQ ID NO: 900640 - protein, 146 aa, Homo sapiens; identical to SEQ ID NO: 900629

SEQ ID NO: 900641 - protein, 234 aa, Homo sapiens; identical to SEQ ID NO: 900622

SEQ ID NO: 900642 - protein, 154 aa, Homo sapiens
MAAGIVASRRLRDLLTRRLTGSNYPGLSISLRLTGSSAQEAASGVALGEAPDHSYESLRVTSAQKHVLHVQLNRPNKRCPKPVIAAVHGGCIGGGVDLVTACDIRYCAQDAFFQVNGGGRGFGCRCRNTAAPAQGHREPEPGQRAGLHRPQDDG

SEQ ID NO: 900643 - protein, 78 aa, Homo sapiens
KLSRYQQAWAQIKNVMLDAALALAAEISSKSPVAVQSTKVNLLYSRDHSVAESLNYVGVLEHEHAADPRPREVGPGHD

SEQ ID NO: 900644 - protein, 129 aa, Homo sapiens
MAAGIVASRRLRDLLTRRLTGSNYPGLSISLRLTGSSAQEAASGVALGEAPDHSYESLRVTSAQKHVLHVQLNRPNKRNAMNKVFWREMVECFNKISRDADCRAVVISGAGKMFTAEVPDALHTPCQPS

SEQ ID NO: 900645 - protein, 346 aa, Homo sapiens
GARVGKMALRLLRRAARGAAAAALLRLKASLAADIPRLGYSSSSHHKYIPRRAVLYVPGNDEKKIKKIPSLNVDCAVLDCEDGVAANKKNEARLRIVKTLEDIDLGPTEKCVRVNSVSSGLAEEDLETLLQSRVLPSSLMLPKVESPEEIQWFADKFSFHLKGRKLEQPMNLIPFVETAMGLLNFKAVCEETLKVGPQVGLFLDAVVFGGEDFRASIGATSSKETLDILYARQKIVVIAKAFGLQAVDLVYIDFRDGAGLLRQSREGAAMGFTGKQVIHPNQIAVVQEQFSPSPEKIKWAEELIAAFKEHQQLGKGAFTFQGSMIDMPLLKQAQNTVTLATSIKEK

SEQ ID NO: 900646 - protein, 346 aa, Homo sapiens; identical to SEQ ID NO: 900645

SEQ ID NO: 900647 - protein, 357 aa, Homo sapiens
GARVGKMALRLLRRAARGAAAAALLRLKASLAADIPRLGYSSSSHHKYIPRRAVLYVPGNDEKKIKKIPSLNVDCAVLDCEDGVAANKKNEARLRIVKTLEDIDLGPTEKCVRVNSVSSGLAEEDLETLLQSRVLPSSLMLPKVESPEEIQWFADKFSFHLKGRKLEQPMNLIPFVETAMGLLNFKAVCEETLKVGPQVGLFLDAVVFGGEDFRASIGVKDISLSLFLCATSSKETLDILYARQKIVVIAKAFGLQAVDLVYIDFRDGAGLLRQSREGAAMGFTGKQVIHPNQIAVVQEQFSPSPEKIKWAEELIAAFKEHQQLGKGAFTFQGSMIDMPLLKQAQNTVTLATSIKEK

SEQ ID NO: 900648 - protein, 346 aa, Homo sapiens; identical to SEQ ID NO: 900645

SEQ ID NO: 900649 - protein, 270 aa, Homo sapiens
GARVGKMALRLLRRAARGAAAAALLRLKASLAADIPRLGYSSSSHHKYIPRRAVLYVPGNDEKKIKKIPSLNVDCAVLDCEDGVAANKKNEARLRIVKTLEDIDLGPTEKCVRVNSVSSGLAEEDLETLLQSRVLPSSLMLPKVESPEEIQWFADKFSFHLKGRKLEQPMNLIPFVETAMGLLNFKAVCEETLKVGPQVGLFLDAVVFGGEDFRASIGVKDISLSLFLCVCVYMCVYIFSLPLKDGHLHNNVYLPTMTMVFHDNGMDTTS

SEQ ID NO: 900650 - protein, 346 aa, Homo sapiens; identical to SEQ ID NO: 900645

SEQ ID NO: 900651 - protein, 389 aa, Homo sapiens
GARVGKMALRLLRRAARGAAAAALLRLKASLAADIPRLGYSSSSHHKYIPRRAVLYVPGNDEKKIKKIPSLNVDCAVLDCEDGVAANKKNEARLRIVKTLEDIDLGPTEKCVRVNSVSSGLAEEDLETLLQSRVLPSSLMLPKVESPEEIQWFADKFSFHLKGRKLEQPMNLIPFVETAMGLLNFKAVCEETLKVGPQVGLFLDAVVFGGEDFRASIGATSSKETLDILYARQKIVVIAKAFGLQAVDLVYIDFRDGAGLLRQSREGAAMGFTGKQVIHPNQIAVVQEQFSPSPEKIKWAEELIAAFKEHQQLGKVGRYCCSWLCIQPFPSSPGQRSQSISRVPGRYWVLGARSWESKGAFTFQGSMIDMPLLKQAQNTVTLATSIKEK

SEQ ID NO: 900652 - protein, 312 aa, Homo sapiens
GARVGKMALRLLRRAARGAAAAALLRLKASLAADIPRLGYSSSSHHKYIPRRAVLYVPGNDEKKIKKIPSLNVDCAVLDCEDGVAANKKNEARLRIVKTLEDIDLGPTEKCVRVNSVSSGLAEEDLETLLQSRVLPSSLMLPKVESPEEIQWAVCEETLKVGPQVGLFLDAVVFGGEDFRASIGATSSKETLDILYARQKIVVIAKAFGLQAVDLVYIDFRDGAGLLRQSREGAAMGFTGKQVIHPNQIAVVQEQFSPSPEKIKWAEELIAAFKEHQQLGKGAFTFQGSMIDMPLLKQAQNTVTLATSIKEK

SEQ ID NO: 900653 - protein, 357 aa, Homo sapiens
GARVGKMALRLLRRAARGAAAAALLRLKASLAADIPRLGYSSSSHHKYIPRRAVLYVPGNDEKKIKKIPSLNVDCAVLDCEDGVAANKKNEARLRIVKTLEDIDLGPTEKCVRVNSVSSGLAEEDLETLLQSRVLPSSLMLPKVESPEEIQWFADKFSFHLKGRKLEQPMNLIPFVETAMGLLNFKAVCEETLKVGPQVGLFLDAVVFGGEDFRASIGATSSKETLDILYARQKIVVIAKAFGLQAVDLVYIDFRDGAGLLRQSREGAAMGFTGKQVIHPNQIAVVQEQFSPSPEKIKWAEELIAAFKEHQQLGKEVCILCFPGGLYFPREYDRHAITEAGPEHCYACHLHQGKMIC

SEQ ID NO: 900654 - protein, 1341 aa, Homo sapiens
QPLPSAALRRCPPPARVGGRWVSAEKVNEGGSGGGGSQRLTRRARSTARVPAPGTMDAPRASAAKPPTGRKMKARAPPPPGKAATLHVHSDQKPPHDGALGSQQNLVRMKEALRASTMDVTVVLPSGLEKRSVLNGSHAMMDLLVELCLQNHLNPSHHALEIRSSETQQPLSFKPNTLIGTLNVHTVFLKEKVPEEKVKPGPPKVPEKSVRLVVNYLRTQKAVVRVSPEVPLQNILPVICAKCEVSPEHVVLLRDNIAGEELELSKSLNELGIKELYAWDNRRETFRKSSLGNDETDKEKKKFLGFFKVNKRSNSKAEQLVLSGADSDEDTSRAAPGRGLNGCLTTPNSPSMHSRSLTLGPSLSLGSISGVSVKSEMKKRRAPPPPGSGPPVQDKASEKVSLGSQIDLQKKKRRAPAPPPPQPPPPSPLIPNRTEDKEENRKSTMVSLPLGSGSHCSPDGAPQVLSEAEETVSVGSCFASEDTTEDSGVMSSPSDIVSLDSQQDSMKYKDKWATDQEDCSDQDLAGTPDLGPQKSPLWEKNGSENSHLRTEKAVTASNDEEDLLIAGEFRKTLAELDEDLEEMEDSYETDTSSLTSSIHGASNHCPQDAMIPHGDTDAIPVTFIGEVSDDPVDSGLFSNRNNNAGSFDSEGVASRRDSLAPLQAEHSQPHEKAREEVPALHPASHDVGKGIRVALSNISKDGNLMETAPRVTSFASNLHTDNLNAKVKDKVYGCADGERTQATERVNSQPVNEKDSNDKNAALAPTSWHQRGQNPGKSYRLKHGLTTYKIIPPKSEMRCYDRDVSLSTGAIKIDELGNLVSPHATGIRIISLSSSVPEAESQPIGKVREFWRCNSVEKHLGRPSESSARGPPSTPVPTQTQNPESRLQADPKPISPQQKSAHHEGRNPLGEGRNQPPTMGMGHVRVPAAHTTEVTFLKPQRRTSSQYVASAIAKRIGAPKVHADVVRPHGYAEKGYAGKAPVLAAPPVTVKDDRTSSPHSETQGWKDGAQWPCVTPPNNHGEDLAVGAPPRGEVIGPHRKLSTQDRPAAIHRSSCFSLVQSSQRDRVSVGQSCGFSGKQSTSSQEASSASEPRRAPDGTDPPPPHTSDTQACSRELVNGSVRAPGHGEPSHPPGGSGTESHILLEREEKPSVFSTDGNETDSIWPPSIFGPKKKFKPVVQRPVPKDTSLHSALMEAIHSAGGKDRLRKTAEHTGEGRPAKLSYTEAEGERSALLAAIRGHSGTCSLRKVASSASEELQSFRDAALSAQGSESPLLEDLGLLSPPAIPPPPPPPSQALSAPRTASRFSTGTLSNTADARQALMDAIRSGTGAARLRKVPLLV

SEQ ID NO: 900655 - protein, 1323 aa, Homo sapiens
QPLPSAALRRCPPPARVGGRWVSAEKVNEGGSGGGGSQRLTRRARSTARVPAPGTMDAPRASAAKPPTGRKMKARAPPPPGKAATLHVHSDQKPPHDGALGSQQNLVRMKEALRASTMDVTVVLPSGLEKRSVLNGSHAMMDLLVELCLQNHLNPSHHALEIRSSETQQPLSFKPNTLIGTLNVHTVFLKEKVPEEKVKPGPPKVPEKSVRLVVNYLRTQKAVVRVSPEVPLQNILPVICAKCEVSPEHVVLLRDNIAGEELELSKSLNELGIKELYAWDNRRETFRKSSLGNDETDKEKKKFLGFFKVNKRSNSKAEQLVLSGADSDEDTSRAAPGRGLNGCLTTPNSPSMHSRSLTLGPSLSLGSISGVSVKSEMKKRRAPPPPGSGPPVQDKASEKVSLGSQIDLQKKKRRAPAPPPPQPPPPSPLIPNRTEDKEENRKSTMVSLPLGSGSHCSPDGAPQVLSEAEETVSVGSCFASEDTTEDSGVMSSPSDIVSLDSQQDSMKYKDKWATDQEDCSDQDLAGTPDLGPQKSPLWEKNGSENSHLRTEKAVTASNDEEDLLIAGEFRKTLAELDEDLEEMEDSYETDTSSLTSSIHGASNHCPQDAMIPHGDTDAIPVTFIGEVSDDPVDSGLFSNRNNNAGSFDSEGVASRRDSLAPLQAEHSQPHEKAREEVPALHPASHDVGKGIRVALSNISKDGNLMETAPRVTSFASNLHTDNLNAKVKDKVYGCADGERTQATERVNSQPVNEKDSNDKNAALAPTSWHQRGQNPGKSYRLKHGLTTYKIIPPKSEMRCYDRDVSLSTGAIKIDELGNLVSPHATGIRIISLSSSVPEAESQPIGKVREFWRCNSVEKHLGRPSESSARGPPSTPVPTQTQNPESRLQADPKPISPQQKSAHHEGRNPLGEGRNQPPTMGMGHVRVPAAHTTEVTFLKPQRRTSSQYVASAIAKRIGAPGKAPVLAAPPVTVKDDRTSSPHSETQGWKDGAQWPCVTPPNNHGEDLAVGAPPRGEVIGPHRKLSTQDRPAAIHRSSCFSLVQSSQRDRVSVGQSCGFSGKQSTSSQEASSASEPRRAPDGTDPPPPHTSDTQACSRELVNGSVRAPGHGEPSHPPGGSGTESHILLEREEKPSVFSTDGNETDSIWPPSIFGPKKKFKPVVQRPVPKDTSLHSALMEAIHSAGGKDRLRKTAEHTGEGRPAKLSYTEAEGERSALLAAIRGHSGTCSLRKVASSASEELQSFRDAALSAQGSESPLLEDLGLLSPPAIPPPPPPPSQALSAPRTASRFSTGTLSNTADARQALMDAIRSGTGAARLRKVPLLV

SEQ ID NO: 900656 - protein, 990 aa, Homo sapiens
MHSRSLTLGPSLSLGSISGVSVKSEMKKRRAPPPPGSGPPVQDKASEKVSLGSQIDLQKKKRRAPAPPPPQPPPPSPLIPNRTEDKEENRKSTMVSLPLGSGSHCSPDGAPQVLSEAEETVSVGSCFASEDTTEDSGVMSSPSDIVSLDSQQDSMKYKDKWATDQEDCSDQDLAGTPDLGPQKSPLWEKNGSENSHLRTEKAVTASNDEEDLLIAGEFRKTLAELDEDLEEMEDSYETDTSSLTSSIHGASNHCPQDAMIPHGDTDAIPVTFIGEVSDDPVDSGLFSNRNNNAGSFDSEGVASRRDSLAPLQAEHSQPHEKAREEVPALHPASHDVGKGIRVALSNISKDGNLMETAPRVTSFASNLHTDNLNAKVKDKVYGCADGERTQATERVNSQPVNEKDSNDKNAALAPTSWHQRGQNPGKSYRLKHGLTTYKIIPPKSEMRCYDRDVSLSTGAIKIDELGNLVSPHATGIRIISLSSSVPEAESQPIGKVREFWRCNSVEKHLGRPSESSARGPPSTPVPTQTQNPESRLQADPKPISPQQKSAHHEGRNPLGEGRNQPPTMGMGHVRVPAAHTTEVTFLKPQRRTSSQYVASAIAKRIGAPKVHADVVRPHGYAEKGYAGKAPVLAAPPVTVKDDRTSSPHSETQGWKDGAQWPCVTPPNNHGEDLAVGAPPRGEVIGPHRKLSTQDRPAAIHRSSCFSLVQSSQRDRVSVGQSCGFSGKQSTSSQEASSASEPRRAPDGTDPPPPHTSDTQACSRELVNGSVRAPGHGEPSHPPGGSGTESHILLEREEKPSVFSTDGNETDSIWPPSIFGPKKKFKPVVQRPVPKDTSLHSALMEAIHSAGGKDRLRKTAEHTGEGRPAKLSYTEAEGERSALLAAIRGHSGTCSLRKVASSASEELQSFRDAALSAQGSESPLLEDLGLLSPPAIPPPPPPPSQALSAPRTASRFSTGTLSNTADARQALMDAIRSGTGAARLRKVPLLV

SEQ ID NO: 900657 - protein, 803 aa, Homo sapiens
MSAPFSLVFPRTEKAVTASNDEEDLLIAGEFRKTLAELDEDLEEMEDSYETDTSSLTSSIHGASNHCPQDAMIPHGDTDAIPVTFIGEVSDDPVDSGLFSNRNNNAGSFDSEGVASRRDSLAPLQAEHSQPHEKAREEVPALHPASHDVGKGIRVALSNISKDGNLMETAPRVTSFASNLHTDNLNAKVKDKVYGCADGERTQATERVNSQPVNEKDSNDKNAALAPTSWHQRGQNPGKSYRLKHGLTTYKIIPPKSEMRCYDRDVSLSTGAIKIDELGNLVSPHATGIRIISLSSSVPEAESQPIGKVREFWRCNSVEKHLGRPSESSARGPPSTPVPTQTQNPESRLQADPKPISPQQKSAHHEGRNPLGEGRNQPPTMGMGHVRVPAAHTTEVTFLKPQRRTSSQYVASAIAKRIGAPKVHADVVRPHGYAEKGYAGKAPVLAAPPVTVKDDRTSSPHSETQGWKDGAQWPCVTPPNNHGEDLAVGAPPRGEVIGPHRKLSTQDRPAAIHRSSCFSLVQSSQRDRVSVGQSCGFSGKQSTSSQEASSASEPRRAPDGTDPPPPHTSDTQACSRELVNGSVRAPGHGEPSHPPGGSGTESHILLEREEKPSVFSTDGNETDSIWPPSIFGPKKKFKPVVQRPVPKDTSLHSALMEAIHSAGGKDRLRKTAEHTGEGRPAKLSYTEAEGERSALLAAIRGHSGTCSLRKVASSASEELQSFRDAALSAQGSESPLLEDLGLLSPPAIPPPPPPPSQALSAPRTASRFSTGTLSNTADARQALMDAIRSGTGAARLRKVPLLV

SEQ ID NO: 900658 - protein, 459 aa, Homo sapiens
QPLPSAALRRCPPPARVGGRWVSAEKVNEGGSGGGGSQRLTRRARSTARVPAPGTMDAPRASAAKPPTGRKMKARAPPPPGKAATLHVHSDQKPPHDGALGSQQNLVRMKEALRASTMDVTVVLPSGLEKRSVLNGSHAMMDLLVELCLQNHLNPSHHALEIRSSETQQPLSFKPNTLIGTLNVHTVFLKEKVPEEKVKPGPPKVPEKSVRLVVNYLRTQKAVVRVSPEVPLQNILPVICAKCEVSPEHVVLLRDNIAGEELELSKSLNELGIKELYAWDNRRETFRKSSLGNDETDKEKKKFLGFFKVNKRSNSKAEQLVLSGADSDEDTSRAAPGRGLNGCLTTPNSPSMHSRSLTLGPSLSLGSISGVSVKSEMKKRRAPPPPGSGPPVQDKASEKVSLGSQIDLQKKKRRAPAPPPPQPPPPSPLIPNRTEDKEENRKSTMVYCCASFPTQAKRF

SEQ ID NO: 900659 - protein, 1316 aa, Homo sapiens
QPLPSAALRRCPPPARVGGRWVSAEKVNEGGSGGGGSQRLTRRARSTARVPAPGTMDAPRASAAKPPTGRKMKARAPPPPGKAATLHVHSDQKPPHDGALGSQQNLVRMKEALRASTMDVTVVLPSGLEKRSVLNGSHAMMDLLVELCLQNHLNPSHHALEIRSSETQQPLSFKPNTLIGTLNVHTVFLKEKVPEEKVKPGPPKVPEKSVRLVVNYLRTQKAVVRVSPEVPLQNILPVICAKCEVSPEHVVLLRDNIAGEELELSKSLNELGIKELYAWDNRRETFRKSSLGNDETDKEKKKFLGFFKVNKRSNSKGCLTTPNSPSMHSRSLTLGPSLSLGSISGVSVKSEMKKRRAPPPPGSGPPVQDKASEKVSLGSQIDLQKKKRRAPAPPPPQPPPPSPLIPNRTEDKEENRKSTMVSLPLGSGSHCSPDGAPQVLSEAEETVSVGSCFASEDTTEDSGVMSSPSDIVSLDSQQDSMKYKDKWATDQEDCSDQDLAGTPDLGPQKSPLWEKNGSENSHLRTEKAVTASNDEEDLLIAGEFRKTLAELDEDLEEMEDSYETDTSSLTSSIHGASNHCPQDAMIPHGDTDAIPVTFIGEVSDDPVDSGLFSNRNNNAGSFDSEGVASRRDSLAPLQAEHSQPHEKAREEVPALHPASHDVGKGIRVALSNISKDGNLMETAPRVTSFASNLHTDNLNAKVKDKVYGCADGERTQATERVNSQPVNEKDSNDKNAALAPTSWHQRGQNPGKSYRLKHGLTTYKIIPPKSEMRCYDRDVSLSTGAIKIDELGNLVSPHATGIRIISLSSSVPEAESQPIGKVREFWRCNSVEKHLGRPSESSARGPPSTPVPTQTQNPESRLQADPKPISPQQKSAHHEGRNPLGEGRNQPPTMGMGHVRVPAAHTTEVTFLKPQRRTSSQYVASAIAKRIGAPKVHADVVRPHGYAEKGYAGKAPVLAAPPVTVKDDRTSSPHSETQGWKDGAQWPCVTPPNNHGEDLAVGAPPRGEVIGPHRKLSTQDRPAAIHRSSCFSLVQSSQRDRVSVGQSCGFSGKQSTSSQEASSASEPRRAPDGTDPPPPHTSDTQACSRELVNGSVRAPGHGEPSHPPGGSGTESHILLEREEKPSVFSTDGNETDSIWPPSIFGPKKKFKPVVQRPVPKDTSLHSALMEAIHSAGGKDRLRKTAEHTGEGRPAKLSYTEAEGERSALLAAIRGHSGTCSLRKVASSASEELQSFRDAALSAQGSESPLLEDLGLLSPPAIPPPPPPPSQALSAPRTASRFSTGTLSNTADARQALMDAIRSGTGAARLRKVPLLV

SEQ ID NO: 900660 - protein, 1294 aa, Homo sapiens
QPLPSAALRRCPPPARVGGRWVSAEKVNEGGSGGGGSQRLTRRARSTARVPAPGTMDAPRASAAKPPTGRKMKARAPPPPGKAATLHVHSDQKPPHDGALGSQQNLVRMKEALRASTMDVTVVLPSGLEKRSVLNGSHAMMDLLVELCLQNHLNPSHHALEIRSSETQQPLSFKPNTLIGTLNVHTVFLKEKVPEEKVKPGPPKVPEKSVRLVVNYLRTQKAVVRVSPEVPLQNILPVICAKCEVSPEHVVLLRDNIAGEELELSKSLNELGIKELYAWDNRRETFRKSSLGNDETDKEKKKFLGFFKVNKRSNSKAEQLVLSGADSDEDTSRAAPGRGLNGCLTTPNSPSMHSRSLTLGPSLSLGSISGVSVKSEMKKRRAPPPPGSGPPVQDKASEKVSLGSQIDLQKKKRRAPAPPPPQPPPPSPLIPNRTEDKEENRKSTMVSLPLGSGSHCSPDGAPQVLSEAEETVSVGSCFASEDTTEDSGVMSSPSDIVSLDSQQDSMKYKDKWATDQEDCSDQDLAGTPDLGPQKSPLWEKNGSENSHLRTEKAVTASNDEEDLLIAGEFRKTLAELDEDLEEMEDSYETDTSSLTSSIHGASNHCPQDAMIPHGDTDAIPVTFIGEVSDDPVDSGLFSNRNNNAGSFDSEGVASRRDSLAPLQAEHSQPHEKAREEVPALHPASHDVGKGIRVALSNISKDGNLMETAPRVTSFASNLHTDNLNAKVKDKVYGCADGERTQATERVNSQPVNEKDSNDKNAALAPTSWHQRGQNPGKSYRLKHGLTTYKIIPPKSEMRCYDRDVSLSTGAIKIDELGNLVSPHATGIRIISLSSSVPEAESQPIGKVREFWRCNSVEKHLGRPSESSARGPPSTPVPTQTQNPESRLQADPKPISPQQKSAHHEGRNPLGEGRNQPPTMGMGHVRVPAAHTTEVTFLKPQRRTSSQYVASAIAKRIGAPKVHADVVRPHGYAEKGYAGKAPVLAAPPVTVKDDRTSSPHSETQGWKDGAQWPCVTPPNNHGEDLAVGAPPRGEVIGPHRKLSTQDRPAAIHRSSCFSLVQSSQRDRVSVGQSCGFSGKQSTSSQEASSASEPRRAPDGTDPPPPHTSDTQACSRELVNGSVRAPGHGEPSHPPGGSGTESHILLEREEKPSVFSTDGNETDSIWPPSIFGPKKKFKPVVQRPVPKDTSLHSALMEAIHSAGGKDRLRKTAEHTGEGRPAKLSYTEAEGERSALLAAIRGHSGTCSLRKALSAPRTASRFSTGTLSNTADARQALMDAIRSGTGAARLRKVPLLV

SEQ ID NO: 900661 - protein, 1253 aa, Homo sapiens
QPLPSAALRRCPPPARVGGRWVSAEKVNEGGSGGGGSQRLTRRARSTARVPAPGTMDAPRASAAKPPTGRKMKARAPPPPGKAATLHVHSDQKPPHDGALGSQQNLVRMKEALRASTMDVTVVLPSGLEKRSVLNGSHAMMDLLVELCLQNHLNPSHHALEIRSSETQQPLSFKPNTLIGTLNVHTVFLKEKVPEEKVKPGPPKVPEKSVRLVVNYLRTQKAVVRVSPEVPLQNILPVICAKCEVSPEHVVLLRDNIAGEELELSKSLNELGIKELYAWDNRRETFRKSSLGNDETDKEKKKFLGFFKVNKRSNSKAEQLVLSGADSDEDTSRAAPGRGLNGCLTTPNSPSMHSRSLTLGPSLSLGSISGVSVKSEMKKRRAPPPPGSGPPVQDKASEKVSLGSQIDLQKKKRRAPAPPPPQPPPPSPLIPNRTEDKEENRKSTMVSLPLGSGSHCSPDGAPQVLSEAEETVSVGSCFASEDTTEDSGVMSSPSDIVSLDSQQDSMKYKDKWATDQEDCSDQDLAGTPDLGPQKSPLWEKNGSENSHLRTEKAVTASNDEEDLLIAGEFRKTLAELDEDLEEMEDSYETDTSSLTSSIHGASNHCPQDAMIPHGDTDAIPVTFIGEVSDDPVDSGLFSNRNNNAGSFDSEGVASRRDSLAPLQAEHSQPHEKAREEVPALHPASHDVGKGIRVALSNISKDGNLMETAPRVTSFASNLHTDNLNAKVKDKVYGCADGERTQATERVNSQPVNEKDSNDKNAALAPTSWHQRGQNPGKSYRLKHGLTTYKIIPPKSEMRCYDRDVSLSTGAIKIDELGNLVSPHATGIRIISLSSSVPEAESQPIGKVREFWRCNSVEKHLGRPSESSARGPPSTPVPTQTQNPESRLQADPKPISPQQKSAHHEGRNPLGEGRNQPPTMGMGHVRVPAAHTTEVTFLKPQRRTSSQYVASAIAKRIGAPKVHADVVRPHGYAEKGYAGKAPVLAAPPVTVKDDRTSSPHSETQGWKDGAQWPCVTPPNNHGEDLAVGAPPRGEVIGPHRKLSTQDRPAAIHRSSCFSLVQSSQRDRVSVGQSCGFSGKQSTSSQEASSASEPRRAPDGTDPPPPHTSDTQACSRELVNGSVRAPGHGEPSHPPGGSGTESHILLEREEKPSVFSTDGNETDSIWPPSIFGPKKKFKPVVQRPVPKDTSLHSALMEAIHSAGGKDRLRKTAEHTGEGRPAKLSYTEAEGERSALLAAIRGHSGTCSLRKVPLLV

SEQ ID NO: 900662 - protein, 72 aa, Homo sapiens
VPLTSGLCILLVVLPWQLLRGSWSVRRSVRTALITASFLQVKGTGKGVPGVLLQEWLCTELSSTRRSASWAY

SEQ ID NO: 900663 - protein, 447 aa, Homo sapiens
QPLPSAALRRCPPPARVGGRWVSAEKVNEGGSGGGGSQRLTRRARSTARVPAPGTMDAPRASAAKPPTGRKMKARAPPPPGKAATLHVHSDQKPPHDGALGSQQNLVRMKEALRASTMDVTVVLPSGLEKRSVLNGSHAMMDLLVELCLQNHLNPSHHALEIRSSETQQPLSFKPNTLIGTLNVHTVFLKEKVPEEKVKPGPPKVPEKSVRLVVNYLRTQKAVVRVSPEVPLQNILPVICAKCEVSPEHVVLLRDNIAGEELELSKSLNELGIKELYAWDNRRETFRKSSLGNDETDKEKKKFLGFFKVNKRSNSKAEQLVLSGADSDEDTSRAAPGRGLNGCLTTPNSPSMHSRSLTLGPSLSLGSISGVSVKSEMKKRRAPPPPGSGPPVQDKASEKVSLGSQIDLQKKKRRAPAPPPPQPPPPSPLIPNRTEDKEENRKSTMGE

SEQ ID NO: 900664 - protein, 455 aa, Homo sapiens [sequence omitted]

SEQ ID NO: 900665 - protein, 807 aa, Homo sapiens
MMDSPFLELWQSKAVSIREQLGLGDRPNDSYCYNSAKNSTVLQGVTFGGIPTVLLIDVSCFLFLILVFSIIRRRFWDYGRIALVSEADSESRFQRLSSTSSSGQQDFENELGCCPWLTAIFRLHDDQILEWCGEDAIHYLSFQRHIIFLLVVVSFLSLCVILPVNLSGDLLDKDPYSFGRTTIANLQTDNDLLWLHTIFAVIYLFFTVGFMRHHTQSIKYKEENLVRRTLFITGLPRDARKETVESHFRDAYPTCEVVDVQLCYNVAKLIYLCKEKKKTEKSLTYYTNLQVKTGQRTLINPKPCGQFCCCEVLGCEWEDAISYYTRMKDRLLERITEEERHVQDQPLGMAFVTFQEKSMATYILKDFNACKCQSLQCKGEPQPSSHSRELYTSKWTVTFAADPEDICWKNLSIQGLRWWLQWLGINFTLFLGLFFLTTPSIILSTMDKFNVTKPIHALNNPIISQFFPTLLLWSFSALLPSIVYYSTLLESHWTKSGENQIMMTKVYIFLIFMVLILPSLGLTSLDFFFRWLFDKTSSEASIRLECVFLPDQGAFFVNYVIASAFIGNGMELLRLPGLILYTFRMIMAKTAADRRNVKQNQAFQYEFGAMYAWMLCVFTVIVAYSITCPIIAPFGLIYILLKHMVDRHNLYFVYLPAKLEKGIHFAAVNQALAAPILCLFWLYFFSFLRLGMKAPATLFTFLVLLLTILVCLAHTCFGCFKHLSPLNYKTEEPASDKGSEAEAHMPPPFTPYVPRILNGLASERTALSPQQQQQQTYGAIHNISGTIPGQCLAQSATGSVAAAPQEA

SEQ ID NO: 900666 - protein, 807 aa, Homo sapiens; identical to SEQ ID NO: 900665

SEQ ID NO: 900667 - protein, 204 aa, Homo sapiens [sequence omitted]

SEQ ID NO: 900668 - protein, 807 aa, Homo sapiens; identical to SEQ ID NO: 900665

SEQ ID NO: 900669 - protein, 107 aa, Homo sapiens [sequence omitted]

SEQ ID NO: 900670 - protein, 414 aa, Homo sapiens
SELAEESQERGEIARLPPPEPASRDRAMWLEILLTSVLGFAIYWFISRDKEETLPLEDGWWGPGTRSAAREDDSIRPFKVETSDEEIHDLHQRIDKFRFTPPLEDSCFHYGFNSNYLKKVISYWRNEFDWKKQVEILNRHPHFKTKIEGLDIHFIHVKPPQLPAGHTPKPLLMVHGWPGSFYEFYKIIPLLTDPKNHGLSDEHVFEVICPSIPGYGFSEASSKKGFNSVATARIFYKLMLRLGFQEFYIQGGDWGSLICTNMAQLVPSHVKGLHLNMALVLSNFSTLTLLLGQRFGRFLGLTERDVELLYPVKEKVFYSLMRESGYMHIQCTKPDTVGSALNDSPVGLAAYILEKFSTWTNTEFRYLEDGGLERDVLGEQLRLLKGRKVAPTNHVGIGDELWVLEPHPLFRRVQ

SEQ ID NO: 900671 - protein, 387 aa, Homo sapiens
MWLEILLTSVLGFAIYWFISRDKEETLPLEDGWWGPGTRSAAREDDSIRPFKVETSDEEIHDLHQRIDKFRFTPPLEDSCFHYGFNSNYLKKVISYWRNEFDWKKQVEILNRHPHFKTKIEGLDIHFIHVKPPQLPAGHTPKPLLMVHGWPGSFYEFYKIIPLLTDPKNHGLSDEHVFEVICPSIPGYGFSEASSKKGFNSVATARIFYKLMLRLGFQEFYIQGGDWGSLICTNMAQLVPSHVKGLHLNMALVLSNFSTLTLLLGQRFGRFLGLTERDVELLYPVKEKVFYSLMRESGYMHIQCTKPDTVGSALNDSPVGLAAYILEKFSTWTNTEFRYLEDGGLERDVLGEQLRLLKGRKVAPTNHVGIGDELWVLEPHPLFRRVQ

SEQ ID NO: 900672 - protein, 213 aa, Homo sapiens
  misc_feature (17)..(17): Xaa can be any naturally occurring amino acid
MTQKHERMKVYVPTGFXEASSKKGFNSVATARIFYKLMLRLGFQEFYIQGGDWGSLICTNMAQLVPSHVKGLHLNMALVLSNFSTLTLLLGQRFGRFLGLTERDVELLYPVKEKVFYSLMRESGYMHIQCTKPDTVGSALNDSPVGLAAYILEKFSTWTNTEFRYLEDGGLERDVLGEQLRLLKGRKVAPTNHVGIGDELWVLEPHPLFRRVQ

SEQ ID NO: 900673 - protein, 107 aa, Homo sapiens [sequence omitted]

SEQ ID NO: 900674 - protein, 107 aa, Homo sapiens [sequence omitted]

SEQ ID NO: 900675 - protein, 482 aa, Homo sapiens
SELAEESQERGEIARLPPPEPASRDRAMWLEILLTSVLGFAIYWFISRDKEETLPLEDGWWGPGTRSAAREDDSIRPFKVETSDEEIHDLHQRIDKFRFTPPLEDSCFHYGFNSNYLKKVISYWRNEFDWKKQVEILNRHPHFKTKIEGLDIHFIHVKPPQLPAGHTPKPLLMVHGWPGSFYEFYKIIPLLTDPKNHGLSDEHVFEVICPSIPGYGFSEASSKKGFNSVATARIFYKLMLRLGFQEFYIQGGDWGSLICTNMAQLVPSHVKGLHLNMALVLSNFSTLTLLLGQRFGRFLGLTERDVELLYPVKEKVFYSLMRESGYMHIQCTKPDTVGSALNDSPVGLAAYILEKFSTWTNTEFRYLEDGGLERKFSLDDLLTNVMLYWTTGTIISSQRFYKENLGQGWMTQKHERMKVYVPTGFSAFPFELLHTPEKWVRFKYPKLISYSYMVRGGHFAAFEEPELLAQDIRKFLSVLERQ

SEQ ID NO: 900676 - protein, 807 aa, Homo sapiens; identical to SEQ ID NO: 900665

SEQ ID NO: 900677 - protein, 715 aa, Homo sapiens
MVLLTHHPWDLSVVFPSPPSATHTHFQPAQPMFVYQAVGVWAAATEWVILADPLELMWPGPTAGLFPAALDPSCWLHVPALPQGRWRHPPFRHLLWATDPSVCGSPPSHKCKAVGKTPGARWGAHCSGELDPGEWLFTVALGMGLRLSCLWSQCHLALGAAQGGSGEGCGKVSSHCPRHCDTRNGLTQDFLPPADTGAGGKGKASEAGVEGLLGSLREVKGGKAVTFEMVRVEVGALRREAWEQAMCNVVYCYTWAWGKSDQNEKLSHWPGSSTDQSSSLTGRVEGDGPMEEQCVALSFLICKMGIVLPLLLVVARIKQNSPHTVLAWHLLHSVTHNTLITTKQRSYATASHSYSVPTCHMCAGNLSSLGLAVATFPCSILKDFNACKCQSLQCKGEPQPSSHSRELYTSKWTVTFAADPEDICWKLLDQGEVGERPGFLVGAAHHLEHRCDLAVNGDLHTSAILWAVMLCCARCGPTGVSAQPFPPVFLPSIQVLPSRNIMPVLHLILNFLIAMLKKEKETVEINFNNVSRPIYPNCYFNMQFLKNVRCFTFSFSHLVFNIWCVFYTSSTSQFTPATFKMLSSRMQLVQPYLGPVSAWGRAGELSCVHGGPGEPPVLLLRVRAPSASPSAAACPALPQLLAQNELEVLPSARFYVLPLTVLLFGSQGFLNSGLLCGSVLWDERPGQVQAMPSLLCPCLPPSCTPATAPLGRMCR

SEQ ID NO: 900678 - protein, 807 aa, Homo sapiens; identical to SEQ ID NO: 900665

SEQ ID NO: 900679 - protein, 807 aa, Homo sapiens; identical to SEQ ID NO: 900665

SEQ ID NO: 900680 - protein, 807 aa, Homo sapiens; identical to SEQ ID NO: 900665

SEQ ID NO: 900681 - protein, 1049 aa, Homo sapiens
MYFAGGQSETLSLNKTKQNKSPLCIKFQNFPLLEDKRQREERSPLAQKPAARSLCHPFPWIRGHVSCLGCFLFQRCLLPPSLPGHRDAYPTCEVVDVQLCYNVAKLIYLCKEKKKTEKSLTYYTNLQVKTGQRTLINPKPCGQFCCCEVLGCEWEDAISYYTRMKDRLLERITEEERHVQDQPLGMAFVTFQEKSMATYECRHIQTPSWLTPCSPPDNSLSLSSGDGTADPPSLGFICGVSFSSLSYPHSLSASPAHVCVTGGGGVGSSQEWVILADPLELMWPGPTAGLFPAALDPSCWLHVPALPQGRWRHPPFRHLLWATDPSVCGSPPSHKCKAVGKTPGARWGAHCSGELDPGEWLFTVALGMGLRLSCLWSQCHLALGAAQGGSGEGCGKVSSHCPRHCDTRNGLTQDFLPPADTGAGGKGKASEAGVEGLLGSLREVKGGKAVTFEMVRVEVGALRREAWEQAMCNVVYCYTWAWGKSDQNEKLSHWPGSSTDQSSSLTGRVEGDGPMEEQCVALSFLICKMGIVLPLLLVVARIKQNSPHTVLAWHLLHSVTHNTLITTKQRSYATASHSYSVPTCHMCAGNLSSLGLAVATFPCSILKDFNACKCQSLQCKGEPQPSSHSRELYTSKWTVTFAADPEDICWKNLSIQGLRWWLQWLGINFTLFLGLFFLTTPSIILSTMDKFNVTKPIHALNNPIISQFFPTLLLWSFSALLPSIVYYSTLLESHWTKSGENQIMMTKVYIFLIFMVLILPSLGLTSLDFFFRWLFDKTSSEASIRLECVFLPDQGAFFVNYVIASAFIGNGMELLRLPGLILYTFRMIMAKTAADRRNVKQNQAFQYEFGAMYAWMLCVFTVIVAYSITCPIIAPFGLIYILLKHMVDRHNLYFVYLPAKLEKGIHFAAVNQALAAPILCLFWLYFFSFLRLGMKAPATLFTFLVLLLTILVCLAHTCFGCFKHLSPLNYKTEEPASDKGSEAEAHMPPPFTPYVPRILNGLASERTALSPQQQQQQTYGAIHNISGTIPGQCLAQSATGSVAAAPQEA

SEQ ID NO: 900682 - protein, 103 aa, Homo sapiens
PDSSSWGTLGSLPSSIGPWGPGEVLCLGPYREPTTSRVSVGEGCSPRPSRSLSHWQRGERLGPQVVLAEEGGVGSHRGALMDGEPVLGVWGEIKAGGSPLGRT

SEQ ID NO: 900683 - protein, 91 aa, Homo sapiens
MVHGWPGSFYEFYKIIPLLTDPKNHGLSDEHVFEVICPSIPGYGFSEASSKKGTGLLRFHNCPVLAKGGPGVPTRLSFRRGEQGVGPRKLG

SEQ ID NO: 900684 - protein, 91 aa, Homo sapiens
LQGLLCFLETDFALVLCPSHPSQLGVLNLLQDLHQRIDKFRFTPPLEDSCFHYGFNSNYLKKVISYWRNEFDWKKQVEILNRHPHFKTKIE

SEQ ID NO: 900685 - protein, 125 aa, Homo sapiens
MGPLCKQSWPAPPCWQRHGRPAGDEATGQGYAAPDQWHRPTPPSAGAAWSRGSTGHRCGGKSASRESLSEKAQISPGPPGQRTGTGRGYRGAKAPGSCARSLDLLFHILPLPTPTASGLYLGAPW

SEQ ID NO: 900686 - protein, 807 aa, Homo sapiens; identical to SEQ ID NO: 900665

SEQ ID NO: 900687 - protein, 727 aa, Homo sapiens
MYFAGGQSETLSLNKTKQNKSPLCIKFQNFPLLEDKRQREERSPLAQKPAARSLCHPFPWIRGHVSCLGCFLFQRCLLPPSLPGHRDAYPTCEVVDVQLCYNVAKLIYLCKEKKKTEKSLTYYTNLQVKTGQRTLINPKPCGQFCCCEVLGCEWEDAISYYTRMKDRLLERITEEERHVQDQPLGMAFVTFQEKSMATYECRHIQTPSWLTPCSPPDNSLSLSSGDGTADPPSLGFICGVSFSSLSYPHSLSASPAHVCVTGGGGVGSSQEWVILADPLELMWPGPTAGLFPAALDPSCWLHVPALPQGRWRHPPFRHLLWATDPSVCGSPPSHKCKAVGKTPGARWGAHCSGELDPGEWLFTVALGMGLRLSCLWSQCHLALGAAQGGSGEGCGKVSSHCPRHCDTRNGLTQDFLPPADTGAGGKGKASEAGVEGLLGSLREVKGGKAVTFEMVRVEVGALRREAWEQAMCNVVYCYTWAWGKSDQNEKLSHWPGSSTDQSSSLTGRVEGDGPMEEQCVALSFLICKMGIVLPLLLVVARIKQNSPHTVLAWHLLHSVTHNTLITTKQRSYATASHSYSVPTCHMCAGNLSSLGLAVATFPCSILKDFNACKCQSLQCKGEPQPSSHSRELYTSKWTVTFAADPEDICWKNLSIQGLRWWLQWLGINFTLFLGLFFLTTPSIILSTMDKFNVTKPIHALNNISGTIPGQCLAQSATGSVAAAPQEA

SEQ ID NO: 900688 - protein, 807 aa, Homo sapiens; identical to SEQ ID NO: 900665

SEQ ID NO: 900689 - protein, 807 aa, Homo sapiens; identical to SEQ ID NO: 900665

SEQ ID NO: 900690 - protein, 807 aa, Homo sapiens; identical to SEQ ID NO: 900665

SEQ ID NO: 900691 - protein, 107 aa, Homo sapiens [sequence omitted]

SEQ ID NO: 900692 - protein, 101 aa, Homo sapiens
PSGIVWWGLTSCSRYPCARSRPDPLPRWSCRSSINPCVLLNVGQGKQIPDEGPAEALGGGEDLPAGMSLLLIWPQCTCFSLWTSHPFQAPFPCIFIAFLFA

SEQ ID NO: 900693 - protein, 482 aa, Homo sapiens; identical to SEQ ID NO: 900675

SEQ ID NO: 900694 - protein, 482 aa, Homo sapiens; identical to SEQ ID NO: 900675

SEQ ID NO: 900695 - protein, 482 aa, Homo sapiens; identical to SEQ ID NO: 900675

SEQ ID NO: 900696 - protein, 372 aa, Homo sapiens
SELAEESQERGEIARLPPPEPASRDRAMWLEILLTSVLGFAIYWFISRDKEETLPLEDGWWGPGTRSAAREDDSIRPFKVETSDEEIHDLHQRIDKFRFTPPLEDSCFHYGFNSNYLKKVISYWRNEFDWKKQVEILNRHPHFKTKIEGLDIHFIHVKPPQLPAGHTPKPLLMVHGWPGSFYEFYKIIPLLTDPKNHGLSDEHVFEVICPSIPGYGFSEASSKKGFNSVATARIFYKLMLRLGFQEFYIQGGDWGSLICTNMAQLVPSHVKGLHLNMALVLSNFSTLTLLLGQRFGRFLGLTERDVELLYPVKEKVFYSLMRESGYMHIQCTKPDTVDPLTPPSSLPNPQLRVVSNMALMINDFTLKAAGTQ

SEQ ID NO: 900697 - protein, 340 aa, Homo sapiens
SELAEESQERGEIARLPPPEPASRDRAMWLEILLTSVLGFAIYWFISRDKEETLPLEDGWWGPGTRSAAREDDSIRPFKVETSDEEIHDLHQRIDKFRFTPPLEDSCFHYGFNSNYLKKVISYWRNEFDWKKQVEILNRHPHFKTKIEGLDIHFIHVKPPQLPAGHTPKPLLMVHGWPGSFYEFYKIIPLLTDPKNHGLSDEHVFEVICPSIPGYGFSEASSKKGFNSVATARIFYKLMLRLGFQEFYIQGGDWGSLICTNMAQLVPSHVKGLHLNMALVLSNFSTLTLLLGQRFGRFLGLTERDVELLYPVKEKVFYSLMRESGYMHIQCTKPDTVALL

SEQ ID NO: 900698 - protein, 101 aa, Homo sapiens; identical to SEQ ID NO: 900692

SEQ ID NO: 900699 - protein, 113 aa, Homo sapiens
CSLGPLVFYEISQARLPPGGGQKSSQRQEGILEPKYRGGISSPGGRCVWGRPLRPLLSQLPRANSLLTPPEGEPGGNTGPTLGEDGAVMEPLAAPYPSWRMPLRSHSQGWKGR

SEQ ID NO: 900700 - protein, 169 aa, Homo sapiens
MLGGSGSHGRRSLAALSQIAYQRNDDDEEEAARERRRRARQERLRQKQEEESLGQVTDQVEVNAQNSVPDEEAKTTTTNTQVEGDDEAAFLERLARREERRQKRLQEALERQKEFDPTITDASLSLPSRRMQNDTAENETTEKEEKSESRQERYEIEERTSQSTEMWRC

SEQ ID NO: 900701 - protein, 395 aa, Homo sapiens [sequence omitted]

SEQ ID NO: 900702 - protein, 317 aa, Homo sapiens
MQETKIKGEKVEQKIEGKWVNEKKAQEDKLQTAVLKKQGEEKGTKVQAKREKLQEDKPTFKKEEIKDEKIKKDKEPKEEVKSFMDRKKGFTEVKSQNGEFMTHKLKHTENTFSRPGGRASVDTKEAEGAPQVEAGKRLEELRRRRGETESEEFEKLKQKQQEAALELEELKKKREERRKVLEEEEQRRKQEEADRKLREEEEKRRLKEEIERRRAEAAEKRQKMPEDGLSDDKKPFKCFTPKGSSLKIEERAEFLNKSVQKSSGVKSTHQAAIVSKIDSRLEQYTSAIEATSRVCGRKGMCFHPPLQQAHQIRKLLA

SEQ ID NO: 900703 - protein, 289 aa, Homo sapiens
MQETKIKGEKVEQKIEGKWVNEKKAQEDKLQTAVLKKQGEEKGTKVQAKREKLQEDKPTFKKEEIKDEKIKKDKEPKEEVKSFMDRKKGFTEVKSQNGEFMTHKLKHTENTFSRPGGRASVDTKEAEGAPQVEAGKRLEELRRRRGETESEEFEKLKQKQQEAALELEELKKKREERRKVLEEEEQRRKQEEADRKLREEEEKRRLKEEIERRRAEAAEKRQKMPEDGLSDDKKPFKCFTPKGSSLKIEERAEFLNKSVQKSSGVKSTHQAAIVSKIDSRLEQYTSAIE

SEQ ID NO: 900704 - protein, 395 aa, Homo sapiens [sequence omitted]

SEQ ID NO: 900705 - protein, 405 aa, Homo sapiens
MQETKIKGEKVEQKIEGKWVNEKKAQEDKLQTAVLKKQGEEKGTKVQAKREKLQEDKPTFKKEEIKDEKIKKDKEPKEEVKSFMDRKKGFTEVKSQNGEFMTHKLKHTENTFSRPGGRASVDTKEAEGAPQVEAGKRLEELRRRRGETESEEFEKLKQKQQEAALELEELKKKREERRKVLEEEEQRRKQEEADRKLREEEEKRRLKEEIERRRAEAAEKRQKMPEDGLSDDKKPFKCFTPKGSSLKIEERAEFLNKSVQKSSGVKSTHQAAIVSKIDSRLEQYTSAIEGTKSAKPTKPAASDLPVPAEGVRNIKSMWEKGNVFSSPTAAGTPNKETAGLKVGVSSRINEWLTKTPDGNKSPAPKPSDLRPGDVSSKRNLWEKQSVDKVTSPTKEPVSKETHAVK

SEQ ID NO: 900706 - protein, 395 aa, Homo sapiens [sequence omitted]

SEQ ID NO: 900707 - protein, 405 aa, Homo sapiens; identical to SEQ ID NO: 900705

SEQ ID NO: 900708 - protein, 395 aa, Homo sapiens [sequence omitted]

SEQ ID NO: 900709 - protein, 395 aa, Homo sapiens [sequence omitted]

SEQ ID NO: 900710 - protein, 395 aa, Homo sapiens [sequence omitted]

SEQ ID NO: 900711 - protein, 395 aa, Homo sapiens [sequence omitted]

SEQ ID NO: 900712 - protein, 395 aa, Homo sapiens [sequence omitted]

SEQ ID NO: 900713 - protein, 374 aa, Homo sapiens
MQETKIKGEKVEQKIEGKWVNEKKAQEDKLQTAVLKKQGEEKGTKVQAKREKLQEDKPTFKKEEIKDEKIKKDKEPKEEVKSFMDRKKGFTEVKSQNGEFMTHKLKHTENTFSRPGGRASVDTKEAEGAPQVEAGKRLEELRRRRGETESEEFEKLKQKQQEAALELEELKKKREERRKVLEEEEQRRKQEEADRKLREEEEKRRLKEEIERRRAEAAEKRQKMPEDGLSDDKKPFKCFTPKGSSLKIEERAEFLNKSVQKSSGVKSTHQAAIVSKIDSRLEQYTSAIEGTKSAKPTKPAASDLPVPAEGVRNIKSMWEKGNVFSSPTAAGTPNKETAGLKVGVSSRINEWLTKTPDGNKSPAPKPSVSTFRFF

SEQ ID NO: 900714 - protein, 400 aa, Homo sapiens
MQETKIKGEKVEQKIEGKWVNEKKAQEDKLQTAVLKKQGEEKGTKVQAKREKLQEDKPTFKKEEIKDEKIKKDKEPKEEVKSFMDRKKGFTEVKSQNGEFMTHKLKHTENTFSRPGGRASVDTKEAEGAPQVEAGKRLEELRRRRGETESEEFEKLKQKQQEAALELEELKKKREERRKVLEEEEQRRKQEEADRKLREEEEKRRLKEEIERRRAEAAEKRQKMPEDGLSDDKKPFKCFTPKGSSLKIEERAEFLNKSVQKSSGVKSTHQAAIVSKIDSRLEQYTSAIEGTKSAKPTKPAASDLPVPAEGVRNIKSMWEKGNVFSSPTAAGTPNKETAGLKVGVSSRINEWLTKTPDGNKSPAPKPSDLRPGDVSSKRNLWEKQSVDKVTSPTKVIYWED

SEQ ID NO: 900715 - protein, 118 aa, Homo sapiens
MESHSVTQVGVQWRHLSSLQPPPPGFKQFSCRSLPSSWDYRHLPPSPGNFCIFSRDGVSPCWPGWSQTPDLDPPASASPSAGITGMSHLAWPINYDSDDRIVFKQENNQNVLAKVETT

SEQ ID NO: 900716 - protein, 481 aa, Homo sapiens
MDDFERRRELRRQKREEMRLEAERIAYQRNDDDEEEAARERRRRARQERLRQKQEEESLGQVTDQVEVNAQNSVPDEEAKTTTTNTQVEGDDEAAFLERLARREERRQKRLQEALERQKEFDPTITDASLSLPSRRMQNDTAENETTEKEEKSESRQERYEIEETETVTKSYQKNDWRDAEENKKEDKEKEEEEEEKPKRGSIGENQIKDEKIKKDKEPKEEVKSFMDRKKGFTEVKSQNGEFMTHKLKHTENTFSRPGGRASVDTKEAEGAPQVEAGKRLEELRRRRGETESEEFEKLKQKQQEAALELEELKKKREERRKVLEEEEQRRKQEEADRKLREEEEKRRLKEEIERRRAEAAEKRQKMPEDGLSDDKKPFKCFTPKGSSLKIEERAEFLNKSVQKSSGVKSTHQAAIVSKIDSRLEQYTSAIEGTKSAKPTKPAASDLPVPAEGVRNIKSMWEKGNVFSSPTAAGTPNKVSI

SEQ ID NO: 900717 - protein, 395 aa, Homo sapiens [sequence omitted]

SEQ ID NO: 900718 - protein, 395 aa, Homo sapiens [sequence omitted]

SEQ ID NO: 900719 - protein, 395 aa, Homo sapiens [sequence omitted]

SEQ ID NO: 900720 - protein, 395 aa, Homo sapiens [sequence omitted]

SEQ ID NO: 900721 - protein, 75 aa, Homo sapiens
SPTTTKFAAASTGVSSRINEWLTKTPDGNKSPAPKPSDLRPGDVSSKRNLWEKQSVDKVTSPTKEPVSKETHAVK

SEQ ID NO: 900722 - protein, 395 aa, Homo sapiens [sequence omitted]

SEQ ID NO: 900723 - protein, 395 aa, Homo sapiens [sequence omitted]

SEQ ID NO: 900724 - protein, 395 aa, Homo sapiens [sequence omitted]

SEQ ID NO: 900725 - protein, 395 aa, Homo sapiens [sequence omitted]

SEQ ID NO: 900726 - protein, 114 aa, Homo sapiens
GRLLLLNSRPRRRAAEERQRIKEEEKRAAEERQRIKEEEKRAAEERQRARAEEEEKAKVEEQKRNKQLEEKKHAMQETKIKGEKVEQKIEGKWVNEKKAQEDKLQTAVLKKQVQ

SEQ ID NO: 900727 - protein, 278 aa, Homo sapiens
MELGRGAYGVVEKMRHVPSGQIMAVKRIRATVNSQEQKRLLMDLDISMRTVDCPFTVTFYGALFREGDVWICMELMDTSLDKFYKQVIDKGQTIPEDILGKIAVSIVKALEHLHSKLSVIHRDVKPSNVLINALGQVKMCDFGISGYLVDSVAKTIDAGCKPYMAPERINPELNQKGYSVKSDIWSLGITMIELAILRFPYDSWGTPFQQLKQVVEEPSPQLPADKFSAEFVDFTSQCLKKNSKERPTYPELMQHPFFTLHESKGTDVASFVKLILGD

SEQ ID NO: 900728 - protein, 126 aa, Homo sapiens
MELGRGAYGVVEKMRHVPSGQIMAVKRIRATVNSQEQKRLLMDLDISMRTVDCPFTVTFYGALFREGDVWICMELMDTSLDKFYKQVIDKGQTIPEDILGKIAVSIVKALEHLHSKLSVIHRGKHP

SEQ ID NO: 900729 - protein, 334 aa, Homo sapiens
MSQSKGKKRNPGLKIPKEAFEQPQTSSTPPRDLDSKACISIGNQNFEVKADDLEPIMELGRGAYGVVEKMRHVPSGQIMAVKRIRATVNSQEQKRLLMDLDISMRTVDCPFTVTFYGALFREGDVWICMELMDTSLDKFYKQVIDKGQTIPEDILGKIAVSIVKALEHLHSKLSVIHRDVKPSNVLINALGQVKMCDFGISGYLVDSVAKTIDAGCKPYMAPERINPELNQKGYSVKSDIWSLGITMIELAILRFPYDSWGTPFQQLKQVVEEPSPQLPADKFSAEFVDFTSQCLKKNSKERPTYPELMQHPFFTLHESKGTDVASFVKLILGD

SEQ ID NO: 900730 - protein, 140 aa, Homo sapiens
MCDFGISGYLVDSVAKTIDAGCKPYMAPERINPELNQKGYSVKSDIWSLGITMIELAILRFPYDSWGTPFQQLKQVVEEPSPQLPADKFSAEFVDFTSQCLKKNSKERPTYPELMQHPFFTLHESKGTDVASFVKLILGD

SEQ ID NO: 900731 - protein, 334 aa, Homo sapiens; identical to SEQ ID NO: 900729

SEQ ID NO: 900732 - protein, 334 aa, Homo sapiens; identical to SEQ ID NO: 900729

SEQ ID NO: 900733 - protein, 278 aa, Homo sapiens; identical to SEQ ID NO: 900727

SEQ ID NO: 900734 - protein, 245 aa, Homo sapiens
MSQSKGKKRNPGLKIPKEAFEQPQTSSTPPRDLDSKACISIGNQNFEVKADDLEPIMELGRGAYGVVEKMRHVPSGQIMAVKRIRATVNSQEQKRLLMDLDISMRTVDCPFTVTFYGALFREGDVWICMELMDTSLDKFYKQVIDKGQTIPEDILGKIAVSIVKALEHLHSKLSVIHRDVKPSNVLINALGQVKMCDFGISGYLVDSVAKTIDAGCKPYMAPERINPELNQTSSLQSLLTLPHSA

SEQ ID NO: 900735 - protein, 290 aa, Homo sapiens
MVEAGVESGFCFFNSVAITAKLLQQKLNVGKVLIVDWDIHHGNGTQQAFYNDPSVLYISLHRYDNGNFFPGSGAPEEVGGGPGVGYNVNVAWTGGVDPPIGDVEYLTAFRTVVMPIAHEFSPDVVLVSAGFDAVEGHLSPLGGYSVTARCFGHLTRQLMTLAGGRVVLALEGGHDLTAICDASEACVSALLSVELQPLDEAVLQQKPNINAVATLEKVIEIQSKHWSCVQKFAAGLGRSLREAQAGETEEAETVSAMALLSVGAEQAQAAAAREHSPRPAEEPMEQEPAL

SEQ ID NO: 900736 - protein, 148 aa, Homo sapiens
  misc_feature (1)..(1): Xaa can be any naturally occurring amino acid
XDSPTAIQAPKRCKYLIECRPTTKSLNNKSSPNPGVIPRAEFGTSSALLSVELQPLDEAVLQQKPNINAVATLEKVIEIQSKHWSCVQKFAAGLGRSLREAQAGETEEAETVSAMALLSVGAEQAQAAAAREHSPRPAEEPMEQEPAL

SEQ ID NO: 900737 - protein, 1113 aa, Homo sapiens
MSGREPSLEILPRTSLHSIPVTVEVKPVLPRAMPSSMGGGGGGSPSPVELRGALVGSVDPTLREQQLQQELLALKQQQQLQKQLLFAEFQKQHDHLTRQHEVQLQKHLKQQQEMLAAKQQQEMLAAKRQQELEQQRQREQQRQEELEKQRLEQQLLILRNKEKSKESAIASTEVKLRLQEFLLSKSKEPTPGGLNHSLPQHPKCWGAHHASLDQSSPPQSGPPGTPPSYKLPLPGPYDSRDDFPLRKTASEPNLKVRSRLKQKVAERRSSPLLRRKDGTVISTFKKRAVEITGAGPGASSVCNSAPGSGPSSPNSSHSTIAENGFTGSVPNIPTEMLPQHRALPLDSSPNQFSLYTSPSLPNISLGLQATVTVTNSHLTASPKLSTQQEAERQALQSLRQGGTLTGKFMSTSSIPGCLLGVALEGDGSPHGHASLLQHVLLLEQARQQSTLIAVPLHGQSPLVTGERVATSMRTVGKLPRHRPLSRTQSSPLPQSPQALQQLVMQQQHQQFLEKQKQQQLQLGKILTKTGELPRQPTTHPEETEEELTEQQEVLLGEGALTMPREGSTESESTQEDLEEEDEEEDGEEEEDCIQVKDEEGESGAEEGPDLEEPGAGYKKLFSDAQPLQPLQVYQAPLSLATVPHQALGRTQSSPAAPGGMKSPPDQPVKHLFTTGVVYDTFMLKHQCMCGNTHVHPEHAGRIQSIWSRLQETGLLSKCERIRGRKATLDEIQTVHSEYHTLLYGTSPLNRQKLDSKKLLGPISQKMYAVLPCGGIGVDSDTVWNEMHSSSAVRMAVGCLLELAFKVAAGELKNGFAIIRPPGHHAEESTAMGFCFFNSVAITAKLLQQKLNVGKVLIVDWDIHHGNGTQQAFYNDPSVLYISLHRYDNGNFFPGSGAPEEVGGGPGVGYNVNVAWTGGVDPPIGDVEYLTAFRTVVMPIAHEFSPDVVLVSAGFDAVEGHLSPLGGYSVTARCFGHLTRQLMTLAGGRVVLALEGGHDLTAICDASEACVSALLSVELQPLDEAVLQQKPNINAVATLEKVIEIQSKHWSCVQKFAAGLGRSLREAQAGETEEAETVSAMALLSVGAEQAQAAAAREHSPRPAEEPMEQEPAL

SEQ ID NO: 900738 - protein, 1113 aa, Homo sapiens; identical to SEQ ID NO: 900737

SEQ ID NO: 900739 - protein, 1113 aa, Homo sapiens; identical to SEQ ID NO: 900737

SEQ ID NO: 900740 - protein, 708 aa, Homo sapiens
ALGYDAPGTRPRAVGVALEGDGSPHGHASLLQHVLLLEQARQQSTLIAVPLHGQSPLVTGERVATSMRTVGKLPRHRPLSRTQSSPLPQSPQALQQLVMQQQHQQFLEKQKQQQLQLGKILTKTGELPRQPTTHPEETEEELTEQQEVLLGEGALTMPREGSTESESTQEDLEEEDEEEDGEEEEDCIQVKDEEGESGAEEGPDLEEPGAGYKKLFSDAQPLQPLQVYQAPLSLATVPHQALGRTQSSPAAPGGMKSPPDQPVKHLFTTGVVYDTFMLKHQCMCGNTHVHPEHAGRIQSIWSRLQETGLLSKCERIRGRKATLDEIQTVHSEYHTLLYGTSPLNRQKLDSKKLLGPISQKMYAVLPCGGIGVDSDTVWNEMHSSSAVRMAVGCLLELAFKVAAGELKNGFAIIRPPGHHAEESTAMGFCFFNSVAITAKLLQQKLNVGKVLIVDWDIHHGNGTQQAFYNDPSVLYISLHRYDNGNFFPGSGAPEEVGGGPGVGYNVNVAWTGGVDPPIGDVEYLTAFRTVVMPIAHEFSPDVVLVSAGFDAVEGHLSPLGGYSVTARCFGHLTRQLMTLAGGRVVLALEGGHDLTAICDASEACVSALLSVELQPLDEAVLQQKPNINAVATLEKVIEIQSKHWSCVQKFAAGLGRSLREAQAGETEEAETVSAMALLSVGAEQAQAAAAREHSPRPAEEPMEQEPAL

SEQ ID NO: 900741 - protein, 1101 aa, Homo sapiens
MSGREPSLEILPRTSLHSIPVTVEVKPVLPRAMPSSMGGGGGGSPSPVELRGALVGSVDPTLREQQLQQELLALKQQQQLQKQLLFAEFQKQHDHLTRQHEVQLQKHLKQQQEMLAAKQQQEMLAAKRQQELEQQRQREQQRQEELEKQRLEQQLLILRNKEKSKESAIASTEVKLRLQEFLLSKSKEPTPGGLNHSLPQHPKCWGAHHASLDQSSPPQSGPPGTPPSYKLPLPGPYDSRDDFPLRKTASEPNLKVRSRLKQKVAERRSSPLLRRKDGTVISTFKKRAVEITGAGPGASSVCNSAPGSGPSSPNSSHSTIAENGFTGSVPNIPTEMLPQHRALPLDSSPNQFSLYTSPSLPNISLGLQATVTVTNSHLTASPKLSTQQEAERQALQSLRQGGTLTGKFMSTSSIPGCLLGVALEGDGSPHGHASLLQHVLLLEQARQQSTLIAVPLHGQSPLVTGERVATSMRTVGKLPRHRPLSRTQSSPLPQSPQALQQLVMQQQHQQFLEKQKQQQLQLGKILTKTGELPRQPTTHPEETEEELTEQQEVLLGEGALTMPREGSTESESTQEDLEEEDEEEDGEEEEDCIQVKDEEGESGAEEGPDLEEPGAGYKKLFSDAQPLQPLQVYQAPLSLATVPHQALGRTQSSPAAPGGMKSPPDQPVKHLFTTGVVYDTFMLKHQCMCGNTHVHPEHAGRIQSIWSRLQETGLLSKCERIRGRKATLDEIQTVHSEYHTLLYGTSPLNRQKLDSKKLLGPISQKMYAVLPCGGIGVDSDTVWNEMHSSSAVRMAVGCLLELAFKVAAGELKNGFAIIRPPGHHAEESTAMGFCFFNSVAITAKLLQQKLNVGKVLIVDWDIHHGNGTQQAFYNDPSVLYISLHRYDNGNFFPGSGAPEEVGGGPGVGYNVNVAWTGGVDPPIGDVEYLTAFRTVVMPIAHEFSPDVVLVSAGFDAVEGHLSPLGGYSVTARCFGHLTRQLMTLAGGRVVLALEGGHDLTAICDASEACVSALLSVELQPLDEAVLQQKPNINAVATLEKVIEIQSKHWSCVQKFAAGLGRSLREAQAGETEEAETVSAMALLSVGAEQAQAAAAREHSPR

SEQ ID NO: 900742 - protein, 872 aa, Homo sapiens
MSGREPSLEILPRTSLHSIPVTVEVKPVLPRAMPSSMGGGGGGSPSPVELRGALVGSVDPTLREQQLQQELLALKQQQQLQKQLLFAEFQKQHDHLTRQHEVQLQKHLKQQQEMLAAKQQQEMLAAKRQQELEQQRQREQQRQEELEKQRLEQQLLILRNKEKSKESAIASTEVKLRLQEFLLSKSKEPTPGGLNHSLPQHPKCWGAHHASLDQSSPPQSGPPGTPPSYKLPLPGPYDSRDDFPLRKTASEPNLKVRSRLKQKVAERRSSPLLRRKDGTVISTFKKRAVEITGAGPGASSVCNSAPGSGPSSPNSSHSTIAENGFTGSVPNIPTEMLPQHRALPLDSSPNQFSLYTSPSLPNISLGLQATVTVTNSHLTASPKLSTQQEAERQALQSLRQGGTLTGKFMSTSSIPGCLLGVALEGDGSPHGHASLLQHVLLLEQARQQSTLIAVPLHGQSPLVTGERVATSMRTVGKLPRHRPLSRTQSSPLPQSPQALQQLVMQQQHQQFLEKQKQQQLQLGKILTKTGELPRQPTTHPEETEEELTEQQEVLLGEGALTMPREGSTESESTQEDLEEEDEEEDGEEEEDCIQVKDEEGESGAEEGPDLEEPGAGYKKLFSDAQPLQPLQVYQAPLSLATVPHQALGRTQSSPAAPGGMKSPPDQPVKHLFTTGVVYDTFMLKHQCMCGNTHVHPEHAGRIQSIWSRLQETGLLSKCERIRGRKATLDEIQTVHSEYHTLLYGTSPLNRQKLDSKKLLGPISQKMYAVLPCGGIGVDSDTVWNEMHSSSAVRMAVGCLLELAFKVAAGELKNGFAIIRPPGHHAEESTAMGFCFFNSVAITAKLLQQKLNVGKVLIVDWVGSELVGLGRGG

SEQ ID NO: 900743 - protein, 817 aa, Homo sapiens
MSGREPSLEILPRTSLHSIPVTVEVKPVLPRAMPSSMGGGGGGSPSPVELRGALVGSVDPTLREQQLQQELLALKQQQQLQKQLLFAEFQKQHDHLTRQHEVQLQKHLKQQQEMLAAKQQQEMLAAKRQQELEQQRQREQQRQEELEKQRLEQQLLILRNKEKSKESAIASTEVKLRLQEFLLSKSKEPTPGGLNHSLPQHPKCWGAHHASLDQSSPPQSGPPGTPPSYKLPLPGPYDSRDDFPLRKTASEPNLKVRSRLKQKVAERRSSPLLRRKDGTVISTFKKRAVEITGAGPGASSVCNSAPGSGPSSPNSSHSTIAENGFTGSVPNIPTEMLPQHRALPLDSSPNQFSLYTSPSLPNISLGLQATVTVTNSHLTASPKLSTQQEAERQALQSLRQGGTLTGKFMSTSSIPGCLLGVALEGDGSPHGHASLLQHVLLLEQARQQSTLIAVPLHGQSPLVTGERVATSMRTVGKLPRHRPLSRTQSSPLPQSPQALQQLVMQQQHQQFLEKQKQQQLQLGKILTKTGELPRQPTTHPEETEEELTEQQEVLLGEGALTMPREGSTESESTQEDLEEEDEEEDGEEEEDCIQVKDEEGESGAEEGPDLEEPGAGYKKLFSDAQPLQPLQVYQAPLSLATVPHQALGRTQSSPAAPGGMKSPPDQPVKHLFTTGVVYDTFMLKHQCMCGNTHVHPEHAGRIQSIWSRLQETGLLSKCERIRGRKATLDEIQTVHSEYHTLLYGTSPLNRQKLDSKKLLGPISQKMYAVLPCGGIGVDSDTVWNEMHSSSAVRMAVGCLLELAFKVAAGELKVSVCL

SEQ ID NO: 900744 - protein, 175 aa, Homo sapiens
NKSSLQKNLVLEYFFLNLVEGHLSPLGGYSVTARCFGHLTRQLMTLAGGRVVLALEGGHDLTAICDASEACVSALLSVELQPLDEAVLQQKPNINAVATLEKVIEIQSKHWSCVQKFAAGLGRSLREAQAGETEEAETVSAMALLSVGAEQAQAAAAREHSPRPAEEPMEQEPAL

SEQ ID NO: 900745 - protein, 316 aa, Homo sapiens
MSGREPSLEILPRTSLHSIPVTVEVKPVLPRAMPSSMGGGGGGSPSPVELRGALVGSVDPTLREQQLQQELLALKQQQQLQKQLLFAEFQKQHDHLTRQHEVQLQKHLKQQQEMLAAKQQQEMLAAKRQQELEQQRQREQQRQEELEKQRLEQQLLILRNKEKSKESAIASTEVKLRLQEFLLSKSKEPTPGGLNHSLPQHPKCWGAHHASLDQSSPPQSGPPGTPPSYKLPLPGPYDSRDDFPLRKTASEPNLKVRSRLKQKVAERRSSPLLRRKDGTVISTFKKRAVEITGAGPGGKGCSHVPVLRVWESGVGG

SEQ ID NO: 900746 - protein, 90 aa, Homo sapiens
PDEALPYSVGPVGSGLREPVLCGLPDHLPFGLLPASGGPLPGMLLVPKAQGLVEMLQTIYETESCFSAMGCQVGNHPWKSCRGLLCTASL

SEQ ID NO: 900747 - protein, 191 aa, Homo sapiens
MLKHQCMCGNTHVHPEHAGRIQSIWSRLQETGLLSKCERIRGRKATLDEIQTVHSEYHTLLYGTSPLNRQKLDSKKLLGPISQKMYAVLPCGGIGVDSDTVWNEMHSSSAVRMAVGCLLELAFKVAAGELKNGFAIIRPPGHHAEESTAMGFCFFNSVAITAKLLQQKLNVGKVLIVDWVGSELVGLGRGG

SEQ ID NO: 900748 - protein, 1113 aa, Homo sapiens; identical to SEQ ID NO: 900737

SEQ ID NO: 900749 - protein, 1113 aa, Homo sapiens; identical to SEQ ID NO: 900737

SEQ ID NO: 900750 - protein, 872 aa, Homo sapiens; identical to SEQ ID NO: 900742

SEQ ID NO: 900751 - protein, 896 aa, Homo sapiens
MSGREPSLEILPRTSLHSIPVTVEVKPVLPRAMPSSMGGGGGGSPSPVELRGALVGSVDPTLREQQLQQELLALKQQQQLQKQLLFAEFQKQHDHLTRQHEVQLQKHLKQQQEMLAAKQQQEMLAAKRQQELEQQRQREQQRQEELEKQRLEQQLLILRNKEKSKESAIASTEVKLRLQEFLLSKSKEPTPGGLNHSLPQHPKCWGAHHASLDQSSPPQSGPPGTPPSYKLPLPGPYDSRDDFPLRKTASEPNLKVRSRLKQKVAERRSSPLLRRKDGTVISTFKKRAVEITGAGPGASSVCNSAPGSGPSSPNSSHSTIAENGFTGSVPNIPTEVLLGEGALTMPREGSTESESTQEDLEEEDEEEDGEEEEDCIQVKDEEGESGAEEGPDLEEPGAGYKKLFSDAQPLQPLQVYQAPLSLATVPHQALGRTQSSPAAPGGMKSPPDQPVKHLFTTGVVYDTFMLKHQCMCGNTHVHPEHAGRIQSIWSRLQETGLLSKCERIRGRKATLDEIQTVHSEYHTLLYGTSPLNRQKLDSKKLLGPISQKMYAVLPCGGIGVDSDTVWNEMHSSSAVRMAVGCLLELAFKVAAGELKNGFAIIRPPGHHAEESTAMGFCFFNSVAITAKLLQQKLNVGKVLIVDWDIHHGNGTQQAFYNDPSVLYISLHRYDNGNFFPGSGAPEEVGGGPGVGYNVNVAWTGGVDPPIGDVEYLTAFRTVVMPIAHEFSPDVVLVSAGFDAVEGHLSPLGGYSVTARCFGHLTRQLMTLAGGRVVLALEGGHDLTAICDASEACVSALLSVELQPLDEAVLQQKPNINAVATLEKVIEIQSKHWSCVQKFAAGLGRSLREAQAGETEEAETVSAMALLSVGAEQAQAAAAREHSPRPAEEPMEQEPAL

SEQ ID NO: 900752 - protein, 254 aa, Homo sapiens
MDIHHGNGTQQAFYNDPSVLYISLHRYDNGNFFPGSGAPEEVGGGPGVGYNVNVAWTGGVDPPIGDVEYLTAFRTVVMPIAHEFSPDVVLVSAGFDAVEGHLSPLGGYSVTARCFGHLTRQLMTLAGGRVVLALEGGHDLTAICDASEACVSALLSVELQPLDEAVLQQKPNINAVATLEKVIEIQSKHWSCVQKFAAGLGRSLREAQAGETEEAETVSAMALLSVGAEQAQAAAAREHSPRPAEEPMEQEPAL

SEQ ID NO: 900753 - protein, 421 aa, Homo sapiens
MSGREPSLEILPRTSLHSIPVTVEVKPVLPRAMPSSMGGGGGGSPSPVELRGALVGSVDPTLREQQLQQELLALKQQQQLQKQLLFAEFQKQHDHLTRQHEVQLQKHLKQQQEMLAAKQQQEMLAAKRQQELEQQRQREQQRQEELEKQRLEQQLLILRNKEKSKESAIASTEVKLRLQEFLLSKSKEPTPGGLNHSLPQHPKCWGAHHASLDQSSPPQSGPPGTPPSYKLPLPGPYDSRDDFPLRKTASEPNLKVRSRLKQKVAERRSSPLLRRKDGTVISTFKKRAVEITGAGPGASSVCNSAPGSGPSSPNSSHSTIAENGFTGSVPNIPTEMLPQHRALPLDSSPNQFSLYTSPSLPNISLGLQATVTVTNSHLTASPKLSTQQEAERQALQSLRQGGTLTGKFMSTSSIPGCLRRP

SEQ ID NO: 900754 - protein, 132 aa, Homo sapiens [sequence omitted]

SEQ ID NO: 900755 - protein, 414 aa, Homo sapiens
MSEYIRVTEDENDEPIEIPSEDDGTVLLSTVTAQFPGACGLRYRNPVSQCMRGVRLVEGILHAPDAGWGNLVYVVNYPKDNKRKMDETDASSAVKVKRAVQKTSDLIVLGLPWKTTEQDLKEYFSTFGEVLMVQVKKDLKTGHSKGFGFVRFTEYETQVKVMSQRHMIDGRWCDCKLPNSKQSQDEPLRSRKVFVGRCTEDMTEDELREFFSQYGDVMDVFIPKPFRAFAFVTFADDQIAQSLCGEDLIIKGISVHISNAEPKHNSNRQLERSGRFGGNPGGFGNQGGFGNSRGGGAGLGNNQGSNMGGGMNFGAFSINPAMMAAAQAALQSSWGMMGMLASQQNQSGPSGNNQNQGNMQREPNQAFGSGNNSYSGSNSGAAIGWGSASNAGSGSGFNGGFGSSMDSKSSGWGM

SEQ ID NO: 900756 - protein, 414 aa, Homo sapiens; identical to SEQ ID NO: 900755

SEQ ID NO: 900757 - protein, 414 aa, Homo sapiens; identical to SEQ ID NO: 900755

SEQ ID NO: 900758 - protein, 364 aa, Homo sapiens [sequence omitted]

SEQ ID NO: 900759 - protein, 253 aa, Homo sapiens
MSQRHMIDGRWCDCKLPNSKQSQDEPLRSRKVFVGRCTEDMTEDELREFFSQYGDVMDVFIPKPFRAFAFVTFADDQIAQSLCGEDLIIKGISVHISNAEPKHNSNRQLERSGRFGGNPGGFGNQGGFGNSRGGGAGLGNNQGSNMGGGMNFGAFSINPAMMAAAQAALQSSWGMMGMLASQQNQSGPSGNNQNQGNMQREPNQAFGSGNNSYSGSNSGAAIGWGSASNAGSGSGFNGGFGSSMDSKSSGWGM

SEQ ID NO: 900760 - protein, 374 aa, Homo sapiens
MRTMSPLKYHRKTMGRCCSPRLQPNAGWGNLVYVVNYPKDNKRKMDETDASSAVKVKRAVQKTSDLIVLGLPWKTTEQDLKEYFSTFGEVLMVQVKKDLKTGHSKGFGFVRFTEYETQVKVMSQRHMIDGRWCDCKLPNSKQSQDEPLRSRKVFVGRCTEDMTEDELREFFSQYGDVMDVFIPKPFRAFAFVTFADDQIAQSLCGEDLIIKGISVHISNAEPKHNSNRQLERSGRFGGNPGGFGNQGGFGNSRGGGAGLGNNQGSNMGGGMNFGAFSINPAMMAAAQAALQSSWGMMGMLASQQNQSGPSGNNQNQGNMQREPNQAFGSGNNSYSGSNSGAAIGWGSASNAGSGSGFNGGFGSSMDSKSSGWGM

SEQ ID NO: 900761 - protein, 315 aa, Homo sapiens
HGFAGAVQLGLIGRKTTEQDLKEYFSTFGEVLMVQVKKDLKTGHSKGFGFVRFTEYETQVKVMSQRHMIDGRWCDCKLPNSKQSQDEPLRSRKVFVGRCTEDMTEDELREFFSQYGDVMDVFIPKPFRAFAFVTFADDQIAQSLCGEDLIIKGISVHISNAEPKHNSNRQLERSGRFGGNPGGFGNQGGFGNSRGGGAGLGNNQGSNMGGGMNFGAFSINPAMMAAAQAALQSSWGMMGMLASQQNQSGPSGNNQNQGNMQREPNQAFGSGNNSYSGSNSGAAIGWGSASNAGSGSGFNGGFGSSMDSKSSGWGM

SEQ ID NO: 900762 - protein, 108 aa, Homo sapiens
MGGGMNFGAFSINPAMMAAAQAALQSSWGMMGMLASQQNQSGPSGNNQNQGNMQREPNQAFGSGNNSYSGSNSGAAIGWGSASNAGSGSGFNGGFGSSMDSKSSGWGM

SEQ ID NO: 900763 - protein, 102 aa, Homo sapiens [sequence omitted]

SEQ ID NO: 900764 - protein, 414 aa, Homo sapiens; identical to SEQ ID NO: 900755

SEQ ID NO: 900765 - protein, 396 aa, Homo sapiens
MSEYIRVTEDENDEPIEIPSEDDGTVLLSTVTAQFPGACGLRYRNPVSQCMRGVRLVEGILHAPDAGWGNLVYVVNYPKDNKRKMDETDASSAVKVKRAVQKTSDLIVLGLPWKTTEQDLKEYFSTFGEVLMVQVKKDLKTGHSKGFGFVRFTEYETQVKVMSQRHMIDGRWCDCKLPNSKQSQDEPLRSRFFSQYGDVMDVFIPKPFRAFAFVTFADDQIAQSLCGEDLIIKGISVHISNAEPKHNSNRQLERSGRFGGNPGGFGNQGGFGNSRGGGAGLGNNQGSNMGGGMNFGAFSINPAMMAAAQAALQSSWGMMGMLASQQNQSGPSGNNQNQGNMQREPNQAFGSGNNSYSGSNSGAAIGWGSASNAGSGSGFNGGFGSSMDSKSSGWGM

SEQ ID NO: 900766 - protein, 330 aa, Homo sapiens [sequence omitted]

SEQ ID NO: 900767 - protein, 302 aa, Homo sapiens
MSEYIRVTEDENDEPIEIPSEDDGTVLLSTVTAQFPGACGLRYRNPVSQCMRGVRLVEGILHAPDAGWGNLVYVVNYPKDNKRKMDETDASSAVKVKRAVQKTSDLIVLGLPWKTTEQDLKEYFSTFGEVLMVQVKKDLKTGHSKGFGFVRFTEYETQVKVMSQRHMIDGRWCDCKLPNSKQSQDEPLRSRKVFVGRCTEDMTEDELREFFSQYGDVMDVFIPKPFRAFAFVTFADDQIAQSLCGEDLIIKGISVHISNAEPKHNSNRQLERSGRFGGNPGSHFKCLWKKHFIESSAVNILP

SEQ ID NO: 900768 - protein, 277 aa, Homo sapiens
MSEYIRVTEDENDEPIEIPSEDDGTVLLSTVTAQFPGACGLRYRNPVSQCMRGVRLVEGILHAPDAGWGNLVYVVNYPKDNKRKMDETDASSAVKVKRAVQKTSDLIVLGLPWKTTEQDLKEYFSTFGEVLMVQVKKDLKTGHSKGFGFVRFTEYETQVKVMSQRHMIDGRWCDCKLPNSKQSQDEPLRSRKVFVGRCTEDMTEDELREFFSQYGDVMDVFIPKPFRAFAFVTFADDQIAQSLCGEDLIIKGISVHSHFKCLWKKHFIESSAVNILP

SEQ ID NO: 900769 - protein, 197 aa, Homo sapiens
MSEYIRVTEDENDEPIEIPSEDDGTVLLSTVTAQFPGACGLRYRNPVSQCMRGVRLVEGILHAPDAGWGNLVYVVNYPKDNKRKMDETDASSAVKVKRAVQKTSDLIVLGLPWKTTEQDLKEYFSTFGEVLMVQVKKDLKTGHSKGFGFVRFTEYETQVKVMSQRHMIDGRWCDCKLPNSKQSQDEPLRSAWPVRAD

SEQ ID NO: 900770 - protein, 433 aa, Homo sapiens
LKSRCRAGGGGGGSGGGGSSRRGARLGGGIRRAVLAPRSLPRSLPGAVGRRGAKPGWPEGAMAAPVPWACCAVLAAAAAVVYAQRHSPQEAPHVQYERLGSDVTLPCGTANWDAAVTWRVNGTDLAPDLLNGSQLVLHGLELGHSGLYACFHRDSWHLRHQVLLHVGLPPREPVLSCRSNTYPKGFYCSWHLPTPTYIPNTFNVTVLHGSKIMVCEKDPALKNRCHIRYMHLFSTIKYKVSISVSNALGHNATAITFDEFTIVKPDPPENVVARPVPSNPRRLEVTWQTPSTWPDPESFPLKFFLRYRPLILDQWQHVELSDGTAHTITDAYAGKEYIIQVAAKDNEIGTWSDWSVAAHATPWTEEPRHLTTEAQAAETTTSTTSSLAPPPTTKICDPGELGSGGGPSAPFLVSVPITLALAAAAATASSLLI

SEQ ID NO: 900771 - protein, 372 aa, Homo sapiens
MAAPVPWACCAVLAAAAAVVYAQRHSPQEAPHVQYERLGSDVTLPCGTANWDAAVTWRVNGTDLAPDLLNGSQLVLHGLELGHSGLYACFHRDSWHLRHQVLLHVGLPPREPVLSCRSNTYPKGFYCSWHLPTPTYIPNTFNVTVLHGSKIMVCEKDPALKNRCHIRYMHLFSTIKYKVSISVSNALGHNATAITFDEFTIVKPDPPENVVARPVPSNPRRLEVTWQTPSTWPDPESFPLKFFLRYRPLILDQWQHVELSDGTAHTITDAYAGKEYIIQVAAKDNEIGTWSDWSVAAHATPWTEEPRHLTTEAQAAETTTSTTSSLAPPPTTKICDPGELGSGGGPSAPFLVSVPITLALAAAAATASSLLI

SEQ ID NO: 900772 - protein, 372 aa, Homo sapiens; identical to SEQ ID NO: 900771

SEQ ID NO: 900773 - protein, 372 aa, Homo sapiens; identical to SEQ ID NO: 900771

SEQ ID NO: 900774 - protein, 247 aa, Homo sapiens
MAAPVPWACCAVLAAAAAVVYAQRHSPQEAPHVQYERLGSDVTLPCGTANWDAAVTWRVNGTDLAPDLLNGSQLVLHGLELGHSGLYACFHRDSWHLRHQVLLHVGLPPREPVLSCRSNTYPKGFYCSWHLPTPTYIPNTFNVTVLHGSKIMVCEKDPALKNRCHIRYMHLFSTIKYKVSISVSNALGHNATAITFDEFTIVWSEHSRDYRRAIIPTAFGDVAIIMYPMKNHMLFIAITKGDDIGSC

SEQ ID NO: 900775 - protein, 403 aa, Homo sapiens
MFSVFEEITRIVVKEMDAGGDMIAVRSLVDADRFRCFHLVGEKRTFFGCRHYTTGLTLMDILDTDGDKWLDELDSGLQGQKAEFQILDNVDSTGELIVRLPKEITISGSFQGFHHQKIKISENRISQQYLATLENRKLKRELPFSFRSINTRENLYLVTETLETVKEETLKSDRQYKFWSQISQGHLSYKHKGQREVTIPPNRVLSYRVKQLVFPNKETMKKDGASSCLGKSLGSEDSRNMKEKLEDMESVLKDLTEEKRKDVLNSLAKCLGKEDIRQDLEQRVSEVLISGELHMEDPDKPLLSSLFNAAGVLVEARAKAILDFLDALLELSEEQQFVAEALEKGTLPLLKDQVKSVMEQNWDELASSPPDMDYDPEARILCALYVVVSILLELAEGPTSVSS

SEQ ID NO: 900776 - protein, 163 aa, Homo sapiens
MKEKLEDMESVLKDLTEEKRKDVLNSLAKCLGKEDIRQDLEQRVSEVLISGELHMEDPDKPLLSSLFNAAGVLVEARAKAILDFLDALLELSEEQQFVAEALEKGTLPLLKDQVKSVMEQNWDELASSPPDMDYDPEARILCALYVVVSILLELAEGPTSVSS

SEQ ID NO: 900777 - protein, 366 aa, Homo sapiens
MFSVFEEITRIVVKEMDAGGDMIAVRSLVDADRFRCFHLVGEKRTFFGCRHYTTGLTLMDILDTDGDKWLDELDSGLQGQKAEFQILDNVDSTGELIVRLPKEITISGSFQGFHHQKIKISENRISQQYLATLENRKLKRELPFSFRSINTRENLYLVTETLETVKEETLKSDRQYKFWSQISQGHLSYETQGKSLGSEDSRNMKEKLEDMESVLKDLTEEKRKDVLNSLAKCLGKEDIRQDLEQRVSEVLISGELHMEDPDKPLLSSLFNAAGVLVEARAKAILDFLDALLELSEEQQFVAEALEKGTLPLLKDQVKSVMEQNWDELASSPPDMDYDPEARILCALYVVVSILLELAEGPTSVSS

SEQ ID NO: 900778 - protein, 123 aa, Homo sapiens
MKEKLEDMESVLKDLTEEKRKDVLNSLAKCLGKEDIRQDLEQRVSEVLISGELHMEDPDKPLLSSLFNAAGVLVEARAKAILDFLDALLELSEEQQFVAEALEKGTLPLLKDQLAEGPTSVSS

SEQ ID NO: 900779 - protein, 117 aa, Homo sapiens
MKEKLEDMESVLKDLTEEKRKDVLNSLAKCLGKEDIRQDLEQRVSEVLISGELHMEDPDKPLLSSLFNAAGVLVEARAKAILDFLDALLELSEEQQFVAEALEKGTLPLLKDQDSLG

SEQ ID NO: 900780 - protein, 394 aa, Homo sapiens
MFSVFEEITRIVVKEMDAGGDMIAVRSLVDADRFRCFHLVGEKRTFFGCRHYTTGLTLMDILDTDGDKWLDELDSGLQGQKAEFQILDNVDSTGELIVRLPKEITISGSFQGFHHQKIKISENRISQQYLATLENRKLKRELPFSFRSINTRENLYLVTETLETVKEETLKSDRQYKFWSQISQGHLSYKHKGQREVTIPPNRVLSYRVKQLVFPNKETMRKSLGSEDSRNMKEKLEDMESVLKDLTEEKRKDVLNSLAKCLGKEDIRQDLEQRVSEVLISGELHMEDPDKPLLSSLFNAAGVLVEARAKAILDFLDALLELSEEQQFVAEALEKGTLPLLKDQVKSVMEQNWDELASSPPDMDYDPEARILCALYVVVSILLELAEGPTSVSS

SEQ ID NO: 900781 - protein, 163 aa, Homo sapiens; identical to SEQ ID NO: 900776

SEQ ID NO: 900782 - protein, 163 aa, Homo sapiens; identical to SEQ ID NO: 900776

SEQ ID NO: 900783 - protein, 262 aa, Homo sapiens
MFSVFEEITRIVVKEMDAGGDMIAVRSLVDADRFRCFHLVGEKRTFFGCRHYTTGLTLMDILDTDGDKWLDELDSGLQGQKAEFQILDNVDSTGELIVRLPKEITISGSFQGFHHQKIKISENRISQQYLATLENRKLKRELPFSFRSINTRENLYLVTETLETVKEETLKSDRQYKFWSQISQGHLSYKHKGQREVTIPPNRVLSYRVKQLVFPNKETMKKDGASSCLGKGDSQVCSGWLHQPTLSPCGSRLLLRWGQLSG

SEQ ID NO: 900784 - protein, 373 aa, Homo sapiens
MSLRRHIGNPEYLMKRIPQNPRYQHIKSRLDTGNSMTKYTEKLEEIKKNYRYKKDELFKRLKVTTFAQLIIQVASLSDQTLEVTAEEIQRLEDNDSAASDPDAETTARTNGKGNPGEQSPSPEQFINNAGAGDSSRSTLQSVISGVGELDLDKGPVKKAEPHTKDKPYPDCPFLLLDVRDRDSYQQCHIVGAYSYPIATLSRTMNPYSNDILEYKNAHGKIIILYDDDERLASQAATTMCERGFENLFMLSGGLKVLAQKFPEGLITGSLPASCQQALPPGSARKRSSPKGPPLPAENKWRFTPEDLKKIEYYLEEEQGPADHPSRLNQANSSGRESKVPGARSAQNLPGGGPASHSNPRSLSSGHLQGKPWK

SEQ ID NO: 900785 - protein, 373 aa, Homo sapiens; identical to SEQ ID NO: 900784

SEQ ID NO: 900786 - protein, 170 aa, Homo sapiens
MNPYSNDILEYKNAHGKIIILYDDDERLASQAATTMCERGFENLFMLSGGLKVLAQKFPEGLITGSLPASCQQALPPGSARKRSSPKGPPLPAENKWRFTPEDLKKIEYYLEEEQGPADHPSRLNQANSSGRESKVPGARSAQNLPGGGPASHSNPRSLSSGHLQGKPWK

SEQ ID NO: 900787 - protein, 373 aa, Homo sapiens; identical to SEQ ID NO: 900784

SEQ ID NO: 900788 - protein, 329 aa, Homo sapiens
MSLRRHIGNPEYLMKRIPQNPRYQHIKSRLDTGNSMTKYTEKLEEIKKNNDSAASDPDAETTARTNGKGNPGEQSPSPEQFINNAGAGDSSRSTLQSVISGVGELDLDKGPVKKAEPHTKDKPYPDCPFLLLDVRDRDSYQQCHIVGAYSYPIATLSRTMNPYSNDILEYKNAHGKIIILYDDDERLASQAATTMCERGFENLFMLSGGLKVLAQKFPEGLITGSLPASCQQALPPGSARKRSSPKGPPLPAENKWRFTPEDLKKIEYYLEEEQGPADHPSRLNQANSSGRESKVPGARSAQNLPGGGPASHSNPRSLSSGHLQGKPWK

SEQ ID NO: 900789 - protein, 301 aa, Homo sapiens
MSLRRHIGNPEYLMKRIPQNPRYQHIKSRLDTGNSMTKYTEKLEEIKKNYRYKKDELFKRLKVTTFAQLIIQVASLSDQTLEVTAEEIQRLEDNDSAASDPDAETTARTNGKGNPGEQSPSPEQFINNAGAGDSSRSTLQSVISGVGELDLDKGPVKKAEPHTKDKPYPDCPFLLLDVRDRDSYQQCHIVGAYSYPIATLSRTMNPYSNDILEYKNAHGKIIILYDDDERLASQAATTMCERGFENLFMLSGGRLNQANSSGRESKVPGARSAQNLPGGGPASHSNPRSLSSGHLQGKPWK

SEQ ID NO: 900790 - protein, 1365 aa, Homo sapiens
MEFSIKQSPLSVQSVVKCIKMKQAPEILGSANGKTPSCEVNRECSVFLSKAQLSSSLQEGVMQKFNGHDALPFIPADKLKDLTSRVFNGEPGAHDAKLRFESQEMKGIGTPPNTTPIKNGSPEIKLKITKTYMNGKPLFESSICGDSAADVSQSEENGQKPENKARRNRKRSIKYDSLLEQGLVEAALVSKISSPSDKKIPAKKESCPNTGRDKDHLLKYNVGDLVWSKVSGYPWWPCMVSADPLLHSYTKLKGQKKSARQYHVQFFGDAPERAWIFEKSLVAFEGEGQFEKLCQESAKQAPTKAEKIKLLKPISGKLRAQWEMGIVQAEEAASMSVEERKAKFTFLYVGDQLHLNPQVAKEAGIAAESLGEMAESSGVSEEAAENPKSVREECIPMKRRRRAKLCSSAETLESHPDIGKSTPQKTAEADPRRGVGSPPGRKKTTVSMPRSRKGDAASQFLVFCQKHRDEVVAEHPDASGEEIEELLRSQWSLLSEKQRARYNTKFALVAPVQAEEDSGNVNGKKRNHTKRIQDPTEDAEAEDTPRKRLRTDKHSLRKRDTITDKTARTSSYKAMEAASSLKSQAATKNLSDACKPLKKRNRASTAASSALGFSKSSSPSASLTENEVSDSPGDEPSESPYESADETQTEVSVSSKKSERGVTAKKEYVCQLCEKPGSLLLCEGPCCGAFHLACLGLSRRPEGRFTCSECASGIHSCFVCKESKTDVKRCVVTQCGKFYHEACVKKYPLTVFESRGFRCPLHSCVSCHASNPSNPRPSKGKMMRCVRCPVAYHSGDACLAAGCSVIASNSIICTAHFTARKGKRHHAHVNVSWCFVCSKGGSLLCCESCPAAFHPDCLNIEMPDGSWFCNDCRAGKKLHFQDIIWVKLGNYRWWPAEVCHPKNVPPNIQKMKHEIGEFPVFFFGSKDYYWTHQARVFPYMEGDRGSRYQGVRGIGRVFKNALQEAEARFREIKLQREARETQESERKPPPYKHIKVNKPYGKVQIYTADISEIPKCNCKPTDENPCGFDSECLNRMLMFECHPQVCPAGEFCQNQCFTKRQYPETKIIKTDGKGWGLVAKRDIRKGEFVNEYVGELIDEEECMARIKHAHENDITHFYMLTIDKDRIIDAGPKGNYSRFMNHSCQPNCETLKWTVNGDTRVGLFAVCDIPAGTELTFNYNLDCLGNEKTVCRCGASNCSGFLGDRPKTSTTLSSEEKGKKTKKKTRRRRAKGEGKRQSEDECFRCGDGGQLVLCDRKFCTKAYHLSCLGLGKRPFGKWECPWHHCDVCGKPSTSFCHLCPNSFCKEHQDGTAFSCTPDGRSYCCEHDLGAASVRSTKTEKPPPEPGKPKGKRRRRRGWRRVTEGK

SEQ ID NO: 900791 - protein, 1365 aa, Homo sapiens; identical to SEQ ID NO: 900790

SEQ ID NO: 900792 - protein, 647 aa, Homo sapiens
MEFSIKQSPLSVQSVVKCIKMKQAPEILGSANGKTPSCEVNRECSVFLSKAQLSSSLQEGVMQKFNGHDALPFIPADKLKDLTSRVFNGEPGAHDAKLRFESQEMKGIGTPPNTTPIKNGSPEIKLKITKTYMNGKPLFESSICGDSAADVSQSEENGQKPENKARRNRKRSIKYDSLLEQGLVEAALVSKISSPSDKKIPAKKESCPNTGRDKDHLLKYNVGDLVWSKVSGYPWWPCMVSADPLLHSYTKLKGQKKSARQYHVQFFGDAPERAWIFEKSLVAFEGEGQFEKLCQESAKQAPTKAEKIKLLKPISGKLRAQWEMGIVQAEEAASMSVEERKAKFTFLYVGDQLHLNPQVAKEAGIAAESLGEMAESSGVSEEAAENPKSVREECIPMKRRRRAKLCSSAETLESHPDIGKSTPQKTAEADPRRGVGSPPGRKKTTVSMPRSRKGDAASQFLVFCQKHRDEVVAEHPDASGEEIEELLRSQWSLLSEKQRARYNTKFALVAPVQAEEDSGNVNGKKRNHTKRIQDPTEDAEAEDTPRKRLRTDKHSLRKRDTITDKTARTSSYKAMEAASSLKSQAATKNLSDACKPLKKRNRASTAASSALGFSKSSSPSASLTENELLWEPTPVKLDLNPAALYCT

SEQ ID NO: 900793 - protein, 156 aa, Homo sapiens
MNHSCQPNCETLKWTVNGDTRVGLFAVCDIPAGTELTFNYNLDCLGNEKTVCRCGASNCSGFLGDRPKTSTTLSSEEKGKKTKKKTRRRRAKGEGKRQSEDECFRCGDGGQLVLCDRKFCTKAYHLSCLGLGKRPFGSGMLNHVTVGTSIIALANR

SEQ ID NO: 900794 - protein, 186 aa, Homo sapiens
  misc_feature (35)..(35): Xaa can be any naturally occurring amino acid
RRSLSILLADKHPRCDRHGGSGHTASFYLLTALGXKGWKHGPAPARSHILCSSSCSFSPCFLVFVHFLLTETISSMSVEERKAKFTFLYVGDQLHLNPQVAKEAGIAAESLGEMAESSGVSEEAAENPKSVREECIPMKRRRRAKLCSSAETLESHPDIGKSTPQKTAEADPRRGVVNRRPSEFLI

SEQ ID NO: 900795 - protein, 1365 aa, Homo sapiens; identical to SEQ ID NO: 900790

SEQ ID NO: 900796 - protein, 713 aa, Homo sapiens [sequence omitted]

SEQ ID NO: 900797 - protein, 713 aa, Homo sapiens [sequence omitted]

SEQ ID NO: 900798 - protein, 705 aa, Homo sapiens [sequence omitted]

SEQ ID NO: 900799 - protein, 713 aa, Homo sapiens [sequence omitted]

SEQ ID NO: 900800 - protein, 629 aa, Homo sapiens
MEFSIKQSPLSVQSVVKCIKMKQAPEILGSANGKTPSCEVNRECSVFLSKAQLSSSLQEGVMQKFNGHDALPFIPADKLKDLTSRVFNGEPGAHDAKLRFESQEMKGIGTPPNTTPIKNGSPEIKLKITKTYMNGKPLFESSICGDSAADVSQSEENGQKPENKARRNRKRSIKYDSLLEQGLVEAALVSKISSPSDKKIPAKKESCPNTGRDKDHLLKYNVGDLVWSKVSGYPWWPCMVSADPLLHSYTKLKGQKKSARQYHVQFFGDAPERAWIFEKSLVAFEGEGQFEKLCQESAKQAPTKAEKIKLLKPISGKLRAQWEMGIVQAEEAASMSVEERKAKFTFLYVGDQLHLNPQVAKEAGIAAESLGEMAESSGVSEEAAENPKSVREECIPMKRRRRAKLCSSAETLESHPDIGKSTPQKTAEADPRRGVGSPPGRKKTTVSMPRSRKGDAASQFLVFCQKHRDEVVAEHPDASGEEIEELLRSQWSLLSEKQRARYNTKFALVAPVQAEEDSGNVNGKKRNHTKRIQDPTEDAEAEDTPRKRLRTDKHSLRKRDTITDKTARTSSYKAMEAASSLKSQAATKNLSDACKPLKKRNRASTAASSALGFSKSSSPSASLTENEVK

SEQ ID NO: 900801 - protein, 647 aa, Homo sapiens; identical to SEQ ID NO: 900792

SEQ ID NO: 900802 - protein, 640 aa, Homo sapiens
MEFSIKQSPLSVQSVVKCIKMKQAPEILGSANGKTPSCEVNRECSVFLSKAQLSSSLQEGVMQKFNGHDALPFIPADKLKDLTSRVFNGEPGAHDAKLRFESQEMKGIGTPPNTTPIKNGSPEIKLKITKTYMNGKPLFESSICGDSAADVSQSEENGQKPENKARRNRKRSIKYDSLLEQGLVEAALVSKISSPSDKKIPAKKESCPNTGRDKDHLLKYNVGDLVWSKVSGYPWWPCMVSADPLLHSYTKLKGQKKSARQYHVQFFGDAPERAWIFEKSLVAFEGEGQFEKLCQESAKQAPTKAEKIKLLKPISGKLRAQWEMGIVQAEEAASMSVEERKAKFTFLYVGDQLHLNPQVAKEAGIAAESLGEMAESSGVSEEAAENPKSVREECIPMKRRRRAKLCSSAETLESHPDIGKSTPQKTAEADPRRGVGSPPGRKKTTVSMPRSRKGDAASQFLVFCQKHRDEVVAEHPDASGEEIEELLRSQWSLLSEKQRARYNTKFALVAPVQAEEDSGNVNGKKRNHTKRIQDPTEDAEAEDTPRKRLRTDKHSLRKRDTITDKTARTSSYKAMEAASSLKSQAATKNLSDACKPLKKRNRASTAASSALGFSKSSSPSASLTENEGKIIIITITMALV

SEQ ID NO: 900803 - protein, 713 aa, Homo sapiens [sequence omitted]

SEQ ID NO: 900804 - protein, 226 aa, Homo sapiens
MNHSCQPNCETLKWTVNGDTRVGLFAVCDIPAGTELTFNYNLDCLGNEKTVCRCGASNCSGFLGDRPKTSTTLSSEEKGKKTKKKTRRRRAKGEGKRQSEDECFRCGDGGQLVLCDRKFCTKAYHLSCLGLGKRPFGKWECPWHHCDVCGKPSTSFCHLCPNSFCKEHQDGTAFSCTPDGRSYCCEHDLGAASVRSTKTEKPPPEPGKPKGKRRRRRGWRRVTEGK

SEQ ID NO: 900805 - protein, 640 aa, Homo sapiens; identical to SEQ ID NO: 900802

SEQ ID NO: 900806 - protein, 640 aa, Homo sapiens; identical to SEQ ID NO: 900802

SEQ ID NO: 900807 - protein, 607 aa, Homo sapiens [sequence omitted]

SEQ ID NO: 900808 - protein, 484 aa, Homo sapiens
MEFSIKQSPLSVQSVVKCIKMKQAPEILGSANGKTPSCEVNRECSVFLSKAQLSSSLQEGVMQKFNGHDALPFIPADKLKDLTSRVFNGEPGAHDAKLRFESQEMKGIGTPPNTTPIKNGSPEIKLKITKTYMNGKPLFESSICGDSAADVSQSEENGQKPENKARRNRKRSIKYDSLLEQGLVEAALVSKISSPSDKKIPAKKESCPNTGRDKDHLLKYNVGDLVWSKVSGYPWWPCMVSADPLLHSYTKLKGQKKSARQYHVQFFGDAPERAWIFEKSLVAFEGEGQFEKLCQESAKQAPTKAEKIKLLKPISGKLRAQWEMGIVQAEEAASMSVEERKAKFTFLYVGDQLHLNPQVAKEAGIAAESLGEMAESSGVSEEAAENPKSVREECIPMKRRRRAKLCSSAETLESHPDIGKSTPQKTAEADPRRGVGSPPGRKKTTVSMPRSRKGDAASQFLVFCQKHRDEVSTKLCFMLASFRI

SEQ ID NO: 900809 - protein, 484 aa, Homo sapiens; identical to SEQ ID NO: 900808

SEQ ID NO: 900810 - protein, 1365 aa, Homo sapiens; identical to SEQ ID NO: 900790

SEQ ID NO: 900811 - protein, 584 aa, Homo sapiens
MMRCVRCPVAYHSGDACLAAGCSVIASNSIICTAHFTARKGKRHHAHVNVSWCFVCSKGGSLLCCESCPAAFHPDCLNIEMPDGSWFCNDCRAGKKLHFQDIIWVKLGNYRWWPAEVCHPKNVPPNIQKMKHEIGEFPVFFFGSKDYYWTHQARVFPYMEGDRGSRYQGVRGIGRVFKNALQEAEARFREIKLQREARETQESERKPPPYKHIKVNKPYGKVQIYTADISEIPKCNCKPTDENPCGFDSECLNRMLMFECHPQVCPAGEFCQNQCFTKRQYPETKIIKTDGKGWGLVAKRDIRKGEFVNEYVGELIDEEECMARIKHAHENDITHFYMLTIDKDRIIDAGPKGNYSRFMNHSCQPNCETLKWTVNGDTRVGLFAVCDIPAGTELTFNYNLDCLGNEKTVCRCGASNCSGFLGDRPKTSTTLSSEEKGKKTKKKTRRRRAKGEGKRQSEDECFRCGDGGQLVLCDRKFCTKAYHLSCLGLGKRPFGKWECPWHHCDVCGKPSTSFCHLCPNSFCKEHQDGTAFSCTPDGRSYCCEHDLGAASVRSTKTEKPPPEPGKPKGKRRRRRGWRRVTEGK

SEQ ID NO: 900812 - protein, 103 aa, Homo sapiens
AGPGMCCEASEGDLVSHNEGLASLVLGQQGLKRLQLPGQCLHIVILARLIVGVDEGEFVNEYVGELIDEEECMARIKHAHENDITHFYMLTIDKDRIIDAGPT

SEQ ID NO: 900813 - protein, 705 aa, Homo sapiens [sequence omitted]

SEQ ID NO: 900814 - protein, 584 aa, Homo sapiens; identical to SEQ ID NO: 900811

SEQ ID NO: 900815 - protein, 671 aa, Homo sapiens
EDPEKTTEGRFTACECAQGIHSCFVCKESKTDVKRCVVTQCGKFYHEACVKKYPLTVFESRGFRCPLHSCVSCHASNPSNPRPSKGKMMRCVRCPVAYHSGDACLAAGCSVIASNSIICTAHFTARKGKRHHAHVNVSWCFVCSKGGSLLCCESCPAAFHPDCLNIEMPDGSWFCNDCRAGKKLHFQDIIWVKLGNYRWWPAEVCHPKNVPPNIQKMKHEIGEFPVFFFGSKDYYWTHQARVFPYMEGDRGSRYQGVRGIGRVFKNALQEAEARFREIKLQREARETQESERKPPPYKHIKVNKPYGKVQIYTADISEIPKCNCKPTDENPCGFDSECLNRMLMFECHPQVCPAGEFCQNQCFTKRQYPETKIIKTDGKGWGLVAKRDIRKGEFVNEYVGELIDEEECMARIKHAHENDITHFYMLTIDKDRIIDAGPKGNYSRFMNHSCQPNCETLKWTVNGDTRVGLFAVCDIPAGTELTFNYNLDCLGNEKTVCRCGASNCSGFLGDRPKTSTTLSSEEKGKKTKKKTRRRRAKGEGKRQSEDECFRCGDGGQLVLCDRKFCTKAYHLSCLGLGKRPFGKWECPWHHCDVCGKPSTSFCHLCPNSFCKEHQDGTAFSCTPDGRSYCCEHDLGAASVRSTKTEKPPPEPGKPKGKRRRRRGWRRVTEGK

SEQ ID NO: 900816 - protein, 640 aa, Homo sapiens; identical to SEQ ID NO: 900802

SEQ ID NO: 900817 - protein, 738 aa, Homo sapiens [sequence omitted]

SEQ ID NO: 900818 - protein, 647 aa, Homo sapiens
MEFSIKQSPLSVQSVVKCIKMKQAPEILGSANGKTPSCEVNRECSVFLSKAQLSSSLQEGVMQKFNGHDALPFIPADKLKDLTSRVFNGEPGAHDAKLRFESQEMKGIGTPPNTTPIKNGSPEIKLKITKTYMNGKPLFESSICGDSAADVSQSEENGQKPENKARRNRKRSIKYDSLLEQGLVEAALVSKISSPSDKKIPAKKESCPNTGRDKDHLLKYNVGDLVWSKVSGYPWWPCMVSADPLLHSYTKLKGQKKSARQYHVQFFGDAPERAWIFEKSLVAFEGEGQFEKLCQESAKQAPTKAEKIKLLKPISGKLRAQWEMGIVQAEEAASMSVEERKAKFTFLYVGDQLHLNPQVAKEAGIAAESLGEMAESSGVSEEAAENPKSVREECIPMKRRRRAKLCSSAETLESHPDIGKSTPQKTAEADPRRGVGSPPGRKKTTVSMPRSRKGDAASQFLVFCQKHRDEVVAEHPDASGEEIEELLRSQWSLLSEKQRARYNTKFALVAPVQAEEDSGNVNGKKRNHTKRIQDPTEDAEAEDTPRKRLRTDKHSLRKRDTITDKTARTSSYKAMEAASSLKSQAATKNLSDACKPLKKRNRASTAASSALGFSKSSSPSASLTENEWKMKVFRTSPGETKPPREVP

SEQ ID NO: 900819 - protein, 318 aa, Homo sapiens [sequence omitted]

SEQ ID NO: 900820 - protein, 713 aa, Homo sapiens [sequence omitted]

SEQ ID NO: 900821 - protein, 713 aa, Homo sapiens [sequence omitted]

SEQ ID NO: 900822 - protein, 713 aa, Homo sapiens [sequence omitted]

SEQ ID NO: 900823 - protein, 713 aa, Homo sapiens [sequence omitted]

SEQ ID NO: 900824 - protein, 647 aa, Homo sapiens; identical to SEQ ID NO: 900792

SEQ ID NO: 900825 - protein, 500 aa, Homo sapiens
MPPAVGGPVGYTPPDGGWGWAVVIGAFISIGFSYAFPKSITVFFKEIEGIFHATTSEVSWISSIMLAVMYGGGPISSILVNKYGSRIVMIVGGCLSGCGLIAASFCNTVQQLYVCIGVIGGLGLAFNLNPALTMIGKYFYKRRPLANGLAMAGSPVFLCTLAPLNQVFFGIFGWRGSFLILGGLLLNCCVAGALMRPIGPKPTKAGKDKSKASLEKAGKSGVKKDLHDANTDLIGRHPKQEKRSVFQTINQFLDLTLFTHRGFLLYLSGNVIMFFGLFAPLVFLSSYGKSQHYSSEKSAFLLSILAFVDMVARPSMGLVANTKPIRPRIQYFFAASVVANGVCHMLAPLSTTYVGFCVYAGFFGFAFGWLSSVLFETLMDLVGPQRFSSAVGLVTIVECCPVLLGPPLLGRLNDMYGDYKYTYWACGVVLIISGIYLFIGMGINYRLLAKEQKANEQKKESKEEETSIDVAGKPNEVTKAAESPDQKDTEGGPKEEESPV

SEQ ID NO: 900826 - protein, 500 aa, Homo sapiens; identical to SEQ ID NO: 900825

SEQ ID NO: 900827 - protein, 296 aa, Homo sapiens
MPPAVGGPVGYTPPDGGWGWAVVIGAFISIGFSYAFPKSITVFFKEIEGIFHATTSEVSWISSIMLAVMYGGGPISSILVNKYGSRIVMIVGGCLSGCGLIAASFCNTVQQLYVCIGVIGGLGLAFNLNPALTMIGKYFYKRRPLANGLAMAGSPVFLCTLAPLNQVFFGIFGWRGSFLILGGLLLNCCVAGALMRPIGPKPTKAGKDKSKASLEKAGKSGVKKDLHDANTDLIGRHPKQEKRSVFQTINQFLDLTLFTHRGFLLYLSGNVIMFFGLFAPLVFLIGSVLFCFNLSF

SEQ ID NO: 900828 - protein, 500 aa, Homo sapiens; identical to SEQ ID NO: 900825

SEQ ID NO: 900829 - protein, 412 aa, Homo sapiens [sequence omitted]

SEQ ID NO: 900830 - protein, 500 aa, Homo sapiens; identical to SEQ ID NO: 900825

SEQ ID NO: 900831 - protein, 998 aa, Homo sapiens
MDSLEEPQKKVFKARKTMRVSDRQQLEAVYKVKEELLKTDVKLLNGNHENGDLDPTSPLENMDYIKDKEEVNGIEEICFDPEGSKAEWKETPCILSVNVKNKQDDDLNCEPLSPHNITPEPVSKLPAEPVSGDPAPGDLDAGDPASGVLASGDSTSGDPTSSEPSSSDAASGDATSGDAPSGDVSPGDATSGDATADDLSSGDPTSSDPIPGEPVPVEPISGDCAADDIASSEITSVDLASGAPASTDPASDDLASGDLSSSELASDDLATGELASDELTSESTFDRTFEPKSVPVCEPVPEIDNIEPSSNKDDDFLEKNGADEKLEQIQSKDSLDEKNKADNNIDANEETLETDDTTICSDRPPENEKKVEEDIITELALGEDAISSSMEIDQGEKNEDETSADLVETINENVIEDNKSENILENTDSMETDEIIPILEKLAPSEDELTCFSKTSLLPIDETNPDLEEKMESSFGSPSKQESSESLPKEAFLVLSDEEDISGEKDESEVISQNETCSPAEVESNEKDNKPEEEEQVIHEDDERPSEKNEFSRRKRSKSEDMDNVQSKRRRYMEEEYEAEFQVKITAKGDINQKLQKVIQWLLEEKLCALQCAVFDKTLAELKTRVEKIECNKRHKTVLTELQAKIARLTKRFEAAKEDLKKRHEHPPNPPVSPGKTVNDVNSNNNMSYRNAGTVRQMLESKRNVSESAPPSFQTPVNTVSSTNLVTPPAVVSSQPKLQTPVTSGSLTATSVLPAPNTATVVATTQVPSGNPQPTISLQPLPVILHVPVAVSSQPQLLQSHPGTLVTNQPSGNVEFISVQSPPTVSGLTKNPVSLPSLPNPTKPNNVPSVPSPSIQRNPTASAAPLGTTLAVQAVPTAHSIVQATRTSLPTVGPSGLYSPSTNRGPIQMKIPISAFSTSSAAEQNSNTTPRIENQTNKTIDASVSKKAADSTSQCGKATGSDSSGVIDLTMDDEESGASQGTSIVIVLSNVLIPFFLS

SEQ ID NO: 900832 - protein, 1270 aa, Homo sapiens
MDSLEEPQKKVFKARKTMRVSDRQQLEAVYKVKEELLKTDVKLLNGNHENGDLDPTSPLENMDYIKDKEEVNGIEEICFDPEGSKAEWKETPCILSVNVKNKQDDDLNCEPLSPHNITPEPVSKLPAEPVSGDPAPGDLDAGDPASGVLASGDSTSGDPTSSEPSSSDAASGDATSGDAPSGDVSPGDATSGDATADDLSSGDPTSSDPIPGEPVPVEPISGDCAADDIASSEITSVDLASGAPASTDPASDDLASGDLSSSELASDDLATGELASDELTSESTFDRTFEPKSVPVCEPVPEIDNIEPSSNKDDDFLEKNGADEKLEQIQSKDSLDEKNKADNNIDANEETLETDDTTICSDRPPENEKKVEEDIITELALGEDAISSSMEIDQGEKNEDETSADLVETINENVIEDNKSENILENTDSMETDEIIPILEKLAPSEDELTCFSKTSLLPIDETNPDLEEKMESSFGSPSKQESSESLPKEAFLVLSDEEDISGEKDESEVISQNETCSPAEVESNEKDNKPEEEEQVIHEDDERPSEKNEFSRRKRSKSEDMDNVQSKRRRYMEEEYEAEFQVKITAKGDINQKLQKVIQWLLEEKLCALQCAVFDKTLAELKTRVEKIECNKRHKTVLTELQAKIARLTKRFEAAKEDLKKRHEHPPNPPVSPGKTVNDVNSNNNMSYRNAGTVRQMLESKRNVSESAPPSFQTPVNTVSSTNLVTPPAVVSSQPKLQTPVTSGSLTATSVLPAPNTATVVATTQVPSGNPQPTISLQPLPVILHVPVAVSSQPQLLQSHPGTLVTNQPSGNVEFISVQSPPTVSGLTKNPVSLPSLPNPTKPNNVPSVPSPSIQRNPTASAAPLGTTLAVQAVPTAHSIVQATRTSLPTVGPSGLYSPSTNRGPIQMKIPISAFSTSSAAEQNSNTTPRIENQTNKTIDASVSKKAADSTSQCGKATGSDSSGVIDLTMDDEESGASQDPKKLNHTPVSTMSSSQPVSRPLQPIQPAPPLQPSGVPTSGPSQTTIHLLPTAPTTVNVTHRPVTQVTTRLPVPRAPANHQVVYTTLPAPPAQAPLRGTVMQAPAVRQVNPQNSVTVRVPQTTTYVVNNGLTLGSTGPQLTVHHRPPQVHTEPPRPVHPAPLPEAPQPQRLPPEAASTSLPQKPHLKLARVQSQNGIVLSWSVLEVDRSCATVDSYHLYAYHEEPSATVPSQWKKIGEVKALPLPMACTLTQFVSGSKYYFAVRAKDIYGRFGPFCDPQSTDVISSTQSS

SEQ ID NO: 900833 - protein, 1270 aa, Homo sapiens; identical to SEQ ID NO: 900832

SEQ ID NO: 900834 - protein, 1270 aa, Homo sapiens; identical to SEQ ID NO: 900832

SEQ ID NO: 900835 - protein, 1270 aa, Homo sapiens; identical to SEQ ID NO: 900832

SEQ ID NO: 900836 - protein, 1270 aa, Homo sapiens; identical to SEQ ID NO: 900832

SEQ ID NO: 900837 - protein, 636 aa, Homo sapiens
FTGQSQLQYIHQTNKTIDASVSKKAADSTSQHPPNPPVSPGKTVNDVNSNNNMSYRNAGTVRQMLESKRNVSESAPPSFQTPVNTVSSTNLVTPPAVVSSQPKLQTPVTSGSLTATSVLPAPNTATVVATTQVPSGNPQPTISLQPLPVILHVPVAVSSQPQLLQSHPGTLVTNQPSGNVEFISVQSPPTVSGLTKNPVSLPSLPNPTKPNNVPSVPSPSIQRNPTASAAPLGTTLAVQAVPTAHSIVQATRTSLPTVGPSGLYSPSTNRGPIQMKIPISAFSTSSAAEQNSNTTPRIENQTNKTIDASVSKKAADSTSQCGKATGSDSSGVIDLTMDDEESGASQDPKKLNHTPVSTMSSSQPVSRPLQPIQPAPPLQPSGVPTSGPSQTTIHLLPTAPTTVNVTHRPVTQVTTRLPVPRAPANHQVVYTTLPAPPAQAPLRGTVMQAPAVRQVNPQNSVTVRVPQTTTYVVNNGLTLGSTGPQLTVHHRPPQVHTEPPRPVHPAPLPEAPQPQRLPPEAASTSLPQKPHLKLARVQSQNGIVLSWSVLEVDRSCATVDSYHLYAYHEEPSATVPSQWKKIGEVKALPLPMACTLTQFVSGSKYYFAVRAKDIYGRFGPFCDPQSTDVISSTQSS

SEQ ID NO: 900838 - protein, 600 aa, Homo sapiens
EYDLMFRGVPVVGLQCSYLENAGTVRQMLESKRNVSESAPPSFQTPVNTVSSTNLVTPPAVVSSQPKLQTPVTSGSLTATSVLPAPNTATVVATTQVPSGNPQPTISLQPLPVILHVPVAVSSQPQLLQSHPGTLVTNQPSGNVEFISVQSPPTVSGLTKNPVSLPSLPNPTKPNNVPSVPSPSIQRNPTASAAPLGTTLAVQAVPTAHSIVQATRTSLPTVGPSGLYSPSTNRGPIQMKIPISAFSTSSAAEQNSNTTPRIENQTNKTIDASVSKKAADSTSQCGKATGSDSSGVIDLTMDDEESGASQDPKKLNHTPVSTMSSSQPVSRPLQPIQPAPPLQPSGVPTSGPSQTTIHLLPTAPTTVNVTHRPVTQVTTRLPVPRAPANHQVVYTTLPAPPAQAPLRGTVMQAPAVRQVNPQNSVTVRVPQTTTYVVNNGLTLGSTGPQLTVHHRPPQVHTEPPRPVHPAPLPEAPQPQRLPPEAASTSLPQKPHLKLARVQSQNGIVLSWSVLEVDRSCATVDSYHLYAYHEEPSATVPSQWKKIGEVKALPLPMACTLTQFVSGSKYYFAVRAKDIYGRFGPFCDPQSTDVISSTQSS

SEQ ID NO: 900839 - protein, 1149 aa, Homo sapiens
  misc_feature (1141)..(1141): Xaa can be any naturally occurring amino acid
MDSLEEPQKKVFKARKTMRVSDRQQLEAVYKVKEELLKTDVKLLNGNHENGDLDPTSPLENMDYIKDKEEVNGIEEICFDPEGSKAEWKETPCILSVNVKNKQDDDLNCEPLSPHNITPEPVSKLPAEPVSGDPAPGDLDAGDPASGVLASGDSTSGDPTSSEPSSSDAASGDATSGDAPSGDVSPGDATSGDATADDLSSGDPTSSDPIPGEPVPVEPISGDCAADDIASSEITSVDLASGAPASTDPASDDLASGDLSSSELASDDLATGELASDELTSESTFDRTFEPKSVPVCEPVPEIDNIEPSSNKDDDFLEKNGADEKLEQIQSKDSLDEKNKADNNIDANEETLETDDTTICSDRPPENEKKVEEDIITELALGEDAISSSMEIDQGEKNEDETSADLVETINENVIEDNKSENILENTDSMETDEIIPILEKLAPSEDELTCFSKTSLLPIDETNPDLEEKMESSFGSPSKQESSESLPKEAFLVLSDEEDISGEKDESEVISQNETCSPAEVESNEKDNKPEEEEQVIHEDDERPSEKNEFSRRKRSKSEDMDNVQSKRRRYMEEEYEAEFQVKITAKGDINQKLQKVIQWLLEEKLCALQCAVFDKTLAELKTRVEKIECNKRHKTVLTELQAKIARLTKRFEAAKEDLKKRHEHPPNPPVSPGKTVNDVNSNNNMSYRNAGTVRQMLESKRNVSESAPPSFQTPVNTVSSTNLVTPPAVVSSQPKLQTPVTSGSLTATSVLPAPNTATVVATTQVPSGNPQPTISLQPLPVILHVPVAVSSQPQLLQSHPGTLVTNQPSGNVEFISVQSPPTVSGLTKNPVSLPSLPNPTKPNNVPSVPSPSIQRNPTASAAPLGTTLAVQAVPTAHSIVQATRTSLPTVGPSGLYSPSTNRGPIQMKIPISAFSTSSAAEQNSNTTPRIENQTNKTIDASVSKKAADSTSQCGKATGSDSSGVIDLTMDDEESGASQDPKKLNHTPVSTMSSSQPVSRPLQPIQPAPPLQPSGVPTSGPSQTTIHLLPTAPTTVNVTHRPVTQVTTRLPVPRAPANHQVVYTTLPAPPAQAPLRGTVMQAPAVRQVNPQNSVTVRVPQTTTYVVNNGLTLGSTGPQLTVHHRPPQVHTEPPRPVHPVXNILLILKD

SEQ ID NO: 900840 - protein, 520 aa, Homo sapiens
MDSLEEPQKKVFKARKTMRVSDRQQLEAVYKVKEELLKTDVKLLNGNHENGDLDPTSPLENMDYIKDKEEVNGIEEICFDPEGSKAEWKETPCILSVNVKNKQDDDLNCEPLSPHNITPEPVSKLPAEPVSGDPAPGDLDAGDPASGVLASGDSTSGDPTSSEPSSSDAASGDATSGDAPSGDVSPGDATSGDATADDLSSGDPTSSDPIPGEPVPVEPISGDCAADDIASSEITSVDLASGAPASTDPASDDLASGDLSSSELASDDLATGELASDELTSESTFDRTFEPKSVPVCEPVPEIDNIEPSSNKDDDFLEKNGADEKLEQIQSKDSLDEKNKADNNIDANEETLETDDTTICSDRPPENEKKVEEDIITELALGEDAISSSMEIDQGEKNEDETSADLVETINENVIEDNKSENILENTDSMETDEIIPILEKLAPSEDELTCFSKTSLLPIDETNPDLEEKMESSFGSPSKQESSESLPKEAFLVLSDEEDISGEKDESEVISQNETCSPG

SEQ ID NO: 900841 - protein, 602 aa, Homo sapiens
MDSLEEPQKKVFKARKTMRVSDRQQLEAVYKVKEELLKTDVKLLNGNHENGDLDPTSPLENMDYIKDKEEVNGIEEICFDPEGSKAEWKETPCILSVNVKNKQDDDLNCEPLSPHNITPEPVSKLPAEPVSGDPAPGDLDAGDPASGVLASGDSTSGDPTSSEPSSSDAASGDATSGDAPSGDVSPGDATSGDATADDLSSGDPTSSDPIPGEPVPVEPISGDCAADDIASSEITSVDLASGAPASTDPASDDLASGDLSSSELASDDLATGELASDELTSESTFDRTFEPKSVPVCEPVPEIDNIEPSSNKDDDFLEKNGADEKLEQIQSKDSLDEKNKADNNIDANEETLETDDTTICSDRPPENEKKVEEDIITELALGEDAISSSMEIDQGEKNEDETSADLVETINENVIEDNKSENILENTDSMETDEIIPILEKLAPSEDELTCFSKTSLLPIDETNPDLEEKMESSFGSPSKQESSESLPKEAFLVLSDEEDISGEKDESEVISQNETCSPAEVESNEKDNKPEEEEQVIHEDDERPSEKNEFSRRKRSKSEDMDNVQSKRRRYMEEEYEAEFQVKITAKGDINQKLQKVLCQL

SEQ ID NO: 900842 - protein, 1270 aa, Homo sapiens; identical to SEQ ID NO: 900832

SEQ ID NO: 900843 - protein, 1270 aa, Homo sapiens; identical to SEQ ID NO: 900832

SEQ ID NO: 900844 - protein, 1270 aa, Homo sapiens; identical to SEQ ID NO: 900832

SEQ ID NO: 900845 - protein, 1270 aa, Homo sapiens; identical to SEQ ID NO: 900832

SEQ ID NO: 900846 - protein, 757 aa, Homo sapiens
GTLVTNQPSGNVEFISVQSPPTVSGLTKNPVSLPSLPNPTKPNNVPSVPSPSIQRNPTASAAPLGTTLAVQAVPTAHSIVQATRTSLPTVGPSGLYSPSTNRGPIQMKIPISAFSTSSAAEQNSNTTPRIENQTNKTIDASVSKKAADSTSQHPPNPPVSPGKTVNDVNSNNNMSYRNAGTVRQMLESKRNVSESAPPSFQTPVNTVSSTNLVTPPAVVSSQPKLQTPVTSGSLTATSVLPAPNTATVVATTQVPSGNPQPTISLQPLPVILHVPVAVSSQPQLLQSHPGTLVTNQPSGNVEFISVQSPPTVSGLTKNPVSLPSLPNPTKPNNVPSVPSPSIQRNPTASAAPLGTTLAVQAVPTAHSIVQATRTSLPTVGPSGLYSPSTNRGPIQMKIPISAFSTSSAAEQNSNTTPRIENQTNKTIDASVSKKAADSTSQCGKATGSDSSGVIDLTMDDEESGASQDPKKLNHTPVSTMSSSQPVSRPLQPIQPAPPLQPSGVPTSGPSQTTIHLLPTAPTTVNVTHRPVTQVTTRLPVPRAPANHQVVYTTLPAPPAQAPLRGTVMQAPAVRQVNPQNSVTVRVPQTTTYVVNNGLTLGSTGPQLTVHHRPPQVHTEPPRPVHPAPLPEAPQPQRLPPEAASTSLPQKPHLKLARVQSQNGIVLSWSVLEVDRSCATVDSYHLYAYHEEPSATVPSQWKKIGEVKALPLPMACTLTQFVSGSKYYFAVRAKDIYGRFGPFCDPQSTDVISSTQSS

SEQ ID NO: 900847 - protein, 301 aa, Homo sapiens
SLHHSASGCSLSRNMLLQALCCYGTVKAPKVVLQLRVPSNNSHIVVNNWTKPWESTGPQLTVHHRIKKKCIVSNHGAGATQLPVPRAPANHQVVYTTLPAPPAQAPLRGTVMQAPAVRQVNPQNSVTVRVPQTTTYVVNNGLTLGSTGPQLTVHHRPPQVHTEPPRPVHPAPLPEAPQPQRLPPEAASTSLPQKPHLKLARVQSQNGIVLSWSVLEVDRSCATVDSYHLYAYHEEPSATVPSQWKKIGEVKALPLPMACTLTQFVSGSKYYFAVRAKDIYGRFGPFCDPQSTDVISSTQSS

SEQ ID NO: 900848 - protein, 1101 aa, Homo sapiens
MDSLEEPQKKVFKARKTMRVSDRQQLEAVYKVKEELLKTDVKLLNGNHENGDLDPTSPLENMDYIKDKEEVNGIEEICFDPEGSKAEWKETPCILSVNVKNKQDDDLNCEPLSPHNITPEPVSKLPAEPVSGDPAPGDLDAGDPASGVLASGDSTSGDPTSSEPSSSDAASGDATSGDAPSGDVSPGDATSGDATADDLSSGDPTSSDPIPGEPVPVEPISGDCAADDIASSEITSVDLASGAPASTDPASDDLASGDLSSSELASDDLATGELASDELTSESTFDRTFEPKSVPVCEPVPEIDNIEPSSNKDDDFLEKNGADEKLEQIQSKDSLDEKNKADNNIDANEETLETDDTTICSDRPPENEKKVEEDIITELALGEDAISSSMEIDQGEKNEDETSADLVETINENVIEDNKSENILENTDSMETDEIIPILEKLAPSEDELTCFSKTSLLPIDETNPDLEEKMESSFGSPSKQESSESLPKEAFLVLSDEEDISGEKDESEVISQNETCSPAEVESNEKDNKPEEEEQVIHEDDERPSEKNEFSRRKRSKSEDMDNVQSKRRRYMEEEYEAEFQVKITAKGDINQKLQKVIQWLLEEKLCALQCAVFDKTLAELKTRVEKIECNKRHKTVLTELQAKIARLTKRFEAAKEDLKKRHEHPPNPPVSPGKTVNDVNSNNNMSYRNAGTVRQMLESKRNVSESAPPSFQTPVNTVSSTNLVTPPAVVSSQPKLQTPVTSGSLTATSVLPAPNTATVVATTQVPSGNPQPTISLQPLPVILHVPVAVSSQPQLLQSHPGTLVTNQPSGNVEFISVQSPPTVSGLTKNPVSLPSLPNPTKPNNVPSVPSPSIQRNPTASAAPLGTTLAVQAVPTAHSIVQATRTSLPTVGPSGLYSPSTNRGPIQMKIPISAFSTSSAAEQNSNTTPRIENQTNKTIDASVSKKAADSTSQCGKATGSDSSGVIDLTMDDEESGASQDPKKLNHTPVSTMSSSQPVSRPLQPIQPAPPLQPSGVPTSGPSQTTIHLLPTAPTTVNVTHRPVTQVTTRLPVPRAPANHQVVYTTLPAPPAQAPLRGTVMQAPAVRQVNPQNRELNRENC

SEQ ID NO: 900849 - protein, 1073 aa, Homo sapiens
MDSLEEPQKKVFKARKTMRVSDRQQLEAVYKVKEELLKTDVKLLNGNHENGDLDPTSPLENMDYIKDKEEVNGIEEICFDPEGSKAEWKETPCILSVNVKNKQDDDLNCEPLSPHNITPEPVSKLPAEPVSGDPAPGDLDAGDPASGVLASGDSTSGDPTSSEPSSSDAASGDATSGDAPSGDVSPGDATSGDATADDLSSGDPTSSDPIPGEPVPVEPISGDCAADDIASSEITSVDLASGAPASTDPASDDLASGDLSSSELASDDLATGELASDELTSESTFDRTFEPKSVPVCEPVPEIDNIEPSSNKDDDFLEKNGADEKLEQIQSKDSLDEKNKADNNIDANEETLETDDTTICSDRPPENEKKVEEDIITELALGEDAISSSMEIDQGEKNEDETSADLVETINENVIEDNKSENILENTDSMETDEIIPILEKLAPSEDELTCFSKTSLLPIDETNPDLEEKMESSFGSPSKQESSESLPKEAFLVLSDEEDISGEKDESEVISQNETCSPAEVESNEKDNKPEEEEQVIHEDDERPSEKNEFSRRKRSKSEDMDNVQSKRRRYMEEEYEAEFQVKITAKGDINQKLQKVIQWLLEEKLCALQCAVFDKTLAELKTRVEKIECNKRHKTVLTELQAKIARLTKRFEAAKEDLKKRHEHPPNPPVSPGKTVNDVNSNNNMSYRNAGTVRQMLESKRNVSESAPPSFQTPVNTVSSTNLVTPPAVVSSQPKLQTPVTSGSLTATSVLPAPNTATVVATTQVPSGNPQPTISLQPLPVILHVPVAVSSQPQLLQSHPGTLVTNQPSGNVEFISVQSPPTVSGLTKNPVSLPSLPNPTKPNNVPSVPSPSIQRNPTASAAPLGTTLAVQAVPTAHSIVQATRTSLPTVGPSGLYSPSTNRGPIQMKIPISAFSTSSAAEQNSNTTPRIENQTNKTIDASVSKKAADSTSQCGKATGSDSSGVIDLTMDDEESGASQDPKKLNHTPVSTMSSSQPVSRPLQPIQPAPPLQPSGVPTSGPSQTTIHLLPTAPTTVNVTHRPVLLSGAELIQDHRNTKPSISITASPNDIPI

SEQ ID NO: 900850 - protein, 127 aa, Homo sapiens
MIFSMLRKLPKVTCRDVLPEIRAICIEEIGCWMRSYSTSFLTDSYLKYIGWTLHDKHREVRVKCVKALKGLYGNRDLTARLELFTGCFKDWMVSMIMDREYSVAVEAVRLLILILKKHGRGADGRGL

SEQ ID NO: 900851 - protein, 116 aa, Homo sapiens
MIFSMLRKLPKVTCRDVLPEIRAICIEEIGCWMRSYSTSFLTDSYLKYIGWTLHDKHREVRVKCVKALKGLYGNRDLTARLELFTGCFKDWMVSMIMDREYSVAVEAVRLLILILK

SEQ ID NO: 900852 - protein, 116 aa, Homo sapiens; identical to SEQ ID NO: 900851

SEQ ID NO: 900853 - protein, 73 aa, Homo sapiens
RWSPSVVVWRVFRALVSGGFRALVSGGFRALVSWRFPTVGVWRFPTVGVWHAPPSLALVAPCRCTRQEDKKMI

SEQ ID NO: 900854 - protein, 252 aa, Homo sapiens
MAQSKANGSHYALTAIGLGMLVLGVIMAMWNLVPGFSAAEKPTAQGSNKTEVGGGILKSKTFSVAYVLVGAGVMLLLLSICLSIRDKRKQRQGEDLAHVQHPTGAGPHAQEEDSQEEEEEDEEAASRYYVPSYEEVMNTNYSEARGEEQNPRLSISLPSYESLTGLDETTPTSTRADVEASPGNPPDRQNSKLAKRLKPLKVRRIKSEKLHLKDFRINLPDKNVPPPSIEPLTPPPQYDEVQEKAPDTRPPD

SEQ ID NO: 900855 - protein, 252 aa, Homo sapiens; identical to SEQ ID NO: 900854

SEQ ID NO: 900856 - protein, 252 aa, Homo sapiens; identical to SEQ ID NO: 900854

SEQ ID NO: 900857 - protein, 500 aa, Homo sapiens
MAQSKANGSHYALTAIGLGMLVLGVIMAMWNLVPGFSAAEKPTAQGSNKTEVGGGILKSKTFSVAYVLVGAGVMLLLLSICLSIRDKRKQRQGEDLAHVQHPTGAGPHAQEEDSQERRKGGMTRADLNDNNEHPDYAGKECSTPSLLTKHRGDDGRRNTRGLDHPRLPEPNAVAGTGAYDAHYTTPDTISHPTFTRPISNLPNTPYIIHVSPYYTRISNHTIQHLFPNYHYIANTPPMRQSFLNIQLYTAPAIAGACDATIDSSHTSRSRRHHAQSTTHRHRLAGDATAVRERDKSSKARAPPSARTSTRKQAGRQRTPRGGRGEEHRIQHPEDCMRRSRGNEHSRPRGMEVTAPCDSIDTHTSLCTARKSNTTEDKASTTERRRAHTASRWHDSITTTPPNSPLTPLPRSTATRNYHTYHTRHLNTYLNTSHTTPLTSPTPSSLTTLLHNHTPNYTSTPSIQHTTLHKPAPTYDTLHSPPQPHPLNHNSKSTQILHHPP

SEQ ID NO: 900858 - protein, 121 aa, Homo sapiens
ALFYIYIALFYIYIALFYIYIALFYIYIALFYIYIALFYIYIKTVLFQKGNKFCVCCLRWSPELWVENTTWLCRKDTGLFYELSGEAQVAALAEPLMLLFFEGLRPDERRHVMRNSLQWYT

SEQ ID NO: 900859 - protein, 252 aa, Homo sapiens; identical to SEQ ID NO: 900854

SEQ ID NO: 900860 - protein, 252 aa, Homo sapiens; identical to SEQ ID NO: 900854

SEQ ID NO: 900861 - protein, 100 aa, Homo sapiens
  misc_feature (12)..(13): Xaa can be any naturally occurring amino acid
  misc_feature (18)..(18): Xaa can be any naturally occurring amino acid
EREREREREREXXREREXPTSTRADVEASPGNPPDRQNSKLAKRLKPLKVRRIKSEKLHLKDFRINLPDKNVPPPSIEPLTPPPQYDEVQEKAPDTRPPD

SEQ ID NO: 900862 - protein, 670 aa, Homo sapiens
MGETEKRIETHRIRCLSKLKMFLLAITCAFVSKTLSGSYMNSMLTQIERQFNIPTSLVGFINGSFEIGNLLLIIFVSYFGTKLHRPIMIGIGCVVMGLGCFLKSLPHFLMNQYEYESTVSVSGNLSSNSFLCMENGTQILRPTQDPSECTKEVKSLMWVYVLVGNIVRGMGETPILPLGISYIEDFAKFENSPLYIGLVETGAIIGPLIGLLLASFCANVYVDTGFVNTDDLIITPTDTRWVGAWWFGFLICAGVNVLTAIPFFFLPNTLPKEGLETNADIIKNENEDKQKEEVKKEKYGITKDFLPFMKSLSCNPIYMLFILVSVIQFNAFVNMISFMPKYLEQQYGISSSDAIFLMGIYNLPPICIGYIIGGLIMKKFKITVKQAAHIGCWLSLLEYLLYFLSFLMTCENSSVVGINTSYEGIPQDLYVENDIFADCNVDCNCPSKIWDPVCGNNGLSYLSACLAGCETSIGTGINMVFQNCSCIQTSGNSSAVLGLCDKGPDCSLMLQYFLILSAMSSFIYSLAAIPGYMVLLRCMKSEEKSLGVGLHTFCTRVFAGIPAPIYFGALMDSTCLHWGTLKCGESGACRIYDSTTFRYIYLGLPAALRGSSFVPALIILILLRKCHLPGENASSGTELIETKVKGKENECKDIYQKSTVLKDDELKTKL

SEQ ID NO: 900863 - protein, 670 aa, Homo sapiens; identical to SEQ ID NO: 900862

SEQ ID NO: 900864 - protein, 284 aa, Homo sapiens
MFLLAITCAFVSKTLSGSYMNSMLTQIERQFNIPTSLVGFINGSFEIGNLLLIIFVSYFGTKLHRPIMIGIGCVVMGLGCFLKSLPHFLMNQYEYESTVSVSGNLSSNSFLCMENGTQILRPTQDPSECTKEVKSLMWVYVLVGNIVRGMGETPILPLGISYIEDFAKFENSPLYIGLVETGAIIGPLIGLLLASFCANVYVDTGFVNTDDLIITPTDTRWVGAWWFGFLICAGVNVLTAIPFFFLPNTLPKEGLETNADIIKNENEDKQKEEVKKEKYGITKE

SEQ ID NO: 900865 - protein, 284 aa, Homo sapiens; identical to SEQ ID NO: 900864

SEQ ID NO: 900866 - protein, 579 aa, Homo sapiens
MFLTKNCKQEQERVESAKMFLLAITCAFVSKTLSGSYMNSMLTQIERQFNIPTSLVGFINGSFEIGNLLLIIFVSYFGTKLHRPIMIGIGCVVMGLGCFLKSLPHFLMNQYEYESTVSVSGNLSSNSFLCMENGTQILRPTQDPSECTKEVKSLMWVYVLVGNIVRGMGETPILPLGISYIEDFAKFENSPLYIGLVETGAIIGPLIGLLLASFCANVYVDTGFVNTDDLIITPTDTRWVGAWWFGFLICAGVNVLTAIPFFFLPNTLPKEGLETNADIIKNENEDKQKEEVKKEKYGITKDFLPFMKSLSCNPIYMLFILVSVIQFNAFVNMISFMPKYLEQQYGISSSDAIFLMGIYNLPPICIGYIIGGLIMKKFKITVKQAAHIGCWLSLLEYLLYFLSFLMTCENSSVVGINTSYEGIPQDLYVENDIFADCNVDCNCPSKIWDPVCGNNGLSYLSACLAGCETSIGTGINMVFQNCSCIQTSGNSSAVLGLCDKGPDCSLMLQYFLILSAMSSFIYSLAAIPGYMVLLRCMKSEEKSLGVGLHTFCTRVFGKNSYFFPHPIRTILLLLFFITL

SEQ ID NO: 900867 - protein, 650 aa, Homo sapiens
MFLLAITCAFVSKTLSGSYMNSMLTQIERQFNIPTSLVGFINGSFEIGNLLLIIFVSYFGTKLHRPIMIGIGCVVMGLGCFLKSLPHFLMNQYEYESTVSVSGNLSSNSFLCMENGTQILRPTQDPSECTKEVKSLMWVYVLVGNIVRGMGETPILPLGISYIEDFAKFENSPLYIGLVETGAIIGPLIGLLLASFCANVYVDTGFVNTDDLIITPTDTRWVGAWWFGFLICAGVNVLTAIPFFFLPNTLPKEGLETNADIIKNENEDKQKEEVKKEKYGITKDFLPFMKSLSCNPIYMLFILVSVIQFNAFVNMISFMPKYLEQQYGISSSDAIFLMGIYNLPPICIGYIIGGLIMKKFKITVKQAAHIGCWLSLLEYLLYFLSFLMTCENSSVVGINTSYEGIPQDLYVENDIFADCNVDCNCPSKIWDPVCGNNGLSYLSACLAGCETSIGTGINMVFQNCSCIQTSGNSSAVLGLCDKGPDCSLMLQYFLILSAMSSFIYSLAAIPGYMVLLRCMKSEEKSLGVGLHTFCTRVFAGIPAPIYFGALMDSTCLHWGTLKCGESGACRIYDSTTFRYIYLGLPAALRGSSFVPALIILILLRKCHLPGENASSGTELIETKVKGKENECKDIYQKSTVLKDDELKTKL

SEQ ID NO: 900868 - protein, 305 aa, Homo sapiens
MFLLAITCAFVSKTLSGSYMNSMLTQIERQFNIPTSLVGFINGSFEIGNLLLIIFVSYFGTKLHRPIMIGIGCVVMGLGCFLKSLPHFLMNQYEYESTVSVSGNLSSNSFLCMENGTQILRPTQDPSECTKEVKSLMWVYVLVGNIVRGMGETPILPLGISYIEDFAKFENSPLYIGLVETGAIIGPLIGLLLASFCANVYVDTGFVNTDDLIITPTDTRWVGAWWFGFLICAGVNVLTAIPFFFLPNTLPKEGLETNADIIKNENEDKQKEEVKKEKYGITKGKYTYSKYYEIDLLFHIDMSVF

SEQ ID NO: 900869 - protein, 466 aa, Homo sapiens
WLVEKELMVSVLGPLSIDPNMLNTQRQQVQILLQEFATRKPQYEQLTAAGQGILSRPGEDPSLRGIVKEQLAAVTQKWDSLTGQLSDRCDWIDQAIVKSTQYQSLLRSLSDKLSDLDNKLSSSLAVSTHPDAMNQQLETAQKMKQEIQQEKKQIKVAQALCEDLSALVKEEYLKAELSRQLEGILKSFKDVEQKAENHVQHLQSACASSHQFQQMSRDFQAWLDTKKEEQNKSHPISAKLDVLESLIKDHKDFSKTLTAQSHMYEKTIAEGENLLLKTQGSEKAALQLQLNTIKTNWDTFNKQVKERENKLKESLEKALKYKEQVETLWPWIDKCQNNLEEIKFCLDPAEGENSIAKLKSLQKEMDQHFGMVELLNNTANSLLSVCEIDKEVVTDENKSLIQKVDMVTEQLHSKKFCLENMTQKFKEFQEVSKESKRQLQCAKEQLDIHDSLGSQAYSNKYLTMLQ

SEQ ID NO: 900870 - protein, 346 aa, Homo sapiens
WLVEKELMVSVLGPLSIDPNMLNTQRQQVQILLQEFATRKPQYEQLTAAGQGILSRPGEDPSLRGIVKEQLAAVTQKWDSLTGQLSDRCDWIDQAIVKSTQYQSLLRSLSDKLSDLDNKLSSSLAVSTHPDAMNQQLETAQKMKQEIQQEKKQIKVAQALCEDLSALVKEEYLKAELSRQLEGILKSFKDVEQKAENHVQHLQSACASSHQFQQMSRDFQAWLDTKKEEQNKSHPISAKLDVLESLIKDHKDFSKTLTAQSHMYEKTIAEGENLLLKTQGSEKAALQLQLNTIKTNWDTFNKQVKERENKLKESLEKALGFAYGSEVERLQLASYCEVAGAGYLES

SEQ ID NO: 900871 - protein, 187 aa, Homo sapiens
MQEAQPPEVLKTAGKWRSEGYCTASRVVARRTAPASSSPPPPPASPGGPSSSDQRSPCSNATARWTPPSTASWRTGPVEDTAIVGNKDPPSIWAAVPGKTFLNVTPAEVGVLVGKDWSSFVMNGLTLGGQKYTVVLDSLLQDGELTTDLRMKSIGGAPTFNVIVTMTAKTLGLLMGKEGIHGNFIDK

SEQ ID NO: 900872 - protein, 75 aa, Homo sapiens
GESTERELLELRTKVSKQEQLLQSTTEHLKNANQQKESMEQFIVSQLTRTHDVLKKARTNLEVKSLRALPCTPAL

SEQ ID NO: 900873 - protein, 75 aa, Homo sapiens; identical to SEQ ID NO: 900872

SEQ ID NO: 900874 - protein, 522 aa, Homo sapiens
MEFPDHSRHLLQCLSEQRHQGFLCDCTVLVGDAQFRAHRAVLASCSMYFHLFYKDQLDKRDIVHLNSDIVTAPAFALLLEFMYEGKLQFKDLPIEDVLAAASYLHMYDIVKVCKKKLKEKATTEADSTKKEEDASSCSDKVESLSDGSSHIAGDLPSDEDEGEDEKLNILPSKRDLAAEPGNMWMRLPSDSAGIPQAGGEAEPHATAAGKTVASPCSSTESLSQRSVTSVRDSADVDCVLDLSVKSSLSGVENLNSSYFSSQDVLRSNLVQVKVEKEASCDESDVGTNDYDMEHSTVKESVSTNNRVQYEPAHLAPLREDSVLRELDREDKASDDEMMTPESERVQVEGGMESSLLPYVSNILSPAGQIFMCPLCNKVFPSPHILQIHLSTHFREQDGIRSKPAADVNVPTCSLCGKTFSCMYTLKRHERTHSGEKPYTCTQCGKSFQYSHNLSRHAVVHTREKPHACKWCERRFTQSGDLYRHIRKFHCELVNSLSVKSEALSLPTVRDWTLEDSSQELWK

SEQ ID NO: 900875 - protein, 485 aa, Homo sapiens
MEFPDHSRHLLQCLSEQRHQGFLCDCTVLVGDAQFRAHRAVLASCSMYFHLFYKDQLDKRDIVHLNSDIVTAPAFALLLEFMYEGKLQFKDLPIEDVLAAASYLHMYDIVKVCKKKLKEKATTEADSTKKEEDASSCSDKVESLSDGSSHIAGDLPSDEDEGEDEKLNILPSKRDLAAEPGNMWMRLPSDSAGIPQAGGEAEPHATAAGKTVASPCSSTESLSQRTLLRSNLVQVKVEKEASCDESDVGTNDYDMEHSTVKESVSTNNRVQYEPAHLAPLREDSVLRELDREDKASDDEMMTPESERVQVEGGMESSLLPYVSNILSPAGQIFMCPLCNKVFPSPHILQIHLSTHFREQDGIRSKPAADVNVPTCSLCGKTFSCMYTLKRHERTHSGEKPYTCTQCGKSFQYSHNLSRHAVVHTREKPHACKWCERRFTQSGDLYRHIRKFHCELVNSLSVKSEALSLPTVRDWTLEDSSQELWK

SEQ ID NO: 900876 - protein, 522 aa, Homo sapiens; identical to SEQ ID NO: 900874

SEQ ID NO: 900877 - protein, 494 aa, Homo sapiens
MCPKGYEDSMEFPDHSRHLLQCLSEQRHQGFLCDCTVLVGDAQFRAHRAVLASCSMYFHLFYKDQLDKRDIVHLNSDIVTAPAFALLLEFMYEGKLQFKDLPIEDVLAAASYLHMYDIVKVCKKKLKEKATTEADSTKKEEDASSCSDKVESLSDGSSHIAGDLPSDEDEGEDEKLNILPSKRDLAAEPGNMWMRLPSDSAGIPQAGGEAEPHATAAGKTVASPCSSTESLSQRTLLRSNLVQVKVEKEASCDESDVGTNDYDMEHSTVKESVSTNNRVQYEPAHLAPLREDSVLRELDREDKASDDEMMTPESERVQVEGGMESSLLPYVSNILSPAGQIFMCPLCNKVFPSPHILQIHLSTHFREQDGIRSKPAADVNVPTCSLCGKTFSCMYTLKRHERTHSGEKPYTCTQCGKSFQYSHNLSRHAVVHTREKPHACKWCERRFTQSGDLYRHIRKFHCELVNSLSVKSEALSLPTVRDWTLEDSSQELWK

SEQ ID NO: 900878 - protein, 494 aa, Homo sapiens; identical to SEQ ID NO: 900877

SEQ ID NO: 900879 - protein, 429 aa, Homo sapiens
MTAALAVVTTSGLEDGVPRSRGEGTGEVVLERGPGAAYHMFVVMEDLVEKLKLLRYEEEFLRKSNLKAPSRHYFALPTNPGEQFYMFCTLAAWLINKAGRPFEQPQEYDDPNATISNILSELRSFGRTADFPPSKLKSGYGEHVCYVLDCFAEEALKYIGFTWKRPIYPVEELEEESVAEDDAELTLNKVDEEFVEEETDNEENFIDLNVLKAQTYHLDMNETAKQEDILESTTDAAEWSLEVERVLPQLKVTIRTDNKDWRIHVDQMHQHRSGIESALKETKGFLDKLHNEITRTLEKISSREKYINNQLENLVQEYRAAQAQLSEAKERYQQGNGGVTERTRLLSEVMEELEKVKQEMEEKGSSMTDGAPLVKIKQSLTKLKQETVEMDIRIGIVEHTLLQSKLKEKSNMTRNMHATVIPEPATGFY

SEQ ID NO: 900880 - protein, 411 aa, Homo sapiens
MTAALAVVTTSGLEDGVPRSRGEGTGEVVLERGPGAAYHMFVVMEDLVEKLKLLRYEEEFLRKSNLKAPSRHYFALPTNPGEQFYMFCTLAAWLINKAGRPFEQPQEYDDPNATISNILSELRSFGRTADFPPSKLKSGYGEHVCYVLDCFAEEALKYIGFTWKRPIYPVEELEEESVAEDDAELTLNKVDEEFVEEETDNEENFIDLNVLKAQTYHLDMNETAKQEDILESTTDAAEWSLEVERVLPQLKVTIRTDNKDWRIHVDQMHQHRSGIESALKETKGFLDKLHNEITRTLEKISSREKYINNQLENLVQEYRAAQAQLSEAKERYQQGNGGVTERTRLLSEVMEELEKVKQEMEEKGSSMTDGAPLVKIKQSLTKLKQETVEMDIRIGIVEHTLLQSKLKEKSM

SEQ ID NO: 900881 - protein, 466 aa, Homo sapiens
MTAALAVVTTSGLEDGVPRSRGEGTGEVVLERGPGAAYHMFVVMEDLVEKLKLLRYEEEFLRKSNLKAPSRHYFALPTNPGEQFYMFCTLAAWLINKAGRPFEQPQEYDDPNATISNILSELRSFGRTADFPPSKLKSGYGEHVCYVLDCFAEEALKYIGFTWKRVSPCCPGWSQTPGLRQSTCLGLPKCWDYRCEPSHPARPIYPVEELEEESVAEDDAELTLNKVDEEFVEEETDNEENFIDLNVLKAQTYHLDMNETAKQEDILESTTDAAEWSLEVERVLPQLKVTIRTDNKDWRIHVDQMHQHRSGIESALKETKGFLDKLHNEITRTLEKISSREKYINNQLENLVQEYRAAQAQLSEAKERYQQGNGGVTERTRLLSEVMEELEKVKQEMEEKGSSMTDGAPLVKIKQSLTKLKQETVEMDIRIGIVEHTLLQSKLKEKSNMTRNMHATVIPEPATGFY

SEQ ID NO: 900882 - protein, 270 aa, Homo sapiens
MTAALAVVTTSGLEDGVPRSRGEGTGEVVLERGPGAAYHMFVVMEDLVEKLKLLRYEEEFLRKSNLKAPSRHYFALPTNPGEQFYMFCTLAAWLINKAGRPFEQPQEYDDPNATISNILSELRSFGRTADFPPSKLKSGYGEHVCYVLDCFAEEALKYIGFTWKRPIYPVEELEEESVAEDDAELTLNKVDEEFVEEETDNEENFIDLNVLKAQTYHLDMNETAKQEDILESTTDAAEWSLEVERVLPQLKVTIRTDNKVSKWEHIFLKK

SEQ ID NO: 900883 - protein, 429 aa, Homo sapiens; identical to SEQ ID NO: 900879

SEQ ID NO: 900884 - protein, 387 aa, Homo sapiens
MTAALAVVTTSGLEDGVPRSRGEGTGEVVLERGPGAAYHMFVVMEDLVEKLKLLRYEEEFLRKSNLKAPSRHYFALPTNPGEQFYMFCTLAAWLINKAGRPFEQPQEYDDPNATISNILSELRSFGRTADFPPSKLKSGYGEHVCYVLDCFAEEALKYIGFTWKRPIYPVEELEEESVAEDDAELTLNKVDEEFVEEETDNEENFIDLNVLKAQTYHLDMNETAKQEDILESTTDAAEWSLEVERVLPQLKVTIRTDNKDWRIHVDQMHQHRSGIESALKETKGFLDKLHNEITRTLEKISSREKYINNQLENLVQEYRAAQAQLSEAKERYQQGNGGVTERTRLLSEVMEELEKVKQEMEEKGSSMTDGAPLVKIKQSLTKGAPAA

SEQ ID NO: 900885 - protein, 165 aa, Homo sapiens
MTAALAVVTTSGLEDGVPRSRGEGTGEVVLERGPGAAYHMFVVMEDLVEKLKLLRYEEEFLRKSNLKAPSRHYFALPTNPGEQFYMFCTLAAWLINKAGRPFEQPQEYDDPNATISNILSELRSFGRTADFPPSKLKSGYGEHVCYVLDCFAEEALKYIGFTWKR

SEQ ID NO: 900886 - protein, 287 aa, Homo sapiens [sequence omitted]

SEQ ID NO: 900887 - protein, 1369 aa, Homo sapiens
MGRLPSTYRKCYMLDFGLARQYTNTTGDVRPPRNVAGFRGTVRYASVNAHKNREMGRHDDLWSLFYMLVEFAVGQLPWRKIKDKEQVGMIKEKYEHRMLLKHMPSEFHLFLDHIASLDYFTKPDYQLIMSVFENSMKERGIAENEAFDWEKAGTDALLSTSTSTPPQQNTRQTAAMFGVVNVTPVPGDLLRENTEDVLQGEHLSDQENAPPILPGRPSEGLGPSPHLVPHPGGPEAEVWEETDVNRNKLRINIGKSPCVEEEQSRGMGVPSSPVRAPPDSPTTPVRSLRYRRVNSPESERLSTADGRVELPERRSRMDLPGSPSRQACSSQPAQMLSVDTGHADRQASGRMDVSASVEQEALSNAFRSVPLAEEEDFDSKEWVIIDKETELKDFPPGAEPSTSGTTDEEPEELRPLPEEGEERRRLGAEPTVRPRGRSMQALAEEDLQHLPPQPLPPQLSQGDGRSETSQPPTPGSPSHSPLHSGPRPRRRESDPTGPQRQVFSVAPPFEVNGLPRAVPLSLPYQDFKRDLSDYRERARLLNRVRRVGFSHMLLTTPQVPLAPVQPQANGKEEEEEEEEDEEEEEEDEEEEEEEEEEEEEEEEEEEEEEEAAAAVALGEVLGPRSGSSSEGSERSTDRSQEGAPSTLLADDQKESRGRASMADGDLEPEEGSKTLVLVSPGDMKKSPVTAELAPDPDLGTLAALTPQHERPQPTGSQLDVSEPGTLSSVLKSEPKPPGPGAGLGAGTVTTGVGGVAVTSSPFTKVERTFVHIAEKTHLNVMSSGGQALRSEEFSAGGELGLELASDGGAVEEGARAPLENGLALSGLNGAEIEGSALSGAPRETPSEMATNSLPNGPALADGPAPVSPLEPSPEKVATISPRRHAMPGSRPRSRIPVLLSEEDTGSEPSGSLSAKERWSKRARPQQDLARLVMEKRQGRLLLRLASGASSSSSEEQRRASETLSGTGSEEDTPASEPAAALPRKSGRAAATRSRIPRPIGLRMPMPVAAQQPASRSHGAAPALDTAITSRLQLQTPPGSATAADLRPKQPPGRGLGPGRAQAGARPPAPRSPRLPASTSAARNASASPRSQSLSRRESPSPSHQARPGVPPPRGVPPARAQPDGTPSPGGSKKGPRGKLQAQRATTKGRAGGAEGLGWGQIMTPAALRGPPPSPRPPTRSRPHWSSSQHSLTRPTRATRGPSFPPAPARTRASTRGAPPGLRARGGRGPAPRGGSASPSSPCVLSSSRRPSGRPASHQSLRPGEGSATFHRGLHFWGRLVRSPTRPRLRSMLPQQSLPTPPAAPCPPPTPFQPKSPHPFREAASNSRSGGSSLPARVQPHSLLGAIVARDGLWTARLGWGPREHRSTQV

SEQ ID NO: 900888 - protein, 1369 aa, Homo sapiens; identical to SEQ ID NO: 900887

SEQ ID NO: 900889 - protein, 1515 aa, Homo sapiens
GGGEQADILPANYVVKDRWKVLKKIGGGGFGEIYEAMDLLTRENVALKVESAQQPKQVLKMEVAVLKKLQGKDHVCRFIGCGRNEKFNYVVMQLQGRNLADLRRSQPRGTFTLSTTLRLGKQILESIEAIHSVGFLHRDIKPSNFAMGRLPSTYRKCYMLDFGLARQYTNTTGDVRPPRNVAGFRGTVRYASVNAHKNREMGRHDDLWSLFYMLVEFAVGQLPWRKIKDKEQVGMIKEKYEHRMLLKHMPSEFHLFLDHIASLDYFTKPDYQLIMSVFENSMKERGIAENEAFDWEKAGTDALLSTSTSTPPQQNTRQTAAMFGVVNVTPVPGDLLRENTEDVLQGEHLSDQENAPPILPGRPSEGLGPSPHLVPHPGGPEAEVWEETDVNRNKLRINIGKSPCVEEEQSRGMGVPSSPVRAPPDSPTTPVRSLRYRRVNSPESERLSTADGRVELPERRSRMDLPGSPSRQACSSQPAQMLSVDTGHADRQASGRMDVSASVEQEALSNAFRSVPLAEEEDFDSKEWVIIDKETELKDFPPGAEPSTSGTTDEEPEELRPLPEEGEERRRLGAEPTVRPRGRSMQALAEEDLQHLPPQPLPPQLSQGDGRSETSQPPTPGSPSHSPLHSGPRPRRRESDPTGPQRQVFSVAPPFEVNGLPRAVPLSLPYQDFKRDLSDYRERARLLNRVRRVGFSHMLLTTPQVPLAPVQPQANGKEEEEEEEEDEEEEEEDEEEEEEEEEEEEEEEEEEEEEEEAAAAVALGEVLGPRSGSSSEGSERSTDRSQEGAPSTLLADDQKESRGRASMADGDLEPEEGSKTLVLVSPGDMKKSPVTAELAPDPDLGTLAALTPQHERPQPTGSQLDVSEPGTLSSVLKSEPKPPGPGAGLGAGTVTTGVGGVAVTSSPFTKVERTFVHIAEKTHLNVMSSGGQALRSEEFSAGGELGLELASDGGAVEEGARAPLENGLALSGLNGAEIEGSALSGAPRETPSEMATNSLPNGPALADGPAPVSPLEPSPEKVATISPRRHAMPGSRPRSRIPVLLSEEDTGSEPSGSLSAKERWSKRARPQQDLARLVMEKRQGRLLLRLASGASSSSSEEQRRASETLSGTGSEEDTPASEPAAALPRKSGRAAATRSRIPRPIGLRMPMPVAAQQPASRSHGAAPALDTAITSRLQLQTPPGSATAADLRPKQPPGRGLGPGRAQAGARPPAPRSPRLPASTSAARNASASPRSQSLSRRESPSPSHQARPGVPPPRGVPPARAQPDGTPSPGGSKKGPRGKLQAQRATTKGRAGGAEGLGWGQIMTPAALRGPPPSPRPPTRSRPHWSSSQHSLTRPTRATRGPSFPPAPARTRASTRGAPPGLRARGGRGPAPRGGSASPSSPCVLSSSRRPSGRPASHQSLRPGEGSATFHRGLHFWGRLVRSPTRPRLRSMLPQQSLPTPPAAPCPPPTPFQPKSPHPFREAASNSRSGGSSLPARVQPHSLLGAIVARDGLWTARLGWGPREHRSTQV

SEQ ID NO: 900890 - protein, 625 aa, Homo sapiens
MLARMVSISRPRDPPASASQIERTFVHIAEKTHLNVMSSGGQALRSEEFSAGGELGLELASDGGAVEEGARAPLENGLALSGLNGAEIEGSALSGAPRETPSEMATNSLPNGPALADGPAPVSPLEPSPEKVATISPRRHAMPGSRPRSRIPVLLSEEDTGSEPSGSLSAKERWSKRARPQQDLARLVMEKRQGRLLLRLASGASSSSSEEQRRASETLSGTGSEEDTPASEPAAALPRKSGRAAATRSRIPRPIGLRMPMPVAAQQPASRSHGAAPALDTAITSRLQLQTPPGSATAADLRPKQPPGRGLGPGRAQAGARPPAPRSPRLPASTSAARNASASPRSQSLSRRESPSPSHQARPGVPPPRGVPPARAQPDGTPSPGGSKKGPRGKLQAQRATTKGRAGGAEGLGWGQIMTPAALRGPPPSPRPPTRSRPHWSSSQHSLTRPTRATRGPSFPPAPARTRASTRGAPPGLRARGGRGPAPRGGSASPSSPCVLSSSRRPSGRPASHQSLRPGEGSATFHRGLHFWGRLVRSPTRPRLRSMLPQQSLPTPPAAPCPPPTPFQPKSPHPFREAASNSRSGGSSLPARVQPHSLLGAIVARDGLWTARLGWGPREHRSTQV

SEQ ID NO: 900891 - protein, 486 aa, Homo sapiens
MGRLPSTYRKCYMLDFGLARQYTNTTGDVRPPRNVAGFRGTVRYASVNAHKNREMGRHDDLWSLFYMLVEFAVGQLPWRKIKDKEQVGMIKEKYEHRMLLKHMPSEFHLFLDHIASLDYFTKPDYQLIMSVFENSMKERGIAENEAFDWEKAGTDALLSTSTSTPPQQNTRQTAAMFGVVNVTPVPGDLLRENTEDVLQGEHLSDQENAPPILPGRPSEGLGPSPHLVPHPGGPEAEVWEETDVNRNKLRINIGKSPCVEEEQSRGMGVPSSPVRAPPDSPTTPVRSLRYRRVNSPESERLSTADGRVELPERRSRMDLPGSPSRQACSSQPAQMLSVDTGHADRQASGRMDVSASVEQEALSNAFRSVPLAEEEDFDSKEWVIIDKETELKDFPPGAEPSTSGTTDEEPEELRPLPEEGEERRRLGAEPTVRPRGRSMQALAEEDLQHLPPQPLPPQLSQGDGRSETSQPSLGKPPKNVYMPNRM

SEQ ID NO: 900892 - protein, 246 aa, Homo sapiens
MESIDQYIERKKKHFEEHNSMNELKQQPINKGGVRTPVPPRGRLSVASTPISQRRSQGRSCGPASQSTLGLKGSLKRSAISAAKTGVRFSAATKDNEHKRSLTKTPARKSAHVTVSGGTPKGEAVLGTHKLKTITGNSAAVITPFKLTTEATQTPVSNKKPVFDLKASLSRPLNYEPHKGKLKPWGQSKENNYLNQHVNRINFYKKTYKQPHLQTKEEQRKKREQERKEKKAKVLGMRRGLILAED

SEQ ID NO: 900893 - protein, 246 aa, Homo sapiens; identical to SEQ ID NO: 900892

SEQ ID NO: 900894 - protein, 246 aa, Homo sapiens; identical to SEQ ID NO: 900892

SEQ ID NO: 900895 - protein, 207 aa, Homo sapiens
MESIDQYIERKKKHFEEHNSMNELKQQPINKGGVRTPVPPRGRLSVASTPISQRRSQGRSCGPASQSTLGLKGSLKRSAISAAKTGVRFSAATKDNEHKRSLTKTPARKSAHVTVSGGTPKGEAVLGTHKLKTITGNSAAGKLKPWGQSKENNYLNQHVNRINFYKKTYKQPHLQTKEEQRKKREQERKEKKAKVLGMRRGLILAED

SEQ ID NO: 900896 - protein, 246 aa, Homo sapiens; identical to SEQ ID NO: 900892

SEQ ID NO: 900897 - protein, 288 aa, Homo sapiens
MESIDQYIERKKKHFEEHNSMNELKQQPINKGGVRTPVPPRGRLSVASTPISQRRSQGRSCGPASQSTLGLKGSLKRSAISAAKTGVRFSAATKDNEHKRSLTKTPARKSAHVTVSGGTPKGEAVLGTHKLKTITGNSAAVITPFKLTTEATQTPVSNKKPVFDLKASLSRPLNYEPHKGKLKPWGQSKENNYLNQHVNRINFYKKTYKQPHLQTKEEPRKKREQNEGEQGQRWEMGTGSYGCKYISLTLLVFGIHTFLLRNPMRRSPFREISERQMCSARSQRTLKS

SEQ ID NO: 900898 - protein, 246 aa, Homo sapiens; identical to SEQ ID NO: 900892

SEQ ID NO: 900899 - protein, 246 aa, Homo sapiens; identical to SEQ ID NO: 900892

SEQ ID NO: 900900 - protein, 246 aa, Homo sapiens; identical to SEQ ID NO: 900892

SEQ ID NO: 900901 - protein, 246 aa, Homo sapiens; identical to SEQ ID NO: 900892

SEQ ID NO: 900902 - protein, 308 aa, Homo sapiens
MRTFLKSFIISVSLDLGNRDSKVPSEGKKSLYTDESSKPGKNKRTAITTPNFKKLHEAHFKEMESIDQYIERKKKHFEEHNSMNELKQQPINKGGVRTPVPPRGRLSVASTPISQRRSQGRSCGPASQSTLGLKGSLKRSAISAAKTGVRFSAATKDNEHKRSLTKTPARKSAHVTVSGGTPKGEAVLGTHKLKTITGNSAAVITPFKLTTEATQTPVSNKKPVFDLKASLSRPLNYEPHKGKLKPWGQSKENNYLNQHVNRINFYKKTYKQPHLQTKEEQRKKREQERKEKKAKVLGMRRGLILAED

SEQ ID NO: 900903 - protein, 231 aa, Homo sapiens
MESIDQYIERQQPINKGGVRTPVPPRGRLSVASTPISQRRSQGRSCGPASQSTLGLKGSLKRSAISAAKTGVRFSAATKDNEHKRSLTKTPARKSAHVTVSGGTPKGEAVLGTHKLKTITGNSAAVITPFKLTTEATQTPVSNKKPVFDLKASLSRPLNYEPHKGKLKPWGQSKENNYLNQHVNRINFYKKTYKQPHLQTKEEQRKKREQERKEKKAKVLGMRRGLILAED

SEQ ID NO: 900904 - protein, 383 aa, Homo sapiens
MEEKPSGPIPDMLATAEPSSSETDKEVLSPAVPAAAPSSSMSEEPGPEQAATPPVWERGGAGGMQQGSSPAPDSCQPGPGPSPGLTSIVSGTSEDLRPPRRRPPPGKQIPCSSPGCCLSFPSVRDLAQHLRTHCPPTQSLEGKLFRCSALSCTETFPSMQELVAHSKLHYKPNRYFKCENCLLRFRTHRSLFKHLHVCAEHAQSPAPPPPPALDREPPAPERPPEVDPASAPGLPFPLLEPFTTPAPAPTGPFLPYLNPAPFGLSPPRLRPFLAAAPGPPASSAAVWKKSQGAGSSPRRPQGGSDAPSGHAAPSRIVWEHTRGRYSCMQCAFSTASRPAMTLHLEDHRPGAPAAPAAGPPRPDAPAGKAEECAGGEGGGGPRR

SEQ ID NO: 900905 - protein, 390 aa, Homo sapiens
MEEKPSGPIPDMLATAEPSSSETDKEVLSPAVPAAAPSSSMSEEPGPEQAATPPVWERGGAGGMQQGSSPAPDSCQPGPGPSPGLTSIVSGTSEDLRPPRRRPPPGKQIPCSSPGCCLSFPSVRDLAQHLRTHCPPTQSLEGKLFRCSALSCTETFPSMQELVAHSKLHYKPNRYFKCENCLLRFRTHRSLFKHLHVCAEHAQSPAPPPPPALDREPPAPERPPEVDPASAPGLPFPLLEPFTTPAPAPTGPFLPYLNPAPFGLSPPRLRPFLAAAPGPPASSAAVWKKSQGAGSSPRRPQGGSDAPSGHAAPSRIVWEHTRGRYSCMQCAFSTASRPAMTLHLEDHRPGAPAAPAAGPPRPDAPADPAPLAPKVSPLLSEGELPVFSQL

SEQ ID NO: 900906 - protein, 312 aa, Homo sapiens
MEEKPSGPIPDMLATAEPSSSETDKEVLSPAVPAAAPSSSMSEEPGPEQAATPPVWERGGAGGMQQGSSPAPDSCQPGPGPSPGLTSIVSGTSEDLRPPRRRPPPGKQIPCSSPGCCLSFPSVRDLAQHLRTHCPPTQSLEGKLFRCSALSCTETFPSMQELVAHSKLHYKPNRYFKCENCLLRFRTHRSLFKHLHVCAEHAQSPAPPPPPALDREPPAPERPPEVDPASAPGLPFPLLEPFTTPAPAPTGPFLPYLNPAPFGLSPPRLRPFLAAAPGPPASSAAVWKKSQGAGSSPRRPQGGSDAPSGACR

SEQ ID NO: 900907 - protein, 336 aa, Homo sapiens
  misc_feature (6)..(6): Xaa can be any naturally occurring amino acid
NLYGAXRVKRGPRAGWLESRPRENGADVSANSHCPEGGRRLSCSRRSRRNKRPSRVEDGKQIPCSSPGCCLSFPSVRDLAQHLRTHCPPTQSLEGKLFRCSALSCTETFPSMQELVAHSKLHYKPNRYFKCENCLLRFRTHRSLFKHLHVCAEHAQSPAPPPPPALDREPPAPERPPEVDPASAPGLPFPLLEPFTTPAPAPTGPFLPYLNPAPFGLSPPRLRPFLAAAPGPPASSAAVWKKSQGAGSSPRRPQGGSDAPSGHAAPSRIVWEHTRGRYSCMQCAFSTASRPAMTLHLEDHRPGAPAAPAAGPPRPDAPAGKAEECAGGEGGGGPRR

SEQ ID NO: 900908 - protein, 475 aa, Homo sapiens
MGADWVDPEPRRVLSASSFHQEEKPSGPIPDMLATAEPSSSETDKEVLSPAVPAAAPSSSMSEEPGPEQAATPPVWERGGAGGMQQGSSPAPDSCQPGPGPSPGLTSIVSGTSEDLRPPRRRPPPGKQIPCSSPGCCLSFPSVRDLAQHLRTHCPPTQSLEGKLFRCSALSCTETFPSMQELVAHSKLHYKPNRYFKGDPDLLSPPSTPWMGRGIRGRGPTQPGFTSQVENRPPNLKLRLLSGFPRVSPGSHPKWSGRVAATVVQELGRCENCLLRFRTHRSLFKHLHVCAEHAQSPAPPPPPALDREPPAPERPPEVDPASAPGLPFPLLEPFTTPAPAPTGPFLPYLNPAPFGLSPPRLRPFLAAAPGPPASSAAVWKKSQGAGSSPRRPQGGSDAPSGHAAPSRIVWEHTRGRYSCMQCAFSTASRPAMTLHLEDHRPGAPAAPAAGPPRPDAPAGKAEECAGGEGGGGPRR

SEQ ID NO: 900909 - protein, 358 aa, Homo sapiens
MEEKPSGPIPDMLATAEPSSSETDKEVLSPAVPAAAPSSSMSEEPGPEQAATPPVWERGGAGGMQQGSSPAPDSCQPGPGPSPGLTSIVSGTSEDLRPPRRRPPPGKQIPCSSPGCCLSFPSVRDLAQHLRTHCPPTQSLEGKLFRCSALSCTETFPSMQELVAHSKLHYKPNRYFKCENCLLRFRTHRSLFKHLHVCAEHAQSPAPPPPPALDREPPAPERPPEVDPASAPGLPFPLLEPFTTRPFLAAAPGPPASSAAVWKKSQGAGSSPRRPQGGSDAPSGHAAPSRIVWEHTRGRYSCMQCAFSTASRPAMTLHLEDHRPGAPAAPAAGPPRPDAPAGKAEECAGGEGGGGPRR

SEQ ID NO: 900910 - protein, 410 aa, Homo sapiens
MEEKPSGPIPDMLATAEPSSSETDKEVLSPAVPAAAPSSSMSEEPGPEQAATPPVWERGGAGGMQQGSSPAPDSCQPGPGPSPGLTSIVSGTSEDLRPPRRRPPPGKQIPCSSPGCCLSFPSVRDLAQHLRTHCPPTQSLEGKLFRCSALSCTETFPSMQELVAHSKLHYKPNRYFKCENCLLRFRTHRSLFKHLHVCAEHAQSPAPPPPPALDREPPAPERPPEVDPASAPGLPFPLLEPFTTPAPAPTGPFLPYLNPAPFGLSPPRLRPFLAAAPGPPASSAAVWKKSQGECGVGGLQEGGLGSALTLNLTRPFTAGAGSSPRRPQGGSDAPSGHAAPSRIVWEHTRGRYSCMQCAFSTASRPAMTLHLEDHRPGAPAAPAAGPPRPDAPAGKAEECAGGEGGGGPRR

SEQ ID NO: 900911 - protein, 393 aa, Homo sapiens
MGADWVDPEPRRVLSASSFHQEEKPSGPIPDMLATAEPSSSETDKEVLSPAVPAAAPSSSMSEEPGPEQAATPPVWERGGAGGMQQGSSPAPDSCQPGPGPSPGLTSIVSGTSEDLRPPRRRPPPGKQIPCSSPGCCLSFPSVRDLAQHLRTHCPPTQSLEGKLFRCSALSCTETFPSMQELVAHSKLHYKPNRYFKGDPDLLSPPSTPWMGRGIRGRGPTQPGFTSQVENRPPNLKLRLLSGFPRVSPGSHPKWSGRVAAVPAAGTLHDPRPCPHRTVPALLEPCALWPKPPAPAPLPGRCTRAAGFQRRRLEKEPRCWQQPPKTPGRLRRALRARGPEPHRVGAHTRPLLVHAVRLLHGLAARHDPAPGGPPPRRPRGPRGRAAAPRRPRG

SEQ ID NO: 900912 - protein, 403 aa, Homo sapiens
MGADWVDPEPRRVLSASSFHQEEKPSGPIPDMLATAEPSSSETDKEVLSPAVPAAAPSSSMSEEPGPEQAATPPVWERGGAGGMQQGSSPAPDSCQPGPGPSPGLTSIVSGTSEDLRPPRRRPPPGKQIPCSSPGCCLSFPSVRDLAQHLRTHCPPTQSLEGKLFRCSALSCTETFPSMQELVAHSKLHYKPNRYFKCENCLLRFRTHRSLFKHLHVCAEHAQSPAPPPPPALDREPPAPERPPEVDPASAPGLPFPLLEPFTTPAPAPTGPFLPYLNPAPFGLSPPRLRPFLAAAPGPPASSAAVWKKSQGAGSSPRRPQGGSDAPSGHAAPSRIVWEHTRGRYSCMQCAFSTASRPAMTLHLEDHRPGAPAAPAAGPPRPDAPAGKAEECAGGEGGGGPRR

SEQ ID NO: 900913 - protein, 501 aa, Homo sapiens
  misc_feature (6)..(6): Xaa can be any naturally occurring amino acid
NLYGAXRVKRGPRAGWLESRPRENGADVSANSHCPEGGRRLSCSRRSRRNKRPSRVEDGERGTGVAGAAELRGLAGSGPVRAYSLRPTPPPHPGTRPPLAVTRRAPYFRARPGMDHARQEEKPSGPIPDMLATAEPSSSETDKEVLSPAVPAAAPSSSMSEEPGPEQAATPPVWERGGAGGMQQGSSPAPDSCQPGPGPSPGLTSIVSGTSEDLRPPRRRPPPGKQIPCSSPGCCLSFPSVRDLAQHLRTHCPPTQSLEGKLFRCSALSCTETFPSMQELVAHSKLHYKPNRYFKCENCLLRFRTHRSLFKHLHVCAEHAQSPAPPPPPALDREPPAPERPPEVDPASAPGLPFPLLEPFTTPAPAPTGPFLPYLNPAPFGLSPPRLRPFLAAAPGPPASSAAVWKKSQGAGSSPRRPQGGSDAPSGHAAPSRIVWEHTRGRYSCMQCAFSTASRPAMTLHLEDHRPGAPAAPAAGPPRPDAPAGKAEECAGGEGGGGPRR

SEQ ID NO: 900914 - protein, 312 aa, Homo sapiens; identical to SEQ ID NO: 900906

SEQ ID NO: 900915 - protein, 367 aa, Homo sapiens
MEEKPSGPIPDMLATAEPSSSETDKEVLSPAVPAAAPSSSMSEEPGPEQAATPPVWERGGAGGMQQGSSPAPDSCQPGPGPSPGLTSIVSGTSEDLRPPRRRPPPGKQIPCSSPGCCLSFPSVRDLAQHLRTHCPPTQSLEGKLFRCSALSCTETFPSMQELVAHSKLHYKPNRYFKCENCLLRFRTHRSLFKHLHVCAEHAQSPAPPPPPALDREPPAPERPPEVDPASAPGLPFPLLEPFTTPAPAPTGPFRPFLAAAPGPPASSAAVWKKSQGAGSSPRRPQGGSDAPSGHAAPSRIVWEHTRGRYSCMQCAFSTASRPAMTLHLEDHRPGAPAAPAAGPPRPDAPAGKAEECAGGEGGGGPRR

SEQ ID NO: 900916 - protein, 222 aa, Homo sapiens
GPPGGPAQPRPLPTSRCENCLLRFRTHRSLFKHLHVCAEHAQSPAPPPPPALDREPPAPERPPEVDPASAPGLPFPLLEPFTTPAPAPTGPFLPYLNPAPFGLSPPRLRPFLAAAPGPPASSAAVWKKSQGAGSSPRRPQGGSDAPSGHAAPSRIVWEHTRGRYSCMQCAFSTASRPAMTLHLEDHRPGAPAAPAAGPPRPDAPAGKAEECAGGEGGGGPRR

SEQ ID NO: 900917 - protein, 241 aa, Homo sapiens
MFLTRSEYDRGVNTFSPEGRLFQVEYAIEAIKLGSTAIGIQTSEGVCLAVEKRITSPLMEPSSIEKIVEIDAHIGCAMSGLIADAKTLIDKARVETQNHWFTYNETMTVESVTQAVSNLALQFGEEDADPGAMSRPFGVALLFGGVDEKGPQLFHMDPSGTFVQCDARAIGSASEGAQSSLQEVYHKSMTLKEAIKSSLIILKQVMEEKLNATNIELATVQPGQNFHMFTKEELEEVIKDI

SEQ ID NO: 900918 - protein, 208 aa, Homo sapiens
MFLTRSEYDRGVNTFSPEGRLFQVEYAIEAIKLGSTAIGIQTSEGVCLAVEKRITSPLMEPSSIEKIVEIDAHIGCAMSGLIADAKTLIDKARVETQNHWFTYNETMTVESVTQAVSNLALQFGEEDADPGAMSRPFGVALLFGGVDEKGPQLFHMDPSGTFVQCDARAIGSASEGAQSSLQEVYHKALILKKASRVSLLFLNSKGGG

SEQ ID NO: 900919 - protein, 126 aa, Homo sapiens
MFLTRSEYDRGVNTFSPEGRLFQVEYAIEAIKLGSTAIGIQTSEGVCLAVEKRITSPLMEPSSIEKIVEIDAHIGCAMSGLIADAKTLIDKARVETQVKLALSPLLEGCTMLCSSSRTTGSPTMRQ

SEQ ID NO: 900920 - protein, 241 aa, Homo sapiens; identical to SEQ ID NO: 900917

SEQ ID NO: 900921 - protein, 241 aa, Homo sapiens; identical to SEQ ID NO: 900917

SEQ ID NO: 900922 - protein, 183 aa, Homo sapiens
MEPSSIEKIVEIDAHIGCAMSGLIADAKTLIDKARVETQNHWFTYNETMTVESVTQAVSNLALQFGEEDADPGAMSRPFGVALLFGGVDEKGPQLFHMDPSGTFVQCDARAIGSASEGAQSSLQEVYHKSMTLKEAIKSSLIILKQVMEEKLNATNIELATVQPGQNFHMFTKEELEEVIKDI

SEQ ID NO: 900923 - protein, 223 aa, Homo sapiens
MFLTRSEYDRGVNTFSPEGRLFQVEYAIEAIKLGSTAIGIQTSEGVCLAVEKRITSPLMEPSSIEDAKTLIDKARVETQNHWFTYNETMTVESVTQAVSNLALQFGEEDADPGAMSRPFGVALLFGGVDEKGPQLFHMDPSGTFVQCDARAIGSASEGAQSSLQEVYHKSMTLKEAIKSSLIILKQVMEEKLNATNIELATVQPGQNFHMFTKEELEEVIKDI

SEQ ID NO: 900924 - protein, 135 aa, Homo sapiens
MTVESVTQAVSNLALQFGEEDADPGAMSRPFGVALLFGGVDEKGPQLFHMDPSGTFVQCDARAIGSASEGAQSSLQEVYHKSMTLKEAIKSSLIILKQVMEEKLNATNIELATVQPGQNFHMFTKEELEEVIKDI

SEQ ID NO: 900925 - protein, 106 aa, Homo sapiens
MFLTRSEYDRGVNTFSPEGRLFQVEYAIEAIKLGSTAIGIQTSEGVCLAVEKRITSPLMEPSSIEKIVEIDAHIDYLCIPCCLCPLFWSLIPLPWLLTSLYNSITG

SEQ ID NO: 900926 - protein, 241 aa, Homo sapiens; identical to SEQ ID NO: 900917

SEQ ID NO: 900927 - protein, 218 aa, Homo sapiens
MFLTRSEYDRGVNTFSPEGRLFQVEYAIEAIKLGSTAIGIQTSEGVCLAVEKRITSPLMEPSSIEKIVEIDAHIGCAMSGLIADAKTLIDKARVETQNHWFTYNETMTVESVTQAVSNLALQFGEEDADPGAMSRPFGVALLFGGVDEKGPQLVYKCPFGPLYRGVVEHWALFKGGQRSCRKLPKSMLLRRLSFYLILNSIGGVVRLVCPGGRPISCS

SEQ ID NO: 900928 - protein, 241 aa, Homo sapiens; identical to SEQ ID NO: 900917

SEQ ID NO: 900929 - protein, 241 aa, Homo sapiens; identical to SEQ ID NO: 900917

SEQ ID NO: 900930 - protein, 183 aa, Homo sapiens; identical to SEQ ID NO: 900922

SEQ ID NO: 900931 - protein, 241 aa, Homo sapiens
MFLTRSEYDRGVNTFSPEGRLFQVEYAIEAIKLGSTAIGIQTSEGVCLAVEKRITSPLMEPSSIEKIVEIDAHIGCAMSGLIADAKTLIDKARVETQNHWFTYNETMTVESVTQAVSNLALQFGEEDADPGAMSRPFGVALLFGGVDEKGPQLFHMDPSGTFVQCDARAIGSASEGAQSSLQEVYHKSMTLKEAIKSSLIILKQVMEEKLNATNIERWGLAVLPRLVLNSWAQGNSPASAY

SEQ ID NO: 900932 - protein, 147 aa, Homo sapiens
AQEGGLKRSRSHAQLVLSTAAVWVSWLPVSWVPVESCWSSESPRSRCLLLPSPCFLPGLSTTGPCSWGTSGGNYGWAGPGPGRAAWVLPCHGAPQEPETGRTWGCYALLRRPPSFPKLDHIGGTCPTAESPLGPNSVRKREAPAGAW

SEQ ID NO: 900933 - protein, 511 aa, Homo sapiens
EKGERRGRVRRSAAPEVLVMNRIRIHVLPTNRGRITPVPRSQEPLSCAFTHRPCSHPRLEGQEFCIKHILEDKNAPFKQCSYISTKNGKRCPNAAPKPEKKDGVSFCAEHVRRNALALHAQMKKTNPGPVGETLLCQLSSYAKTELGSQTPESSRSEASRILDEDSWSDGEQEPITVDQTWRGDPDSEADSIDSDQEDPLKHAGVYTAEEVALIMREKLIRLQSLYIDQFKRLQHLLKEKKRRYLHNRKVEHEALGSSLLTGPEGLLAKERENLKRLKCLRRYRQRYGVEALLHRQLKERRMLATDGAAQQAHTTRSSQRCLAFVDDVRCSNQSLPMTRHCLTHICQDTNQVLFKCCQGSEEVPCNKPVPVSLSEDPCCPLHFQLPPQMYKPEQVLSVPDDLEAGPMDLYLSAAELQPTESLPLEFSDDLDVVGDGMQCPPSPLLFDPSLTLEDHLVKEIAEDTVDILGQMQMAGDGCRSQGSRNSEKASAPLSQSGLATANGKPEPTSIS

SEQ ID NO: 900934 - protein, 511 aa, Homo sapiens; identical to SEQ ID NO: 900933

SEQ ID NO: 900935 - protein, 537 aa, Homo sapiens
KQCQSQSRFLRLPGARISGDWSRRTKWRSHRLPRPGPVVRSEVLVMNRIRIHVLPTNRGRITPVPRSQEPLSCAFTHRPCSHPRLEGQEFCIKHILEDKNAPFKQCSYISTKNGKRCPNAAPKPEKKDGVSFCAEHVRRNALALHAQMKKTNPGPVGETLLCQLSSYAKTELGSQTPESSRSEASRILDEDSWSDGEQEPITVDQTWRGDPDSEADSIDSDQEDPLKHAGVYTAEEVALIMREKLIRLQSLYIDQFKRLQHLLKEKKRRYLHNRKVEHEALGSSLLTGPEGLLAKERENLKRLKCLRRYRQRYGVEALLHRQLKERRMLATDGAAQQAHTTRSSQRCLAFVDDVRCSNQSLPMTRHCLTHICQDTNQVLFKCCQGSEEVPCNKPVPVSLSEDPCCPLHFQLPPQMYKPEQVLSVPDDLEAGPMDLYLSAAELQPTESLPLEFSDDLDVVGDGMQCPPSPLLFDPSLTLEDHLVKEIAEDTVDILGQMQMAGDGCRSQGSRNSEKASAPLSQSGLATANGKPEPTSIS

SEQ ID NO: 900936 - protein, 477 aa, Homo sapiens
EKGERRGRVRRSAAPEVLVMNRIRIHVLPTNRGRITPVPRSQEPLSCAFTHRPCSHPRLEGQEFCIKHILEDKNAPFKQCSYISTKNGKRCPNAAPKPEKKDGVSFCAEHVRRNALALHAQMKKTNPGPVGETLLCQLSSYAKTELGSQTPESSRSEASRILDEDSWSDGEQEPITVDQTWRGDPDSEADSIDSDQEDPLKHAGVYTAEEVALIMREKLIRLQSLYIDQFKRLQHLLKEKKRRYLHNRKVEHEALGSSLLTGPEGLLAKERENLKRLKCLRRYRQRYGVEALLHRQLKERRMLATDGAAQQAHTTRSSQRCLAFVDDVRCSNQSLPMTRHCLTHICQDTNQVLFKCCQGSEEVPCNKPVPVSLSEDPCCPLHFQLPPQMYKPEQDLDVVGDGMQCPPSPLLFDPSLTLEDHLVKEIAEDTVDILGQMQMAGDGCRSQGSRNSEKASAPLSQSGLATANGKPEPTSIS

SEQ ID NO: 900937 - protein, 448 aa, Homo sapiens
EKGERRGRVRRSAAPEVLVMNRIRIHVLPTNRGRITPVPRVSFCAEHVRRNALALHAQMKKTNPGPVGETLLCQLSSYAKTELGSQTPESSRSEASRILDEDSWSDGEQEPITVDQTWRGDPDSEADSIDSDQEDPLKHAGVYTAEEVALIMREKLIRLQSLYIDQFKRLQHLLKEKKRRYLHNRKVEHEALGSSLLTGPEGLLAKERENLKRLKCLRRYRQRYGVEALLHRQLKERRMLATDGAAQQAHTTRSSQRCLAFVDDVRCSNQSLPMTRHCLTHICQDTNQVLFKCCQGSEEVPCNKPVPVSLSEDPCCPLHFQLPPQMYKPEQVLSVPDDLEAGPMDLYLSAAELQPTESLPLEFSDDLDVVGDGMQCPPSPLLFDPSLTLEDHLVKEIAEDTVDILGQMQMAGDGCRSQGSRNSEKASAPLSQSGLATANGKPEPTSIS

SEQ ID NO: 900938 - protein, 225 aa, Homo sapiens
QGKTNRLGGRVNRTRECWHRWCCQQAHTTRSSQRCLAFVDDVRCSNQSLPMTRHCLTHICQDTNQVLFKCCQGSEEVPCNKPVPVSLSEDPCCPLHFQLPPQMYKPEQVLSVPDDLEAGPMDLYLSAAELQPTESLPLEFSDDLDVVGDGMQCPPSPLLFDPSLTLEDHLVKEIAEDTVDILGQMQMAGDGCRSQGSRNSEKASAPLSQSGLATANGKPEPTSIS

SEQ ID NO: 900939 - protein, 152 aa, Homo sapiens
MREKLIRLQSLYIDQFKRLQHLLKEKKRRYLHNRKVEHEALGSSLLTGPEGLLAKERENLKRLKCLRRYRQRYGVEALLHRQLKERRMLATDGAAQQAHTTRSSQRCLAFVDDVRCSNQSLPMTRHCLTQKDATAIGDLLTLYCGLMETALD

SEQ ID NO: 900940 - protein, 575 aa, Homo sapiens
KQCQSQSRFLRLPGARISGDWSRRTKWRSHRLPRPGPVVRSEAGRDKGGVRGGGVAAAWGWCCRFPSCCSCASPEDTFSVVLVMNRIRIHVLPTNRGRITPVPRSQEPLSCAFTHRPCSHPRLEGQEFCIKHILEDKNAPFKQCSYISTKNGKRCPNAAPKPEKKDGVSFCAEHVRRNALALHAQMKKTNPGPVGETLLCQLSSYAKTELGSQTPESSRSEASRILDEDSWSDGEQEPITVDQTWRGDPDSEADSIDSDQEDPLKHAGVYTAEEVALIMREKLIRLQSLYIDQFKRLQHLLKEKKRRYLHNRKVEHEALGSSLLTGPEGLLAKERENLKRLKCLRRYRQRYGVEALLHRQLKERRMLATDGAAQQAHTTRSSQRCLAFVDDVRCSNQSLPMTRHCLTHICQDTNQVLFKCCQGSEEVPCNKPVPVSLSEDPCCPLHFQLPPQMYKPEQVLSVPDDLEAGPMDLYLSAAELQPTESLPLEFSDDLDVVGDGMQCPPSPLLFDPSLTLEDHLVKEIAEDTVDILGQMQMAGDGCRSQGSRNSEKASAPLSQSGLATANGKPEPTSIS

SEQ ID NO: 900941 - protein, 366 aa, Homo sapiens
EKGERRGRVRRSAAPEVLVMNRIRIHVLPTNRGRITPVPRSQEPLSCAFTHRPCSHPRLEGQEFCIKHILEDKNAPFKQCSYISTKNGKRCPNAAPKPEKKDGVSFCAEHVRRNALALHAQMKKTNPGPVGETLLCQLSSYAKTELGSQTPESSRSEASRILDEDSWSDGEQEPITVDQTWRGDPDSEADSIDSDQEDPLKHAGVYTAEEVALIMREKLIRLQSLYIDQFKRLQHLLKEKKRRYLHNRKVEHEALGSSLLTGPEGLLAKERENLKRLKCLRRYRQRYGVEALLHRQLKERRMLATDGAAQQAHTTRSSQRCLAFVDDVRCSNQSLPMTRHCLTQKDATAIGDLLTLYCGLMETALD

SEQ ID NO: 900942 - protein, 297 aa, Homo sapiens [sequence omitted]

SEQ ID NO: 900943 - protein, 552 aa, Homo sapiens
MKHWPFRVVSEGGKPKVQVEYKGETKTFFPEEISSMVLTKMKEIAEAYLGGKVHSAVITVPAYFNDSQRQATKDAGTITGLNVLRIINEPTAAAIAYGLDKKGCAGGEKNVLIFDLGGGTFDVSILTIEDGIFEVKSTAGDTHLGGEDFDNRMVSHLAEEFKRKHKKDIGPNKRAVRRLRTACERAKRTLSSSTQASIEIDSLYEGVDFYTSITRARFEELNADLFRGTLEPVEKALRDAKLDKGQIQEIVLVGGSTRIPKIQKLLQDFFNGKELNKSINPDEAVAYGAAVQAAILIGDKSENVQDLLLLDVTPLSLGIETAGGVMTPLIKRNTTIPTKQTQTFTTYSDNQSSVLVQVYEGERAMTKDNNLLGKFDLTGIPPAPRGVPQIEVTFDIDANGILNVTAADKSTGKENKITITNDKGRLSKDDIDRMVQEAERYKSEDEANRDRVAAKNALESYTYNIKQTVEDEKLRGKISEQDKNKILDKCQEVINWLDRNQMAEKDEYEHKQKELERVCNPIISKLYQGGPGGGSGGGGSGASGGPTIEEVD

SEQ ID NO: 900944 - protein, 552 aa, Homo sapiens; identical to SEQ ID NO: 900943

SEQ ID NO: 900945 - protein, 613 aa, Homo sapiens
MSARGPAIGIDLGTTYSCVGVFQHGKVEIIANDQGNRTTPSYVAFTDTERLIGDAAKNQVAMNPDQHHLRRQEADWTEIRGCHSAVGYETLAVPGGERGRQAQSASRVQGGDQDLLPRGDILHGPHEDEGDRGSLPGGQGAQRGHNGPGLFQRLAAPGHQGRRHHHGAQCAAHHQRAHGGTFDVSILTIEDGIFEVKSTAGDTHLGGEDFDNRMVSHLAEEFKRKHKKDIGPNKRAVRRLRTACERAKRTLSSSTQASIEIDSLYEGVDFYTSITRARFEELNADLFRGTLEPVEKALRDAKLDKGQIQEIVLVGGSTRIPKIQKLLQDFFNGKELNKSINPDEAVAYGAAVQAAILIGDKSENVQDLLLLDVTPLSLGIETAGGVMTPLIKRNTTIPTKQTQTFTTYSDNQSSVLVQVYEGERAMTKDNNLLGKFDLTGIPPAPRGVPQIEVTFDIDANGILNVTAADKSTGKENKITITNDKGRLSKDDIDRMVQEAERYKSEDEANRDRVAAKNALESYTYNIKQTVEDEKLRGKISEQDKNKILDKCQEVINWLDRNQMAEKDEYEHKQKELERVCNPIISKLYQGGPGGGSGGGGSGASGGPTIEEVD

SEQ ID NO: 900946 - protein, 118 aa, Homo sapiens
YGGFQNPGEGLGRRVLLEVETKSLETWNIPDLSPHQRPADLFPEDFCLKEDEEEVGDSQAWEEPTNWSTETWNLATSWEVGRGLRRRCSQAVAKGPSHSLGWEGGTTAEGRLKQSLFS

SEQ ID NO: 900947 - protein, 552 aa, Homo sapiens; identical to SEQ ID NO: 900943

SEQ ID NO: 900948 - protein, 150 aa, Homo sapiens
MSKGLLLLLLLSMGGTWASKEPLRPRCRPINATLAVEKEGCPVCITVNTTICAGYCPTMTRVLQGVLPALPQVVCNYRDVRFESIRLPGCPRGVNPVVSYAVALSCQCALCRRSTTDCGGPKDHPLTCDDPRFQASSSSKAPPPSLPSPS

SEQ ID NO: 900949 - protein, 118 aa, Homo sapiens
MEMFQGLLLLLLLSMGGDMGIQGAASATVPPHQCHPGCGEGGLPRVHHRQHHHLCRLLPHHDPRAAGGPAGPASGGVQLPRCALRVHPAPWLPARREPRGLLRRGSQLSMCTLPPQHH

SEQ ID NO: 900950 - protein, 113 aa, Homo sapiens
MTRVLQGVLPALPQVVCNYRDVRFESIRLPGCPRGVNPVVSYAVALSCQCALCRRSTTDCGGPKDHPLTCDDPRFQDSSSSKAPPPSLPSPSRLPGLETRTQIRFHRKKKTEE

SEQ ID NO: 900951 - protein, 170 aa, Homo sapiens
ILKKATRVELLEHSRNIGIVVTAIETFKSSFQSSQPGDTLGLLVRGLKREDLRRGLVMVKPGSIKPHQKVEAQVYILSKEEGGRHKPFVSHFMPVMFSLTWDMACRIILPPEKELAMPGEDLKFNLILRQPMILEKGQRFTLRDGNRTIGTGLVTNTLAMTEEEKNIKWG

SEQ ID NO: 900952 - protein, 170 aa, Homo sapiens; identical to SEQ ID NO: 900951

SEQ ID NO: 900953 - protein, 306 aa, Homo sapiens
GCLLVVAANDSPMPQTREHLLLAKQIGVEHVVVYVNKADAVQDSEMVELVELEIQELFTEFGYKGEETPVIVGSLSALEGRDPELGLKSVQKLLDAVDTYIPVPARDLEKPFLLPVEAVYSMSGHGTMVTGMLEHDILKKGDKRELLGHNKNICTVLTGIEMFHKSLERAEAGDNLGALVRGLKREDLRRGLVMVKPGSIKPHQKVEAQVYILSKEEGGRHKPFVSHFMPVMFSLTWDMACRIILPPEKELAMPGEDLKFNLILRQPMILEKGQRFTLRDGNRTIGTGLVTNTLAMTEEEKNIKWG

SEQ ID NO: 900954 - protein, 516 aa, Homo sapiens
RVPGLGAALRRMSPWSWFLLQTLCLLPTGAASRRGAPGTANCELKPQQSELNSFLWTIKRDPPSYFFGTIHVPYTRVWDFIPDNSKEAFLQSSIVYFELDLTDPYTISALTSCQMLPQGENLQDVLPRDIYCRLKRHLEYVKLMMPLWMTPDQRGKGLYADYLFNAIAGNWERKRPVWVMLMVNSLTEVDIKSRGVPVLDLFLAQEAERLRKQTGAVEKVEEQCHPLNGLNFSQVIFALNQTLLQQESLRAGSLQIPYTTEDLIKHYNCGDLSSVILSHDSSQVPNFINATLPPQERITAQEIDSYLRRELIYKRNERIGKRVKALLEEFPDKGFFFAFGAGHFMGNNTVLDVLRREGYEVEHAPAGRPIHKGKSKKTSTRPTLSTIFAPKVPTLEVPAPEAVSSGHSTLPPLVSRPGSADTPSEAEQRFRKKRRRSQRRPRLRQFSDLWVRLEESDIVPQLQVPVLDRHISTELRLPRRGHSHHSQMVASSACLSLWTPVFWVLVLAFQTETPLL

SEQ ID NO: 900955 - protein, 409 aa, Homo sapiens
RVPGLGAALRRMSPWSWFLLQTLCLLPTGAASRRGAPGTANCELKPQQSELNSFLWTIKRDPPSYFFGTIHVPYTRVWDFIPDNSKEAFLQSSIVYFELDLTDPYTISALTSCQMLPQGENLQDVLPRDIYCRLKRHLEYVKLMMPLWMTPDQRGKGLYADYLFNAIAGNWERKRPVWVMLMVNSLTEVDIKSRGVPVLDLFLAQEAERLRKQTVGSGKGGRAVPSIEWVELFTGHFMGNNTVLDVLRREGYEVEHAPAGRPIHKGKSKKTSTRPTLSTIFAPKVPTLEVPAPEAVSSGHSTLPPLVSRPGSADTPSEAEQRFRKKRRRSQRRPRLRQFSDLWVRLEESDIVPQLQVPVLDRHISTELRLPRRGHSHHSQMVASSACLSLWTPVFWVLVLAFQTETPLL

SEQ ID NO: 900956 - protein, 344 aa, Homo sapiens
RVPGLGAALRRMSPWSWFLLQTLCLLPTGAASRRGAPGTANCELKPQQSELNSFLWTIKRDPPSYFFGTIHVPYTRVWDFIPDNSKEAFLQSSIVYFELDLTDPYTISALTSCQMLPQGENLQDVLPRDIYCRLKRHLEYVKLMMPLWMTPDQRGKGLYADYLFNAIAGNWERKRPVWVMLMVNSLTEVDIKSRGVPVLDLFLAQEAERLRKQTGAVEKVEEQCHPLNGLNFSQVIFALNQTLLQQESLRAGSLQIPYTTEDLIKHYNCGDLSSVILSHDSSQVPNFINATLPPQERITAQEIDSYLRRELIYKRNERIGKRVKALLEEFPDKGFFFAFGAASQ

SEQ ID NO: 900957 - protein, 111 aa, Homo sapiens
MVIFALNQTLLQQESLRAGSLQIPYTTEDLIKHYNCGDLSSVILSHDSSQVPNFINATLPPQERITAQEIDSYLRRELIYKRNERIGKRVKALLEEFPDKGFFFAFGAASQ

SEQ ID NO: 900958 - protein, 172 aa, Homo sapiens
MGNNTVLDVLRREGYEVEHAPAGRPIHKGKSKKTSTRPTLSTIFAPKVPTLEVPAPEAVSSGHSTLPPLVSRPGSADTPSEAEQRFRKKRRRSQRRPRLRQFSDLWVRLEESDIVPQLQVPVLDRHISTELRLPRRGHSHHSQMVASSACLSLWTPVFWVLVLAFQTETPLL

SEQ ID NO: 900959 - protein, 260 aa, Homo sapiens
RVPGLGAALRRMSPWSWFLLQTLCLLPTGAASRRGAPGTANCELKPQQSELNSFLWTIKRDPPSYFFGTIHVPYTRVWDFIPDNSKEAFLQSSIVYFELDLTDPYTISALTSCQMLPQGENLQDVLPRDIYCRLKRHLEYVKLMMPLWMTPDQRGKGLYADYLFNAIAGNWERKRPVWVMLMVNSLTEVDIKSRGVPVLDLFLAQEAERLRKQTGAVEKVEEQCHPLNGLNFSQHLCFEPRPSCRRTTPPSSLQNTFGYL

SEQ ID NO: 900960 - protein, 435 aa, Homo sapiens
SVSRSGGGPGCGGGSGGRCRGGRRRSMWRSRWDASVLKAEALALLPCGLGMAFSQSHVMAARRHQHSRLIIEVDEYSSNPTQAFTFYNINQGRFQPPHVQMVDPVPHDAPKPPGYTRFVCVSDTHSRTDPIQMPYGDVLIHAGDFTELGLPSEVKKFNEWLGSLPYEYKIVIAGNHELTFDQEFMADLIKQDFYYFPSVSKLKPENYENVQSLLTNCIYLQDSEVTVRGFRIYGSPWQPWFYGWGFNLPRGQALLEKWNLIPEGVDILITHGPPLGFLDWVPKKMQRVGCVELLNTVQRRVQPRLHVFGHIHEGYGVMADGTTTYVNASVCTVNYQPVNPPIVIDLPTPRKLLTAPHCPCPARPCQLHRPGPATVPSMLSCLDDPSGCGDWPSRQVRALERLFSLLSPGVGTLRIPIRGSVLIYFFCVYILRVPR

SEQ ID NO: 900961 - protein, 305 aa, Homo sapiens
SVSRSGGGPGCGGGSGGRCRGGRRRSMWRSRWDASVLKAEALALLPCGLGMAFSQSHVMAARRHQHSRLIIEVDEYSSNPTQAFTFYNINQGRFQPPHVQMVDPVPHDAPKPPGYTRFVCVSDTHSRTDPIQMPYGDVLIHAGDFTELGLPSEVKKFNEWLGSLPYEYKIVIAGNHELTFDQEFMADLIKQDFYYFPSVSKLKPENYENVQSLLTNCIYLQDSEVTVRGFRIYGSPWQQHCIGLAEAERRGVQGSRNPVVAEGVPVARDVYEVSLMPQAQDMCAGGEKQALSVPAPLNFYVDQER

SEQ ID NO: 900962 - protein, 730 aa, Homo sapiens
MLFNSVLRQPQLGVLRNGWSSQYPLQSLLTGYQCSGNDEHTSYGETGVPVPPFGCTFSSAPNMEHVLAVANEEGFVRLYNTESQSFRKKCFKEWMAHWNAVFDLAWVPGELKLVTAAGDQTAKFWDVKAGELIGTCKGHQCSLKSVAFSKFEKAVFCTGGRDGNIMVWDTRCNKKDGFYRQVNQISGAHNTSDKQTPSKPKKKQNSKGLAPSVDFQQSVTVVLFQDENTLVSAGAVDGIIKVWDLRKNYTAYRQEPIASKSFLYPGSSTRKLGYSSLILDSTGSTLFANCTDDNIYMFNMTGLKTSPVAIFNGHQNSTFYVKSSLSPDDQFLVSGSSDEAAYIWKVSTPWQPPTVLLGHSQEVTSVCWCPSDFTKIATCSDDNTLKIWRLNRGLEEKPGGDKLSTVGWASQKKKESRPGLVTVTSSQSTPAKAPRVKCNPSNSSPSSAACAPSCAGDLPLPSNTPTFSIKTSPAKARSPINRRGSVSSVSPKPPSSFKMSIRNWVTRTPSSSPPITPPASETKIMSPRKALIPVSQKSSQAEACSESRNRVKRRLDSSCLESVKQKCVKSCNCVTELDGQVENLHLDLCCLAGNQEDLSKDSLGPTKSSKIEGAGTSISEPPSPISPYASESCGTLPLPLRPCGEGSEMVGKENSSPENKNWLLAMAAKRKAENPSPRSPSSQTPNSRRQSGKTLPSPVTITPSSMRKICTYFHRKSQEDFCGPEHSTEL

SEQ ID NO: 900963 - protein, 730 aa, Homo sapiens; identical to SEQ ID NO: 900962

SEQ ID NO: 900964 - protein, 730 aa, Homo sapiens; identical to SEQ ID NO: 900962

SEQ ID NO: 900965 - protein, 496 aa, Homo sapiens
MVIRIIKVWDLRKNYTAYRQEPIASKSFLYPGSSTRKLGYSSLILDSTGSTLFANCTDDNIYMFNMTGLKTSPVAIFNGHQNSTFYVKSSLSPDDQFLVSGSSDEAAYIWKVSTPWQPPTVLLGHSQEVTSVCWCPSDFTKIATCSDDNTLKIWRLNRGLEEKPGGDKLSTVGWASQKKKESRPGLVTVTSSQSTPAKAPRVKCNPSNSSPSSAACAPSCAGDLPLPSNTPTFSIKTSPAKARSPINRRGSVSSVSPKPPSSFKMSIRNWVTRTPSSSPPITPPASETKIMSPRKALIPVSQKSSQAEACSESRNRVKRRLDSSCLESVKQKCVKSCNCVTELDGQVENLHLDLCCLAGNQEDLSKDSLGPTKSSKIEGAGTSISEPPSPISPYASESCGTLPLPLRPCGEGSEMVGKENSSPENKNWLLAMAAKRKAENPSPRSPSSQTPNSRRQSGKTLPSPVTITPSSMRKICTYFHRKSQEDFCGPEHSTEL

SEQ ID NO: 900966 - protein, 730 aa, Homo sapiens; identical to SEQ ID NO: 900962

SEQ ID NO: 900967 - protein, 232 aa, Homo sapiens
MSIRNWVTRTPSSSPPITPPASETKIMSPRKALIPVSQKSSQAEACSESRNRVKRRLDSSCLESVKQKCVKSCNCVTELDGQVENLHLDLCCLAGNQEDLSKDSLGPTKSSKIEGAGTSISEPPSPISPYASESCGTLPLPLRPCGEGSEMVGKENSSPENKNWLLAMAAKRKAENPSPRSPSSQTPNSRRQSGKTLPSPVTITPSSMRKICTYFHRKSQEDFCGPEHSTEL

SEQ ID NO: 900968 - protein, 72 aa, Homo sapiens
PRFVRASATPCAGAQGALGLQVPAAGRKGGGDPKGEMTLRRPDVARKPIRERDVSLARSLAAGAYSGGSWRR

SEQ ID NO: 900969 - protein, 730 aa, Homo sapiens; identical to SEQ ID NO: 900962

SEQ ID NO: 900970 - protein, 653 aa, Homo sapiens
MLFNSVLRQPQLGVLRNAPNMEHVLAVANEEGFVRLYNTESQSFRKKCFKEWMAHWNAVFDLAWVPGELKLVTAAGDQTAKFWDVKAGELIGTCKGHQCSLKSVAFSKFEKAVFCTGGRDGNIMVWDTRCNKKDGFYRQVNQISGAHNTSDKQTPSKPKKKQNSKGLAPSVDFQQSVTVVLFQDENTLVSAGAVDGIFKSDFGFHWLYLFANCTDDNIYMFNMTGLKTSPVAIFNGHQNSTFYVKSSLSPDDQFLVSGSSDEAAYIWKVSTPWQPPTVLLGHSQEVTSVCWCPSDFTKIATCSDDNTLKIWRLNRGLEEKPGGDKLSTVGWASQKKKESRPGLVTVTSSQSTPAKAPRVKCNPSNSSPSSAACAPSCAGDLPLPSNTPTFSIKTSPAKARSPINRRGSVSSVSPKPPSSFKMSIRNWVTRTPSSSPPITPPASETKIMSPRKALIPVSQKSSQAEACSESRNRVKRRLDSSCLESVKQKCVKSCNCVTELDGQVENLHLDLCCLAGNQEDLSKDSLGPTKSSKIEGAGTSISEPPSPISPYASESCGTLPLPLRPCGEGSEMVGKENSSPENKNWLLAMAAKRKAENPSPRSPSSQTPNSRRQSGKTLPSPVTITPSSMRKICTYFHRKSQEDFCGPEHSTEL

SEQ ID NO: 900971 - protein, 232 aa, Homo sapiens; identical to SEQ ID NO: 900967

SEQ ID NO: 900972 - protein, 713 aa, Homo sapiens
MLFNSVLRQPQLGVLRNGWSSQYPLQSLLTGYQCSGNDEHTSYGETGVPVPPFGCTFSSAPNMEHVLAVANEEGFVRLYNTESQSFRKKCFKEWMAHWNAVFDLAWVPGELKLVTAAGDQTAKFWDVKAGELIGTCKGHQCSLKSVAFSKFEKAVFCTGGRDGNIMVWDTRCNKKDGFYRQVNQISGAHNTSDKQTPSKPKKKQNSKGLAPSVDFQQSVTVVLFQDENTLVSAGAVDGIIKVWDLRKNYTAYRQEPIASKSFLYPGSSTRKLGYSSLILDSTGSTLFANCTDDNIYMFNMTGLKTSPVAIFNGHQNSTFYVKSSLSPDDQFLVSGSSDEAAYIWKVSTPWQPPTVLLGHSQEVTSVCWCPSDFTKIATCSDDNTLKIWRLNRGLEEKPGGDKLSTVGWASQKKKESRPGLVTVTSSQSTPAKAPRVKCNPSNSSPSSAACAPSCAGDLPLPSNTPTFSIKTSPAKARSPINRRGSVSSVSPKPPSSFKMSIRNWVTRTPSSSPPITPPASETKIMSPRKALIPVSQKSSQAEACSESRNRVKRRLDSSCLESVKQKCVKSCNCVTELDGQVENLHLDLCCLAGNQEDLSKDSLGPTKSSKIEGAGTSISEPPSPISPYASESCGTLPLPLRPCGEGSEMVGKENSSPENKNWLLAMAAKRKAENPSPRSPSSQTPNSRRQSGKTLPSPLQSAKVFTNQNQLVI

SEQ ID NO: 900973 - protein, 761 aa, Homo sapiens [sequence omitted]

SEQ ID NO: 900974 - protein, 348 aa, Homo sapiens
MGSAVSFLLLSKAVCLYECFKWSFFYPYCYRGFTGQKTEEVKQDKDDIINIFSVASGHLYERFLRIMMLSVLKNTKTPVKFWFLKNYLSPTFKEFIPYMANEYNFQYELVQYKWPRWLHQQTEKQRIIWGYKILFLDVLFPLVVDKFLFVDADQIVRTDLKELRDFNLDGAPYGYTPFCDSRREMDGYRFWKSGYWASHLAGRKYHISALYVVDLKKFRKIAAGDRLRGQYQGLSQDPNSLSNLDQDLPNNMIHQVPIKSLPQEWLWCETWCDDASKKRAKTIDLCNNPMTKEPKLEAAVRIVPEWQDYDQEIKQLQIRFQKEKETGALYKEKTKEPSREGPQKREEL

SEQ ID NO: 900975 - protein, 608 aa, Homo sapiens
MINNPAKEISYENTQISRAIWAALQTQTSNAAKNFITKMAKEGAAEALAAGADIAEFSVGGMDFSLFKEVFESSKMDFILSHAVYCRDVLKLKKGQRAVISNGRIIGPLEDSELFNQDDFHLLENIILKTSGQKIKSHIQQLRVEEDVASDLVMKVDALLSAQPKGDPRIEYQFFEDRHSAIKLRPKEGETYFDVVAVVDPVTREAQRLAPLLLVLAQLINMNLRVFMNCQSKLSDMPLKSFYRYVLEPEISFTSDNSFAKGPIAKFLDMPQSPLFTLNLNTPESWMVESVRTPYDLDNIYLEEVDSVVAAEYELEYLLLEGHCYDITTGQPPRGLQFTLGTSANPVIVDTIVMANLGYFQLKANPGAWILRLRKGRSEDIYRIYSHDGTDSPPDADEVVIVLNNFKSKIIKVKVQKKADMVNEDLLSDGTSENESGFWDSFKWGFTGQKTEEVKQDKDDIINIFSVASGHLYERFLRIMMLSVLKNTKTPVKFWFLKNYLSPTFKDLPNNMIHQVPIKSLPQEWLWCETWCDDASKKRAKTIDLCNNPMTKEPKLEAAVRIVPEWQDYDQEIKQLQIRFQKEKETGALYKEKTKEPSREGPQKREEL

SEQ ID NO: 900976 - protein, 761 aa, Homo sapiens [sequence omitted]

SEQ ID NO: 900977 - protein, 761 aa, Homo sapiens [sequence omitted]

SEQ ID NO: 900978 - protein, 761 aa, Homo sapiens [sequence omitted]

SEQ ID NO: 900979 - protein, 761 aa, Homo sapiens [sequence omitted]

SEQ ID NO: 900980 - protein, 92 aa, Homo sapiens
HFSCLPLATHTFFVDVNTALHEPTTILLLCNNPMTKEPKLEAAVRIVPEWQDYDQEIKQLQIRFQKEKETGALYKEKTKEPSREGPQKREEL

SEQ ID NO: 900981 - protein, 761 aa, Homo sapiens [sequence omitted]

SEQ ID NO: 900982 - protein, 764 aa, Homo sapiens
MINNPAKEISYENTQISRAIWAALQTQTSNAAKNFITKMAKEGAAEALAAGADIAEFSVGGMDFSLFKEVFESSKMDFILSHAVYCRDVLKLKKGQRAVISNGRIIGPLEDSELFNQDDFHLLENIILKTSGQKIKSHIQQLRVEEDVASDLVMKVDALLSAQPKGDPRIEYQFFEDRHSAIKLRPKEGETYFDVVAVVDPVTREAQRLAPLLLVLAQLINMNLRVFMNCQSKLSDMPLKSFYRYVLEPEISFTSDNSFAKGPIAKFLDMPQSPLFTLNLNTPESWMVESVRTPYDLDNIYLEEVDSVVAAEYELEYLLLEGHCYDITTGQPPRGLQFTLGTSANPVIVDTIVMANLGYFQLKANPGAWILRLRKGRSEDIYRIYSHDGTDSPPDADEVVIVLNNFKSKIIKVKVQKKADMVNEDLLSDGTSENESGFWDSFKWGFTGQKTEEVKQDKDDIINIFSVASGHLYERFLRIMMLSVLKNTKTPVKFWFLKNYLSPTFKEFIPYMANEYNFQYELVQYKWPRWLHQQTEKQRIIWGYKILFLDVLFPLVVDKFLFVDADQIVRTDLKELRDFNLDGAPYGYTPFCDSRREMDGYRFWKSGYWASHLAGRKYHISALYVVDLKKFRKIAAGDRLRGQYQGLSQDPNSLSNLDQDLPNNMIHQVPIKSLPQEWLWCETWCDDASKKRAKTIDLCNNPMTKEPKLEAAVRIVPEWQDYDQEIKQLQIRFQKEKETGALYKEKTKEPSREGPQTPSKGINR

SEQ ID NO: 900983 - protein, 622 aa, Homo sapiens
MINNPAKEISYENTQISRAIWAALQTQTSNAAKNFITKMAKEGAAEALAAGADIAEFSVGGMDFSLFKEVFESSKMDFILSHAVYCRDVLKLKKGQRAVISNGRIIGPLEDSELFNQDDFHLLENIILKTSGQKIKSHIQQLRVEEDVASDLVMKVDALLSAQPKGDPRIEYQFFEDRHSAIKLRPKEGETYFDVVAVVDPVTREAQRLAPLLLVLAQLINMNLRVFMNCQSKLSDMPLKSFYRYVLEPEISFTSDNSFAKGPIAKFLDMPQSPLFTLNLNTPESWMVESVRTPYDLDNIYLEEVDSVVAAEYELEYLLLEGHCYDITTGQPPRGLQFTLGTSANPVIVDTIVMANLGYFQLKANPGAWILRLRKGRSEDIYRIYSHDGTDSPPDADEVVIVLNNFKSKIIKVKVQKKADMVNEDLLSDGTSENESGFWDSFKWGFTGQKTEEVKQDKDDIINIFSVASGHLYERFLRIMMLSVLKNTKTPVKFWFLKNYLSPTFKEFIPYMANEYNFQYELVQYKWPRWLHQQTEKQRIIWGYKILFLDVLFPLVVDKFLFVDADQIVRTDLKELRDFNLDGAPYGYTPFCDSRREMDGYRFWKSGYWASHLAGRKYHIRY

SEQ ID NO: 900984 - protein, 1567 aa, Homo sapiens
SLALWRTDHGPGMGCKGDASGACAAGALPVTGVCYKMGVLVVLTVLWLFSSVKADSKAITTSLTTKWFSTPLLLEASEFLAEDSQEKFWNFVEASQNIGSSDHDGTDYSYYHAILEAAFQFLSPLQQNLFKFCLSLRSYSATIQAFQQIAADEPPPEGCNSFFSVHGKKTCESDTLEALLLTASERPKPLLFKGDHRYPSSNPESPVVIFYSEIGSEEFSNFHRQLISKSNAGKINYVFRHYIFNPRKEPVYLSGYGVELAIKSTEYKAKDDTQVKGTEVNTTVIGENDPIDEVQGFLFGKLRDLHPDLEGQLKELRKHLVESTNEMAPLKVWQLQDLSFQTAARILASPVELALVVMKDLSQNFPTKARAITKTAVSSELRTEVEENQKYFKGTLGLQPGDSALFINGLHMDLDTQDIFSLFDVLRNEARVMEGLHRLGIEGLSLHNVLKLNIQPSEADYAVDIRSPAISWVNNLEVDSRYNSWPSSLQELLRPTFPGVIRQIRKNLHNMVFIVDPAHETTAELMNTAEMFLSNHIPLRIGFIFVVNDSEDVDGMQDAGVAVLRAYNYVAQEVDDYHAFQTLTHIYNKVRTGEKVKVEHVVSVLEKKYPYVEVNSILGIDSAYDRNRKEARGYYEQTGVGPLPVVLFNGMPFEREQLDPDELETITMHKILETTTFFQRAVYLGELPHDQDVVEYIMNQPNVVPRINSRILTAERDYLDLTASNNFFVDDYARFTILDSQGKTAAVANSMNYLTKKGMSSKEIYDDSFIRPVTFWIVGDFDSPSGRQLLYDAIKHQKSSNNVRISMINNPAKEISYENTQISRAIWAALQTQTSNAAKNFITKMAKEGAAEALAAGADIAEFSVGGMDFSLFKEVFESSKMDFILSHAVYCRDVLKLKKGQRAVISNGRIIGPLEDSELFNQDDFHLLENIILKTSGQKIKSHIQQLRVEEDVASDLVMKVDALLSAQPKGDPRIEYQFFEDRHSAIKLRPKEGETYFDVVAVVDPVTREAQRLAPLLLVLAQLINMNLRVFMNCQSKLSDMPLKSFYRYVLEPEISFTSDNSFAKGPIAKFLDMPQSPLFTLNLNTPESWMVESVRTPYDLDNIYLEEVDSVVAAEYELEYLLLEGHCYDITTGQPPRGLQFTLGTSANPVIVDTIVMANLGYFQLKANPGAWILRLRKGRSEDIYRIYSHDGTDSPPDADEVVIVLNNFKSKIIKVKVQKKADMVNEDLLSDGTSENESGFWDSFKWGFTGQKTEEVKQDKDDIINIFSVASGHLYERFLRIMMLSVLKNTKTPVKFWFLKNYLSPTFKEFIPYMANEYNFQYELVQYKWPRWLHQQTEKQRIIWGYKILFLDVLFPLVVDKFLFVDADQIVRTDLKELRDFNLDGAPYGYTPFCDSRREMDGYRFWKSGYWASHLAGRKYHISALYVVDLKKFRKIAAGDRLRGQYQGLSQDPNSLSNLDQDLPNNMIHQVPIKSLPQEWLWCETWCDDASKKRAKTIDLCNNPMTKEPKLEAAVRIVPEWQDYDQEIKQLQIRFQKEKETGALYKEKTKEPSREGPQKREEL

SEQ ID NO: 900985 - protein, 626 aa, Homo sapiens
MINNPAKEISYENTQISRAIWAALQTQTSNAAKNFITKMAKEGAAEALAAGADIAEFSVGGMDFSLFKEVFESSKMDFILSHAVYCRDVLKLKKGQRAVISNGRIIGPLEDSELFNQDDFHLLENIILKTSGQKIKSHIQQLRVEEDVASDLVMKVDALLSAQPKGDPRIEYQFFEDRHSAIKLRPKEGETYFDVVAVVDPVTREAQRLAPLLLVLAQLINMNLRVFMNCQSKLSDMPLKSFYRYVLEPEISFTSDNSFAKGPIAKFLDMPQSPLFTLNLNTPESWMVESVRTPYDLDNIYLEEVDSVVAAEYELEYLLLEGHCYDITTGQPPRGLQFTLGTSANPVIVDTIVMANLGYFQLKANPGAWILRLRKGRSEDIYRIYSHDGTDSPPDADEVVIVLNNFKSKIIKVKVQKKADMVNEDLLSDGTSENESGFWDSFKWGFTGQKTEEVKQDKDDIINIFSVASGHLYERFLRIMMLSVLKNTKTPVKFWFLKNYLSPTFKEFIPYMANEYNFQYELVQYKWPRWLHQQTEKQRIIWGYKILFLDVLFPLVVDKFLFVDADQIVRTDLKELRDFNLDGAPYGYTPFCDSRREMDGYRFWKSGYWASHLAGRKYHIRICPIT

SEQ ID NO: 900986 - protein, 761 aa, Homo sapiens [sequence omitted]

SEQ ID NO: 900987 - protein, 761 aa, Homo sapiens [sequence omitted]

SEQ ID NO: 900988 - protein, 761 aa, Homo sapiens [sequence omitted]

SEQ ID NO: 900989 - protein, 761 aa, Homo sapiens [sequence omitted]

SEQ ID NO: 900990 - protein, 761 aa, Homo sapiens [sequence omitted]

SEQ ID NO: 900991 - protein, 698 aa, Homo sapiens
MINNPAKEISYENTQISRAIWAALQTQTSNAAKNFITKMAKEGAAEALAAGADIAEFSVGGMDFSLFKEVFESSKMDFILSHAVYCRDVLKLKKGQRAVISNGRIIGPLEDSELFNQDDFHLLENIILKTSGQKIKSHIQQLRVEEDVASDLVMKVDALLSAQPKGDPRIEYQFFEDRHSAIKLRPKEGETYFDVVAVVDPVTREAQRLAPLLLVLAQLINMNLRVFMNCQSKLSDMPLKSFYRYVLEPEISFTSDNSFAKGPIAKFLDMPQSPLFTLNLNTPESWMVESVRTPYDLDNIYLEEVDSVVAAEYELEYLLLEGHCYDITTGQPPRGLQFTLGTSANPVIVDTIVMANLGYFQLKANPGAWILRLRKGRSEDIYRIYSHDGTDSPPDADEVVIVLNNFKSKIIKVKVQKKADMVNEDLLSDGTSENESGFWDSFKWGFTGQKTEEVKQDKDDIINIFSVASGHLYERFLRIMMLSVLKNTKTPVKFWFLKNYLSPTFKEFIPYMANEYNFQYELVQYKWPRWLHQQTEKQRIIWGYKILFLDVLFPLVVDKFLFVDADQIVRTDLKELRDFNLDGAPYGYTPFCDSRREMDGYRFWKSGYWASHLAGRKYHISALYVVDLKKFRKIAAGDRLRGQYQGLSQDPNSLSNLDQDLPNNMIHQVPIKSLPQEWLWCETWCDDASKKRAKTIDL

SEQ ID NO: 900992 - protein, 626 aa, Homo sapiens; identical to SEQ ID NO: 900985

SEQ ID NO: 900993 - protein, 928 aa, Homo sapiens
MPPKTPRKTAATAAAAAAEPPAPPPPPPPEEDPEQDSGPEDLPLVRLEFEETEEPDFTALCQKLKIPDHVRERAWLTWEKVSSVDGVLGGYIQKKKELWGICIFIAAVDLDEMSFTFTELQKNIEISVHKFFNLLKEIDTSTKVDNAMSRLLKKYDVLFALFSKLERTCELIYLTQPSSSISTEINSALVLKVSWITFLLAKGEVLQMEDDLVISFQLMLCVLDYFIKLSPPMLLKEPYKTAVIPINGSPRTPRRGQNRSARIAKQLENDTRIIEVLCKEHECNIDEVKNVYFKNFIPFMNSLGLVTSNGLPEVENLSKRYEEIYLKNKDLDARLFLDHDKTLQTDSIDSFETQRTPRKSNLDEEVNVIPPHTPVRTVMNTIQQLMMILNSASDQPSENLISYFNNCTVNPKESILKRVKDIGYIFKEKFAKAVGQGCVEIGSQRYKLGVRLYYRVMESMLKSEEERLSIQNFSKLLNDNIFHMSLLACALEVVMATYSRSTSQNLDSGTDLSFPWILNVLNLKAFDFYKVIESFIKAEGNLTREMIKHLERCEHRIMESLAWLSDSPLFDLIKQSKDREGPTDHLESACPLNLPLQNNHTAADMYLSPVRSPKKKGSTTRVNSTANAETQATSAFQTQKPLKSTSLSLFYKKVYRLAYLRLNTLCERLLSEHPELEHIIWTLFQHTLQNEYELMRDRHLDQIMMCSMYGICKVKNIDLKFKIIVTAYKDLPHAVQETFKRVLIKEEEYDSIIVFYNSVFMQRLKTNILQYASTRPPTLSPIPHIPRSPYKFPSSPLRIPGGNIYISPLKSPYKISEGLPTPTKMTPRSRILVSIGESFGTSEKFQKINQMVCNSDRVLKRSAEGSNPPKPLKKLRFDIEGSDEADGSKHLPGESKFQQKLAEMTSTRTRMQKQKMNDSMDTSNKEEK

SEQ ID NO: 900994 - protein, 103 aa, Homo sapiens
MPPKTPRKTAATAAAAAAEPPAPPPPPPPEEDPEQDSGPEDLPLVRLEFEETEEPDFTALCQKLKIPDHVRERAWLTWEKVSSVDGVLVLRSPVFKPWLTMGN

SEQ ID NO: 900995 - protein, 864 aa, Homo sapiens
SSISTEINSALVLKVSWITFLLAKGGYIQKKKELWGICIFIAAVDLDEMSFTFTELQKNIEISVHKFFNLLKEIDTSTKVDNAMSRLLKKYDVLFALFSKLERTCELIYLTQPSSSISTEINSALVLKVSWITFLLAKGEVLQMEDDLVISFQLMLCVLDYFIKLSPPMLLKEPYKTAVIPINGSPRTPRRGQNRSARIAKQLENDTRIIEVLCKEHECNIDEVKNVYFKNFIPFMNSLGLVTSNGLPEVENLSKRYEEIYLKNKDLDARLFLDHDKTLQTDSIDSFETQRTPRKSNLDEEVNVIPPHTPVRTVMNTIQQLMMILNSASDQPSENLISYFNNCTVNPKESILKRVKDIGYIFKEKFAKAVGQGCVEIGSQRYKLGVRLYYRVMESMLKSEEERLSIQNFSKLLNDNIFHMSLLACALEVVMATYSRSTSQNLDSGTDLSFPWILNVLNLKAFDFYKVIESFIKAEGNLTREMIKHLERCEHRIMESLAWLSDSPLFDLIKQSKDREGPTDHLESACPLNLPLQNNHTAADMYLSPVRSPKKKGSTTRVNSTANAETQATSAFQTQKPLKSTSLSLFYKKVYRLAYLRLNTLCERLLSEHPELEHIIWTLFQHTLQNEYELMRDRHLDQIMMCSMYGICKVKNIDLKFKIIVTAYKDLPHAVQETFKRVLIKEEEYDSIIVFYNSVFMQRLKTNILQYASTRPPTLSPIPHIPRSPYKFPSSPLRIPGGNIYISPLKSPYKISEGLPTPTKMTPRSRILVSIGESFGTSEKFQKINQMVCNSDRVLKRSAEGSNPPKPLKKLRFDIEGSDEADGSKHLPGESKFQQKLAEMTSTRTRMQKQKMNDSMDTSNKEEK

SEQ ID NO: 900996 - protein, 928 aa, Homo sapiens; identical to SEQ ID NO: 900993

SEQ ID NO: 900997 - protein, 913 aa, Homo sapiens
MPPKTPRKTAATAAAAAAEPPAPPPPPPPEEDPEQDSGPEDLPLVRLEFEETEEPDFTALCQKLKIPDHVRERAWLTWEKVSSVDGVLGGYIQKKKELWGICIFIAAVDLDEMSFTFTELQKNIEISVHKFFNLLKEIDTSTKVDNAMSRLLKKYDVLFALFSKLERTCELIYLTQPSSSISTEINSALVLKVSWITFLLAKGEVLQMEDDLVISFQLMLCVLDYFIKLSPPMLLKEPYKTAVIPINGSPRTPRRGQNRSARIAKQLENDTRIIEVLCKEHECNIDEVKNVYFKNFIPFMNSLGLVTSNGLPEVENLSKRYEEIYLKNKDLDARLFLDHDKTLQTDSIDSFETQRTPRKSNLDEEVNVIPPHTPVRTVMNTIQQLMMILNSASDQPSENLISYFNNCTVNPKESILKRVKDIGYIFKEKFAKAVGQGCVEIGSQRYKLGVRLYYRVMESMLKSEEERLSIQNFSKLLNDNIFHMSLLACALEVVMATYSRSTSQNLDSGTDLSFPWILNVLNLKAFDFYKVIESFIKAEGNLTREMIKHLERCEHRIMESLAWLSDSPLFDLIKQSKDREGPTDHLESACPLNLPLQNNHTAADMYLSPVRSPKKKGSTTRVNSTANAETQATSAFQTQKPLKSTSLSLFYKKVYRLAYLRLNTLCERLLSEHPELEHIIWTLFQHTLQNEYELMRDRHLDQIMMCSMYGICKVKNIDLKFKIIVTAYKDLPHAVQETFKRVLIKEEEYDSIIVFYNSVFMQRLKTNILQYASTRPPTLSPIPHIPRSPYKFPSSPLRIPGGNIYISPLKSPYKISEGLPTPTKMTPRSRILVSIGESFGTSEKFQKINQMVCNSDRVLKRSAEGSNPPKPLNKHLPGESKFQQKLAEMTSTRTRMQKQKMNDSMDTSNKEEK

SEQ ID NO: 900998 - protein, 323 aa, Homo sapiens
SVIKSSGIHRFSQAVMLVLLVLSDDATTACHEPDPDGNLPLFHCFIKKVYRLAYLRLNTLCERLLSEHPELEHIIWTLFQHTLQNEYELMRDRHLDQIMMCSMYGICKVKNIDLKFKIIVTAYKDLPHAVQETFKRVLIKEEEYDSIIVFYNSVFMQRLKTNILQYASTRPPTLSPIPHIPRSPYKFPSSPLRIPGGNIYISPLKSPYKISEGLPTPTKMTPRSRILVSIGESFGTSEKFQKINQMVCNSDRVLKRSAEGSNPPKPLKKLRFDIEGSDEADGSKHLPGESKFQQKLAEMTSTRTRMQKQKMNDSMDTSNKEEK

SEQ ID NO: 900999 - protein, 835 aa, Homo sapiens
MPPKTPRKTAATAAAAAAEPPAPPPPPPPEEDPEQDSGPEDLPLVRLEFEETEEPDFTALCQKLKIPDHVRERAWLTWEKVSSVDGVLGGYIQKKKELWGICIFIAAVDLDEMSFTFTELQKNIEISVHKFFNLLKEIDTSTKVDNAMSRLLKKYDVLFALFSKLERTCELIYLTQPSSSISTEINSALVLKVSWITFLLAKGEVLQMEDDLVISFQLMLCVLDYFIKLSPPMLLKEPYKTAVIPINGSPRTPRRGQNRSARIAKQLENDTRIIEVLCKEHECNIDEVKNVYFKNFIPFMNSLGLVTSNGLPEVENLSKRYEEIYLKNKDLDARLFLDHDKTLQTDSIDSFETQRTPRKSNLDEEVNVIPPHTPVRTVMNTIQQLMMILNSASDQPSENLISYFNNCTVNPKESILKRVKDIGYIFKEKFAKAVGQGCVEIGSQRYKLGVRLYYRVMESMLKSEEERLSIQNFSKLLNDNIFHMSLLACALEVVMATYSRSTSQNLDSGTDLSFPWILNVLNLKAFDFYKVIESFIKAEGNLTREMIKHLERCEHRIMESLAWLSDSPLFDLIKQSKDREGPTDHLESACPLNLPLQNNHTAADMYLSPVRSPKKKGSTTRVNSTANAETQATSAFQTQKPLKSTSLSLFYKKVYRLAYLRLNTLCERLLSEHPELEHIIWTLFQHTLQNEYELMRDRHLDQIMMCSMYGICKVKNIDLKFKIIVTAYKDLPHAVQETFKRVLIKEEEYDSIIVFYNSVFMQRLKTNILQYASTRPPTLSPIPHIPRSPYKFPSSPLRIPGGNIYISPLKSPYKISEGLPTPTKMTPRSRCVFSL

SEQ ID NO: 901000 - protein, 610 aa, Homo sapiens
MPPKTPRKTAATAAAAAAEPPAPPPPPPPEEDPEQDSGPEDLPLVRLEFEETEEPDFTALCQKLKIPDHVRERAWLTWEKVSSVDGVLGGYIQKKKELWGICIFIAAVDLDEMSFTFTELQKNIEISVHKFFNLLKEIDTSTKVDNAMSRLLKKYDVLFALFSKLERTCELIYLTQPSSSISTEINSALVLKVSWITFLLAKGEVLQMEDDLVISFQLMLCVLDYFIKLSPPMLLKEPYKTAVIPINGSPRTPRRGQNRSARIAKQLENDTRIIEVLCKEHECNIDEVKNVYFKNFIPFMNSLGLVTSNGLPEVENLSKRYEEIYLKNKDLDARLFLDHDKTLQTDSIDSFETQRTPRKSNLDEEVNVIPPHTPVRTVMNTIQQLMMILNSASDQPSENLISYFNNCTVNPKESILKRVKDIGYIFKEKFAKAVGQGCVEIGSQRYKLGVRLYYRVMESMLKSEEERLSIQNFSKLLNDNIFHMSLLACALEVVMATYSRSTSQNLDSGTDLSFPWILNVLNLKAFDFYKVIESFIKAEGNLTREMIKHLERCEHRIMESLAWLSVILPYPGERNVMQEAKKKLNKQAMMDSHLSLLPLGHVLFVQSHFY

SEQ ID NO: 901001 - protein, 113 aa, Homo sapiens [sequence omitted]

SEQ ID NO: 901002 - protein, 928 aa, Homo sapiens; identical to SEQ ID NO: 900993

SEQ ID NO: 901003 - protein, 721 aa, Homo sapiens
MEDDLVISFQLMLCVLDYFIKLSPPMLLKEPYKTAVIPINGSPRTPRRGQNRSARIAKQLENDTRIIEVLCKEHECNIDEVKNVYFKNFIPFMNSLGLVTSNGLPEVENLSKRYEEIYLKNKDLDARLFLDHDKTLQTDSIDSFETQRTPRKSNLDEEVNVIPPHTPVRTVMNTIQQLMMILNSASDQPSENLISYFNNCTVNPKESILKRVKDIGYIFKEKFAKAVGQGCVEIGSQRYKLGVRLYYRVMESMLKSEEERLSIQNFSKLLNDNIFHMSLLACALEVVMATYSRSTSQNLDSGTDLSFPWILNVLNLKAFDFYKVIESFIKAEGNLTREMIKHLERCEHRIMESLAWLSDSPLFDLIKQSKDREGPTDHLESACPLNLPLQNNHTAADMYLSPVRSPKKKGSTTRVNSTANAETQATSAFQTQKPLKSTSLSLFYKKVYRLAYLRLNTLCERLLSEHPELEHIIWTLFQHTLQNEYELMRDRHLDQIMMCSMYGICKVKNIDLKFKIIVTAYKDLPHAVQETFKRVLIKEEEYDSIIVFYNSVFMQRLKTNILQYASTRPPTLSPIPHIPRSPYKFPSSPLRIPGGNIYISPLKSPYKISEGLPTPTKMTPRSRILVSIGESFGTSEKFQKINQMVCNSDRVLKRSAEGSNPPKPLKKLRFDIEGSDEADGSKHLPGESKFQQKLAEMTSTRTRMQKQKMNDSMDTSNKEEK

SEQ ID NO: 901004 - protein, 928 aa, Homo sapiens; identical to SEQ ID NO: 900993

SEQ ID NO: 901005 - protein, 378 aa, Homo sapiens
MVDPITWNTFLKATQDSPLFDLIKQSKDREGPTDHLESACPLNLPLQNNHTAADMYLSPVRSPKKKGSTTRVNSTANAETQATSAFQTQKPLKSTSLSLFYKKVYRLAYLRLNTLCERLLSEHPELEHIIWTLFQHTLQNEYELMRDRHLDQIMMCSMYGICKVKNIDLKFKIIVTAYKDLPHAVQETFKRVLIKEEEYDSIIVFYNSVFMQRLKTNILQYASTRPPTLSPIPHIPRSPYKFPSSPLRIPGGNIYISPLKSPYKISEGLPTPTKMTPRSRILVSIGESFGTSEKFQKINQMVCNSDRVLKRSAEGSNPPKPLKKLRFDIEGSDEADGSKHLPGESKFQQKLAEMTSTRTRMQKQKMNDSMDTSNKEEK

SEQ ID NO: 901006 - protein, 928 aa, Homo sapiens; identical to SEQ ID NO: 900993

SEQ ID NO: 901007 - protein, 483 aa, Homo sapiens
MPPKTPRKTAATAAAAAAEPPAPPPPPPPEEDPEQDSGPEDLPLVRLEFEETEEPDFTALCQKLKIPDHVRERAWLTWEKVSSVDGVLGGYIQKKKELWGICIFIAAVDLDEMSFTFTELQKNIEISVHKFFNLLKEIDTSTKVDNAMSRLLKKYDVLFALFSKLERTCELIYLTQPSSSISTEINSALVLKVSWITFLLAKGEVLQMEDDLVISFQLMLCVLDYFIKLSPPMLLKEPYKTAVIPINGSPRTPRRGQNRSARIAKQLENDTRIIEVLCKEHECNIDEVKNVYFKNFIPFMNSLGLVTSNGLPEVENLSKRYEEIYLKNKDLDARLFLDHDKTLQTDSIDSFETQRTPRKSNLDEEVNVIPPHTPVRTVMNTIQQLMMILNSASDQPSENLISYFNNCTVNPKESILKRVKDIGYIFKEKFAKAVGQGCVEIGSQRYKLGVRLYYRVMESMLKSEEERLSIQILANFCITIRFR

SEQ ID NO: 901008 - protein, 652 aa, Homo sapiens
MINAQELLTLEDVTVEFTWEEWQLLGPFQKDLYRDVMLEIYSNLLSMGYQVSKPDALSKLERGEEPWTMEDERHSRICPENNEVDDHLQDHLENQRMLKSVEQYHEHNAFGNTASQTKSLCLFRENHDTFELYIKTLKSNLSLVNQNKSCEINNSTKFSGDGKSFLHGNYEELYSAAKFSVSTKANSTKSQVSKHQRTHEIEKNHVCSECGKAFVKKSQLTDHERVHTGEKPYGCTLCAKVFSRKSRLNEHQRIHKREKSFICSECGKVFTMKSRLIEHQRTHTGEKPYICNECGKGFPGKRNLIVHQRNHTGEKSYICSECGKGFTGKSMLIIHQRTHTGEKPYICSECGKGFTTKHYVIIHQRNHTGEKPYICNECGKGFTMKSRMIEHQRTHTGEKPYICSECGKGFPRKSNLIVHQRNHTVEKSYLCSECGKGFTVKSMLIIHQRTHTGEKPYTCSECGKGFPLKSRLIVHQRTHTGEKPYRCSECGKGFIVNSGLMLHQRTHTGEKPYICNECGKGFAFKSNLVVHQRTHTGEKPFMCSECGKGFTMKRYLIVHQQIHTEEKSCICSECGRGFAKETELALHKQVHTGEKPYGCNECGKGFTMKSRLIVHQRTHTGEKPFVCSECRKAFSSKRNLIVHQRTHNGNKP

SEQ ID NO: 901009 - protein, 652 aa, Homo sapiens; identical to SEQ ID NO: 901008

SEQ ID NO: 901010 - protein, 652 aa, Homo sapiens; identical to SEQ ID NO: 901008

SEQ ID NO: 901011 - protein, 652 aa, Homo sapiens; identical to SEQ ID NO: 901008

SEQ ID NO: 901012 - protein, 100 aa, Homo sapiens
STELTRRRSLRTLNSTPQHTHQASARGRVTSSTPNAVAPATHGFGAGLRGDVEVRGAARGVSLGWQTCTPYSVLRSRSGAVFGSLVIHRHPGPHVLPDHS

SEQ ID NO: 901013 - protein, 100 aa, Homo sapiens; identical to SEQ ID NO: 901012

SEQ ID NO: 901014 - protein, 132 aa, Homo sapiens
MNPTSRASTCYRLHLVNSELAILQIDPNNLDSAEQSYAYGITSCNPYLLESISNDEGLRPRCWIRTSRWYQQVKGILSVCCAPGSVQILFYYTLKAKVLEKLRMKPRVVVRVGVETVKRNNREESCPERLME

SEQ ID NO: 901015 - protein, 100 aa, Homo sapiens; identical to SEQ ID NO: 901012

SEQ ID NO: 901016 - protein, 100 aa, Homo sapiens; identical to SEQ ID NO: 901012

SEQ ID NO: 901017 - protein, 100 aa, Homo sapiens; identical to SEQ ID NO: 901012

SEQ ID NO: 901018 - protein, 124 aa, Homo sapiens
MSMTLGYWDIRGLAHAIRLLLEYTDSSYEEKKYTMGDAPDYDRSQWLNEKFKLGLDFPNLPYLIDGAHKITQSNAILCYIARKHNLCGEIRRGEDSCGHFGEPGYGQSPMQLAMSLLQTQTLRN

SEQ ID NO: 901019 - protein, 150 aa, Homo sapiens
DSCFLPQEKLKPEYLQALPEMLKLYSQFLGKQPWFLGDKITFVDFIAYDVLERNQVFEPSCLDAFPNLKDFISRFEGLEKISAYMKSSRFLPRPVFTKMAVWGGSGWTSCRQRSSPSQILDCSRSCPAAYGCPWSGSPKCPHEASPLLSP

SEQ ID NO: 901020 - protein, 124 aa, Homo sapiens; identical to SEQ ID NO: 901018

SEQ ID NO: 901021 - protein, 124 aa, Homo sapiens; identical to SEQ ID NO: 901018

SEQ ID NO: 901022 - protein, 266 aa, Homo sapiens
MSMTLGYWDIRGLAHAIRLLLEYTDSSYEEKKYTMGDGNDTLVSGLCPLTLSGTKQPMVATCGYLCRPPLLELQAVPSLSPGEGVLWPCKAECWGGMLGPLFNWVGCPSELPYTLEALAVWGPEPSAGFFVPEPWDVGLSGQILDPPVSGILPLVPWEGPREGGLGSGEVCFHFFFPTAAPDYDRSQWLNEKFKLGLDFPNLPYLIDGAHKITQSNAILCYIARKHNLCGEIRRGEDSCGHFGEPGYGQSPMQLAMSLLQTQTLRN

SEQ ID NO: 901023 - protein, 218 aa, Homo sapiens
MPMTLGYWNIRGLAHAIRLLLEYTDSSYEEKKYTMGDAPDYDRSQWLNEKFKLGLDFPNLPYLIDGAHKITQSNAILCYIARKHNLCGETEEEKIRVDILENQTMDNHMQLGMICYNPEFEKLKPKYLEELPEKLKLYSEFLGKRPWFAGNKITFVDFLVYDVLDLHRIFEPKCLDAFPNLKDFISRFEGLEKISAYMKSSRFLPRPVFSKMAVWGNK

SEQ ID NO: 901024 - protein, 124 aa, Homo sapiens; identical to SEQ ID NO: 901018

SEQ ID NO: 901025 - protein, 218 aa, Homo sapiens
MPMTLGYWNIRGLAHSIRLLLEYTDSSYEEKKYTMGDAPDYDRSQWLNEKFKLGLDFPNLPYLIDGTHKITQSNAILRYIARKHNLCGESEKEQIREDILENQFMDSRMQLAKLCYDPDFEKLKPKYLEELPEKLKLYSEFLGKRPWFAGNKITFVDFLVYDVLDLHRIFEPKCLDAFPNLKDFISRFEGLEKISAYMKSSRFLPRPVFSKMAVWGNK

SEQ ID NO: 901026 - protein, 103 aa, Homo sapiens
AILCYIARKHNLCGETEEEKIRVDILATSIMSMTLGYWDIRGLAHAIRLLLEYTDSSYEEKKYTMGDAPDYDRSQWLNDHKITQICYSPDFEKLKPEVLGGTP

SEQ ID NO: 901027 - protein, 361 aa, Homo sapiens
MPMILGYWDIRGLAHAIRLLLEYTDSSYEEKKYTMGDGNGTLVFGLCPLTLSWHQATHGGHLWLPLQASPAGAAGCLFPEPLVREPSGLARQNAGVGCWAPCLIGTGVPQGLPETLEALAVWGPEPSAGFFVPEPWDVGLSGQILDPPVSGILPLAPWEGPREGGLGSGEVCFHFFFPTTAPDYDRSQWLNEKFKLGLDFPNLPYLIDGAHKITQSNAILCYIARKHNLCGETEEEKIRVDILENQTMDNHMQLGMICYNPEFEKLKPKYLEELPEKLKLYSEFLGKRPWFAGNKITFVDFLVYDVLDLHRIFEPKCLDAFPNLKDFISRFEGLEKISAYMKSSRFLPRPVFSKMAVWGNK

SEQ ID NO: 901028 - protein, 200 aa, Homo sapiens
MPMILGYWDIRGLAHAIRLLLEYTDSSYEEKKYTMGDAPDYDRSQWLNDHKITQSNAILCYIARKHNLCGETEEEKIRVDILENQTMDNHMQLGMICYNPEFEKLKPKYLEELPEKLKLYSEFLGKRPWFAGNKITFVDFLVYDVLDLHRIFEPKCLDAFPNLKDFISRFEGLEKISAYMKSSRFLPRPVFSKMAVWGNK

SEQ ID NO: 901029 - protein, 218 aa, Homo sapiens; identical to SEQ ID NO: 901023

SEQ ID NO: 901030 - protein, 218 aa, Homo sapiens
MPMTLGYWNIRGLAHSIRLLLEYTDSSYEEKKYTMGDAPDYDRSQWLNEKFKLGLDFPNLPYLIDGTHKITQSNAILRYIARKHNLCGESEKEQIREDILENQFMDSRMQLAKLCYDPDFEKLKPEYLQALPEMLKLYSQFLGKQPWFLGDKITFVDFIAYDVLERNQVFEPSCLDAFPNLKDFISRFEGLEKISAYMKSSRFLPRPVFTKMAVWGNK

SEQ ID NO: 901031 - protein, 323 aa, Homo sapiens
MSMTLGYWDIRGLAHAIRLLLEYTDSSYEEKKYTMGDGNDTLVSGLCPLTLSGTKQPMVATCGYLCRPPLLELQAVPSLSPGEGVLWPCKAECWGGMLGPLFNWVGCPSELPYTLEALAVWGPEPSAGFFVPEPWDVGLSGQILDPPVSGILPLVPWEGPREGGLGSGEVCFHFFFPTAAPDYDRSQWLNEKFKLGLDFPNLPYLIDGAHKITQSNAILCYIARKHNLCGETEEEKIRVDILENQTMDNHMQLGMICYNPEFEKLKPKYLEELPEKLKLYSEFLGKRPWFAGNKGLEKISAYMKSSRFLPRPVFSKMAVWGNK

SEQ ID NO: 901032 - protein, 124 aa, Homo sapiens; identical to SEQ ID NO: 901018

SEQ ID NO: 901033 - protein, 291 aa, Homo sapiens
MSMTLGYWDIRGLAHAIRLLLEYTDSSYEEKKYTMGDGNDTLVSGLCPLTLSGTKQPMVATCGYLCRPPLLELQAVPSLSPGEGVLWPCKAECWGGMLGPLFNWVGCPSELPYTLEALAVWGPEPSAGFFVPEPWDVGLSGQILDPPVSGILPLVPWEGPREGGLGSGEVCFHFFFPTAAPDYDRSQWLNEKFKLGLDFPNLPYLIDGAHKITQSNAILCYIARKHNLCGETEEEKIRVDILENQTMDNHMQLGMICYNPEFGLEKISAYMKSSRFLPRPVFSKMAVWGNK

SEQ ID NO: 901034 - protein, 209 aa, Homo sapiens
MPMTLGYWNIRGLAHSIRLLLEYTDSSYEEKKYTMGDAPDYDRSQWLNEKFKLGLDFPNLPYLIDGTHKITQSNAILRYIARKHNLCGESEKEQIREDILENQFMDSRMQLAKLCYDPDFALPEMLKLYSQFLGKQPWFLGDKITFVDFIAYDVLERNQVFEPSCLDAFPNLKDFISRFEGLEKISAYMKSSRFLPRPVFTKMAVWGNK

SEQ ID NO: 901035 - protein, 151 aa, Homo sapiens
MPMTLGYWNIRGLAHSIRLLLEYTDSSYEEKKYTMGDAPDYDRSQWLNEKFKLGLDFPNLPYLIDGTHKITQSNAILRYIARKHNLCGESEKEQIREDILENQFMDSRMQLAKLCYDPDFVSPPTPLPVSPSLLPVSPFPAEFVSKIDSFW

SEQ ID NO: 901036 - protein, 107 aa, Homo sapiens
MSMTLGYWDIRGLAHAIRLLLEYTDSSYEEKKYTMGDAPDYDRSQWLNEKFKLGLDFPNIRGVRIRSLLPNSSHSWLSTQPLHDVLCPSSFVHVTVFLCQACHERAQ

SEQ ID NO: 901037 - protein, 314 aa, Homo sapiens
MSMTLGYWDIRGLAHAIRLLLEYTDSSYEEKKYTMGDGNDTLVSGLCPLTLSGTKQPMVATCGYLCRPPLLELQAVPSLSPGEGVLWPCKAECWGGMLGPLFNWVGCPSELPYTLEALAVWGPEPSAGFFVPEPWDVGLSGQILDPPVSGILPLVPWEGPREGGLGSGEVCFHFFFPTAAPDYDRSQWLNEKFKLGLDFPNLPYLIDGAHKITQSNAILCYIARKHNLCGETEEEKIRVDILENQTMDNHMQLGMICYNPEFEKLKPKYLEELPEKLKLYSEFLGKRPWFAGNKITFVDFLVYDVLFSSFQGIS

SEQ ID NO: 901038 - protein, 95 aa, Homo sapiens
GLGLSAESAPTSTMPMILGYWDIRGLAHAIRLLLEYTDSSYEEKKYTMGDGNGTLVFGLCPLTLSWHQATHGGHLWLPLQASPAGAAGCLFPEPR

SEQ ID NO: 901039 - protein, 259 aa, Homo sapiens
MPMTLGYWNIRGLAHSIRLLLEYTDSSYEEKKYTMGDAPDYDRSQWLNEKFKLGLDFPNLPYLIDGTHKITQSNAILRYIARKHNLCGESEKEQIREDILENQFMDSRMQLAKLCYDPDFEKLKPEYLQALPEMLKLYSQFLGKQPWFLGDKITFVDFIAYDVLERNQVFEPSCLDAFPNLKDFISRFERGKVYCRLELEKDIWILVVPDQPKEILWSKPEHTEEARHHHGTLFYTERDTLCRKSRDPGWRTCMGPGKD

SEQ ID NO: 901040 - protein, 104 aa, Homo sapiens
GEAGTRGGDGAPLVQSRHKVRDPPSLTRAVGHLSQLAHSIRLLLEYTDSSYEEKKYTMGDASNLGRLGASLGYAPIWLREWGDAAQMGQPWLKYKAGSGAPQIP

SEQ ID NO: 901041 - protein, 124 aa, Homo sapiens; identical to SEQ ID NO: 901018

SEQ ID NO: 901042 - protein, 204 aa, Homo sapiens
MSMTLGYWDIRGLAHAIRLLLEYTDSSYEEKKYTMGDAPDYDRSQWLNEKFKLGLDFPNIRGVRIRSLLPNSSHSWLSTQPLHDVLCPSSFVHVTVFLCQACHERAQWVPGLPSALAYGKGMLGSLLAQLSFPGFPSIQLPYLIDGAHKITQSNAILCYIARKHNLCGEIRRGEDSCGHFGEPGYGQSPMQLAMSLLQTQTLRN

SEQ ID NO: 901043 - protein, 124 aa, Homo sapiens; identical to SEQ ID NO: 901018

SEQ ID NO: 901044 - protein, 360 aa, Homo sapiens
MSMTLGYWDIRGLAHAIRLLLEYTDSSYEEKKYTMGDGNDTLVSGLCPLTLSGTKQPMVATCGYLCRPPLLELQAVPSLSPGEGVLWPCKAECWGGMLGPLFNWVGCPSELPYTLEALAVWGPEPSAGFFVPEPWDVGLSGQILDPPVSGILPLVPWEGPREGGLGSGEVCFHFFFPTAAPDYDRSQWLNEKFKLGLDFPNLPYLIDGAHKITQSNAILCYIARKHNLCGETEEEKIRVDILENQTMDNHMQLGMICYNPEFEKLKPKYLEELPEKLKLYSEFLGKRPWFAGNKITFVDFLVYDVLDLHRIFEPKCLDAFPNLKDFISRFEGLEKISAYMKSSRFLPRPVFSKMAVWGNK

SEQ ID NO: 901045 - protein, 218 aa, Homo sapiens [sequence omitted]

SEQ ID NO: 901046 - protein, 218 aa, Homo sapiens
MPMILGYWDIRGLAHAIRLLLEYTDSSYEEKKYTMGDAPDYDRSQWLNEKFKLGLDFPNLPYLIDGAHKITQSNAILCYIARKHNLCGETEEEKIRVDILENQTMDNHMQLGMICYNPEFEKLKPKYLEELPEKLKLYSEFLGKRPWFAGNKITFVDFLVYDVLDLHRIFEPKCLDAFPNLKDFISRFEGLEKISAYMKSSRFLPRPVFSKMAVWGNK

SEQ ID NO: 901047 - protein, 151 aa, Homo sapiens; identical to SEQ ID NO: 901035

SEQ ID NO: 901048 - protein, 162 aa, Homo sapiens
MPMTLGYWNIRGLAHSIRLLLEYTDSSYEEKKYTMGDAPDYDRSQWLNEKFKLGLDFPNLPYLIDGTHKITQSNAILRYIARKHNLYLCPKLIPSGEFLVLLTLRMKPRSYTVSVTVLKDGVSGVCSFRCSDVSAVSSFRWVCGLADFRGEAADLRSECYSS

SEQ ID NO: 901049 - protein, 181 aa, Homo sapiens
MPMILGYWDIRGLAHAIRLLLEYTDSSYEEKKYTMGDAPDYDRSQWLNEKFKLGLDFPNLPYLIDGAHKITQSNAILCYIARKHNLCGETEEEKIRVDILENQTMDNHMQLGMICYNPEFEKLKPKYLEELPEKLKLYSEFLGKRPWFAGNKGLEKISAYMKSSRFLPRPVFSKMAVWGNK

SEQ ID NO: 901050 - protein, 218 aa, Homo sapiens; identical to SEQ ID NO: 901023

SEQ ID NO: 901051 - protein, 218 aa, Homo sapiens; identical to SEQ ID NO: 901023

SEQ ID NO: 901052 - protein, 282 aa, Homo sapiens
MSMTLGYWDIRGLAHAIRLLLEYTDSSYEEKKYTMGDGNDTLVSGLCPLTLSGTKQPMVATCGYLCRPPLLELQAVPSLSPGEGVLWPCKAECWGGMLGPLFNWVGCPSELPYTLEALAVWGPEPSAGFFVPEPWDVGLSGQILDPPVSGILPLVPWEGPREGGLGSGEVCFHFFFPTAAPDYDRSQWLNEKFKLGLDFPNLPYLIDGAHKITQSNAILCYIARKHNLCGETEEEKIRVDILENQTMDNHMQLGMICYNPEFEKLKPKYLEELPEKLNMQAL

SEQ ID NO: 901053 - protein, 122 aa, Homo sapiens
AILCYIARKHNLCGETEEEKIRVDILATSIMSMTLGYWDIRGLAHAIRLLLEYTDSSYEEKKYTMGDAPDYDRSQWLNEKFKLGLDFPNLPYLIDGAHKITQSNAILCYIEKLKPEVLGGTP

SEQ ID NO: 901054 - protein, 356 aa, Homo sapiens
WSYTQVRRTGGGGVETVQGPGVSWVHPDGVGVQIDTITPEIRALYNVLAKVKRERDEYKRRWEEELAKRMNLQTMVDTLQEAAQEADAIQEEMNEKIERLKAELVVFKGLMSDPMTDLDTKIQEKAMKVDMDICRRIDITAKLCDVAQQRNSEDVSKIFQVVPKKKERKVASDDDISEQDGEVNRFSDDEVGSMNITDEMKRMFNQLRETFDFDDDCDSLTWEENEDTLLLWEDFTNCNPTIDLQGEQEENLGNLIHETESFFKTRDKEYQETIGQIELELATAKSDMNRHLHEYMEMCSMKRGLDVQMETCRRLIKGSADRNSPSPSSVASSDSGSTDEIQDEFEREADVEPMVS

SEQ ID NO: 901055 - protein, 356 aa, Homo sapiens; identical to SEQ ID NO: 901054

SEQ ID NO: 901056 - protein, 167 aa, Homo sapiens
PDEPDSSRTCYPPDEPDRRETFDFDDDCDSLTWEENEDTLLLWEDFTNCNPTIDLQGEQEENLGNLIHETESFFKTRDKEYQETIGQIELELATAKSDMNRHLHEYMEMCSMKRGLDVQMETCRRLIKGSADRNSPSPSSVASSDSGSTDEIQDEFEREADVEPMVS

SEQ ID NO: 901057 - protein, 356 aa, Homo sapiens; identical to SEQ ID NO: 901054

SEQ ID NO: 901058 - protein, 356 aa, Homo sapiens; identical to SEQ ID NO: 901054

SEQ ID NO: 901059 - protein, 349 aa, Homo sapiens
WSYTQVRRTGGGGVETVQGPGVSWVHPDGVGVQIDTITPEIRALYNVLAKVKRERDEYKRRWEEELAKRMNLQTMVDTLQEAAQEADAIQEEMNEKIERLKAELVVFKGLMSDPMTDLDTKIQEKAMKVDMDICRRIDITAKLCDVAQQRNSEDVSKIFQVVPKKKERKVASDDDISEQDGEVNRFSDDEVGSMNITDEMKRMFNQLRETFDFDDDCDSLTWEENEDTLLLWEDFTNCNPTIDLQGEQEENLGNLIHETESFFKTRDKEYQETIGQIELELATAKSDMNRHLHEYMEMCSMKRGLDVQMETCRRLIKGSADRNSPSPSSVASSVPQRGPLERPQQQLPH

SEQ ID NO: 901060 - protein, 131 aa, Homo sapiens
CLLFSHALWCHPHRRETFDFDDDCDSLTWEENEDTLLLWEDFTNCNPTIDLQGECPAFSGGASLTGSLILSFACSLGSPAKLSLLCPQQEENLGNLIHETESFFKTRDKEYQETIGQIEVRARDVEPTREA

SEQ ID NO: 901061 - protein, 356 aa, Homo sapiens; identical to SEQ ID NO: 901054

SEQ ID NO: 901062 - protein, 188 aa, Homo sapiens
PLRYLLEKQLLQQQSFRMVNSLLFGEMVSVASSDSGSTDEIQDEFEREADVEPMVQNEDTLLLWEDFTNCNPTIDLQGEQEENLGNLIHETESFFKTRDKEYQETIGQIELELATAKSDMNRHLHEYMEMCSMKRGLDVQMETCRRLIKGSADRNSPSPSSVASSDSGSTDEIQDEFEREADVEPMVS

SEQ ID NO: 901063 - protein, 356 aa, Homo sapiens; identical to SEQ ID NO: 901054

SEQ ID NO: 901064 - protein, 356 aa, Homo sapiens; identical to SEQ ID NO: 901054

SEQ ID NO: 901065 - protein, 290 aa, Homo sapiens
AGLDARSKMAANVFPFRDARAAPDPVLEAGPVAHGPLPVPLVLDNGSFQVRAGWACPGQDPGPEPRLQFRAVCARGRGGARGASGPQVGNALGSLEPLRWMLRSPFDRNVPVNLELQELLLDYSFQHLGVSSQGCVDHPIVLTEAVCNPLYSRQMMSELLFECYGIPKVAYGIDSLFSFYHNKPKNSMCSGLIISSGYQCTHVLPILEGRLDAKNCKRINLGGSQAAGYLQRLLQLKYPGHLAAITLSRMEEILHEHSYIAEDYVEGIQEDVCLQLLGVVYLVFLKLLPA

SEQ ID NO: 901066 - protein, 615 aa, Homo sapiens
AGLDARSKMAANVFPFRDARAAPDPVLEAGPVAHGPLPVPLVLDNGSFQVRAGWACPGQDPGPEPRLQFRAVCARGRGGARGASGPQVGNALGSLEPLRWMLRSPFDRNVPVNLELQELLLDYSFQHLGVSSQGCVDHPIVLTEAVCNPLYSRQMMSELLFECYGIPKVAYGIDSLFSFYHNKPKNSMCSGLIISSGYQCTHVLPILEGRLDAKNCKRINLGGSQAAGYLQRLLQLKYPGHLAAITLSRMEEILHEHSYIAEDYVEELHKWRCPDYYENNVHKMQLPFSSKLLGSTLTSEEKQERRQQQLRRLQELNARRREEKLQLDQERLDRLLYVQELLEDGQMDQFHKALIELNMDSPEELQSYIQKLSIAVEQAKQKILQAEVNLEVDVVDSKPETPDLEQLEPSLEDVESMNDFDPLFSEETPGVEKPVTTVQPVFNLAAYHQLFVGTERIRAPEIIFQPSLIGEEQAGIAETLQYILDRYPKDIQEMLVQNVFLTGGNTMYPGMKARMEKELLEMRPFRSSFQVQLASNPVLDAWYGARDWALNHLDDNEVWITRKEYEEKGGEYLKEHCASNIYVPIRLPKQASRSSDAQASSKGSAAGGGGAGEQA

SEQ ID NO: 901067 - protein, 283 aa, Homo sapiens
  misc_feature (258)..(258): Xaa can be any naturally occurring amino acid
  misc_feature (264)..(264): Xaa can be any naturally occurring amino acid
  misc_feature (271)..(271): Xaa can be any naturally occurring amino acid
AGLDARSKMAANVFPFRDARAAPDPVLEAGPVAHGPLPVPLVLDNGSFQVRAGWACPGQDPGPEPRLQFRAVCARGRGGARGASGPQVGNALGSLEPLRWMLRSPFDRNVPVNLELQELLLDYSFQHLGVSSQGCVDHPIVLTEAVCNPLYSRQMMSELLFECYGIPKVAYGIDSLFSFYHNKPKNSMCSGLIISSGYQCTHVLPILEGRLDAKNCKRINLGGSQAAGYLQRLLQLKYPGHLAAITPPARHGKKNSAXKHKPSXPLKELMXGKKFTPKLAGVP

SEQ ID NO: 901068 - protein, 105 aa, Homo sapiens
AVLRLELLRVDRSAGPARGPGPWRRRRLCCGDLTFPAPSRKALTFVGGDPPLLWPCQESHPYPGAPLTLDLLGQRQREGPEQEEKKGLPSRGTAWTKAHRGGGAQ

SEQ ID NO: 901069 - protein, 105 aa, Homo sapiens; identical to SEQ ID NO: 901068

SEQ ID NO: 901070 - protein, 196 aa, Homo sapiens
MEIPVPVQPSWLRRASAPLPGLSAPGRLFDQRFGEGLLEAELAALCPTTLAPYYLRAPSVALPVAQVPTDPGHFSVLLDVKHFSPEEIAVKVVGEHVEVHARHEERPDEHGFVAREFHRRYRLPPGVDPAAVTSALSPEGVLSIQAAPAPREPPQAPSIKADLTPPSQMSRVRQGLSSHPLLDSALTSILDTALIT

SEQ ID NO: 901071 - protein, 160 aa, Homo sapiens
MEIPVPVQPSWLRRASAPLPGLSAPGRLFDQRFGEGLLEAELAALCPTTLAPYYLRAPSVALPVAQVPTDPGHFSVLLDVKHFSPEEIAVKVVGEHVEVHARHEERPDEHGFVAREFHRRYRLPPGVDPAAVTSALSPEGVLSIQAAPASAQAPPPAAAK

SEQ ID NO: 901072 - protein, 160 aa, Homo sapiens; identical to SEQ ID NO: 901071

SEQ ID NO: 901073 - protein, 160 aa, Homo sapiens; identical to SEQ ID NO: 901071

SEQ ID NO: 901074 - protein, 189 aa, Homo sapiens
MEIPVPVQPSWLRRASAPLPGLSAPGRLFDQRFGEGLLEAELAALCPTTLAPYYLRAPSVALPVAQVPTDPGHFSVLLDVKHFSPEEIAVKVVGEHVEVHARHEERPVSRGVGRGWSGYAAAGPEGRGRSSLPPLQDEHGFVAREFHRRYRLPPGVDPAAVTSALSPEGVLSIQAAPASAQAPPPAAAK

SEQ ID NO: 901075 - protein, 160 aa, Homo sapiens; identical to SEQ ID NO: 901071

SEQ ID NO: 901076 - protein, 118 aa, Homo sapiens
IPDAAKATDGRWMKWLSQLGWGPVSCCAPGAGARSGISRIAAAHSPPPSAPPSADDNIKTPAFHPQRMISRHLPSVSSLPFHPQLHPQQMIISRYLLSVCGFRFHHQPMIISQTTFRA

SEQ ID NO: 901077 - protein, 821 aa, Homo sapiens
MVKLSIVLTPQFLSHDQGQLTKELQQHVKSVTCPCEYLRKVINTLADHHHRGTDFGGSPWLHVIIAFPTSYKVVITLWIVYLWVSLLKTIFWSRNGHDGSTDVQQRAWRSNRRRQEGLRSICMHTKKRVSSFRGNKIGLKDVITLRRHVETKVRAKIRKRKVTTKINHHDKINGKRKTARKQKMFQRAQELRRRAEDYHKCKIPPSARKALCNWVRMAAAEHRHSSGLPYWPYLTAETLKNRMGHQPPPPTQQHSITDNSLSLKTPPECLLTPLPPSADDNLKTPPECVLTPLPPSADDNLKTPPECVLTPLPPSADDNLKTPPECLLTPLPPSADDNLKTPPECLTDDNLKTPSERQLTPLPPSAPPLSSTLQQMIISRHLPSVCGGRFHPQQMIISRHLPSVSSLPFHPQLHPQQMIISRHLPSVCGGRFHPQRMIISRHLPSVSSLPFHPQLHPQQMIISRHLPSVCGERLRGPLPPSADDNLKTPSERQLTPLPPSAPPSADDNIKTPAERLRGPLPPSADDNLKTPSERQLTPLPPSAPPSADDNIKTPAERLRGPLPPSADDNLKTPSERQLTPLPPSAPPSADDNIKTPAERLRGPLPPSADDNLKTPSERQLTPLPPSAPPSADDNIKTPAERLRGPLPPSADDNLKTPSERQLTPLPPSAPPSADDNIKTPAERLRGPLPPSADDNLKTPPLATQEAEAEKPRKPKRQRAAEMEPPPEPKRRRVGDVEPSRKPKRRRAADVEPSSPEPKRRRVGDVEPSRKPKRRRAADVEPSSPEPKRRRVGDVEPSRKPKRRRAADVEPSLPEPKRRRLS

SEQ ID NO: 901078 - protein, 420 aa, Homo sapiens
MVKLSIVLTPQFLSHDQGQLTKELQQHVKSVTCPCEYLRKVINTLADHHHRGTDFGGSPWLHVIIAFPTSYKVVITLWIVYLWVSLLKTIFWSRNGHDGSTDVQQRAWRSNRRRQEGLRSICMHTKKRVSSFRGNKIGLKDVITLRRHVETKVRAKIRKRKVTTKINHHDKINGKRKTARKQKMFQRAQELRRRAEDYHKCKIPPSARKALCNWVRMAAAEHRHSSGLPYWPYLTAETLKNRMGHQPPPPTQQHSITDNSLSLKTPPECLLTPLPPSADDNLKTPPECVLTPLPPSADDNLKTPPECVLTPLPPSADDNLKTPPECLLTPLPPSADDNLKTPPECSHYSPPPSAPPSADDNIKTPAFHPQRMISRHLPSVSSLPFHPQLHPQQMIISRHLPSVCGGRFHPQPMIISRHLP

SEQ ID NO: 901079 - protein, 715 aa, Homo sapiens
YRARPGVERERLRSICMHTKKRVSSFRGNKIGLKDVITLRRHVETKVRAKIRKRKVTTKINHHDKINGKRKTARKQKMFQRAQELRRRAEDYHKCKIPPSARKALCNWVRMAAAEHRHSSGLPYWPYLTAETLKNRMGHQPPPPTQQHSITDNSLSLKTPPECLLTPLPPSADDNLKTPPECVLTPLPPSADDNLKTPPECVLTPLPPSADDNLKTPPECLLTPLPPSADDNLKTPPECLTDDNLKTPSERQLTPLPPSAPPLSSTLQQMIISRHLPSVCGGRFHPQQMIISRHLPSVSSLPFHPQLHPQQMIISRHLPSVCGGRFHPQRMIISRHLPSVSSLPFHPQLHPQQMIISRHLPSVCGERLRGPLPPSADDNLKTPSERQLTPLPPSAPPSADDNIKTPAERLRGPLPPSADDNLKTPSERQLTPLPPSAPPSADDNIKTPAERLRGPLPPSADDNLKTPSERQLTPLPPSAPPSADDNIKTPAERLRGPLPPSADDNLKTPSERQLTPLPPSAPPSADDNIKTPAERLRGPLPPSADDNLKTPSERQLTPLPPSAPPSADDNIKTPAERLRGPLPPSADDNLKTPPLATQEAEAEKPRKPKRQRAAEMEPPPEPKRRRVGDVEPSRKPKRRRAADVEPSSPEPKRRRVGDVEPSRKPKRRRAADVEPSSPEPKRRRVGDVEPSRKPKRRRAADVEPSLPEPKRRRLS

SEQ ID NO: 901080 - protein, 663 aa, Homo sapiens
MVKLSIVLTPQFLSHDQGQLTKELQQHVKSVTCPCEYLRKVINTLADHHHRGTDFGGSPWLHVIIAFPTSYKVVITLWIVYLWVSLLKTIFWSRNGHDGSTDVQQRAWRSNRRRQEGLRSICMHTKKRVSSFRGNKIGLKDVITLRRHVETKVRAKIRKRKVTTKINHHDKINGKRKTARKQKMFQRAQELRRRAEDYHKCKIPPSARKALCNWVRMAAAEHRHSSGLPYWPYLTAETLKNRMGHQPPPPTQQHSITDNSLSLKTPPECLLTPLPPSADDNLKTPPECVLTPLPPSADDNLKTPPECVLTPLPPSADDNLKTPPECLLTPLPPHPQLYPQLHPQRNDNLKTRAECLLHPLPPSADDNLKTPSERQLTPLPPSAPPSADDNIKTPAERQRLRGPLPPSADDNLKTPSERQLTPLPPSAPPSADDNIKTPAERLRGPLPPSADDNLKTPSERQLTPLPPSAPPSADDNIKTPAERLRGPLPPSADDNLKTPSERQLTPLPPSAPPSADDNIKTPAERLRGPLPPSADDNLKTPPLATQEAEAEKPRKPKRQRAAEMEPPPEPKRRRVGDVEPSRKPKRRRAADVEPSSPEPKRRRVGDVEPSRKPKRRRAADVEPSSPEPKRRRVGDVEPSRKPKRRRAADVEPSLPEPKRRRLS

SEQ ID NO: 901081 - protein, 218 aa, Homo sapiens
MVKLSIVLTPQFLSHDQGQLTKELQQHVKSVTCPCEYLRKVINTLADHHHRGTDFGGSPWLHVIIAFPTSYKVVITLWIVYLWVSLLKTIFWSRNGHDGSTDVQQRAWRSNRRRQEGLRSICMHTKKRVSSFRGNKIGLKDVITLRRHVETKVRAKIRKRKVTTKINHHDKINGKRKTARKQSPLLQERLFATGSEWRQRSIVILQDCPTGPTSQLKL

SEQ ID NO: 901082 - protein, 676 aa, Homo sapiens
MTKSMERGRPPENRSTTSFKRTMPVYKPSCFCPVKHGKCFNVRKSCGGEQRTTTNAKSPLLEDRLFSNWVRMAAAEHRHSSGLPYWPYLTAETLKNRMGHQPPPPTQQHSITDNSLSLKTPPECLLTPLPPSADDNLKTPPECVLTPLPPSADDNLKTPPECVLTPLPPSADDNLKTPPECLLTPLPPSADDNLKTPPECLTDDNLKTPSERQLTPLPPSAPPLSSTLQQMIISRHLPSVCGGRFHPQQMIISRHLPSVSSLPFHPQLHPQQMIISRHLPSVCGGRFHPQRMIISRHLPSVSSLPFHPQLHPQQMIISRHLPSVCGERLRGPLPPSADDNLKTPSERQLTPLPPSAPPSADDNIKTPAERLRGPLPPSADDNLKTPSERQLTPLPPSAPPSADDNIKTPAERLRGPLPPSADDNLKTPSERQLTPLPPSAPPSADDNIKTPAERLRGPLPPSADDNLKTPSERQLTPLPPSAPPSADDNIKTPAERLRGPLPPSADDNLKTPSERQLTPLPPSAPPSADDNIKTPAERLRGPLPPSADDNLKTPPLATQEAEAEKPRKPKRQRAAEMEPPPEPKRRRVGDVEPSRKPKRRRAADVEPSSPEPKRRRVGDVEPSRKPKRRRAADVEPSSPEPKRRRVGDVEPSRKPKRRRAADVEPSLPEPKRRRLS

SEQ ID NO: 901083 - protein, 821 aa, Homo sapiens; identical to SEQ ID NO: 901077

SEQ ID NO: 901084 - protein, 793 aa, Homo sapiens
MVKLSIVLTPQFLSHDQGQLTKELQQHVKSVTCPCEYLRKVINTLADHHHRGTDFGGSPWLHVIIAFPTSYKVVITLWIVYLWVSLLKTIFWSRNGHDGSTDVQQRAWRSNRRRQEGLRSICMHTKKRVSSFRGNKIGLKDVITLRRHVETKVRAKIRKRKVTTKINHHDKINGKRKTARKQKMFQRAQELRRRAEDYHKCKIPPSARKALCNWVRMAAAEHRHSSGLPYWPYLTAETLKNRMGHQPPPPTQQHSITDNSLSLKTPPECLLTPLPPSADDNLKTPPECVLTPLPPSADDNLKTPPECVLTPLPPSADDNLKTPPECLLTPLPPSADDNLKTPPECLTDDNLKTPSERQLTPLPPSAPPLSSTLQQMIISRHLPSVCGGRFHPQQMIISRHLPSVSSLPFHPQLHPQQMIISRHLPSVCGGRFHPQRMIISRHLPSVSSLPFHPQLHPQQMIISRHLPSVCGERLRGPLPPSADDNLKTPSERQLTPLPPSAPPSADDNIKTPAERLRGPLPPSADDNLKTPSERQLTPLPPSAPPSADDNIKTPAERLRGPLPPSADDNLKTPSERQLTPLPPSAPPSADDNIKTPAERLRGPLPPSADDNLKTPSERQLTPLPPSAPPSADDNIKTPAERLRGPLPPSADDNLKTPSERQLTPLPPSAPPSADDNIKTPAERLRGPLPPSADDNLKTPPLATQEAEAEKPRKPKRQRAAEMEPSSPEPKRRRVGDVEPSRKPKRRRAADVEPSSPEPKRRRVGDVEPSRKPKRRRAADVEPSLPEPKRRRLS

SEQ ID NO: 901085 - protein, 807 aa, Homo sapiens
MVKLSIVLTPQFLSHDQGQLTKELQQHVKSVTCPCEYLRKVINTLADHHHRGTDFGGSPWLHVIIAFPTSYKVVITLWIVYLWVSLLKTIFWSRNGHDGSTDVQQRAWRSNRRRQEGLRSICMHTKKRVSSFRGNKIGLKDVITLRRHVETKVRAKIRKRKVTTKINHHDKINGKRKTARKQKMFQRAQELRRRAEDYHKCKIPPSARKALCNWVRMAAAEHRHSSGLPYWPYLTAETLKNRMGHQPPPPTQQHSITDNSLSLKTPPECLLTPLPPSADDNLKTPPECVLTPLPPSADDNLKTPPECVLTPLPPSADDNLKTPPECLLTPLPPSADDNLKTPPECLTDDNLKTPSERQLTPLPPSAPPLSSTLQQMIISRHLPSVCGGRFHPQQMIISRHLPSVSSLPFHPQLHPQQMIISRHLPSVCGGRFHPQRMIISRHLPSVSSLPFHPQLHPQQMIISRHLPSVCGERLRGPLPPSADDNLKTPSERQLTPLPPSAPPSADDNIKTPAERLRGPLPPSADDNLKTPSERQLTPLPPSAPPSADDNIKTPAERLRGPLPPSADDNLKTPSERQLTPLPPSAPPSADDNIKTPAERLRGPLPPSADDNLKTPSERQLTPLPPSAPPSADDNIKTPAERLRGPLPPSADDNLKTPSERQLTPLPPSAPPSADDNIKTPAERLRGPLPPSADDNLKTPPLATQEAEAEKPRKPKRQRAAEMEPPPEPKRRRVGDVEPSRKPKRRRAADVEPSSPEPKRRRAADVEPSSPEPKRRRVGDVEPSRKPKRRRAADVEPSLPEPKRRRLS

SEQ ID NO: 901086 - protein, 807 aa, Homo sapiens; identical to SEQ ID NO: 901085

SEQ ID NO: 901087 - protein, 792 aa, Homo sapiens
MVKLSIVLTPQFLSHDQGQLTKELQQHVKSVTCPCEYLRKVINTLADHHHRGTDFGGSPWLHVIIAFPTSYKVVITLWIVYLWVSLLKTIFWSRNGHDGSTDVQQRAWRSNRRRQEGLRSICMHTKKRVSSFRGNKIGLKDVITLRRHVETKVRAKIRKRKVTTKINHHDKINGKRKTARKQKMFQRAQELRRRAEDYHKCKIPPSARKALCNWVRMAAAEHRHSSGLPYWPYLTAETLKNRMGHQPPPPTQQHSITDNSLSLKTPPECLLTPLPPSADDNLKTPPECVLTPLPPSADDNLKTPPECVLTPLPPSADDNLKTPPECLLTPLPPSADDNLKTPPECLTDDNLKTPSERQLTPLPPSAPPLSSTLQQMIISRHLPSVCGGRFHPQQMIISRHLPSVSSLPFHPQLHPQQMIISRHLPSVCGGRFHPQRMIISRHLPSVSSLPFHPQLHPQQMIISRHLPSVCGERLRGPLPPSADDNLKTPSERQLTPLPPSAPPSADDNIKTPAERLRGPLPPSADDNLKTPSERQLTPLPPSAPPSADDNIKTPAERLRGPLPPSADDNLKTPSERQLTPLPPSAPPSADDNIKTPAERLRGPLPPSADDNLKTPSERQLTPLPPSAPPSADDNIKTPAERLRGPLPPSADDNLKTPSERQLTPLPPSAPPSADDNIKTPAERLRGPLPPSADDNLKTPPLATQEAEAEKPRKPKRQRAAEMEPPPEPKRRRVGDVEPSRKPKRRRAADVEPSSPEPKRRRVGDVEPSRKPKRRRAADVEPSSPEPKRRRLS

SEQ ID NO: 901088 - protein, 478 aa, Homo sapiens
MVKLSIVLTPQFLSHDQGQLTKELQQHVKSVTCPCEYLRKVINTLADHHHRGTDFGGSPWLHVIIAFPTSYKVVITLWIVYLWVSLLKTIFWSRNGHDGSTDVQQRAWRSNRRRQEGLRSICMHTKKRVSSFRGNKIGLKDVITLRRHVETKVRAKIRKRKVTTKINHHDKINGKRKTARKQKMFQRAQELRRRAEDYHKCKIPPSARKALCNWVRMAAAEHRHSSGLPYWPYLTAETLKNRMGHQPPPPTQQHSITDNSLSLKTPPECLLTPLPPSADDNLKTPPECVLTPLPPSADDNLKTPPECVLTPLPPSADDNLKTPPECLLTPLPPSADDNLKTPPECLTDDNLKTPSERQLTPLPPSAPPSADDNIKTPAERLRGPLPPSADDNLKTPSERQLTPYSPPPSAPPSADDNIKTPAFHPQRMISRHLPSVSSLPFHPQLHPQQMIISRYLLSVCGFRFHHQPMIISQTTFRA

SEQ ID NO: 901089 - protein, 140 aa, Homo sapiens
TFPPLALQVRMAAAEHRHSSGLPYWPYLTAETLKNRMGHQPPPPTQQHSITDNSLSLKTPPECLLTPLPPSADDNLKTPPECVLTPLPPSADDNLKTPPECVLTPLPPSADDNLKTPPECLLTPLPPSADDNLKTPPECS

SEQ ID NO: 901090 - protein, 124 aa, Homo sapiens
MVKLSIVLTPQFLSHDQGQLTKELQQHVKSVTCPCEYLRKVINTLADHHHRGTDFGGSPWLHVIIAFPTSYKVVITLWIVYLWVSILTFCRGILVITNKNKLYKTIHISGLHYEYVVLPKKSGK

SEQ ID NO: 901091 - protein, 817 aa, Homo sapiens
MVKLSIVLTPQFLSHDQGQLTKELQQHVKSVTCPCEYLRKVINTLADHHHRGTDFGGSPWLHVIIAFPTSYKVVITLWIVYLWVSLLKTIFWSRNGHDGSTDVQQRAWRSNRRRQEGLRSICMHTKKRVSSFRGNKIGLKDVITLRRHVETKVRAKIRKRKVTTKINHHDKINGKRKTARKQKMFQRAQELRRRAEDYHKCKIPPSARKALCNWVRMAAAEHRHSSGLPYWPYLTAETLKNRMGHQPPPPTQQHSITDNSLSLKTPPECLLTPLPPSADDNLKTPPECVLTPLPPSADDNLKTPPECVLTPLPPSADDNLKTPPECLLTPLPPSADDNLKTPPECLTDDNLKTPSERQLTPLPPSAPPLSSTLQQMIISRHLPSVCGGRFHPQQMIISRHLPSVSSLPFHPQLHPQQMIISRHLPSVCGGRFHPQRMIISRHLPSVSSLPFHPQLHPQQMIISRHLPSVCGERLRGPLPPSADDNLKTPSERQLTPLPPSAPPSADDNIKTPAERLRGPLPPSADDNLKTPSERQLTPLPPSAPPSADDNIKTPAERLRGPLPPSADDNLKTPSERQLTPLPPSAPPSADDNIKTPAERLRGPLPPSADDNLKTPSERQLTPLPPSADDNIKTPAERLRGPLPPSADDNLKTPSERQLTPLPPSAPPSADDNIKTPAERLRGPLPPSADDNLKTPPLATQEAEAEKPRKPKRQRAAEMEPPPEPKRRRVGDVEPSRKPKRRRAADVEPSSPEPKRRRVGDVEPSRKPKRRRAADVEPSSPEPKRRRVGDVEPSRKPKRRRAADVEPSLPEPKRRRLS

SEQ ID NO: 901092 - protein, 597 aa, Homo sapiens
MVKLSIVLTPQFLSHDQGQLTKELQQHVKSVTCPCEYLRKVINTLADHHHRGTDFGGSPWLHVIIAFPTSYKVVITLWIVYLWVSLLKTIFWSRNGHDGSTDVQQRAWRSNRRRQEGLRSICMHTKKRVSSFRGNKIGLKDVITLRRHVETKVRAKIRKRKVTTKINHHDKINGKRKTARKQKMFQRAQELRRRAEDYHKCKIPPSARKALCNWVRMAAAEHRHSSGLPYWPYLTAETLKNRMGHQPPPPTQQHSITDNSLSLKTPPECLLTPLPPSADDNLKTPPECVLTPLPPSADDNLKTPPECVLTPLPPSADDNLKTPPECLLTPLPPSADDNLKTPPECLTDDNLKTPSERQLTPLPPSAPPSADDNIKTPAERLRGPLPPSADDNLKTPSERQLTPYSPPPSAPPSADDEYQDTCLPPSADDLKTPSERQLTPLPPSAPPSADDNIKTPAERLRGPLPPSADDNLKTPPLATQEAEAEKPRKPKRQRAAEMEPPPEPKRRRVGDVEPSRKPKRRRAADVEPSSPEPKRRRVGDVEPSRKPKRRRAADVEPSSPEPKRRRVGDVEPSRKPKRRRAADVEPSLPEPKRRRLS

SEQ ID NO: 901093 - protein, 587 aa, Homo sapiens
MVKLSIVLTPQFLSHDQGQLTKELQQHVKSVTCPCEYLRKVINTLADHHHRGTDFGGSPWLHVIIAFPTSYKVVITLWIVYLWVSLLKTIFWSRNGHDGSTDVQQRAWRSNRRRQEGLRSICMHTKKRVSSFRGNKIGLKDVITLRRHVETKVRAKIRKRKVTTKINHHDKINGKRKTARKQKMFQRAQELRRRAEDYHKCKIPPSARKALCNWVRMAAAEHRHSSGLPYWPYLTAETLKNRMGHQPPPPTQQHSITDNSLSLKTPPECLLTPLPPSADDNLKTPPECVLTPLPPSADDNLKTPPECVLTPLPPSADDNLKTPPECLLTPLPPSADDNLKTPPECSHHPQLYPQLHPQRNDNLKTRAECLLHPLPPSADDNLKTPSERQLTPLPPSAPPSADDNIKTPAERLPPSADDNLKTPSERQLTPLPPSAPPSADDNIKTPAERLRGPLPPSADDNLKTPPLATQEAEAEKPRKPKRQRAAEMEPPPEPKRRRVGDVEPSRKPKRRRAADVEPSSPEPKRRRVGDVEPSRKPKRRRAADVEPSSPEPKRRRVGDVEPSRKPKRRRAADVEPSLPEPKRRRLS

SEQ ID NO: 901094 - protein, 857 aa, Homo sapiens
MVKLSIVLTPQFLSHDQGQLTKELQQHVKSVTCPCEYLRKVINTLADHHHRGTDFGGSPWLHVIIAFPTSYKVVITLWIVYLWVSLLKTIFWSRNGHDGSTDVQQRAWRSNRRRQEGLRSICMHTKKRVSSFRGNKIGLKDVITLRRHVETKVRAKIRKRKVTTKINHHDKINGKRKTARKQKMFQRAQELRRRAEDYHKCKEGASSLQLQDSSVLMQMMPRPLDSLNIQFLMCWLFQIPPSARKALCNWVRMAAAEHRHSSGLPYWPYLTAETLKNRMGHQPPPPTQQHSITDNSLSLKTPPECLLTPLPPSADDNLKTPPECVLTPLPPSADDNLKTPPECVLTPLPPSADDNLKTPPECLLTPLPPSADDNLKTPPECLTDDNLKTPSERQLTPLPPSAPPLSSTLQQMIISRHLPSVCGGRFHPQQMIISRHLPSVSSLPFHPQLHPQQMIISRHLPSVCGGRFHPQRMIISRHLPSVSSLPFHPQLHPQQMIISRHLPSVCGERLRGPLPPSADDNLKTPSERQLTPLPPSAPPSADDNIKTPAERLRGPLPPSADDNLKTPSERQLTPLPPSAPPSADDNIKTPAERLRGPLPPSADDNLKTPSERQLTPLPPSAPPSADDNIKTPAERLRGPLPPSADDNLKTPSERQLTPLPPSAPPSADDNIKTPAERLRGPLPPSADDNLKTPSERQLTPLPPSAPPSADDNIKTPAERLRGPLPPSADDNLKTPPLATQEAEAEKPRKPKRQRAAEMEPPPEPKRRRVGDVEPSRKPKRRRAADVEPSSPEPKRRRVGDVEPSRKPKRRRAADVEPSSPEPKRRRVGDVEPSRKPKRRRAADVEPSLPEPKRRRLS

SEQ ID NO: 901095 - protein, 821 aa, Homo sapiens; identical to SEQ ID NO: 901077

SEQ ID NO: 901096 - protein, 821 aa, Homo sapiens; identical to SEQ ID NO: 901077

SEQ ID NO: 901097 - protein, 821 aa, Homo sapiens; identical to SEQ ID NO: 901077

SEQ ID NO: 901098 - protein, 649 aa, Homo sapiens
MVKLSIVLTPQFLSHDQGQLTKELQQHVKSVTCPCEYLRKVINTLADHHHRGTDFGGSPWLHVIIAFPTSYKVVITLWIVYLWVSLLKTIFWSRNGHDGSTDVQQRAWRSNRRRQEGLRSICMHTKKRVSSFRGNKIGLKDVITLRRHVETKVRAKIRKRKVTTKINHHDKINGKRKTARKQKMFQRAQELRRRAEDYHKCKIPPSARKALCNWVRMAAAEHRHSSGLPYWPYLTAETLKNRMGHQPPPPTQQHSITDNSLSLKTPPECLLTPLPPSADDNLKTPPECVLTPLPPSADDNLKTPPECVLTPLPPSADDNLKTPPECLLTPLPPSADDNLKTPPECSHHPQLYPQLHPQRNDNLKTRAECLLHPLPPSADDNLKTPSERQLTPLPPSAPPSADDNIKTPAERQRLRGPLPPSADDNLKTPSERQLTPLPPSAPPSADDNIKTPAERLRGPLPPSADDNLKTPSERQLTPLPPSAPPSADDNIKTPAERLRGPLPPSADDNLKTPSERQLTPLPPSAPPSADDNIKTPAERLRGPLPPSADDNLKTPPLATQEAEAEKPRKPKRQRAAEMEPSSPEPKRRRVGDVEPSRKPKRRRAADVEPSSPEPKRRRVGDVEPSRKPKRRRAADVEPSLPEPKRRRLS

SEQ ID NO: 901099 - protein, 552 aa, Homo sapiens
MVKLSIVLTPQFLSHDQGQLTKELQQHVKSVTCPCEYLRKVINTLADHHHRGTDFGGSPWLHVIIAFPTSYKVVITLWIVYLWVSLLKTIFWSRNGHDGSTDVQQRAWRSNRRRQEGLRSICMHTKKRVSSFRGNKIGLKDVITLRRHVETKVRAKIRKRKVTTKINHHDKINGKRKTARKQKMFQRAQELRRRAEDYHKCKIPPSARKALCNWVRMAAAEHRHSSGLPYWPYLTAETLKNRMGHQPPPPTQQHSITDNSLSLKTPPECLLTPLPPSADDNLKTPPECVLTPLPPSADDNLKTPPECVLTPLPPSADDNLKTPPECLLTPLPPSADDNLKTPPECLTDDNLKTPSERQLTPLPPSAPPLSSTLQQMIISRHLPSVCGGRFHPQQMIISRHLPSVSSLPFHPQLHPQQMIISRHLPSVCGGRFHPQRMIISRHLPSVSSLPFHPQLHPQQMIISRHLPSVCGERLRGPLPPSADDNLKTPSERQLTPLPPSAPPSADDNIKTPAERLRGPLPPSADDNHQQPGAADDYVRRRRPDVRGGSRSS

SEQ ID NO: 901100 - protein, 182 aa, Homo sapiens
MVKLSIVLTPQFLSHDQGQLTKELQQHVKSVTCPCEYLRKVINTLADHHHRGTDFGGSPWLHVIIAFPTSYKVVITLWIVYLWVSLLKTIFWSRNGHDGSTDVQQRAWRSNRRRQEGLRSICMHTKKRVSSFRGNKIGLKDVITLRRHVETKVRAKIRKRKVTTKINHHDKINGKRKTARKQ

SEQ ID NO: 901101 - protein, 1512 aa, Homo sapiens
MVSEKSHLGNPQEPVQEEPKTRLLSMTVRRGPRSLPPIPSTSRTGFAEFSMRGRMREKLQAARSKAESALLQEIPTPRPRRLRSPSKKELETEFGTEPGKEVERTQQEVDSQSYSRVKFHDSARKIKPKPQVPPGFPSAEEAYNFFTFNFDPEPEGSEEKPKARHRAGTNQEEEEGEEEEPPAQGGGKEMDEEELLNGDDAEDFLLGLDHVADDFVAVRPADYESIHDRLQMEREMLFIPSRQTVPTYKKLPENVQPRFLEDEGLYTGVRPEVARTNQNIMENRLLMQDPERRWFGDDGRILALPNPIKPFPSRPPVLTQEQSIKAELETLYKKAVKYVHSSQHVIRSGDPPGNFQLDIDISGLIFTHHPCFSREHVLAAKLAQLYDQYLARHQRNKAKFLTDKLQALRNAVQTGLDPEKPHQSLDTIQKTINEYKSEIRQTRKFRDAEQEKDRTLLKTIIKVWKEMKSLREFQRFTNTPLKLVLRKEKADQKADEEAYEAEIQAEISELLEEHTEEYAQKMEEYRTSLQQWKAWRKVQRAKKKKRKQAAEEHPGDEIAEPYPEEDLVKPSPPEPTDRAVIEQEVRERAAQSRRRPWEPTLVPELSLAGSVTPNDQCPRAEVSRREDVKKRSVYLKVLFNNKEVSRTVSRPLGADFRVHFGQIFNLQIVNWPESLTLQVYETVGHSSPTLLAEVFLPIPETTVVTGRAPTEEVEFSSNQHVTLDHEGVGSGVPFSFEADGSNQLTLMTSGKVSHSVAWAIGENGIPLIPPLSQQNIGFRSALKKADAISSIGTSGLTDMKKLAKWAAESKLDPNDPNNAPLMQLISVATSGESYVPDFFRLEQLQQEFNFVSDQELNRSKRFRLLHLRSQEVPEFRNYKQVPVYDREIMEKVFQDYEKRLRDRNVIETKEHIDTHRAIVAKYLQQVRESVINRFLIAKQYFLLADMIVEEEVPNISILGLSLFKLAEQKRPLRPRRKGRKKVTAQNLSDGDIKLLVNIVRAYDIPVRKPAVSKFQQPSGSSRMFSEKHAASPSTYSPTHNADYPLGQVLVRPFVEVSFQRTVCHTTTAEGPNPSWNEELELPFRAPNGDYSTASLQSVKDVVFINIFDEVLHDVLEDDRERGSGIHTRIERHWLGCVKMPFSTIYFQARFESQEDEKLLQATEKFQAECALKFPNRQCLTTVIDISGKTVFITRYLKPLNPPQELLNVYPNNLQATAELVARYVSLIPFLPDTVSFGGICDLWSTSDQFLDLLAGDEEEHAVLLCNYFLSLGKKAWLLMGNAIPEGPTAYVLTWEQGRYLIWNPCSGHFYGQFDTFCPLKNVGCLIGPDNIWFNIQRYESPLRINFDVTRPKLWKSFFSRSLPYPGLSSVQPEELIYQRSDKAAAAELQDRIEKILKEKIMDWRPRHLTRWNRYCTSTLRHFLPLLEKSQGEDVEDDHRAELLKQLGDYRFSGFPLHMPYSEVKPLIDAVYSTGVHNIDVPNVEFALAVYIHPYPKNVLSVWIYVASLIRNR

SEQ ID NO: 901102 - protein, 1091 aa, Homo sapiens
MNPREEKVKIITEEFIENDEDADMGRQNKNSKVRRQPRKKQPPTAVPKEMVSEKSHLGNPQEPVQEEPKTRLLSMTVRRGPRSLPPIPSTSRTGFAEFSMRGRMREKLQAARSKAESALLQEIPTPRPRRLRSPSKKELETEFGTEPGKEVERTQQEVDSQSYSRVKFHDSARKIKPKPQVPPGFPSAEEAYNFFTFNFDPEPEGSEEKPKARHRAGTNQEEEEGEEEEPPAQGGGKEMDEEELLNGDDAEDFLLGLDHVADDFVAVRPADYESIHDRLQMEREMLFIPSRQTVPTYKKLPENVQPRFLEDEGLYTGVRPEVARTNQNIMENRLLMQDPERRWFGDDGRILALPNPIKPFPSRPPVLTQEQSIKAELETLYKKAVKYVHSSQHVIRSGDPPGNFQLDIDISGLIFTHHPCFSREHVLAAKLAQLYDQYLARHQRNKAKFLTDKLQALRNAVQTGLDPEKPHQSLDTIQKTINEYKSEIRQTRKFRDAEQEKDRTLLKTIIKVWKEMKSLREFQRFTNTPLKLVLRKEKADQKADEEAYEAEIQAEISELLEEHTEEYAQKMEEYRTSLQQWKAWRKVQRAKKKKRKQAAEEHPGDEIAEPYPEEDLVKPSPPEPTDRAVIEQEVRERAAQSRRRPWEPTLVPELSLAGSVTPNDQCPRAEVSRREDVKKRSVYLKVLFNNKEVSRTVSRPLGADFRVHFGQIFNLQIVNWPESLTLQVYETVGHSSPTLLAEVFLPIPETTVVTGRAPTEEVEFSSNQHVTLDHEGVGSGVPFSFEADGSNQLTLMTSGKVSHSVAWAIGENGIPLIPPLSQQNIGFRSALKKADAISSIGTSGLTDMKKLAKWAAESKLDPNDPNNAPLMQLISVATSGESYVPDFFRLEQLQQEFNFVSDQELNRSKRFRLLHLRSQEVPEFRNYKQVPVYDREIMEKVFQDYEKRLRDRNVIETKEHIDTHRAIVAKYLQQLKEKIMDWRPRHLTRWNRYCTSTLRHFLPLLEKSQGEDVEDDHRAELLKQLGDYRFSGFPLHMPYSEVKPLIDAVYSTGVHNIDVPNVEFALAVYIHPYPKNVLSVWIYVASLIRNR

SEQ ID NO: 901103 - protein, 111 aa, Homo sapiens
MNPREEKVKIITEEFIENDEDADMGRQNKNSKVRRQPRKKQPPTAVPKEMVSEKSHLGNPQEPVQEEPKTRLLSMTVRRGPRRELVVKKSLGRPGTVTHVCNPSTLEGRGG

SEQ ID NO: 901104 - protein, 276 aa, Homo sapiens
MNPREEKVKIITEEFIENDEDADMGRQNKNSKVRRQPRKKQPPTAVPKEMVSEKSHLGNPQEPVQEEPKTRLLSMTVRRGPRSLPPIPSTSRTGFAEFSMRGRMREKLQAARSKAESALLQEIPTPRPRRLRSPSKKELETEFGTEPGKEVERTQQEVDSQSYSRVKFHDSARKIKPKPQVPPGFPSAEEAYNFFTFNFDPEPEGSEEKPKARHRAGTNQEEEEGEEEEPPAQGGGKEMVFNIRMVMRCGWRARRKKLMSLQERKWLRRNLPPPGE

SEQ ID NO: 901105 - protein, 536 aa, Homo sapiens
MNPREEKVKIITEEFIENDEDADMGRQNKNSKVRRQPRKKQPPTAVPKEMVSEKSHLGNPQEPVQEEPKTRLLSMTVRRGPRSLPPIPSTSRTGFAEFSMRGRMREKLQAARSKAESALLQEIPTPRPRRLRSPSKKELETEFGTEPGKEVERTQQEVDSQSYSRVKFHDSARKIKPKPQVPPGFPSAEEAYNFFTFNFDPEPEGSEEKPKARHRAGTNQEEEEGEEEEPPAQGGGKEMDEEELLNGDDAEDFLLGLDHVADDFVAVRPADYESIHDRLQMEREMLFIPSRQTVPTYKKLPENVQPRFLEDEGLYTGVRPEVARTNQNIMENRLLMQDPERRWFGDDGRILALPNPIKPFPSRPPVLTQEQSIKAELETLYKKAVKYVHSSQHVIRSGDPPGNFQLDIDISGLIFTHHPCFSREHVLAAKLAQLYDQYLARHQRNKAKFLTDKLQALRNAVQTGLDPEKPHQSLDTIQKTINEYKSEIRQTRKFRDAEQEKDRTLLKTIIKVWKEMKSLREFQRFTNTPLKLVLRK

SEQ ID NO: 901106 - protein, 124 aa, Homo sapiens
LLFNIMQDEEELLNGDDAEDFLLGLDHVADDFVAVRPADYESIHDRLQMEREMLFIPSRQTGTCSFYFLVQLRHRHLPCHEIWLVYKDASSPELIPVSNLTIKKYLQTNKKNTTWKNIHSTNTY

SEQ ID NO: 901107 - protein, 1601 aa, Homo sapiens
MNPREEKVKIITEEFIENDEDADMGRQNKNSKVRRQPRKKQPPTAVPKEMVSEKSHLGNPQEPVQEEPKTRLLSMTVRRGPRSLPPIPSTSRTGFAEFSMRGRMREKLQAARSKAESALLQEIPTPRPRRLRSPSKKELETEFGTEPGKEVERTQQEVDSQSYSRVKFHDSARKIKPKPQVPPGFPSAEEAYNFFTFNFDPEPEGSEEKPKARHRAGTNQEEEEGEEEEPPAQGGGKEMDEEELLNGDDAEDFLLGLDHVADDFVAVRPADYESIHDRLQMEREMLFIPSRQTVPTYKKLPENVQPRFLEDEGLYTGVRPEVARTNQNIMENRLLMQDPERRWFGDDGRILALPNPIKPFPSRPPVLTQEQSIKAELETLYKKAVKYVHSSQHVIRSGDPPGNFQLDIDISGLIFTHHPCFSREHVLAAKLAQLYDQYLARHQRNKAKFLTDKLQALRNAVQTGLDPEKPHQSLDTIQKTINEYKSEIRQTRKFRDAEQEKDRTLLKTIIKVWKEMKSLREFQRFTNTPLKLVLRKEKADQKADEEAYEAEIQAEISELLEEHTEEYAQKMEEYRTSLQQWKAWRKVQRAKKKKRKQAAEEHPGDEIAEPYPEEDLVKPSPPEPTDRAVIEQEVRERAAQSRRRPWEPTLVPELSLAGSVTPNDQCPRAEVSRREDVKKRSVYLKVLFNNKEVSRTVSRPLGADFRVHFGQIFNLQIVNWPESLTLQVYETVGHSSPTLLAEVFLPIPETTVVTGRAPTEEVEFSSNQHVTLDHEGVGSGVPFSFEADGSNQLTLMTSGKVSHSVAWAIGENGIPLIPPLSQQNIGFRSALKKADAISSIGTSGLTDMKKLAKWAAESKLDPNDPNNAPLMQLISVATSGESYVPDFFRLEQLQQEFNFVSDQELNRSKRFRLLHLRSQEVPEFRNYKQVPVYDREIMEKVFQDYEKRLRDRNVIETKEHIDTHRAIVAKYLQQVRESVINRFLIAKQYFLLADMIVEEEVPNISILGLSLFKLAEQKRPLRPRRKGRKKVTAQNLSDGDIKLLVNIVRAYDIPVRKPAVSKFQQPSGSSRMFSEKHAASPSTYSPTHNADYPLGQVLVRPFVEVSFQRTVCHTTTAEGPNPSWNEELELPFRAPNGDYSTASLQSVKDVVFINIFDEVLHDVLEDDRERGSGIHTRIERHWLGCVKMPFSTIYFQARIDGTFKIDIPPVLLGYSKERNMILEREVLILSEAESEGSYITLFITIEPQLVPGESIREKFESQEDEKLLQATEKFQAECALKFPNRQCLTTVIDISGKTVFITRYLKPLNPPQELLNVYPNNLQATAELVARYVSLIPFLPDTVSFGGICDLWSTSDQFLDLLAGDEEEHAVLLCNYFLSLGKKAWLLMGNAIPEGPTAYVLTWEQGRYLIWNPCSGHFYGQFDTFCPLKNVGCLIGPDNAQAMEIFLFKKPSIPGLSSVQPEELIYQRSDKAAAAELQDRIEKILKEKIMDWRPRHLTRWNRYCTSTLRHFLPLLEKSQGEDVEDDHRAELLKQLGDYRFSGFPLHMPYSEVKPLIDAVYSTGVHNIDVPNVEFALAVYIHPYPKNVLSVWIYVASLIRNR

SEQ ID NO: 901108 - protein, 111 aa, Homo sapiens; identical to SEQ ID NO: 901103

SEQ ID NO: 901109 - protein, 106 aa, Homo sapiens
MMRMQTWEDRIRTQRFEDSQERNRQKPTPFSRACWQILPHLSAGVPLLGWEHPVQGKSFQATNCCPQGNGVRKIPPWQPPGACAGGAQDPPPEYDSPERPTERAGC

SEQ ID NO: 901110 - protein, 114 aa, Homo sapiens
MMRMQTWEDRIRTQRFEDSQERNRQKPTPFSRACWQILPHLSAGVPLLGWEHPVQGKSFQATNCCPQGNGVRKIPPWQPPGACAGGAQDPPPEYDSPERPTEELVVKKSLGLQA

SEQ ID NO: 901111 - protein, 473 aa, Homo sapiens
GGSGKPRSELRVVAMAASGAVEPGPPGAAVAPSPAPAPPPAPDHLFRPISAEDEEQQPTEIESLCMNCYCNGMTRLLLTKIPFFREIIVSSFSCEHCGWNNTEIQSAGRIQDQGVRYTLSVRALEDMNREVVKTDSAATRIPELDFEIPAFSQKGALTTVEGLITRAISGLEQDQPARRANKDATAERIDEFIVKLKELKQVASPFTLIIDDPSGNSFVENPHAPQKDDALVITHYNRTRQQEEMLGLQEEAPAEKPEEEDLRNEVLQFSTNCPECNAPAQTNMKLVQIPHFKEVIIMATNCENCGHRTNEVKSGGAVEPLGTRITLHITDASDMTRDLLKSETCSVEIPELEFELGMAVLGGKFTTLEGLLKDIRELVTKNPFTLGDSSNPGQTERLQEFSQKMDQIIEGNMKAHFIMDDPAGNSYLQNVYAPEDDPEMKVERYKRTFDQNEELGLNDMKTEGYEAGLAPQR

SEQ ID NO: 901112 - protein, 490 aa, Homo sapiens
GGSGKPRSELRVVAMAASGAVEPGPPGAAVAPSPAPAPPPAPDHLFRPISAEDEEQQPTEIESLCMNCYCNGMTRLLLTKIPFFREIIVSSFSCEHCGWNNTEIQSAGRIQDQGVRYTLSVRALEDMNREVVKTDSAATRIPELDFEIPAFSQKGALTTVEGLITRAISGLEQDQPARRANKDATAERIDEFIVKLKELKQVASPFTLIIDDPSGNSFVENPHAPQKDDALVITHYNRTRQQEEMLGLQEEAPAEKPEEEDLRNEVLQFSTNCPECNAPAQTNMKLVHGGLVRLEVDFLNIRFPEIPHFKEVIIMATNCENCGHRTNEVKSGGAVEPLGTRITLHITDASDMTRDLLKSETCSVEIPELEFELGMAVLGGKFTTLEGLLKDIRELVTKNPFTLGDSSNPGQTERLQEFSQKMDQIIEGNMKAHFIMDDPAGNSYLQNVYAPEDDPEMKVERYKRTFDQNEELGLNDMKTEGYEAGLAPQR

SEQ ID NO: 901113 - protein, 457 aa, Homo sapiens
GGSGKPRSELRVVAMAASGAVEPGPPGAAVAPSPAPAPPPAPDHLFRPISAEDEEQQPTEIESLCMNCYCNGMTRLLLTKIPFFREIIVSSFSCEHCGWNNTEIQSAGRIQDQGVRYTLSVRALEDMNREVVKTDSAATRIPELDFEIPAFSQKGALTTVEGLITRAISGLEQDQPARRANKDATAERIDEFIVKLKELKQVASPFTLIIDDPSGNSFVENPHAPQKDDALVITHYNRTRQQEEMLGLQVLQFSTNCPECNAPAQTNMKLVQIPHFKEVIIMATNCENCGHRTNEVKSGGAVEPLGTRITLHITDASDMTRDLLKSETCSVEIPELEFELGMAVLGGKFTTLEGLLKDIRELVTKNPFTLGDSSNPGQTERLQEFSQKMDQIIEGNMKAHFIMDDPAGNSYLQNVYAPEDDPEMKVERYKRTFDQNEELGLNDMKTEGYEAGLAPQR

SEQ ID NO: 901114 - protein, 468 aa, Homo sapiens
PGYFITAWRSVLSYVSGACTSQASVAPDASLGTRASPDHLFRPISAEDEEQQPTEIESLCMNCYCNGMTRLLLTKIPFFREIIVSSFSCEHCGWNNTEIQSAGRIQDQGVRYTLSVRALEDMNREVVKTDSAATRIPELDFEIPAFSQKGALTTVEGLITRAISGLEQDQPARRANKDATAERIDEFIVKLKELKQVASPFTLIIDDPSGNSFVENPHAPQKDDALVITHYNRTRQQEEMLGLQEEAPAEKPEEEDLRNEVLQFSTNCPECNAPAQTNMKLVQIPHFKEVIIMATNCENCGHRTNEVKSGGAVEPLGTRITLHITDASDMTRDLLKSETCSVEIPELEFELGMAVLGGKFTTLEGLLKDIRELVTKNPFTLGDSSNPGQTERLQEFSQKMDQIIEGNMKAHFIMDDPAGNSYLQNVYAPEDDPEMKVERYKRTFDQNEELGLNDMKTEGYEAGLAPQR

SEQ ID NO: 901115 - protein, 347 aa, Homo sapiens [sequence omitted]

SEQ ID NO: 901116 - protein, 82 aa, Homo sapiens
MTRLLLTKIPFFREIIVSSFSCEHCGWNNTEIQSAGRIQDQGVRYTLSVRALEVRGPQSRYLSILERDSVLGSELWSRRSDL

SEQ ID NO: 901117 - protein, 473 aa, Homo sapiens; identical to SEQ ID NO: 901111

SEQ ID NO: 901118 - protein, 429 aa, Homo sapiens
GGSGKPRSELRVVAMAASGAVEPGPPGAAVAPSPAPAPPPAPDHLFRPISAEDEEQQPTEIESLCMNCYCNGMTRLLLTKIPFFREIIVSSFSCEHCGWNNTEIQSAGRIQDQGVRYTLSVRALEDMNREVVKTDSAATRIPELDFEIPAFSQKGALTTVEGLITRAISGLEQDQPARRANKDATAERIDEFIVKLKELKQVASPFTLIIDDPSGNSFVENPHAPQKDDALVITHYNRTRQQEEMLGLQEEAPAEKPEEEDLRNEVLQFSTNCPECNAPAQTNMKLVQIPHFKEVIIMATNCENCGHRTNEVKSGGAVEPLGTRITLHITDASDMTRDLLKSETCSVEIPELEFELGMAVLGGKFTTLEGLLKDIRELVTKNPFTLGDSSNPGQTERLQEFSQKMDQIIEGNMSPLYYGCPTTEICRAT

SEQ ID NO: 901119 - protein, 467 aa, Homo sapiens
MNLLIMDKWYHMLERHQWPPGAAVAPSPAPAPPPAPDHLFRPISAEDEEQQPTEIESLCMNCYCNGMTRLLLTKIPFFREIIVSSFSCEHCGWNNTEIQSAGRIQDQGVRYTLSVRALEDMNREVVKTDSAATRIPELDFEIPAFSQKGALTTVEGLITRAISGLEQDQPARRANKDATAERIDEFIVKLKELKQVASPFTLIIDDPSGNSFVENPHAPQKDDALVITHYNRTRQQEEMLGLQEEAPAEKPEEEDLRNEVLQFSTNCPECNAPAQTNMKLVQIPHFKEVIIMATNCENCGHRTNEVKSGGAVEPLGTRITLHITDASDMTRDLLKSETCSVEIPELEFELGMAVLGGKFTTLEGLLKDIRELVTKNPFTLGDSSNPGQTERLQEFSQKMDQIIEGNMKAHFIMDDPAGNSYLQNVYAPEDDPEMKVERYKRTFDQNEELGLNDMKTEGYEAGLAPQR

SEQ ID NO: 901120 - protein, 175 aa, Homo sapiens
GGSGKPRSELRVVAMAASGAVEPGPPGAAVAPSPAPAPPPAPDHLFRPISAEDEEQQPTEIESLCMNCYCNGMTRLLLTKIPFFREIIVSSFSCEHCGWNNTEIQSAGRIQDQGVRYTLSVRALEDMNREVVKTDSAATRIPELDFEIPAFSQKGALTTVEGLITRSGVFRDPLN

SEQ ID NO: 901121 - protein, 227 aa, Homo sapiens
  misc_feature (225)..(225): Xaa can be any naturally occurring amino acid
GRGRGLLLLSFRRLRRALRRTSRLSRAAPPLAAPPPPPLLRHRLPPPEQSARAPAGSVMATRSPGVVISDDEPGYDLDLFCIPNHYAEDLERVFIPHGLIMDRTERLARDVMKEMGGHHIVALCVLKGGYKFFADLLDYIKALNRNSDRSIPMTVDFIRLKSYCNDQSTGDIKVIGGDDLSTLTGKNVIDVEDIMTLAKQADFAFLVSIYPRSSRNCRWTPEVGXAS

SEQ ID NO: 901122 - protein, 276 aa, Homo sapiens
GRGRGLLLLSFRRLRRALRRTSRLSRAAPPLAAPPPPPLLRHRLPPPEQSARAPAGSVMATRSPGVVISDDEPGYDLDLFCIPNHYAEDLERVFIPHGLIMDRTERLARDVMKEMGGHHIVALCVLKGGYKFFADLLDYIKALNRNSDRSIPMTVDFIRLKSYCNDQSTGDIKVIGGDDLSTLTGKNVLIVEDIIDTGKTMQTLLSLVRQYNPKMVKVASLLVKRTPRSVGYKPDFVGFEIPDKFVVGYALDYNEYFRDLNHVCVISETGKAKYKA

SEQ ID NO: 901123 - protein, 309 aa, Homo sapiens
GVVISDDEPGYDLDLFCIPNHYAEDLERVFIPHGLIMDRTERLARDVMKEMGGHHIVALCVLKGGYKFFADLLDYIKALNRNSDRSIPMTVDFIRLKSYCISDDEPGYDLDLFCIPNHYAEDLERVFIPHGLIMDRTERLARDVMKEMGGHHIVALCVLKGGYKFFADLLDYIKALNRNSDRSIPMTVDFIRLKSYCNDQSTGDIKVIGGDDLSTLTGKNVLIVEDIIDTGKTMQTLLSLVRQYNPKMVKVASLLVKRTPRSVGYKPDFVGFEIPDKFVVGYALDYNEYFRDLNHVCVISETGKAKYKA

SEQ ID NO: 901124 - protein, 222 aa, Homo sapiens
GRGRGLLLLSFRRLRRALRRTSRLSRAAPPLAAPPPPPLLRHRLPPPEQSARAPAGSVMATRSPGVVISDDEPGYDLDLFCIPNHYAEDLERVFIPHGLIMDRTERLARDVMKEMGGHHIVALCVLKGGYKFFADLLDYIKALNRNSDRSIPMTVDFIRLKSYCNDQSTGDIKVIGGDDLSTLTGKNVLIVEDIIDTGKTMQTLLSLVRQYNPKMVKVARYV

SEQ ID NO: 901125 - protein, 276 aa, Homo sapiens; identical to SEQ ID NO: 901122

SEQ ID NO: 901126 - protein, 276 aa, Homo sapiens; identical to SEQ ID NO: 901122

SEQ ID NO: 901127 - protein, 187 aa, Homo sapiens
AGTSVEGLYVTYHCNQDALMRVGNRARRVSTLPLCVLKGGYKFFADLLDYIKALNRNSDRSIPMTVDFIRLKSYCNDQSTGDIKVIGGDDLSTLTGKNVLIVEDIIDTGKTMQTLLSLVRQYNPKMVKVASLLVKRTPRSVGYKPDFVGFEIPDKFVVGYALDYNEYFRDLNHVCVISETGKAKYKA

SEQ ID NO: 901128 - protein, 606 aa, Homo sapiens
MKGATTNICYNVLDRNVHEKKLGDKVAFYWEGNEPGETTQITYHQLLVQVCQFSNVLRKQGIQKGDRVAIYMPMIPELVVAMLACARIGALHSIVFAGFSSESLCERILDSSCSLLITTDAFYRGEKLVNLKELADEALQKCQEKGFPVRCCIVVKHLGRAELGMGDSTSQSPPIKRSCPDVQISWNQGIDLWWHELMQEAGDECEPEWCDAEDPLFILYTSGSTGKPKGVVHTVGGYMLYVATTFKYVFDFHAEDVFWCTADIGWITGHSYVTYGPLANGATSVLFEGIPTYPDVNRLWSIVDKYKVTKFYTAPTAIRLLMKFGDEPVTKHSRASLQVLGTVGEPINPEAWLWYHRVVGAQRCPIVDTFWQTETGGHMLTPLPGATPMKPGSATFPFFGVAPAILNESGEELEGEAEGYLVFKQPWPGIMRTVYGNHERFETTYFKKFPGYYVTGDGCQRDQDGYYWITGRIDDMLNVSGHLLSTAEVESALVEHEAVAEAAVVGHPHPVKGECLYCFVTLCDGHTFSPKLTEELKKQIREKIGPIATPDYIQNAPGLPKTRSGKIMRRVLRKIAQNDHDLGDMSTVADPSVISHLFSHRCLTIQ

SEQ ID NO: 901129 - protein, 169 aa, Homo sapiens
MGDSTSQSPPIKRSCPDVQISWNQGIDLWWHELMQEAGDECEPEWCDAEDPLFILYTSGSTGKPKGVVHTVGGYMLYVATTFKYVFDFHAEDVFWCTADIGWITGHSYVTYGPLANGATSVLCGGIPPYSGREPAVGPCGPFTGGPVFHNGPRPSLVMKVGDYLFPSIP

SEQ ID NO: 901130 - protein, 666 aa, Homo sapiens
MEICEGKEIEDMSSEEGENLSWFQEFWGDIAKEFYWKTPCPGPFLRYNFDVTKGKIFIEWMKGATTNICYNVLDRNVHEKKLGDKVAFYWEGNEPGETTQITYHQLLVQVCQFSNVLRKQGIQKGDRVAIYMPMIPELVVAMLACARIGALHSIVFAGFSSESLCERILDSSCSLLITTDAFYRGEKLVNLKELADEALQKCQEKGFPVRCCIVVKHLGRAELGMGDSTSQSPPIKRSCPDVQISWNQGIDLWWHELMQEAGDECEPEWCDAEDPLFILYTSGSTGKPKGVVHTVGGYMLYVATTFKYVFDFHAEDVFWCTADIGWITGHSYVTYGPLANGATSVLFEGIPTYPDVNRLWSIVDKYKVTKFYTAPTAIRLLMKFGDEPVTKHSRASLQVLGTVGEPINPEAWLWYHRVVGAQRCPIVDTFWQTETGGHMLTPLPGATPMKPGSATFPFFGVAPAILNESGEELEGEAEGYLVFKQPWPGIMRTVYGNHERFETTYFKKFPGYYVTGDGCQRDQDGYYWITGRIDDMLNVSGHLLSTAEVESALVEHEAVAEAAVVGHPHPVKGECLYCFVTLCDGHTFSPKLTEELKKQIREKIGPIATPDYIQNAPGLPKTRSGKIMRRVLRKIAQNDHDLGDMSTVADPSVISHLFSHRCLTIQ

SEQ ID NO: 901131 - protein, 751 aa, Homo sapiens
MGLPEERVRSGSGSRGQEEAGAGGRARSWSPPPEVSRSAHVPSLQRYRELHRRSVEEPREFWGDIAKEFYWKTPCPGPFLRYNFDVTKGKIFIEWMKGATTNICYNVLDRNVHEKKLGDKVAFYWEGNEPGETTQITYHQLLVQVCQFSNVLRKQGIQKGDRVAIYMPMIPELVVAMLACARIGALHSIVFAGFSSESLCERILDSSCSLLITTDAFYRGEKLVNLKELADEALQKCQEKKCVWLLSELTEPFPSARFLCPLYPKWTWVGLAKFPLSQQGYHFRLFSSPGGFPVRCCIVVKHLGRAELGMGDSTSQSPPIKRSCPDVQISWNQGIDLWWHELMQEAGDECEPEWCDAEDPLFILYTSGSTGKPKGVVHTVGGYMLYVATTFKYVFDFHAEDVFWCTADIGWITGHSYVTYGPLANGATSVLFEGIPTYPDVNRLWSIVDKYKVTKFYTAPTAIRLLMKFGDEPVTKHSRASLQVLGTVGEPINPEAWLWYHRVVGAQRCPIVDTFWQTETGGHMLTPLPGATPMKPGSATFPFFGVAPAILNESGEELEGEAEGYLVFKQPWPGIMRTVYGNHERFETTYFKKFPGYYVTGDGCQRDQDGYYWITGRIDDMLNVSGHLLSTAEVESALVEHEAVAEAAVVGHPHPVKGECLYCFVTLCDGHTFSPKLTEELKKQIREKIGPIATPDYIQNAPGLPKTRSGKIMRRVLRKIAQNDHDLGDMSTVADPSVISHLFSHRCLTIQ

SEQ ID NO: 901132 - protein, 442 aa, Homo sapiens
MGDSTSQSPPIKRSCPDVQISWNQGIDLWWHELMQEAGDECEPEWCDAEDPLFILYTSGSTGKPKGVVHTVGGYMLYVATTFKYVFDFHAEDVFWCTADIGWITGHSYVTYGPLANGATSVLFEGIPTYPDVNRLWSIVDKYKVTKFYTAPTAIRLLMKFGDEPVTKHSRASLQVLGTVGEPINPEAWLWYHRVVGAQRCPIVDTFWQTETGGHMLTPLPGATPMKPGSATFPFFGVAPAILNESGEELEGEAEGYLVFKQPWPGIMRTVYGNHERFETTYFKKFPGYYVTGDGCQRDQDGYYWITGRIDDMLNVSGHLLSTAEVESALVEHEAVAEAAVVGHPHPVKGECLYCFVTLCDGHTFSPKLTEELKKQIREKIGPIATPDYIQNAPGLPKTRSGKIMRRVLRKIAQNDHDLGDMSTVADPSVISHLFSHRCLTIQ

SEQ ID NO: 901133 - protein, 442 aa, Homo sapiens; identical to SEQ ID NO: 901132

SEQ ID NO: 901134 - protein, 701 aa, Homo sapiens [sequence omitted]

SEQ ID NO: 901135 - protein, 701 aa, Homo sapiens [sequence omitted]

SEQ ID NO: 901136 - protein, 176 aa, Homo sapiens [sequence omitted]

SEQ ID NO: 901137 - protein, 681 aa, Homo sapiens
MGLPEERVRSGSGSRGQEEAGAGGRARSWSPPPEVSRSAHVPSLQRYRELHRRSVEEPREFWGDIAKEFYWKTPCPGPFLRYNFDVTKGKIFIEWMKGATTNICYNVLDRNVHEKKLGDKVAFYWEGNEPGETTQITYHQLLVQVCQFSNVLRKQGIQKGDRVAIYMPMIPELVVAMLACARIGALHSIVFAGFSSESLCERILDSSCSLLITTDAFYRGEKLVNLKELADEALQKCQEKGFPVRCCIVVKHLGRAELGMGDSTSQSPPIKRSCPDVQISWNQGIDLWWHELMQEAGDECEPEWCDAEDPLFILYTSGSTGKPKGVVHTVGGYMLYVATTFKYVFDFHAEDVFWCTADIGWITGHSYVTYGPLANGATSVLFEGIPTYPDVNRLWSIVDKYKVTKFYTAPTAIRLLMKFGDEPVTKHSRASLQVLGTVGEPINPEAWLWYHRVVGAQRCPIVDTFWQTETGGHMLTPLPGATPMKPGSATFPFFGVAPAILNESGEELEGEAEGYLVFKQPWPGIMRTVYGNHERFETTYFKKFPGYYVTGDGCQRDQDGYYWITGRIDDMLNVSGHLLSTAEVESALVEHEAVAEAAVVGHPHPVKGECLYCFVTLCDGHTFSPKLTEELKKQIREKIGPIATPDYIQNAPGLPKTRSGMFRGLHGLGWAEAWWWWGVRG

SEQ ID NO: 901138 - protein, 538 aa, Homo sapiens
MGLPEERVRSGSGSRGQEEAGAGGRARSWSPPPEVSRSAHVPSLQRYRELHRRSVEEPREFWGDIAKEFYWKTPCPGPFLRYNFDVTKGKIFIEWMKGATTNICYNVLDRNVHEKKLGDKVAFYWEGNEPGETTQITYHQLLVQVCQFSNVLRKQGIQKGDRVAIYMPMIPELVVAMLACARIGALHSIVFAGFSSESLCERILDSSCSLLITTDAFYRGEKLVNLKELADEALQKCQEKGFPVRCCIVVKHLGRAELGMGDSTSQSPPIKRSCPDVQISWNQGIDLWWHELMQEAGDECEPEWCDAEDPLFILYTSGSTGKPKGVVHTVGGYMLYVATTFKYVFDFHAEDVFWCTADIGWITGHSYVTYGPLANGATSVLFEGIPTYPDVNRLWSIVDKYKVTKFYTAPTAIRLLMKFGDEPVTKHSRASLQVLGTVGEPINPEAWLWYHRVVGAQRCPIVDTFWQTETGGHMLTPLPGATPMKPGSATFPFFGVAPAILNESGEELEGEAEGYLVRPWPLGVFKERGKGSAKGTLL

SEQ ID NO: 901139 - protein, 240 aa, Homo sapiens
MGLPEERVRSGSGSRGQEEAGAGGRARSWSPPPEVSRSAHVPSLQRYRELHRRSVEEPREFWGDIAKEFYWKTPCPGPFLRYNFDVTKGKIFIEWMKGATTNICYNVLDRNVHEKKLGDKVAFYWEGNEPGETTQITYHQLLVQVCQFSNVLRKQGIQKGDRVAIYMPMIPELVVAMLACARIGALHSIVFAGFSSESLCERILDSSCSLLITTDAFYRGEKLVNLKELADEALQKCQEK

SEQ ID NO: 901140 - protein, 701 aa, Homo sapiens [sequence omitted]

SEQ ID NO: 901141 - protein, 244 aa, Homo sapiens
MGDSTSQSPPIKRSCPDVQISWNQGIDLWWHELMQEAGDECEPEWCDAEDPLFILYTSGSTGKPKGVVHTVGGYMLYVATTFKYVFDFHAEDVFWCTADIGWITGHSYVTYGPLANGATSVLFEGIPTYPDVNRLWSIVDKYKVTKFYTAPTAIRLLMKFGDEPVTKHSRASLQVLGTVGEPINPEAWLWYHRVVGAQRCPIVDTFWQTETGGHMLTPLPGATPMKPGSATFPSWVIRIDNREM

SEQ ID NO: 901142 - protein, 701 aa, Homo sapiens [sequence omitted]

SEQ ID NO: 901143 - protein, 650 aa, Homo sapiens
MEICEGKEIEDMSSEEGENLSWFQEFWGDIAKEFYWKTPCPGPFLRYNFDVTKGKIFIEWMKGATTNICYNVLDRNVHEKKLGDKVAFYWEGNEPGETTQITYHQLLVQVCQFSNVLRKQELVVAMLACARIGALHSIVFAGFSSESLCERILDSSCSLLITTDAFYRGEKLVNLKELADEALQKCQEKGFPVRCCIVVKHLGRAELGMGDSTSQSPPIKRSCPDVQISWNQGIDLWWHELMQEAGDECEPEWCDAEDPLFILYTSGSTGKPKGVVHTVGGYMLYVATTFKYVFDFHAEDVFWCTADIGWITGHSYVTYGPLANGATSVLFEGIPTYPDVNRLWSIVDKYKVTKFYTAPTAIRLLMKFGDEPVTKHSRASLQVLGTVGEPINPEAWLWYHRVVGAQRCPIVDTFWQTETGGHMLTPLPGATPMKPGSATFPFFGVAPAILNESGEELEGEAEGYLVFKQPWPGIMRTVYGNHERFETTYFKKFPGYYVTGDGCQRDQDGYYWITGRIDDMLNVSGHLLSTAEVESALVEHEAVAEAAVVGHPHPVKGECLYCFVTLCDGHTFSPKLTEELKKQIREKIGPIATPDYIQNAPGLPKTRSGKIMRRVLRKIAQNDHDLGDMSTVADPSVISHLFSHRCLTIQ

SEQ ID NO: 901144 - protein, 568 aa, Homo sapiens
GNSSYRYTCREGNEPGETTQITYHQLLVQVCQFSNVLRKQGIQKGDRVAIYMPMIPELVVAMLACARIGALHSIVFAGFSSESLCERILDSSCSLLITTDAFYRGEKGFPVRCCIVVKHLGRAELGMGDSTSQSPPIKRSCPDVQISWNQGIDLWWHELMQEAGDECEPEWCDAEDPLFILYTSGSTGKPKGVVHTVGGYMLYVATTFKYVFDFHAEDVFWCTADIGWITGHSYVTYGPLANGATSVLFEGIPTYPDVNRLWSIVDKYKVTKFYTAPTAIRLLMKFGDEPVTKHSRASLQVLGTVGEPINPEAWLWYHRVVGAQRCPIVDTFWQTETGGHMLTPLPGATPMKPGSATFPFFGVAPAILNESGEELEGEAEGYLVFKQPWPGIMRTVYGNHERFETTYFKKFPGYYVTGDGCQRDQDGYYWITGRIDDMLNVSGHLLSTAEVESALVEHEAVAEAAVVGHPHPVKGECLYCFVTLCDGHTFSPKLTEELKKQIREKIGPIATPDYIQNAPGLPKTRSGKIMRRVLRKIAQNDHDLGDMSTVADPSVISHLFSHRCLTIQ

SEQ ID NO: 901145 - protein, 701 aa, Homo sapiens [sequence omitted]

SEQ ID NO: 901146 - protein, 176 aa, Homo sapiens [sequence omitted]

SEQ ID NO: 901147 - protein, 163 aa, Homo sapiens
MSMRKSLEIKLLFTGCQRDQDGYYWITGRIDDMLNVSGHLLSTAEVESALVEHEAVAEAAVVGHPHPVKGECLYCFVTLCDGHTFSPKLTEELKKQIREKIGPIATPDYIQNAPGLPKTRSGKIMRRVLRKIAQNDHDLGDMSTVADPSVISHLFSHRCLTIQ

SEQ ID NO: 901148 - protein, 242 aa, Homo sapiens
MGLPEERVRSGSGSRGQEEAGAGGRARSWSPPPEVSRSAHVPSLQRYRELHRRSVEEPREFWGDIAKEFYWKTPCPGPFLRYNFDVTKGKIFIEWMKGATTNICYNVLDRNVHEKKLGDKVAFYWEGNEPGETTQITYHQLLVQVCQFSNVLRKQGIQKGDRVAIYMPMIPELVVAMLACARIGALHSIVFAGFSSESLCERILDSSCSLLITTDASTVCPLAPGAVWADSVSRGYSDHLLL

SEQ ID NO: 901149 - protein, 115 aa, Homo sapiens
HLLSTAEVESALVEHEAVAEAAVVGHPHPVKGECLYCFVTLCDGHTFSPKLTEELKKQSKEPPWAGTIGSVLEAQLSLQVVGEGLEQAAPQTTNRFQGAPWADCPLPVQSPLVSH

SEQ ID NO: 901150 - protein, 282 aa, Homo sapiens
MEQSSPGFRQTHLQDLSEATQDVKEENHYLTPRSVLLELDNIIASSDSGESIETDGPDQVSGRIECHYEPMESYFFKETSHESVDSSKEEPQTLPETQDGDLHLQEQGSGIDWCLSPADVEAQTTNDQKGSASLTVVQLSILINNIPDESQVEKLNVFLSPPDVINYLALTEATGRICVSQWEGPPRLGCIFCHGDHLLAVNDLKPQSLEEVSLFLTRSIQKEKLKLTIGRIPNSETFHAASCMCPSKCQSAAPSQLDKPRLNRAPKRSPAIKKSQQKGARE

SEQ ID NO: 901151 - protein, 299 aa, Homo sapiens
MEQSSPGFRQTHLQDLSEATQDVKEENHYLTPRSVLLELDNIIASSDSGESIETDGPDQVSGRIECHYEPMESYFFKETSHESVDSSKEEPQTLPETQDGDLHLQEQGSGIDWCLSPADVEAQTTNDQKGSASLTVVQLSILINNIPDESQVEKLNVFLSPPDVINYLALTEATGRICVSQWEGPPRLGCIFCHGDHLLAVNDLKPQSLEEVSLFLTRSIQKEDSFRILSYQVAFGEGTELRDRAPGFRTSDRHDVAKRACMESDWCRDSKTAPSTNLCLSFLFCKIMTNDGAGCWIIK

SEQ ID NO: 901152 - protein, 268 aa, Homo sapiens
MEQSSPGFRQTHLQDLSEATQDVKEENHYLTPRSVLLELDNIIASSDSGESIETDGPDQVSGRIECHYEPMESYFFKETSHESVDSSKEEPQTLPETQDGDLHLQEQGSGIDWCLSPADVEAQTTNDQKGNIPDESQVEKLNVFLSPPDVINYLALTEATGRICVSQWEGPPRLGCIFCHGDHLLAVNDLKPQSLEEVSLFLTRSIQKEKLKLTIGRIPNSETFHAASCMCPSKCQSAAPSQLDKPRLNRAPKRSPAIKKSQQKGARE

SEQ ID NO: 901153 - protein, 500 aa, Homo sapiens
MAPPSAPLPAQGPGKARPSRKRGRRPRALKFVDVAVYFSPEEWGCLRPAQRALYRDVMRETYGHLGALGCAGPKPALISWLERNTDDWEPAALDPQEYPRGLTVQRKSRTRKKNGEKEVFPPKEAPRKGKRGRRPSKPRLIPRQTSGGPICPDCGCTFPDHQALESHKCAQNLKKPYPCPDCGRRFSYPSLLVSHRRAHSGECPYVCDQCGKRFSQRKNLSQHQVIHTGEKPYHCPDCGRCFRRSRSLANHRTTHTGEKPHQCPSCGRRFAYPSLLAIHQRTHTGEKPYTCLECNRRFRQRTALVIHQRIHTGEKPYPCPDCERRFSSSSRLVSHRRVHSGERPYACEHCEARFSQRSTLLQHQLLHTGEKPYPCPDCGRAFRRSGSLAIHRSTHTEEKLHACDDCGRRFAYPSLLASHRRVHSGERPYACDLCSKRFAQWSHLAQHQLLHTGEKPFPCLECGRCFRQRWSLAVHKCSPKAPNCSPRSAIGGSSQRGNAH

SEQ ID NO: 901154 - protein, 466 aa, Homo sapiens
MSGSIAQIVPSFSDWLSLPESNSGKQPRGLLLPPGCAGPKPALISWLERNTDDWEPAALDPQEYPRGLTVQRKSRTRKKNGEKEVFPPKEAPRKGKRGRRPSKPRLIPRQTSGGPICPDCGCTFPDHQALESHKCAQNLKKPYPCPDCGRRFSYPSLLVSHRRAHSGECPYVCDQCGKRFSQRKNLSQHQVIHTGEKPYHCPDCGRCFRRSRSLANHRTTHTGEKPHQCPSCGRRFAYPSLLAIHQRTHTGEKPYTCLECNRRFRQRTALVIHQRIHTGEKPYPCPDCERRFSSSSRLVSHRRVHSGERPYACEHCEARFSQRSTLLQHQLLHTGEKPYPCPDCGRAFRRSGSLAIHRSTHTEEKLHACDDCGRRFAYPSLLASHRRVHSGERPYACDLCSKRFAQWSHLAQHQLLHTGEKPFPCLECGRCFRQRWSLAVHKCSPKAPNCSPRSAIGGSSQRGNAH

SEQ ID NO: 901155 - protein, 249 aa, Homo sapiens [sequence omitted]

SEQ ID NO: 901156 - protein, 412 aa, Homo sapiens
SYERSTSNGSVQSFGWARESRTRKKNGEKEVFPPKEAPRKGKRGRRPSKPRLIPRQTSGGPICPDCGCTFPDHQALESHKCAQNLKKPYPCPDCGRRFSYPSLLVSHRRAHSGECPYVCDQCGKRFSQRKNLSQHQVIHTGEKPYHCPDCGRCFRRSRSLANHRTTHTGEKPHQCPSCGRRFAYPSLLAIHQRTHTGEKPYTCLECNRRFRQRTALVIHQRIHTGEKPYPCPDCERRFSSSSRLVSHRRVHSGERPYACEHCEARFSQRSTLLQHQLLHTGEKPYPCPDCGRAFRRSGSLAIHRSTHTEEKLHACDDCGRRFAYPSLLASHRRVHSGERPYACDLCSKRFAQWSHLAQHQLLHTGEKPFPCLECGRCFRQRWSLAVHKCSPKAPNCSPRSAIGGSSQRGNAH

SEQ ID NO: 901157 - protein, 500 aa, Homo sapiens; identical to SEQ ID NO: 901153

SEQ ID NO: 901158 - protein, 500 aa, Homo sapiens; identical to SEQ ID NO: 901153

SEQ ID NO: 901159 - protein, 484 aa, Homo sapiens
MQLLASFKRTAFASTQSERSIFGSRPMNARIGEGKKDGVKPNRSAITLEGKEGCAGPKPALISWLERNTDDWEPAALDPQEYPRGLTVQRKSRTRKKNGEKEVFPPKEAPRKGKRGRRPSKPRLIPRQTSGGPICPDCGCTFPDHQALESHKCAQNLKKPYPCPDCGRRFSYPSLLVSHRRAHSGECPYVCDQCGKRFSQRKNLSQHQVIHTGEKPYHCPDCGRCFRRSRSLANHRTTHTGEKPHQCPSCGRRFAYPSLLAIHQRTHTGEKPYTCLECNRRFRQRTALVIHQRIHTGEKPYPCPDCERRFSSSSRLVSHRRVHSGERPYACEHCEARFSQRSTLLQHQLLHTGEKPYPCPDCGRAFRRSGSLAIHRSTHTEEKLHACDDCGRRFAYPSLLASHRRVHSGERPYACDLCSKRFAQWSHLAQHQLLHTGEKPFPCLECGRCFRQRWSLAVHKCSPKAPNCSPRSAIGGSSQRGNAH

SEQ ID NO: 901160 - protein, 167 aa, Homo sapiens
RLVELGVNGRPYACEHCEARFSQRSTLLQHQLLHTGEKPYPCPDCGRAFRRSGSLAIHRSTHTEEKLHACDDCGRRFAYPSLLASHRRVHSGERPYACDLCSKRFAQWSHLAQHQLLHTGEKPFPCLECGRCFRQRWSLAVHKCSPKAPNCSPRSAIGGSSQRGNAH

SEQ ID NO: 901161 - protein, 135 aa, Homo sapiens
EEWGCLRPAQRALYRDVMRETYGHLGALGEAGPIRCRGARRDAGAGEGVGREATVLAGDQVVRGGGQGLSRRCRRGDTTRRDLGAGLLICSLSPGCAGPKPALISWLERNTDDWEPAALDPQEYPRGLTVQRSEC

SEQ ID NO: 901162 - protein, 574 aa, Homo sapiens
MWTFLGIATFTYFYKKFGDFITLANREVLLCVLVFLSLGLVLSYRCRHRNGGLLGRQQSGSQFALFSDILSGLPFIGFFWAKSPPESENKEQLEARRRRKGTNISETSLIGTAACTSTSSQNDPEVIIVGAGVLGSALAAVLSRDGRKVTVIERDLKEPDRIVGEFLQPGGYHVLKDLGLGDTVEGLDAQVVNGYMIHDQESKSEVQIPYPLSENNQVQSGRAFHHGRFIMSLRKAAMAEPNAKFIEGVVLQLLEEDDVVMGVQYKDKETGDIKELHAPLTVVADGLFSKFRKSLVSNKVSVSSHFVGFLMKNAPQFKANHAELILANPSPVLIYQISSSETRVLVDIRGEMPRNLREYMVEKIYPQIPDHLKEPFLEATDNSHLRSMPASFLPPSSVKKRGVLLLGDAYNMRHPLTGGGMTVAFKDIKLWRKLLKGIPDLYDDAAIFEAKKSFYWARKTSHSFVVNILAQALYELFSATDDSLHQLRKACFLYFKLGGECVAGPVGLLSVLSPNPLVLIGHFFAVAIYAVYFCFKSEPWITKPRALLSSGAVLYKACSVIFPLIYSEMKYMVH

SEQ ID NO: 901163 - protein, 574 aa, Homo sapiens; identical to SEQ ID NO: 901162

SEQ ID NO: 901164 - protein, 467 aa, Homo sapiens [sequence omitted]

SEQ ID NO: 901165 - protein, 556 aa, Homo sapiens
MWTFLGIATFTYFYKKFGDFITLANREVLLCVLVFLSLGLVLSYRCRHRNGGLLGRQQSGSQFALFSDILSGLPFIGFFWAKSPPESENKEQLEARRRRKGTNISETSLIGTAACTSTSSQNDPEVIIVGAGVLGSALAAVLSRDGRKVTVIERDLKEPDRIVGEFLQPGGYHVLKDLGLGDTVEGLDAQVVNGYMIHDQESKSEVQIPYPLSENNQVQSGRAFHHGRFIMSLRKAAMAEPNAKFIEGVVLQLLEEDDVVMGVQYKDKETGDIKELHAPLTVVADGLFSKFRKSLVSNKVSVSSHFVGFLMKNAPQFKANHAELILANPSPVLIYQISSSETRVLVDIRGEMPRNLREYMVEKIYPQIPDHLKEPFLEATDNSHLRSMPASFLPPSSVKKRGVLLLGDAYNMRHPLTGGGMTVAFKDIKLWRKLLKGIPDLYDDAAIFEAKKSFYWARKTSHSFVVNILAQALYELFSATDDSLHQLSGLLSVLSPNPLVLIGHFFAVAIYAVYFCFKSEPWITKPRALLSSGAVLYKACSVIFPLIYSEMKYMVH

SEQ ID NO: 901166 - protein, 516 aa, Homo sapiens
MLEFHFEGEEQPLSMMKKFLKSSWVRIGFVPEEERNVLRRRKGTNISETSLIGTAACTSTSSQNDPEVIIVGAGVLGSALAAVLSRDGRKVTVIERDLKEPDRIVGEFLQPGGYHVLKDLGLGDTVEGLDAQVVNGYMIHDQESKSEVQIPYPLSENNQVQSGRAFHHGRFIMSLRKAAMAEPNAKFIEGVVLQLLEEDDVVMGVQYKDKETGDIKELHAPLTVVADGLFSKFRKSLVSNKVSVSSHFVGFLMKNAPQFKANHAELILANPSPVLIYQISSSETRVLVDIRGEMPRNLREYMVEKIYPQIPDHLKEPFLEATDNSHLRSMPASFLPPSSVKKRGVLLLGDAYNMRHPLTGGGMTVAFKDIKLWRKLLKGIPDLYDDAAIFEAKKSFYWARKTSHSFVVNILAQALYELFSATDDSLHQLRKACFLYFKLGGECVAGPVGLLSVLSPNPLVLIGHFFAVAIYAVYFCFKSEPWITKPRALLSSGAVLYKACSVIFPLIYSEMKYMVH

SEQ ID NO: 901167 - protein, 528 aa, Homo sapiens
MWTFLGIATFTYFYKKFGDFITLANREVLLCVLVFLSLGLVLSYRCRHRNGGLLGRQQSGSQFALFSDILSGLPFIGFFWAKSPPESENKEQLEARRRRKGTNISETSLIGTAACTSTSSQNDPEVIIVGAGVLGSALAAVLSRDGRKVTVIERDLKEPDRIVGEFLQPGGYHVLKDLGLGDTVEGLDAQVVNGYMIHDQESKSEVQIPYPLSENNQVQSGRAFHHGRFIMSLRKAAMAEPNAKFIEGVVLQLLEEDDVVMGVQYKDKETGDIKELHAPLTVVADGLFSKFRKSLVSNKVSVSSHFVGFLMKNAPQFKANHAELILANPSPVLIYQISSSETRVLVDIRGEMPRNLREYMVEKIYPQIPDHLKEPFLEATDNSHLRSMPASFLPPSSVKKRGVLLLGDAYNMRHPLTGGGMTVAFKDIKLWRKLLKGIPDLYDDAAIFEAKKSFYWARKTSHSFVVNILAQALYELFSATDDSLHQLRKACFLYFKLGGECVAGPVGLLSVLSPNPLVLIGSYLRGML

SEQ ID NO: 901168 - protein, 223 aa, Homo sapiens [sequence omitted]

SEQ ID NO: 901169 - protein, 574 aa, Homo sapiens; identical to SEQ ID NO: 901162

SEQ ID NO: 901170 - protein, 574 aa, Homo sapiens; identical to SEQ ID NO: 901162

SEQ ID NO: 901171 - protein, 297 aa, Homo sapiens
MWTFLGIATFTYFYKKFGDFITLANREVLLCVLVFLSLGLVLSYRCRHRNGGLLGRQQSGSQFALFSDILSGLPFIGFFWAKSPPESENKEQLEARRRRKGTNISETSLIGTAACTSTSSQNDPEVIIVGAGVLGSALAAVLSRDGRKVTVIERDLKEPDRIVGEFLQPGGYHVLKDLGLGDTVEGLDAQVVNGYMIHDQESKSEVQIPYPLSENNQVQSGRAFHHGRFIMSLRKAAMAEPNAKFIEGVVLQLLEEDDVVMGVQYKDKETGDIKSPSSGKAWSPIKFLYHLILLAFL

SEQ ID NO: 901172 - protein, 454 aa, Homo sapiens
MWTFLGIATFTYFYKKFGDFITLANREVLLCVLVFLSLGLVLSYRCRHRNGGLLGRQQSGSQFALFSDILSGLPFIGFFWAKSPPESENKEQLEARRRRKGTNISETSLIGTAACTSTSSQNDPEVIIVGAGVLGSALAAVLSRDGRKVTVIERDLKEPDRIVGEFLQPGGYHVLKDLGLGDTVEGLDAQVVNGYMIHDQESKSEVQIPYPLSENNQVQSGRAFHHGRFIMSLRKAAMAEPNAKFIEGVVLQLLEEDDVVMGVQYKDKETGDIKELHAPLTVVADGLFSKFRKSLVSNKVSVSSHFVGFLMKNAPQFKANHAELILANPSPVLIYQISSSETRVLVDIRGEMPRNLREYMVEKIYPQIPDHLKEPFLEATDNSHLRSMPASFLPPSSVKKRGVLLLGDAYNMRHPLTGGGMTVAFKDIKLWRKLLKGIPDLYDDAAIFEIPCIN

SEQ ID NO: 901173 - protein, 502 aa, Homo sapiens
MPTSFISFHIIMKPLYYFIITSRRKRRKGTNISETSLIGTAACTSTSSQNDPEVIIVGAGVLGSALAAVLSRDGRKVTVIERDLKEPDRIVGEFLQPGGYHVLKDLGLGDTVEGLDAQVVNGYMIHDQESKSEVQIPYPLSENNQVQSGRAFHHGRFIMSLRKAAMAEPNAKFIEGVVLQLLEEDDVVMGVQYKDKETGDIKELHAPLTVVADGLFSKFRKSLVSNKVSVSSHFVGFLMKNAPQFKANHAELILANPSPVLIYQISSSETRVLVDIRGEMPRNLREYMVEKIYPQIPDHLKEPFLEATDNSHLRSMPASFLPPSSVKKRGVLLLGDAYNMRHPLTGGGMTVAFKDIKLWRKLLKGIPDLYDDAAIFEAKKSFYWARKTSHSFVVNILAQALYELFSATDDSLHQLRKACFLYFKLGGECVAGPVGLLSVLSPNPLVLIGHFFAVAIYAVYFCFKSEPWITKPRALLSSGAVLYKACSVIFPLIYSEMKYMVH

SEQ ID NO: 901174 - protein, 467 aa, Homo sapiens [sequence omitted]

SEQ ID NO: 901175 - protein, 116 aa, Homo sapiens [sequence omitted]

SEQ ID NO: 901176 - protein, 66 aa, Homo sapiens
GRVVSTHASEEIPGPWLLGAMRFRFCGDLDCPDWVLAEISTLAKMSSVKLRLLCSQGTKGAAGTGD

SEQ ID NO: 901177 - protein, 77 aa, Homo sapiens
PEAVSPSHVIVDSADPAGPEKEIPGPWLLGAMRFRFCGDLDCPDWVLAEISTLAKMSSVKLRLLCSQGTKGAAGTGD

SEQ ID NO: 901178 - protein, 77 aa, Homo sapiens; identical to SEQ ID NO: 901177

SEQ ID NO: 901179 - protein, 74 aa, Homo sapiens
AAAYYYCSEFKLLTMYGDMSLSADKNGPPGRTEAGPDPDELPGLRRRVFQACVEPPCPYGVTPSELLFGRQPWF

SEQ ID NO: 901180 - protein, 77 aa, Homo sapiens; identical to SEQ ID NO: 901177

SEQ ID NO: 901181 - protein, 86 aa, Homo sapiens
HSGRSEAWAAGAGMRGRQVAPETGGGCTGLSANTVCAGVRARFRFCGDLDCPDWVLAEISTLAKMSSVKLRLLCSQGTKGAAGTGD

SEQ ID NO: 901182 - protein, 208 aa, Homo sapiens
PEAVSPSHVIVDSADPAGPEKEIPGPWLLGAMRFRFCGDLDCPDWVLAEISTLAKMYEKILKLTADAKFESGDVKATVAVLSFILSSAAKHSVDGESLSSELQQLGLPKEHAASLCRCYEEKQSPLQKHLRVCSLRMNRLAGVGWRVDYTLSSSLLQSVEEPMVHLRLEVAAAPGTPAQPVAMSLSADKFQVLLAELKQAQTLMSSLG

SEQ ID NO: 901183 - protein, 122 aa, Homo sapiens
PEAVSPSHVIVDSADPAGPEKEIPGPWLLGAMRFRFCGDLDCPDWVLAEISTLAKMVECTGSSLGGGGVLGVGIVGVEDGEVSLGLGPQCSQPVLPCFVTLISGWPALSQSPGRRGEVCQPG

SEQ ID NO: 901184 - protein, 143 aa, Homo sapiens
MGPSESGDVKATVAVLSFILSSAAKHSVDGESLSSELQQLGLPKEHAASLCRCYEEKQSPLQKHLRVCSLRMNRLAGVGWRVDYTLSSSLLQSVEEPMVHLRLEVAAAPGTPAQPVAMSLSADKFQVLLAELKQAQTLMSSLG

SEQ ID NO: 901185 - protein, 177 aa, Homo sapiens
MASAKSQLICRQTLKELLCQPNDYEKILQLTADAKLETESGDVKATVAVLSFILSSAAKHSVDGESLSSELQQLGLPKEHAASLCRCYEEKQSPLQKHLRVCSLRMNRLAGVGWRVDYTLSSSLLQSVEEPMVHLRLEVAAAPGTPAQPVAMSLSADKFQVLLAELKQAQTLMSSLG

SEQ ID NO: 901186 - protein, 110 aa, Homo sapiens
MLLQSYSILPPEHAASLCRCYEEKQSPLQKHLRVCSLRMNRLAGVGWRVDYTLSSSLLQSVEEPMVHLRLEVAAAPGTPAQPVAMSLSADKFQVLLAELKQAQTLMSSLG

SEQ ID NO: 901187 - protein, 106 aa, Homo sapiens
VYPPGCRIRHELLGAMRFRFCGDLDCPDWVLAEISTLAKMVECTGSSLGGGGVLGVGIVGVEDGEVSLGLGPQCSQPVLPCFVTLISGWPALSQSPGRRGEVCQPG

SEQ ID NO: 901188 - protein, 106 aa, Homo sapiens; identical to SEQ ID NO: 901187

SEQ ID NO: 901189 - protein, 122 aa, Homo sapiens; identical to SEQ ID NO: 901183

SEQ ID NO: 901190 - protein, 122 aa, Homo sapiens; identical to SEQ ID NO: 901183

SEQ ID NO: 901191 - protein, 77 aa, Homo sapiens; identical to SEQ ID NO: 901177

SEQ ID NO: 901192 - protein, 82 aa, Homo sapiens
DMATGWAGVPGAAATSSRRCTMGSSTDCSRLELRCSRPVWSRPARMESRPLNCSSGGSPGSRMLRPWPGLWPPRSPAASLLS

SEQ ID NO: 901193 - protein, 106 aa, Homo sapiens; identical to SEQ ID NO: 901187

SEQ ID NO: 901194 - protein, 77 aa, Homo sapiens; identical to SEQ ID NO: 901177

SEQ ID NO: 901195 - protein, 77 aa, Homo sapiens; identical to SEQ ID NO: 901177

SEQ ID NO: 901196 - protein, 66 aa, Homo sapiens; identical to SEQ ID NO: 901176

SEQ ID NO: 901197 - protein, 92 aa, Homo sapiens
MTRSAAPRSRCYSTPHTPVVRCDIQKVLSTCPSDYLSLVDRDTHHILWVVGVRNNSKCMERPQPPHTRANSYRSSLGEEEIKTNILYDDASS

SEQ ID NO: 901198 - protein, 106 aa, Homo sapiens; identical to SEQ ID NO: 901187

SEQ ID NO: 901199 - protein, 219 aa, Homo sapiens
PEAVSPSHVIVDSADPAGPEKEIPGPWLLGAMRFRFCGDLDCPDWVLAEISTLAKMSSVKLRLLCSQYEKILKLTADAKFESGDVKATVAVLSFILSSAAKHSVDGESLSSELQQLGLPKEHAASLCRCYEEKQSPLQKHLRVCSLRMNRLAGVGWRVDYTLSSSLLQSVEEPMVHLRLEVAAAPGTPAQPVAMSLSADKFQVLLAELKQAQTLMSSLG

SEQ ID NO: 901200 - protein, 122 aa, Homo sapiens; identical to SEQ ID NO: 901183

SEQ ID NO: 901201 - protein, 106 aa, Homo sapiens; identical to SEQ ID NO: 901187

SEQ ID NO: 901202 - protein, 122 aa, Homo sapiens; identical to SEQ ID NO: 901183

SEQ ID NO: 901203 - protein, 122 aa, Homo sapiens; identical to SEQ ID NO: 901183

SEQ ID NO: 901204 - protein, 77 aa, Homo sapiens; identical to SEQ ID NO: 901177

SEQ ID NO: 901205 - protein, 122 aa, Homo sapiens; identical to SEQ ID NO: 901183

SEQ ID NO: 901206 - protein, 144 aa, Homo sapiens
MRGRQVAPETGGGCTGLSANTVCAGVRAVSLVGKSPPLSRSRDGGGGTGRVRQSRPAGLESRCFPGGRKGPCLPGQELGLVWSWESFQVFPIPKRTSQGYPLPQPCRGACTRRCLESGSLFHTVRKPLRSFQSQKVVVLGLRLI

SEQ ID NO: 901207 - protein, 462 aa, Homo sapiens
MFLATLYFALPLLDLLLSAEVSGGDRLDCVKASDQCLKEQSCSTKYRTLRQCVAGKETNFSLASGLEAKDECRSAMEALKQKSLYNCRCKRGMKKEKNCLRIYWSMYQSLQGNDLLEDSPYEPVNSRLSDIFRVVPFISDAVEHIPKGNNCLDAAKACNLDDICKKYRSAYITPCTTSVSNDVCNRRKCHKALRQFFDKVPAKHSYGMLFCSCRDIACTERRRQTIVPVCSYEEREKPNCLNLQDSCKTNYICRSRLADFFTNCQPESRSVSSCLKENYADCLLAYSGLIGTVMTPNYIDSSSLSVAPWCDCSNSGNDLEECLKFLNFFKDNTCLKNAIQAFGNGSDVTVWQPAFPVQTTTATTTTALRVKNKPLGPAGSENEIPTHVLPPCANLQAQKLKSNVSGNTHLCISNGNYEKEGLGASSHITTKSMAAPPSCGLSPLLVLVVTALSTLLSLTETS

SEQ ID NO: 901208 - protein, 462 aa, Homo sapiens; identical to SEQ ID NO: 901207

SEQ ID NO: 901209 - protein, 462 aa, Homo sapiens; identical to SEQ ID NO: 901207

SEQ ID NO: 901210 - protein, 305 aa, Homo sapiens
MTNQYGILFKQEQAHDDAIWSVAWGTNKKENSETVVTGSLDDLVKVWKWRDERLDLQWSLEGHQLGVVSVDISHTLPIAASSSLDAHIRLWDLENGKQIKSIDAGPVDAWTLAFSPDSQYLATGTHVGKVNIFGVESGKKEYSLDTRGKFILSIAYSPDGKYLASGAIDGIINIFDIATGKLLHTLEGHAMPIRSLTFSPDSQLLVTASDDGYIKIYDVQHANLAGTLSGHASWVLNVAFCPDDTHFVSSSSDKSVKVWDVGTRTCVHTFFDHQDQVWGVKYNGNGSKIVSVGDDQEIHIYDCPI

SEQ ID NO: 901211 - protein, 305 aa, Homo sapiens; identical to SEQ ID NO: 901210

SEQ ID NO: 901212 - protein, 305 aa, Homo sapiens; identical to SEQ ID NO: 901210

SEQ ID NO: 901213 - protein, 305 aa, Homo sapiens; identical to SEQ ID NO: 901210

SEQ ID NO: 901214 - protein, 292 aa, Homo sapiens [sequence omitted]

SEQ ID NO: 901215 - protein, 305 aa, Homo sapiens [sequence omitted]

SEQ ID NO: 901216 - protein, 115 aa, Homo sapiens [sequence omitted]

SEQ ID NO: 901217 - protein, 189 aa, Homo sapiens
MTNQYGILFKQEQAHDDAIWSVAWGTNKKENSETVVTGSLDDLVKVWKWRDERLDLQWSLEGHQLGVVSVDISHTLPIAASSSLDAHIRLWDLENGKQIKSIDAGPVDAWTLAFSPDSQYLATGTHVGKVNIFGVESGKKEYSLDTRGKFILSIAYSPDGKYLASGAIDGIINIFDIATGKLLHTLEGG

SEQ ID NO: 901218 - protein, 305 aa, Homo sapiens; identical to SEQ ID NO: 901210

SEQ ID NO: 901219 - protein, 305 aa, Homo sapiens; identical to SEQ ID NO: 901210

SEQ ID NO: 901220 - protein, 305 aa, Homo sapiens; identical to SEQ ID NO: 901210

SEQ ID NO: 901221 - protein, 305 aa, Homo sapiens
MTNQYGILFKQERAHDDAIWSVAWGTNKKENSETVVTGSLDDLVKVWKWRDERLDLQWSLEGHQLGVVSVDISHTLPIAASSSLDAHIRLWDLENGKQIKSIDAGPVDAWTLAFSPDSQYLATGTHVGKVNIFGVESGKKEYSLDTRGKFILSIAYSPDGKYLASGAIDGIINIFDIATGKLLHTLEGHAMPIRSLTFSPDSQLLVTASDDGYIKIYDVQHANLAGTLSGHASWVLNVAFCPDDTHFVSSSSDKSVKVWDVGTRTCVHTFFDHQDQVWGVKYNGNGSKIVSVGDDQEIHIYDCPI

SEQ ID NO: 901222 - protein, 222 aa, Homo sapiens
MMVVIARMRHLSIILLMIDKKHNSPVDLTCFSPDSQYLATGTHVGKVNIFGVESGKKEYSLDTRGKFILSIAYSPDGKYLASGAIDGIINIFDIATGKLLHTLEGHAMPIRSLTFSPDSQLLVTASDDGYIKIYDVQHANLAGTLSGHASWVLNVAFCPDDTHFVSSSSDKSVKVWDVGTRTCVHTFFDHQDQVWGVKYNGNGSKIVSVGDDQEIHIYDCPI

SEQ ID NO: 901223 - protein, 122 aa, Homo sapiens
MWIPFLRIMQITRNLVETQIIRSMRLMLGTQLLYKFERPQYAEILADHPDAPMSQVYGAPHLLRLFVRIGAMLAYTPLDEKSLALLLNYLHDFLKYLAKNSATLFSASDYEVAPPEYHRKAV

SEQ ID NO: 901224 - protein, 175 aa, Homo sapiens
ARKQDPKPKFQEGERVLCFHGPLLYEAKCVKVAIKDKQVKYFIHYSGWNKNWDEWVPESRVLKYVDTNLQKQRELQKANQEQYAEGKMRGAAPGKKTSGLQQKNVEVKTKKNKHLLRLFVRIGAMLAYTPLDEKSLALLLNYLHDFLKYLAKNSATLFSASDYEVAPPEYHRKAV

SEQ ID NO: 901225 - protein, 738 aa, Homo sapiens
MDLRRRDYHMERPLLNQEHLEELGRWGSAPRTHQWRTWLQCSRARAYALLLQHLPVLVWLPRYPVRDWLLGDLLSGLSVAIMQLPQGLAYALLAGLPPVFGLYSSFYPVFIYFLFGTSRHISVGTFAVMSVMVGSVTESLAPQALNDSMINETARDAARVQVASTLSVLVGLFQVGLGLIHFGFVVTYLSEPLVRGYTTAAAVQVFVSQLKYVFGLHLSSHSGPLSLIYTVLEVCWKLPQSKVGTVVTAAVAGVVLVVVKLLNDKLQQQLPMPIPGELLTLIGATGISYGMGLKHRFEVDVVGNIPAGLVPPVAPNTQLFSKLVGSAFTIAVVGFAIAISLGKIFALRHGYRVDSNQELVALGLSNLIGGIFQCFPVSCSMSRSLVQESTGGNSQVAGAISSLFILLIIVKLGELFHDLPKAVLAAIIIVNLKGMLRQLSDMRSLWKANRADLLIWLVTFTATILLNLDLGLVVAVIFSLLLVVVRTQMPHYSVLGQVPDTDIYRDVAEYSEAKEVRGVKVFRSSATVYFANAEFYSDALKQRCGVDVDFLISQKKKLLKKQEQLKLKQLQKEEKLRKQAASPKGASVSINVNTSLEDMRSNNVEDCKMMQVSSGDKMEDATANGQEDSKAPDGSTLKALGLPQPDFHSLILDLGALSFVDTVCLKSLKNIFHDFREIEVEVYMAACHSPVVSQLEAGHFFDASITKKHLFASVHDAVTFALQHPRPVPDSPVSVTRL

SEQ ID NO: 901226 - protein, 759 aa, Homo sapiens
MGLADASGPRDTQALLSATQAMDLRRRDYHMERPLLNQEHLEELGRWGSAPRTHQWRTWLQCSRARAYALLLQHLPVLVWLPRYPVRDWLLGDLLSGLSVAIMQLPQGLAYALLAGLPPVFGLYSSFYPVFIYFLFGTSRHISVGTFAVMSVMVGSVTESLAPQALNDSMINETARDAARVQVASTLSVLVGLFQVGLGLIHFGFVVTYLSEPLVRGYTTAAAVQVFVSQLKYVFGLHLSSHSGPLSLIYTVLEVCWKLPQSKVGTVVTAAVAGVVLVVVKLLNDKLQQQLPMPIPGELLTLIGATGISYGMGLKHRFEVDVVGNIPAGLVPPVAPNTQLFSKLVGSAFTIAVVGFAIAISLGKIFALRHGYRVDSNQELVALGLSNLIGGIFQCFPVSCSMSRSLVQESTGGNSQVAGAISSLFILLIIVKLGELFHDLPKAVLAAIIIVNLKGMLRQLSDMRSLWKANRADLLIWLVTFTATILLNLDLGLVVAVIFSLLLVVVRTQMPHYSVLGQVPDTDIYRDVAEYSEAKEVRGVKVFRSSATVYFANAEFYSDALKQRCGVDVDFLISQKKKLLKKQEQLKLKQLQKEEKLRKQAASPKGASVSINVNTSLEDMRSNNVEDCKMMQVSSGDKMEDATANGQEDSKAPDGSTLKALGLPQPDFHSLILDLGALSFVDTVCLKSLKNIFHDFREIEVEVYMAACHSPVVSQLEAGHFFDASITKKHLFASVHDAVTFALQHPRPVPDSPVSVTRL

SEQ ID NO: 901227 - protein, 749 aa, Homo sapiens
MGLADASGPRDTQALLSATQAMDLRRRDYHMERPLLNQEHLEELGRWGSAPRTHQWRTWLQCSRARAYALLLQHLPVLVWLPRYPVRDWLLGDLLSGLSVAIMQLPQGLAYALLAGLPPVFGLYSSFYPVFIYFLFGTSRHISVGTFAVMSVMVGSVTESLAPQALNDSMINETARDAARVQVASTLSVLVGLFQVGLGLIHFGFVVTYLSEPLVRGYTTAAAVQVFVSQLKYVFGLHLSSHSGPLSLIYTVLEVCWKLPQSKVGTVVTAAVAGVVLVVVKLLNDKLQQQLPMPIPGELLTLIGATGISYGMGLKHRFEAGAPSGPQHPAVLKARGQRLHHRCGWVCHCHLTGEIFALRHGYRVDSNQELVALGLSNLIGGIFQCFPVSCSMSRSLVQESTGGNSQVAGAISSLFILLIIVKLGELFHDLPKAVLAAIIIVNLKGMLRQLSDMRSLWKANRADLLIWLVTFTATILLNLDLGLVVAVIFSLLLVVVRTQMPHYSVLGQVPDTDIYRDVAEYSEAKEVRGVKVFRSSATVYFANAEFYSDALKQRCGVDVDFLISQKKKLLKKQEQLKLKQLQKEEKLRKQAASPKGASVSINVNTSLEDMRSNNVEDCKMMQVSSGDKMEDATANGQEDSKAPDGSTLKALGLPQPDFHSLILDLGALSFVDTVCLKSLKNIFHDFREIEVEVYMAACHSPVVSQLEAGHFFDASITKKHLFASVHDAVTFALQHPRPVPDSPVSVTRL

SEQ ID NO: 901228 - protein, 738 aa, Homo sapiens
MGLADASGPRDTQALLSATQAMDLRRRDYHMERPLLNQEHLEELGRWGSAPRTHQWRTWLQCSRARAYALLLQHLPVLVWLPRYPVRDWLLGDLLSGLSVAIMQLPQGLAYALLAGLPPVFGLYSSFYPVFIYFLFGTSRHISVGTFAVMSVMVGSVTESLAPQALNDSMINETARDAARVQVASTLSVLVGLFQVGLGLIHFGFVVTYLSEPLVRGYTTAAAVQVFVSQLKYVFGLHLSSHSGPLSLIYTVLEVCWKLPQSKVGTVVTAAVAGVVLVVVKLLNDKLQQQLPMPIPGELLTLIGATGISYGMGLKHRFEVDVVGNIPAGLVPPVAPNTQLFSKLVGSAFTIAVVGFAIAISLGKIFALRHGYRVDSNQELVALGLSNLIGGIFQCFPVSCSMSRSLVQESTGGNSQVAGAISSLFILLIIVKLGELFHDLPKAVLAAIIIVNLKGMLRQLSDMRSLWKANRADLLIWLVTFTATILLNLDLGLVVAVIFSLLLVVVRTQMPHYSVLGQVPDTDIYRDVAEYSEAKEVRGVKVFRSSATVYFANAEFYSDALKQRCGVDVDFLISQKKKLAASPKGASVSINVNTSLEDMRSNNVEDCKMMQVSSGDKMEDATANGQEDSKAPDGSTLKALGLPQPDFHSLILDLGALSFVDTVCLKSLKNIFHDFREIEVEVYMAACHSPVVSQLEAGHFFDASITKKHLFASVHDAVTFALQHPRPVPDSPVSVTRL

SEQ ID NO: 901229 - protein, 358 aa, Homo sapiens
MSRSLVQESTGGNSQVAGAISSLFILLIIVKLGELFHDLPKAVLAAIIIVNLKGMLRQLSDMRSLWKANRADLLIWLVTFTATILLNLDLGLVVAVIFSLLLVVVRTQMPHYSVLGQVPDTDIYRDVAEYSEAKEVRGVKVFRSSATVYFANAEFYSDALKQRCGVDVDFLISQKKKLLKKQEQLKLKQLQKEEKLRKQAASPKGASVSINVNTSLEDMRSNNVEDCKMMQVSSGDKMEDATANGQEDSKAPDGSTLKALGLPQPDFHSLILDLGALSFVDTVCLKSLKNIFHDFREIEVEVYMAACHSPVVSQLEAGHFFDASITKKHLFASVHDAVTFALQHPRPVPDSPVSVTRL

SEQ ID NO: 901230 - protein, 778 aa, Homo sapiens
MGLADASGPRDTQALLSATQAMDLRRRDYHMERPLLNQEHLEELGRWGSAPRTHQWRTWLQCSRARAYALLLQHLPVLVWLPRYPVRDWLLGDLLSGLSVAIMQLPQGLAYALLAGLPPVFGLYSSFYPVFIYFLFGTSRHISVGTFAVMSVMVGSVTESLAPQALNDSMINETARDAARVQVASTLSVLVGLFQVGLGLIHFGFVVTYLSEPLVRGYTTAAAVQVFVSQLKYVFGLHLSSHSGPLSLIYTVLEVCWKLPQSKVGTVVTAAVAGVVLVVVKLLNDKLQQQLPMPIPGELLTLIGATGISYGMGLKHRFEVDVVGNIPAGLVPPVAPNTQLFSKLVGSAFTIAVVGFAIAISLGKIFALRHGYRVDSNQELVALGLSNLIGGIFQCFPVSCSMSRSLVQESTGGNSQVAGAISSLFILLIIVKLGELFHDLPKAVLAAIIIVNLKGMLRQLSDMRSLWKANRADLLIWLVTFTATILLNLDLGLVVAVIFSLLLVVVRTQMPHYSVLGQVPDTDIYRDVAEYSEAKEVRGVKVFRSSATVYFANAEFYSDALKQRCGVDVDFLISQKKKLLKKQEQLKLKQLQKEEKLRKQAASPKGASVSINVNTSLEDMRSNNVEDCKMMQVSSGDKMEDATANGQEDSKAPDGSTLKALGLPQPDFHSLILDLGALSFVDTVCLKSLKNIFHDFREIEVEVYMAACHSPVVSQLEAGHFFDASITKKHLFASLHVHTHNSGKEVLGLQVQRSRSGTGPACSQAGSGAVQGGNWCIF

SEQ ID NO: 901231 - protein, 673 aa, Homo sapiens
MGLADASGPRDTQALLSATQAMDLRRRDYHMERPLLNQEHLEELGRWGSAPRTHQWRTWLQCSRARAYALLLQHLPVLVWLPRYPVRDWLLGDLLSGLSVAIMQLPQGLAYALLAGLPPVFGLYSSFYPVFIYFLFGTSRHISVGTFAVMSVMVGSVTESLAPQALNDSMINETARDAARVQVASTLSVLVGLFQVGLGLIHFGFVVTYLSEPLVRGYTTAAAVQVFVSQLKYVFGLHLSSHSGPLSLIYTVLEVCWKLPQSKVGTVVTAAVAGVVLVVVKLLNDKLQQQLPMPIPGELLTLIGATGISYGMGLKHRFEVDVVGNIPAGLVPPVAPNTQLFSKLVGSAFTIAVVGFAIAISLGKIFALRHGYRVDSNQELVALGLSNLIGGIFQCFPVSCSMSRSLVQESTGGNSQVAGAISSLFILLIIVKLGELFHDLPKAVLAAIIIVNLKGMLRQLSDMRSLWKANRADLLIWLVTFTATILLNLDLGLVVAVIFSLLLVVVRTQMPHYSVLGQVPDTDIYRDVAEYSEAKEVRGVKVFRSSATVYFANAEFYSDALKQRCGVDVDFLISQKKKLLKKQEQLKLKQLQKEEKLRKQAASPKGASVSINVNTSLEDMRSNNVEDCKMMVRLEVGKEVTAVSCRDAGSTCLMRNAMDPAAVGSRVLRRWQE

SEQ ID NO: 901232 - protein, 106 aa, Homo sapiens
TREGKAGEQDAARREEIQPPPVLPHPQAKEVRGVKVFRSSATVYFANAEFYSDALKQRVRRSPQDGCQAPAPRELTNPSLMFASSVVWMSTSSSPRRRNCSRSRSS

SEQ ID NO: 901233 - protein, 166 aa, Homo sapiens
MCPMHAPHLTLRVLACLCAASPAFTLSWVALAACLAPQQVSSGDKMEDATANGQEDSKAPDGSTLKALGLPQPDFHSLILDLGALSFVDTVCLKSLKNIFHDFREIEVEVYMAACHSPVVSQLEAGHFFDASITKKHLFASVHDAVTFALQHPRPVPDSPVSVTRL

SEQ ID NO: 901234 - protein, 735 aa, Homo sapiens
MGLADASGPRDTQALLSATQAMDLRRRDYHMERPLLNQEHLEELGRWGSAPRTHQWRTWLQCSRARAYALLLQHLPVLVWLPRYPVRDWLLGDLLSGLSVAIMQLPQGLAYALLAGLPPVFGLYSSFYPVFIYFLFGTSRHISVGTFAVMSVMVGSVTESLAPQALNDSMINETARDAARVQVASTLSVLVGLFQVGLGLIHFGFVVTYLSEPLVRGYTTAAAVQVFVSQLKYVFGLHLSSHSGPLSLIYTVLEVCWKLPQSKVGTVVTAAVAGVVLVVVKLLNDKLQQQLPMPIPGELLTLIGATGISYGMGLKHRFEVDVVGNIPAGLVPPVAPNTQLFSKLVGSAFTIAVVGFAIAISLGKIFALRHGYRVDSNQELVALGLSNLIGGIFQCFPVSCSMSRSLVQESTGGNSQVAGAISSLFILLIIVKLGELFHDLPKAVLAAIIIVNLKGMLRQLSDMRSLWKANRADLLIWLVTFTATILLNLDLGLVVAVIFSLLLVVVRTQMPHYSVLGQVPDTDIYRDVAEYSEAKEVRGVKVFRSSATVYFANAEFYSDALKQRCGVDVDFLISQKKKLLKKQEQLKLKQLQKEEKLRKQAGPLLSEQVSSGDKMEDATANGQEDSKAPDGSTLKALGLPQPDFHSLILDLGALSFVDTVCLKSLKNIFHDFREIEVEVYMAACHSPVVSQLEAGHFFDASITKKHLFASVHDAVTFALQHPRPVPDSPVSVTRL

SEQ ID NO: 901235 - protein, 802 aa, Homo sapiens
MGLADASGPRDTQALLSATQAMDLRRRDYHMERPLLNQEHLEELGRWGSAPRTHQWRTWLQCSRARAYALLLQHLPVLVWLPRYPVRDWLLGDLLSGLSVAIMQLPQGLAYALLAGLPPVFGLYSSFYPVFIYFLFGTSRHISVGTFAVMSVMVGSVTESLAPQALNDSMINETARDAARVQVASTLSVLVGLFQVGLGLIHFGFVVTYLSEPLVRGYTTAAAVQVFVSQLKYVFGLHLSSHSGPLSLIYTVLEVCWKLPQSKVGTVVTAAVAGVVLVVVKLLNDKLQQQLPMPIPGELLTLIGATGISYGMGLKHRFEAGAPSGPQHPAVLKARGQRLHHRCGWVCHCHLTGEIFALRHGYRVDSNQELVALGLSNLIGGIFQCFPVSCSMSRSLVQESTGGNSQVAGAISSLFILLIIVKLGELFHDLPKAVLAAIIIVNLKGMLRQLSDMRSLWKANRADLLIWLVTFTATILLNLDLGLVVAVIFSLLLVVVRTQMESAMLVPSFQLVREYHRAPRSFPHISGDFRLLRTPLLSPFSAPSSCILSLLHRPHYSVLGQVPDTDIYRDVAEYSEAKEVRGVKVFRSSATVYFANAEFYSDALKQRCGVDVDFLISQKKKLLKKQEQLKLKQLQKEEKLRKQAASPKGASVSINVNTSLEDMRSNNVEDCKMMQVSSGDKMEDATANGQEDSKAPDGSTLKALGLPQPDFHSLILDLGALSFVDTVCLKSLKNIFHDFREIEVEVYMAACHSPVVSQLEAGHFFDASITKKHLFASVHDAVTFALQHPRPVPDSPVSVTRL

SEQ ID NO: 901236 - protein, 330 aa, Homo sapiens
EVSWGTPSMTLPKAVLAAIIIVNLKGMLRQLSDMRSLWKANRADLLIWLVTFTATILLNLDLGLVVAVIFSLLLVVVRTQMPHYSVLGQVPDTDIYRDVAEYSEAKEVRGVKVFRSSATVYFANAEFYSDALKQRCGVDVDFLISQKKKLLKKQEQLKLKQLQKEEKLRKQAASPKGASVSINVNTSLEDMRSNNVEDCKMMQVSSGDKMEDATANGQEDSKAPDGSTLKALGLPQPDFHSLILDLGALSFVDTVCLKSLKNIFHDFREIEVEVYMAACHSPVVSQLEAGHFFDASITKKHLFASVHDAVTFALQHPRPVPDSPVSVTRL

SEQ ID NO: 901237 - protein, 764 aa, Homo sapiens
MGLADASGPRDTQALLSATQAMDLRRRDYHMERPLLNQEHLEELGRWGSAPRTHQWRTWLQCSRARAYALLLQHLPVLVWLPRYPVRDWLLGDLLSGLSVAIMQLPQGLAYALLAGLPPVFGLYSSFYPVFIYFLFGTSRHISVGTFAVMSVMVGSVTESLAPQALNDSMINETARDAARVQVASTLSVLVGLFQVGLGLIHFGFVVTYLSEPLVRGYTTAAAVQVFVSQLKYVFGLHLSSHSGPLSLIYTVLEVCWKLPQSKVGTVVTAAVAGVVLVVVKLLNDKLQQQLPMPIPGELLTLIGATGISYGMGLKHRFEVDVVGNIPAGLVPPVAPNTQLFSKLVGSAFTIAVVGFAIAISLGKIFALRHGYRVDSNQELVALGLSNLIGGIFQCFPVSCSMSRSLVQESTGGNSQVAGAISSLFILLIIVKLGELFHDLPKAVLAAIIIVNLKGMLRQLSDMRSLWKANRADLLIWLVTFTATILLNLDLGLVVAVIFSLLLVVVRTQMPHYSVLGQVPDTDIYRDVAEYSEAKEVRGVKVFRSSATVYFANAEFYSDALKQRCGVDVDFLISQKKKLLKKQEQLKLKQLQKEEKLRKQAASPKGASVSINVNTSLEDMRSNNVEDCKMMQVSSGDKMEDATANGQEDSKAPDGSTLKALGLPQPDFHSLILDLGALSFVDTVCLKSLKNIFHDFREIEVEVYMAACHSPVVSQLEAGHFFDASITKKHLFASVHDAVTFALQHPRPVMAAGLAVCHSLSSLV

SEQ ID NO: 901238 - protein, 166 aa, Homo sapiens
MGLADASGPRDTQALLSATQAMDLRRRDYHMERPLLNQEHLEELGRWGSAPRTHQWRTWLQCSRARAYALLLQHLPVLVWLPRYPVRDWLLGDLLSGLSVAIMQLPQGLAYALLAGLPPVFGLYSSFYPVFIYFLFGTSRHISVGHQTLNMLHPAQDCTSGGAGHP

SEQ ID NO: 901239 - protein, 146 aa, Homo sapiens
MSPSSECCCCHSSWLLWAMISQGQVNLGLKGIPLHGPQESLIGDTCRALTTRPELAFSPLGQAHGVEMVPPAEVIAPVLGWPLCPPCLRYALTCWAHKALSTYQEGGHSLARHLFAFHSWVSVHPSREAGLREAGRPVPPALAFLQ

SEQ ID NO: 901240 - protein, 335 aa, Homo sapiens [sequence omitted]

SEQ ID NO: 901241 - protein, 259 aa, Homo sapiens
MALNQFSDMSFAEIKHKYLWSEPQNCSATKSNYLRGTGPYPPSVDWRKKGNFVSPVKNQGACGSCWTFSTTGALESAIAIATGKMLSLAEQQLVDCAQDFNNHGCQGGLPSQAFEYILYNKGIMGEDTYPYQGKDGYCKFQPGKAIGFVKDVANITIYDEEAMVEAVALYNPVSFAFEVTQDFMMYRTGIYSSTSCHKTPDKVNHAVLAVGYGEKNGIPYWIVKNSWGPQWGMNGYFLIERGKNMCGLAACASYPIPLV

SEQ ID NO: 901242 - protein, 259 aa, Homo sapiens; identical to SEQ ID NO: 901241

SEQ ID NO: 901243 - protein, 251 aa, Homo sapiens
MSFAEIKHKYLWSEPQNCSATKSNYLRGTGPYPPSVDWRKKGNFVSPVKNQGACGSCWTFSTTGALESAIAIATGKMLSLAEQQLVDCAQDFNNHGCQGGLPSQAFEYILYNKGIMGEDTYPYQGKDGYCKFQPGKAIGFVKDVANITIYDEEAMVEAVALYNPVSFAFEVTQDFMMYRTGIYSSTSCHKTPDKVNHAVLAVGYGEKNGIPYWIVKNSWGPQWGMNGYFLIERGKNMCGLAACASYPIPLV

SEQ ID NO: 901244 - protein, 320 aa, Homo sapiens
MWATLPLLCAGAWLLGVPVCGAAELSVNSLEKFHFKSWMSKHRKTYSTEEYHHRLQTFASNWRKINAHNNGNHTFKMALNQFSDMSFAEIKHKYLWSEPQNCSATKSNYLRGTGPYPPSVDWRKKGNFVSPVKNQESAIAIATGKMLSLAEQQLVDCAQDFNNHGCQGGLPSQAFEYILYNKGIMGEDTYPYQGKDGYCKFQPGKAIGFVKDVANITIYDEEAMVEAVALYNPVSFAFEVTQDFMMYRTGIYSSTSCHKTPDKVNHAVLAVGYGEKNGIPYWIVKNSWGPQWGMNGYFLIERGKNMCGLAACASYPIPLV

SEQ ID NO: 901245 - protein, 372 aa, Homo sapiens
RSRRSSTLVPPPPRSQLTLWAATSADPERKSQAASAAMWATLPLLCAGAWLLGVPVCGAAELSVNSLEKFHFKSWMSKHRKTYSTEEYHHRLQTFASNWRKINAHNNGNHTFKMALNQFSDMSFAEIKHKYLWSEPQNCSATKSNYLRGTGPYPPSVDWRKKGNFVSPVKNQGACGSCWTFSTTGALESAIAIATGKMLSLAEQQLVDCAQDFNNHGCQGGLPSQAFEYILYNKGIMGEDTYPYQGKDGYCKFQPGKAIGFVKDVANITIYDEEAMVEAVALYNPVSFAFEVTQDFMMYRTGIYSSTSCHKTPDKVNHAVLAVGYGEKNGIPYWIVKNSWGPQWGMNGYFLIERGKNMCGLAACASYPIPLV

SEQ ID NO: 901246 - protein, 372 aa, Homo sapiens; identical to SEQ ID NO: 901245

SEQ ID NO: 901247 - protein, 293 aa, Homo sapiens
SQTRPHTIQSEHEPRQDLSLPEGTRLAPPPVSGQGGAIPGDMNASPVISSSPLRSEAQGQASLSGSVSSSGTRQEDDLPWRCPWATAHRAQEPQPATWASTPFPARDDGSIALGFMVFLEEQMSWSFTDCAQDFNNHGCQGGLPSQAFEYILYNKGIMGEDTYPYQGKDGYCKFQPGKAIGFVKDVANITIYDEEAMVEAVALYNPVSFAFEVTQDFMMYRTGIYSSTSCHKTPDKVNHAVLAVGYGEKNGIPYWIVKNSWGPQWGMNGYFLIERGKNMCGLAACASYPIPLV

SEQ ID NO: 901248 - protein, 372 aa, Homo sapiens; identical to SEQ ID NO: 901245

SEQ ID NO: 901249 - protein, 176 aa, Homo sapiens
MALNQFSDMSFAEIKHKYLWSEPQNCSATKSNYLRGTGPYPPSVDWRKKGNFVSPVKNQGACGSCWTFSTTGALYDEEAMVEAVALYNPVSFAFEVTQDFMMYRTGIYSSTSCHKTPDKVNHAVLAVGYGEKNGIPYWIVKNSWGPQWGMNGYFLIERGKNMCGLAACASYPIPLV

SEQ ID NO: 901250 - protein, 308 aa, Homo sapiens
RSRRSSTLVPPPPRSQLTLWAATSADPERKSQAASAAMWATLPLLCAGAWLLGVPVCGAAELSVNSLEKFHFKSWMSKHRKTYSTEEYHHRLQTFASNWRKINAHNNGNHTFKMALNQFSDMSFAEIKHKYLWSEPQNCSATKSNYLRGTGPYPPSVDWRKKGNFVSPVKNQGACGSCWTFSTTGALESAIAIATGKMLSLAEQQLVDCAQDFNNHGCQGGLPSQAFEYILYNKGIMGEDTYPYQGKDGYCKFQPGKAIGFVKDVANITIVSADPPLGWGMCPDEEASLMLSDSQWAQQGSPSGSTSL

SEQ ID NO: 901251 - protein, 270 aa, Homo sapiens
RSRRSSTLVPPPPRSQLTLWAATSADPERKSQAASAAMWATLPLLCAGAWLLGVPVCGAAELSVNSLEKFHFKSWMSKHRKTYSTEEYHHRLQTFASNWRKINAHNNGNHTFKMALNQFSDMSFAEIKHKYLWSEPQNCSATKSNYLRGTGPYPPSVDWRKKGNFVSPVKNQGACGSCWTFSTTGALESAIAIATGKMLSLAEQQLVDCAQDFNNHGCQGGLPSQAFEYILYNKGIMGEDTYPYQGKDGYCKFQPGKAIGFVKDVANITI

SEQ ID NO: 901252 - protein, 314 aa, Homo sapiens
SQTRPHTIQSEHEPRQDLSLPEGTRLAPPPVSGQGGAIPGDMNASPVISSSPLRSEAQGQASLSGSVSSSGTRQEDDLPWRCPWATAHRAQEPQPATWASTPFPARDDGSIALGFMVFLEEQMSWSFTDCAQDFNNHGCQGGLPSQAFEYILYNKGIMGEDTYPYQGKDGYCKFQPGKAIGFVKDVANITIYDEEAMVEAVALYNPVSFAFEVTQDFMMYRTGIYSSTSCHKTPDKVNHAVLAVGYGDPLGPPTFCPHLCAQPGNLQTRRSSTMSSPVSMTQRSPAMCLSVLLNRLKPHGPRIFFLSRRATFHI

SEQ ID NO: 901253 - protein, 207 aa, Homo sapiens
PPLSGQPQVGSPVCTSCRGLPSQAFEYILYNKGIMGEDTYPYQGKVTPTASTLSSWRTACLASLPPQPWKTSLLPPPPSRRNSHNCLFSPNSSFPSSTHLSPLLYQSRGLFIILTPYPLCGTISFLPEPDFSGPLLPPTCPIFLAPLPPATSAILSPLSMQLASCAKDPLGAHPHPYPIKAAGPPTITSAQPGHSQVPCLSPRPVAP

SEQ ID NO: 901254 - protein, 372 aa, Homo sapiens; identical to SEQ ID NO: 901245

SEQ ID NO: 901255 - protein, 410 aa, Homo sapiens
RSRRSSTLVPPPPRSQLTLWAATSADPERKSQAASAAMWATLPLLCAGAWLLGVPVCGAAELSVNSLGTQRARRPERVLAGPRVDAGENLARAHWAPEERGRAFPEKFHFKSWMSKHRKTYSTEEYHHRLQTFASNWRKINAHNNGNHTFKMALNQFSDMSFAEIKHKYLWSEPQNCSATKSNYLRGTGPYPPSVDWRKKGNFVSPVKNQGACGSCWTFSTTGALESAIAIATGKMLSLAEQQLVDCAQDFNNHGCQGGLPSQAFEYILYNKGIMGEDTYPYQGKDGYCKFQPGKAIGFVKDVANITIYDEEAMVEAVALYNPVSFAFEVTQDFMMYRTGIYSSTSCHKTPDKVNHAVLAVGYGEKNGIPYWIVKNSWGPQWGMNGYFLIERGKNMCGLAACASYPIPLV

SEQ ID NO: 901256 - protein, 297 aa, Homo sapiens
MSKHRKTYSTEEYHHRLQTFASNWRKINAHNNGNHTFKMALNQFSDMSFAEIKHKYLWSEPQNCSATKSNYLRGTGPYPPSVDWRKKGNFVSPVKNQGACGSCWTFSTTGALESAIAIATGKMLSLAEQQLVDCAQDFNNHGCQGGLPSQAFEYILYNKGIMGEDTYPYQGKDGYCKFQPGKAIGFVKDVANITIYDEEAMVEAVALYNPVSFAFEVTQDFMMYRTGIYSSTSCHKTPDKVNHAVLAVGYGEKNGIPYWIVKNSWGPQWGMNGYFLIERGKNMCGLAACASYPIPLV

SEQ ID NO: 901257 - protein, 372 aa, Homo sapiens; identical to SEQ ID NO: 901245

SEQ ID NO: 901258 - protein, 372 aa, Homo sapiens; identical to SEQ ID NO: 901245

SEQ ID NO: 901259 - protein, 372 aa, Homo sapiens; identical to SEQ ID NO: 901245

SEQ ID NO: 901260 - protein, 372 aa, Homo sapiens; identical to SEQ ID NO: 901245

SEQ ID NO: 901261 - protein, 416 aa, Homo sapiens
RSRRSSTLVPPPPRSQLTLWAATSADPERKSQAASAAMWATLPLLCAGAWLLGVPVCGAAELSVNSLEKFHFKSWMSKHRKTYSTEEYHHRLQTFASNWRKINAHNNGNHTFKMALNQFSDMSFAEIKHKYLWSEPQNCSATKSNYLRGTGPYPPSVDWRKKGNFVSPVKNQGACGSCWTFSTTGALESAIAIATGKMLSLAEQQLVDCAQDFNNHGCQGGLPSQAFEYILYNKGIMGEDTYPYQGKDGYCKFQPGKAIGFVKDVANITIYDEEAMVEAVALYNPVSFAFEVTQDFMMYRTGIYSSTSCHKTPDKVNHAVLAVGYGEKNGIPYWIVKNSWGPQWGMNGYFLIERGKNMGSLGLGGNPALEEVVGRSTGTPNILPSPLCPAWKPTDKEEFHHELTRVYDAKITSHVP

SEQ ID NO: 901262 - protein, 273 aa, Homo sapiens
SQTRPHTIQSEHEPRQDLSLPEGTRLAPPPVSGQGGAIPGDMNASPVISSSPLRSEAQGQASLSGSVSSSGTRQEDDLPWRCPWATAHRAQEPQPATWASTPFPARDDGSIALGFMVFLEEQMSWSFTDCAQDFNNHGCQGGLPSQGKDGYCKFQPGKAIGFVKDVANITIYDEEAMVEAVALYNPVSFAFEVTQDFMMYRTGIYSSTSCHKTPDKVNHAVLAVGYGEKNGIPYWIVKNSWGPQWGMNGYFLIERGKNMCGLAACASYPIPLV

SEQ ID NO: 901263 - protein, 109 aa, Homo sapiens
MWATLPLLCAGAWLLGVPVCGAAELSVNSLEKFHFKSWMSKHRKTYSTEEYHHRLQTFASNWRKINAHNNGNHTFKMALNQFSDMSFAEIKHKYLWSEPQVGIIHCNQI

SEQ ID NO: 901264 - protein, 117 aa, Homo sapiens
MTLWAATSADPERKSQAASAAMWATLPLLCAGAWLLGVPVCGAAELSVNSLGTQRARRPERVLAGPRVDAGRTWPGRTGLRRNGAELSPVRGQELCVLARGGVNCIIGGGSRRVGGL

SEQ ID NO: 901265 - protein, 856 aa, Homo sapiens
MALVLGSLLLLGLCGNSFSGGQPSSTDAPKAWNYELPATNYETQDSHKAGPIGILFELVHIFLYVVQPRDFPEDTLRKFLQKAYESKIDYDKIVYYEAGIILCCVLGLLFIILMPLVGYFFCMCRCCNKCGGEMHQRQKENGPFLRKCFAISLLVICIIISIGIFYGFVANHQVRTRIKRSRKLADSNFKDLRTLLNETPEQIKYILAQYNTTKDKAFTDLNSINSVLGGGILDRLRPNIIPVLDEIKSMATAIKETKEALENMNSTLKSLHQQSTQLSSSLTSVKTSLRSSLNDPLCLVHPSSETCNSIRLSLSQLNSNPELRQLPPVDAELDNVNNVLRTDLDGLVQQGYQSLNDIPDRVQRQTTTVVAGIKRVLNSIGSDIDNVTQRLPIQDILSAFSVYVNNTESYIHRNLPTLEEYDSYWWLGGLVICSLLTLIVIFYYLGLLCGVCGYDRHATPTTRGCVSNTGGVFLMVGVGLSFLFCWILMIIVVLTFVFGANVEKLICEPYTSKELFRVLDTPYLLNEDWEYYLSGKLFNKSKMKLTFEQVYSDCKKNRGTYGTLHLQNSFNISEHLNINEHTGSISSELESLKVNLNIFLLGAAGRKNLQDFAACGIDRMNYDSYLAQTGKSPAGVNLLSFAYDLEAKANSLPPGNLRNSLKRDAQTIKTIHQQRVLPIEQSLSTLYQSVKILQRTGNGLLERVTRILASLDFAQNFITNNTSSVIIEETKKYGRTIIGYFEHYLQWIEFSISEKVASCKPVATALDTAVDVFLCSYIIDPLNLFWFGIGKATVFLLPALIFAVKLAKYYRRMDSEDVYDDVETIPMKNMENGNNGYHKDHVYGIHNPVMTSPSQH

SEQ ID NO: 901266 - protein, 865 aa, Homo sapiens
MALVLGSLLLLGLCGNSFSGGQPSSTDAPKAWNYELPATNYETQDSHKAGPIGILFELVHIFLYVVQPRDFPEDTLRKFLQKAYESKIDYDKPETVILGLKIVYYEAGIILCCVLGLLFIILMPLVGYFFCMCRCCNKCGGEMHQRQKENGPFLRKCFAISLLVICIIISIGIFYGFVANHQVRTRIKRSRKLADSNFKDLRTLLNETPEQIKYILAQYNTTKDKAFTDLNSINSVLGGGILDRLRPNIIPVLDEIKSMATAIKETKEALENMNSTLKSLHQQSTQLSSSLTSVKTSLRSSLNDPLCLVHPSSETCNSIRLSLSQLNSNPELRQLPPVDAELDNVNNVLRTDLDGLVQQGYQSLNDIPDRVQRQTTTVVAGIKRVLNSIGSDIDNVTQRLPIQDILSAFSVYVNNTESYIHRNLPTLEEYDSYWWLGGLVICSLLTLIVIFYYLGLLCGVCGYDRHATPTTRGCVSNTGGVFLMVGVGLSFLFCWILMIIVVLTFVFGANVEKLICEPYTSKELFRVLDTPYLLNEDWEYYLSGKLFNKSKMKLTFEQVYSDCKKNRGTYGTLHLQNSFNISEHLNINEHTGSISSELESLKVNLNIFLLGAAGRKNLQDFAACGIDRMNYDSYLAQTGKSPAGVNLLSFAYDLEAKANSLPPGNLRNSLKRDAQTIKTIHQQRVLPIEQSLSTLYQSVKILQRTGNGLLERVTRILASLDFAQNFITNNTSSVIIEETKKYGRTIIGYFEHYLQWIEFSISEKVASCKPVATALDTAVDVFLCSYIIDPLNLFWFGIGKATVFLLPALIFAVKLAKYYRRMDSEDVYDDVETIPMKNMENGNNGYHKDHVYGIHNPVMTSPSQH

SEQ ID NO: 901267 - protein, 856 aa, Homo sapiens; identical to SEQ ID NO: 901265

SEQ ID NO: 901268 - protein, 72 aa, Homo sapiens
PPCMSSPNLMCLMQHCSEARWILQVQRGCDPPEVTVGQGVPELKLPTFQMEFTSLPLAYTFLVVKAIITESL

SEQ ID NO: 901269 - protein, 128 aa, Homo sapiens
PLSRLLRNIFPCVEQTNCSERDAERVRSTHLLPPDYILLWLPYRGVYVIGRRLDELAGRVIGKATVFLLPALIFAVKLAKYYRRMDSEDVYDDVETIPMKNMENGNNGYHKDHVYGIHNPVMTSPSQH

SEQ ID NO: 901270 - protein, 804 aa, Homo sapiens
MALVLGSLLLLGLCGNSFSGGQPSSTDAPKAWNYELPATNYETQDSHKAGPIGILFELVHIFLYVVQPRDFPEDTLRKFLQKAYESKIDYDKIVYYEAGIILCCVLGLLFIILMPLVGYFFCMCRCCNKCGGEMHQRQKENGPFLRKCFAISLLVICIIISIGIFYGFVANHQVRTRIKRSRKLADSNFKDLRTLLNETPEQIKYILAQYNTTKDKAFTDLNSINSVLGGGILDRLRPNIIPVLDEIKSMATAIKETKEALENMNSTLKSLHQQSTQLSSSLTSVKTSLRSSLNDPLCLVHPSSETCNSIRLSLSQLNSNPELRQLPPVDAELDNVNNVLRTDLDGLVQQGYQSLNDIPDRVQRQTTTVVAGIKRVLNSIGSDIDNVTQRLPIQDILSAFSVYVNNTESYIHRNLPTLEEYDSYWWLGGLVICSLLTLIVIFYYLGLLCGVCGYDRHATPTTRGCVSNTGGVFLMVGVGLSFLFCWILMIIVVLTFVFGANVEKLICEPYTSKELFRVLDTPYLLNEDWEYYLSGKLFNKSKMKLTFEQVYSDCKKNRGTYGTLHLQNSFNISEHLNINEHTGSISSELESLKVNLNIFLLGAAGRKNLQDFAACGIDRMNYDSYLAQTGKSPAGVNLLSFAYDLEAKANSLPPGNLRNSLKRDAQTIKTIHQQRVLPIEQSLSTLYQSVKILQRTGNGLLERVTRILASLDFAQNFITNNTSSVIIEETKKYGRTIIGYFEHYLQWIEFSEVSERTLMCRTKTSGASHQVRGQPPPGPLCSPLPYAVLPFASHPLFQVTKGPG

SEQ ID NO: 901271 - protein, 136 aa, Homo sapiens
MLFWLAYHPHIPTPHHRILFSFLPSNSWLPRCQLCSLCLQFKGAPWKKCNNSLTCDWYLTATTPGQQWLTVDKDNFFLSPKPNSLHQLPSQDSLSGPYRCRSGWQLPNLGKRKYPIMATYLHLQLLPVHPQSLLFV

SEQ ID NO: 901272 - protein, 136 aa, Homo sapiens; identical to SEQ ID NO: 901271

SEQ ID NO: 901273 - protein, 136 aa, Homo sapiens; identical to SEQ ID NO: 901271

SEQ ID NO: 901274 - protein, 136 aa, Homo sapiens; identical to SEQ ID NO: 901271

SEQ ID NO: 901275 - protein, 136 aa, Homo sapiens; identical to SEQ ID NO: 901271

SEQ ID NO: 901276 - protein, 136 aa, Homo sapiens; identical to SEQ ID NO: 901271

SEQ ID NO: 901277 - protein, 815 aa, Homo sapiens
MYEGKHIHFSEVDNKPLCSYSPKLCKQRRLNGYAFCIRHVLEDKTAPFKQCEYVAKYNSQRCTNPIPKSEDRRYCNSHLQVLGFIPKKERKKKNDPIDEVKVRHQMDTMAFSLTVPTLALKMPNGLDGMSLSPPGARVPLHYLETELEDPFAFNEEDDDLKKGATVRKKLQSKLAQNRQRQRETEILKVRQEHFSPPPAPSQQQPPQQHSHLSPLSTSLKPPAPPQGSVCKSPQPQNTSLPMQGVAPTTHTIAQARQLSHKRPLPLLPSSRAPTVDPPRTDRILMKATAFSPHFSCISRLQRLVKLCTQKHQLDTDLFPHLGLDWSEESGEEPEDSEQASPYQVAWSIRETLRYQRHASDDDDAESRSSRVTQLCTYFQQKYKHLCRLERAESRQKKCRHTFRKALLQAASKEPECTGQLIQELRRAACSRTSISRTKLREVEPAACSGTVKGEQCANKALPFTRHCFQHILLNHSQQLFSSCTAKFADGQQCSVPVFDITHQTPLCEEHAKKMDNFLRGDNSRKVQHQQQRKPRKKTKPPALTKKHKKKRRRGPRRPQKPIPPAVPQGNLSMPASVSLPVEASHIRSPSTPELSADELPDDIANEITDIPHDLELNQEDFSDVLPRLPDDLQDFDFFEGKNGDLLPTTEEAEELERALQAVTSLECLSTIGVLAQSDGVPVQELSDRGIGVFSTGTGASGIQSLSREVNTDLGELLNGRIVHDNFSSLELDENLLRSATLSNPPTPLAGQIQGQFSAPANVGLTSATLISQSALGERAFPGQFHGLHDGSHASQRPHPAQLLSKADDPNHLIDS

SEQ ID NO: 901278 - protein, 455 aa, Homo sapiens [sequence omitted]

SEQ ID NO: 901279 - protein, 1027 aa, Homo sapiens
MYEGKHIHFSEVDNKPLCSYSPKLCKQRRLNGYAFCIRHVLEDKTAPFKQCEYVAKYNSQRCTNPIPKSEDRRYCNSHLQVLGFIPKKERKKKNDPIDEVKVRHQMDTMAFSLTVPTLALKMPNGLDGMSLSPPGARVPLHYLETELEDPFAFNEEDDDLKKGATVRKKLQSKLAQNRQRQRETEILKVRQEHFSPPPAPSQQQPPQQHSHLSPLSTSLKPPAPPQGSVCKSPQPQNTSLPMQGVAPTTHTIAQARQLSHKRPLPLLPSSRAPTVDPPRTDRILMKATAFSPHFSCISRLQRLVKLCTQKHQLDTDLFPHLGLDWSEESGEEPEDSEQASPYQVAWSIRETLRYQRHASDDDDAESRSSRVTQLCTYFQQKYKHLCRLERAESRQKKCRHTFRKALLQAASKEPECTGQLIQELRRAACSRTSISRTKLREVEPAACSGTVKGEQCANKALPFTRHCFQHILLNHSQQLFSSCTAKFADGQQCSVPVFDITHQTPLCEEHAKKMDNFLRGDNSRKVQHQQQRKPRKKTKPPALTKKHKKKRRRGPRRPQKPIPPAVPQGNLSMPASVSLPVEASHIRSPSTPELSADELPDDIANEITDIPHDLELNQEDFSDVLPRLPDDLQDFDFFEGKNGDLLPTTEEAEELERALQAVTSLECLSTIGVLAQSDGVPVQELSDRGIGVFSTGTGASGIQSLSREVNTDLGELLNGRIVHDNFSSLELDENLLRSATLSNPPTPLAGQIQGQFSAPANVGLTSATLISQSALGERAFPGQFHGLHDGSHASQRPHPAQLLSKADDLITSRQQYSSDHSHSSPHGSHYDSEHVPSPYSDHITSPHTTSYSGDNMAATFSAEMPIMAQHLLPTQLEVPLGGVVNPRTHWGNLPVNLGDPSPFSNLLGADGHLLSTSLSTPPTTSNSETTQPAFATVTPSSSSVLPGLPQTSFSGMGPSAELMASTSPKQQLPQFSAAFGHQLSSHSGIPKDLQPSHSSIAPPTGFTVTGATATSTNNASSPFPSPN

SEQ ID NO: 901280 - protein, 2466 aa, Homo sapiens
MHVSLAEALEVRGGPLQEEEIWAVLNQSAESLQELFRKVSLADPAALGFIISPWSLLLLPSGSVSFTDENISNQDLRAFTAPEVLQNQSLTSLSDVEKIHIYSLGMTLYWGADYEVPQSQPIKLGDHLNSILLGMCEDVIYARVSVRTVLDACSAHIRNSNCAPSFSYVKHLVKLVLGNLSGTDQLSCNSEQKPDRSQAIRDRLRGKGLPTGRSSTSDVLDIQKPPLSHQTFLNKGLSKSMGFLSIKDTQDENYFKDILSDNSGREDSENTFSPYQFKTSGPEKKPIPGIDVLSKKKIWASSMDLLCTADRDFSSGETATYRRCHPEAVTVRTSTTPRKKEARYSDGSIALDIFGPQKMDPIYHTRELPTSSAISSALDRIRERQKKLQVLREAMNVEEPVRRYKTYHGDVFSTSSESPSIISSESDFRQVRRSEASKRFESSSGLPGVDETLSQGQSQRPSRQYETPFEGNLINQEIMLKRQEEELMQLQAKMALRQSRLSLYPGDTIKASMLDITRDPLREIALETAMTQRKLRNFFGPEFVKMTIEPFISLDLPRSILTKKGKNEDNRRKVNIMLLNGQRLELTCDTKTICKDVFDMVVAHIGLVEHHLFALATLKDNEYFFVDPDLKLTKVAPEGWKEEPKKKTKATVNFTLFFRIKFFMDDVSLIQHTLTCHQYYLQLRKDILEERMHCDDETSLLLASLALQAEYGDYQPEVHGVSYFRMEHYLPARVMEKLDLSYIKEELPKLHNTYVGASEKETELEFLKVCQRLTEYGVHFHRVHPEKKSQTGILLGVCSKGVLVFEVHNGVRTLVLRFPWRETKKISFSKKKITLQNTSDGIKHGFQTDNSKICQYLLHLCSYQHKFQLQMRARQSNQDAQDIERASFRSLNLQAESVRGFNMGRAISTGSLASSTLNKLAVRPLSVQAEILKRLSCSELSLYQPLQNSSKEKNDKASWEEKPREMSKSYHDLSQASLYPHRKNVIVNMEPPPQTVAELVGKPSHQMSRSDAESLAGVTKLNNSKSVASLNRSPERRKHESDSSSIEDPGQAYVLDVLHKRWSIVSSPEREITLVNLKKDAKYGLGFQIIGGEKMGRLDLGIFISSVAPGGPADLDGCLKPGDRLISVNSVSLEGVSHHAAIEILQNAPEDVTLVISQPKEKISKVPSTPVHLTNEMKNYMKKSSYMQDSAIDSSSKDHHWSRGTLRHISENSFGPSGGLREGSLSSQDSRTESASLSQSQVNGFFASHLGDQTWQESQHGSPSPSVISKATEKETFTDSNQSKTKKPGISDVTDYSDRGDSDMDEATYSSSQDHQTPKQESSSSVNTSNKMNFKTFSSSPPKPGDIFEVELAKNDNSLGISVTGGVNTSVRHGGIYVKAVIPQGAAESDGRIHKGDRVLAVNGVSLEGATHKQAVETLRNTGQVVHLLLEKGQSPTSKEHVPVTPQCTLSDQNAQGQGPEKVKKTTQVKDYSFVTEENTFEVKLFKNSSGLGFSFSREDNLIPEQINASIVRVKKLFPGQPAAESGKIDVGDVILKVNGASLKGLSQQEVISALRGTAPEVFLLLCRPPPGVLPEIDTALLTPLQSPAQVLPNSSKDSSQPSCVEQSTSSDENEMSDKSKKQCKSPSRRDSYSDSSGSGEDDLVTAPANISNSTWSSALHQTLSNMVSQAQSHHEAPKSQEDTICTMFYYPQKIPNKPEFEDSNPSPLPPDMAPGQSYQPQSESASSSSMDKYHIHHISEPTRQENWTPLKNDLENHLEDFELEVELLITLIKSEKGSLGFTVTKGNQRIGCYVHDVIQDPAKSDGRLKPGDRLIKVNDTDVTNMTHTDAVNLLRAASKTVRLVIGRVLELPRIPMLPHLLPDITLTCNKEELGFSLCGGHDSLYQVVYISDINPRSVAAIEGNLQLLDVIHYVNGVSTQGMTLEEVNRALDMSLPSLVLKATRNDLPVVPSSKRSAVSAPKSTKGNGSYSVGSCSQPALTPNDSFSTVAGEEINEISYPKGKCSTYQIKGSPNLTLPKESYIQEDDIYDDSQEAEVIQSLLDVVDEEAQNLLNENNAAGYSCGPGTLKMNGKLSEERTEDTDCDGSPLPEYFTEATKMNGCEEYCEEKVKSESLIQKPQEKKTDDDEITWGNDELPIERTNHEDSDKDHSFLTNDELAVLPVVKVLPSGKYTGANLKSVIRVLRGLLDQGIPSKELENLQELKPLDQCLIGQTKENRRKNRYKNILPYDATRVPLGDEGGYINASFIKIPVGKEEFVYIACQGPLPTTVGDFWQMIWEQKSTVIAMMTQEVEGEKIKCQRYWPNILGKTTMVSNRLRLALVRMQQLKGFVVRAMTLEDIQTREVRHISHLNFTAWPDHDTPSQPDDLLTFISYMRHIHRSGPIITHCSAGIGRSGTLICIDVVLGLISQDLDFDISDLVRCMRLQRHGMVQTEDQYIFCYQVILYVLTRLQAEEEQKQQPQLLK

SEQ ID NO: 901281 - protein, 2485 aa, Homo sapiens
MHVSLAEALEVRGGPLQEEEIWAVLNQSAESLQELFRKVSLADPAALGFIISPWSLLLLPSGSVSFTDENISNQDLRAFTAPEVLQNQSLTSLSDVEKIHIYSLGMTLYWGADYEVPQSQPIKLGDHLNSILLGMCEDVIYARVSVRTVLDACSAHIRNSNCAPSFSYVKHLVKLVLGNLSGTDQLSCNSEQKPDRSQAIRDRLRGKGLPTGRSSTSDVLDIQKPPLSHQTFLNKGLSKSMGFLSIKDTQDENYFKDILSDNSGREDSENTFSPYQFKTSGPEKKPIPGIDVLSKKKIWASSMDLLCTADRDFSSGETATYRRCHPEAVTVRTSTTPRKKEARYSDGSIALDIFGPQKMDPIYHTRELPTSSAISSALDRIRERQKKLQVLREAMNVEEPVRRYKTYHGDVFSTSSESPSIISSESDFRQVRRSEASKRFESSSGLPGVDETLSQGQSQRPSRQYETPFEGNLINQEIMLKRQEEELMQLQAKMALRQSRLSLYPGDTIKASMLDITRDPLREIALETAMTQRKLRNFFGPEFVKMTIEPFISLDLPRSILTKKGKNEDNRRKVNIMLLNGQRLELTCDTKTICKDVFDMVVAHIGLVEHHLFALATLKDNEYFFVDPDLKLTKVAPEGWKEEPKKKTKATVNFTLFFRIKFFMDDVSLIQHTLTCHQYYLQLRKDILEERMHCDDETSLLLASLALQAEYGDYQPEVHGVSYFRMEHYLPARVMEKLDLSYIKEELPKLHNTYVGASEKETELEFLKVCQRLTEYGVHFHRVHPEKKSQTGILLGVCSKGVLVFEVHNGVRTLVLRFPWRETKKISFSKKKITLQNTSDGIKHGFQTDNSKICQYLLHLCSYQHKFQLQMRARQSNQDAQDIERASFRSLNLQAESVRGFNMGRAISTGSLASSTLNKLAVRPLSVQAEILKRLSCSELSLYQPLQNSSKEKNDKASWEEKPREMSKSYHDLSQASLYPHRKNVIVNMEPPPQTVAELVGKPSHQMSRSDAESLAGVTKLNNSKSVASLNRSPERRKHESDSSSIEDPGQAYVLGMTMHSSGNSSSQVPLKENDVLHKRWSIVSSPEREITLVNLKKDAKYGLGFQIIGGEKMGRLDLGIFISSVAPGGPADLDGCLKPGDRLISVNSVSLEGVSHHAAIEILQNAPEDVTLVISQPKEKISKVPSTPVHLTNEMKNYMKKSSYMQDSAIDSSSKDHHWSRGTLRHISENSFGPSGGLREGSLSSQDSRTESASLSQSQVNGFFASHLGDQTWQESQHGSPSPSVISKATEKETFTDSNQSKTKKPGISDVTDYSDRGDSDMDEATYSSSQDHQTPKQESSSSVNTSNKMNFKTFSSSPPKPGDIFEVELAKNDNSLGISVTGGVNTSVRHGGIYVKAVIPQGAAESDGRIHKGDRVLAVNGVSLEGATHKQAVETLRNTGQVVHLLLEKGQSPTSKEHVPVTPQCTLSDQNAQGQGPEKVKKTTQVKDYSFVTEENTFEVKLFKNSSGLGFSFSREDNLIPEQINASIVRVKKLFPGQPAAESGKIDVGDVILKVNGASLKGLSQQEVISALRGTAPEVFLLLCRPPPGVLPEIDTALLTPLQSPAQVLPNSSKDSSQPSCVEQSTSSDENEMSDKSKKQCKSPSRRDSYSDSSGSGEDDLVTAPANISNSTWSSALHQTLSNMVSQAQSHHEAPKSQEDTICTMFYYPQKIPNKPEFEDSNPSPLPPDMAPGQSYQPQSESASSSSMDKYHIHHISEPTRQENWTPLKNDLENHLEDFELEVELLITLIKSEKGSLGFTVTKGNQRIGCYVHDVIQDPAKSDGRLKPGDRLIKVNDTDVTNMTHTDAVNLLRAASKTVRLVIGRVLELPRIPMLPHLLPDITLTCNKEELGFSLCGGHDSLYQVVYISDINPRSVAAIEGNLQLLDVIHYVNGVSTQGMTLEEVNRALDMSLPSLVLKATRNDLPVVPSSKRSAVSAPKSTKGNGSYSVGSCSQPALTPNDSFSTVAGEEINEISYPKGKCSTYQIKGSPNLTLPKESYIQEDDIYDDSQEAEVIQSLLDVVDEEAQNLLNENNAAGYSCGPGTLKMNGKLSEERTEDTDCDGSPLPEYFTEATKMNGCEEYCEEKVKSESLIQKPQEKKTDDDEITWGNDELPIERTNHEDSDKDHSFLTNDELAVLPVVKVLPSGKYTGANLKSVIRVLRGLLDQGIPSKELENLQELKPLDQCLIGQTKENRRKNRYKNILPYDATRVPLGDEGGYINASFIKIPVGKEEFVYIACQGPLPTTVGDFWQMIWEQKSTVIAMMTQEVEGEKIKCQRYWPNILGKTTMVSNRLRLALVRMQQLKGFVVRAMTLEDIQTREVRHISHLNFTAWPDHDTPSQPDDLLTFISYMRHIHRSGPIITHCSAGIGRSGTLICIDVVLGLISQDLDFDISDLVRCMRLQRHGMVQTEDQYIFCYQVILYVLTRLQAEEEQKQQPQLLK

SEQ ID NO: 901282 - protein, 2294 aa, Homo sapiens
MHVSLAEALEVRGGPLQEEEIWAVLNQSAESLQELFRKVSLADPAALGFIISPWSLLLLPSGSVSFTDENISNQDLRAFTAPEVLQNQSLTSLSDVEKIHIYSLGMTLYWGADYEVPQSQPIKLGDHLNSILLGMCEDVIYARVSVRTVLDACSAHIRNSNCAPSFSYVKHLVKLVLGNLSGTDQLSCNSEQKPDRSQAIRDRLRGKGLPTGRSSTSDVLDIQKPPLSHQTFLNKGLSKSMGFLSIKDTQDENYFKDILSDNSGREDSENTFSPYQFKTSGPEKKPIPGIDVLSKKKIWASSMDLLCTADRDFSSGETATYRRCHPEAVTVRTSTTPRKKEARYSDGSIALDIFGPQKMDPIYHTRELPTSSAISSALDRIRERQKKLQVLREAMNVEEPVRRYKTYHGDVFSTSSESPSIISSESDFRQVRRSEASKRFESSSGLPGVDETLSQGQSQRPSRQYETPFEGNLINQEIMLKRQEEELMQLQAKMALRQSRLSLYPGDTIKASMLDITRDPLREIALETAMTQRKLRNFFGPEFVKMTIEPFISLDLPRSILTKKGKNEDNRRKVNIMLLNGQRLELTCDTKTICKDVFDMVVAHIGLVEHHLFALATLKDNEYFFVDPDLKLTKVAPEGWKEEPKKKTKATVNFTLFFRIKFFMDDVSLIQHTLTCHQYYLQLRKDILEERMHCDDETSLLLASLALQAEYGDYQPEVHGVSYFRMEHYLPARVMEKLDLSYIKEELPKLHNTYVGASEKETELEFLKVCQRLTEYGVHFHRVHPEKKSQTGILLGVCSKGVLVFEVHNGVRTLVLRFPWRETKKISFSKKKITLQNTSDGIKHGFQTDNSKICQYLLHLCSYQHKFQLQMRARQSNQDAQDIDVLHKRWSIVSSPEREITLVNLKKDAKYGLGFQIIGGEKMGRLDLGIFISSVAPGGPADLDGCLKPGDRLISVNSVSLEGVSHHAAIEILQNAPEDVTLVISQPKEKISKVPSTPVHLTNEMKNYMKKSSYMQDSAIDSSSKDHHWSRGTLRHISENSFGPSGGLREGSLSSQDSRTESASLSQSQVNGFFASHLGDQTWQESQHGSPSPSVISKATEKETFTDSNQSKTKKPGISDVTDYSDRGDSDMDEATYSSSQDHQTPKQESSSSVNTSNKMNFKTFSSSPPKPGDIFEVELAKNDNSLGISVTGGVNTSVRHGGIYVKAVIPQGAAESDGRIHKGDRVLAVNGVSLEGATHKQAVETLRNTGQVVHLLLEKGQSPTSKEHVPVTPQCTLSDQNAQGQGPEKVKKTTQVKDYSFVTEENTFEVKLFKNSSGLGFSFSREDNLIPEQINASIVRVKKLFPGQPAAESGKIDVGDVILKVNGASLKGLSQQEVISALRGTAPEVFLLLCRPPPGVLPEIDTALLTPLQSPAQVLPNSSKDSSQPSCVEQSTSSDENEMSDKSKKQCKSPSRRDSYSDSSGSGEDDLVTAPANISNSTWSSALHQTLSNMVSQAQSHHEAPKSQEDTICTMFYYPQKIPNKPEFEDSNPSPLPPDMAPGQSYQPQSESASSSSMDKYHIHHISEPTRQENWTPLKNDLENHLEDFELEVELLITLIKSEKGSLGFTVTKGNQRIGCYVHDVIQDPAKSDGRLKPGDRLIKVNDTDVTNMTHTDAVNLLRAASKTVRLVIGRVLELPRIPMLPHLLPDITLTCNKEELGFSLCGGHDSLYQVVYISDINPRSVAAIEGNLQLLDVIHYVNGVSTQGMTLEEVNRALDMSLPSLVLKATRNDLPVVPSSKRSAVSAPKSTKGNGSYSVGSCSQPALTPNDSFSTVAGEEINEISYPKGKCSTYQIKGSPNLTLPKESYIQEDDIYDDSQEAEVIQSLLDVVDEEAQNLLNENNAAGYSCGPGTLKMNGKLSEERTEDTDCDGSPLPEYFTEATKMNGCEEYCEEKVKSESLIQKPQEKKTDDDEITWGNDELPIERTNHEDSDKDHSFLTNDELAVLPVVKVLPSGKYTGANLKSVIRVLRGLLDQGIPSKELENLQELKPLDQCLIGQTKENRRKNRYKNILPYDATRVPLGDEGGYINASFIKIPVGKEEFVYIACQGPLPTTVGDFWQMIWEQKSTVIAMMTQEVEGEKIKCQRYWPNILGKTTMVSNRLRLALVRMQQLKGFVVRAMTLEDIQTREVRHISHLNFTAWPDHDTPSQPDDLLTFISYMRHIHRSGPIITHCSAGIGRSGTLICIDVVLGLISQDLDFDISDLVRCMRLQRHGMVQTEDQYIFCYQVILYVLTRLQAEEEQKQQPQLLK

SEQ ID NO: 901283 - protein, 2466 aa, Homo sapiens; identical to SEQ ID NO: 901280

SEQ ID NO: 901284 - protein, 2226 aa, Homo sapiens
MGFLSIKDTQDENYFKDILSDNSGREDSENTFSPYQFKTSGPEKKPIPGIDVLSKKKIWASSMDLLCTADRDFSSGETATYRRCHPEAVTVRTSTTPRKKEARYSDGSIALDIFGPQKMDPIYHTRELPTSSAISSALDRIRERQKKLQVLREAMNVEEPVRRYKTYHGDVFSTSSESPSIISSESDFRQVRRSEASKRFESSSGLPGVDETLSQGQSQRPSRQYETPFEGNLINQEIMLKRQEEELMQLQAKMALRQSRLSLYPGDTIKASMLDITRDPLREIALETAMTQRKLRNFFGPEFVKMTIEPFISLDLPRSILTKKGKNEDNRRKVNIMLLNGQRLELTCDTKTICKDVFDMVVAHIGLVEHHLFALATLKDNEYFFVDPDLKLTKVAPEGWKEEPKKKTKATVNFTLFFRIKFFMDDVSLIQHTLTCHQYYLQLRKDILEERMHCDDETSLLLASLALQAEYGDYQPEVHGVSYFRMEHYLPARVMEKLDLSYIKEELPKLHNTYVGASEKETELEFLKVCQRLTEYGVHFHRVHPEKKSQTGILLGVCSKGVLVFEVHNGVRTLVLRFPWRETKKISFSKKKITLQNTSDGIKHGFQTDNSKICQYLLHLCSYQHKFQLQMRARQSNQDAQDIERASFRSLNLQAESVRGFNMGRAISTGSLASSTLNKLAVRPLSVQAEILKRLSCSELSLYQPLQNSSKEKNDKASWEEKPREMSKSYHDLSQASLYPHRKNVIVNMEPPPQTVAELVGKPSHQMSRSDAESLAGVTKLNNSKSVASLNRSPERRKHESDSSSIEDPGQAYVLDVLHKRWSIVSSPEREITLVNLKKDAKYGLGFQIIGGEKMGRLDLGIFISSVAPGGPADLDGCLKPGDRLISVNSVSLEGVSHHAAIEILQNAPEDVTLVISQPKEKISKVPSTPVHLTNEMKNYMKKSSYMQDSAIDSSSKDHHWSRGTLRHISENSFGPSGGLREGSLSSQDSRTESASLSQSQVNGFFASHLGDQTWQESQHGSPSPSVISKATEKETFTDSNQSKTKKPGISDVTDYSDRGDSDMDEATYSSSQDHQTPKQESSSSVNTSNKMNFKTFSSSPPKPGDIFEVELAKNDNSLGISVTGGVNTSVRHGGIYVKAVIPQGAAESDGRIHKGDRVLAVNGVSLEGATHKQAVETLRNTGQVVHLLLEKGQSPTSKEHVPVTPQCTLSDQNAQGQGPEKVKKTTQVKDYSFVTEENTFEVKLFKNSSGLGFSFSREDNLIPEQINASIVRVKKLFPGQPAAESGKIDVGDVILKVNGASLKGLSQQEVISALRGTAPEVFLLLCRPPPGVLPEIDTALLTPLQSPAQVLPNSSKDSSQPSCVEQSTSSDENEMSDKSKKQCKSPSRRDSYSDSSGSGEDDLVTAPANISNSTWSSALHQTLSNMVSQAQSHHEAPKSQEDTICTMFYYPQKIPNKPEFEDSNPSPLPPDMAPGQSYQPQSESASSSSMDKYHIHHISEPTRQENWTPLKNDLENHLEDFELEVELLITLIKSEKGSLGFTVTKGNQRIGCYVHDVIQDPAKSDGRLKPGDRLIKVNDTDVTNMTHTDAVNLLRAASKTVRLVIGRVLELPRIPMLPHLLPDITLTCNKEELGFSLCGGHDSLYQVVYISDINPRSVAAIEGNLQLLDVIHYVNGVSTQGMTLEEVNRALDMSLPSLVLKATRNDLPVVPSSKRSAVSAPKSTKGNGSYSVGSCSQPALTPNDSFSTVAGEEINEISYPKGKCSTYQIKGSPNLTLPKESYIQEDDIYDDSQEAEVIQSLLDVVDEEAQNLLNENNAAGYSCGPGTLKMNGKLSEERTEDTDCDGSPLPEYFTEATKMNGCEEYCEEKVKSESLIQKPQEKKTDDDEITWGNDELPIERTNHEDSDKDHSFLTNDELAVLPVVKVLPSGKYTGANLKSVIRVLRGLLDQGIPSKELENLQELKPLDQCLIGQTKENRRKNRYKNILPYDATRVPLGDEGGYINASFIKIPVGKEEFVYIACQGPLPTTVGDFWQMIWEQKSTVIAMMTQEVEGEKIKCQRYWPNILGKTTMVSNRLRLALVRMQQLKGFVVRAMTLEDIQTREVRHISHLNFTAWPDHDTPSQPDDLLTFISYMRHIHRSGPIITHCSAGIGRSGTLICIDVVLGLISQDLDFDISDLVRCMRLQRHGMVQTEDQYIFCYQVILYVLTRLQAEEEQKQQPQLLK

SEQ ID NO: 901285 - protein, 2265 aa, Homo sapiens
MGFLSIKDTQDENYFKDILSDNSGREDSENTFSPYQFKTSGPEKKPIPGIDVLSKKKIWASSMDLLCTADRDFSSGETATYRRCHPEAVTVRTSTTPRKKEARYSDGSIALDIFGPQKMDPIYHTRELPTSSAISSALDRIRERQKKLQVLREAMNVEEPVRRYKTYHGDVFSTSSESPSIISSESDFRQVRRSEASKRFESSSGLPGVDETLSQGQSQRPSRQYETPFEGNLINQEIMLKRQEEELMQLQAKMALRQSRLSLYPGDTIKASMLDITRDPLREIALETAMTQRKLRNFFGPEFVKMTIEPFISLDLPRSILTKKGKNEDNRRKVNIMLLNGQRLELTCDTKTICKDVFDMVVAHIGLVEHHLFALATLKDNEYFFVDPDLKLTKVAPEGWKEEPKKKTKATVNFTLFFRIKFFMDDVSLIQHTLTCHQYYLQLRKDILEERMHCDDETSLLLASLALQAEYGDYQPEVHGVSYFRMEHYLPARVMEKLDLSYIKEELPKLHNTYVGASEKETELEFLKVCQRLTEYGVHFHRVHPEKKSQTGILLGVCSKGVLVFEVHNGVRTLVLRFPWRETKKISFSKKKITLQNTSDGIKHGFQTDNSKICQYLLHLCSYQHKFQLQMRARQSNQDAQDIERASFRSLNLQAESVRGFNMGRAISTGSLASSTLNKLAVRPLSVQAEILKRLSCSELSLYQPLQNSSKEKNDKASWEEKPREMSKSYHDLSQASLYPHRKNVIVNMEPPPQTVAELVGKPSHQMSRSDAESLAGVTKLNNSKSVASLNRSPERRKHESDSSSIEDPGQAYVLDVLHKRWSIVSSPEREITLVNLKKDAKYGLGFQIIGGEKMGRLDLGIFISSVAPGGPADLDGCLKPGDRLISVNSVSLEGVSHHAAIEILQNAPEDVTLVISQPKEKISKVPSTPVHLTNEMKNYMKKSSYMQDSAIDSSSKDHHWSRGTLRHISENSFGPSGGLREGSLSSQDSRTESASLSQSQVNGFFASHLGDQTWQESQHGSPSPSVISKATEKETFTDSNQSKTKKPGISDVTDYSDRGDSDMDEATYSSSQDHQTPKQESSSSVNTSNKMNFKTFSSSPPKPGDIFEVELAKNDNSLGISVTGGVNTSVRHGGIYVKAVIPQGAAESDGRIHKGDRVLAVNGVSLEGATHKQAVETLRNTGQVVHLLLEKGQSPTSKEHVPVTPQCTLSDQNAQGQGPEKVKKTTQVKDYSFVTEENTFEVKLFKNSSGLGFSFSREDNLIPEQINASIVRVKKLFPGQPAAESGKIDVGDVILKVNGASLKGLSQQVSPKHVEYSIFNDEMDWPFRMVSYCWFNCTFICHSWYPQEVISALRGTAPEVFLLLCRPPPGVLPEIDTALLTPLQSPAQVLPNSSKDSSQPSCVEQSTSSDENEMSDKSKKQCKSPSRRDSYSDSSGSGEDDLVTAPANISNSTWSSALHQTLSNMVSQAQSHHEAPKSQEDTICTMFYYPQKIPNKPEFEDSNPSPLPPDMAPGQSYQPQSESASSSSMDKYHIHHISEPTRQENWTPLKNDLENHLEDFELEVELLITLIKSEKGSLGFTVTKGNQRIGCYVHDVIQDPAKSDGRLKPGDRLIKVNDTDVTNMTHTDAVNLLRAASKTVRLVIGRVLELPRIPMLPHLLPDITLTCNKEELGFSLCGGHDSLYQVVYISDINPRSVAAIEGNLQLLDVIHYVNGVSTQGMTLEEVNRALDMSLPSLVLKATRNDLPVVPSSKRSAVSAPKSTKGNGSYSVGSCSQPALTPNDSFSTVAGEEINEISYPKGKCSTYQIKGSPNLTLPKESYIQEDDIYDDSQEAEVIQSLLDVVDEEAQNLLNENNAAGYSCGPGTLKMNGKLSEERTEDTDCDGSPLPEYFTEATKMNGCEEYCEEKVKSESLIQKPQEKKTDDDEITWGNDELPIERTNHEDSDKDHSFLTNDELAVLPVVKVLPSGKYTGANLKSVIRVLRGLLDQGIPSKELENLQELKPLDQCLIGQTKENRRKNRYKNILPYDATRVPLGDEGGYINASFIKIPVGKEEFVYIACQGPLPTTVGDFWQMIWEQKSTVIAMMTQEVEGEKIKCQRYWPNILGKTTMVSNRLRLALVRMQQLKGFVVRAMTLEDIQTREVRHISHLNFTAWPDHDTPSQPDDLLTFISYMRHIHRSGPIITHCSAGIGRSGTLICIDVVLGLISQDLDFDISDLVRCMRLQRHGMVQTEDQYIFCYQVILYVLTRLQAEEEQKQQPQLLK

SEQ ID NO: 901286 - protein, 963 aa, Homo sapiens
MGFLSIKDTQDENYFKDILSDNSGREDSENTFSPYQFKTSGPEKKPIPGIDVLSKKKIWASSMDLLCTADRDFSSGETATYRRCHPEAVTVRTSTTPRKKEARYSDGSIALDIFGPQKMDPIYHTRELPTSSAISSALDRIRERQKKLQVLREAMNVEEPVRRYKTYHGDVFSTSSESPSIISSESDFRQVRRSEASKRFESSSGLPGVDETLSQGQSQRPSRQYETPFEGNLINQEIMLKRQEEELMQLQAKMALRQSRLSLYPGDTIKASMLDITRDPLREIALETAMTQRKLRNFFGPEFVKMTIEPFISLDLPRSILTKKGKNEDNRRKVNIMLLNGQRLELTCDTKTICKDVFDMVVAHIGLVEHHLFALATLKDNEYFFVDPDLKLTKVAPEGWKEEPKKKTKATVNFTLFFRIKFFMDDVSLIQHTLTCHQYYLQLRKDILEERMHCDDETSLLLASLALQAEYGDYQPEVHGVSYFRMEHYLPARVMEKLDLSYIKEELPKLHNTYVGASEKETELEFLKVCQRLTEYGVHFHRVHPEKKSQTGILLGVCSKGVLVFEVHNGVRTLVLRFPWRETKKISFSKKKITLQNTSDGIKHGFQTDNSKICQYLLHLCSYQHKFQLQMRARQSNQDAQDIERASFRSLNLQAESVRGFNMGRAISTGSLASSTLNKLAVRPLSVQAEILKRLSCSELSLYQPLQNSSKEKNDKASWEEKPREMSKSYHDLSQASLYPHRKNVIVNMEPPPQTVAELVGKPSHQMSRSDAESLAGVTKLNNSKSVASLNRSPERRKHESDSSSIEDPGQAYVLDVLHKRWSIVSSPEREITLVNLKKDAKYGLGFQIIGGEKMGRLDLGIFISSVAPGGPADLDGCLKPGDRLISVNSVSLEGVSHHAAIEILQNAPEDVTLVISQPKEKISKGNVNVSYLCILFHFSVSFLFSDIRTKMDSLCTKLMQLK

SEQ ID NO: 901287 - protein, 2557 aa, Homo sapiens
DYEVPQSQPIKLGDHLNSILLGMCEDVIYARVSVRTVLDACSAHIRNSNCAPSFSYVKHLVKLVLEKSFWGNMHVSLAEALEVRGGPLQEEEIWAVLNQSAESLQELFRKVSLADPAALGFIISPWSLLLLPSGSVSFTDENISNQDLRAFTAPEVLQNQSLTSLSDVEKIHIYSLGMTLYWGADYEVPQSQPIKLGDHLNSILLGMCEDVIYARVSVRTVLDACSAHIRNSNCAPSFSYVKHLVKLVLGNLSGTDQLSCNSEQKPDRSQAIRDRLRGKGLPTGRSSTSDVLDIQKPPLSHQTFLNKGLSKSMGFLSIKDTQDENYFKDILSDNSGREDSENTFSPYQFKTSGPEKKPIPGIDVLSKKKIWASSMDLLCTADRDFSSGETATYRRCHPEAVTVRTSTTPRKKEARYSDGSIALDIFGPQKMDPIYHTRELPTSSAISSALDRIRERQKKLQVLREAMNVEEPVRRYKTYHGDVFSTSSESPSIISSESDFRQVRRSEASKRFESSSGLPGVDETLSQGQSQRPSRQYETPFEGNLINQEIMLKRQEEELMQLQAKMALRQSRLSLYPGDTIKASMLDITRDPLREIALETAMTQRKLRNFFGPEFVKMTIEPFISLDLPRSILTKKGKNEDNRRKVNIMLLNGQRLELTCDTKTICKDVFDMVVAHIGLVEHHLFALATLKDNEYFFVDPDLKLTKVAPEGWKEEPKKKTKATVNFTLFFRIKFFMDDVSLIQHTLTCHQYYLQLRKDILEERMHCDDETSLLLASLALQAEYGDYQPEVHGVSYFRMEHYLPARVMEKLDLSYIKEELPKLHNTYVGASEKETELEFLKVCQRLTEYGVHFHRVHPEKKSQTGILLGVCSKGVLVFEVHNGVRTLVLRFPWRETKKISFSKKKITLQNTSDGIKHGFQTDNSKICQYLLHLCSYQHKFQLQMRARQSNQDAQDIERASFRSLNLQAESVRGFNMGRAISTGSLASSTLNKLAVRPLSVQAEILKRLSCSELSLYQPLQNSSKEKNDKASWEEKPREMSKSYHDLSQASLYPHRKNVIVNMEPPPQTVAELVGKPSHQMSRSDAESLAGVTKLNNSKSVASLNRSPERRKHESDSSSIEDPGQAYVLGMTMHSSGNSSSQVPLKENDVLHKRWSIVSSPEREITLVNLKKDAKYGLGFQIIGGEKMGRLDLGIFISSVAPGGPADLDGCLKPGDRLISVNSVSLEGVSHHAAIEILQNAPEDVTLVISQPKEKISKVPSTPVHLTNEMKNYMKKSSYMQDSAIDSSSKDHHWSRGTLRHISENSFGPSGGLREGSLSSQDSRTESASLSQSQVNGFFASHLGDQTWQESQHGSPSPSVISKATEKETFTDSNQSKTKKPGISDVTDYSDRGDSDMDEATYSSSQDHQTPKQESSSSVNTSNKMNFKTFSSSPPKPGDIFEVELAKNDNSLGISVTGGVNTSVRHGGIYVKAVIPQGAAESDGRIHKGDRVLAVNGVSLEGATHKQAVETLRNTGQVVHLLLEKGQSPTSKEHVPVTPQCTLSDQNAQGQGPEKVKKTTQVKDYSFVTEENTFEVKLFKNSSGLGFSFSREDNLIPEQINASIVRVKKLFPGQPAAESGKIDVGDVILKVNGASLKGLSQQEVISALRGTAPEVFLLLCRPPPGVLPEIDTALLTPLQSPAQVLPNSSKDSSQPSCVEQSTSSDENEMSDKSKKQCKSPSRRDSYSDSSGSGEDDLVTAPANISNSTWSSALHQTLSNMVSQAQSHHEAPKSQEDTICTMFYYPQKIPNKPEFEDSNPSPLPPDMAPGQSYQPQSESASSSSMDKYHIHHISEPTRQENWTPLKNDLENHLEDFELEVELLITLIKSEKGSLGFTVTKGNQRIGCYVHDVIQDPAKSDGRLKPGDRLIKVNDTDVTNMTHTDAVNLLRAASKTVRLVIGRVLELPRIPMLPHLLPDITLTCNKEELGFSLCGGHDSLYQVVYISDINPRSVAAIEGNLQLLDVIHYVNGVSTQGMTLEEVNRALDMSLPSLVLKATRNDLPVVPSSKRSAVSAPKSTKGNGSYSVGSCSQPALTPNDSFSTVAGEEINEISYPKGKCSTYQIKGSPNLTLPKESYIQEDDIYDDSQEAEVIQSLLDVVDEEAQNLLNENNAAGYSCGPGTLKMNGKLSEERTEDTDCDGSPLPEYFTEATKMNGCEEYCEEKVKSESLIQKPQEKKTDDDEITWGNDELPIERTNHEDSDKDHSFLTNDELAVLPVVKVLPSGKYTGANLKSVIRVLRGLLDQGIPSKELENLQELKPLDQCLIGQTKENRRKNRYKNILPYDATRVPLGDEGGYINASFIKIPVGKEEFVYIACQGPLPTTVGDFWQMIWEQKSTVIAMMTQEVEGEKIKCQRYWPNILGKTTMVSNRLRLALVRMQQLKGFVVRAMTLEDIQTREVRHISHLNFTAWPDHDTPSQPDDLLTFISYMRHIHRSGPIITHCSAGIGRSGTLICIDVVLGLISQDLDFDISDLVRCMRLQRHGMVQTEDQYIFCYQVILYVLTRLQAEEEQKQQPQLLK

SEQ ID NO: 901288 - protein, 117 aa, Homo sapiens
  misc_feature (99)..(99): Xaa can be any naturally occurring amino acid
  misc_feature (106)..(106): Xaa can be any naturally occurring amino acid
MGFLSIKDTQDENYFKDILSDNSGREDSENTFSPYQFKTSGPEKKPIPGIDVLSKKKIWASSMDLLCTADRDFSSGETATYRRCHPEAVTVRTDLESIXRKPPFQXTDSGRGQGGPA

SEQ ID NO: 901289 - protein, 2466 aa, Homo sapiens; identical to SEQ ID NO: 901280

SEQ ID NO: 901290 - protein, 1265 aa, Homo sapiens
MGFLSIKDTQDENYFKDILSDNSGREDSENTFSPYQFKTSGPEKKPIPGIDVLSKKKIWASSMDLLCTADRDFSSGETATYRRCHPEAVTVRTSTTPRKKEARYSDGSIALDIFGPQKMDPIYHTRELPTSSAISSALDRIRERQKKLQVLREAMNVEEPVRRYKTYHGDVFSTSSESPSIISSESDFRQVRRSEASKRFESSSGLPGVDETLSQGQSQRPSRQYETPFEGNLINQEIMLKRQEEELMQLQAKMALRQSRLSLYPGDTIKASMLDITRDPLREIALETAMTQRKLRNFFGPEFVKMTIEPFISLDLPRSILTKKGKNEDNRRKVNIMLLNGQRLELTCDTKTICKDVFDMVVAHIGLVEHHLFALATLKDNEYFFVDPDLKLTKVAPEGWKEEPKKKTKATVNFTLFFRIKFFMDDVSLIQHTLTCHQYYLQLRKDILEERMHCDDETSLLLASLALQAEYGDYQPEVHGVSYFRMEHYLPARVMEKLDLSYIKEELPKLHNTYVGASEKETELEFLKVCQRLTEYGVHFHRVHPEKKSQTGILLGVCSKGVLVFEVHNGVRTLVLRFPWRETKKISFSKKKITLQNTSDGIKHGFQTDNSKICQYLLHLCSYQHKFQLQMRARQSNQDAQDIERASFRSLNLQAESVRGFNMGRAISTGSLASSTLNKLAVRPLSVQAEILKRLSCSELSLYQPLQNSSKEKNDKASWEEKPREMSKSYHDLSQASLYPHRKNVIVNMEPPPQTVAELVGKPSHQMSRSDAESLAGVTKLNNSKSVASLNRSPERRKHESDSSSIEDPGQAYVLDVLHKRWSIVSSPEREITLVNLKKDAKYGLGFQIIGGEKMGRLDLGIFISSVAPGGPADLDGCLKPGDRLISVNSVSLEGVSHHAAIEILQNAPEDVTLVISQPKEKISKVPSTPVHLTNEMKNYMKKSSYMQDSAIDSSSKDHHWSRGTLRHISENSFGPSGGLREGSLSSQDSRTESASLSQSQVNGFFASHLGDQTWQESQHGSPSPSVISKATEKETFTDSNQSKTKKPGISDVTDYSDRGDSDMDEATYSSSQDHQTPKQESSSSVNTSNKMNFKTFSSSPPKPGDIFEVELAKNDNSLGISVTGGVNTSVRHGGIYVKAVIPQGAAESDGRIHKGDRVLAVNGVSLEGATHKQAVETLRNTGQVVHLLLEKGQSPTSKEHVPVTPQCTLSDQNAQGQGPEKVKKTTQVKDYSFVTEGSHICSQGNCSRSILASLQTSTWCATGN

SEQ ID NO: 901291 - protein, 113 aa, Homo sapiens
MGFLSIKDTQDENYFKDILSDNSGREDSENTFSPYQFKTSGPEKKPIPGIDVLSKKKIWASSMDLLCTADRDFSSGETATYRRCHPEAVTVRTCYPQGLSCVGKMKEEKYEMY

SEQ ID NO: 901292 - protein, 95 aa, Homo sapiens
LLCTADRDFSSGETATYRRCHPEAVTVRTSTTPRKKEARYSDGSIALDIFGPQKMDPIYHTRELPTSSAISSALDRIRERQKKLQVLREAMNVEG

SEQ ID NO: 901293 - protein, 380 aa, Homo sapiens
YAVGWETGAGDSGDRSSGREPLGRQTEPAANAPGALGSNQLMPLCPLAHAMQPQSVLHSGYFHPLLRAWQTATTTLNASNLIYPIFVTDVPDDIQPITSLPGVARYGVKRLEEMLRPLVEEGLRCVLIFGVPSRVPKDERGSAADSEESPAIEAIHLLRKTFPNLLVACDVCLCPYTSHGHCGLLSENGAFRAEESRQRLAEVALAYAKAGCQVVAPSDMMDGRVEAIKEALMAHGLGNRVSVMSYSAKFASCFYGPFRDAAKSSPAFGDRRCYQLPPGARGLALRAVDRDVREGADMLMVKPGMPYLDIVREVKDKHPDLPLAVYHVSGEFAMLWHGAQAGAFDLKAAVLEAMTAFRRAGADIIITYYTPQLLQWLKEE

SEQ ID NO: 901294 - protein, 380 aa, Homo sapiens; identical to SEQ ID NO: 901293

SEQ ID NO: 901295 - protein, 362 aa, Homo sapiens
YAVGWETGAGDSGDRSSGREPLGRQTEPAANAPGALGSNQLMPLCPLAHAMQPQSVLHSGYFHPLLRAWQTATTTLNASNLIYPIFVTDVPDDIQPITSLPGVARYGVKRLEEMLRPLVEEGLRCVLIFGVPSRVPKDERGSAADSEESPAIEAIHLLRKTFPNLLVACDVCLCPYTSHGHCGLCSATLCPPGCQVVAPSDMMDGRVEAIKEALMAHGLGNRVSVMSYSAKFASCFYGPFRDAAKSSPAFGDRRCYQLPPGARGLALRAVDRDVREGADMLMVKPGMPYLDIVREVKDKHPDLPLAVYHVSGEFAMLWHGAQAGAFDLKAAVLEAMTAFRRAGADIIITYYTPQLLQWLKEE

SEQ ID NO: 901296 - protein, 435 aa, Homo sapiens
YAVGWETGAGDSGDRSSGREPLGRQTEPAANAPGALGSNQLMPLCPLAHAMQPQSVLHSGYFHPLLRAWQTATTTLNASNLIYPIFVTPWAWPGREARHWIPSSSHHLHFHISFLLPNHPSQSPPHHWPFPQYQSISHPRSCRDVPDDIQPITSLPGVARYGVKRLEEMLRPLVEEGLRCVLIFGVPSRVPKDERGSAADSEESPAIEAIHLLRKTFPNLLVACDVCLCPYTSHGHCGLLSENGAFRAEESRQRLAEVALAYAKAGCQVVAPSDMMDGRVEAIKEALMAHGLGNRVSVMSYSAKFASCFYGPFRDAAKSSPAFGDRRCYQLPPGARGLALRAVDRDVREGADMLMVKPGMPYLDIVREVKDKHPDLPLAVYHVSGEFAMLWHGAQAGAFDLKAAVLEAMTAFRRAGADIIITYYTPQLLQWLKEE

SEQ ID NO: 901297 - protein, 339 aa, Homo sapiens
MPLCPLAHAMQPQSVLHSGYFHPLLRAWQTATTTLNASNLIYPIFVTDVPDDIQPITSLPGVARYGVKRLEEMLRPLVEEGLRCVLIFGVPSRVPKDERGSAADSEESPAIEAIHLLRKTFPNLLVACDVCLCPYTSHGHCGLLSENGAFRAEESRQRLAEVALAYAKAGCQVVAPSDMMDGRVEAIKEALMAHGLGNRVSVMSYSAKFASCFYGPFRDAAKSSPAFGDRRCYQLPPGARGLALRAVDRDVREGADMLMVKPGMPYLDIVREVKDKHPDLPLAVYHVSGEFAMLWHGAQAGAFDLKAAVLEAMTAFRRAGADIIITYYTPQLLQWLKEE

SEQ ID NO: 901298 - protein, 417 aa, Homo sapiens
YAVGWETGAGDSGDRSSGREPLGRQTEPAANAPGALGSNQLMPLCPLAHAMQPQSVLHSGYFHPLLRAWQTATTTLNASNLIYPIFVTPWAWPGREARHWIPSSSHHLHFHISFLLPNHPSQSPPHHWPFPQYQSISHPRSCRDVPDDIQPITSLPGVARYGVKRLEEMLRPLVEEGLRCVLIFGVPSRVPKDERGSAADSEESPAIEAIHLLRKTFPNLLVACDVCLCPYTSHGHCGLCSATLCPPGCQVVAPSDMMDGRVEAIKEALMAHGLGNRVSVMSYSAKFASCFYGPFRDAAKSSPAFGDRRCYQLPPGARGLALRAVDRDVREGADMLMVKPGMPYLDIVREVKDKHPDLPLAVYHVSGEFAMLWHGAQAGAFDLKAAVLEAMTAFRRAGADIIITYYTPQLLQWLKEE

SEQ ID NO: 901299 - protein, 380 aa, Homo sapiens; identical to SEQ ID NO: 901293

SEQ ID NO: 901300 - protein, 743 aa, Homo sapiens
HEGPGSAGGGPLGPQAAVAAVAAVGPRQAASVAEVAGRVAGGRREGAAGADPPAMKPPAACAGDMADAASPCSVVNDLRWDLSAQQIEERTRELIEQTKRVYDQVGTQEFEDVSYESTLKALADVEVTYTVQRNILDFPQHVSPSKDIRTASTEADKKLSEFDVEMSMREDVYQRIVWLQEKVQKDSLRPEAARYLERLIKLGRRNGLHLPRETQENIKRIKKKLSLLCIDFNKNLNEDTTFLPFTLQELGGLPEDFLNSLEKMEDGKLKVTLKYPHYFPLLKKCHVPETRRKVEEAFNCRCKEENCAILKELVTLRAQKSRLLGFHTHADYVLEMNMAKTSQTVATFLDELAQKLKPLGEQERAVILELKRAECERRGLPFDGRIRAWDMRYYMNQVEETRYCVDQNLLKEYFPVQVVTHGLLGIYQELLGLAFHHEEGASAWHEDVRLYTARDAASGEVVGKFYLDLYPREGKYGHAACFGLQPGCLRQDGSRQIAIAAMVANFTKPTADAPSLLQHDEVETYFHEFGHVMHQLCSQAEFAMFSGTHVERDFVEAPSQMLENWVWEQEPLLRMSRHYRTGSAVPRELLEKLIESRQANTGLFNLRQIVLAKVDQALHTQTDADPAEEYARLCQEILGVPATPGTNMPATFGHLAGGYDAQYYGYLWSEVYSMDMFHTRFKQEGVLNSKVGMDYRSCILRPGGSEDASAMLRRFLGRDPKQDAFLLSKGLQVGGCEPEPQVC

SEQ ID NO: 901301 - protein, 578 aa, Homo sapiens
MSMREDVYQRIVWLQEKVQKDSLRPEAARYLERLIKLGRRNGLHLPRETQENIKRIKKKLSLLCIDFNKNLNEDTTFLPFTLQELGGLPEDFLNSLEKMEDGKLKVTLKYPHYFPLLKKCHVPETRRKVEEAFNCRCKEENCAILKELVTLRAQKSRLLGFHTHADYVLEMNMAKTSQTVATFLDELAQKLKPLGEQERAVILELKRAECERRGLPFDGRIRAWDMRYYMNQVEETRYCVDQNLLKEYFPVQVVTHGLLGIYQELLGLAFHHEEGASAWHEDVRLYTARDAASGEVVGKFYLDLYPREGKYGHAACFGLQPGCLRQDGSRQIAIAAMVANFTKPTADAPSLLQHDEVETYFHEFGHVMHQLCSQAEFAMFSGTHVERDFVEAPSQMLENWVWEQEPLLRMSRHYRTGSAVPRELLEKLIESRQANTGLFNLRQIVLAKVDQALHTQTDADPAEEYARLCQEILGVPATPGTNMPATFGHLAGGYDAQYYGYLWSEVYSMDMFHTRFKQEGVLNSKVGMDYRSCILRPGGSEDASAMLRRFLGRDPKQDAFLLSKGLQVGGCEPEPQVC

SEQ ID NO: 901302 - protein, 632 aa, Homo sapiens
MTRLAPRSLRTCPTRARSRRWPMWRSPTQHVSPSKDIRTASTEADKKLSEFDVEMSMREDVYQRIVWLQEKVQKDSLRPEAARYLERLIKLGRRNGLHLPRETQENIKRIKKKLSLLCIDFNKNLNEDTTFLPFTLQELGGLPEDFLNSLEKMEDGKLKVTLKYPHYFPLLKKCHVPETRRKVEEAFNCRCKEENCAILKELVTLRAQKSRLLGFHTHADYVLEMNMAKTSQTVATFLDELAQKLKPLGEQERAVILELKRAECERRGLPFDGRIRAWDMRYYMNQVEETRYCVDQNLLKEYFPVQVVTHGLLGIYQELLGLAFHHEEGASAWHEDVRLYTARDAASGEVVGKFYLDLYPREGKYGHAACFGLQPGCLRQDGSRQIAIAAMVANFTKPTADAPSLLQHDEVETYFHEFGHVMHQLCSQAEFAMFSGTHVERDFVEAPSQMLENWVWEQEPLLRMSRHYRTGSAVPRELLEKLIESRQANTGLFNLRQIVLAKVDQALHTQTDADPAEEYARLCQEILGVPATPGTNMPATFGHLAGGYDAQYYGYLWSEVYSMDMFHTRFKQEGVLNSKVGMDYRSCILRPGGSEDASAMLRRFLGRDPKQDAFLLSKGLQVGGCEPEPQVC

SEQ ID NO: 901303 - protein, 731 aa, Homo sapiens
HEGPGSAGGGPLGPQAAVAAVAAVGPRQAASVAEVAGRVAGGRREGAAGADPPAMKPPAACAGDMADAASPCSVVNDLRWDLSAQQIEERTRELIEQTKRVYDQVGTQEFEDVSYESTLKALADVEVTYTVQRNILDFPQHVSPSKDIRTASTEADKKLSEFDVEMSMREDVYQRIVWLQEKVQKDSLRPEAARYLERLIKLGRRNGLHLPRETQENIKRIKKKLSLLCIDFNKNLNEDTTFLPFTLQELGGLPEDFLNSLEKMEDGKLKVTLKYPHYFPLLKKCHVPETRRKVEEAFNCRCKEENCAILKELVTLRAQKSRLLGFHTHADYVLEMNMAKTSQTVATFLDELAQKLKPLGEQERAVILELKRAECERRGLPFDGRIRAWDMRYYMNQVEETRYCVDQNLLKEYFPVQVVTHGLLGIYQELLGLAFHHEEGASAWHEDVRLYTARDAASGEVVGKFYLDLYPREGKYGHAACFGLQPGCLRQDGSRQIAIAAMVANFTKPTADAPSLLQHDEVETYFHEFGHVMHQLCSQAEFAMFSGTHVERDFVEAPSQMLENWVWEQEPLLRMSRHYRTGSAVPRELLEKLIESRQANTGLFNLRQIVLAKVDQALHTQTDADPAEEYARLCQEILGVPATPGGYDAQYYGYLWSEVYSMDMFHTRFKQEGVLNSKVGMDYRSCILRPGGSEDASAMLRRFLGRDPKQDAFLLSKGLQVGGCEPEPQVC

SEQ ID NO: 901304 - protein, 743 aa, Homo sapiens; identical to SEQ ID NO: 901300

SEQ ID NO: 901305 - protein, 480 aa, Homo sapiens
MEDGKLKVTLKYPHYFPLLKKCHVPETRRKVEEAFNCRCKEENCAILKELVTLRAQKSRLLGFHTHADYVLEMNMAKTSQTVATFLDELAQKLKPLGEQERAVILELKRAECERRGLPFDGRIRAWDMRYYMNQVEETRYCVDQNLLKEYFPVQVVTHGLLGIYQELLGLAFHHEEGASAWHEDVRLYTARDAASGEVVGKFYLDLYPREGKYGHAACFGLQPGCLRQDGSRQIAIAAMVANFTKPTADAPSLLQHDEVETYFHEFGHVMHQLCSQAEFAMFSGTHVERDFVEAPSQMLENWVWEQEPLLRMSRHYRTGSAVPRELLEKLIESRQANTGLFNLRQIVLAKVDQALHTQTDADPAEEYARLCQEILGVPATPGTNMPATFGHLAGGYDAQYYGYLWSEVYSMDMFHTRFKQEGVLNSKVGMDYRSCILRPGGSEDASAMLRRFLGRDPKQDAFLLSKGLQVGGCEPEPQVC

SEQ ID NO: 901306 - protein, 636 aa, Homo sapiens
HEGPGSAGGGPLGPQAAVAAVAAVGPRQAASVAEVAGRVAGGRREGAAGADPPAMKPPAACAGDMADAASPCSVVNDLRWDLSAQQIEERTRELIEQTKRVYDQVGTQEFEDVSYESTLKALADVEVTYTVQRNILDFPQHVSPSKDIRTASTEADKKLSEFDVEMSMREDVYQRIVWLQEKVQKDSLRPEAARYLERLIKLGRRNGLHLPRETQENIKRIKKKLSLLCIDFNKNLNEDTTFLPFTLQELGGLPEDFLNSLEKMEDGKLKVTLKYPHYFPLLKKCHVPETRRKVEEAFNCRCKEENCAILKELVTLRAQKSRLLGFHTHADYVLEMNMAKTSQTVATFLDELAQKLKPLGEQERAVILELKRAECERRGLPFDGRIRAWDMRYYMNQVEETRYCVDQNLLKEYFPVQVVTHGLLGIYQELLGLAFHHEEGASAWHEDVRLYTARDAASGEVVGKFYLDLYPREGKYGHAACFGLQPGCLRQDGSRQIAIAAMVANFTKPTADAPSLLQHDEVETYFHEFGHVMHQLCSQAEFAMFSGTHVERDFVEAPSQMLENWVWEQEPLLRMSRHYRTGSAVPRELLEKLIESRQANTGLFNLRQIVLGLVFVALTRLLSGKRPLSGDGSSLK

SEQ ID NO: 901307 - protein, 596 aa, Homo sapiens
HEGPGSAGGGPLGPQAAVAAVAAVGPRQAASVAEVAGRVAGGRREGAAGADPPAMKPPAACAGDMADAASPCSVVNDLRWDLSAQQIEERTRELIEQTKRVYDQVGTQEFEDVSYESTLKALADVEVTYTVQRNILDFPQHVSPSKDIRTASTEADKKLSEFDVEMSMREDVYQRIVWLQEKVQKDSLRPEAARYLERLIKLGRRNGLHLPRETQERAVILELKRAECERRGLPFDGRIRAWDMRYYMNQVEETRYCVDQNLLKEYFPVQVVTHGLLGIYQELLGLAFHHEEGASAWHEDVRLYTARDAASGEVVGKFYLDLYPREGKYGHAACFGLQPGCLRQDGSRQIAIAAMVANFTKPTADAPSLLQHDEVETYFHEFGHVMHQLCSQAEFAMFSGTHVERDFVEAPSQMLENWVWEQEPLLRMSRHYRTGSAVPRELLEKLIESRQANTGLFNLRQIVLAKVDQALHTQTDADPAEEYARLCQEILGVPATPGTNMPATFGHLAGGYDAQYYGYLWSEVYSMDMFHTRFKQEGVLNSKVGMDYRSCILRPGGSEDASAMLRRFLGRDPKQDAFLLSKGLQVGGCEPEPQVC

SEQ ID NO: 901308 - protein, 105 aa, Homo sapiens
RALDLTLLDEKRVIPSFPSALLTLTLTEPKADPPGTGFCFCVACAGDMADAASPCSVVNDLRWDLSAQQIEERTRELIEQTKRVYDQVGTQEFEDVSYESTLKAL

SEQ ID NO: 901309 - protein, 268 aa, Homo sapiens
HEGPGSAGGGPLGPQAAVAAVAAVGPRQAASVAEVAGRVAGGRREGAAGADPPAMKPPAACAGDMADAASPCSVVNDLRWDLSAQQIEERTRELIEQTKRVYDQVGTQEFEDVSYESTLKALADVEVTYTVQRNILDFPQHVSPSKDIRTASTEADKKLSEFDVEMSMREDVYQRIVWLQEKVQKDSLRPEAARYLERLIKLGRRNGLHLPRETQENIKRIKKKLSLLCIDFNKNLNEDTTFLPFTLQELVAGPPFPPPPPFTHEVGA

SEQ ID NO: 901310 - protein, 887 aa, Homo sapiens
HEGPGSAGGGPLGPQAAVAAVAAVGPRQAASVAEVAGRVAGGRREGAAGADPPAMKPPAACAGDMADAASPCSVVNDLRWDLSAQQIEERTRELIEQTKRVYDQVGTQEFEDVSYESTLKALADVEVTYTVQRNILDFPQHVSPSKDIRTASTEADKKLSEFDVEMSMREDVYQRIVWLQEKVQKDSLRPEAARYLERLIKLGRRNGLHLPRETQENIKRIKKKLSLLCIDFNKNLNEDTTFLPFTLQELGGLPEDFLNSLEKMEDGKLKVTLKYPHYFPLLKKCHVPETRRKVEEAFNCRCKEENCAILKELVTLRAQKSRLLGFHTHADYVLEMNMAKTSQTVATFLDELAQKLKPLGEQERAVILELKRAECERRGLPFDGRIRAWDMRYYMNQVEETRYCVDQNLLKEYFPVQVVTHGLLGIYQELLGLAFHHEEGASAWHEDVRLYTARDAASGEVVGKFYLDLYPRWVRAAGAGGAPGPGSPRSPVCPSEMGRKSLPAPWGLGDEPRDVAPVGTPQGPKMQLSPFPVSLSHPDRAQLCPGRSPLGEGWQPGPGRGFHAALRQATSAEREVQNLRGARRSGLAVRWLRDAESGTLAVSLVPAGPDAASLPREGKYGHAACFGLQPGCLRQDGSRQIAIAAMVANFTKPTADAPSLLQHDEVETYFHEFGHVMHQLCSQAEFAMFSGTHVERDFVEAPSQMLENWVWEQEPLLRMSRHYRTGSAVPRELLEKLIESRQANTGLFNLRQIVLAKVDQALHTQTDADPAEEYARLCQEILGVPATPGTNMPATFGHLAGGYDAQYYGYLWSEVYSMDMFHTRFKQEGVLNSKVGMDYRSCILRPGGSEDASAMLRRFLGRDPKQDAFLLSKGLQVGGCEPEPQVC

SEQ ID NO: 901311 - protein, 743 aa, Homo sapiens; identical to SEQ ID NO: 901300

SEQ ID NO: 901312 - protein, 758 aa, Homo sapiens
HEGPGSAGGGPLGPQAAVAAVAAVGPRQAASVAEVAGRVAGGRREGAAGADPPAMKPPAACAGDMADAASPCSVVNDLRWDLSAQQIEERTRELIEQTKRVYDQVGTQEFEDVSYESTLKALADVEVTYTVQRNILDFPQHVSPSKDIRTASTEADKKLSEFDVEMSMREDVYQRIVWLQEKVQKDSLRPEAARYLERLIKLGRRNGLHLPRETQENIKRIKKKLSLLCIDFNKNLNEDTTFLPFTLQELGGLPEDFLNSLEKMEDGKLKVTLKYPHYFPLLKKCHVPETRRKVEEAFNCRCKEENCAILKELVTLRAQKSRLLGFHTHADYVLEMNMAKTSQTVATFLDELAQKLKPLGEQERAVILELKRAECERRGLPFDGRIRAWDMRYYMNQVEETRYCVDQNLLKEYFPVQVVTHGLLGIYQELLGLAFHHEEGASAWHEDVRLYTARDAASGEVVGKFYLDLYPREGKYGHAACFGLQPGCLRQDGSRQIAIAAMVANFTKPTADAPSLLQHDEVETYFHEFGHVMHQLCSQAEFAMFSGTHVERDFVEAPSQMLENWVWEQEPLLRMSRHYRTGSAVPRELLEKLIESRQANTGLFNLRQIVLAKVDQALHTQTDADPAEEYARLCQEILGVPATPGTNMPATFGHLAGGYDAQYYGYLWSEVYSMDMFHTRFKQEGVLNSKEAPHWPLRPRAVSAGSSVSSHTSPSGICVIGSEPWAETDPSLEKAWRLPFICSSNLQFPHYEVRPLRH

SEQ ID NO: 901313 - protein, 515 aa, Homo sapiens
  misc_feature (1)..(2): Xaa can be any naturally occurring amino acid
XXDIVGPPARTRAFLPFSLQELGGLPEDFLNSLEKMEDGKLKVTLKYPHYFPLLKKCHVPETRRKVEEAFNCRCKEENCAILKELVTLRAQKSRLLGFHTHADYVLEMNMAKTSQTVATFLDELAQKLKPLGEQERAVILELKRAECERRGLPFDGRIRAWDMRYYMNQVEETRYCVDQNLLKEYFPVQVVTHGLLGIYQELLGLAFHHEEGASAWHEDVRLYTARDAASGEVVGKFYLDLYPREGKYGHAACFGLQPGCLRQDGSRQIAIAAMVANFTKPTADAPSLLQHDEVETYFHEFGHVMHQLCSQAEFAMFSGTHVERDFVEAPSQMLENWVWEQEPLLRMSRHYRTGSAVPRELLEKLIESRQANTGLFNLRQIVLAKVDQALHTQTDADPAEEYARLCQEILGVPATPGTNMPATFGHLAGGYDAQYYGYLWSEVYSMDMFHTRFKQEGVLNSKVGMDYRSCILRPGGSEDASAMLRRFLGRDPKQDAFLLSKGLQVGGCEPEPQVC

SEQ ID NO: 901314 - protein, 119 aa, Homo sapiens
AHPRSEILMKGTCALPPVLMQAAPGLPGNLEGVAPRPPWARVCRLLGSSAFLPGSPPGHSALSPRQVGMDYRSCILRPGGSEDASAMLRRFLGRDPKQDAFLLSKGLQVGGCEPEPQVC

SEQ ID NO: 901315 - protein, 124 aa, Homo sapiens
MADDLKRFLYKKLPSVEGLHAIVVSDRDGVPVIKVANDNAPEHALRPGFLSTFALATDQGSKLGLSKNKSIICYYNTYQVVQFNRLPLVVSFIASSSANTGLIVSLEKELAPLFEELRQVVEVS

SEQ ID NO: 901316 - protein, 124 aa, Homo sapiens; identical to SEQ ID NO: 901315

SEQ ID NO: 901317 - protein, 124 aa, Homo sapiens; identical to SEQ ID NO: 901315

SEQ ID NO: 901318 - protein, 117 aa, Homo sapiens
MADDLKRFLYKKLPSVEGLHAIVVSDRDGVPVIKEHALRPGFLSTFALATDQGSKLGLSKNKSIICYYNTYQVVQFNRLPLVVSFIASSSANTGLIVSLEKELAPLFEELRQVVEVS

SEQ ID NO: 901319 - protein, 124 aa, Homo sapiens; identical to SEQ ID NO: 901315

SEQ ID NO: 901320 - protein, 124 aa, Homo sapiens; identical to SEQ ID NO: 901315

SEQ ID NO: 901321 - protein, 124 aa, Homo sapiens; identical to SEQ ID NO: 901315

SEQ ID NO: 901322 - protein, 120 aa, Homo sapiens
MADDLKRFLYKKLPSVEGLHAIVVSDRDGVPVIKVANDNAPEHALRPGFLSTFALATDQGSKLGLSKNKSIICYYNTYQVVQFNRLPLVVSFIASSSANTDKLWKFLNLTVVSVCTLSSL

SEQ ID NO: 901323 - protein, 654 aa, Homo sapiens
MSEASSEDLVPPLEAGAAPYREEEEAAKKKKEKKKKSKGLANVFCVFTKGKKKKGQPSSAEPEDAAGSRQGLDGPPPTVEELKAALERGQLEAARPLLALERELAAAAAAGGVSEEELVRRQSKVEALYELLRDQVLGVLRRPLEAPPERLRQALAVVAEQEREDRQAAAAGPGTSGLAATRPRRWLQLWRRGVAEAAEERMGQRPAAGAEVPESVFLHLGRTMKEDLEAVVERLKPLFPAEFGVVAAYAESYHQHFAAHLAAVAQFELCERDTYMLLLWVQNLYPNDIINSPKLVGELQGMGLGSLLPPRQIRLLEATFLSSEAANVRELMDRALELEARRWAEDVPPQRLDGHCHSELAIDIIQITSQAQAKAESITLDLGSQIKRVLLVELPAFLRSYQRAFNEFLERGKQLTNYRANVIANINNCLSFRMSMEQNWQVPQDTLSLLLGPLGELKSHGFDTLLQNLHEDLKPLFKRFTHTRWAAPVETLENIIATVDTRLPEFSELQGCFREELMEALHLHLVKEYIIQLSKGRLVLKTAEQQQQLAGYILANADTIQHFCTQHGSPATWLQPALPTLAEIIRLQDPSAIKIEVATYATCYPDFSKGHLSAILAIKGNLSNSEVKRIRSILDVSMGAQEPSRPLFSLIKVG

SEQ ID NO: 901324 - protein, 654 aa, Homo sapiens; identical to SEQ ID NO: 901323

SEQ ID NO: 901325 - protein, 679 aa, Homo sapiens
MSEASSEDLVPPLEAGAAPYREEEEAAKKKKEKKKKSKGLANVFCVFTKGKKKKGQPSSAEPEDAAGSRQGLDGPPPTVEELKAALERGQLEAARPLLALERELAAAAAAGGVSEEELVRRQSKVEALYELLRDQVLGVLAAAAGGAARAAAPGAGRGGGAGARGPPGGGGGAEVPESVFLHLGRTMKEDLEAVVERLKPLFPAEFGVVAAYAESYHQHFAAHLAAVAQFELCERDTYMLLLWVQNLYPNDIINSPKLVGELQGMGLGSLLPPRQIRLLEATFLSSEAANVRELMDRALELEARRWAEDVPPQRLDGHCHSELAIDIIQITSQAQAKAESITLDLGSQIKRVLLVELPAFLRSYQRAFNEFLERGKQLTNYRANVIANINNCLSFRMSMEQNWQVPQDTLSLLLGPLGELKSHGFDTLLQNLHEDLKPLFKRFTHTRWAAPVETLENIIATVDTRLPEFSELQGCFREELMEALHLHLVKEYIIQLSKGRLVLKTAEQQQQLAGYILANADTIQHFCTQHGSPATWLQPALPTLAEIIRLQDPSAIKIEVATYATCYPDFSKGHLSAILAIKGNLSNSEVKRIRSILDVSMGAQEPSRPLFSLIKPRAAVSGIQQWWNGRQNWKRKKEKMSSRLAGAFRVLWRAVSTASVRRHIQVAPRPLQAGPAMGP

SEQ ID NO: 901326 - protein, 409 aa, Homo sapiens
MSEASSEDLVPPLEAGAAPYREEEEAAKKKKEKKKKSKGLANVFCVFTKGKKKKGQPSSAEPEDAAGSRQGLDGPPPTVEELKAALERGQLEAARPLLALERELAAAAAAGGVSEEELVRRQSKVEALYELLRDQVLGVLAAAAGGAARAAAPGAGRGGGAGARGPPGGGGGAEVPESVFLHLGRTMKEDLEAVVERLKPLFPAEFGVVAAYAESYHQHFAAHLAAVAQFELCERDTYMLLLWVQNLYPNDIINSPKLVGELQGMGLGSLLPPRQIRLLEATFLSSEAANVRELMDRALELEARRWAEDVPPQRLDGHCHSELAIDIIQITSQAQAKAESITLDLGSQIKRVLLVELPAFLRSYQRAFNEFLERGKQLTNYRANVIANINNCLSFRMSMEQNWQYPEDH

SEQ ID NO: 901327 - protein, 107 aa, Homo sapiens
PVSSRHSNLALLKPTSRDLTAPPEGASLMTVGGITAPRDVQVWNPRTWESVTLRGKRDPADASAVLSQDLGPALLGLSPFPRYCLTKLWPGSGRYKGCPRSLYVCRS

SEQ ID NO: 901328 - protein, 654 aa, Homo sapiens; identical to SEQ ID NO: 901323

SEQ ID NO: 901329 - protein, 617 aa, Homo sapiens
MSEASSEDLVPPLEAGAAPYREEEEAAKKKKEKKKKSKGLANVFCVFTKGKKKKGQPSSAEPEDAAGSRQGLDGPPPTVEELKAALERGQLEAARPLLALERELAAAAAAGGVSEEELVRRQSKVEALYELLRDQVLGVLAAAAGGAARAAAPGAGRGGGAGARGPPGGGGGAEVPESVFLHLGRTMKEDLEAVVERLKPLFPAEFGVVAAYAESYHQHFAAHLAAVAQFELCERDTYMLLLWVQNLYPNDIINSPKLVGELQGMGLGSLLPPRQIRLLEATFLSSEAANVRELMDRALELEARRWAEDVPPQRLDGHCHSELAIDIIQITSQAQAKAESITLDLGSQIKRVLLVELPAFLRSYQRAFNEFLERGKQLTNYRANVIANINNCLSFRMSMEQNWQVPQDTLSLLLGPLGELKSHGFDTLLQNLHEDLKPLFKRFTHTRWAAPVETLENIIATVDTRLPEFSELQGCFREELMEALHLHLVKEYIIQLSKGRLVLKTAEQQQQLAGYILANADTIQHFCTQHGSPATWLQPALPTLAEIIRLQDPSAIKIEVATYATCYPDFSKGHLSAILAIKGNLSNSEVKRIRSILDVSMGAQEPSRPLFSLIKVG

SEQ ID NO: 901330 - protein, 571 aa, Homo sapiens
MSEASSEDLVPPLEAGAAPYREEEEAAKKKKEKKKKSKGLANVFCVFTKGKKKKGQPSSAEPEDAAGSRQGLDGPPPTVEELKAALERGQLEAARPLLALERELAAAAAAGGVSEEELVRRQSKVEALYELLRDQVLGVLAAAAGGAARAAAPGAGRGGGAGARGPPGGGGGAEVPESVFLHLGRTMKEDLEAVVERLKPLFPAEFGVVAAYAESYHQHFAAHLAAVAQFELCERDTYMLLLWVQNLYPNDIINSPKLVGELQGMGLGSLLPPRQIRLLEATFLSSEAANVRELMDRALELEARRWAEDVPPQRLDGHCHSELAIDIIQITSQAQAKAESITLDLGSQIKRVLLVELPAFLRSYQRAFNEFLERGKQLTNYRANVIANINNCLSFRMSMEQNWQVPQDTLSLLLGPLGELKSHGFDTLLQNLHEDLKPLFKRFTHTRWAAPVETLENIIATVDTRLPEFSELQGCFREELMEALHLHLVKEYIIQLSKGRLVLKTAEQQQQLAGYILANADTIQHFCTQHGSPATWLQPALPTLAEIIRLQDPSAIKIEVATYATCYPDFR

SEQ ID NO: 901331 - protein, 142 aa, Homo sapiens
MAAAVAAAGAGEPQSPDELLPKGDAEKPEEELEEDDDEELDETLSERLWGLTEMFPERVRSAAGATFDLSLFVAQKMYRFSRAALWIGTTSFMILVLPVVFETEKLQMEQQQQLQQRQILLGPNTGLSGGMPGALPSLPGKI

SEQ ID NO: 901332 - protein, 153 aa, Homo sapiens
PPSALPVSPTVMAAAVAAAGAGEPQSPDELLPKGDAEKPEEELEEDDDEELDETLSERLWGLTEMFPERVRSAAGATFDLSLFVAQKMYRFSRAALWIGTTSFMILVLPVVFETEKLQMEQQQQLQQRQILLGPNTGLSGGMPGALPSLPGKI

SEQ ID NO: 901333 - protein, 153 aa, Homo sapiens; identical to SEQ ID NO: 901332

SEQ ID NO: 901334 - protein, 153 aa, Homo sapiens
AKRLLWEAGLGALLGPGCPSSSGARRLPVPQRGQEWMSLFRLRPASTPPQLDETLSERLWGLTEMFPERVRSAAGATFDLSLFVAQKMYRFSRAALWIGTTSFMILVLPVVFETEKLQMEQQQQLQQRQILLGPNTGLSGGMPGALPSLPGKI

SEQ ID NO: 901335 - protein, 175 aa, Homo sapiens
  misc_feature (150)..(150): Xaa can be any naturally occurring amino acid
PPSALPVSPTVMAAAVAAAGAGEPQSPDELLPKGDAEKPEEELEEDDDEELDETLSERLWGLTEMFPERVRSAAGATFDLSLFVAQKMYRFSRAALWIGTTSFMILVLPVVFETEKLQMEQQQQLQQRQILLGPNTGLLSEDMARCFLTXSSSLGKKGFREDMPYFGIVFEEVLC

SEQ ID NO: 901336 - protein, 153 aa, Homo sapiens; identical to SEQ ID NO: 901332

SEQ ID NO: 901337 - protein, 153 aa, Homo sapiens; identical to SEQ ID NO: 901332

SEQ ID NO: 901338 - protein, 153 aa, Homo sapiens; identical to SEQ ID NO: 901332

SEQ ID NO: 901339 - protein, 76 aa, Homo sapiens
LEHLSFLSHKEGKIKSGSGRDRTTSFMILVLPVVFETEKLQMEQQQQLQQRQILLGPNTGLSGGMPGALPSLPGKI

SEQ ID NO: 901340 - protein, 115 aa, Homo sapiens
QSGERFKKSISNAAPSKEAFKMRSLRKGKDRTVAEGEECAREMGVDIIARSESLGPISELYSDELSEPEHEAARPVYPPHEGREIPTPEPLKVTFKSQVKVEDDESLLLDLKHSS

SEQ ID NO: 901341 - protein, 441 aa, Homo sapiens
MSERSDLLHFKFENYGDSMLQKMNKLREENKFCDVTVLIDDIEVQGHKIVFAAGSPFLRDQFLLNDSREVKISILQSSEVGRQLLLSCYSGVLEFPEMELVNYLTAASFLQMSHIVERCTQALWKFIKPKQPMDSKEGCEPQSASPQSKEQQGDARGSPKQDSPCIHPSEDSMDMEDSDIQIVKVESIGDVSEVRSKKDQNQFISSEPTALHSSEPQHSLINSTVENRVSEIEQNHLHNYALSYTGSDNIIMASKDVFGPNIRGVDKGLQWHHQCPKCTRVFRHLENYANHLKMHKLFMCLLCGKTFTQKGNLHRHMRVHAGIKPFQCKICGKTFSQKCSLQDHLNLHSGDKPHKCNYCDMVFAHKPVLRKHLKQLHGKNSFDNANERNVQDLTVDFDSFACTTVTDSKGCQPQPDATQVLDAGKLAQAVLNLRNDSTCVN

SEQ ID NO: 901342 - protein, 466 aa, Homo sapiens
RSPEGPELLAVPDPDGGLPPGLSAKMSERSDLLHFKFENYGDSMLQKMNKLREENKFCDVTVLIDDIEVQGHKIVFAAGSPFLRDQFLLNDSREVKISILQSSEVGRQLLLSCYSGVLEFPEMELVNYLTAASFLQMSHIVERCTQALWKFIKPKQPMDSKEGCEPQSASPQSKEQQGDARGSPKQDSPCIHPSEDSMDMEDSDIQIVKVESIGDVSEVRSKKDQNQFISSEPTALHSSEPQHSLINSTVENRVSEIEQNHLHNYALSYTGSDNIIMASKDVFGPNIRGVDKGLQWHHQCPKCTRVFRHLENYANHLKMHKLFMCLLCGKTFTQKGNLHRHMRVHAGIKPFQCKICGKTFSQKCSLQDHLNLHSGDKPHKCNYCDMVFAHKPVLRKHLKQLHGKNSFDNANERNVQDLTVDFDSFACTTVTDSKGCQPQPDATQVLDAGKLAQAVLNLRNDSTCVN

SEQ ID NO: 901343 - protein, 406 aa, Homo sapiens
MIHTNLKKKFSCCVLVFLLFAVICVWKEKKKGSYYDSFKLQTKEFQVLKSLGKLAMGSDSQSVSSSSTQDPHRGRQTLGSLRGLAKAKPEASFQVWNKDSSSKNLIPRLQKIWKNYLSMNKYKVSYKGPGPGIKFSAEALRCHLRDHVNVSMVEVTDFPFNTSEWEGYLPKESIRTKAGPWGRCAVVSSAGSLKSSQLGREIDDHDAVLRFNGAPTANFQQDVGTKTTIRLMNSQLVTTEKRFLKDSLYNEGILIVWDPSVYHSDIPKWYQNPDYNFFNNYKTYRKLHPNQPFYILKPQMPWELWDILQEISPEEIQPNPPSSGMLGIIIMMTLCDQVDIYEFLPSKRKTDVCYYYQKFFDSACTMGAYHPLLYEKNLVKHLNQGTDEDIYLLGKATLPGFRTIHC

SEQ ID NO: 901344 - protein, 406 aa, Homo sapiens; identical to SEQ ID NO: 901343

SEQ ID NO: 901345 - protein, 406 aa, Homo sapiens; identical to SEQ ID NO: 901343

SEQ ID NO: 901346 - protein, 406 aa, Homo sapiens; identical to SEQ ID NO: 901343

SEQ ID NO: 901347 - protein, 401 aa, Homo sapiens
MIHTNLKKKFSCCVLVFLLFAVICVWKEKKKGSYYDSFKLQTKEFQVLKSLGKLAMGSDSQSVSSSSTQDPHRGRQTLGSLRGLAKAKPEASFQVWNKDSSSKNLIPRLQKIWKNYLSMNKYKVSYKGPGPGIKFSAEALRCHLRDHVNVSMVEVTDFPFNTSEWEGYLPKESIRTKAGPWGRCAVVSSAGSLKSSQLGREIDDHDAVLRFNGAPTANFQQDVGTKTTIRLMNSQLVTTEKRFLKDSLYNEGILIVWDPSVYHSDIPKWYQNPDYNFFNNYKTYRKLHPNQPFYILKPQMPWELWDILQEISPEEIQPNPPSSGMLGIIIMMTLCDQVDIYEFLPSKRKTDVCYYYQKFFDSACTMGAYHPLLYEKNLVKHLNQGTDEDIYLLGSSPSGIK

SEQ ID NO: 901348 - protein, 406 aa, Homo sapiens; identical to SEQ ID NO: 901343

SEQ ID NO: 901349 - protein, 406 aa, Homo sapiens; identical to SEQ ID NO: 901343

SEQ ID NO: 901350 - protein, 239 aa, Homo sapiens
MGKHYSLAPSPASRLSLFLHIASAHHLFSVSLWFIDDHDAVLRFNGAPTANFQQDVGTKTTIRLMNSQLVTTEKRFLKDSLYNEGILIVWDPSVYHSDIPKWYQNPDYNFFNNYKTYRKLHPNQPFYILKPQMPWELWDILQEISPEEIQPNPPSSGMLGIIIMMTLCDQVDIYEFLPSKRKTDVCYYYQKFFDSACTMGAYHPLLYEKNLVKHLNQGTDEDIYLLGKATLPGFRTIHC

SEQ ID NO: 901351 - protein, 406 aa, Homo sapiens; identical to SEQ ID NO: 901343

SEQ ID NO: 901352 - protein, 406 aa, Homo sapiens; identical to SEQ ID NO: 901343

SEQ ID NO: 901353 - protein, 147 aa, Homo sapiens
LFFLPSPVPSTVRLLSPVLPQRTPLSRLPSGVPSSRAILPLPSAFSGVTWGRGVLGRAGLGKTPGALPGVNKGSRYRPAWARSGRPPPSVLSNRSLRGRECSEQGESQLRRALQPAVPLSLIGNPAGPAQPWCGEVKRLAQDHQVML

SEQ ID NO: 901354 - protein, 253 aa, Homo sapiens [sequence omitted]

SEQ ID NO: 901355 - protein, 231 aa, Homo sapiens
MIHTNLKKKFSCCVLVFLLFAVICVWKEKKKGSYYDSFKLQTKEFQVLKSLGKLAMGSDSQSVSSSSTQDPHRGRQTLGSLRGLAKAKPEASFQVWNKDSSSKNLIPRLQKIWKNYLSMNKYKVSYKGPGPGIKFSAEALRCHLRDHVNVSMVEVTDFPFNTSEWEGYLPKESIRTKAGPWGRCAVVSSAGSLKSSQLGREIGMFWGCSVNGSAYWDWLGILMVWETSGPS

SEQ ID NO: 901356 - protein, 128 aa, Homo sapiens
LFFLPSPVPSTVRLLSPVLPQRTPLSRLPSGVPSSRAILPLPSAFSGVTWGRGVLGRAGLGKTPGALPGVNKGSRYRPAWARSGRPPPSVLSNRSLRGRECSEQGESQLRRALQPAVQGEVVNVMEPS

SEQ ID NO: 901357 - protein, 406 aa, Homo sapiens; identical to SEQ ID NO: 901343

SEQ ID NO: 901358 - protein, 406 aa, Homo sapiens; identical to SEQ ID NO: 901343

SEQ ID NO: 901359 - protein, 406 aa, Homo sapiens; identical to SEQ ID NO: 901343

SEQ ID NO: 901360 - protein, 406 aa, Homo sapiens; identical to SEQ ID NO: 901343

SEQ ID NO: 901361 - protein, 175 aa, Homo sapiens
MNSQLVTTEKRFLKDSLYNEGILIVWDPSVYHSDIPKWYQNPDYNFFNNYKTYRKLHPNQPFYILKPQMPWELWDILQEISPEEIQPNPPSSGMLGIIIMMTLCDQVDIYEFLPSKRKTDVCYYYQKFFDSACTMGAYHPLLYEKNLVKHLNQGTDEDIYLLGKATLPGFRTIHC

SEQ ID NO: 901362 - protein, 406 aa, Homo sapiens; identical to SEQ ID NO: 901343

SEQ ID NO: 901363 - protein, 128 aa, Homo sapiens; identical to SEQ ID NO: 901356

SEQ ID NO: 901364 - protein, 128 aa, Homo sapiens; identical to SEQ ID NO: 901356

SEQ ID NO: 901365 - protein, 261 aa, Homo sapiens
MIHTNLKKKFSCCVLVFLLFAVICVWKEKKKGSYYDSFKLQTKEFQVLKSLGKLAMGSDSQSVSSSSTQDPHRGRQTLGSLRGLAKAKPEASFQVWNKDSSSKNLIPRLQKIWKNYLSMNKYKVSYKGPGPGIKFSAEALRCHLRDHVNVSMVEVTDFPFNTSEWEGYLPKESIRTKAGPWGRCAVVSSAGSLKSSQLGREIDDHDAVLRFNGAPTANFQQDVGTKTTIRLMNSQISVHHCARAARKVAHFPGYTTHPQES

SEQ ID NO: 901366 - protein, 119 aa, Homo sapiens
PSLSSFSPFPSPSAFPWHSLSRTGSCCCSGRSPGSGGCARGAQCHGLHWGRNRRVLHSSQDDVRSSHCQRGWCFCGEPGGYSAVRGGSWTLHIIQHPPGLCWVSVGGLLGEFTFFFSPS

SEQ ID NO: 901367 - protein, 105 aa, Homo sapiens
MGFTGAGIAASSIAAKMMSAAAIANGGGVSAGSLVATLQSVGAAGLSTSSNILLASVGSVLGACLGNSPSSSLPAEPEAKEDEARENVPQGEPPKPPLKSEKHEE

SEQ ID NO: 901368 - protein, 130 aa, Homo sapiens
MMKRAAAAAVGGALAVGAVPVVLSAMGFTGAGIAASSIAAKMMSAAAIANGGGVSAGSLVATLQSVGAAGLSTSSNILLASVGSVLGACLGNSPSSSLPAEPEAKEDEARENVPQGEPPKPPLKSEKHEE

SEQ ID NO: 901369 - protein, 130 aa, Homo sapiens; identical to SEQ ID NO: 901368

SEQ ID NO: 901370 - protein, 630 aa, Homo sapiens
MDEMATTQISKDELDELKEAFAKVDLNSNGFICDYELHELFKEANMPLPGYKVREIIQKLMLDGDRNKDGKISFDEFVYIFQEVKSSDIAKTFRKAINRKEGICALGGTSELSSEGTQHSYSEEEKYAFVNWINKALENDPDCRHVIPMNPNTDDLFKAVGDGIVLCKMINLSVPDTIDERAINKKKLTPFIIQENLNLALNSASAIGCHVVNIGAEDLRAGKPHLVLGLLWQIIKIGLFADIELSRNEALAALLRDGETLEELMKLSPEELLLRWANFHLENSGWQKINNFSADIKDSKAYFHLLNQIAPKGQKEGEPRIDINMSGFNETDDLKRAESMLQQADKLGCRQFVTPADVVSGNPKLNLAFVANLFNKYPALTKPENQDIDWTLLEGETREERTFRNWMNSLGVNPHVNHLYADLQDALVILQLYERIKVPVDWSKVNKPPYPKLGANMKKLENCNYAVELGKHPAKFSLVGIGGQDLNDGNQTLTLALVWQLMRRYTLNVLEDLGDGQKANDDIIVNWVNRTLSEAGKSTSIQSFKDKTISSSLAVVDLIDAIQPGCINYDLVKSGNLTEDDKHNNAKYAVSMARRIGARVYALPEDLVEVKPKMVMTVFACLMGRGMKRV

SEQ ID NO: 901371 - protein, 585 aa, Homo sapiens
MPLPGYKVREIIQKLMLDGDRNKDGKISFDEFVYIFQEVKSSDIAKTFRKAINRKEGICALGGTSELSSEGTQHSYSEEEKYAFVNWINKALENDPDCRHVIPMNPNTDDLFKAVGDGIVLCKMINLSVPDTIDERAINKKKLTPFIIQENLNLALNSASAIGCHVVNIGAEDLRAGKPHLVLGLLWQIIKIGLFADIELSRNEALAALLRDGETLEELMKLSPEELLLRWANFHLENSGWQKINNFSADIKDSKAYFHLLNQIAPKGQKEGEPRIDINMSGFNETDDLKRAESMLQQADKLGCRQFVTPADVVSGNPKLNLAFVANLFNKYPALTKPENQDIDWTLLEGETREERTFRNWMNSLGVNPHVNHLYADLQDALVILQLYERIKVPVDWSKVNKPPYPKLGANMKKLENCNYAVELGKHPAKFSLVGIGGQDLNDGNQTLTLALVWQLMRRYTLNVLEDLGDGQKANDDIIVNWVNRTLSEAGKSTSIQSFKDKTISSSLAVVDLIDAIQPGCINYDLVKSGNLTEDDKHNNAKYAVSMARRIGARVYALPEDLVEVKPKMVMTVFACLMGRGMKRV

SEQ ID NO: 901372 - protein, 366 aa, Homo sapiens [sequence omitted]

SEQ ID NO: 901373 - protein, 630 aa, Homo sapiens; identical to SEQ ID NO: 901370

SEQ ID NO: 901374 - protein, 404 aa, Homo sapiens
LWSKAAKASFLLNSMSPPSRSKAALAALLRDGETLEELMKLSPEELLLRWANFHLENSGWQKINNFSADIKDSKAYFHLLNQIAPKGQKEGEPRIDINMSGFNETDDLKRAESMLQQADKLGCRQFVTPADVVSGNPKLNLAFVANLFNKYPALTKPENQDIDWTLLEGETREERTFRNWMNSLGVNPHVNHLYADLQDALVILQLYERIKVPVDWSKVNKPPYPKLGANMKKLENCNYAVELGKHPAKFSLVGIGGQDLNDGNQTLTLALVWQLMRRYTLNVLEDLGDGQKANDDIIVNWVNRTLSEAGKSTSIQSFKDKTISSSLAVVDLIDAIQPGCINYDLVKSGNLTEDDKHNNAKYAVSMARRIGARVYALPEDLVEVKPKMVMTVFACLMGRGMKRV

SEQ ID NO: 901375 - protein, 376 aa, Homo sapiens
MDEMATTQISKDELDELKEAFAKVDLNSNGFICDYELHELFKEANMPLPGYKVREIIQKLMLDGDRNKDGKISFDEFVYIFQEVKSSDIAKTFRKAINRKEGICALGGTSELSSEGTQHSYSEEEKYAFVNWINKALENDPDCRHVIPMNPNTDDLFKAVGDGIVLCKMINLSVPDTIDERAINKKKLTPFIIQENLNLALNSASAIGCHVVNIGAEDLRAGKPHLVLGLLWQIIKIGLFADIELSRNEALAALLRDGETLEELMKLSPEELLLRWANFHLENSGWQKINNFSADIKDSKAYFHLLNQIAPKGQKEGEPRIDINMSGFNETDDLKRAESMLQQADKLGCRQFVTPADVVSGNPKLNLAFVANLFNK

SEQ ID NO: 901376 - protein, 630 aa, Homo sapiens; identical to SEQ ID NO: 901370

SEQ ID NO: 901377 - protein, 493 aa, Homo sapiens
MDEMATTQISKDELDELKEAFAKVDLNSNGFICDYELHELFKEANMPLPGYKVREIIQKLMLDGDRNKDGKISFDEFVYIFQEVKSSDIAKTFRKAINRKEGICALGGTSELSSEGTQHSYSEEEKYAFVNWINKALENDPDCRHVIPMNPNTDDLFKAVGDGIVLCKMINLSVPDTIDERAINKKKLTPFIIQENLNLALNSASAIGCHVVNIGAEDLRAGKPHLVLGLLWQIIKIGLFADIELSRNEALAALLRDGETLEELMKLSPEELLLRWANFHLENSGWQKINNFSADIKDSKAYFHLLNQIAPKGQKEGEPRIDINMSGFNETDDLKRAESMLQQADKLGCRQFVTPADVVSGNPKLNLAFVANLFNKYPALTKPENQDIDWTLLEGETREERTFRNWMNSLGVNPHVNHLYADLQDALVILQLYERIKVPVDWSKVNKPPYPKLGANMKKLENCNYAVELGKHPVPDFSFKFGTCGEEFPLNAR

SEQ ID NO: 901378 - protein, 630 aa, Homo sapiens; identical to SEQ ID NO: 901370

SEQ ID NO: 901379 - protein, 354 aa, Homo sapiens
MDEMATTQISKDELDELKEAFAKVDLNSNGFICDYELHELFKEANMPLPGYKVREIIQKLMLDGDRNKDGKISFDEFVYIFQEVKSSDIAKTFRKAINRKEGICALGGTSELSSEGTQHSYSEEEKYAFVNWINKALENDPDCRHVIPMNPNTDDLFKAVGDGIVLCKMINLSVPDTIDERAINKKKLTPFIIQENLNLALNSASAIGCHVVNIGAEDLRAGKPHLVLGLLWQIIKIGLFADIELSRNEALAALLRDGETLEELMKLSPEELLLRWANFHLENSGWQKINNFSADIKDSKAYFHLLNQIAPKGQKEGEPRIDINMSGFNETDDLKRAESMLQQADKLGCRQFST

SEQ ID NO: 901380 - protein, 630 aa, Homo sapiens; identical to SEQ ID NO: 901370

SEQ ID NO: 901381 - protein, 630 aa, Homo sapiens; identical to SEQ ID NO: 901370

SEQ ID NO: 901382 - protein, 220 aa, Homo sapiens
MSILHVNHLYADLQDALVILQLYERIKVPVDWSKVNKPPYPKLGANMKKLENCNYAVELGKHPAKFSLVGIGGQDLNDGNQTLTLALVWQLMRRYTLNVLEDLGDGQKANDDIIVNWVNRTLSEAGKSTSIQSFKDKTISSSLAVVDLIDAIQPGCINYDLVKSGNLTEDDKHNNAKYAVSMARRIGARVYALPEDLVEVKPKMVMTVFACLMGRGMKRV

SEQ ID NO: 901383 - protein, 630 aa, Homo sapiens; identical to SEQ ID NO: 901370

SEQ ID NO: 901384 - protein, 421 aa, Homo sapiens
MDEMATTQISKDELDELKEAFAKVDLNSNGFICDYELHELFKEANMPLPGYKVREIIQKLMLDGDRNKDGKISFDEFVYIFQEVKSSDIAKTFRKAINRKEGICALGGTSELSSEGTQHSYSEEEKYAFVNWINKALENDPDCRHVIPMNPNTDDLFKAVGDGIVLCKMINLSVPDTIDERAINKKKLTPFIIQENLNLALNSASAIGCHVVNIGAEDLRAGKPHLVLGLLWQIIKIGLFADIELSRNEALAALLRDGETLEELMKLSPEELLLRWANFHLENSGWQKINNFSADIKDSKAYFHLLNQIAPKGQKEGEPRIDINMSGFNETDDLKRAESMLQQADKLGCRQFVTPADVVSGNPKLNLAFVANLFNKYPALTKPENQDIDWTLLEGETREERTFRNWMNSLGVNPHVNHLYA

SEQ ID NO: 901385 - protein, 1394 aa, Homo sapiens
MAALLRSARWLLRAGAAPRLPLSLRLLPGGPGRLHAASYLPAARAGPVAGGLLSPARLYAIAAKEKDIQEESTFSSRKISNQFDWALMRLDLSVRRTGRIPKKLLQKVFNDTCRSGGLGGSHALLLLRSCGSLLPELKLEERTEFAHRIWDTLQKLGAVYDVSHYNALLKVYLQNEYKFSPTDFLAKMEEANIQPNRVTYQRLIASYCNVGDIEGASKILGFMKTKDLPVTEAVFSALVTGHARAGDMENAENILTVMRDAGIEPGPDTYLALLNAYAEKGDIDHVKQTLEKVEKSELHLMDRDLLQIIFSFSKAGYPQYVSEILEKVTCERRYIPDAMNLILLLVTEKLEDVALQILLACPVSKEDGPSVFGSFFLQHCVTMNTPVEKLTDYCKKLKEVQMHSFPLQFTLHCALLANKTDLAKALMKAVKEEGFPIRPHYFWPLLVGRRKEKNVQGIIEILKGMQELGVHPDQETYTDYVIPCFDSVNSARAILQENGCLSDSDMFSQAGLRSEAANGNLDFVLSFLKSNTLPISLQSIRSSLLLGFRRSMNINLWSEITELLYKDGRYCQEPRGPTEAVGYFLYNLIDSMSDSEVQAKEEHLRQYFHQLEKMNVKIPENIYRGIRNLLESYHVPELIKDAHLLVESKNLDFQKTVQLTSSELESTLETLKAENQPIRDVLKQLILVLCSEENMQKALELKAKYESDMVTGGYAALINLCCRHDKVEDALNLKEEFDRLDSSAVLDTGKYVGLVRVLAKHGKLQDAINILKEMKEKDVLIKDTTALSFFHMLNGAALRGEIETVKQLHEAIVTLGLAEPSTNISFPLVTVHLEKGDLSTALEVAIDCYEKYKVLPRIHDVLCKLVEKGETDLIQKAMDFVSQEQGEMVMLYDLFFAFLQTGNYKEAKKIIETPGIRARSARLQWFCDRCVANNQVETLEKLVELTQKLFECDRDQMYYNLLKLYKINGDWQRADAVWNKIQEENVIPREKTLRLLAEILREGNQEVPFDVPELWYEDEKHSLNSSSASTTEPDFQKDILIACRLNQKKGAYDIFLNAKEQNIVFNAETYSNLIKLLMSEDYFTQAMEVKAFAETHIKGFTLNDAANSRLIITQVRRDYLKEAVTTLKTVLDQQQTPSRLAVTRVIQALAMKGDVENIEVVQKMLNGLEDSIGLSKMVFINNIALAQIKNNNIDAAIENIENMLTSENKVIEPQYFGLAYLFRKVIEEQLEPAVEKISIMAERLANQFAIYKPVTDFFLQLVDAGKVDDARALLQRCGAIAEQTPILLLFLLRNSRKQGKASTVKSVLELIPELNEKEEAYNSLMKSYVSEKDVTSAKALYEHLTAKNTKLDDLFLKRYASLLKYAGEPVPFIEPPESFEFYAQQLRKLRENSS

SEQ ID NO: 901386 - protein, 1094 aa, Homo sapiens
MDRDLLQIIFSFSKAGYPQYVSEILEKVTCERRYIPDAMNLILLLVTEKLEDVALQILLACPVSKEDGPSVFGSFFLQHCVTMNTPVEKLTDYCKKLKEVQMHSFPLQFTLHCALLANKTDLAKALMKAVKEEGFPIRPHYFWPLLVGRRKEKNVQGIIEILKGMQELGVHPDQETYTDYVIPCFDSVNSARAILQENGCLSDSDMFSQAGLRSEAANGNLDFVLSFLKSNTLPISLQSIRSSLLLGFRRSMNINLWSEITELLYKDGRYCQEPRGPTEAVGYFLYNLIDSMSDSEVQAKEEHLRQYFHQLEKMNVKIPENIYRGIRNLLESYHVPELIKDAHLLVESKNLDFQKTVQLTSSELESTLETLKAENQPIRDVLKQLILVLCSEENMQKALELKAKYESDMVTGGYAALINLCCRHDKVEDALNLKEEFDRLDSSAVLDTGKYVGLVRVLAKHGKLQDAINILKEMKEKDVLIKDTTALSFFHMLNGAALRGEIETVKQLHEAIVTLGLAEPSTNISFPLVTVHLEKGDLSTALEVAIDCYEKYKVLPRIHDVLCKLVEKGETDLIQKAMDFVSQEQGEMVMLYDLFFAFLQTGNYKEAKKIIETPGIRARSARLQWFCDRCVANNQVETLEKLVELTQKLFECDRDQMYYNLLKLYKINGDWQRADAVWNKIQEENVIPREKTLRLLAEILREGNQEVPFDVPELWYEDEKHSLNSSSASTTEPDFQKDILIACRLNQKKGAYDIFLNAKEQNIVFNAETYSNLIKLLMSEDYFTQAMEVKAFAETHIKGFTLNDAANSRLIITQVRRDYLKEAVTTLKTVLDQQQTPSRLAVTRVIQALAMKGDVENIEVVQKMLNGLEDSIGLSKMVFINNIALAQIKNNNIDAAIENIENMLTSENKVIEPQYFGLAYLFRKVIEEQLEPAVEKISIMAERLANQFAIYKPVTDFFLQLVDAGKVDDARALLQRCGAIAEQTPILLLFLLRNSRKQGKASTVKSVLELIPELNEKEEAYNSLMKSYVSEKDVTSAKALYEHLTAKNTKLDDLFLKRYASLLKYAGEPVPFIEPPESFEFYAQQLRKLRENSS

SEQ ID NO: 901387 - protein, 1013 aa, Homo sapiens
MAALLRSARWLLRAGAAPRLPLSLRLLPGGPGRLHAASYLPAARAGPVAGGLLSPARLYAIAAKEKDIQEESTFSSRKISNQFDWALMRLDLSVRRTGRIPKKLLQKVFNDTCRSGGLGGSHALLLLRSCGSLLPELKLEERTEFAHRIWDTLQKLGAVYDVSHYNALLKVYLQNEYKFSPTDFLAKMEEANIQPNRVTYQRLIASYCNVGDIEGASKILGFMKTKDLPVTEAVFSALVTGHARAGDMENAENILTVMRDAGIEPGPDTYLALLNAYAEKGDIDHVKQTLEKVEKSELHLMDRDLLQIIFSFSKAGYPQYVSEILEKVTCERRYIPDAMNLILLLVTEKLEDVALQILLACPVSKEDGPSVFGSFFLQHCVTMNTPVEKLTDYCKKLKEVQMHSFPLQFTLHCALLANKTDLAKALMKAVKEEGFPIRPHYFWPLLVGRRKEKNVQGIIEILKGMQELGVHPDQETYTDYVIPCFDSVNSARAILQENGCLSDSDMFSQAGLRSEAANGNLDFVLSFLKSNTLPISLQSIRSSLLLGFRRSMNINLWSEITELLYKDGRYCQEPRGPTEAVGYFLYNLIDSMSDSEVQAKEEHLRQYFHQLEKMNVKIPENIYRGIRNLLESYHVPELIKDAHLLVESKNLDFQKTVQLTSSELESTLETLKAENQPIRDVLKQLILVLCSEENMQKALELKAKYESDMVTGGYAALINLCCRHDKVEDALNLKEEFDRLDSSAVLDTGKYVGLVRVLAKHGKLQDAINILKEMKEKDVLIKDTTALSFFHMLNGAALRGEIETVKQLHEAIVTLGLAEPSTNISFPLVTVHLEKGDLSTALEVAIDCYEKYKVLPRIHDVLCKLVEKGETDLIQKAMDFVSQEQGEMVMLYDLFFAFLQTGNYKEAKKIIETPGIRARSARLQWFCDRCVANNQVETLEKLVELTQKLFECDRDQMYYNLLKLYKINGDWQRADAVWNKIQEENVIPREKTLRLLAERYIDCLPIEPKKRGI

SEQ ID NO: 901388 - protein, 1394 aa, Homo sapiens; identical to SEQ ID NO: 901385

SEQ ID NO: 901389 - protein, 1394 aa, Homo sapiens; identical to SEQ ID NO: 901385

SEQ ID NO: 901390 - protein, 468 aa, Homo sapiens
KKKKKKNNQVETLEKLVELTQKLFECDRDQMYYNLLKLYKINGDWQRADAVWNKIQEENVIPREKTLRLLAEILREGNQEVPFDVPELWYEDEKHSLNSSSASTTEPDFQKDILIACRLNQKKGAYDIFLNAKEQNIVFNAETYSNLIKLLMSEDYFTQAMEVKAFAETHIKGFTLNDAANSRLIITQVRRDYLKEAVTTLKTVLDQQQTPSRLAVTRVIQALAMKGDVENIEVVQKMLNGLEDSIGLSKMVFINNIALAQIKNNNIDAAIENIENMLTSENKVIEPQYFGLAYLFRKVIEEQLEPAVEKISIMAERLANQFAIYKPVTDFFLQLVDAGKVDDARALLQRCGAIAEQTPILLLFLLRNSRKQGKASTVKSVLELIPELNEKEEAYNSLMKSYVSEKDVTSAKALYEHLTAKNTKLDDLFLKRYASLLKYAGEPVPFIEPPESFEFYAQQLRKLRENSS

SEQ ID NO: 901391 - protein, 1277 aa, Homo sapiens
MAALLRSARWLLRAGAAPRLPLSLRLLPGGPGRLHAASYLPAARAGPVAGGLLSPARLYAIAAKEKDIQEESTFSSRKISNQFDWALMRLDLSVRRTGRIPKKLLQKVFNDTCRSGGLGGSHALLLLRSCGSLLPELKLEERTEFAHRIWDTLQKLGAVYDVSHYNALLKVYLQNEYKFSPTDFLAKMEEANIQPNRVTYQRLIASYCNVGDIEGASKILGFMKTKDLPVTEAVFSALVTGHARAGDMENAENILTVMRDAGIEPGPDTYLALLNAYAEKGDIDHVKQTLEKVEKSELHLMDRDLLQIIFSFSKAGYPQYVSEILEKVTCERRYIPDAMNLILLLVTEKLEDVALQILLACPVSKEDGPSVFGSFFLQHCVTMNTPVEKLTDYCKKLKEVQMHSFPLQFTLHCALLANKTDLAKALMKAVKEEGFPIRPHYFWPLLVGRRKEKNVQGIIEILKGMQELGVHPDQETYTDYVIPCFDSVNSARAILQENGCLSDSDMFSQAGLRSEAANGNLDFVLSFLKSNTLPISLQSIRSSLLLGFRRSMNINLWSEITELLYKDGRYCQEPRGPTEAVGYFLYNLIDSMSDSEVQAKEEHLRQYFHQLEKMNVKIPENIYRGIRNLLESYHVPELIKDAHLLVESKNLDFQKTVQLTSSELESTLETLKAENQPIRDVLKQLILVLCSEENMQKALELKAKYESDMVTGGYAALINLCCRHDKVEDALNLKEEFDRLDSSAVLDTGKYVGLVRVLAKHGKLQDAINILKEMKEKDVLIKDTTALSFFHMLNGAALRGEIETVKQLHEAIVTLGLAEPSTNISFPLVTVHLEKGDLSTALEVAIDCYEKYKVLPRIHDVLCKLVEKGETDLIQKAMDFVSQEQGEMVMLYDLFFAFLQTGNYKEAKKIIETPGIRARSARLQWFCDRCVANNQVETLEKLVELTQKLFECDRDQMYYNLLKLYKINGDWQRADAVWNKIQEENVIPREKTLRLLAEILREGNQEVPFDVPELWYEDEKHSLNSSSASTTEPDFQKDILIACRLNQKKGAYDIFLNAKEQNIVFNAETYSNLIKLLMSEDYFTQAMEVKAFAETHIKGFTLNDAANSRLIITQVRRDYLKEAVTTLKTVLDQQQTPSRLAVTRVIQALAMKGDVENIEVVQKMLNGLEDSIGLSKMVFINNIALAQIKNNNIDAAIENIENMLTSENKVIEPQYFGLAYLFRKVIEEQLEPAVEKISIMAERLANQFAIYKPVTDFFLQLVDAGKVDDARALLQEF

SEQ ID NO: 901392 - protein, 112 aa, Homo sapiens
AADTNTKFADDRPRKQGRASTVKSVLELIPELNEKEEAYNSLMKSYVSEKDVTSAKALYEHLTAKNTKLDDLFLKRYASLLKYAGEPVPFIEPPESFEFYAQQLRKLRENSS

SEQ ID NO: 901393 - protein, 837 aa, Homo sapiens
MAALLRSARWLLRAGAAPRLPLSLRLLPGGPGRLHAASYLPAARAGPVAGGLLSPARLYAIAAKEKDIQEESTFSSRKISNQFDWALMRLDLSVRRTGRIPKKLLQKVFNDTCRSGGLGGSHALLLLRSCGSLLPELKLEERTEFAHRIWDTLQKLGAVYDVSHYNALLKVYLQNEYKFSPTDFLAKMEEANIQPNRVTYQRLIASYCNVGDIEGASKILGFMKTKDLPVTEAVFSALVTGHARAGDMENAENILTVMRDAGIEPGPDTYLALLNAYAEKGDIDHVKQTLEKVEKSELHLMDRDLLQIIFSFSKAGYPQYVSEILEKVTCERRYIPDAMNLILLLVTEKLEDVALQILLACPVSKEDGPSVFGSFFLQHCVTMNTPVEKLTDYCKKLKEVQMHSFPLQFTLHCALLANKTDLAKALMKAVKEEGFPIRPHYFWPLLVGRRKEKNVQGIIEILKGMQELGVHPDQETYTDYVIPCFDSVNSARAILQENGCLSDSDMFSQAGLRSEAANGNLDFVLSFLKSNTLPISLQSIRSSLLLGFRRSMNINLWSEITELLYKDGRYCQEPRGPTEAVGYFLYNLIDSMSDSEVQAKEEHLRQYFHQLEKMNVKIPENIYRGIRNLLESYHVPELIKDAHLLVESKNLDFQKTVQLTSSELESTLETLKAENQPIRDVLKQLILVLCSEENMQKALELKAKYESDMVTGGYAALINLCCRHDKVEDALNLKEEFDRLDSSAVLDTGKYVGLVRVLAKHGKLQDAINILKEMKEKDVLIKDTTALSFFHMLNGAALRGEIETVKQLHEAIVTLGLAEPSTNISFPLVTVHLEKES

SEQ ID NO: 901394 - protein, 648 aa, Homo sapiens
MAALLRSARWLLRAGAAPRLPLSLRLLPGGPGRLHAASYLPAARAGPVAGGLLSPARLYAIAAKEKDIQEESTFSSRKISNQFDWALMRLDLSVRRTGRIPKKLLQKVFNDTCRSGGLGGSHALLLLRSCGSLLPELKLEERTEFAHRIWDTLQKLGAVYDVSHYNALLKVYLQNEYKFSPTDFLAKMEEANIQPNRVTYQRLIASYCNVGDIEGASKILGFMKTKDLPVTEAVFSALVTGHARAGDMENAENILTVMRDAGIEPGPDTYLALLNAYAEKGDIDHVKQTLEKVEKSELHLMDRDLLQIIFSFSKAGYPQYVSEILEKVTCERRYIPDAMNLILLLVTEKLEDVALQILLACPVSKEDGPSVFGSFFLQHCVTMNTPVEKLTDYCKKLKEVQMHSFPLQFTLHCALLANKTDLAKALMKAVKEEGFPIRPHYFWPLLVGRRKEKNVQGIIEILKGMQELGVHPDQETYTDYVIPCFDSVNSARAILQENGCLSDSDMFSQAGLRSEAANGNLDFVLSFLKSNTLPISLQSIRSSLLLGFRRSMNINLWSEITELLYKDGRYCQEPRGPTEAVGYFLYNLIDSMSDSEVQAKEEHLRQYFTSPSFPSATVASSTSVHRASLKLSLGHDLSRSRAMCFLSL

SEQ ID NO: 901395 - protein, 1394 aa, Homo sapiens; identical to SEQ ID NO: 901385

SEQ ID NO: 901396 - protein, 1369 aa, Homo sapiens
MAALLRSARWLLRAGAAPRLPLSLRLLPGGPGRLHAASYLPAARAGPVAGGLLSPARLYAIAAKEKDIQEESTFSSRKISNQFDWALMRLDLSVRRTGRIPKKLLQKVFNDTCRSGGLGGSHALLLLRSCGSLLPELKLEERTEFAHRIWDTLQKLGAVYDVSHYNALLKVYLQNEYKFSPTDFLAKMEEANIQPNRVTYQRLIASYCNVGDIEGASKILGFMKTKDLPVTEAVFSALVTGHARAGDMENAENILTVMRDAGIEPGPDTYLALLNAYAEKGDIDHVKQTLEKVEKSELHLMDRDLLQIIFSFSKAGYPQYVSEILEKVTCERRYIPDAMNLILLLVTEKLEDVALQILLACPVSKEDGPSVFGSFFLQHCVTMNTPVEKLTDYCKKLKEVQMHSFPLQFTLHCALLANKTDLAKALMKAVKEEGFPIRPHYFWPLLVGRRKEKNVQGIIEILKGMQELGVHPDQETYTDYVIPCFDSVNSARAILQENGCLSDSDMFSQAGLRSEAANGNLDFVLSFLKSNTLPISLQSIRSSLLLGFRRSMNINLWSEITELLYKDGRYCQEPRGPTEAVGYFLYNLIDSMSDSEVQAKEEHLRQYFHQLEKMNVKIPENIYRGIRNLLESYHVPELIKDAHLLVESKNLDFQKTVQLTSSELESTLETLKAENQPIRDVLKQLILVLCSEENMQKALELKAKYESDMVTGGYAALINLCCRHDKVEDALNLKEEFDRLDSSAVLDTGKYVGLVRVLAKHGKLQDAINILKEMKEKDVLIKDTTALSFFHMLNGAALRGEIETVKQLHEAIVTLGLAEPSTNISFPLVTVHLEKGDLSTALEVAIDCYEKYKVLPRIHDVLCKLVEKGETDLIQKAMDFVSQEQGEMVMLYDLFFAFLQTGNYKEAKKIIETPGIRARSARLQWFCDRCVANNQVETLEKLVELTQKLFECDRDQMYYNLLKLYKINGDWQRADAVWNKIQEENVIPREKTLRLLAEILREGNQEVPFDVPELWYEDEKHSLNSSSASTTEPDFQKDILIACRLNQKKGAYDIFLNAKEQNIVFNAETYSNLIKLLMSEDYFTQAMEVKAFAETHIKGFTLNDAANSRLIITQVRRDYLKEAVTTLKTVLDQQQTPSRLAVTRVIQALAMKGDVENIEVVQKMLNGLEDSIGLSKMVFINNIALAQIKNNNIDAAIENIENMLTSENKVIEPQYFGLAYLFRKVIEEQLEPAVEKISIMAERLANQFAIYKPVTDFFLQLVDAGKVDDARALLQASTVKSVLELIPELNEKEEAYNSLMKSYVSEKDVTSAKALYEHLTAKNTKLDDLFLKRYASLLKYAGEPVPFIEPPESFEFYAQQLRKLRENSS

SEQ ID NO: 901397 - protein, 1394 aa, Homo sapiens; identical to SEQ ID NO: 901385

SEQ ID NO: 901398 - protein, 1382 aa, Homo sapiens
MAALLRSARWLLRAGAAPRLPLSLRLLPGGPGRLHAASYLPAARAGPVAGGLLSPARLYAIAAKEKDIQEESTFSSRKISNQFDWALMRLDLSVRRTGRIPKKLLQKVFNDTCRSGGLGGSHALLLLRSCGSLLPELKLEERTEFAHRIWDTLQKLGAVYDVSHYNALLKVYLQNEYKFSPTDFLAKMEEANIQPNRVTYQRLIASYCNVGDIEGASKILGFMKTKDLPVTEAVFSALVTGHARAGDMENAENILTVMRDAGIEPGPDTYLALLNAYAEKGDIDHVKQTLEKVEKSELHLMDRDLLQIIFSFSKAGYPQYVSEILEKVTCERRYIPDAMNLILLLVTEKLEDVALQILLACPVSKEDGPSVFGSFFLQHCVTMNTPVEKLTDYCKKLKEVQMHSFPLQFTLHCALLANKTDLAKALMKAVKEEGFPIRPHYFWPLLVGRRKEKNVQGIIEILKGMQELGVHPDQETYTDYVIPCFDSVNSARAILQENGCLSDSDMFSQAGLRSEAANGNLDFVLSFLKSNTLPISLQSIRSSLLLGFRRSMNINLWSEITELLYKDGRYCQEPRGPTEAVGYFLYNLIDSMSDSEVQAKEEHLRQYFHQLEKMNVKIPENIYRGIRNLLESYHVPELIKDAHLLVESKNLDFQKTVQLTSSELESTLETLKAENQPIRDVLKQLILVLCSEENMQKALELKAKYESDMVTGGYAALINLCCRHDKVEDALNLKEEFDRLDSSAVLDTGKYVGLVRVLAKHGKLQDAINILKEMKEKDVLIKDTTALSFFHMLNGAALRGEIETVKQLHEAIVTLGLAEPSTNISFPLVTVHLEKGDLSTALEVAIDCYEKYKVLPRIHDVLCKLVEKGETDLIQKAMDFVSQEQGEMVMLYDLFFAFLQTGNYKEAKKIIETPGIRARSARLQWFCDRCVANNQVETLEKLVELTQKLFECDRDQMYYNLLKLYKINGDWQRADAVWNKIQEENVIPREKTLRLLAEILREGNQEVPFDVPELWYEDEKHSLNSSSASTTEPDFQKDILIACRLNQKKGAYDIFLNAKEQNIVFNAETYSNLIKLLMSEDYFTQAMEVKAFAETHIKGFTLNDAANSRLIITQVRRDYLKEAVTTLKTVLDQQQTPSRLAVTRVIQALAMKGDVENIEVVQKMLNGLEDSIGLSKMVFINNIALAQIKNNNIDAAIENIENMLTSENKVIEPQYFGLAYLFRKVIEEQLEPAVEKISIMAERLANQFAIYKPVTDFFLQLVDAGKVDDARALLQRCGAIAEQTPILLLFLLRNSRKQGKVLCFTCLQINDTVRALLRSIEFNIKACCFRTLFENTIEIQDFACLYLESVLSSVSCTGNVKQVHAGIFHLHRYALRAPRKGP

SEQ ID NO: 901399 - protein, 1168 aa, Homo sapiens
MAALLRSARWLLRAGAAPRLPLSLRLLPGGPGRLHAASYLPAARAGPVAGGLLSPARLYAIAAKEKDIQEESTFSSRKISNQFDWALMRLDLSVRRTGRIPKKLLQKVFNDTCRSGGLGGSHALLLLRSCGSLLPELKLEERTEFAHRIWDTLQKLGAVYDVSHYNALLKVYLQNEYKFSPTDFLAKMEEANIQPNRVTYQRLIASYCNVGDIEGASKILGFMKTKDLPVTEAVFSALVTGHARAGDMENAENILTVMRDAGIEPGPDTYLALLNAYAEKGDIDHVKQTLEKVEKSELHLMDRDLLQIIFSFSKAGYPQYVSEILEKVTCERRYIPDAMNLILLLVTEKLEDVALQILLACPVSKEDGPSVFGSFFLQHCVTMNTPVEKLTDYCKKLKEVQMHSFPLQFTLHCALLANKTDLAKALMKAVKEEGFPIRPHYFWPLLVGRRKEKNVQGIIEILKGMQELGVHPDQETYTDYVIPCFDSVNSARAILQENGCLSDSDMFSQAGLRSEAANGNLDFVLSFLKSNTLPISLQSIRSSLLLGFRRSMNINLWSEITELLYKDGRYCQEPRGPTEAVGYFLYNLIDSMSDSEVQAKEEHLRQYFHQLEKMNVKIPENIYRGIRNLLESYHVPELIKDAHLLVESKNLDFQKTVQLTSSELESTLETLKAENQPIRDVLKQLILVLCSEENMQKALELKAKYESDMVTGGYAALINLCCRHDKVEDALNLKEEFDRLDSSAVLDTGKYVGLVRVLAKHGKLQDAINILKEMKEKDVLIKDTTALSFFHMLNGAALRGEIETVKQLHEAIVTLGLAEPSTNISFPLVTVHLEKGDLSTALEVAIDCYEKYKVLPRIHDVLCKLVEKGETDLIQKAMDFVSQEQGEMVMLYDLFFAFLQTGNYKEAKKIIETPGIRARSARLQWFCDRCVANNQVETLEKLVELTQKLFECDRDQMYYNLLKLYKINGDWQRADAVWNKIQEENVIPREKTLRLLAEILREGNQEVPFDVPELWYEDEKHSLNSSSASTTEPDFQKDILIACRLNQKKGAYDIFLNAKEQNIVFNAETYSNLIKLLMSEDYFTQAMEVKAFAETHIKGFTLNDAANSRLIITQVRRDYLKEAVTTLKTVLDQQQTPSRLAVTRVIQALAMKGDVENIEVSCITFELC

SEQ ID NO: 901400 - protein, 1080 aa, Homo sapiens
MAALLRSARWLLRAGAAPRLPLSLRLLPGGPGRLHAASYLPAARAGPVAGGLLSPARLYAIAAKEKDIQEESTFSSRKISNQFDWALMRLDLSVRRTGRIPKKLLQKVFNDTCRSGGLGGSHALLLLRSCGSLLPELKLEERTEFAHRIWDTLQKLGAVYDVSHYNALLKVYLQNEYKFSPTDFLAKMEEANIQPNRVTYQRLIASYCNVGDIEGASKILGFMKTKDLPVTEAVFSALVTGHARAGDMENAENILTVMRDAGIEPGPDTYLALLNAYAEKGDIDHVKQTLEKVEKSELHLMDRDLLQIIFSFSKAGYPQYVSEILEKVTCERRYIPDAMNLILLLVTEKLEDVALQILLACPVSKEDGPSVFGSFFLQHCVTMNTPVEKLTDYCKKLKEVQMHSFPLQFTLHCALLANKTDLAKALMKAVKEEGFPIRPHYFWPLLVGRRKEKNVQGIIEILKGMQELGVHPDQETYTDYVIPCFDSVNSARAILQENGCLSDSDMFSQAGLRSEAANGNLDFVLSFLKSNTLPISLQSIRSSLLLGFRRSMNINLWSEITELLYKDGRYCQEPRGPTEAVGYFLYNLIDSMSDSEVQAKEEHLRQYFHQLEKMNVKIPENIYRGIRNLLESYHVPELIKDAHLLVESKNLDFQKTVQLTSSELESTLETLKAENQPIRDVLKQLILVLCSEENMQKALELKAKYESDMVTGGYAALINLCCRHDKVEDALNLKEEFDRLDSSAVLDTGKYVGLVRVLAKHGKLQDAINILKEMKEKDVLIKDTTALSFFHMLNGAALRGEIETVKQLHEAIVTLGLAEPSTNISFPLVTVHLEKGDLSTALEVAIDCYEKYKVLPRIHDVLCKLVEKGETDLIQKAMDFVSQEQGEMVMLYDLFFAFLQTGNYKEAKKIIETPGIRARSARLQWFCDRCVANNQVETLEKLVELTQKLFECDRDQMYYNLLKLYKINGDWQRADAVWNKIQEENVIPREKTLRLLAEILREGNQEVPFDVPELWYEDEKHSLNSSSASTTEPDFQKDILIACRLNQKKGKHIRGWGCVWGGGLLSNSSVGCKPNQLEVL

SEQ ID NO: 901401 - protein, 91 aa, Homo sapiens
CSRDPPHKGCPENIENMLTSENKVIEPQYFGLAYLFRKVIEEQLEPAVEKISIMAERLANQFAIYKPVTDFFLQLVDAGKVDDARALLQEF

SEQ ID NO: 901402 - protein, 1906 aa, Homo sapiens
MVRERKCILCHIVYSSKKEMDEHMRSMLHHRELENLKGRDISHECRVCGVTEVGLSAYAKHISGQLHKDNVDAQEREDDGKGEEEEEDYFDKELIQLIKQRKEQSRQDEPSNSNQEINSDDRRPQWRREDRIPYQDRESYSQPAWHHRGPPQRDWKWEKDGFNNTRKNSFPHSLRNGGGPRGRSGWHKGVAGGSSTWFHNHSNSGGGWLSNSGAVDWNHNGTGRNSSWLSEGTGGFSSWHMNNSNGNWKSSVRSTNNWNYSGPGDKFQPGRNRNSNCQMEDMTMLWNKKSNKSNKYSHDRYNWQRQENDKLGTVATYRGPSEGFTSDKFPSEGLLDFNFEQLESQTTKQADTATSKVSGKNGSAAREKPRRWTPYPSQKTLDLQSGLKDITGNKSEMIEKPLFDFSLITTGIQEPQTDETRNSPTQKTQKEIHTGSLNHKASSDSAASFEVVRQCPTAEKPEQEHTPNKMPSLKSPLLPCPATKSLSQKQDPKNISKNTKTNFFSPGEHSNPSNKPTVEDNHGPYISKLRSSCPHVLKGNKSTFGSQKQSGDNLNDTLRKAKEVLQCHESLQNPLLSTSKSTRNYAKASRNVEESEKGSLKIEFQVHALEDESDGETSDTEKHGTKIGTLGSATTELLSGSTRTADEKEEDDRILKTSRELSTSPCNPIVRQKESELQMTSAASPHPGLLLDLKTSLEDAQVDDSIKSHVSYETEGFESASLDAELQKSDISQPSGPLLPELSKLGFPASLQRDLTRHISLKSKTGVHLPEPNLNSARRIRNISGHRKSETEKESGLKPTLRQILNASRRNVNWEQVIQQVTKKKQELGKGLPRFGIEMVPLVQNEQEALDLDGEPDLSSLEGFQWEGVSISSSPGLARKRSLSESSVIMDRAPSVYSFFSEEGTGKENEPQQMVSPSNSLRAGQSQKATMHLKQEVTPRAASLRTGERAENVATQRRHSAQLSSDHIIPLMHLAKDLNSQERSIPPSENQNSQESNGEGNCLSSSASSALAISSLADAATDSSCTSGAEQNDGQSIRKKRRATGDGSSPELPSLERKNKRRKIKGKKERSQVDQLLNISLREEELSKSLQCMDNNLLQARAALQTAYVEVQRLLMLKQQITMEMSALRTHRIQILQGLQETYEPSEHPDQVPCSLTRERRNSRSQTSIDAALLPTPFFPLFLEPPSSHVSPSPTGASLQITTSPTFQTHGSVPAPDSSVQIKQEPMSPEQDENVNAVPPSSACNVSKELLEANREISDSCPVYPVITARLSLPESTESFHEPSQELKFSVEQRNTRNRENSPSSQSAGLSSINKEGEEPTKGNSGSEACTSSFLRLSFASETPLEKEPHSPADQPEQQAESTLTSAETRGSKKKKKLRKKKSLRAAHVPENSDTEQDVLTVKPVRKVKAGKLIKGGKVTTSTWEDSRTGREQESVRDEPDSDSSLEVLEIPNPQLEVVAIDSSESGEEKPDSPSKKDIWNSTEQNPLETSRSGCDEVSSTSEIGTRYKDGIPVSVAETQTVISSIKGSKNSSEISSEPGDDDEPTEGSFEGHQAAVNAIQIFGNLLYTCSADKTVRVYNLVSRKCIGVFEGHTSKVNCLLVTQTSGKNAALYTGSSDHTIRCYNVKSRECVEQLQLEDRVLCLHSRWRILYAGLANGTVVTFNIKNNKRLEIFECHGPRAVSCLATAQEGARKLLVVGSYDCTISVRDARNGLLLRTLEGHSKTILCMKVVNDLVFSGSSDQSVHAHNIHTGELVRIYKGHNHAVTVVNILGKVMVTACLDKFVRVYELQSHDRLQVYGGHKDMIMCMTIHKSMIYTGCYDGSIQAVRLNLMQNYRCWWHGCSLIFGVVDHLKQHLLTDHTNPNFQTLKCRWKNCDAFFTARKGSKQDAAGHIERHAEDDSKIDS

SEQ ID NO: 901403 - protein, 1906 aa, Homo sapiens; identical to SEQ ID NO: 901402

SEQ ID NO: 901404 - protein, 1845 aa, Homo sapiens
CPSPFGCPSPFVCPSPFVSSLSRIAQAAPGKELIQLIKQRKEQSRQDEPSNSNQEINSDDRRPQWRREDRIPYQDRESYSQPAWHHRGPPQRDWKWEKDGFNNTRKNSFPHSLRNGGGPRGRSGWHKGVAGGSSTWFHNHSNSGGGWLSNSGAVDWNHNGTGRNSSWLSEGTGGFSSWHMNNSNGNWKSSVRSTNNWNYSGPGDKFQPGRNRNSNCQMEDMTMLWNKKSNKSNKYSHDRYNWQRQENDKLGTVATYRGPSEGFTSDKFPSEGLLDFNFEQLESQTTKQADTATSKVSGKNGSAAREKPRRWTPYPSQKTLDLQSGLKDITGNKSEMIEKPLFDFSLITTGIQEPQTDETRNSPTQKTQKEIHTGSLNHKASSDSAASFEVVRQCPTAEKPEQEHTPNKMPSLKSPLLPCPATKSLSQKQDPKNISKNTKTNFFSPGEHSNPSNKPTVEDNHGPYISKLRSSCPHVLKGNKSTFGSQKQSGDNLNDTLRKAKEVLQCHESLQNPLLSTSKSTRNYAKASRNVEESEKGSLKIEFQVHALEDESDGETSDTEKHGTKIGTLGSATTELLSGSTRTADEKEEDDRILKTSRELSTSPCNPIVRQKESELQMTSAASPHPGLLLDLKTSLEDAQVDDSIKSHVSYETEGFESASLDAELQKSDISQPSGPLLPELSKLGFPASLQRDLTRHISLKSKTGVHLPEPNLNSARRIRNISGHRKSETEKESGLKPTLRQILNASRRNVNWEQVIQQVTKKKQELGKGLPRFGIEMVPLVQNEQEALDLDGEPDLSSLEGFQWEGVSISSSPGLARKRSLSESSVIMDRAPSVYSFFSEEGTGKENEPQQMVSPSNSLRAGQSQKATMHLKQEVTPRAASLRTGERAENVATQRRHSAQLSSDHIIPLMHLAKDLNSQERSIPPSENQNSQESNGEGNCLSSSASSALAISSLADAATDSSCTSGAEQNDGQSIRKKRRATGDGSSPELPSLERKNKRRKIKGKKERSQVDQLLNISLREEELSKSLQCMDNNLLQARAALQTAYVEVQRLLMLKQQITMEMSALRTHRIQILQGLQETYEPSEHPDQVPCSLTRERRNSRSQTSIDAALLPTPFFPLFLEPPSSHVSPSPTGASLQITTSPTFQTHGSVPAPDSSVQIKQEPMSPEQDENVNAVPPSSACNVSKELLEANREISDSCPVYPVITARLSLPESTESFHEPSQELKFSVEQRNTRNRENSPSSQSAGLSSINKEGEEPTKGNSGSEACTSSFLRLSFASETPLEKEPHSPADQPEQQAESTLTSAETRGSKKKKKLRKKKSLRAAHVPENSDTEQDVLTVKPVRKVKAGKLIKGGKVTTSTWEDSRTGREQESVRDEPDSDSSLEVLEIPNPQLEVVAIDSSESGEEKPDSPSKKDIWNSTEQNPLETSRSGCDEVSSTSEIGTRYKDGIPVSVAETQTVISSIKGSKNSSEISSEPGDDDEPTEGSFEGHQAAVNAIQIFGNLLYTCSADKTVRVYNLVSRKCIGVFEGHTSKVNCLLVTQTSGKNAALYTGSSDHTIRCYNVKSRECVEQLQLEDRVLCLHSRWRILYAGLANGTVVTFNIKNNKRLEIFECHGPRAVSCLATAQEGARKLLVVGSYDCTISVRDARNGLLLRTLEGHSKTILCMKVVNDLVFSGSSDQSVHAHNIHTGELVRIYKGHNHAVTVVNILGKVMVTACLDKFVRVYELQSHDRLQVYGGHKDMIMCMTIHKSMIYTGCYDGSIQAVRLNLMQNYRCWWHGCSLIFGVVDHLKQHLLTDHTNPNFQTLKCRWKNCDAFFTARKGSKQDAAGHIERHAEDDSKIDS

SEQ ID NO: 901405 - protein, 1111 aa, Homo sapiens
MVRERKCILCHIVYSSKKEMDEHMRSMLHHRELENLKGRFGIEMVPLVQNEQEALDLDGEPDLSSLEGFQWEGVSISSSPGLARKRSLSESSVIMDRAPSVYSFFSEEGTGKENEPQQMVSPSNSLRAGQSQKATMHLKQEVTPRAASLRTGERAENVATQRRHSAQLSSDHIIPLMHLAKDLNSQERSIPPSENQNSQESNGEGNCLSSSASSALAISSLADAATDSSCTSGAEQNDGQSIRKKRRATGDGSSPELPSLERKNKRRKIKGKKERSQVDQLLNISLREEELSKSLQCMDNNLLQARAALQTAYVEVQRLLMLKQQITMEMSALRTHRIQILQGLQETYEPSEHPDQVPCSLTRERRNSRSQTSIDAALLPTPFFPLFLEPPSSHVSPSPTGASLQITTSPTFQTHGSVPAPDSSVQIKQEPMSPEQDENVNAVPPSSACNVSKELLEANREISDSCPVYPVITARLSLPESTESFHEPSQELKFSVEQRNTRNRENSPSSQSAGLSSINKEGEEPTKGNSGSEACTSSFLRLSFASETPLEKEPHSPADQPEQQAESTLTSAETRGSKKKKKLRKKKSLRAAHVPENSDTEQDVLTVKPVRKVKAGKLIKGGKVTTSTWEDSRTGREQESVRDEPDSDSSLEVLEIPNPQLEVVAIDSSESGEEKPDSPSKKDIWNSTEQNPLETSRSGCDEVSSTSEIGTRYKDGIPVSVAETQTVISSIKGSKNSSEISSEPGDDDEPTEGSFEGHQAAVNAIQIFGNLLYTCSADKTVRVYNLVSRKCIGVFEGHTSKVNCLLVTQTSGKNAALYTGSSDHTIRCYNVKSRECVEQLQLEDRVLCLHSRWRILYAGLANGTVVTFNIKNNKRLEIFECHGPRAVSCLATAQEGARKLLVVGSYDCTISVRDARNGLLLRTLEGHSKTILCMKVVNDLVFSGSSDQSVHAHNIHTGELVRIYKGHNHAVTVVNILGKVMVTACLDKFVRVYELQSHDRLQVYGGHKDMIMCMTIHKSMIYTGCYDGSIQAVRLNLMQNYRCWWHGCSLIFGVVDHLKQHLLTDHTNPNFQTLKCRWKNCDAFFTARKGSKQDAAGHIERHAEDDSKIDS

SEQ ID NO: 901406 - protein, 1862 aa, Homo sapiens
MPVGRIECPSSPSFPRDISHECRVCGVTEVGLSAYAKHISGQLHKDNVDAQEREDDGKGEEEEEDYFDKELIQLIKQRKEQSRQDEPSNSNQEINSDDRRPQWRREDRIPYQDRESYSQPAWHHRGPPQRDWKWEKDGFNNTRKNSFPHSLRNGGGPRGRSGWHKGVAGGSSTWFHNHSNSGGGWLSNSGAVDWNHNGTGRNSSWLSEGTGGFSSWHMNNSNGNWKSSVRSTNNWNYSGPGDKFQPGRNRNSNCQMEDMTMLWNKKSNKSNKYSHDRYNWQRQENDKLGTVATYRGPSEGFTSDKFPSEGLLDFNFEQLESQTTKQADTATSKVSGKNGSAAREKPRRWTPYPSQKTLDLQSGLKDITGNKSEMIEKPLFDFSLITTGIQEPQTDETRNSPTQKTQKEIHTGSLNHKASSDSAASFEVVRQCPTAEKPEQEHTPNKMPSLKSPLLPCPATKSLSQKQDPKNISKNTKTNFFSPGEHSNPSNKPTVEDNHGPYISKLRSSCPHVLKGNKSTFGSQKQSGDNLNDTLRKAKEVLQCHESLQNPLLSTSKSTRNYAKASRNVEESEKGSLKIEFQVHALEDESDGETSDTEKHGTKIGTLGSATTELLSGSTRTADEKEEDDRILKTSRELSTSPCNPIVRQKESELQMTSAASPHPGLLLDLKTSLEDAQVDDSIKSHVSYETEGFESASLDAELQKSDISQPSGPLLPELSKLGFPASLQRDLTRHISLKSKTGVHLPEPNLNSARRIRNISGHRKSETEKESGLKPTLRQILNASRRNVNWEQVIQQVTKKKQELGKGLPRFGIEMVPLVQNEQEALDLDGEPDLSSLEGFQWEGVSISSSPGLARKRSLSESSVIMDRAPSVYSFFSEEGTGKENEPQQMVSPSNSLRAGQSQKATMHLKQEVTPRAASLRTGERAENVATQRRHSAQLSSDHIIPLMHLAKDLNSQERSIPPSENQNSQESNGEGNCLSSSASSALAISSLADAATDSSCTSGAEQNDGQSIRKKRRATGDGSSPELPSLERKNKRRKIKGKKERSQVDQLLNISLREEELSKSLQCMDNNLLQARAALQTAYVEVQRLLMLKQQITMEMSALRTHRIQILQGLQETYEPSEHPDQVPCSLTRERRNSRSQTSIDAALLPTPFFPLFLEPPSSHVSPSPTGASLQITTSPTFQTHGSVPAPDSSVQIKQEPMSPEQDENVNAVPPSSACNVSKELLEANREISDSCPVYPVITARLSLPESTESFHEPSQELKFSVEQRNTRNRENSPSSQSAGLSSINKEGEEPTKGNSGSEACTSSFLRLSFASETPLEKEPHSPADQPEQQAESTLTSAETRGSKKKKKLRKKKSLRAAHVPENSDTEQDVLTVKPVRKVKAGKLIKGGKVTTSTWEDSRTGREQESVRDEPDSDSSLEVLEIPNPQLEVVAIDSSESGEEKPDSPSKKDIWNSTEQNPLETSRSGCDEVSSTSEIGTRYKDGIPVSVAETQTVISSIKGSKNSSEISSEPGDDDEPTEGSFEGHQAAVNAIQIFGNLLYTCSADKTVRVYNLVSRKCIGVFEGHTSKVNCLLVTQTSGKNAALYTGSSDHTIRCYNVKSRECVEQLQLEDRVLCLHSRWRILYAGLANGTVVTFNIKNNKRLEIFECHGPRAVSCLATAQEGARKLLVVGSYDCTISVRDARNGLLLRTLEGHSKTILCMKTGELVRIYKGHNHAVTVVNILGKVMVTACLDKFVRVYELQSHDRLQVYGGHKDMIMCMTIHKSMIYTGCYDGSIQAVRLNLMQNYRCWWHGCSLIFGVVDHLKQHLLTDHTNPNFQTLKCRWKNCDAFFTARKGSKQDAAGHIERHAEDDSKIDS

SEQ ID NO: 901407 - protein, 1883 aa, Homo sapiens
MPVGRIECPSSPSFPRDISHECRVCGVTEVGLSAYAKHISGQLHKDNVDAQEREDDGKGEEEEEDYFDKELIQLIKQRKEQSRQDEPSNSNQEINSDDRRPQWRREDRIPYQDRESYSQPAWHHRGPPQRDWKWEKDGFNNTRKNSFPHSLRNGGGPRGRSGWHKGVAGGSSTWFHNHSNSGGGWLSNSGAVDWNHNGTGRNSSWLSEGTGGFSSWHMNNSNGNWKSSVRSTNNWNYSGPGDKFQPGRNRNSNCQMEDMTMLWNKKSNKSNKYSHDRYNWQRQENDKLGTVATYRGPSEGFTSDKFPSEGLLDFNFEQLESQTTKQADTATSKVSGKNGSAAREKPRRWTPYPSQKTLDLQSGLKDITGNKSEMIEKPLFDFSLITTGIQEPQTDETRNSPTQKTQKEIHTGSLNHKASSDSAASFEVVRQCPTAEKPEQEHTPNKMPSLKSPLLPCPATKSLSQKQDPKNISKNTKTNFFSPGEHSNPSNKPTVEDNHGPYISKLRSSCPHVLKGNKSTFGSQKQSGDNLNDTLRKAKEVLQCHESLQNPLLSTSKSTRNYAKASRNVEESEKGSLKIEFQVHALEDESDGETSDTEKHGTKIGTLGSATTELLSGSTRTADEKEEDDRILKTSRELSTSPCNPIVRQKESELQMTSAASPHPGLLLDLKTSLEDAQVDDSIKSHVSYETEGFESASLDAELQKSDISQPSGPLLPELSKLGFPASLQRDLTRHISLKSKTGVHLPEPNLNSARRIRNISGHRKSETEKESGLKPTLRQILNASRRNVNWEQVIQQVTKKKQELGKGLPRFGIEMVPLVQNEQEALDLDGEPDLSSLEGFQWEGVSISSSPGLARKRSLSESSVIMDRAPSVYSFFSEEGTGKENEPQQMVSPSNSLRAGQSQKATMHLKQEVTPRAASLRTGERAENVATQRRHSAQLSSDHIIPLMHLAKDLNSQERSIPPSENQNSQESNGEGNCLSSSASSALAISSLADAATDSSCTSGAEQNDGQSIRKKRRATGDGSSPELPSLERKNKRRKIKGKKERSQVDQLLNISLREEELSKSLQCMDNNLLQARAALQTAYVEVQRLLMLKQQITMEMSALRTHRIQILQGLQETYEPSEHPDQVPCSLTRERRNSRSQTSIDAALLPTPFFPLFLEPPSSHVSPSPTGASLQITTSPTFQTHGSVPAPDSSVQIKQEPMSPEQDENVNAVPPSSACNVSKELLEANREISDSCPVYPVITARLSLPESTESFHEPSQELKFSVEQRNTRNRENSPSSQSAGLSSINKEGEEPTKGNSGSEACTSSFLRLSFASETPLEKEPHSPADQPEQQAESTLTSAETRGSKKKKKLRKKKSLRAAHVPENSDTEQDVLTVKPVRKVKAGKLIKGGKVTTSTWEDSRTGREQESVRDEPDSDSSLEVLEIPNPQLEVVAIDSSESGEEKPDSPSKKDIWNSTEQNPLETSRSGCDEVSSTSEIGTRYKDGIPVSVAETQTVISSIKGSKNSSEISSEPGDDDEPTEGSFEGHQAAVNAIQIFGNLLYTCSADKTVRVYNLVSRKCIGVFEGHTSKVNCLLVTQTSGKNAALYTGSSDHTIRCYNVKSRECVEQLQLEDRVLCLHSRWRILYAGLANGTVVTFNIKNNKRLEIFECHGPRAVSCLATAQEGARKLLVVGSYDCTISVRDARNGLLLRTLEGHSKTILCMKVVNDLVFSGSSDQSVHAHNIHTGELVRIYKGHNHAVTVVNILGKVMVTACLDKFVRVYELQSHDRLQVYGGHKDMIMCMTIHKSMIYTGCYDGSIQAVRLNLMQNYRCWWHGCSLIFGVVDHLKQHLLTDHTNPNFQTLKCRWKNCDAFFTARKGSKQDAAGHIERHAEDDSKIDS

SEQ ID NO: 901408 - protein, 1883 aa, Homo sapiens; identical to SEQ ID NO: 901407

SEQ ID NO: 901409 - protein, 200 aa, Homo sapiens
MSVFCYTVGILECPSRLLHNHSGKVVNDLVFSGSSDQSVHAHNIHTGELVRIYKGHNHAVTVVNILGKVMVTACLDKFVRVYELQSHDRLQVYGGHKDMIMCMTIHKSMIYTGCYDGSIQAVRLNLMQNYRCWWHGCSLIFGVVDHLKQHLLTDHTNPNFQTLKCRWKNCDAFFTARKGSKQDAAGHIERHAEDDSKIDS

SEQ ID NO: 901410 - protein, 96 aa, Homo sapiens
KLSKAIREARDPHDVSLNMAYSDFLLHDPWCIDIVVYGDYVPRSYKNTYTGWPFSSRCLVRTLGGMDACDRYSLVGVCRPGGADADSSHYLYTNCS

SEQ ID NO: 901411 - protein, 1883 aa, Homo sapiens; identical to SEQ ID NO: 901407

SEQ ID NO: 901412 - protein, 1616 aa, Homo sapiens
MPVGRIECPSSPSFPRDISHECRVCGVTEVGLSAYAKHISGQLHKDNVDAQEREDDGKGEEEEEDYFDKELIQLIKQRKEQSRQDEPSNSNQEINSDDRRPQWRREDRIPYQDRESYSQPAWHHRGPPQRDWKWEKDGFNNTRKNSFPHSLRNGGGPRGRSGWHKGVAGGSSTWFHNHSNSGGGWLSNSGAVDWNHNGTGRNSSWLSEGTGGFSSWHMNNSNGNWKSSVRSTNNWNYSGPGDKFQPGRNRNSNCQMEDMTMLWNKKSNKSNKYSHDRYNWQRQENDKLGTVATYRGPSEGFTSDKFPSEGLLDFNFEQLESQTTKQADTATSKVSGKNGSAAREKPRRWTPYPSQKTLDLQSGLKDITGNKSEMIEKPLFDFSLITTGIQEPQTDETRNSPTQKTQKEIHTGSLNHKASSDSAASFEVVRQCPTAEKPEQEHTPNKMPSLKSPLLPCPATKSLSQKQDPKNISKNTKTNFFSPGEHSNPSNKPTVEDNHGPYISKLRSSCPHVLKGNKSTFGSQKQSGDNLNDTLRKAKEVLQCHESLQNPLLSTSKSTRNYAKASRNVEESEKGSLKIEFQVHALEDESDGETSDTEKHGTKIGTLGSATTELLSGSTRTADEKEEDDRILKTSRELSTSPCNPIVRQKESELQMTSAASPHPGLLLDLKTSLEDAQVDDSIKSHVSYETEGFESASLDAELQKSDISQPSGPLLPELSKLGFPASLQRDLTRHISLKSKTGVHLPEPNLNSARRIRNISGHRKSETEKESGLKPTLRQILNASRRNVNWEQVIQQVTKKKQELGKGLPRFGIEMVPLVQNEQEALDLDGEPDLSSLEGFQWEGVSISSSPGLARKRSLSESSVIMDRAPSVYSFFSEEGTGKENEPQQMVSPSNSLRAGQSQKATMHLKQEVTPRAASLRTGERAENVATQRRHSAQLSSDHIIPLMHLAKDLNSQERSIPPSENQNSQESNGEGNCLSSSASSALAISSLADAATDSSCTSGAEQNDGQSIRKKRRATGDGSSPELPSLERKNKRRKIKGKKERSQVDQLLNISLREEELSKSLQCMDNNLLQARAALQTAYVEVQRLLMLKQQITMEMSALRTHRIQILQGLQETYEPSEHPDQVPCSLTRERRNSRSQTSIDAALLPTPFFPLFLEPPSSHVSPSPTGASLQITTSPTFQTHGSVPAPDSSVQIKQEPMSPEQDENVNAVPPSSACNVSKELLEANREISDSCPVYPVITARLSLPESTESFHEPSQELKFSVEQRNTRNRENSPSSQSAGLSSINKEGEEPTKGNSGSEACTSSFLRLSFASETPLEKEPHSPADQPEQQAESTLTSAETRGSKKKKKLRKKKSLRAAHVPENSDTEQDVLTVKPVRKVKAGKLIKGGKVTTSTWEDSRTGREQESVRDEPDSDSSLEVLEIPNPQLEVVAIDSSESGEEKPDSPSKKDIWNSTEQNPLETSRSGCDEVSSTSEIGTRYKDGIPVSVAETQTVISSIKGSKNSSEISSEPGDDDEPTEGSFEGHQAAVNAIQIFGNLLYTCSADKTVRVYNLVSRKCIGVFEGHTSKVNCLLVTQTSGKNAALYTGSSDHTIRCYNVKVGGSREIQSGSY

SEQ ID NO: 901413 - protein, 1233 aa, Homo sapiens
MPVGRIECPSSPSFPRDISHECRVCGVTEVGLSAYAKHISGQLHKDNVDAQEREDDGKGEEEEEDYFDKELIQLIKQRKEQSRQDEPSNSNQEINSDDRRPQWRREDRIPYQDRESYSQPAWHHRGPPQRDWKWEKDGFNNTRKNSFPHSLRNGGGPRGRSGWHKGVAGGSSTWFHNHSNSGGGWLSNSGAVDWNHNGTGRNSSWLSEGTGGFSSWHMNNSNGNWKSSVRSTNNWNYSGPGDKFQPGRNRNSNCQMEDMTMLWNKKSNKSNKYSHDRYNWQRQENDKLGTVATYRGPSEGFTSDKFPSEGLLDFNFEQLESQTTKQADTATSKVSGKNGSAAREKPRRWTPYPSQKTLDLQSGLKDITGNKSEMIEKPLFDFSLITTGIQEPQTDETRNSPTQKTQKEIHTGSLNHKASSDSAASFEVVRQCPTAEKPEQEHTPNKMPSLKSPLLPCPATKSLSQKQDPKNISKNTKTNFFSPGEHSNPSNKPTVEDNHGPYISKLRSSCPHVLKGNKSTFGSQKQSGDNLNDTLRKAKEVLQCHESLQNPLLSTSKSTRNYAKASRNVEESEKGSLKIEFQVHALEDESDGETSDTEKHGTKIGTLGSATTELLSGSTRTADEKEEDDRILKTSRELSTSPCNPIVRQKESELQMTSAASPHPGLLLDLKTSLEDAQVDDSIKSHVSYETEGFESASLDAELQKSDISQPSGPLLPELSKLGFPASLQRDLTRHISLKSKTGVHLPEPNLNSARRIRNISGHRKSETEKESGLKPTLRQILNASRRNVNWEQVIQQVTKKKQELGKGLPRFGIEMVPLVQNEQEALDLDGEPDLSSLEGFQWEGVSISSSPGLARKRSLSESSVIMDRAPSVYSFFSEEGTGKENEPQQMVSPSNSLRAGQSQKATMHLKQEVTPRAASLRTGERAENVATQRRHSAQLSSDHIIPLMHLAKDLNSQERSIPPSENQNSQESNGEGNCLSSSASSALAISSLADAATDSSCTSGAEQNDGQSIRKKRRATGDGSSPELPSLERKNKRRKIKGKKERSQVDQLLNISLREEELSKSLQCMDNNLLQARAALQTAYVEVQRLLMLKQQITMEMSALRTHRIQILQGLQETYEPSEHPDQVPCSLTRERRNSRSQTSIDAALLPTPFFPLFLEPPSSHVSPSPTGASLQITTSPTFQTHGSVPAPDSSVQIKQEPMSPEQDENVNAVPPSSACNVSKELLEANSM

SEQ ID NO: 901414 - protein, 179 aa, Homo sapiens
MPVGRIECPSSPSFPRDISHECRVCGVTEVGLSAYAKHISGQLHKDNVDAQEREDDGKGEEEEEDYFDKELIQLIKQRKEQSRQDEPSNSNQEINSDDRRPQWRREDRIPYQDRESYSQPAWHHRGPPQRDWKWEKDGFVRNGLLRNGLLRNGLLRNGLLRNGLLRNGLLRNGLLRNGL

SEQ ID NO: 901415 - protein, 121 aa, Homo sapiens
KSDISQPSGPLLPELSKLGFPASLQRDLTRHISLKSKTGVHLPEPNLNSARRIRNISGHRKSETEKESGLKPTLRQILNASRRNVNWEQVIQQVTKKKQELGKGLPRCVLLFGVFFFLTFF

SEQ ID NO: 901416 - protein, 1883 aa, Homo sapiens; identical to SEQ ID NO: 901407

SEQ ID NO: 901417 - protein, 1796 aa, Homo sapiens
MPVGRIECPSSPSFPRDISHECRVCGVTEVGLSAYAKHISGQLHKDNVDAQEREDDGKGEEEEEDYFDKELIQLIKQRKEQSRQDEPSNSNQEINSDDRRPQWRREDRIPYQDRESYSQPAWHHRGPPQRDWKWEKDGFNNTRKNSFPHSLRNGGGPRGRSGWHKGVAGGSSTWFHNHSNSGGGWLSNSGAVDWNHNGTGRNSSWLSEGTGGFSSWHMNNSNGNWKSSVRSTNNWNYSGPGDKFQPGRNRNSNCQMEDMTMLWNKKSNKSNKYSHDRYNWQRQENDKLGTVATYRGPSEGFTSDKFPSEGLLDFNFEQLESQTTKQADTATSKVSGKNGSAAREKPRRWTPYPSQKTLDLQSGLKDITGNKSEMIEKPLFDFSLITTGIQEPQTDETRNSPTQKTQKEIHTGSLNHKASSDSAASFEVVRQCPTAEKPEQEHTPNKMPSLKSPLLPCPATKSLSQKQDPKNISKNTKTNFFSPGEHSNPSNKPTVEDNHGPYISKLRSSCPHVLKGNKSTFGSQKQSGDNLNDTLRKAKEVLQCHESLQNPLLSTSKSTRNYAKASRNVEESEKGSLKIEFQVHALEDESDGETSDTEKHGTKIGTLGSATTELLSGSTRTADEKEEDDRILKTSRELSTSPCNPIVRQKESELQMTSAASPHPGLLLDLKTSLEDAQVDDSIKSHVSYETEGFESASLDAELQKSDISQPSGPLLPELSKLGFPASLQRDLTRHISLKSKTGVHLPEPNLNSARRIRNISGHRKSETEKESGLKPTLRQILNASRRNVNWEQVIQQVTKKKQELGKGLPRFGIEMVPLVQNEQEALDLDGEPDLSSLEGFQWEGVSISSSPGLARKRSLSESSVIMDRAPSVYSFFSEEGTGKENEPQQMVSPSNSLRAGQSQKATMHLKQEVTPRAASLRTGERAENVATQRRHSAQLSSDHIIPLMHLAKDLNSQERSIPPSENQNSQESNGEGNCLSSSASSALAISSLADAATDSSCTSGAEQNDGQSIRKKRRATGDGSSPELPSLERKNKRRKIKGKKERSQVDQLLNISLREEELSKSLQCMDNNLLQARAALQTAYVEVQRLLMLKQQITMEMSALRTHRIQILQGLQETYEPSEHPDQVPCSLTRERRNSRSQTSIDAALLPTPFFPLFLEPPSSHVSPSPTGASLQITTSPTFQTHGSVPAPDSSVQIKQEPMSPEQDENVNAVPPSSACNVSKELLEANKTPLEKEPHSPADQPEQQAESTLTSAETRGSKKKKKLRKKKSLRAAHVPENSDTEQDVLTVKPVRKVKAGKLIKGGKVTTSTWEDSRTGREQESVRDEPDSDSSLEVLEIPNPQLEVVAIDSSESGEEKPDSPSKKDIWNSTEQNPLETSRSGCDEVSSTSEIGTRYKDGIPVSVAETQTVISSIKGSKNSSEISSEPGDDDEPTEGSFEGHQAAVNAIQIFGNLLYTCSADKTVRVYNLVSRKCIGVFEGHTSKVNCLLVTQTSGKNAALYTGSSDHTIRCYNVKSRECVEQLQLEDRVLCLHSRWRILYAGLANGTVVTFNIKNNKRLEIFECHGPRAVSCLATAQEGARKLLVVGSYDCTISVRDARNGLLLRTLEGHSKTILCMKVVNDLVFSGSSDQSVHAHNIHTGELVRIYKGHNHAVTVVNILGKVMVTACLDKFVRVYELQSHDRLQVYGGHKDMIMCMTIHKSMIYTGCYDGSIQAVRLNLMQNYRCWWHGCSLIFGVVDHLKQHLLTDHTNPNFQTLKCRWKNCDAFFTARKGSKQDAAGHIERHAEDDSKIDS

SEQ ID NO: 901418 - protein, 1883 aa, Homo sapiens; identical to SEQ ID NO: 901407

SEQ ID NO: 901419 - protein, 1068 aa, Homo sapiens
MVPLVQNEQEALDLDGEPDLSSLEGFQWEGVSISSSPGLARKRSLSESSVIMDRAPSVYSFFSEEGTGKENEPQQMVSPSNSLRAGQSQKATMHLKQEVTPRAASLRTGERAENVATQRRHSAQLSSDHIIPLMHLAKDLNSQERSIPPSENQNSQESNGEGNCLSSSASSALAISSLADAATDSSCTSGAEQNDGQSIRKKRRATGDGSSPELPSLERKNKRRKIKGKKERSQVDQLLNISLREEELSKSLQCMDNNLLQARAALQTAYVEVQRLLMLKQQITMEMSALRTHRIQILQGLQETYEPSEHPDQVPCSLTRERRNSRSQTSIDAALLPTPFFPLFLEPPSSHVSPSPTGASLQITTSPTFQTHGSVPAPDSSVQIKQEPMSPEQDENVNAVPPSSACNVSKELLEANREISDSCPVYPVITARLSLPESTESFHEPSQELKFSVEQRNTRNRENSPSSQSAGLSSINKEGEEPTKGNSGSEACTSSFLRLSFASETPLEKEPHSPADQPEQQAESTLTSAETRGSKKKKKLRKKKSLRAAHVPENSDTEQDVLTVKPVRKVKAGKLIKGGKVTTSTWEDSRTGREQESVRDEPDSDSSLEVLEIPNPQLEVVAIDSSESGEEKPDSPSKKDIWNSTEQNPLETSRSGCDEVSSTSEIGTRYKDGIPVSVAETQTVISSIKGSKNSSEISSEPGDDDEPTEGSFEGHQAAVNAIQIFGNLLYTCSADKTVRVYNLVSRKCIGVFEGHTSKVNCLLVTQTSGKNAALYTGSSDHTIRCYNVKSRECVEQLQLEDRVLCLHSRWRILYAGLANGTVVTFNIKNNKRLEIFECHGPRAVSCLATAQEGARKLLVVGSYDCTISVRDARNGLLLRTLEGHSKTILCMKVVNDLVFSGSSDQSVHAHNIHTGELVRIYKGHNHAVTVVNILGKVMVTACLDKFVRVYELQSHDRLQVYGGHKDMIMCMTIHKSMIYTGCYDGSIQAVRLNLMQNYRCWWHGCSLIFGVVDHLKQHLLTDHTNPNFQTLKCRWKNCDAFFTARKGSKQDAAGHIERHAEDDSKIDS

SEQ ID NO: 901420 - protein, 1883 aa, Homo sapiens; identical to SEQ ID NO: 901407

SEQ ID NO: 901421 - protein, 178 aa, Homo sapiens
MKVVNDLVFSGSSDQSVHAHNIHTGELVRIYKGHNHAVTVVNILGKVMVTACLDKFVRVYELQSHDRLQVYGGHKDMIMCMTIHKSMIYTGCYDGSIQAVRLNLMQNYRCWWHGCSLIFGVVDHLKQHLLTDHTNPNFQTLKCRWKNCDAFFTARKGSKQDAAGHIERHAEDDSKIDS

SEQ ID NO: 901422 - protein, 1883 aa, Homo sapiens; identical to SEQ ID NO: 901407

SEQ ID NO: 901423 - protein, 1883 aa, Homo sapiens; identical to SEQ ID NO: 901407

SEQ ID NO: 901424 - protein, 1406 aa, Homo sapiens
MPVGRIECPSSPSFPRDISHECRVCGVTEVGLSAYAKHISGQLHKDNVDAQEREDDGKGEEEEEDYFDKELIQLIKQRKEQSRQDEPSNSNQEINSDDRRPQWRREDRIPYQDRESYSQPAWHHRGPPQRDWKWEKDGFNNTRKNSFPHSLRNGGGPRGRSGWHKGVAGGSSTWFHNHSNSGGGWLSNSGAVDWNHNGTGRNSSWLSEGTGGFSSWHMNNSNGNWKSSVRSTNNWNYSGPGDKFQPGRNRNSNCQMEDMTMLWNKKSNKSNKYSHDRYNWQRQENDKLGTVATYRGPSEGFTSDKFPSEGLLDFNFEQLESQTTKQADTATSKVSGKNGSAAREKPRRWTPYPSQKTLDLQSGLKDITGNKSEMIEKPLFDFSLITTGIQEPQTDETRNSPTQKTQKEIHTGSLNHKASSDSAASFEVVRQCPTAEKPEQEHTPNKMPSLKSPLLPCPATKSLSQKQDPKNISKNTKTNFFSPGEHSNPSNKPTVEDNHGPYISKLRSSCPHVLKGNKSTFGSQKQSGDNLNDTLRKAKEVLQCHESLQNPLLSTSKSTRNYAKASRNVEESEKGSLKIEFQVHALEDESDGETSDTEKHGTKIGTLGSATTELLSGSTRTADEKEEDDRILKTSRELSTSPCNPIVRQKESELQMTSAASPHPGLLLDLKTSLEDAQVDDSIKSHVSYETEGFESASLDAELQKSDISQPSGPLLPELSKLGFPASLQRDLTRHISLKSKTGVHLPEPNLNSARRIRNISGHRKSETEKESGLKPTLRQILNASRRNVNWEQVIQQVTKKKQELGKGLPRFGIEMVPLVQNEQEALDLDGEPDLSSLEGFQWEGVSISSSPGLARKRSLSESSVIMDRAPSVYSFFSEEGTGKENEPQQMVSPSNSLRAGQSQKATMHLKQEVTPRAASLRTGERAENVATQRRHSAQLSSDHIIPLMHLAKDLNSQERSIPPSENQNSQESNGEGNCLSSSASSALAISSLADAATDSSCTSGAEQNDGQSIRKKRRATGDGSSPELPSLERKNKRRKIKGKKERSQVDQLLNISLREEELSKSLQCMDNNLLQARAALQTAYVEVQRLLMLKQQITMEMSALRTHRIQILQGLQETYEPSEHPDQVPCSLTRERRNSRSQTSIDAALLPTPFFPLFLEPPSSHVSPSPTGASLQITTSPTFQTHGSVPAPDSSVQIKQEPMSPEQDENVNAVPPSSACNVSKELLEANREISDSCPVYPVITARLSLPESTESFHEPSQELKFSVEQRNTRNRENSPSSQSAGLSSINKEGEEPTKGNSGSEACTSSFLRLSFASETPLEKEPHSPADQPEQQAESTLTSAETRGSKKKKKLRKKKSLRAAHVPENSDTEQDVLTVKPVRKVKAGKLIKGGKVTTSTWEECEL

SEQ ID NO: 901425 - protein, 1037 aa, Homo sapiens
MPVGRIECPSSPSFPRDISHECRVCGVTEVGLSAYAKHISGQLHKDNVDAQEREDDGKGEEEEEDYFDKELIQLIKQRKEQSRQDEPSNSNQEINSDDRRPQWRREDRIPYQDRESYSQPAWHHRGPPQRDWKWEKDGFNNTRKNSFPHSLRNGGGPRGRSGWHKGVAGGSSTWFHNHSNSGGGWLSNSGAVDWNHNGTGRNSSWLSEGTGGFSSWHMNNSNGNWKSSVRSTNNWNYSGPGDKFQPGRNRNSNCQMEDMTMLWNKKSNKSNKYSHDRYNWQRQENDKLGTVATYRGPSEGFTSDKFPSEGLLDFNFEQLESQTTKQADTATSKVSGKNGSAAREKPRRWTPYPSQKTLDLQSGLKDITGNKSEMIEKPLFDFSLITTGIQEPQTDETRNSPTQKTQKEIHTGSLNHKASSDSAASFEVVRQCPTAEKPEQEHTPNKMPSLKSPLLPCPATKSLSQKQDPKNISKNTKTNFFSPGEHSNPSNKPTVEDNHGPYISKLRSSCPHVLKGNKSTFGSQKQSGDNLNDTLRKAKEVLQCHESLQNPLLSTSKSTRNYAKASRNVEESEKGSLKIEFQVHALEDESDGETSDTEKHGTKIGTLGSATTELLSGSTRTADEKEEDDRILKTSRELSTSPCNPIVRQKESELQMTSAASPHPGLLLDLKTSLEDAQVDDSIKSHVSYETEGFESASLDAELQKSDISQPSGPLLPELSKLGFPASLQRDLTRHISLKSKTGVHLPEPNLNSARRIRNISGHRKSETEKESGLKPTLRQILNASRRNVNWEQVIQQVTKKKQELGKGLPRFGIEMVPLVQNEQEALDLDGEPDLSSLEGFQWEGVSISSSPGLARKRSLSESSVIMDRAPSVYSFFSEEGTGKENEPQQMVSPSNSLRAGQSQKATMHLKQEVTPRAASLRTGERAENVATQRRHSAQLSSDHIIPLMHLAKDLNSQERSIPPSENQNSQESNGEGNCLSSSASSALAISSLADAATDSSCTSGAEQNDGQSIRKKRRATGQNGRKYLQTAHVTRD

SEQ ID NO: 901426 - protein, 465 aa, Homo sapiens
  misc_feature (2)..(2): Xaa can be any naturally occurring amino acid
  misc_feature (26)..(26): Xaa can be any naturally occurring amino acid
  misc_feature (34)..(35): Xaa can be any naturally occurring amino acid
  misc_feature (39)..(40): Xaa can be any naturally occurring amino acid
  misc_feature (42)..(42): Xaa can be any naturally occurring amino acid
  misc_feature (46)..(47): Xaa can be any naturally occurring amino acid
EXGEDEWGNEFEGSTGRGRKRGVGCXGEKDGGEXXEEEXXEXERGXXGRDRGGEEGELAGTGGYGINILGMDPLSTPFDNEFYNGLCNRDRDGNTLTYYRRPWNVASLIYETKGEKNFRTEHYEEQIEAFKSIIQEKTSNFNAAISLKFTPTETNKAEQCCEETASSISLHGKGSFRFSYSKNETYQLFLSYSSKKEKMFLHVKGEIHLGRFVMRNRDVVLTTTFVDDIKALPTTYEKGEYFAFLETYGTHYSSSGSLGGLYELIYVLDKASMKRKGVELKDIKRCLGYHLDVSLAFSEISVGAEFNKDDCVKRGEGRAVNITSENLIDDVVSLIRGGTRKYAFELKEKLLRGTVIDVTDFVNWASSINDAPVLISQKLSPIYNLVPVKMKNAHLKKQNLERAIEDYINEFSVRKCHTCQNGGTVILMDGKCLCACPFKFEGIACEISKQKISEGLPALEFPNEK

SEQ ID NO: 901427 - protein, 465 aa, Homo sapiens; identical to SEQ ID NO: 901426
  misc_feature (2)..(2): Xaa can be any naturally occurring amino acid
  misc_feature (26)..(26): Xaa can be any naturally occurring amino acid
  misc_feature (34)..(35): Xaa can be any naturally occurring amino acid
  misc_feature (39)..(40): Xaa can be any naturally occurring amino acid
  misc_feature (42)..(42): Xaa can be any naturally occurring amino acid
  misc_feature (46)..(47): Xaa can be any naturally occurring amino acid

SEQ ID NO: 901428 - protein, 174 aa, Homo sapiens
DEDDCESEPRPPCRDRVVEESELARTAGYGINILGMDPLSTPFDNEFYNGLCNRDRDGNTLTYYRRPWNVASLIYETKGEKNFRTEHYEEQIEAFKSIIQEKTSNFNAAISLKFTPTETNKAEQCCEETASSISLHGKGSFRFSYSKNETYQLFLSYSSKKIAMLCSQQLLWMI

SEQ ID NO: 901429 - protein, 422 aa, Homo sapiens
  misc_feature (2)..(2): Xaa can be any naturally occurring amino acid
  misc_feature (26)..(26): Xaa can be any naturally occurring amino acid
  misc_feature (34)..(35): Xaa can be any naturally occurring amino acid
  misc_feature (39)..(40): Xaa can be any naturally occurring amino acid
  misc_feature (42)..(42): Xaa can be any naturally occurring amino acid
  misc_feature (46)..(47): Xaa can be any naturally occurring amino acid
EXGEDEWGNEFEGSTGRGRKRGVGCXGEKDGGEXXEEEXXEXERGXXGRDRGGEEGELAGTGGYGINILGMDPLSTPFDNEFYNGLCNRDRDGNTLTYYRRPWNVASLIYETKGEKNFRTEHYEEQIEAFKSIIQEKTSNFNAAISLKFTPTETNKAEQCCEETASSISLHGKGSFRFSYSKNETYQLFLSYSSKKEKMFLHVKGEIHLGRFVMRNRDVVLTTTFVDDIKALPTTYEKGEYFAFLETYGTHYSSSGSLGGLYELIYVLDKASMKRKVNITSENLIDDVVSLIRGGTRKYAFELKEKLLRGTVIDVTDFVNWASSINDAPVLISQKLSPIYNLVPVKMKNAHLKKQNLERAIEDYINEFSVRKCHTCQNGGTVILMDGKCLCACPFKFEGIACEISKQKISEGLPALEFPNEK

SEQ ID NO: 901430 - protein, 465 aa, Homo sapiens; identical to SEQ ID NO: 901426
  misc_feature (2)..(2): Xaa can be any naturally occurring amino acid
  misc_feature (26)..(26): Xaa can be any naturally occurring amino acid
  misc_feature (34)..(35): Xaa can be any naturally occurring amino acid
  misc_feature (39)..(40): Xaa can be any naturally occurring amino acid
  misc_feature (42)..(42): Xaa can be any naturally occurring amino acid
  misc_feature (46)..(47): Xaa can be any naturally occurring amino acid

SEQ ID NO: 901431 - protein, 465 aa, Homo sapiens; identical to SEQ ID NO: 901426
  misc_feature (2)..(2): Xaa can be any naturally occurring amino acid
  misc_feature (26)..(26): Xaa can be any naturally occurring amino acid
  misc_feature (34)..(35): Xaa can be any naturally occurring amino acid
  misc_feature (39)..(40): Xaa can be any naturally occurring amino acid
  misc_feature (42)..(42): Xaa can be any naturally occurring amino acid
  misc_feature (46)..(47): Xaa can be any naturally occurring amino acid

SEQ ID NO: 901432 - protein, 430 aa, Homo sapiens
DEDDCESEPRPPCRDRVVEESELARTAGYGINILGMDPLSTPFDNEFYNGLCNRDRDGNTLTYYRRPWNVASLIYETKGEKNFRTEHYEEQIEAFKSIIQEKTSNFNAAISLKFTPTETNKAEQCCEETASSISLHGKGSFRFSYSKNETYQLFLSYSSKKEKMFLHVKGEIHLGRFVMRNRDVVLTTTFVDDIKALPTTYEKGEYFAFLETYGTHYSSSGSLGGLYELIYVLDKASMKRKGVELKDIKRCLGYHLDVSLAFSEISVGAEFNKDDCVKRGEGRAVNITSENLIDDVVSLIRGGTRKYAFELKEKLLRGTVIDVTDFVNWASSINDAPVLISQKLSPIYNLVPVKMKNAHLKKQNLERAIEDYINEFSVRKCHTCQNGGTVILMDGKCLCACPFKFEGIACEISKQKISEGLPALEFPNEK

SEQ ID NO: 901433 - protein, 465 aa, Homo sapiens; identical to SEQ ID NO: 901426
  misc_feature (2)..(2): Xaa can be any naturally occurring amino acid
  misc_feature (26)..(26): Xaa can be any naturally occurring amino acid
  misc_feature (34)..(35): Xaa can be any naturally occurring amino acid
  misc_feature (39)..(40): Xaa can be any naturally occurring amino acid
  misc_feature (42)..(42): Xaa can be any naturally occurring amino acid
  misc_feature (46)..(47): Xaa can be any naturally occurring amino acid

SEQ ID NO: 901434 - protein, 465 aa, Homo sapiens; identical to SEQ ID NO: 901426
  misc_feature (2)..(2): Xaa can be any naturally occurring amino acid
  misc_feature (26)..(26): Xaa can be any naturally occurring amino acid
  misc_feature (34)..(35): Xaa can be any naturally occurring amino acid
  misc_feature (39)..(40): Xaa can be any naturally occurring amino acid
  misc_feature (42)..(42): Xaa can be any naturally occurring amino acid
  misc_feature (46)..(47): Xaa can be any naturally occurring amino acid

SEQ ID NO: 901435 - protein, 433 aa, Homo sapiens
  misc_feature (2)..(2): Xaa can be any naturally occurring amino acid
  misc_feature (26)..(26): Xaa can be any naturally occurring amino acid
  misc_feature (34)..(35): Xaa can be any naturally occurring amino acid
  misc_feature (39)..(40): Xaa can be any naturally occurring amino acid
  misc_feature (42)..(42): Xaa can be any naturally occurring amino acid
  misc_feature (46)..(47): Xaa can be any naturally occurring amino acid
EXGEDEWGNEFEGSTGRGRKRGVGCXGEKDGGEXXEEEXXEXERGXXGRDRGGEEGELAGTGGYGINILGMDPLSTPFDNEFYNGLCNRDRDGNTLTYYRRPWNVASLIYETKGEKNFRTEHYEEQIEAFKSIIQEKTSNFNAAISLKFTPTETNKAEQCCEETASSISLHGKGSFRFSYSKNETYQLFLSYSSKKEKMFLHVKGEIHLGRFVMRNRDVVLTTTFVDDIKALPTTYEKGEYFAFLETYGTHYSSSGSLGGLYELIYVLDKASMKRKGVELKDIKRCLGYHLDVSLAFSEISVGAEFNKDDCVKRGEGRAVNITSENLIDDVVSLIRGGTRKYAFELKEKLLRGTVIDVTDFVNWASSINDAPVLISQKLSPIYNLVPVKMKNAHLKKQNLERAIEDYINEFSVRKCHTCQNGGLPALEFPNEK

SEQ ID NO: 901436 - protein, 267 aa, Homo sapiens
  misc_feature (2)..(2): Xaa can be any naturally occurring amino acid
  misc_feature (26)..(26): Xaa can be any naturally occurring amino acid
  misc_feature (34)..(35): Xaa can be any naturally occurring amino acid
  misc_feature (39)..(40): Xaa can be any naturally occurring amino acid
  misc_feature (42)..(42): Xaa can be any naturally occurring amino acid
  misc_feature (46)..(47): Xaa can be any naturally occurring amino acid
EXGEDEWGNEFEGSTGRGRKRGVGCXGEKDGGEXXEEEXXEXERGXXGRDRGGEEGELAGTGGYGINILGMDPLSTPFDNEFYNGLCNRDRDGNTLTYYRRPWNVASLIYETKGEKNFRTEHYEEQIEAFKSIIQEKTSNFNAAISLKFTPTETNKAEQCCEETASSISLHGKGSFRFSYSKNETYQLFLSYSSKKEKMFLHVKGEIHLGRFVMRNRDVVLTTTFVDDIKALPTTYAGSLGGLYELIYVLDKASMKRKGMPRNRALT

SEQ ID NO: 901437 - protein, 1312 aa, Homo sapiens
MKALDEPPYLTVGTDVSAKYRGAFCEAKIKTAKRLVKVKVTFRHDSSTVEVQDDHIKGPLKVGAIVEVKNLDGAYQEAVINKLTDASWYTVVFDDGDEKTLRRSSLCLKGERHFAESETLDQLPLTNPEHFGTPVIGKKTNRGRRSNHIPEEESSSSSSDEDEDDRKQIDELLGKVVCVDYISLDKKKALWFPALVVCPDCSDEIAVKKDNILVRSFKDGKFTSVPRKDVHEITSDTAPKPDAVLKQAFEQALEFHKSRTIPANWKTELKEDSSSSEAEEEEEEEDDEKEKEDNSSEEEEEIEPFPEERENFLQQLYKFMEDRGTPINKRPVLGYRNLNLFKLFRLVHKLGGFDNIESGAVWKQVYQDLGIPVLNSAAGYNVKCAYKKYLYGFEEYCRSANIEFQMALPEKVVNKQCKECENVKEIKVKEENETEIKEIKMEEERNIIPREEKPIEDEIERKENIKPSLGSKKNLLESIPTHSDQEKEVNIKKPEDNENLDDKDDDTTRVDESLNIKVEAEEEKAKSGDETNKEEDEDDEEAEEEEEEEEEEEDEDDDDNNEEEEFECYPPGMKVQVRYGRGKNQKMYEASIKDSDVEGGEVLYLVHYCGWNVRYDEWIKADKIVRPADKNVPKIKHRKKIKNKLDKEKDKDEKYSPKNCKLRRLSKPPFQTNPSPEMVSKLDLTDAKNSDTAHIKSIEITSILNGLQASESSAEDSEQEDERGAQDMDNNGKEESKIDHLTNNRNDLISKEEQNSSSLLEENKVHADLVISKPVSKSPERLRKDIEVLSEDTDYEEDEVTKKRKDVKKDTTDKSSKPQIKRGKRRYCNTEECLKTGSPGKKEEKAKNKESLCMENSSNSSSDEDEEETKAKMTPTKKYNGLEEKRKSLRTTGFYSGFSEVAEKRIKLLNNSDERLQNSRAKDRKDVWSSIQGQWPKKTLKELFSDSDTEAAASPPHPAPEEGVAEESLQTVAEEESCSPSVELEKPPPVNVDSKPIEEKTVEVNDRKAEFPSSGSNSVLNTPPTTPESPSSVTVTEGSRQQSSVTVSEPLAPNQEEVRSIKSETDSTIEVDSVAGELQDLQSEGNSSPAGFDASVSSSSSNQPEPEHPEKACTGQKRVKDAQGGGSSSKKQKRSHKATVVNNKKKGKGTNSSDSEELSAGESITKSQPVKSVSTGMKSHSTKSPARTQSPGKCGKNGDKDPDLKEPSNRLPKVYKWSFQMSDLENMTSAERITILQEKLQEIRKHYLSLKSEVASIDRRRKRLKKKERESAATSSSSSSPSSSSITAAVMLTLAEPSMSSASQNGMSVECR

SEQ ID NO: 901438 - protein, 125 aa, Homo sapiens
MKALDEPPYLTVGTDVSAKYRGAFCEAKIKTAKRLVKVKVTFRHDSSTVEVQDDHIKGPLKVGAIVEVKNLDGAYQEAVINKLTDASWYTVVFDDGDEKTLRRSSLCLKGERHFAESEVSHHLTN

SEQ ID NO: 901439 - protein, 1344 aa, Homo sapiens
MKAGVQWCNLSLLQSPSPEFKQFCLSLLSSCDYKALDEPPYLTVGTDVSAKYRGAFCEAKIKTAKRLVKVKVTFRHDSSTVEVQDDHIKGPLKVGAIVEVKNLDGAYQEAVINKLTDASWYTVVFDDGDEKTLRRSSLCLKGERHFAESETLDQLPLTNPEHFGTPVIGKKTNRGRRSNHIPEEESSSSSSDEDEDDRKQIDELLGKVVCVDYISLDKKKALWFPALVVCPDCSDEIAVKKDNILVRSFKDGKFTSVPRKDVHEITSDTAPKPDAVLKQAFEQALEFHKSRTIPANWKTELKEDSSSSEAEEEEEEEDDEKEKEDNSSEEEEEIEPFPEERENFLQQLYKFMEDRGTPINKRPVLGYRNLNLFKLFRLVHKLGGFDNIESGAVWKQVYQDLGIPVLNSAAGYNVKCAYKKYLYGFEEYCRSANIEFQMALPEKVVNKQCKECENVKEIKVKEENETEIKEIKMEEERNIIPREEKPIEDEIERKENIKPSLGSKKNLLESIPTHSDQEKEVNIKKPEDNENLDDKDDDTTRVDESLNIKVEAEEEKAKSGDETNKEEDEDDEEAEEEEEEEEEEEDEDDDDNNEEEEFECYPPGMKVQVRYGRGKNQKMYEASIKDSDVEGGEVLYLVHYCGWNVRYDEWIKADKIVRPADKNVPKIKHRKKIKNKLDKEKDKDEKYSPKNCKLRRLSKPPFQTNPSPEMVSKLDLTDAKNSDTAHIKSIEITSILNGLQASESSAEDSEQEDERGAQDMDNNGKEESKIDHLTNNRNDLISKEEQNSSSLLEENKVHADLVISKPVSKSPERLRKDIEVLSEDTDYEEDEVTKKRKDVKKDTTDKSSKPQIKRGKRRYCNTEECLKTGSPGKKEEKAKNKESLCMENSSNSSSDEDEEETKAKMTPTKKYNGLEEKRKSLRTTGFYSGFSEVAEKRIKLLNNSDERLQNSRAKDRKDVWSSIQGQWPKKTLKELFSDSDTEAAASPPHPAPEEGVAEESLQTVAEEESCSPSVELEKPPPVNVDSKPIEEKTVEVNDRKAEFPSSGSNSVLNTPPTTPESPSSVTVTEGSRQQSSVTVSEPLAPNQEEVRSIKSETDSTIEVDSVAGELQDLQSEGNSSPAGFDASVSSSSSNQPEPEHPEKACTGQKRVKDAQGGGSSSKKQKRSHKATVVNNKKKGKGTNSSDSEELSAGESITKSQPVKSVSTGMKSHSTKSPARTQSPGKCGKNGDKDPDLKEPSNRLPKVYKWSFQMSDLENMTSAERITILQEKLQEIRKHYLSLKSEVASIDRRRKRLKKKERESAATSSSSSSPSSSSITAAVMLTLAEPSMSSASQNGMSVECR

SEQ ID NO: 901440 - protein, 1119 aa, Homo sapiens
RCLPVSRVRSEELGRRSGGRLLSFILPPPRPPPGPLPGGSCRGSIAAVLWRAARLGARTSSPGGIFRRPPPPNQGARAAAKQRYQSPPREEEDDEKEKEDNSSEEEEEIEPFPEERENFLQQLYKFMEDRGTPINKRPVLGYRNLNLFKLFRLVHKLGGFDNIESGAVWKQVYQDLGIPVLNSAAGYNVKCAYKKYLYGFEEYCRSANIEFQMALPEKVVNKQCKECENVKEIKVKEENETEIKEIKMEEERNIIPREEKPIEDEIERKENIKPSLGSKKNLLESIPTHSDQEKEVNIKKPEDNENLDDKDDDTTRVDESLNIKVEAEEEKAKSGDETNKEEDEDDEEAEEEEEEEEEEEDEDDDDNNEEEEFECYPPGMKVQVRYGRGKNQKMYEASIKDSDVEGGEVLYLVHYCGWNVRYDEWIKADKIVRPADKNVPKIKHRKKIKNKLDKEKDKDEKYSPKNCKLRRLSKPPFQTNPSPEMVSKLDLTDAKNSDTAHIKSIEITSILNGLQASESSAEDSEQEDERGAQDMDNNGKEESKIDHLTNNRNDLISKEEQNSSSLLEENKVHADLVISKPVSKSPERLRKDIEVLSEDTDYEEDEVTKKRKDVKKDTTDKSSKPQIKRGKRRYCNTEECLKTGSPGKKEEKAKNKESLCMENSSNSSSDEDEEETKAKMTPTKKYNGLEEKRKSLRTTGFYSGFSEVAEKRIKLLNNSDERLQNSRAKDRKDVWSSIQGQWPKKTLKELFSDSDTEAAASPPHPAPEEGVAEESLQTVAEEESCSPSVELEKPPPVNVDSKPIEEKTVEVNDRKAEFPSSGSNSVLNTPPTTPESPSSVTVTEGSRQQSSVTVSEPLAPNQEEVRSIKSETDSTIEVDSVAGELQDLQSEGNSSPAGFDASVSSSSSNQPEPEHPEKACTGQKRVKDAQGGGSSSKKQKRSHKATVVNNKKKGKGTNSSDSEELSAGESITKSQPVKSVSTGMKSHSTKSPARTQSPGKCGKNGDKDPDLKEPSNRLPKVYKWSFQMSDLENMTSAERITILQEKLQEIRKHYLSLKSEVASIDRRRKRLKKKERESAATSSSSSSPSSSSITAAVMLTLAEPSMSSASQNGMSVECR

SEQ ID NO: 901441 - protein, 1814 aa, Homo sapiens
MKALDEPPYLTVGTDVSAKYRGAFCEAKIKTAKRLVKVKVTFRHDSSTVEVQDDHIKGPLKVGAIVEVKNLDGAYQEAVINKLTDASWYTVVFDDGDEKTLRRSSLCLKGERHFAESETLDQLPLTNPEHFGTPVIGKKTNRGRRSNHIPEEESSSSSSDEDEDDRKQIDELLGKVVCVDYISLDKKKALWFPALVVCPDCSDEIAVKKDNILVRSFKDGKFTSVPRKDVHEITSDTAPKPDAVLKQAFEQALEFHKSRTIPANWKTELKEDSSSSEAEEEEEEEDDEKEKEDNSSEEEEEIEPFPEERENFLQQLYKFMEDRGTPINKRPVLGYRNLNLFKLFRLVHKLGGFDNIESGAVWKQVYQDLGIPVLNSAAGYNVKCAYKKYLYGFEEYCRSANIEFQMALPEKVVNKQCKECENVKEIKVKEENETEIKEIKMEEERNIIPREEKPIEDEIERKENIKPSLGSKKNLLESIPTHSDQEKEVNIKKPEDNENLDDKDDDTTRVDESLNIKVEAEEEKAKSGDETNKEEDEDDEEAEEEEEEEEEEEDEDDDDNNEEEEFECYPPGMKVQVRYGRGKNQKMYEASIKDSDVEGGEVLYLVHYCGWNVRYDEWIKADKIVRPADKNVPKIKHRKKIKNKLDKEKDKDEKYSPKNCKLRRLSKPPFQTNPSPEMVSKLDLTDAKNSDTAHIKSIEITSILNGLQASESSAEDSEQEDERGAQDMDNNGKEESKIDHLTNNRNDLISKEEQNSSSLLEENKVHADLVISKPVSKSPERLRKDIEVLSEDTDYEEDEVTKKRKDVKKDTTDKSSKPQIKRGKRRYCNTEECLKTGSPGKKEEKAKNKESLCMENSSNSSSDEDEEETKAKMTPTKKYNGLEEKRKSLRTTGFYSGFSEVAEKRIKLLNNSDERLQNSRAKDRKDVWSSIQGQWPKKTLKELFSDSDTEAAASPPHPAPEEGVAEESLQTVAEEESCSPSVELEKPPPVNVDSKPIEEKTVEVNDRKAEFPSSGSNSVLNTPPTTPESPSSVTVTEGSRQQSSVTVSEPLAPNQEEVRSIKSETDSTIEVDSVAGELQDLQSEGNSSPAGFDASVSSSSSNQPEPEHPEKACTGQKRVKDAQGGGSSSKKQKRSHKATVVNNKKKGKGTNSSDSEELSAGESITKSQPVKSVSTGMKSHSTKSPARTQSPGKCGKNGDKDPDLKEPSNRLPKVYKWSFQMSDLENMTSAERITILQEKLQEIRKHYLSLKSEVASIDRRRKRLKKKERESAATSSSSSSPSSSSITAAVMLTLAEPSMSSASQNGMLQPLPEDVLHSQNEAFLKRRGPPTDGDKPAPSPSASLRRRPAADCRRGGGVARERKCPETRKCELARSCSLGVFGVRMALEGMSKRKRKRSVQEGENPDDGVRGSPPEDYRLGQVASSLFRGEHHSRGGTGRLASLFSSLEPQIQPVYVPVPKQTIKKTKRNEEEESTSQIERPLSQEPAKKVKAKKKHTNAEKKLADRESALASADLEEEIHQKQGQKRKNSQPGVKVADRKILDDTEDTVVSQRKKIQINQEEERLKNERTVFVGNLPVTCNKKKLKSFFKEYGQIESVRFRSLIPAEGTLSKKLAAIKRKIHPDQKNINAYVVFKEESAATQALKRNGAQIADGFRIRVDLASETSSRDKRSVFVGNLPYKVEESAIEKHFLDCGSIMAVRIVRDKMTGIGKGFGYVLFENTDSVHLALKLNNSELMGRKLRVMRSVNKEKFKQQNSNPRLKNVSKPKQGLNFTSKTAEGHPKSLFIGEKAVLLKTKKKGQKKSGRPKKQRKQK

SEQ ID NO: 901442 - protein, 1814 aa, Homo sapiens; identical to SEQ ID NO: 901441

SEQ ID NO: 901443 - protein, 1609 aa, Homo sapiens
MKALDEPPYLTVGTDVSAKYRGAFCEAKIKTAKRLVKVKVTFRHDSSTVEVQDDHIKGPLKVGAIVEVKNLDGAYQEAVINKLTDASWYTVVFDDGDEKTLRRSSLCLKGERHFAESETLDQLPLTNPEHFGTPVIGKKTNRGRRSNHIPEEESSSSSSDEDEDDRKQIDELLGKVVCVDYISLDKKKALWFPALVVCPDCSDEIAVKKDNILVRSFKDGKFTSVPRKDVHEITSDTAPKPDAVLKQAFEQALEFHKSRTIPANWKTELKEDSSSSEAEEEEEEEDDEKEKEDNSSEEEEEIEPFPEERENFLQQLYKFMEDRGTPINKRPVLGYRNLNLFKLFRLVHKLGGFDNIESGAVWKQVYQDLGIPVLNSAAGYNVKCAYKKYLYGFEEYCRSANIEFQMALPEKVVNKQCKECENVKEIKVKEENETEIKEIKMEEERNIIPREEKPIEDEIERKENIKPSLGSKKNLLESIPTHSDQEKEVNIKKPEDNENLDDKDDDTTRVDESLNIKVEAEEEKAKSGDETNKEEDEDDEEAEEEEEEEEEEEDEDDDDNNEEEEFECYPPGMKVQVRYGRGKNQKMYEASIKDSDVEGGEVLYLVHYCGWNVRYDEWIKADKIVRPADKNVPKIKHRKKIKNKLDKEKDKDEKYSPKNCKLRRLSKPPFQTNPSPEMVSKLDLTDAKNSDTAHIKSIEITSILNGLQASESSAEDSEQEDERGAQDMDNNGKEESKIDHLTNNRNDLISKEEQNSSSLLEENKVHADLVISKPVSKSPERLRKDIEVLSEDTDYEEDEVTKKRKDVKKDTTDKSSKPQIKRGKRRYCNTEECLKTGSPGKKEEKAKNKESLCMENSSNSSSDEDEEETKAKMTPTKKYNGLEEKRKSLRTTGFYSGFSEVAEKRIKLLNNSDERLQNSRAKDRKDVWSSIQGQWPKKTLKELFSDSDTEAAASPPHPAPEEGVAEESLQTVAEEESCSPSVELEKPPPVNVDSKPIEEKTVEVNDRKAEFPSSGSNSVLNTPPTTPESPSSVTVTEGSRQQSSVTVSEPLAPNQEEVRSIKSETDSTIEVDSVAGELQDLQSEGNSSPAGFDASVSSSSSNQPEPEHPEKACTGQKRVKDAQGGGSSSKKQKRSHKATVVNNKKKGKGTNSSDSEELSAGESITKSQPVKSVSTGMKSHSTKSPARTQSPGKCGKNGDKDPDLKEPSNRLPKVYKWSFQMSDLENMTSAERITILQEKLQEIRKHYLSLKSEVASIDRRRKRLKKKERESAATSSSSSSPSSSSITAAVMLTLAEPSMSSASQNGMLQPLPEDVLHSQNEAFLKRRGPPTDGDKPAPSPSASLRRRPAADCRRGGGVARERKCPETRKCELARSCSLGVFGVRMALEGMSKRKRKRSVQEGENPDDGVRGSPPEDYRLGQVASSLFRGEHHSRGGTGRLASLFSSLEPQIQPVYVPVPKQTIKKTKRNEEEESTSQIERPLSQEPAKKVKAKKKHTNAEKKLADRESALASADLEEEIHQKQGQKRKNSQPGVKVADRKILDDTEDTVVSQRKKIQINQEEERLKNERTVFVGNLPVTCNKKKLKSFFKEYGQIESVRFRSLVCFIPP

SEQ ID NO: 901444 - protein, 1644 aa, Homo sapiens
MKALDEPPYLTVGTDVSAKYRGAFCEAKIKTAKRLVKVKVTFRHDSSTVEVQDDHIKGPLKVGAIVEVKNLDGAYQEAVINKLTDASWYTVVFDDGDEKTLRRSSLCLKGERHFAESETLDQLPLTNPEHFGTPVIGKKTNRGRRSNHIPEEESSSSSSDEDEDDRKQIDELLGKVVCVDYISLDKKKALWFPALVVCPDCSDEIAVKKDNILVRSFKDGKFTSVPRKDVHEITSDTAPKPDAVLKQAFEQALEFHKSRTIPANWKTELKEDSSSSEAEEEEEEEDDEKEKEDNSSEEEEEIEPFPEERENFLQQLYKFMEDRGTPINKRPVLGYRNLNLFKLFRLVHKLGGFDNIESGAVWKQVYQDLGIPVLNSAAGYNVKCAYKKYLYGFEEYCRSANIEFQMALPEKVVNKQCKECENVKEIKVKEENETEIKEIKMEEERNIIPREEKPIEDEIERKENIKPSLGSKKNLLESIPTHSDQEKEVNIKKPEDNENLDDKDDDTTRVDESLNIKVEAEEEKAKSGDETNKEEDEDDEEAEEEEEEEEEEEDEDDDDNNEEEEFECYPPGMKVQVRYGRGKNQKMYEASIKDSDVEGGEVLYLVHYCGWNVRYDEWIKADKIVRPADKNVPKIKHRKKIKNKLDKEKDKDEKYSPKNCKLRRLSKPPFQTNPSPEMVSKLDLTDAKNSDTAHIKSIEITSILNGLQASESSAEDSEQEDERGAQDMDNNGKEESKIDHLTNNRNDLISKEEQNSSSLLEENKVHADLVISKPVSKSPERLRKDIEVLSEDTDYEEDEVTKKRKDVKKDTTDKSSKPQIKRGKRRYCNTEECLKTGSPGKKEEKAKNKESLCMENSSNSSSDEDEEETKAKMTPTKKYNGLEEKRKSLRTTGFYSGFSEVAEKRIKLLNNSDERLQNSRAKDRKDVWSSIQGQWPKKTLKELFSDSDTEAAASPPHPAPEEGVAEESLQTVAEEESCSPSVELEKPPPVNVDSKPIEEKTVEVNDRKAEFPSSGSNSVLNTPPTTPESPSSVTVTEGSRQQSSVTVSEPLAPNQEEVRSIKSETDSTIEVDSVAGELQDLQSEGNSSPAGFDASVSSSSSNQPEPEHPEKACTGQKRVKDAQGGGSSSKKQKRSHKATVVNNKKKGKGTNSSDSEELSAGESITKSQPVKSVSTGMKSHSTKSPARTQSPGKCGKNGDKDPDLKEPSNRLPKVYKWSFQMSDLENMTSAERITILQEKLQEIRKHYLSLKSEVASIDRRRKRLKKKERESAATSSSSSSPSSSSITAAVMLTLAEPSMSSASQNGMLQPLPEDVLHSQNEAFLKRRGPPTDGDKPAPSPSASLRRRPAADCRRGGGVARERKCPETRKCELARSCSLGVFGVRMALEGMSKRKRKRSVQEGENPDDGVRGSPPEDYRLGQVASSLFRGEHHSRGGTGRLASLFSSLEPQIQPVYVPVPKQTIKKTKRNEEEESTSQIERPLSQEPAKKVKAKKKHTNAEKKLADRESALASADLEEEIHQKQGQKRKNSQPGVKVADRKILDDTEDTVVSQRKKIQINQEEERLKNERTVFVGNLPVTCNKKKLKSFFKEYGQIESVRFRSLIPAEGTLSKKLAAIKLECNGVISAHRNLRLPGSSDSPASAY

SEQ ID NO: 901445 - protein, 1625 aa, Homo sapiens
MKALDEPPYLTVGTDVSAKYRGAFCEAKIKTAKRLVKVKVTFRHDSSTVEVQDDHIKGPLKVGAIVEVKNLDGAYQEAVINKLTDASWYTVVFDDGDEKTLRRSSLCLKGERHFAESETLDQLPLTNPEHFGTPVIGKKTNRGRRSNHIPEEESSSSSSDEDEDDRKQIDELLGKVVCVDYISLDKKKALWFPALVVCPDCSDEIAVKKDNILVRSFKDGKFTSVPRKDVHEITSDTAPKPDAVLKQAFEQALEFHKSRTIPANWKTELKEDSSSSEAEEEEEEEDDEKEKEDNSSEEEEEIEPFPEERENFLQQLYKFMEDRGTPINKRPVLGYRNLNLFKLFRLVHKLGGFDNIESGAVWKQVYQDLGIPVLNSAAGYNVKCAYKKYLYGFEEYCRSANIEFQMALPEKVVNKQCKECENVKEIKVKEENETEIKEIKMEEERNIIPREEKPIEDEIERKENIKPSLGSKKNLLESIPTHSDQEKEVNIKKPEDNENLDDKDDDTTRVDESLNIKVEAEEEKAKSGDETNKEEDEDDEEAEEEEEEEEEEEDEDDDDNNEEEEFECYPPGMKVQVRYGRGKNQKMYEASIKDSDVEGGEVLYLVHYCGWNVRYDEWIKADKIVRPADKNVPKIKHRKKIKNKLDKEKDKDEKYSPKNCKLRRLSKPPFQTNPSPEMVSKLDLTDAKNSDTAHIKSIEITSILNGLQASESSAEDSEQEDERGAQDMDNNGKEESKIDHLTNNRNDLISKEEQNSSSLLEENKVHADLVISKPVSKSPERLRKDIEVLSEDTDYEEDEVTKKRKDVKKDTTDKSSKPQIKRGKRRYCNTEECLKTGSPGKKEEKAKNKESLCMENSSNSSSDEDEEETKAKMTPTKKYNGLEEKRKSLRTTGFYSGFSEVAEKRIKLLNNSDERLQNSRAKDRKDVWSSIQGQWPKKTLKELFSDSDTEAAASPPHPAPEEGVAEESLQTVAEEESCSPSVELEKPPPVNVDSKPIEEKTVEVNDRKAEFPSSGSNSVLNTPPTTPESPSSVTVTEGSRQQSSVTVSEPLAPNQEEVRSIKSETDSTIEVDSVAGELQDLQSEGNSSPAGFDASVSSSSSNQPEPEHPEKACTGQKRVKDAQGGGSSSKKQKRSHKATVVNNKKKGKGTNSSDSEELSAGESITKSQPVKSVSTGMKSHSTKSPARTQSPGKCGKNGDKDPDLKEPSNRLPKVYKWSFQMSDLENMTSAERITILQEKLQEIRKHYLSLKSEVASIDRRRKRLKKKERESAATSSSSSSPSSSSITAAVMLTLAEPSMSSASQNGMLQPLPEDVLHSQNEAFLKRRGPPTDGDKPAPSPSASLRRRPAADCRRGGGVARERKCPETRKCELARSCSLGVFGVRMALEGMSKRKRKRSVQEGENPDDGVRGSPPEDYRLGQVASSLFRGEHHSRGGTGRLASLFSSLEPQIQPVYVPVPKQTIKKTKRNEEEESTSQIERPLSQEPAKKVKAKKKHTNAEKKLADRESALASADLEEEIHQKQGQKRKNSQPGVKVADRKILDDTEDTVVSQRKKIQINQEEERLKNERTVFVGNLPVTCNKKKLKSFFKEYGQIESVRFRSLIPAEGNAIQKLGDKVKSSDRNF

SEQ ID NO: 901446 - protein, 1485 aa, Homo sapiens
MKALDEPPYLTVGTDVSAKYRGAFCEAKIKTAKRLVKVKVTFRHDSSTVEVQDDHIKGPLKVGAIVEVKNLDGAYQEAVINKLTDASWYTVVFDDGDEKTLRRSSLCLKGERHFAESETLDQLPLTNPEHFGTPVIGKKTNRGRRSNHIPEEESSSSSSDEDEDDRKQIDELLGKVVCVDYISLDKKKALWFPALVVCPDCSDEIAVKKDNILVRSFKDGKFTSVPRKDVHEITSDTAPKPDAVLKQAFEQALEFHKSRTIPANWKTELKEDSSSSEAEEEEEEEDDEKEKEDNSSEEEEEIEPFPEERENFLQQLYKFMEDRGTPINKRPVLGYRNLNLFKLFRLVHKLGGFDNIESGAVWKQVYQDLGIPVLNSAAGYNVKCAYKKYLYGFEEYCRSANIEFQMALPEKVVNKQCKECENVKEIKVKEENETEIKEIKMEEERNIIPREEKPIEDEIERKENIKPSLGSKKNLLESIPTHSDQEKEVNIKKPEDNENLDDKDDDTTRVDESLNIKVEAEEEKAKSGDETNKEEDEDDEEAEEEEEEEEEEEDEDDDDNNEEEEFECYPPGMKVQVRYGRGKNQKMYEASIKDSDVEGGEVLYLVHYCGWNVRYDEWIKADKIVRPADKNVPKIKHRKKIKNKLDKEKDKDEKYSPKNCKLRRLSKPPFQTNPSPEMVSKLDLTDAKNSDTAHIKSIEITSILNGLQASESSAEDSEQEDERGAQDMDNNGKEESKIDHLTNNRNDLISKEEQNSSSLLEENKVHADLVISKPVSKSPERLRKDIEVLSEDTDYEEDEVTKKRKDVKKDTTDKSSKPQIKRGKRRYCNTEECLKTGSPGKKEEKAKNKESLCMENSSNSSSDEDEEETKAKMTPTKKYNGLEEKRKSLRTTGFYSGFSEVAEKRIKLLNNSDERLQNSRAKDRKDVWSSIQGQWPKKTLKELFSDSDTEAAASPPHPAPEEGVAEESLQTVAEEESCSPSVELEKPPPVNVDSKPIEEKTVEVNDRKAEFPSSGSNSVLNTPPTTPESPSSVTVTEGSRQQSSVTVSEPLAPNQEEVRSIKSETDSTIEVDSVAGELQDLQSEGNSSPAGFDASVSSSSSNQPEPEHPEKACTGQKRVKDAQGGGSSSKKQKRSHKATVVNNKKKGKGTNSSDSEELSAGESITKSQPVKSVSTGMKSHSTKSPARTQSPGKCGKNGDKDPDLKEPSNRLPKVYKWSFQMSDLENMTSAERITILQEKLQEIRKHYLSLKSEVASIDRRRKRLKKKERESAATSSSSSSPSSSSITAAVMLTLAEPSMSSASQNGMLQPLPEDVLHSQNEAFLKRRGPPTDGDKPAPSPSASLRRRPAADCRRGGGVARERKCPETRKCELARSCSLGVFGVRMALEGMSKRKRKRSVQEGENPDDGVRGSPPEDYRLGQVASSLFRGEHHSRGGTGRLASLFSSLEPQIQPVYVPVPKVSHWAFFPNSSLEPLTYKAIFLPTA

SEQ ID NO: 901447 - protein, 1843 aa, Homo sapiens
MKALDEPPYLTVGTDVSAKYRGAFCEAKIKTAKRLVKVKVTFRHDSSTVEVQDDHIKGPLKVGAIVEVKNLDGAYQEAVINKLTDASWYTVVFDDGDEKTLRRSSLCLKGERHFAESETLDQLPLTNPEHFGTPVIGKKTNRGRRSNHIPEEESSSSSSDEDEDDRKQIDELLGKVVCVDYISLDKKKALWFPALVVCPDCSDEIAVKKDNILVRSFKDGKFTSVPRKDVHEITSDTAPKPDAVLKQAFEQALEFHKSRTIPANWKTELKEDSSSSEAEEEEEEEDDEKEKEDNSSEEEEEIEPFPEERENFLQQLYKFMEDRGTPINKRPVLGYRNLNLFKLFRLVHKLGGFDNIESGAVWKQVYQDLGIPVLNSAAGYNVKCAYKKYLYGFEEYCRSANIEFQMALPEKVVNKQCKECENVKEIKVKEENETEIKEIKMEEERNIIPREEKPIEDEIERKENIKPSLGSKKNLLESIPTHSDQEKEVNIKKPEDNENLDDKDDDTTRVDESLNIKVEAEEEKAKSGDETNKEEDEDDEEAEEEEEEEEEEEDEDDDDNNEEEEFECYPPGMKVQVRYGRGKNQKMYEASIKDSDVEGGEVLYLVHYCGWNVRYDEWIKADKIVRPADKNVPKIKHRKKIKNKLDKEKDKDEKYSPKNCKLRRLSKPPFQTNPSPEMVSKLDLTDAKNSDTAHIKSIEITSILNGLQASESSAEDSEQEDERGAQDMDNNGKEESKIDHLTNNRNDLISKEEQNSSSLLEENKVHADLVISKPVSKSPERLRKDIEVLSEDTDYEEDEVTKKRKDVKKDTTDKSSKPQIKRGKRRYCNTEECLKTGSPGKKEEKAKNKESLCMENSSNSSSDEDEEETKAKMTPTKKYNGLEEKRKSLRTTGFYSGFSEVAEKRIKLLNNSDERLQNSRAKDRKDVWSSIQGQWPKKTLKELFSDSDTEAAASPPHPAPEEGVAEESLQTVAEEESCSPSVELEKPPPVNVDSKPIEEKTVEVNDRKAEFPSSGSNSVLNTPPTTPESPSSVTVTEGSRQQSSVTVSEPLAPNQEEVRSIKSETDSTIEVDSVAGELQDLQSEGNSSPAGFDASVSSSSSNQPEPEHPEKACTGQKRVKDAQGGGSSSKKQKRSHKATVVNNKKKGKGTNSSDSEELSAGESITKSQPVKSVSTGMKSHSTKSPARTQSPGKCGKNGDKDPDLKEPSNRLPKVYKWSFQMSDLENMTSAERITILQEKLQEIRKHYLSLKSEVASIDRRRKRLKKKERESAATSSSSSSPSSSSITAAVMLTLAEPSMSSASQNGMLQPLPEDVLHSQNEAFLKRRGPPTDGDKPAPSPSASLRRRPAADCRRGGGVARERKCPETRKCELARSCSLGVFGVRMALEGMSKRKRKRSVQEGENPDDGVRGSPPEDYRLGQVASSLFRGEHHSRGGTGRLASLFSSLEPQIQPVYVPVPKQTIKKTKRNEEEESTSQIERPLSQEPAKKVKAKKKHTNAEKKLADSSPFRLMLRPCLSISSNTLYCIYRFTIYFWESALASADLEEEIHQKQGQKRKNSQPGVKVADRKILDDTEDTVVSQRKKIQINQEEERLKNERTVFVGNLPVTCNKKKLKSFFKEYGQIESVRFRSLIPAEGTLSKKLAAIKRKIHPDQKNINAYVVFKEESAATQALKRNGAQIADGFRIRVDLASETSSRDKRSVFVGNLPYKVEESAIEKHFLDCGSIMAVRIVRDKMTGIGKGFGYVLFENTDSVHLALKLNNSELMGRKLRVMRSVNKEKFKQQNSNPRLKNVSKPKQGLNFTSKTAEGHPKSLFIGEKAVLLKTKKKGQKKSGRPKKQRKQK

SEQ ID NO: 901448 - protein, 1382 aa, Homo sapiens
MKALDEPPYLTVGTDVSAKYRGAFCEAKIKTAKRLVKVKVTFRHDSSTVEVQDDHIKGPLKVGAIVEVKNLDGAYQEAVINKLTDASWYTVVFDDGDEKTLRRSSLCLKGERHFAESETLDQLPLTNPEHFGTPVIGKKTNRGRRSNHIPEEESSSSSSDEDEDDRKQIDELLGKVVCVDYISLDKKKALWFPALVVCPDCSDEIAVKKDNILVRSFKDGKFTSVPRKDVHEITSDTAPKPDAVLKQAFEQALEFHKSRTIPANWKTELKEDSSSSEAEEEEEEEDDEKEKEDNSSEEEEEIEPFPEERENFLQQLYKFMEDRGTPINKRPVLGYRNLNLFKLFRLVHKLGGFDNIESGAVWKQVYQDLGIPVLNSAAGYNVKCAYKKYLYGFEEYCRSANIEFQMALPEKVVNKQCKECENVKEIKVKEENETEIKEIKMEEERNIIPREEKPIEDEIERKENIKPSLGSKKNLLESIPTHSDQEKEVNIKKPEDNENLDDKDDDTTRVDESLNIKVEAEEEKAKSGDETNKEEDEDDEEAEEEEEEEEEEEDEDDDDNNEEEEFECYPPGMKVQVRYGRGKNQKMYEASIKDSDVEGGEVLYLVHYCGWNVRYDEWIKADKIVRPADKNVPKIKHRKKIKNKLDKEKDKDEKYSPKNCKLRRLSKPPFQTNPSPEMVSKLDLTDAKNSDTAHIKSIEITSILNGLQASESSAEDSEQEDERGAQDMDNNGKEESKIDHLTNNRNDLISKEEQNSSSLLEENKVHADLVISKPVSKSPERLRKDIEVLSEDTDYEEDEVTKKRKDVKKDTTDKSSKPQIKRGKRRYCNTEECLKTGSPGKKEEKAKNKESLCMENSSNSSSDEDEEETKAKMTPTKKYNGLEEKRKSLRTTGFYSGFSEVAEKRIKLLNNSDERLQNSRAKDRKDVWSSIQGQWPKKTLKELFSDSDTEAAASPPHPAPEEGVAEESLQTVAEEESCSPSVELEKPPPVNVDSKPIEEKTVEVNDRKAEFPSSGSNSVLNTPPTTPESPSSVTVTEGSRQQSSVTVSEPLAPNQEEVRSIKSETDSTIEVDSVAGELQDLQSEGNSSPAGFDASVSSSSSNQPEPEHPEKACTGQKRVKDAQGGGSSSKKQKRSHKATVVNNKKKGKGTNSSDSEELSAGESITKSQPVKSVSTGMKSHSTKSPARTQSPGKCGKNGDKDPDLKEPSNRLPKVYKWSFQMSDLENMTSAERITILQEKLQEIRKHYLSLKSEVASIDRRRKRLKKKERESAATSSSSSSPSSSSITAAVMLTLAEPSMSSASQNGMLQPLPEDVLHSQNEAFLKRRGPPTDGDKPAPSPSASLRRRPAADCRRGGGVARERKCPEPGSASWRAAAVWESLE

SEQ ID NO: 901449 - protein, 1516 aa, Homo sapiens
MKALDEPPYLTVGTDVSAKYRGAFCEAKIKTAKRLVKVKVTFRHDSSTVEVQDDHIKGPLKVGAIVEVKNLDGAYQEAVINKLTDASWYTVVFDDGDEKTLRRSSLCLKGERHFAESETLDQLPLTNPEHFGTPVIGKKTNRGRRSNHIPEEESSSSSSDEDEDDRKQIDELLGKVVCVDYISLDKKKALWFPALVVCPDCSDEIAVKKDNILVRSFKDGKFTSVPRKDVHEITSDTAPKPDAVLKQAFEQALEFHKSRTIPANWKTELKEDSSSSEAEEEEEEEDDEKEKEDNSSEEEEEIEPFPEERENFLQQLYKFMEDRGTPINKRPVLGYRNLNLFKLFRLVHKLGGFDNIESGAVWKQVYQDLGIPVLNSAAGYNVKCAYKKYLYGFEEYCRSANIEFQMALPEKVVNKQCKECENVKEIKVKEENETEIKEIKMEEERNIIPREEKPIEDEIERKENIKPSLGSKKNLLESIPTHSDQEKEVNIKKPEDNENLDDKDDDTTRVDESLNIKVEAEEEKAKSGDETNKEEDEDDEEAEEEEEEEEEEEDEDDDDNNEEEEFECYPPGMKVQVRYGRGKNQKMYEASIKDSDVEGGEVLYLVHYCGWNVRYDEWIKADKIVRPADKNVPKIKHRKKIKNKLDKEKDKDEKYSPKNCKLRRLSKPPFQTNPSPEMVSKLDLTDAKNSDTAHIKSIEITSILNGLQASESSAEDSEQEDERGAQDMDNNGKEESKIDHLTNNRNDLISKEEQNSSSLLEENKVHADLVISKPVSKSPERLRKDIEVLSEDTDYEEDEVTKKRKDVKKDTTDKSSKPQIKRGKRRYCNTEECLKTGSPGKKEEKAKNKESLCMENSSNSSSDEDEEETKAKMTPTKKYNGLEEKRKSLRTTGFYSGFSEVAEKRIKLLNNSDERLQNSRAKDRKDVWSSIQGQWPKKTLKELFSDSDTEAAASPPHPAPEEGVAEESLQTVAEEESCSPSVELEKPPPVNVDSKPIEEKTVEVNDRKAEFPSSGSNSVLNTPPTTPESPSSVTVTEGSRQQSSVTVSEPLAPNQEEVRSIKSETDSTIEVDSVAGELQDLQSEGNSSPAGFDASVSSSSSNQPEPEHPEKACTGQKRVKDAQGGGSSSKKQKRSHKATVVNNKKKGKGTNSSDSEELSAGESITKSQPVKSVSTGMKSHSTKSPARTQSPGKCGKNGDKDPDLKEPSNRLPKVYKWSFQMSDLENMTSAERITILQEKLQEIRKHYLSLKSEVASIDRRRKRLKKKERESAATSSSSSSPSSSSITAAVMLTLAEPSMSSASQNGMLQPLPEDVLHSQNEAFLKRRGPPTDGDKPAPSPSASLRRRPAADCRRGGGVARERKCPETRKCELARSCSLGVFGVRMALEGMSKRKRKRSVQEGENPDDGVRGSPPEDYRLGQVASSLFRGEHHSRGGTGRLASLFSSLEPQIQPVYVPVPKQTIKKTKRNEEEESTSQIERPLSQEPAKKVKAKKKHTNAEKKLADRWSLDATPRLQ

SEQ ID NO: 901450 - protein, 1122 aa, Homo sapiens
MKALDEPPYLTVGTDVSAKYRGAFCEAKIKTAKRLVKVKVTFRHDSSTVEVQDDHIKGPLKVGAIVEVKNLDGAYQEAVINKLTDASWYTVVFDDGDEKTLRRSSLCLKGERHFAESETLDQLPLTNPEHFGTPVIGKKTNRGRRSNHIPEEESSSSSSDEDEDDRKQIDELLGKVVCVDYISLDKKKALWFPALVVCPDCSDEIAVKKDNILVRSFKDGKFTSVPRKDVHEITSDTAPKPDAVLKQAFEQALEFHKSRTIPANWKTELKEDSSSSEAEEEEEEEDDEKEKEDNSSEEEEEIEPFPEERENFLQQLYKFMEDRGTPINKRPVLGYRNLNLFKLFRLVHKLGGFDNIESGAVWKQVYQDLGIPVLNSAAGYNVKCAYKKYLYGFEEYCRSANIEFQMALPEKVVNKQCKECENVKEIKVKEENETEIKEIKMEEERNIIPREEKPIEDEIERKENIKPSLGSKKNLLESIPTHSDQEKEVNIKKPEDNENLDDKDDDTTRVDESLNIKVEAEEEKAKSGDETNKEEDEDDEEAEEEEEEEEEEEDEDDDDNNEEEEFECYPPGMKVQVRYGRGKNQKMYEASIKDSDVEGGEVLYLVHYCGWNVRYDEWIKADKIVRPADKNVPKIKHRKKIKNKLDKEKDKDEKYSPKNCKLRRLSKPPFQTNPSPEMVSKLDLTDAKNSDTAHIKSIEITSILNGLQASESSAEDSEQEDERGAQDMDNNGKEESKIDHLTNNRNDLISKEEQNSSSLLEENKVHADLVISKPVSKSPERLRKDIEVLSEDTDYEEDEVTKKRKDVKKDTTDKSSKPQIKRGKRRYCNTEECLKTGSPGKKEEKAKNKESLCMENSSNSSSDEDEEETKAKMTPTKKYNGLEEKRKSLRTTGFYSGFSEVAEKRIKLLNNSDERLQNSRAKDRKDVWSSIQGQWPKKTLKELFSDSDTEAAASPPHPAPEEGVAEESLQTVAEEESCSPSVELEKPPPVNVDSKPIEEKTVEVNDRKAEFPSSGSNSVLNTPPTTPESPSSVTVTEGSRQQSSVTVSEPLAPNQEEVRSIKSETDSTIEVDSVAGELQDLQSEGNSSPAGFDASVSSSSSNQPEPEHPEKGEKENVYVDLF

SEQ ID NO: 901451 - protein, 596 aa, Homo sapiens
MKALDEPPYLTVGTDVSAKYRGAFCEAKIKTAKRLVKVKVTFRHDSSTVEVQDDHIKGPLKVGAIVEVKNLDGAYQEAVINKLTDASWYTVVFDDGDEKTLRRSSLCLKGERHFAESETLDQLPLTNPEHFGTPVIGKKTNRGRRSNHIPEEESSSSSSDEDEDDRKQIDELLGKVVCVDYISLDKKKALWFPALVVCPDCSDEIAVKKDNILVRSFKDGKFTSVPRKDVHEITSDTAPKPDAVLKQAFEQALEFHKSRTIPANWKTELKEDSSSSEAEEEEEEEDDEKEKEDNSSEEEEEIEPFPEERENFLQQLYKFMEDRGTPINKRPVLGYRNLNLFKLFRLVHKLGGFDNIESGAVWKQVYQDLGIPVLNSAAGYNVKCAYKKYLYGFEEYCRSANIEFQMALPEKVVNKQCKECENVKEIKVKEENETEIKEIKMEEERNIIPREEKPIEDEIERKENIKPSLGSKKNLLESIPTHSDQEKEVNIKKPEDNENLDDKDDDTTRVDESLNIKVEAEEEKAKSGDETNKEEDEDDEEAEEEEEEEEEEEDEDDDDNNEEEEFECYPPGMKGIIKLYFLSFFFPLILTLLLIT

SEQ ID NO: 901452 - protein, 444 aa, Homo sapiens
MKALDEPPYLTVGTDVSAKYRGAFCEAKIKTAKRLVKVKVTFRHDSSTVEVQDDHIKGPLKVGAIVEVKNLDGAYQEAVINKLTDASWYTVVFDDGDEKTLRRSSLCLKGERHFAESETLDQLPLTNPEHFGTPVIGKKTNRGRRSNHIPEEESSSSSSDEDEDDRKQIDELLGKVVCVDYISLDKKKALWFPALVVCPDCSDEIAVKKDNILVRSFKDGKFTSVPRKDVHEITSDTAPKPDAVLKQAFEQALEFHKSRTIPANWKTELKEDSSSSEAEEEEEEEDDEKEKEDNSSEEEEEIEPFPEERENFLQQLYKFMEDRGTPINKRPVLGYRNLNLFKLFRLVHKLGGFDNIESGAVWKQVYQDLGIPVLNSAAGYNVKCAYKKYLYGFEEYCRSANIEFQMALPEKVVNKQCKEVARVRKLLGGVYLYETTMHPDTMHC

SEQ ID NO: 901453 - protein, 163 aa, Homo sapiens
MKALDEPPYLTVGTDVSAKYRGAFCEAKIKTAKRLVKVKVTFRHDSSTVEVQDDHIKGPLKVGAIVEVKNLDGAYQEAVINKLTDASWYTVVFDDGDEKTLRRSSLCLKGERHFAESETLDQLPLTNPEHFGTPVIGKKTNRGRRSNHIPEEGEEGGRERERG

SEQ ID NO: 901454 - protein, 155 aa, Homo sapiens
RCLPVSRVRSEELGRRSGGRLLSFILPPPRPPPGPLPGGSCRGSIAAVLWRAARLGARTSSPGGIFRRPPPPNQGARAAAKQRYQSPPREEEEPEPLPQQPLDPPPFFPISPPGLLVLGGRRREGTLDVPGSDLASEEGAAEPGVLEDTLVPESS

SEQ ID NO: 901455 - protein, 1226 aa, Homo sapiens
MKALDEPPYLTVGTDVSAKYRGAFCEAKIKTAKRLVKVKVTFRHDSSTVEVQDDHIKGPLKVGAIVEVKNLDGAYQEAVINKLTDASWYTVVFDDGDEKTLRRSSLCLKGERHFAESETLDQLPLTNPEHFGTPVIGKKTNRGRRSNHIPEEESSSSSSDEDEDDRKQIDELLGKVVCVDYISLDKKKALWFPALVVCPDCSDEIAVKKDNILVRSFKDGKFTSVPRKDVHEITSDTAPKPDAVLKQAFEQALEFHKSRTIPANWKTELKEDSSSSEAEEEEEEEDDEKEKEDNSSEEEEEIEPFPEERENFLQQLYKFMEDRGTPINKRPVLGYRNLNLFKLFRLVHKLGGFDNIESGAVWKQVYQDLGIPVLNSAAGYNVKCAYKKYLYGFEEYCRSANIEFQMALPEKVVNKQCKECENVKEIKVKEENETEIKEIKMEEERNIIPREEKPIEDEIERKENIKPSLGSKKNLLESIPTHSDQEKEVNIKKPEDNENLDDKDDDTTRVDESLNIKVEAEEEKAKSGYDEWIKADKIVRPADKNVPKIKHRKKIKNKLDKEKDKDEKYSPKNCKLRRLSKPPFQTNPSPEMVSKLDLTDAKNSDTAHIKSIEITSILNGLQASESSAEDSEQEDERGAQDMDNNGKEESKIDHLTNNRNDLISKEEQNSSSLLEENKVHADLVISKPVSKSPERLRKDIEVLSEDTDYEEDEVTKKRKDVKKDTTDKSSKPQIKRGKRRYCNTEECLKTGSPGKKEEKAKNKESLCMENSSNSSSDEDEEETKAKMTPTKKYNGLEEKRKSLRTTGFYSGFSEVAEKRIKLLNNSDERLQNSRAKDRKDVWSSIQGQWPKKTLKELFSDSDTEAAASPPHPAPEEGVAEESLQTVAEEESCSPSVELEKPPPVNVDSKPIEEKTVEVNDRKAEFPSSGSNSVLNTPPTTPESPSSVTVTEGSRQQSSVTVSEPLAPNQEEVRSIKSETDSTIEVDSVAGELQDLQSEGNSSPAGFDASVSSSSSNQPEPEHPEKACTGQKRVKDAQGGGSSSKKQKRSHKATVVNNKKKGKGTNSSDSEELSAGESITKSQPVKSVSTGMKSHSTKSPARTQSPGKCGKNGDKDPDLKEPSNRLPKVYKWSFQMSDLENMTSAERITILQEKLQEIRKHYLSLKSEVASIDRRRKRLKKKERESAATSSSSSSPSSSSITAAVMLTLAEPSMSSASQNGMSVECR

SEQ ID NO: 901456 - protein, 960 aa, Homo sapiens
MSSDEFANTMPVRPPTVKRKMNPGLRALWFPALVVCPDCSDEIAVKKDNILVRSFKDGKFTSVPRKDVHEITSDTAPKPDAVLKQAFEQALEFHKSRTIPANWKTELKEDSSSSEAEEEEEEEDDEKEKEDNSSEEEEEIEPFPEERENFLQQLYKFMEDRGTPINKRPVLGYRNLNLFKLFRLVHKLGGFDNIESGAVWKQVYQDLGIPVLNSAAGYNVKCAYKKYLYGFEEYCRSANIEFQMALPEKVVNKQCKECENVKEIKVKEENETEIKEIKMEEERNIIPREEKPIEDEIERKENIKPSLGSKKNLLESIPTHSDQEKEVNIKKPEDNENLDDKDDDTTRVDESLNIKVEAEEEKAKSGDETNKEEDEDDEEAEEEEEEEEEEEDEDDDDNNEEEEFECYPPGMKVQVRYGRGKNQKMYEASIKDSDVEGGEVLYLVHYCGWNVRYDEWIKADKIVRPADKNVPKIKHRKKIKNKLDKEKDKDEKYSPKNCKLRRLSKPPFQTNPSPEMVSKLDLTDAKNSDTAHIKSIEITSILNGLQASESSAEDSEQEDERGAQDMDNNGKEESKIDHLTNNRNDLISKEEQNSSSLLEENKVHADLVISKPVSKSPERLRKDIEVLSEDTDYEEDEVTKKRKDVKKDTTDKSSKPQIKRGKRRYCNTEECLKTGSPGKKEEKAKNKESLCMENSSNSSSDEDEEETKAKMTPTKKYNGLEEKRKSLRTTGFYSGFSEVAEKRIKLLNNSDERLQNSRAKDRKDVWSSIQGQWPKKTLKELFSDSDTEAAASPPHPAPEEGVAEESLQTVAEEESCSPSVELEKPPPVNVDSKPIEEKTVEVNDRKAEFPSSGSNSVLNTPPTTPESPSSVTVTEGSRQQSSVTVSEPLAPNQEEVRSIKSETDSTIEVDSVAGELQDLQSEGNSSPAGFDASVSSSSSNQPEPEHPEKGEKENVYVDLF

SEQ ID NO: 901457 - protein, 144 aa, Homo sapiens
WENDVLSSHDKLLLLFFRNLENDLRFKLAILQVLGNVIRVWEYLYSSLACLFFVRINGNILFFSLPRPEEESSSSSSDEDEDDRKQIDELLGKVVCVDYISLDKKKALWFPALVSSFSIQEFNFKLYKFMKKTIFLLMFFIGTK

SEQ ID NO: 901458 - protein, 993 aa, Homo sapiens
MEDRGTPINKRPVLGYRNLNLFKLFRLVHKLGGFDNIESGAVWKQVYQDLGIPVLNSAAGYNVKCAYKKYLYGFEEYCRSANIEFQMALPEKVVNKQCKECENVKEIKVKEENETEIKEIKMEEERNIIPREEKPIEDEIERKENIKPSLGSKKNLLESIPTHSDQEKEVNIKKPEDNENLDDKDDDTTRVDESLNIKVEAEEEKAKSGDETNKEEDEDDEEAEEEEEEEEEEEDEDDDDNNEEEEFECYPPGMKVQVRYGRGKNQKMYEASIKDSDVEGGEVLYLVHYCGWNVRYDEWIKADKIVRPADKNVPKIKHRKKIKNKLDKEKDKDEKYSPKNCKLRRLSKPPFQTNPSPEMVSKLDLTDAKNSDTAHIKSIEITSILNGLQASESSAEDSEQEDERGAQDMDNNGKEESKIDHLTNNRNDLISKEEQNSSSLLEENKVHADLVISKPVSKSPERLRKDIEVLSEDTDYEEDEVTKKRKDVKKDTTDKSSKPQIKRGKRRYCNTEECLKTGSPGKKEEKAKNKESLCMENSSNSSSDEDEEETKAKMTPTKKYNGLEEKRKSLRTTGFYSGFSEVAEKRIKLLNNSDERLQNSRAKDRKDVWSSIQGQWPKKTLKELFSDSDTEAAASPPHPAPEEGVAEESLQTVAEEESCSPSVELEKPPPVNVDSKPIEEKTVEVNDRKAEFPSSGSNSVLNTPPTTPESPSSVTVTEGSRQQSSVTVSEPLAPNQEEVRSIKSETDSTIEVDSVAGELQDLQSEGNSSPAGFDASVSSSSSNQPEPEHPEKACTGQKRVKDAQGGGSSSKKQKRSHKATVVNNKKKGKGTNSSDSEELSAGESITKSQPVKSVSTGMKSHSTKSPARTQSPGKCGKNGDKDPDLKEPSNRLPKVYKWSFQMSDLENMTSAERITILQEKLQEIRKHYLSLKSEVASIDRRRKRLKKKERESAATSSSSSSPSSSSITAAVMLTLAEPSMSSASQNGMSVECR

SEQ ID NO: 901459 - protein, 1312 aa, Homo sapiens; identical to SEQ ID NO: 901437

SEQ ID NO: 901460 - protein, 1255 aa, Homo sapiens
RGSHSTLHVSAIAQILKAECLAMLGRYPEAQSVASDILRMDPPMQMLCMYEVFALYDEWIKADKIVRPADKNVPKIKHRKKIKNKLDKEKDKDEKYSPKNCKLRRLSKPPFQTNPSPEMVSKLDLTDAKNSDTAHIKSIEITSILNGLQASESSAEDSEQEDERGAQDMDNNGKEESKIDHLTNNRNDLISKEEQNSSSLLEENKVHADLVISKPVSKSPERLRKDIEVLSEDTDYEEDEVTKKRKDVKKDTTDKSSKPQIKRGKRRYCNTEECLKTGSPGKKEEKAKNKESLCMENSSNSSSDEDEEETKAKMTPTKKYNGLEEKRKSLRTTGFYSGFSEVAEKRIKLLNNSDERLQNSRAKDRKDVWSSIQGQWPKKTLKELFSDSDTEAAASPPHPAPEEGVAEESLQTVAEEESCSPSVELEKPPPVNVDSKPIEEKTVEVNDRKAEFPSSGSNSVLNTPPTTPESPSSVTVTEGSRQQSSVTVSEPLAPNQEEVRSIKSETDSTIEVDSVAGELQDLQSEGNSSPAGFDASVSSSSSNQPEPEHPEKACTGQKRVKDAQGGGSSSKKQKRSHKATVVNNKKKGKGTNSSDSEELSAGESITKSQPVKSVSTGMKSHSTKSPARTQSPGKCGKNGDKDPDLKEPSNRLPKVYKWSFQMSDLENMTSAERITILQEKLQEIRKHYLSLKSEVASIDRRRKRLKKKERESAATSSSSSSPSSSSITAAVMLTLAEPSMSSASQNGMLQPLPEDVLHSQNEAFLKRRGPPTDGDKPAPSPSASLRRRPAADCRRGGGVARERKCPETRKCELARSCSLGVFGVRMALEGMSKRKRKRSVQEGENPDDGVRGSPPEDYRLGQVASSLFRGEHHSRGGTGRLASLFSSLEPQIQPVYVPVPKQTIKKTKRNEEEESTSQIERPLSQEPAKKVKAKKKHTNAEKKLADRESALASADLEEEIHQKQGQKRKNSQPGVKVADRKILDDTEDTVVSQRKKIQINQEEERLKNERTVFVGNLPVTCNKKKLKSFFKEYGQIESVRFRSLIPAEGTLSKKLAAIKRKIHPDQKNINAYVVFKEESAATQALKRNGAQIADGFRIRVDLASETSSRDKRSVFVGNLPYKVEESAIEKHFLDCGSIMAVRIVRDKMTGIGKGFGYVLFENTDSVHLALKLNNSELMGRKLRVMRSVNKEKFKQQNSNPRLKNVSKPKQGLNFTSKTAEGHPKSLFIGEKAVLLKTKKKGQKKSGRPKKQRKQK

SEQ ID NO: 901461 - protein, 1382 aa, Homo sapiens; identical to SEQ ID NO: 901448

SEQ ID NO: 901462 - protein, 1613 aa, Homo sapiens
MKALDEPPYLTVGTDVSAKYRGAFCEAKIKTAKRLVKVKVTFRHDSSTVEVQDDHIKGPLKVGAIVEVKNLDGAYQEAVINKLTDASWYTVVFDDGDEKTLRRSSLCLKGERHFAESETLDQLPLTNPEHFGTPVIGKKTNRGRRSNHIPEEESSSSSSDEDEDDRKQIDELLGKVVCVDYISLDKKKALWFPALVVCPDCSDEIAVKKDNILVRSFKDGKFTSVPRKDVHEITSDTAPKPDAVLKQAFEQALEFHKSRTIPANWKTELKEDSSSSEAEEEEEEEDDEKEKEDNSSEEEEEIEPFPEERENFLQQLYKFMEDRGTPINKRPVLGYRNLNLFKLFRLVHKLGGFDNIESGAVWKQVYQDLGIPVLNSAAGYNVKCAYKKYLYGFEEYCRSANIEFQMALPEKVVNKQCKECENVKEIKVKEENETEIKEIKMEEERNIIPREEKPIEDEIERKENIKPSLGSKKNLLESIPTHSDQEKEVNIKKPEDNENLDDKDDDTTRVDESLNIKVEAEEEKAKSGDETNKEEDEDDEEAEEEEEEEEEEEDEDDDDNNEEEEFECYPPGMKVQVRYGRGKNQKMYEASIKDSDVEGGEVLYLVHYCGWNVRYDEWIKADKIVRPADKNVPKIKHRKKIKNKLDKEKDKDEKYSPKNCKLRRLSKPPFQTNPSPEMVSKLDLTDAKNSDTAHIKSIEITSILNGLQASESSAEDSEQEDERGAQDMDNNGKEESKIDHLTNNRNDLISKEEQNSSSLLEENKVHADLVISKPVSKSPERLRKDIEVLSEDTDYEEDEVTKKRKDVKKDTTDKSSKPQIKRGKRRYCNTEECLKTGSPGKKEEKAKNKESLCMENSSNSSSDEDEEETKAKMTPTKKYNGLEEKRKSLRTTGFYSGFSEVAEKRIKLLNNSDERLQNSRAKDRKDVWSSIQGQWPKKTLKELFSDSDTEAAASPPHPAPEEGVAEESLQTVAEEESCSPSVELEKPPPVNVDSKPIEEKTVEVNDRKAEFPSSGSNSVLNTPPTTPESPSSVTVTEGSRQQSSVTVSEPLAPNQEEVRSIKSETDSTIEVDSVAGELQDLQSEGNSSPAGFDASVSSSSSNQPEPEHPEKACTGQKRVKDAQGGGSSSKKQKRSHKATVVNNKKKGKGTNSSDSEELSAGESITKSQPVKSVSTGMKSHSTKSPARTQSPGKCGKNGDKDPDLKEPSNRLPKVYKWSFQMSDLENMTSAERITILQEKLQEIRKHYLSLKSEVASIDRRRKRLKKKERESAATSSSSSSPSSSSITAAVMLTLAEPSMSSASQNGMLQPLPEDVLHSQNEAFLKRRGPPTDGDKPAPSPSASLRRRPAADCRRGGGVARERKCPETRKCELARSCSLGVFGVRMALEGMSKRKRKRSVQEGENPDDGVRGSPPEDYRLGQVASSLFRGEHHSRGGTGRLASLFSSLEPQIQPVYVPVPKQTIKKTKRNEEEESTSQIERPLSQEPAKKVKAKKKHTNAEKKLADRESALASADLEEEIHQKQGQKRKNSQPGVKVADRKILDDTEDTVVSQRKKIQINQEEERLKNERTVFVGNLPVTCNKKKLKSFFKEYGQIESVRFRSLIPVWREGYRA

SEQ ID NO: 901463 - protein, 1794 aa, Homo sapiens
MKALDEPPYLTVGTDVSAKYRGAFCEAKIKTAKRLVKVKVTFRHDSSTVEVQDDHIKGPLKVGAIVEVKNLDGAYQEAVINKLTDASWYTVVFDDGDEKTLRRSSLCLKGERHFAESETLDQLPLTNPEHFGTPVIGKKTNRGRRSNHIPEEESSSSSSDEDEDDRKQIDELLGKVVCVDYISLDKKKALWFPALVVCPDCSDEIAVKKDNILVRSFKDGKFTSVPRKDVHEITSDTAPKPDAVLKQAFEQALEFHKSRTIPANWKTELKEDSSSSEAEEEEEEEDDEKEKEDNSSEEEEEIEPFPEERENFLQQLYKFMEDRGTPINKRPVLGYRNLNLFKLFRLVHKLGGFDNIESGAVWKQVYQDLGIPVLNSAAGYNVKCAYKKYLYGFEEYCRSANIEFQMALPEKVVNKQCKECENVKEIKVKEENETEIKEIKMEEERNIIPREEKPIEDEIERKENIKPSLGSKKNLLESIPTHSDQEKEVNIKKPEDNENLDDKDDDTTRVDESLNIKVEAEEEKAKSGDETNKEEDEDDEEAEEEEEEEEEEEDEDDDDNNEEEEFECYPPGMKVQVRYGRGKNQKMYEASIKDSDVEGGEVLYLVHYCGWNVRYDEWIKADKIVRPADKNVPKIKHRKKIKNKLDKEKDKDEKYSPKNCKLRRLSKPPFQTNPSPEMVSKLDLTDAKNSDTAHIKSIEITSILNGLQASESSAEDSEQEDERGAQDMDNNGKEESKIDHLTNNRNDLISKEEQNSSSLLEENKVHADLVISKPVSKSPERLRKDIEVLSEDTDYEEDEVTKKRKDVKKDTTDKSSKPQIKRGKRRYCNTEECLKTGSPGKKEEKAKNKESLCMENSSNSSSDEDEEETKAKMTPTKKYNGLEEKRKSLRTTGFYSGFSEVAEKRIKLLNNSDERLQNSRAKDRKDVWSSIQGQWPKKTLKELFSDSDTEAAASPPHPAPEEGVAEESLQTVAEEESCSPSVELEKPPPVNVDSKPIEEKTVEVNDRKAEFPSSGSNSVLNTPPTTPESPSSVTVTEGSRQQSSVTVSEPLAPNQEEVRSIKSETDSTIEVDSVAGELQDLQSEGNSSPAGFDASVSSSSSNQPEPEHPEKACTGQKRVKDAQGGGSSSKKQKRSHKATVVNNKKKGKGTNSSDSEELSAGESITKSQPVKSVSTGMKSHSTKSPARTQSPGKCGKNGDKDPDLKEPSNRLPKVYKWSFQMSDLENMTSAERITILQEKLQEIRKHYLSLKSEVASIDRRRKRLKKKERESAATSSSSSSPSSSSITAAVMLTLAEPSMSSASQNGMLQPLPEDVLHSQNEAFLKRRGPPTDGDKPAPSPSASLRRRPAADCRRGGGVARERKCPETRKCELARSCSLGVFGVRMALEGMSKRKRKRSVQEGENPDDGVRGSPPEDYRLGQVASSLFRGEHHSRGGTGRLASLFSSLEPQIQPVYVPVPKQTIKKTKRNEEEESTSQIERPLSQEPAKKVKAKKKHTNAEKKLADRESALASADLEEEIHQKQGQKRKNSQPGVKVADRKILDDTEDTVVSQRKKIQINQEEERLKNERTVFVGNLPVTCNKKIPAEGTLSKKLAAIKRKIHPDQKNINAYVVFKEESAATQALKRNGAQIADGFRIRVDLASETSSRDKRSVFVGNLPYKVEESAIEKHFLDCGSIMAVRIVRDKMTGIGKGFGYVLFENTDSVHLALKLNNSELMGRKLRVMRSVNKEKFKQQNSNPRLKNVSKPKQGLNFTSKTAEGHPKSLFIGEKAVLLKTKKKGQKKSGRPKKQRKQK

SEQ ID NO: 901464 - protein, 1568 aa, Homo sapiens
MKALDEPPYLTVGTDVSAKYRGAFCEAKIKTAKRLVKVKVTFRHDSSTVEVQDDHIKGPLKVGAIVEVKNLDGAYQEAVINKLTDASWYTVVFDDGDEKTLRRSSLCLKGERHFAESETLDQLPLTNPEHFGTPVIGKKTNRGRRSNHIPEEESSSSSSDEDEDDRKQIDELLGKVVCVDYISLDKKKALWFPALVVCPDCSDEIAVKKDNILVRSFKDGKFTSVPRKDVHEITSDTAPKPDAVLKQAFEQALEFHKSRTIPANWKTELKEDSSSSEAEEEEEEEDDEKEKEDNSSEEEEEIEPFPEERENFLQQLYKFMEDRGTPINKRPVLGYRNLNLFKLFRLVHKLGGFDNIESGAVWKQVYQDLGIPVLNSAAGYNVKCAYKKYLYGFEEYCRSANIEFQMALPEKVVNKQCKECENVKEIKVKEENETEIKEIKMEEERNIIPREEKPIEDEIERKENIKPSLGSKKNLLESIPTHSDQEKEVNIKKPEDNENLDDKDDDTTRVDESLNIKVEAEEEKAKSGDETNKEEDEDDEEAEEEEEEEEEEEDEDDDDNNEEEEFECYPPGMKVQVRYGRGKNQKMYEASIKDSDVEGGEVLYLVHYCGWNVRYDEWIKADKIVRPADKNVPKIKHRKKIKNKLDKEKDKDEKYSPKNCKLRRLSKPPFQTNPSPEMVSKLDLTDAKNSDTAHIKSIEITSILNGLQASESSAEDSEQEDERGAQDMDNNGKEESKIDHLTNNRNDLISKEEQNSSSLLEENKVHADLVISKPVSKSPERLRKDIEVLSEDTDYEEDEVTKKRKDVKKDTTDKSSKPQIKRGKRRYCNTEECLKTGSPGKKEEKAKNKESLCMENSSNSSSDEDEEETKAKMTPTKKYNGLEEKRKSLRTTGFYSGFSEVAEKRIKLLNNSDERLQNSRAKDRKDVWSSIQGQWPKKTLKELFSDSDTEAAASPPHPAPEEGVAEESLQTVAEEESCSPSVELEKPPPVNVDSKPIEEKTVEVNDRKAEFPSSGSNSVLNTPPTTPESPSSVTVTEGSRQQSSVTVSEPLAPNQEEVRSIKSETDSTIEVDSVAGELQDLQSEGNSSPAGFDASVSSSSSNQPEPEHPEKACTGQKRVKDAQGGGSSSKKQKRSHKATVVNNKKKGKGTNSSDSEELSAGESITKSQPVKSVSTGMKSHSTKSPARTQSPGKCGKNGDKDPDLKEPSNRLPKVYKWSFQMSDLENMTSAERITILQEKLQEIRKHYLSLKSEVASIDRRRKRLKKKERESAATSSSSSSPSSSSITAAVMLTLAEPSMSSASQNGMLQPLPEDVLHSQNEAFLKRRGPPTDGDKPAPSPSASLRRRPAADCRRGGGVARERKCPETRKCELARSCSLGVFGVRMALEGMSKRKRKRSVQEGENPDDGVRGSPPEDYRLGQVASSLFRGEHHSRGGTGRLASLFSSLEPQIQPVYVPVPKQTIKKTKRNEEEESTSQIERPLSQEPAKKVKAKKKHTNAEKKLADRLVKFSYLMLKKLDGKLTFLYLEYSSVLFHISTFFQNFYYGKSSTYRKVEKAKKPRVLSISNY

SEQ ID NO: 901465 - protein, 693 aa, Homo sapiens
MANFKLPTKICDKFIVTFLFIKSFLSLSANSSDSEELSAGESITKSQPVKSVSTGMKSHSTKSPARTQSPGKCGKNGDKDPDLKEPSNRLPKVYKWSFQMSDLENMTSAERITILQEKLQEIRKHYLSLKSEVASIDRRRKRLKKKERESAATSSSSSSPSSSSITAAVMLTLAEPSMSSASQNGMLQPLPEDVLHSQNEAFLKRRGPPTDGDKPAPSPSASLRRRPAADCRRGGGVARERKCPETRKCELARSCSLGVFGVRMALEGMSKRKRKRSVQEGENPDDGVRGSPPEDYRLGQVASSLFRGEHHSRGGTGRLASLFSSLEPQIQPVYVPVPKQTIKKTKRNEEEESTSQIERPLSQEPAKKVKAKKKHTNAEKKLADRESALASADLEEEIHQKQGQKRKNSQPGVKVADRKILDDTEDTVVSQRKKIQINQEEERLKNERTVFVGNLPVTCNKKKLKSFFKEYGQIESVRFRSLIPAEGTLSKKLAAIKRKIHPDQKNINAYVVFKEESAATQALKRNGAQIADGFRIRVDLASETSSRDKRSVFVGNLPYKVEESAIEKHFLDCGSIMAVRIVRDKMTGIGKGFGYVLFENTDSVHLALKLNNSELMGRKLRVMRSVNKEKFKQQNSNPRLKNVSKPKQGLNFTSKTAEGHPKSLFIGEKAVLLKTKKKGQKKSGRPKKQRKQK

SEQ ID NO: 901466 - protein, 806 aa, Homo sapiens
MKALDEPPYLTVGTDVSAKYRGAFCEAKIKTAKRLVKVKVTFRHDSSTVEVQDDHIKGPLKVGAIVEVKNLDGAYQEAVINKLTDASWYTVVFDDGDEKTLRRSSLCLKGERHFAESETLDQLPLTNPEHFGTPVIGKKTNRGRRSNHIPEEESSSSSSDEDEDDRKQIDELLGKVVCVDYISLDKKKALWFPALVVCPDCSDEIAVKKDNILVRSFKDGKFTSVPRKDVHEITSDTAPKPDAVLKQAFEQALEFHKSRTIPANWKTELKEDSSSSEAEEEEEEEDDEKEKEDNSSEEEEEIEPFPEERENFLQQLYKFMEDRGTPINKRPVLGYRNLNLFKLFRLVHKLGGFDNIESGAVWKQVYQDLGIPVLNSAAGYNVKCAYKKYLYGFEEYCRSANIEFQMALPEKVVNKQCKECENVKEIKVKEENETEIKEIKMEEERNIIPREEKPIEDEIERKENIKPSLGSKKNLLESIPTHSDQEKEVNIKKPEDNENLDDKDDDTTRVDESLNIKVEAEEEKAKSGDETNKEEDEDDEEAEEEEEEEEEEEDEDDDDNNEEEEFECYPPGMKVQVRYGRGKNQKMYEASIKDSDVEGGEVLYLVHYCGWNVRYDEWIKADKIVRPADKNVPKIKHRKKIKNKLDKEKDKDEKYSPKNCKLRRLSKPPFQTNPSPEMVSKLDLTDAKNSDTAHIKSIEITSILNGLQASESSAEDSEQEDERGAQDMDNNGKEESKIDHLTNNRNDLISKEEQNSSSLLEENKVHADLVISKPVSKSPERLRKDLSVVSFLTSFLFFVIFIFFII

SEQ ID NO: 901467 - protein, 382 aa, Homo sapiens
MKALDEPPYLTVGTDVSAKYRGAFCEAKIKTAKRLVKVKVTFRHDSSTVEVQDDHIKGPLKVGAIVEVKNLDGAYQEAVINKLTDASWYTVVFDDGDEKTLRRSSLCLKGERHFAESETLDQLPLTNPEHFGTPVIGKKTNRGRRSNHIPEEESSSSSSDEDEDDRKQIDELLGKVVCVDYISLDKKKALWFPALVVCPDCSDEIAVKKDNILVRSFKDGKFTSVPRKDVHEITSDTAPKPDAVLKQAFEQALEFHKSRTIPANWKTELKEDSSSSEAEEEEEEEDDEKEKEDNSSEEEEEIEPFPEERENFLQQLYKFMEDRGTPINKRPVLGYRNLNLFKLFRLVHKLGGFDNVSVVVKLKHLFHVTCFLRYLPSLKLFF

SEQ ID NO: 901468 - protein, 226 aa, Homo sapiens [sequence omitted]

SEQ ID NO: 901469 - protein, 403 aa, Homo sapiens
VKHLQRRNSQSSSGGGGGGSSSSSRRPSLMDDLCEANGTFAISLFKILGEEDNSRNVFFSPMSISSALAMVFMGAKGSTAAQMSQALCLYKDGDIHRGFQSLLSEVNRTGTQYLLRTANRLFGEKTCDFLPDFKEYCQKFYQAELEELSFAEDTEECRKHINDWVAEKTEGKISEVLDAGTVDPLTKLVLVNAIYFKGKWNEQFDRKYTRGMLFKTNEEKKTVQMMFKEAKFKMGYADEVHTQVLELPYVEEELSMVILLPDDNTDLAVVEKALTYEKFKAWTNSEKLTKSKVQVFLPRLKLEESYDLEPFLRRLGMIDAFDEAKADFSGMSTEKNVPLSKVAHKCFVEVNEEGTEAAAATAVVRNSRCSRMEPRFCADHPFLFFIRHHKTNCILFCGRFSSP

SEQ ID NO: 901470 - protein, 271 aa, Homo sapiens
VKHLQRRNSQSSSGGGGGGSSSSSRRPSLMDDLCEANGTFAISLFKILGEEDNSRNVFFSPMSISSALAMVFMGAKGSTAAQMSQALCLYKDGDIHRGFQSLLSEVNRTGTQYLLRTANRLFGEKTCDFLPDFKEYCQKFYQAELEELSFAEDTEECRKHINDWVAEKTEGKISEVLDAGTVDPLTKLVLVNAIYFKGKWNEQFDRKYTRGMLFKTNEEKKTVQMMFKEAKFKMGYADEVHTQVLELPYVEEELSMVILLPDDNTDLAVKE

SEQ ID NO: 901471 - protein, 288 aa, Homo sapiens
VKHLQRRNSQSSSGGGGGGSSSSSRRPSLMDDLCEANGTFAISLFKILGEEDNSRNVFFSPMSISSALAMVFMGAKGSTAAQMSQALCLYKDGDIHRGFQSLLSEVNRTGTQYLLRTANRLFGEKTCDFLPDFKEYCQKFYQAELEELSFAEDTEECRKHINDWVAEKTEGKISEVLDAGTVDPLTKLVLVNAIYFKGKWNEQFDRKYTRGMLFKTNEEKKTVQMMFKEAKFKMGYADEVHTQVLELPYVEEELSMVILLPDDNTDLAVDTLRSTSFFCDILANIIST

SEQ ID NO: 901472 - protein, 51 aa, Homo sapiens
MTELPAPLSYFQNAQMSEDNHLSNTFPPCLEFLSLTEYNPPGLRLPTDPLD

SEQ ID NO: 901473 - protein, 463 aa, Homo sapiens
MTELPAPLSYFQNAQMSEDNHLSNTNDNRERQEHNDRRSLGHPEPLSNGRPQGNSRQVVEQDEEEDEELTLKYGAKHVIMLFVPVTLCMVVVVATIKSVSFYTRKDGQLIYTPFTEDTETVGQRALHSILNAAIMISVIVVMTILLVVLYKYRCYKVIHAWLIISSLLLLFFFSFIYLGEVFKTYNVAVDYITVALLIWNFGVVGMISIHWKGPLRLQQAYLIMISALMALVFIKYLPEWTAWLILAVISVYDLVAVLCPKGPLRMLVETAQERNETLFPALIYSSTMVWLVNMAEGDPEAQRRVSKNSKYNAESTERESQDTVAENDDGGFSEEWEAQRDSHLGPHRSTPESRAAVQELSSSILAGEDPEERGVKLGLGDFIFYSVLVGKASATASGDWNTTIACFVAILIGLCLTLLLLAIFKKALPALPISITFGLVFYFATDYLVQPFMDQLAFHQFYI

SEQ ID NO: 901474 - protein, 463 aa, Homo sapiens; identical to SEQ ID NO: 901473

SEQ ID NO: 901475 - protein, 374 aa, Homo sapiens
MTELPAPLSYFQNAQMSEDNHLSNTNDNRERQEHNDRRSLGHPEPLSNGRPQGNSRQVVEQDEEEDEELTLKYGAKHVIMLFVPVTLCMVVVVATIKSVSFYTRKDGQLIYTPFTEDTETVGQRALHSILNAAIMISVIVVMTILLVVLYKYRCYKVIHAWLIISSLLLLFFFSFIYLGEVFKTYNVAVDYITVALLIWNFGVVGMISIHWKGPLRLQQAYLIMISALMALVFIKYLPEWTAWLILAVISVYDLVAVLCPKGPLRMLVETAQERNETLFPALIYSSTMVWLVNMAEGDPEAQRRVSKNSKYNAERACLPPAAINLLSIAPMAPRLFMPKGACRPTAQKGSHKTLLQRMMMAGSVRNGKPRGTVI

SEQ ID NO: 901476 - protein, 382 aa, Homo sapiens
AANFKGSPEHVVATIKSVSFYTRKDGQLIYTPFTEDTETVGQRALHSILNAAIMISVIVVMTILLVVLYKYRCYKVIHAWLIISSLLLLFFFSFIYLGEVFKTYNVAVDYITVALLIWNFGVVGMISIHWKGPLRLQQAYLIMISALMALVFIKYLPEWTAWLILAVISVYDLVAVLCPKGPLRMLVETAQERNETLFPALIYSSTMVWLVNMAEGDPEAQRRVSKNSKYNAESTERESQDTVAENDDGGFSEEWEAQRDSHLGPHRSTPESRAAVQELSSSILAGEDPEERGVKLGLGDFIFYSVLVGKASATASGDWNTTIACFVAILIGLCLTLLLLAIFKKALPALPISITFGLVFYFATDYLVQPFMDQLAFHQFYI

SEQ ID NO: 901477 - protein, 463 aa, Homo sapiens; identical to SEQ ID NO: 901473

SEQ ID NO: 901478 - protein, 358 aa, Homo sapiens
MGSVIYTPFTEDTETVGQRALHSILNAAIMISVIVVMTILLVVLYKYRCYKVIHAWLIISSLLLLFFFSFIYLGEVFKTYNVAVDYITVALLIWNFGVVGMISIHWKGPLRLQQAYLIMISALMALVFIKYLPEWTAWLILAVISVYDLVAVLCPKGPLRMLVETAQERNETLFPALIYSSTMVWLVNMAEGDPEAQRRVSKNSKYNAESTERESQDTVAENDDGGFSEEWEAQRDSHLGPHRSTPESRAAVQELSSSILAGEDPEERGVKLGLGDFIFYSVLVGKASATASGDWNTTIACFVAILIGLCLTLLLLAIFKKALPALPISITFGLVFYFATDYLVQPFMDQLAFHQFYI

SEQ ID NO: 901479 - protein, 360 aa, Homo sapiens
MTELPAPLSYFQNAQMSEDNHLSNTNDNRERQEHNDRRSLGHPEPLSNGRPQGNSRQVVEQDEEEDEELTLKYGAKHVIMLFVPVTLCMVVVVATIKSVSFYTRKDGQLIYTPFTEDTETVGQRALHSILNAAIMISVIVVMTILLVVLYKYRCYKVIHAWLIISSLLLLFFFSFIYLGEVFKTYNVAVDYITVALLIWNFGVVGMISIHWKGPLRLQQAYLIMISALMALVFIKYLPEWTAWLILAVISVYDLVAVLCPKGPLRMLVETAQERNETLFPALIYSSTMVWLVNMAEGDPEAQRRVSKNSKYNAEISAEDIRKTLQHKIIPPGTVSHRNLRSTVSYGLIAPPLNPHHVRGF

SEQ ID NO: 901480 - protein, 139 aa, Homo sapiens
MTELPAPLSYFQNAQMSEDNHLSNTNDNRERQEHNDRRSLGHPEPLSNGRPQGNSRQVVEQDEEEDEELTLKYGAKHVIMLFVPVTLCMVVVVATIKSVSFYTRKDGQLIYTPFTEDAQGPEAIRIISGEAPFDSSLPM

SEQ ID NO: 901481 - protein, 101 aa, Homo sapiens
EKENSVLEVVMWLVISINTDLGLLCLFYCRIYTPFTEDTETVGQRALHSILNAAIMISVIVVMTILLVVLYKYRCYKVSMRHRSLLSTLFFLWLGILVTVT

SEQ ID NO: 901482 - protein, 463 aa, Homo sapiens; identical to SEQ ID NO: 901473

SEQ ID NO: 901483 - protein, 463 aa, Homo sapiens; identical to SEQ ID NO: 901473

SEQ ID NO: 901484 - protein, 463 aa, Homo sapiens; identical to SEQ ID NO: 901473

SEQ ID NO: 901485 - protein, 463 aa, Homo sapiens; identical to SEQ ID NO: 901473

SEQ ID NO: 901486 - protein, 170 aa, Homo sapiens
MAEGDPEAQRRVSKNSKYNAESTERESQDTVAENDDGGFSEEWEAQRDSHLGPHRSTPESRAAVQELSSSILAGEDPEERGVKLGLGDFIFYSVLVGKASATASGDWNTTIACFVAILIGLCLTLLLLAIFKKALPALPISITFGLVFYFATDYLVQPFMDQLAFHQFYI

SEQ ID NO: 901487 - protein, 180 aa, Homo sapiens
MTELPAPLSYFQNAQMSEDNHLSNTNDNRERQEHNDRRSLGHPEPLSNGRPQGNSRQVVEQDEEEDEELTLKYGAKHVIMLFVPVTLCMVVVVATIKSVSFYTRKDGQLIYTPFTEDTETVGQRALHSILNAAIMISVIVVMTILLVVLYKYRCYKVSMRHRSLLSTLFFLWLGILVTVT

SEQ ID NO: 901488 - protein, 290 aa, Homo sapiens
RPGPVRRRGKVELIKFVRVQWRRPQVEWRRRRWGPGPGASMAGSEELGLREDTLRVLAAFLRRGEAAGSPVPTPPRSPAQEEPTDFLSRLRRCLPCSLGRGAAPSESPRPCSLPIRPCYGLEPGPATPDFYALVAQRLEQLVQEQLKSPPSPELQGPPSTEKEAILRRLVALLEEEAEVINQKLASDPALRSKLVRLSSDSFARLVELFCSRDDSSRPSRACPGPPPPSPEPLARLALAMELSRRVAGLGGTLAGLSVEHVHSFTPWIQAHGGWEGILAVSPVDLNLPLD

SEQ ID NO: 901489 - protein, 144 aa, Homo sapiens
RPGPVRRRGKVELIKFVRVQWRRPQVEWRRRRWGPGPGASMAGSEELGLREDTLRVLAAFLRRGEAAGSPVPTPPRSPAQEEPTDFLSRLRRCLPCSLGRGRGARAQLHALDPGPRGLGGHPGCFTRGLELAIGLSSFSEAATR

SEQ ID NO: 901490 - protein, 113 aa, Homo sapiens
RPGPVRRRGKVELIKFVRVQWRRPQVEWRRRRWGPGPGASMAGSEELGLREDTLRVLAAFLRRGEAAGSPVPTPPRSPAQEEPTDFLSRLRRCLPCSLGRGRLLPRSPWPAWP

SEQ ID NO: 901491 - protein, 115 aa, Homo sapiens
LTTLCGASFKEAKDSEFMIEEMQVIHPPRPPKVLELQAELPRLDNFLKNFFKVGLIADEFSRWARSSARDFNGMIPFKPTTTSWGSYCPRLVGAERKSPQHAECWNLDLYTKPRL

SEQ ID NO: 901492 - protein, 132 aa, Homo sapiens
RPGPVRRRGKVELIKFVRVQWRRPQVEWRRRRWGPGPGASMAGSEELGLREDTLRVLAAFLRRGEAAGSPVPTPPRPSYSRLLCFGGPAAGTAGPRAAEISAQPRITGSPIDREGSHTAEAGGPAGGGGRSH

SEQ ID NO: 901493 - protein, 132 aa, Homo sapiens; identical to SEQ ID NO: 901492

SEQ ID NO: 901494 - protein, 156 aa, Homo sapiens
MLIVSARTLHWIQAGPKSSLKSPPSPELQGPPSTEKEAILRRLVALLEEEAEVINQKLASDPALRSKLVRLSSDSFARLVELFCSRDDSSRPSRACPGPPPPSPEPLARLALAMELSRRVAGLGGTLAGLSVEHVHSFTPWIQAHGGWVSRCSLSL

SEQ ID NO: 901495 - protein, 199 aa, Homo sapiens
RPGPVRRRGKVELIKFVRVQWRRPQVEWRRRRWGPGPGASMAGSEELGLREDTLRVLAAFLRRGEAAGSPVPTPPRSPAQEEPTDFLSRLRRCLPCSLGRGAAPSESPRPCSLPIRPCYGLEPGPATPDFYALVAQRLEQLVQEQLKSPPSPELQGPPSTEKEAILRRLVALLEEEAEVINQKEGILAVSPVDLNLPLD

SEQ ID NO: 901496 - protein, 463 aa, Homo sapiens
RGRRGLPLGGPLVAGRRRRLRARGSQQDAPALQEAEVRGPERAQPARGRMTKARLFRLWLVLGSVFMILLIIVYWDSAGAAHFYLHTSFSRPHTGPPLPTPGPDRDRELTADSDVDEFLDKFLSAGVKQSDLPRKETEQPPAPGSMEESVRGYDWSPRDARRSPDQGRQQAERRSVLRGFCANSSLAFPTKERAFDDIPNSELSHLIVDDRHGAIYCYVPKVACTNWKRVMIVLSGSLLHRGAPYRDPLRIPREHVHNASAHLTFNKFWRRYGKLSRHLMKVKLKKYTKFLFVRDPFVRLISAFRSKFELENEEFYRKFAVPMLRLYANHTSLPASAREAFRAGLKVSFANFIQYLLDPHTEKLAPFNEHWRQVYRLCHPCQIDYDFVGKLETLDEDAAQLLQLLQVDRQLRFPPSYRNRTASSWEEDWFAKIPLAWRQQLYKLYEADFVLFGYPKPENLLRD

SEQ ID NO: 901497 - protein, 414 aa, Homo sapiens
MTKARLFRLWLVLGSVFMILLIIVYWDSAGAAHFYLHTSFSRPHTGPPLPTPGPDRDRELTADSDVDEFLDKFLSAGVKQSDLPRKETEQPPAPGSMEESVRGYDWSPRDARRSPDQGRQQAERRSVLRGFCANSSLAFPTKERAFDDIPNSELSHLIVDDRHGAIYCYVPKVACTNWKRVMIVLSGSLLHRGAPYRDPLRIPREHVHNASAHLTFNKFWRRYGKLSRHLMKVKLKKYTKFLFVRDPFVRLISAFRSKFELENEEFYRKFAVPMLRLYANHTSLPASAREAFRAGLKVSFANFIQYLLDPHTEKLAPFNEHWRQVYRLCHPCQIDYDFVGKLETLDEDAAQLLQLLQVDRQLRFPPSYRNRTASSWEEDWFAKIPLAWRQQLYKLYEADFVLFGYPKPENLLRD

SEQ ID NO: 901498 - protein, 463 aa, Homo sapiens; identical to SEQ ID NO: 901496

SEQ ID NO: 901499 - protein, 493 aa, Homo sapiens
MRPLCVTCWWLGLLAAMGAVAGQEDGFEGTEEGSPREFIYLNRYKRAGESQDKCTYTFIVPQQRVTGAICVNSKEPEVLLENRVHKQELELLNNELLKQKRQIETLQQLVEVDGGIVSEVKLLRKESRNMNSRVTQLYMQLLHEIIRKRDNALELSQLENRILNQTADMLQLASKYKDLEHKYQHLATLAHNQSEIIAQLEEHCQRVPSARPVPQPPPAAPPRVYQPPTYNRIINQISTNEIQSDQNLKVLPPPLPTMPTLTSLPSSTDKPSGPWRDCLQALEDGHDTSSIYLVKPENTNRLMQVWCDQRHDPGGWTVIQRRLDGSVNFFRNWETYKQGFGNIDGEYWLGLENIYWLTNQGNYKLLVTMEDWSGRKVFAEYASFRLEPESEYYKLRLGRYHGNAGDSFTWHNGKQFTTLDRDHDVYTGNCAHYQKGGWWYNACAHSNLNGVWYRGGHYRSRYQDGVYWAEFRGGSYSLKKVVMMIRPNPNTFH

SEQ ID NO: 901500 - protein, 493 aa, Homo sapiens; identical to SEQ ID NO: 901499

SEQ ID NO: 901501 - protein, 493 aa, Homo sapiens; identical to SEQ ID NO: 901499

SEQ ID NO: 901502 - protein, 165 aa, Homo sapiens
ASARAYHQLMSKKDIIPTPSHPMNIWNSCWAINTIYPQHLPLSQLPLLTSRGHCQEPTLVTLATAQRTTPHQFILRLGGPGCWILFSEVTAADDGTESIRCFLSLLLSFTPDSPSCLQDRTGLQTTLSLNKLSLYNKNTTAKYLHNIHVYEPPLCTYVYTTYICI

SEQ ID NO: 901503 - protein, 493 aa, Homo sapiens; identical to SEQ ID NO: 901499

SEQ ID NO: 901504 - protein, 274 aa, Homo sapiens
MRPLCVTCWWLGLLAAMGAVAGQEDGFEGTEEGSPREFIYLNRYKRAGESQDKCTYTFIVPQQRVTGAICVNSKEPEVLLENRVHKQELELLNNELLKQKRQIETLQQLVEVDGGIVSEVKLLRKESRNMNSRVTQLYMQLLHEIIRKRDNALELSQLENRILNQTADMLQLASKYKDLEHKYQHLATLAHNQSEIIAQLEEHCQRVPSARPVPQPPPAAPPRVYQPPTYNRIINQISTNEIQSDQNLKVLPPPLPTMPTLTSLPSSTDKPSGL

SEQ ID NO: 901505 - protein, 493 aa, Homo sapiens; identical to SEQ ID NO: 901499

SEQ ID NO: 901506 - protein, 364 aa, Homo sapiens
MNSRVTQLYMQLLHEIIRKRDNALELSQLENRILNQTADMLQLASKYKDLEHKYQHLATLAHNQSEIIAQLEEHCQRVPSARPVPQPPPAAPPRVYQPPTYNRIINQISTNEIQSDQNLKVLPPPLPTMPTLTSLPSSTDKPSGPWRDCLQALEDGHDTSSIYLVKPENTNRLMQVWCDQRHDPGGWTVIQRRLDGSVNFFRNWETYKQGFGNIDGEYWLGLENIYWLTNQGNYKLLVTMEDWSGRKVFAEYASFRLEPESEYYKLRLGRYHGNAGDSFTWHNGKQFTTLDRDHDVYTGNCAHYQKGGWWYNACAHSNLNGVWYRGGHYRSRYQDGVYWAEFRGGSYSLKKVVMMIRPNPNTFH

SEQ ID NO: 901507 - protein, 83 aa, Homo sapiens
LSLRFLNWSTRITNLTSGNCAHYQKGGWWYNACAHSNLNGVWYRGGHYRSRYQDGVYWAEFRGGSYSLKKVVMMIRPNPNTFH

SEQ ID NO: 901508 - protein, 446 aa, Homo sapiens
MRPLCVTCWWLGLLAAMGAVAGQEDGFEGTEEGSPREFIYLNRYKRAGESQDKCTYTFIVPQQRVTGAICVNSKEPEVLLENRVHKQELELLNNELLKQKRQIETLQQLVEVDGGIVSEVKLLRKESRNMNSRVTQLYMQLLHEIIRKRDNALELSQLENRILNQTADMLQLASKYKDLEHKYQHLATLAHNQSEIIAQLEEHCQRVPSARPVPQPPPAAPPRVYQPPTYNRIINQISTNEIQSDQNLKVLPPPLPTMPTLTSLPSSTDKPSGPWRDCLQALEDGHDTSSIYLVKPENTNRLMQVWCDQRHDPGGWTVIQRRLDGSVNFFRNWETYKQGFGNIDGEYWLGLENIYWLTNQGNYKLLVTMEDWSGRKVFAEYASFRLEPESEYYKLRLGRYHGNAGDSFTWHNGKQFTTLDRDVGCLVLSMSGCVPITSAFLTKCTM

SEQ ID NO: 901509 - protein, 286 aa, Homo sapiens
RPSSSEESARKQTFPRAMSRLGLPEEPVRNSLLDDAKARLRKYDIGGKYSHLPYNKYSVLLPLVAKEGKLHLLFTVRSEKLRRAPGEVCFPGGKRDPTDMDDAATALREAQEEVGLRPHQVEVVCCLVPCLIDRWGSRYVDEAGLELLASSDPPTSAPKVLGLQTDTLITPFVGLIDHNFQAQPNPAEVKDVFLVPLAYFLHPQVHDQHYVTRLGHRFINHIFEYTNPEDGVTYQIKGMTANLAVLVAFIILEKKPTFEVQFNLNDVLASSEELFLKVHKKATSRL

SEQ ID NO: 901510 - protein, 255 aa, Homo sapiens
RPSSSEESARKQTFPRAMSRLGLPEEPVRNSLLDDAKARLRKYDIGGKYSHLPYNKYSVLLPLVAKEGKLHLLFTVRSEKLRRAPGEVCFPGGKRDPTDMDDAATALREAQEEVGLRPHQVEVVCCLVPCLIDTDTLITPFVGLIDHNFQAQPNPAEVKDVFLVPLAYFLHPQVHDQHYVTRLGHRFINHIFEYTNPEDGVTYQIKGMTANLAVLVAFIILEKKPTFEVQFNLNDVLASSEELFLKVHKKATSRL

SEQ ID NO: 901511 - protein, 71 aa, Homo sapiens
RPSSSEESARKQTFPRAMSRLGLPEEPVRNSLLDDAKARLRKYDIGGKYSHLPYNKYSVLLPLVAKEGQIH

SEQ ID NO: 901512 - protein, 286 aa, Homo sapiens; identical to SEQ ID NO: 901509

SEQ ID NO: 901513 - protein, 89 aa, Homo sapiens
RPSSSEESARKQTFPRAMSRLGLPEEPVRNSLLDDAKARLRKYDIGGKYSHLPYNKYSVLLPLVAKEGKLHLLFTVRSEKVGGQKISCP

SEQ ID NO: 901514 - protein, 202 aa, Homo sapiens
RPSSSEESARKQTFPRAMSRLGLPEEPVRNSLLDDAKARLRKYDIGGKYSHLPYNKYSVLLPLVAKEGKLHLLFTVRSEKTDTLITPFVGLIDHNFQAQPNPAEVKDVFLVPLAYFLHPQVHDQHYVTRLGHRFINHIFEYTNPEDGVTYQIKGMTANLAVLVAFIILEKKPTFEVQFNLNDVLASSEELFLKVHKKATSRL

SEQ ID NO: 901515 - protein, 150 aa, Homo sapiens
TEQLRGVRPETNIPQGNVTTWSSRGASQTDTLITPFVGLIDHNFQAQPNPAEVKDVFLVPLAYFLHPQVHDQHYVTRLGHRFINHIFEYTNPEDGVTYQIKGMTANLAVLVAFIILEKKPTFEVQFNLNDVLASSEELFLKVHKKATSRL

SEQ ID NO: 901516 - protein, 286 aa, Homo sapiens; identical to SEQ ID NO: 901509

SEQ ID NO: 901517 - protein, 122 aa, Homo sapiens
  misc_feature (89)..(89): Xaa can be any naturally occurring amino acid
RKENVGGRLGWCDALTSSGADSPYRYLNTDKDEGDHPNNSFSPCSAHDRRCLQKHFAKIRDRSTSGGKMKVNGAPREDARPVPPGGPAXSRALHQWAPGRRGWACFSPEARQAHELEGTIHN

SEQ ID NO: 901518 - protein, 253 aa, Homo sapiens
MLPLCLVAALLLAAGPGPSLGDEAIHCPPCSEEKLARCRPPVGCEELVREPGCGCCATCALGLGMPCGVYTPRCGSGLRCYPPRGVEKPLHTLMHGQGVCMELAEIEAIQESLQPSDKDEGDHPNNSFSPCSAHDRRCLQKHFAKIRDRSTSGGKMKVNGAPREDARPVPQGSCQSELHRALERLAASQSRTHEDLYIIPIPNCDRNGNFHPKQCHPALDGQRGKCWCVDRKTGVKLPGGLEPKGEPGLPPAG

SEQ ID NO: 901519 - protein, 253 aa, Homo sapiens; identical to SEQ ID NO: 901518

SEQ ID NO: 901520 - protein, 86 aa, Homo sapiens
KSSSVPGGEYGIGNFHAQAVSPSSGWAAWQVLVCGPEDGGEASGGPGAKGGAWTATSWLTAFESEACQQARDSASPATPVLWRLQS

SEQ ID NO: 901521 - protein, 253 aa, Homo sapiens; identical to SEQ ID NO: 901518

SEQ ID NO: 901522 - protein, 253 aa, Homo sapiens; identical to SEQ ID NO: 901518

SEQ ID NO: 901523 - protein, 253 aa, Homo sapiens; identical to SEQ ID NO: 901518

SEQ ID NO: 901524 - protein, 253 aa, Homo sapiens; identical to SEQ ID NO: 901518

SEQ ID NO: 901525 - protein, 103 aa, Homo sapiens
MRGFLGPVPYPICGHSHEVTGMNLSFQWLAPCSSASLSISPSPTPPSPHLPTPLGIFWLDWMEGDLGTYQLAMMSFLLFLFFNKTEQNQKMSKKKKKDIMANW

SEQ ID NO: 901526 - protein, 78 aa, Homo sapiens
RNLRPMRERTAVQGQYLTVEQLTLDFMLHTKYQVVYPFPTFQPAFQLKKDQVVLLNTSYSRWEVDFPPGESEGGQRKT

SEQ ID NO: 901527 - protein, 253 aa, Homo sapiens; identical to SEQ ID NO: 901518

SEQ ID NO: 901528 - protein, 215 aa, Homo sapiens
  misc_feature (175)..(175): Xaa can be any naturally occurring amino acid
  misc_feature (189)..(189): Xaa can be any naturally occurring amino acid
  misc_feature (191)..(191): Xaa can be any naturally occurring amino acid
  misc_feature (194)..(194): Xaa can be any naturally occurring amino acid
  misc_feature (213)..(213): Xaa can be any naturally occurring amino acid
MLPLCLVAALLLAAGPGPSLGDEAIHCPPCSEEKLARCRPPVGCEELVREPGCGCCATCALGLGMPCGVYTPRCGSGLRCYPPRGVEKPLHTLMHGQGVCMELAEIEAIQESLQPSDKDEGDHPNNSFSPCSAHDRRCLQKHFAKIRDRSTSGGKMKVNGAPREDARPVPPDSCXRELPRALARKAAAXKXKQXPLPLNLLPGRAGPFPPACXQF

SEQ ID NO: 901529 - protein, 202 aa, Homo sapiens
  misc_feature (146)..(146): Xaa can be any naturally occurring amino acid
  misc_feature (180)..(180): Xaa can be any naturally occurring amino acid
MLPLCLVAALLLAAGPGPSLGDEAIHCPPCSEEKLARCRPPVGCEELVREPGCGCCATCALGLGMPCGVYTPRCGSGLRCYPPRGVEKPLHTLMHGQGVCMELAEIEAIQESLQPSDKDEGDHPNNSFSPCSAHDRRCLQESNFWXKKFGGTREATQVGGGPKGMEKGSKLGGAAPPGGXGIGPPGAFVGPPQRGLFPGPQE

SEQ ID NO: 901530 - protein, 253 aa, Homo sapiens; identical to SEQ ID NO: 901518

SEQ ID NO: 901531 - protein, 124 aa, Homo sapiens
MLPLCLVAALLLAAGPGPSLGDEAIHCPPCSEEKLARCRPPVGCEELVREPGCGCCATCALGLGMPCGVYTPRCGSGLRCYPPRGCHPALDGQRGKCWCVDRKTGVKLPGGLEPKGEPGLPPAG

SEQ ID NO: 901532 - protein, 253 aa, Homo sapiens; identical to SEQ ID NO: 901518

SEQ ID NO: 901533 - protein, 253 aa, Homo sapiens; identical to SEQ ID NO: 901518

SEQ ID NO: 901534 - protein, 71 aa, Homo sapiens
SSHPERIRTPRTCSLMKGMSFSAPAVRSSSCGTKTNNVTLTKEMFFYKLLLILECLLYNWVGYQGGALWLA

SEQ ID NO: 901535 - protein, 253 aa, Homo sapiens; identical to SEQ ID NO: 901518

SEQ ID NO: 901536 - protein, 253 aa, Homo sapiens; identical to SEQ ID NO: 901518

SEQ ID NO: 901537 - protein, 224 aa, Homo sapiens
MLPLCLVAALLLAAGPGPSLGDEAIHCPPCSEEKLARCRPPVGCEELVREPGCGCCATCALGLGMPCGVYTPRCGSGLRCYPPRGVEKPLHTLMHGQGVCMELAEIEAIQESLQPSDKDEGDHPNNSFSPCSAHDRRCLQKHFAKIRDRSTSGGKMKVNGAPREDARPVVRTSDAQMCMCIDTHTHMPPAPHMHAPTHTITTRSGACSFSTHSRVTTVCKVQLV

SEQ ID NO: 901538 - protein, 83 aa, Homo sapiens
  misc_feature (37)..(43): Xaa can be any naturally occurring amino acid
  misc_feature (48)..(48): Xaa can be any naturally occurring amino acid
  misc_feature (50)..(50): Xaa can be any naturally occurring amino acid
  misc_feature (52)..(52): Xaa can be any naturally occurring amino acid
  misc_feature (82)..(82): Xaa can be any naturally occurring amino acid
MLPLCLVAALLLAAGPGPSLGDEAIHCPPCSEEKPAXXXXXXXFSFLXLXLXLITMGTKGHNSPCPPQMHPSNKKRHHTQSXH

SEQ ID NO: 901539 - protein, 312 aa, Homo sapiens
MADFGISAGQFVAVVWDKSSPVEALKGLVDKLQALTGNEGRVSVENIKQLLQSAHKESSFDIILSGLVPGSTTLHSAEILAEIARILRPGGCLFLKEPVETAVDNNSKVKTASKLCSALTLSGLVEVKELQREPLTPEEVQSVREHLGHESDNLLFVQITGKKPNFEVGSSRQLKLSITKKSSPSVKPAVDPAAAKLWTLSANDMEDDSMDLIDSDELLDPEDLKKPDPASLRAASCGEGKKRKACKNCTCGLAEELEKEKSREQMSSQPKSACGNCYLGDAFRCASCPYLGMPAFKPGEKVLLSDSNLHDA

SEQ ID NO: 901540 - protein, 299 aa, Homo sapiens
MADFGISAGQFVAVVWDKSSPVEALKGLVDKLQALTGNEGRVSVENIKQLLQCLVPGSTTLHSAEILAEIARILRPGGCLFLKEPVETAVDNNSKVKTASKLCSALTLSGLVEVKELQREPLTPEEVQSVREHLGHESDNLLFVQITGKKPNFEVGSSRQLKLSITKKSSPSVKPAVDPAAAKLWTLSANDMEDDSMDLIDSDELLDPEDLKKPDPASLRAASCGEGKKRKACKNCTCGLAEELEKEKSREQMSSQPKSACGNCYLGDAFRCASCPYLGMPAFKPGEKVLLSDSNLHDA

SEQ ID NO: 901541 - protein, 312 aa, Homo sapiens; identical to SEQ ID NO: 901539

SEQ ID NO: 901542 - protein, 312 aa, Homo sapiens; identical to SEQ ID NO: 901539

SEQ ID NO: 901543 - protein, 380 aa, Homo sapiens
MADFGISAGQFVAVVWDKSSPVEALKGLVDKLQALTGNEGRVSVENIKQLLQSAHKESSFDIILSGLVPGSTTLHSAEILAEIARILRPGGCLFLKEPVETAVDNNSKVKTASKLCSALTLSGLVEVKELQREPLTPEEVQSVREHLGHESDNLLFVQITGKKPNFEVGSSRQLKLSITKKSSPSVKPAVDPAAAKLWTLSANDMEDDSMCIFCGCSLTHRWPLEHVVRLNMMINQKEDRVDTFFTLDSKFPLEACSHFSFSLAETTTVSLIALNTLQDLIDSDELLDPEDLKKPDPASLRAASCGEGKKRKACKNCTCGLAEELEKEKSREQMSSQPKSACGNCYLGDAFRCASCPYLGMPAFKPGEKVLLSDSNLHDA

SEQ ID NO: 901544 - protein, 367 aa, Homo sapiens
MADFGISAGQFVAVVWDKSSPVEALKGLVDKLQALTGNEGRVSVENIKQLLQCLVPGSTTLHSAEILAEIARILRPGGCLFLKEPVETAVDNNSKVKTASKLCSALTLSGLVEVKELQREPLTPEEVQSVREHLGHESDNLLFVQITGKKPNFEVGSSRQLKLSITKKSSPSVKPAVDPAAAKLWTLSANDMEDDSMCIFCGCSLTHRWPLEHVVRLNMMINQKEDRVDTFFTLDSKFPLEACSHFSFSLAETTTVSLIALNTLQDLIDSDELLDPEDLKKPDPASLRAASCGEGKKRKACKNCTCGLAEELEKEKSREQMSSQPKSACGNCYLGDAFRCASCPYLGMPAFKPGEKVLLSDSNLHDA

SEQ ID NO: 901545 - protein, 190 aa, Homo sapiens
MADFGISAGQFVAVVWDKSSPVEALKGLVDKLQALTGNEGRVSVENIKQLLQSAHKESSFDIILSGLVPGSTTLHSAEILAEIARILRPGGCLFLKEPVETAVDNNSKVKTASKLCSALTLSGLVEVKELQREPLTPEEVQSVREHLGHESDNLLFVQITGKNETCCGPCCCQAVDPLSQRYGGRQHGSH

SEQ ID NO: 901546 - protein, 249 aa, Homo sapiens
MADFGISAGQFVAVVWDKSSPVEALKGLVDKLQALTGNEGRVSVENIKQLLQSAHKESSFDIILSGLVPGSTTLHSAEILAEIARILRPGGCLFLKEPVETAVDNNSKVKTASKLCSALTLSGLVEVKELQREPLTPEEVQSVREHLGHESDNLLFVQITGKKPNFEVGSSRQLKLSITKKSSPSVKPAVDPAAAKLWTLSANDMEDDSMDLIDSDELLDPEDLKKPDPASLRAASCGEGKKRKACKNW

SEQ ID NO: 901547 - protein, 108 aa, Homo sapiens
MEDDSMDLIDSDELLDPEDLKKPDPASLRAASCGEGKKRKACKNCTCGLAEELEKEKSREQMSSQPKSACGNCYLGDAFRCASCPYLGMPAFKPGEKVLLSDSNLHDA

SEQ ID NO: 901548 - protein, 163 aa, Homo sapiens
MCKRPDVIHHRAGFDVMERSRERAQAAVLIPFWPAVLKPAVDPAAAKLWTLSANDMEDDSMDLIDSDELLDPEDLKKPDPASLRAASCGEGKKRKACKNCTCGLAEELEKEKSREQMSSQPKSACGNCYLGDAFRCASCPYLGMPAFKPGEKVLLSDSNLHDA

SEQ ID NO: 901549 - protein, 246 aa, Homo sapiens
MADFGISAGQFVAVVWDKSSPVEALKGLVDKLQALTGNEGRVSVENIKQLLQSAHKESSFDIILSGLVPGSTTLHSAEILAEIARILRPGGCLFLKEPVETAVDNNSKVKTASKLCSALTLSGLVEVKELQREPLTPEEVQSVREHLGHESDNLLFVQITGKKPNFEVGSSRQLKLSITKKSSPSVKPAVDPAAAKLWTLSANDMEDDSMCYLGDAFRCASCPYLGMPAFKPGEKVLLSDSNLHDA

SEQ ID NO: 901550 - protein, 312 aa, Homo sapiens; identical to SEQ ID NO: 901539

SEQ ID NO: 901551 - protein, 312 aa, Homo sapiens; identical to SEQ ID NO: 901539

SEQ ID NO: 901552 - protein, 312 aa, Homo sapiens; identical to SEQ ID NO: 901539

SEQ ID NO: 901553 - protein, 266 aa, Homo sapiens
MADFGISAGQFVAVVWDKSSPVEALKGLVDKLQALTGNEGRVSVENIKQLLQSAHKESSFDIILSGLVPGSTTLHSAEILAEIARILRPGGCLFLKEPVETAVDNNSKVKTASKLCSALTLSGLVEVKELQREPLTPEEVQSVREHLGHESDNLLFVQITGKKPNFEVGSSRQLKLSITKKSSPSVKPAVDPAAAKLWTLSANDMEDDSMHLWPCRRTGKREVKGTDELPTQVSLWKLLPGRCLPLCQLPLPWDASLQTWGKGASE

SEQ ID NO: 901554 - protein, 277 aa, Homo sapiens
SSLRGASSSRERREAWSRRLERSRERAQAAGLVPGSTTLHSAEILAEIARILRPGGCLFLKEPVETAVDNNSKVKTASKLCSALTLSGLVEVKELQREPLTPEEVQSVREHLGHESDNLLFVQITGKKPNFEVGSSRQLKLSITKKSSPSVKPAVDPAAAKLWTLSANDMEDDSMDLIDSDELLDPEDLKKPDPASLRAASCGEGKKRKACKNCTCGLAEELEKEKSREQMSSQPKSACGNCYLGDAFRCASCPYLGMPAFKPGEKVLLSDSNLHDA

SEQ ID NO: 901555 - protein, 266 aa, Homo sapiens; identical to SEQ ID NO: 901553

SEQ ID NO: 901556 - protein, 317 aa, Homo sapiens
MADFGISAGQFVAVVWDKSSPVEALKGLVDKLQALTGNEGRVSVENIKQLLQSAHKESSFDIILSGLVPGSTTLHSAEILAEIARILRPGGCLFLKEPVETAVDNNSKVKTASKLCSALTLSGLVEVKELQREPLTPEEVQSVREHLGHESDNLLFVQITGKKPNFEVGSSRQLKLSITKKSSPSVKPAVDPAAAKLWTLSANDMEDDSMCIFCGCSLTHRWPLEHVVRLNMMINQKEDRVDTFFTLDSKFPLEACSHFSFSLAETTTVSLIALNTLQDLIDSDELLDPEDLKKPDPASLRAASCGEGKKRKACKNW

SEQ ID NO: 901557 - protein, 475 aa, Homo sapiens
MAGRPHPYDGNSSDPENWDRKLHSRPRKLYKHSSTSSRIAKGGVDHTKMSLHGASGGHERSRDRRRSSDRSRDSSHERTESQLTPCIRNVTSPTRQHHVEREKDHSSSRPSSPRPQKASPNGSISSAGNSSRNSSQSSSDGSCKTAGEMVFVYENAKEGARNIRTSERVTLIVDNTRFVVDPSIFTAQPNTMLGRMFGSGREHNFTRPNEKGEYEVAEGIGSTVFRAILDYYKTGIIRCPDGISIPELREACDYLCISFEYSTIKCRDLSALMHELSNDGARRQFEFYLEEMILPLMVASAQSGERECHIVVLTDDDVVDWDEEYPPQMGEEYSQIIYSTKLYRFFKYIENRDVAKSVLKERGLKKIRLGIEGYPTYKEKVKKRPGGRPEVIYNYVQRPFIRMSWEKEEGKSRHVDFQCVKSKSITNLAAAAADIPQDQLVVMHPTPQVDELDILPIHPPSGNSDLDPDAQNPML

SEQ ID NO: 901558 - protein, 475 aa, Homo sapiens; identical to SEQ ID NO: 901557

SEQ ID NO: 901559 - protein, 427 aa, Homo sapiens
MSLHGASGGHERSRDRRRSSDRSRDSSHERTESQLTPCIRNVTSPTRQHHVEREKDHSSSRPSSPRPQKASPNGSISSAGNSSRNSSQSSSDGSCKTAGEMVFVYENAKEGARNIRTSERVTLIVDNTRFVVDPSIFTAQPNTMLGRMFGSGREHNFTRPNEKGEYEVAEGIGSTVFRAILDYYKTGIIRCPDGISIPELREACDYLCISFEYSTIKCRDLSALMHELSNDGARRQFEFYLEEMILPLMVASAQSGERECHIVVLTDDDVVDWDEEYPPQMGEEYSQIIYSTKLYRFFKYIENRDVAKSVLKERGLKKIRLGIEGYPTYKEKVKKRPGGRPEVIYNYVQRPFIRMSWEKEEGKSRHVDFQCVKSKSITNLAAAAADIPQDQLVVMHPTPQVDELDILPIHPPSGNSDLDPDAQNPML

SEQ ID NO: 901560 - protein, 457 aa, Homo sapiens
MAGRPHPYDGNSSDPENWDRKLHSRPRKLYKHSSTSSRIAKGGVDHTKMSLHGASGGHERSRDRRRSSDRSRDSSHERTESQLTPCIRNVTSPTRQHHVEREKDHSSSRPSSPRPQKASPNGSISSAGNSSRNSSQSSSDGSCKTAGEMVFVYENAKEGARNIRTSERVTLIVDNTRFVVDPSIFTAQPNTMLGRMFGSGREHNFTRPNEKGEYEVAEGIGSTVFRAILDYYKTGIIRCPDGISIPELREACDYLCISFEYSTIKCRDLSALMHELSNDGARRQFEFYLEEMILPLMVASAQSGERECHIVVLTDDDVVDWDEEYPPQMGEEYSQIIYSTKLYRFFKYIENRDVAKSVLKERGLKKIRLGIEGYPTYKEKVKIRMSWEKEEGKSRHVDFQCVKSKSITNLAAAAADIPQDQLVVMHPTPQVDELDILPIHPPSGNSDLDPDAQNPML

SEQ ID NO: 901561 - protein, 475 aa, Homo sapiens; identical to SEQ ID NO: 901557

SEQ ID NO: 901562 - protein, 183 aa, Homo sapiens
MAGRPHPYDGNSSDPENWDRKLHSRPRKLYKHSSTSSRIAKGGVDHTKMSLHGASGGHERSRDRRRSSDRSRDSSHERTESQLTPCIRNVTSPTRQHHVEREKDHSSSRPSSPRPQKASPNGSISSAGNSSRNSSPPFRGPDTPGQGCLQPKGGYNSHVQGTWGPTWAPRAGCRPPQIGARRA

SEQ ID NO: 901563 - protein, 475 aa, Homo sapiens; identical to SEQ ID NO: 901557

SEQ ID NO: 901564 - protein, 475 aa, Homo sapiens; identical to SEQ ID NO: 901557

SEQ ID NO: 901565 - protein, 764 aa, Homo sapiens
MRPADLLQLVLLLDLPRDLGGMGCSSPPCECHQEEDFRVTCKDIQRIPSLPPSTQTLKLIETHLRTIPSHAFSNLPNISRIYVSIDVTLQQLESHSFYNLSKVTHIEIRNTRNLTYIDPDALKELPLLKFLGIFNTGLKMFPDLTKVYSTDIFFILEITDNPYMTSIPVNAFQGLCNETLTLKLYNNGFTSVQGYAFNGTKLDAVYLNKNKYLTVIDKDAFGGVYSGPSLLDVSQTSVTALPSKGLEHLKELIARNTWTLKKLPLSLSFLHLTRADLSYPSHCCAFKNQKKIRGILESLMCNESSMQSLRQRKSVNALNSPLHQEYEENLGDSIVGYKEKSKFQDTHNNAHYYVFFEEQEDEIIGFGQELKNPQEETLQAFDSHYDYTICGDSEDMVCTPKSDEFNPCEDIMGYKFLRIVVWFVSLLALLGNVFVLLILLTSHYKLNVPRFLMCNLAFADFCMGMYLLLIASVDLYTHSEYYNHAIDWQTGPGCNTAGFFTVFASELSVYTLTVITLERWYAITFAMRLDRKIRLRHACAIMVGGWVCCFLLALLPLVGISSYAKVSICLPMDTETPLALAYIVFVLTLNIVAFVIVCCCYVKIYITVRNPQYNPGDKDTKIAKRMAVLIFTDFICMAPISFYALSAILNKPLITVSNSKILLVLFYPLNSCANPFLYAIFTKAFQRDVFILLSKFGICKRQAQAYRGQRVPPKNSTDIQVQKVTHDMRQGLHNMEDVYELIENSHLTPKKQGQISEEYMQTVL

SEQ ID NO: 901566 - protein, 764 aa, Homo sapiens; identical to SEQ ID NO: 901565

SEQ ID NO: 901567 - protein, 253 aa, Homo sapiens
MRPADLLQLVLLLDLPRDLGGMGCSSPPCECHQEEDFRVTCKDIQRIPSLPPSTQTLKLIETHLRTIPSHAFSNLPNISRIYVSIDVTLQQLESHSFYNLSKVTHIEIRNTRNLTYIDPDALKELPLLKFLGIFNTGLKMFPDLTKVYSTDIFFILEITDNPYMTSIPVNAFQGLCNETLTLKLYNNGFTSVQGYAFNGTKLDAVYLNKNKYLTVIDKDAFGGVYSGPSLLLPLGRKSLSFETQKAPSSSMPS

SEQ ID NO: 901568 - protein, 205 aa, Homo sapiens
MRPADLLQLVLLLDLPRDLGGMGCSSPPCECHQEEDFRVTCKDIQRIPSLPPSTQTLKLIETHLRTIPSHAFSNLPNISRIYVSIDVTLQQLESHSFYNLSKVTHIEIRNTRNLTYIDPDALKELPLLKFLGIFNTGLKMFPDLTKVYSTDIFFILEITDNPYMTSIPVNAFQGLCNETLTLKLYNNGFTSVQGYAFNGTKLDAV

SEQ ID NO: 901569 - protein, 764 aa, Homo sapiens; identical to SEQ ID NO: 901565

SEQ ID NO: 901570 - protein, 269 aa, Homo sapiens
MRPADLLQLVLLLDLPRDLGGMGCSSPPCECHQEEDFRVTCKDIQRIPSLPPSTQTLKLIETHLRTIPSHAFSNLPNISRIYVSIDVTLQQLESHSFYNLSKVTHIEIRNTRNLTYIDPDALKELPLLKFLGIFNTGLKMFPDLTKVYSTDIFFILEITDNPYMTSIPVNAFQGLCNETLTLKLYNNGFTSVQGYAFNGTKLDAVYLNKNKYLTVIDKDAFGGVYSGPSLLFLMSPWRLTAPGSVFKDSKDLKVKTSSWDTEAENSRPK

SEQ ID NO: 901571 - protein, 97 aa, Homo sapiens
APGSPLAWGNPRCRAENEAISEDGEIAPSPVENEAGGLAAAGAAARPAQGPGRNGVFVSTLRVPSGGGLQSHLQGYSTHPQLTAQYADSVSTRERSG

SEQ ID NO: 901572 - protein, 1542 aa, Homo sapiens
MFEISRLDLGLSVEVWNKGLIWDTMVGTVWIALKTIRQSDEEGPGEWSTLEAETLMKDDEICGTRNPTPHKILLDTRFELPFDIPEEEARYWTYKWEQINALGADNEYSSQEESQRKPLPTAAAQCSFEDPDSAVDDRDSDYRSETSNSFPPPYHTASQPNASVHQFPVPVRSPQQLLLQGSSRDSCNDSMQSYDLDYPERRAISPTSSSRYGSSCNVSQGSSQLSELDQYHEQDDDHRETDSIHSCHSSHSLSRDGQAGFGEQEKPLEVTGQAEKEAACEPKEMKEDATTHPPPDLVLQKDHFLGPQESFPEENASSPFTQARAHWIRAVTKVRLQLQEIPDDGDPSLPQWLPEGPAGGLYGIDSMPDLRRKKPLPLVSDLSLVQSRKAGITSAMATRTSLKDEELKSHVYKKTLQALIYPISCTTPHNFEVWTATTPTYCYECEGLLWGIARQGMRCSECGVKCHEKCQDLLNADCLQRAAEKSCKHGAEDRTQNIIMAMKDRMKIRERNKPEIFEVIRDVFTVNKAAHVQQMKTVKQSVLDGTSKWSAKITITVVCAQGLQAKDKTGSSDPYVTVQVSKTKKRTKTIFGNLNPVWEEKFHFECHNSSDRIKVRVWDEDDDIKSRVKQRLKRESDDFLGQTIIEVRTLSGEMDVWYNLEKRTDKSAVSGAIRLQISVEIKGEEKVAPYHVQYTCLHENLFHYLTDIQGSGGVRIPEARGDDAWKVYFDETAQEIVDEFAMRYGIESIYQAMTHFACLSSKYMCPGVPAVMSTLLANINAYYAHTTASTNVSASDRFAASNFGKERFVKLLDQLHNSLRIDLSTYRNNFPAGSPERLQDLKSTVDLLTSITFFRMKVQELQSPPRASQVVKDCVKACLNSTYEYIFNNCHDLYSRQYQLKQELPPEEQGPSIRNLDFWPKLITLIVSIIEEDKNSYTPVLNQFPQELNVGKVSAEVMWHLFAQDMKYALEEHEKDHLCKSADYMNLHFKVKWLHNEYVRDLPVLQGQVPEYPAWFEQFVLQWLDENEDVSLEFLRGALERDKKDGFQQTSEHALFSCSVVDVFTQLNQSFEIIRKLECPDPSILAHYMRRFAKTIGKVLMQYADILSKDFPAYCTKEKLPCILMNNVQQLRVQLEKMFEAMGGKELDLEAADSLKELQVKLNTVLDELSMVFGNSFQVRIDECVRQMADILGQVRGTGNASPDARASAAQDADSVLRPLMDFLDGNLTLFATVCEKTVLKRVLKELWRVVMNTMERMIVLPPLTDQTGTQLIFTAAKELSHLSKLKDHMVREETRNLTPKQCAVLDLALDTIKQYFHAGGNGLKKTFLEKSPDLQSLRYALSLYTQTTDTLIKTFVRSQTTQGSGVDDPVGEVSIQVDLFTHPGTGEHKVTVKVVAANDLKWQTAGMFRPFVEVTMVGPHQSDKKRKFTTKSKSNNWAPKYNETFHFLLGNEEGPESYELQICVKDYCFAREDRVLGLAVMPLRDVTAKGSCACWCPLGRKIHMDETGLTILRILSQRSNDEVAREFVKLKSESRSTEEGS

SEQ ID NO: 901573 - protein, 866 aa, Homo sapiens
RCVRNVECLLSRYSTSVVYMSPENLFHYLTDIQGSGGVRIPEARGDDAWKVYFDETAQEIVDEFAMRYGIESIYQAMTHFACLSSKYMCPGVPAVMSTLLANINAYYAHTTASTNVSASDRFAASNFGKERFVKLLDQLHNSLRIDLSTYRNNFPAGSPERLQDLKSTVDLLTSITFFRMKVQELQSPPRASQVVKDCVKACLNSTYEYIFNNCHDLYSRQYQLKQELPPEEQGPSIRNLDFWPKLITLIVSIIEEDKNSYTPVLNQFPQELNVGKVSAEVMWHLFAQDMKYALEEHEKDHLCKSADYMNLHFKVKWLHNEYVRDLPVLQGQVPEYPAWFEQFVLQWLDENEDVSLEFLRGALERDKKDGFQQTSEHALFSCSVVDVFTQLNQSFEIIRKLECPDPSILAHYMRRFAKTIGKVLMQYADILSKDFPAYCTKEKLPCILMNNVQQLRVQLEKMFEAMGGKELDLEAADSLKELQVKLNTVLDELSMVFGNSFQVRIDECVRQMADILGQVRGTGNASPDARASAAQDADSVLRPLMDFLDGNLTLFATVCEKTVLKRVLKELWRVVMNTMERMIVLPPLTDQTGTQLIFTAAKELSHLSKLKDHMVREETRNLTPKQCAVLDLALDTIKQYFHAGGNGLKKTFLEKSPDLQSLRYALSLYTQTTDTLIKTFVRSQTTQGSGVDDPVGEVSIQVDLFTHPGTGEHKVTVKVVAANDLKWQTAGMFRPFVEVTMVGPHQSDKKRKFTTKSKSNNWAPKYNETFHFLLGNEEGPESYELQICVKDYCFAREDRVLGLAVMPLRDVTAKGSCACWCPLGRKIHMDETGLTILRILSQRSNDEVAREFVKLKSESRSTEEGS

SEQ ID NO: 901574 - protein, 1543 aa, Homo sapiens
MSLLCVRVKRAKFQGSPDKFNTYVTLKVQNVKSTTVAVRGDQPSWEQDFMFEISRLDLGLSVEVWNKGLIWDTMVGTVWIALKTIRQSDEEGPGEWSTLEAETLMKDDEICGTRNPTPHKILLDTRFELPFDIPEEEARYWTYKWEQINALGADNEYSSQEESQRKPLPTAAAQCSFEDPDSAVDDRDSDYRSETSNSFPPPYHTASQPNASVHQFPVPVRSPQQLLLQGSSRDSCNDSMQSYDLDYPERRAISPTSSSRYGSSCNVSQGSSQLSELDQYHEQDDDHRETDSIHSCHSSHSLSRDGQAGFGEQEKPLEVTGQAEKEAACEPKEMKEDATTHPPPDLVLQKDHFLGPQESFPEENASSPFTQARAHWIRAVTKVRLQLQEIPDDGDPSLPQWLPEGPAGGLYGIDSMPDLRRKKPLPLVSDLSLVQSRKAGITSAMATRTSLKDEELKSHVYKKTLQALIYPISCTTPHNFEVWTATTPTYCYECEGLLWGIARQGMRCSECGVKCHEKCQDLLNADCLQRAAEKSCKHGAEDRTQNIIMAMKDRMKIRERNKPEIFEVIRDVFTVNKAAHVQQMKTVKQSVLDGTSKWSAKITITVVCAQGLQAKDKTGSSDPYVTVQVSKTKKRTKTIFGNLNPVWEEKFHFECHNSSDRIKVRVWDEDDDIKSRVKQRLKRESDDFLGQTIIEVRTLSGEMDVWYNLEKRTDKSAVSGAIRLQISVEIKGEEKVAPYHVQYTCLHENLFHYLTDIQGSGGVRIPEARGDDAWKVYFDETAQEIVDEFAMRYGIESIYQAMTHFACLSSKYMCPGVPAVMSTLLANINAYYAHTTASTNVSASDRFAASNFGKERFVKLLDQLHNSLRIDLSTYRNNFPAGSPERLQDLKSTVDLLTSITFFRMKVQELQSPPRASQVVKDCVKACLNSTYEYIFNNCHDLYSRQYQLKQELPPEEQGPSIRNLDFWPKLITLIVSIIEEDKNSYTPVLNQFPQELNVGKVSAEVMWHLFAQDMKYALEEHEKDHLCKSADYMNLHFKVKWLHNEYVRDLPVLQGQVPEYPAWFEQFVLQWLDENEDVSLEFLRGALERDKKDGTIGKVLMQYADILSKDFPAYCTKEKLPCILMNNVQQLRVQLEKMFEAMGGKELDLEAADSLKELQVKLNTVLDELSMVFGNSFQVRIDECVRQMADILGQVRGTGNASPDARASAAQDADSVLRPLMDFLDGNLTLFATVCEKTVLKRVLKELWRVVMNTMERMIVLPPLTDQTGTQLIFTAAKELSHLSKLKDHMVREETRNLTPKQCAVLDLALDTIKQYFHAGGNGLKKTFLEKSPDLQSLRYALSLYTQTTDTLIKTFVRSQTTQGSGVDDPVGEVSIQVDLFTHPGTGEHKVTVKVVAANDLKWQTAGMFRPFVEVTMVGPHQSDKKRKFTTKSKSNNWAPKYNETFHFLLGNEEGPESYELQICVKDYCFAREDRVLGLAVMPLRDVTAKGSCACWCPLGRKIHMDETGLTILRILSQRSNDEVAREFVKLKSESRSTEEGS

SEQ ID NO: 901575 - protein, 113 aa, Homo sapiens
DLQVIKDPGTSASHETFHFLLGNEEGPESYELQICVKDYCFAREDRVLGLAVMPLRDVTAKGSCACWCPLGRKIHMDETGLTILRILSQRSNDEVAREFVKLKSESRSTEEGS

SEQ ID NO: 901576 - protein, 1591 aa, Homo sapiens
MSLLCVRVKRAKFQGSPDKFNTYVTLKVQNVKSTTVAVRGDQPSWEQDFMFEISRLDLGLSVEVWNKGLIWDTMVGTVWIALKTIRQSDEEGPGEWSTLEAETLMKDDEICGTRNPTPHKILLDTRFELPFDIPEEEARYWTYKWEQINALGADNEYSSQEESQRKPLPTAAAQCSFEDPDSAVDDRDSDYRSETSNSFPPPYHTASQPNASVHQFPVPVRSPQQLLLQGSSRDSCNDSMQSYDLDYPERRAISPTSSSRYGSSCNVSQGSSQLSELDQYHEQDDDHRETDSIHSCHSSHSLSRDGQAGFGEQEKPLEVTGQAEKEAACEPKEMKEDATTHPPPDLVLQKDHFLGPQESFPEENASSPFTQARAHWIRAVTKVRLQLQEIPDDGDPSLPQWLPEGPAGGLYGIDSMPDLRRKKPLPLVSDLSLVQSRKAGITSAMATRTSLKDEELKSHVYKKTLQALIYPISCTTPHNFEVWTATTPTYCYECEGLLWGIARQGMRCSECGVKCHEKCQDLLNADCLQRAAEKSCKHGAEDRTQNIIMAMKDRMKIRERNKPEIFEVIRDVFTVNKAAHVQQMKTVKQSVLDGTSKWSAKITITVVCAQGLQAKDKTGSSDPYVTVQVSKTKKRTKTIFGNLNPVWEEKFHFECHNSSDRIKVRVWDEDDDIKSRVKQRLKRESDDFLGQTIIEVRTLSGEMDVWYNLEKRTDKSAVSGAIRLQISVEIKGEEKVAPYHVQYTCLHENLFHYLTDIQGSGGVRIPEARGDDAWKVYFDETAQEIVDEFAMRYGIESIYQAMTHFACLSSKYMCPGVPAVMSTLLANINAYYAHTTASTNVSASDRFAASNFGKERFVKLLDQLHNSLRIDLSTYRNNFPAGSPERLQDLKSTVDLLTSITFFRMKVQELQSPPRASQVVKDCVKACLNSTYEYIFNNCHDLYSRQYQLKQELPPEEQGPSIRNLDFWPKLITLIVSIIEEDKNSYTPVLNQFPQELNVGKVSAEVMWHLFAQDMKYALEEHEKDHLCKSADYMNLHFKVKWLHNEYVRDLPVLQGQVPEYPAWFEQFVLQWLDENEDVSLEFLRGALERDKKDGFQQTSEHALFSCSVVDVFTQLNQSFEIIRKLECPDPSILAHYMRRFAKTIGKVLMQYADILSKDFPAYCTKEKLPCILMNNVQQLRVQLEKMFEAMGGKELDLEAADSLKELQVKLNTVLDELSMVFGNSFQVRIDECVRQMADILGQVRGTGNASPDARASAAQDADSVLRPLMDFLDGNLTLFATVCEKTVLKRVLKELWRVVMNTMERMIVLPPLTDQTGTQLIFTAAKELSHLSKLKDHMVREETRNLTPKQCAVLDLALDTIKQYFHAGGNGLKKTFLEKSPDLQSLRYALSLYTQTTDTLIKTFVRSQTTQGSGVDDPVGEVSIQVDLFTHPGTGEHKVTVKVVAANDLKWQTAGMFRPFVEVTMVGPHQSDKKRKFTTKSKSNNWAPKYNETFHFLLGNEEGPESYELQICVKDYCFAREDRVLGLAVMPLRDVTAKGSCACWCPLGRKIHMDETGLTILRILSQRSNDEVAREFVKLKSESRSTEEGS

SEQ ID NO: 901577 - protein, 1610 aa, Homo sapiens
MSLLCVRVKRAKFQGSPDKFNTYVTLKVQNVKSTTVAVRGDQPSWEQDFMFEISRLDLGLSVEVWNKGLIWDTMVGTVWIALKTIRQSDEEGPGEWSTLEAETLMKDDEICGTRNPTPHKILLDTRFELPFDIPEEEARYWTYKWEQINALGADNEYSSQEESQRKPLPTAAAQCSFEDPDSAVDDRDSDYRSETSNSFPPPYHTASQPNASVHQFPVPVRSPQQLLLQGSSRDSCNDSMQSYDLDYPERRAISPTSSSRYGSSCNVSQGSSQLSELDQYHEQDDDHRETDSIHSCHSSHSLSRDGQAGFGEQEKPLEVTGQAEKEAACEPKEMKEDATTHPPPDLVLQKDHFLGPQESFPEENASSPFTQARAHWIRAVTKVRLQLQEIPDDGDPSLPQWLPEGPAGGLYGIDSMPDLRRKKPLPLVSDLSLVQSRKAGITSAMATRTSLKDEELKSHVYKKTLQALIYPISCTTPHNFEVWTATTPTYCYECEGLLWGIARQGMRCSECGVKCHEKCQDLLNADCLQRAAEKSCKHGAEDRTQNIIMAMKDRMKIRERNKPEIFEVIRDVFTVNKAAHVQQMKTVKQSVLDGTSKWSAKITITVVCAQGLQAKDKTGSSDPYVTVQVSKTKKRTKTIFGNLNPVWEEKFHFECHNSSDRIKVRVWDEDDDIKSRVKQRLKRESDDFLGQTIIEVRTLSGEMDVWYNLEKRTDKSAVSGAIRLQISVEIKGEEKVAPYHVQYTCLHENLFHYLTDIQGSGGVRIPEARGDDAWKVYFDETAQEIVDEFAMRYGIESIYQAMTHFACLSSKYMCPGVPAVMSTLLANINAYYAHTTASTNVSASDRFAASNFGKERFVKLLDQLHNSLRIDLSTYRNNFPAGSPERLQDLKSTVDLLTSITFFRMKVQELQSPPRASQVVKDCVKACLNSTYEYIFNNCHDLYSRQYQLKQELPPEEQGPSIRNLDFWPKLITLIVSIIEEDKNSYTPVLNQFPQELNVGKVSAEVMWHLFAQDMKYALEEHEKDHLCKSADYMNLHFKVKWLHNEYVRDLPVLQGQVPEYPAWFEQFVLQWLDENEDVSLEFLRGALERDKKDGFQQTSEHALFSCSVVDVFTQLNQSFEIIRKLECPDPSILAHYMRRFAKTIGKVLMQYADILSKDFPAYCTKEKLPCILMNNVQQLRVQLEKMFEAMGGKELDLEAADSLKELQVKLNTVLDELSMVFGNSFQVRIDECVRQMADILGQVRGTGNASPDARASAAQDADSVLRPLMDFLDGNLTLFATVCEKTVLKRVLKELWRVVMNTMERMIVLPPLTDQTGTQLIFTAAKELSHLSKLKDHMVREETRNLTPKQCAVLDLALDTIKQYFHAGGNGLKKTFLEKSPDLQSLRYALSLYTQTTDTLIKTFVRSQTTQVHDGKGIRFTANEDIRPEKGSGVDDPVGEVSIQVDLFTHPGTGEHKVTVKVVAANDLKWQTAGMFRPFVEVTMVGPHQSDKKRKFTTKSKSNNWAPKYNETFHFLLGNEEGPESYELQICVKDYCFAREDRVLGLAVMPLRDVTAKGSCACWCPLGRKIHMDETGLTILRILSQRSNDEVAREFVKLKSESRSTEEGS

SEQ ID NO: 901578 - protein, 1591 aa, Homo sapiens; identical to SEQ ID NO: 901576

SEQ ID NO: 901579 - protein, 197 aa, Homo sapiens
GGCWGLRGRKVTVRKVCVHRALGFSFFISNMEETYTDSLDPEKLLQCPYDKNHQIRACRFPYHLIKCRKNHPDVASKLATCPFNARHQVPRAEISHHISSCDDRSCIEQDVVNQTRSLRQETLAESTWQCPPCDEDWDKDLWEQTSTPFVWGTTHYSDNNSPASNIVTEHKNNLASGMRVPKSLPYVLPWKNNGNAQ

SEQ ID NO: 901580 - protein, 120 aa, Homo sapiens
GEEGVCPPSTWIQLLHFQHGRNLQIILMLQANWLLVPSMLATRFLELKLVIISQAVMTEVVLSKMLSTKPGALDKRLWLRALGSALLAMKTGIKICGSRPAPHLSGAQLTTLTTTALRAT

SEQ ID NO: 901581 - protein, 197 aa, Homo sapiens; identical to SEQ ID NO: 901579

SEQ ID NO: 901582 - protein, 140 aa, Homo sapiens
RELTDPLILVPQNHPDVASKLATCPFNARHQVPRAEISHHISSCDDRSCIEQDVVNQTRSLRQETLAESTWQCPPCDEDWDKDLWEQTSTPFVWGTTHYSDNNSPASNIVTEHKNNLASGMRVPKSLPYVLPWKNNGNAQ

SEQ ID NO: 901583 - protein, 112 aa, Homo sapiens
RLLGLAWEEGDCEEGVCPPSTWIQLLHFQHGRNLQFLELKLVIISQAVMTEVVLSKMLSTKPGALDKRLWLRALGSALLAMKTGIKICGSRPAPHLSGAQLTTLTTTALRAT

SEQ ID NO: 901584 - protein, 197 aa, Homo sapiens; identical to SEQ ID NO: 901579

SEQ ID NO: 901585 - protein, 196 aa, Homo sapiens
GGCWGLRGRKVTVRKVCVHRALGFSFFISNMEETYTDSLDPEKLLQCPYDKNHQIRACRFPYHLIKCRKNHPDVASKLATCPFNARHQVPRAEISHHISSCDDRSCIEQDVVNQTRSLRQETLAESTWQCPPCDEDWDKDLWEQTSTPFVWGTTHYSDNNSPASNIVTEHKNNLASGMRVPKSLPYVLPWKNNARP

SEQ ID NO: 901586 - protein, 166 aa, Homo sapiens
MASGVTVNDEVIKVFNDMKVRKSSTQEEIKKRKKAVLFCLSDDKRQIIVEEAKQILVGDIGDTVEDPYTSFVKLLPLNDCRYALYDATYETKESKKEDLVFIFWAPESAPLKSKMIYASSKDAIKKKFTGIKHEWQVNGLDDIKDRSTLGEKLGGNVVVSLEGKPL

SEQ ID NO: 901587 - protein, 166 aa, Homo sapiens; identical to SEQ ID NO: 901586

SEQ ID NO: 901588 - protein, 219 aa, Homo sapiens
RCLGPPSPATSLGLQLPACPALSAAHPLARPSFSSQCHRAEARAAAAATAEGTMASGVTVNDEVIKVFNDMKVRKSSTQEEIKKRKKAVLFCLSDDKRQIIVEEAKQILVGDIGDTVEDPYTSFVKLLPLNDCRYALYDATYETKESKKEDLVFIFWAPESAPLKSKMIYASSKDAIKKKFTGIKHEWQVNGLDDIKDRSTLGEKLGGNVVVSLEGKPL

SEQ ID NO: 901589 - protein, 219 aa, Homo sapiens; identical to SEQ ID NO: 901588

SEQ ID NO: 901590 - protein, 219 aa, Homo sapiens; identical to SEQ ID NO: 901588

SEQ ID NO: 901591 - protein, 219 aa, Homo sapiens; identical to SEQ ID NO: 901588

SEQ ID NO: 901592 - protein, 219 aa, Homo sapiens; identical to SEQ ID NO: 901588

SEQ ID NO: 901593 - protein, 171 aa, Homo sapiens
RCLGPPSPATSLGLQLPACPALSAAHPLARPSFSSQCHRAEARAAAAATAEGTMASGVTVNDEVIKVFNDMKVRKSSTQEEIKKRKKAVLFCLSDDKRQIIVEEAKQILAPESAPLKSKMIYASSKDAIKKKFTGIKHEWQVNGLDDIKDRSTLGEKLGGNVVVSLEGKPL

SEQ ID NO: 901594 - protein, 219 aa, Homo sapiens; identical to SEQ ID NO: 901588

SEQ ID NO: 901595 - protein, 137 aa, Homo sapiens
RCLGPPSPATSLGLQLPACPALSAAHPLARPSFSSQCHRAEARAAAAATAEGTMASGVTVNDEVIKVFNDMKVRKAPESAPLKSKMIYASSKDAIKKKFTGIKHEWQVNGLDDIKDRSTLGEKLGGNVVVSLEGKPL

SEQ ID NO: 901596 - protein, 219 aa, Homo sapiens; identical to SEQ ID NO: 901588

SEQ ID NO: 901597 - protein, 149 aa, Homo sapiens
MKVRKSSTQEEIKKRKKAVLFCLSDDKRQIIVEEAKQILVGDIGDTVEDPYTSFVKLLPLNDCRYALYDATYETKESKKEDLVFIFWAPESAPLKSKMIYASSKDAIKKKFTGIKHEWQVNGLDDIKDRSTLGEKLGGNVVVSLEGKPL

SEQ ID NO: 901598 - protein, 155 aa, Homo sapiens
MAVLEDPNQFTSSTQEEIKKRKKAVLFCLSDDKRQIIVEEAKQILVGDIGDTVEDPYTSFVKLLPLNDCRYALYDATYETKESKKEDLVFIFWAPESAPLKSKMIYASSKDAIKKKFTGIKHEWQVNGLDDIKDRSTLGEKLGGNVVVSLEGKPL

SEQ ID NO: 901599 - protein, 137 aa, Homo sapiens; identical to SEQ ID NO: 901595

SEQ ID NO: 901600 - protein, 219 aa, Homo sapiens; identical to SEQ ID NO: 901588

SEQ ID NO: 901601 - protein, 165 aa, Homo sapiens
ARALPARAGSSDCGGIRDGGRAGHHGTGRHRAWRMMNFRQRMGWIGVGLYLLASAAAFYYVFEISETYNRLALEHIQQHPEEPLEGTTWTHSLKAQLLSLPFWVWTVIFLVPYLQMFLFLYSCTRADPKTVGYCIIPICLAVICNRHQAFVKASNQISRLQLIDT

SEQ ID NO: 901602 - protein, 163 aa, Homo sapiens
MPKPPDYSELSDSLTLAVGTGRFSGPLHRAWRMMNFRQRMGWIGVGLYLLASAAAFYYVFEISETYNRLALEHIQQHPEEPLEGTTWTHSLKAQLLSLPFWVWTVIFLVPYLQMFLFLYSCTRADPKTVGYCIIPICLAVICNRHQAFVKASNQISRLQLIDT

SEQ ID NO: 901603 - protein, 199 aa, Homo sapiens
PYTTYKLRVVAHNEVGSTASEWISFTTQKELPQYRAPFSVDSNLSVVCVNWSDTFLLNGQLKEYVLTDGGRRVYSGLDTTLYIPRTADKTFFFQVICTTDEGSVKTPLIQYDTSTGLGLVLTTPGKKKGSRSKSTEFYSELWFIVLMAMLGLILLAIFLSLILQRKIHKEPYIRERPPLVPLQKRMSPLNVYPPGENHM

SEQ ID NO: 901604 - protein, 112 aa, Homo sapiens
SVLEYPSYLRVPGFPHHLTQVPLKSLPDGSAWSAVRQGGWNHFWALWSFPLCSSTSSLQRCSDLCLGRKVEIRMSHGVPWATVALHGNNLLEQGVSSLLGIYPFLEEKPIPP

SEQ ID NO: 901605 - protein, 130 aa, Homo sapiens
MCQGGITTSLRQSQPSPQSQRRLCPAQSSQAFPHHLTQVPLKSLPDGSAWSAVRQGGWNHFWALWSFPLCSSTSSLQRCSDLCLGRKVEIRMSHGVPWATVALHGNNLLEQGVSSLLGIYPFLEEKPIPP

SEQ ID NO: 901606 - protein, 112 aa, Homo sapiens; identical to SEQ ID NO: 901604

SEQ ID NO: 901607 - protein, 452 aa, Homo sapiens
MLIVKQHPQLFCVVSLTPPWKKKKNYGILKTAYDVREKITNSLRVGLFHTHKPIYNIQSNLLTHINIPSYPINCQIINTFIEHLLCVGCKQYWGLTVIKDIVLALSDDCFTEEMEYKKPSNLWNSLLCFSFFFLAVESCSLNESKASLELLGSCGPPALAFSVAGTTGVNTAWKSLNHEELSLKILVIQVVGNLKLYLKNRIREFEIVHKSAKGCINTYFTFTIINFDSKFEYSTLFICGNFRLSPITLISVRHYKYKWAYTFVFALLTNNTQLGGFFFLSILPLNVQHFSDFVIVRLFNSFLEDSIETVIYVTLNSLAFLGTYRYMMVALPVVNSCQNIGFQCLLHMAFSLSTEGCRSLFLRSEPLFLYFLYSFLSLLYKNYACSIVFLFDSLSFIIPSRSDLLFSYVRKADLLVEEKIHPSKSACLIIFEGDLKCGKDCYIRQPNDDMRQ

SEQ ID NO: 901608 - protein, 452 aa, Homo sapiens; identical to SEQ ID NO: 901607

SEQ ID NO: 901609 - protein, 78 aa, Homo sapiens
  misc_feature (1)..(1): Xaa can be any naturally occurring amino acid
  misc_feature (14)..(14): Xaa can be any naturally occurring amino acid
  misc_feature (23)..(23): Xaa can be any naturally occurring amino acid
XVPWKQSLVSLPTXQSSKKHYSXLSQMSTEKYNTYEESSKNYQIVTNLYTHAQVSLSICGALVLGPLMDTNIYGCSSP

SEQ ID NO: 901610 - protein, 109 aa, Homo sapiens
VPEVPSLLPGLRGRGLLTSFVLAPPRPSTRFGPCLVLSVCSYGSEYVCDGPRVTRGLGPLPTLRLASRAVELARAPSPTSASPVRPSLVVGRSSWSLSCAPPHAAGLRV

SEQ ID NO: 901611 - protein, 73 aa, Homo sapiens
SRKCLLSSRVCADAASLPHLSSPLPVPLRVLVPVWCFLFAATAVSISGHRNQSETIASAIKTIVHHGGTHGYL

SEQ ID NO: 901612 - protein, 140 aa, Homo sapiens
MTSMTQSLREVIKAMTKARNFERVLGKITLVSAAPGKVICEMKVEEEHTNAIGTLHGGLTATLVDNISTMALLCTERGAPGVSVDMNITYMSPAKLGEDIVITAHVLKQGKTLAFTSVDLTNKATGKLIAQGRHTKHLGN

SEQ ID NO: 901613 - protein, 218 aa, Homo sapiens
MDNHGPNPAVTYRDLGPSRLSPDFSAAPKSGQKGADSSALCATTFFSTIFLGGFSTLCPFTMAYFSISLHSALDQPSTMTSMTQSLREVIKAMTKARNFERVLGKITLVSAAPGKVICEMKVEEEHTNAIGTLHGGLTATLVDNISTMALLCTERGAPGVSVDMNITYMSPAKLGEDIVITAHVLKQGKTLAFTSVDLTNKATGKLIAQGRHTKHLGN

SEQ ID NO: 901614 - protein, 117 aa, Homo sapiens
MVRKITLVSAAPGKVICEMKVEEEHTNAIGTLHGGLTATLVDNISTMALLCTERGAPGVSVDMNITYMSPAKLGEDIVITAHVLKQGKTLAFTSVDLTNKATGKLIAQGRHTKHLGN

SEQ ID NO: 901615 - protein, 140 aa, Homo sapiens; identical to SEQ ID NO: 901612

SEQ ID NO: 901616 - protein, 124 aa, Homo sapiens
MTQSLREVIKAMTKARNFERVLGKITLVSAAPGKVICEMKVEEEHTNAIGTLHGGLTATLVDNISTMALLCTERGAPDSKYNLLSGSRFAHREVKSICDFSTSFSSRILLRPNGMSLFKHVRSY

SEQ ID NO: 901617 - protein, 126 aa, Homo sapiens [sequence omitted]

SEQ ID NO: 901618 - protein, 140 aa, Homo sapiens; identical to SEQ ID NO: 901612

SEQ ID NO: 901619 - protein, 140 aa, Homo sapiens; identical to SEQ ID NO: 901612

SEQ ID NO: 901620 - protein, 140 aa, Homo sapiens; identical to SEQ ID NO: 901612

SEQ ID NO: 901621 - protein, 563 aa, Homo sapiens
ASGGARRLPGGSGLGAQSGRGSPAPAAMDEERALYIVRAGEAGAIERVLRDYSDKHRATFKFESTDEDKRKKLCEGIFKVLIKDIPTTCQVSCLEVLRILSRDKKVLVPVTTKENMQILLRLAKLNELDDSLEKVSEFPVIVESLKCLCNIVFNSQMAQQLSLELNLAAKLCNLLRKCKDRKFINDIKCFDLRLLFLLSLLHTDIRSQLRYELQGLPLLTQILESAFSIKWTDEYESAIDHNGPPLSPQETDCAIEALKALFNVTVDSWKVHKESDSHQFRVMAAVLRHCLLIVGPTEDKTEELHSNAVNLLSNVPVSCLDVLICPLTHEETAQEATTLDELPSNKTAEKETVLKNNTMVYNGMNMEAIHVLLNFMEKRIDKGSSYREGLTPVLSLLTECSRAHRNIRKFLKDQVLPPLRDVTNRPEVGSTVRNKLVRLMTHVDLGVKQIAAEFLFVLCKERVDSLLKYTGYGNAAGLLAARGLLAGGRGDNWYSEDEDTDTEEYKNAKPNINLITGHLEEPMPNPIDEMTEEQKEYEAMKLVNMLDKLSRRADVKDLHQDGG

SEQ ID NO: 901622 - protein, 547 aa, Homo sapiens
ASGGARRLPGGSGLGAQSGRGSPAPAAMDEERALYIVRAGEAGAIERVLRDYSDKHRATFKFESTDEDKRKKLCEGIFKVLIKDIPTTCQVSCLEVLRILSRDKKVLVPVTTKENMQILLRLAKLNELDDSLEKVSEFPVIVESLKCLCNIVFNSQMAQQLSLELNLAAKLCNLLRKCKDRKFINDIKCFDLRLLFLLSLLHTDIRSQLRYELQGLPLLTQILESAFSIKWTDEYESAIDHNGPPLSPQETDCAIEALKALFNVTVDSWKVHKESDSHQFRVMAAVLRHCLLIVGPTEDKTEELHSNAVNLLSNVPVSCLDVLICPLTHEETAQEATTLDELPSNKTAEKETVLKNNTMVYNGMNMEAIHVLLNFMEKRIDKGSSYREGLTPVLSLLTECSRAHRNIRKFLKDQVLPPLRDVTNRPEVGSTVRNKLVRLMTHVDLGVKQIAAEFLFVLCKERVDSLLKYTGYGNAAGLLAARGLLAGGRGDNWYSEDEDTDTEEYKNAKPKEELLKPMGLKPDGTITPLEEALNQYSVIEETSSDTD

SEQ ID NO: 901623 - protein, 496 aa, Homo sapiens
MLASKLCEGIFKVLIKDIPTTCQVSCLEVLRILSRDKKVLVPVTTKENMQILLRLAKLNELDDSLEKVSEFPVIVESLKCLCNIVFNSQMAQQLSLELNLAAKLCNLLRKCKDRKFINDIKCFDLRLLFLLSLLHTDIRSQLRYELQGLPLLTQILESAFSIKWTDEYESAIDHNGPPLSPQETDCAIEALKALFNVTVDSWKVHKESDSHQFRVMAAVLRHCLLIVGPTEDKTEELHSNAVNLLSNVPVSCLDVLICPLTHEETAQEATTLDELPSNKTAEKETVLKNNTMVYNGMNMEAIHVLLNFMEKRIDKGSSYREGLTPVLSLLTECSRAHRNIRKFLKDQVLPPLRDVTNRPEVGSTVRNKLVRLMTHVDLGVKQIAAEFLFVLCKERVDSLLKYTGYGNAAGLLAARGLLAGGRGDNWYSEDEDTDTEEYKNAKPNINLITGHLEEPMPNPIDEMTEEQKEYEAMKLVNMLDKLSRRADVKDLHQDGG

SEQ ID NO: 901624 - protein, 276 aa, Homo sapiens
ASGGARRLPGGSGLGAQSGRGSPAPAAMDEERALYIVRAGEAGAIERVLRDYSDKHRATFKFESTDEDKRKKLCEGIFKVLIKDIPTTCQVSCLEVLRILSRDKKVLVPVTTKENMQILLRLAKLNELDDSLEKVSEFPVIVESLKCLCNIVFNSQMAQQLSLELNLAAKLCNLLRKCKDRKFINDIKCFDLRLLFLLSLLHTDIRSQLRYELQGLPLLTQILESAFSIKWTDEYESAIDHNGPPLSPQETDCAIEALKALFNVTVDSWKVHKEVR

SEQ ID NO: 901625 - protein, 587 aa, Homo sapiens
ASGGARRLPGGSGLGAQSGRGSPAPAAMDEERALYIVRAGEAGAIERVLRDYSDKHRATFKFESTDEDKRKKLCEGIFKVLIKDIPTTCQVSCLEVLRILSRDKKVLVPVTTKENMQILLRLAKLNELDDSLEKVSEFPVIVESLKCLCNIVFNSQMAQQLSLELNLAAKLCNLLRKCKDRKFINDIKCFDLRLLFLLSLLHTDIRSQLRYELQGLPLLTQILESAFSIKWTDEYESAIDHNGPPLSPQETDCAIEALKALFNVTVDSWKVHKESDSHQFRVMAAVLRHCLLIVGPTEDKTEELHSNAVNLLSNVPVSCLDVLICPLTHEETAQEATTLDELPSNKTAEKETVLKNNTMVYNGMNMEAIHVLLNFMEKRIDKGSSYREGLTPVLSLLTECSRAHRNIRKFLKDQVLPPLRDVTNRPEVGSTVRNKLVRLMTHVDLGVKQIAAEFLFVLCKERVDSLLKYTGYGNAAGLLAARGLLAGGRGDNWYSEDEDTDTEEYKNAKPNINLITGHLEEPMPNPIDEMTEEQKEYEAMKLVNMLDKLSREELLKPMGLKPDGTITPLEEALNQYSVIEETSSDTD

SEQ ID NO: 901626 - protein, 556 aa, Homo sapiens
ASGGARRLPGGSGLGAQSGRGSPAPAAMDEERALYIVRAGEAGAIERVLRDYSDKHRATFKFESTDEDKRKKLCEGIFKVLIKDIPTTCQVSCLEVLRILSRDKKVLVPVTTKENMQILLRLAKLNELDDSLEKVSEFPVIVESLKCLCNIVFNSQMAQQLSLELNLAAKLCNLLRKCKDRKFINDIKCFDLRLLFLLSLLHTDIRSQLRYELQGLPLLTQILESAFSIKWTDEYESAIDHNGPPLSPQETDCAIEALKALFNVTVDSWKVHKESDSHQFRVMAAVLRHCLLIVGPTEDKTEELHSNAVNLLSNVPVSCLDVLICPLTHEETAQEATTLDELPSNKTAEKETVLKNNTMVYNGMNMEAIHVLLNFMEKRIDKGSSYREGLTPVLSLLTECSRAHRNIRKFLKDQVLPPLRDVTNRPEVGSTVRNKLVRLMTHVDLGVKQIAAEFLFVLCKERVDSLLKYTGYGNAAGLLAARGLLAGGRGDNWYSEDEDTDTEEYKNAKPNINLITGHLEEPMPNPIDEMTEEQKEYEAMKLVNMLDKLSRGIHIF

SEQ ID NO: 901627 - protein, 519 aa, Homo sapiens
ASGGARRLPGGSGLGAQSGRGSPAPAAMDEERALYIVRAGEAGAIERVLRDYSDKHRATFKFESTDEDKRKKLCEGIFKVLIKDIPTTCQVSCLEVLRILSRDKKVLVPVTTKENMQILLRLAKLNELDDSLEKVSEFPVIVESLKCLCNIVFNSQMAQQLSLELNLAAKLCNLLRKCKDRKFINDIKCFDLRLLFLLSLLHTDIRSQLRYELQGLPLLTQILESAFSIKWTDEYESAIDHNGPPLSPQETDCAIEALKALFNVTVDSWKVHKESDSHQFRVMAAVLRHCLLIVGPTEDKTEELHSNAVNLLSNVPVSCLDVLICPLTHEETAQEATTLDELPSNKTAEKETVLKNNTMVYNGMNMEAIHVLLNFMEKRIDKGSSYREGLTPVLSLLTECSRAHRNIRKFLKDQVLPPLRDVTNRPEVGSTVRNKLVRLMTHVDLGVKQIAAEFLFVLCKERVDSLLKYTGYGNAAGLLAARGLLAGGRGDNWYSEDEDTDTEEYKNAKPKYSIKFLFT

SEQ ID NO: 901628 - protein, 113 aa, Homo sapiens
PEGPAPPFSAGNGAAPRSSSPAMAFTFAAFCYMLALLLTAALIFFAIWHIIAFDELKTDYKNPIDQCNTLNPLVLPEYLIHAFFCVMFLCAAEWLTLGLNMPLCGISYLEVYE

SEQ ID NO: 901629 - protein, 118 aa, Homo sapiens
ALVVDEAGVDGEQAHKQEQVRPLKKVCQISLFAAFCYMLALLLTAALIFFAIWHIIAFDELKTDYKNPIDQCNTLNPLVLPEYLIHAFFCVMFLCAAEWLTLGLNMPLCGISYLEVYE

SEQ ID NO: 901630 - protein, 113 aa, Homo sapiens; identical to SEQ ID NO: 901628

SEQ ID NO: 901631 - protein, 113 aa, Homo sapiens; identical to SEQ ID NO: 901628

SEQ ID NO: 901632 - protein, 129 aa, Homo sapiens
PEGPAPPFSAGNGAAPRSSSPAMAFTFAAFCYMLALLLTAALIFFAIWHIIAFDELKTDYKNPIDQCNTLNPTVEKVKKIKRVKIALKLVLPEYLIHAFFCVMFLCAAEWLTLGLNMPLCGISYLEVYE

SEQ ID NO: 901633 - protein, 90 aa, Homo sapiens
PEGPAPPFSAGNGAAPRSSSPAMAFTFAAFCYMLALLLTAALIFFAIWHLVLPEYLIHAFFCVMFLCAAEWLTLGLNMPLCGISYLEVYE

SEQ ID NO: 901634 - protein, 108 aa, Homo sapiens
MCWLRCCLQRARRLVQYCTYVHLWYIILSIYEGRVRDLSYDEVLIYTMVDNSAWISSTLVSSLRKIARSYTTTSSYHVVYSAPCGGAEWLTLGLNMPLCGISYLEVYE

SEQ ID NO: 901635 - protein, 113 aa, Homo sapiens; identical to SEQ ID NO: 901628

SEQ ID NO: 901636 - protein, 113 aa, Homo sapiens; identical to SEQ ID NO: 901628

SEQ ID NO: 901637 - protein, 147 aa, Homo sapiens
MGDLEIPHYSLYSQSTSSTLSSVSCFFVQQSGLHWVSICPSVAYHIWRYMSRPVMSGPGLYDPTTIMNADILAYCQKEGWCKLAFYLLAFFYYLYGDLEIPHTEYSGLIELTPEVIVNLASPAVSSLKVRLIFKIVSPGPSIAPNSK

SEQ ID NO: 901638 - protein, 113 aa, Homo sapiens; identical to SEQ ID NO: 901628

SEQ ID NO: 901639 - protein, 70 aa, Homo sapiens
TQRALRRLSPLATAPLPAPPPQPWRSRSRPSATCWRCCSLPRSSSSPFGTIKRNLDKQLKLFFYSEDYFE

SEQ ID NO: 901640 - protein, 75 aa, Homo sapiens
PEGPAPPFSAGNGAAPRSSSPAMAFTFAAFCYMLALLLTAALIFFAIWHIIAFDELKTDYKNPIDQCNTLNPVYE

SEQ ID NO: 901641 - protein, 150 aa, Homo sapiens
PEGPAPPFSAGNGAAPRSSSPAMAFTFAAFCYMLALLLTAALIFFAIWHIIAFDELKTDYKNPIDQCNTLNPLVLPEYLIHAFFCVMFLCAAEWLTLGLNMPLCGISYLEHDLCFGELLEQHTEECGPVKCMQKKPPNEGILSSKDPVQE

SEQ ID NO: 901642 - protein, 274 aa, Homo sapiens
WKSCGGQKAEPLLGDGGISFAMAAGPISERNQDATVYVGGLDEKVSEPLLWELFLQAGPVVNTHMPKDRVTGQHQGYGFVEFLSEEDADYAIKIMNMIKLYGKPIRVNKASAHNKNLDVGANIFIGNLDPEIDEKLLYDTFSAFGVILQTPKIMRDPDTGNSKGYAFINFASFDASDAAIEAMNGQYLCNRPITVSYAFKKDSKGERHGSAAERLLAAQNPLSQADRPHQLFADAPPPPSAPNPVVSSLGSGLPPPGMPLWVLFPPGASGAPVP

SEQ ID NO: 901643 - protein, 424 aa, Homo sapiens
MAAGPISERNQDATVYVGGLDEKVSEPLLWELFLQAGPVVNTHMPKDRVTGQHQGYGFVEFLSEEDADYAIKIMNMIKLYGKPIRVNKASAHNKNLDVGANIFIGNLDPEIDEKLLYDTFSAFGVILQTPKIMRDPDTGNSKGYAFINFASFDASDAAIEAMNGQYLCNRPITVSYAFKKDSKGERHGSAAERLLAAQNPLSQADRPHQLFADAPPPPSAPNPVVSSLGSGLPPPGMPPPGSFPPPVPPPGALPPGIPPAMPPPPMPPGAAGHGPPSAGTPGAGHPGHGHSHPHPFPPGGMPHPGMSQMQLAHHGPHGLGHPHAGPPGSGGQPPPRPPPGMPHPGPPPMGMPPRGPPFGSPMGHPGPMPPHGMRGPPPLMPPHGYTGPPRPPPYGYQRGPLPPPRPTPRPPVPPRGPLRGPLPQ

SEQ ID NO: 901644 - protein, 441 aa, Homo sapiens
TQTASRAAFKSGRGSFRHGCGPISERNQDATVYVGGLDEKVSEPLLWELFLQAGPVVNTHMPKDRVTGQHQGYGFVEFLSEEDADYAIKIMNMIKLYGKPIRVNKASAHNKNLDVGANIFIGNLDPEIDEKLLYDTFSAFGVILQTPKIMRDPDTGNSKGYAFINFASFDASDAAIEAMNGQYLCNRPITVSYAFKKDSKGERHGSAAERLLAAQNPLSQADRPHQLFADAPPPPSAPNPVVSSLGSGLPPPGMPPPGSFPPPVPPPGALPPGIPPAMPPPPMPPGAAGHGPPSAGTPGAGHPGHGHSHPHPFPPGGMPHPGMSQMQLAHHGPHGLGHPHAGPPGSGGQPPPRPPPGMPHPGPPPMGMPPRGPPFGSPMGHPGPMPPHGMRGPPPLMPPHGYTGPPRPPPYGYQRGPLPPPRPTPRPPVPPRGPLRGPLPQ

SEQ ID NO: 901645 - protein, 372 aa, Homo sapiens
  misc_feature (335)..(335): Xaa can be any naturally occurring amino acid
  misc_feature (338)..(338): Xaa can be any naturally occurring amino acid
  misc_feature (341)..(341): Xaa can be any naturally occurring amino acid
WKSCGGQKAEPLLGDGGISFAMAAGPISERNQDATVYVGGLDEKVSEPLLWELFLQAGPVVNTHMPKDRVTGQHQGYGFVEFLSEEDADYAIKIMNMIKLYGKPIRVNKASAHNKNLDVGANIFIGNLDPEIDEKLLYDTFSAFGVILQTPKIMRDPDTGNSKGYAFINFASFDASDAAIEAMNGQYLCNRPITVSYAFKKDSKGERHGSAAERLLAAQNPLSQADRPHQLFADAPPPPSAPNPVVSSLGSGLPPPGMPPPGSFPPPVPPPGALPPGIPPAMPPPPMPPGAAGHGPPSAGTPGAGHPGHGHSHPHPFPPGGMPHPDRILDELTHXYAXNPXDPALGSSADTLMLSDSHGSPGLLIHGTVFSM

SEQ ID NO: 901646 - protein, 462 aa, Homo sapiens
WKSCGGQKAEPLLGDGGISFAMAAGPISERNQDATVYVGGLDEKVSEPLLWELFLQAGPVVNTHMPKDRVTGQHQGYGFVEFLSEEDADYAIKIMNMIKLYGKPIRVNKASAHNKNLDVGANIFIGNLDPEIDEKLLYDTFSAFGVILQTPKIMRDPDTGNSKGYAFINFASFDASDAAIEAMNGQYLCNRPITVSYAFKKDSKGERHGSAAERLLAAQNPLSQADRPHQLFADAPPPPSAPNPVVSSLGSGLPPPGMPPPGSFPPPVPPPGALPPGIPPAMPPPPMPPGAAGHGPPSAGTPGAGHPGHGHSHPHPFPPGGMPHPARPPPGMPHPGPPPMGMPPRGPPFGSPMGHPGPMPPHGMRGPPPLMPPHGYTGPPRASDHYWFNNGGLIPSTETPTSPGWTQLLTSYGPPFSRPRRSVTYQFYVGSSLRSLVYHFALQSLSSRTFPVGKRLETKWAC

SEQ ID NO: 901647 - protein, 188 aa, Homo sapiens
MPPPGSFPPPVPPPGALPPGIPPAMPPPPMPPGAAGHGPPSAGTPGAGHPGHGHSHPHPFPPGGMPHPGMSQMQLAHHGPHGLGHPHAGPPGSGGQPPPRPPPGMPHPGPPPMGMPPRGPPFGSPMGHPGPMPPHGMRGPPPLMPPHGYTGPPRPPPYGYQRGPLPPPRPTPRPPVPPRGPLRGPLPQ

SEQ ID NO: 901648 - protein, 445 aa, Homo sapiens
WKSCGGQKAEPLLGDGGISFAMAAGPISERNQDATVYVGGLDEKVSEPLLWELFLQAGPVVNTHMPKDRVTGQHQGYGFVEFLSEEDADYAIKIMNMIKLYGKPIRVNKASAHNKNLDVGANIFIGNLDPEIDEKLLYDTFSAFGVILQTPKIMRDPDTGNSKGYAFINFASFDASDAAIEAMNGQYLCNRPITVSYAFKKDSKGERHGSAAERLLAAQNPLSQADRPHQLFADAPPPPSAPNPVVSSLGSGLPPPGMPPPGSFPPPVPPPGALPPGIPPAMPPPPMPPGAAGHGPPSAGTPGAGHPGHGHSHPHPFPPGGMPHPGMSQMQLAHHGPHGLGHPHAGPPGSGGQPPPRPPPGMPHPGPPPMGMPPRGPPFGSPMGHPGPMPPHGMRGPPPLMPPHGYTGPPRPPPYGYQRGPLPPPRPTPRPPVPPRGPLRGPLPQ

SEQ ID NO: 901649 - protein, 446 aa, Homo sapiens
NYLRRRSLVCHFQSRGTCAIGLYRYLVSGAYILDATVYVGGLDEKVSEPLLWELFLQAGPVVNTHMPKDRVTGQHQGYGFVEFLSEEDADYAIKIMNMIKLYGKPIRVNKASAHNKNLDVGANIFIGNLDPEIDEKLLYDTFSAFGVILQTPKIMRDPDTGNSKGYAFINFASFDASDAAIEAMNGQYLCNRPITVSYAFKKDSKGERHGSAAERLLAAQNPLSQADRPHQLFADAPPPPSAPNPVVSSLGSGLPPPGMPPPGSFPPPVPPPGALPPGIPPAMPPPPMPPGAAGHGPPSAGTPGAGHPGHGHSHPHPFPPGGMPHPGMSQMQLAHHGPHGLGHPHAGPPGSGGQPPPRPPPGMPHPGPPPMGMPPRGPPFGSPMGHPGPMPPHGMRGPPPLMPPHGYTGPPRPPPYGYQRGPLPPPRPTPRPPVPPRGPLRGPLPQ

SEQ ID NO: 901650 - protein, 470 aa, Homo sapiens
MEHVYYVANVFSQLGYETKTIPHCSNMLKKSSEGEEMDAQLSHQWMLLEWPISERNQDATVYVGGLDEKVSEPLLWELFLQAGPVVNTHMPKDRVTGQHQGYGFVEFLSEEDADYAIKIMNMIKLYGKPIRVNKASAHNKNLDVGANIFIGNLDPEIDEKLLYDTFSAFGVILQTPKIMRDPDTGNSKGYAFINFASFDASDAAIEAMNGQYLCNRPITVSYAFKKDSKGERHGSAAERLLAAQNPLSQADRPHQLFADAPPPPSAPNPVVSSLGSGLPPPGMPPPGSFPPPVPPPGALPPGIPPAMPPPPMPPGAAGHGPPSAGTPGAGHPGHGHSHPHPFPPGGMPHPGMSQMQLAHHGPHGLGHPHAGPPGSGGQPPPRPPPGMPHPGPPPMGMPPRGPPFGSPMGHPGPMPPHGMRGPPPLMPPHGYTGPPRPPPYGYQRGPLPPPRPTPRPPVPPRGPLRGPLPQ

SEQ ID NO: 901651 - protein, 305 aa, Homo sapiens
MAAGPISERNQDATVYVGGLDEKVSEPLLWELFLQAGPVVNTHMPKDRVTGQHQGYGFVEFLSEEDADYAIKIMNMIKLYGKPIRVNKASLFADAPPPPSAPNPVVSSLGSGLPPPGMPPPGSFPPPVPPPGALPPGIPPAMPPPPMPPGAAGHGPPSAGTPGAGHPGHGHSHPHPFPPGGMPHPGMSQMQLAHHGPHGLGHPHAGPPGSGGQPPPRPPPGMPHPGPPPMGMPPRGPPFGSPMGHPGPMPPHGMRGPPPLMPPHGYTGPPRPPPYGYQRGPLPPPRPTPRPPVPPRGPLRGPLPQ

SEQ ID NO: 901652 - protein, 119 aa, Homo sapiens
RRGVRAPGPGAGARHHPLRQGKARFPQFLGRPPSIRGLGHLRSQRDAQGGTLGGILIVIRRFHARAVGGTAGISRRRVSRAFAGGLNGLEAKTLGVGATGSAMGANEDVGLWVQHPTVL

SEQ ID NO: 901653 - protein, 409 aa, Homo sapiens
RSMDAEGPAGRARRVSGEPQQSGDGSLSPQAEAIEVAAGESAGRSPGELAWDAAEEAEVPGVKGSEEAAPGDARADAGEDRVGDGPQQEPGEDEERRERSPEGPREEEAAGGEEESPDSSPHGEASRGAAEPEAQLSNHLAEEGPAEGSGEAARVNGRREDGEASEPRALGQEHDITLFVKAGYDGESIGNCPFSQRLFMILWLKGVIFNVTTVDLKRKPADLQNLAPGTNPPFMTFDGEVKTDVNKIEEFLEEKLAPPRYPKLGTQHPESNSAGNDVFAKFSAFIKNTKKDANEIHEKNLLKALRKLDNYLNSPLPDEIDAYSTEDVTVSGRKFLDGDELTLADCNLLPKLHIIKIVAKKYRDFEFPSEMTGIWRYLNNAYARDEFTNTCPADQEIEHAYSDVAKRMK

SEQ ID NO: 901654 - protein, 437 aa, Homo sapiens
SLQIKFRKDSEFWTPGKPMAMRLILFFGALFGHIYCLETFVGDQVLEIVPSNEEQIKNLLQLEAQEHLQLDFWKSPTTPGETAHVRVPFVNVQAVKVFLESQGIAYSIMIEDVQVLLDKENEEMLFNRRRERSGNFNFGAYHTLEEISQEMDNLVAEHPGLVSKVNIGSSFENRPMNVLKFSTGGDKPAIWLDAGIHAREWVTQATALWTANKIVSDYGKDPSITSILDALDIFLLPVTNPDGYVFSQTKNRMWRKTRSKVSGSLCVGVDPNRNWDAGFGGPGASSNPCSDSYHGPSANSEVEVKSIVDFIKSHGKVKAFITLHSYSQLLMFPYGYKCTKLDDFDELSEVAQKAAQSLRSLHGTKYKVGPICSVIYQASGGSIDWSYDYGIKYSFAFELRDTGRYGFLLPARQILPTAEETWLGLKAIMEHVRDHPY

SEQ ID NO: 901655 - protein, 412 aa, Homo sapiens
SLQIKFRKDSEFWTPGKPMAMRLILFFGALFGHIYCLETFVGDQVLEIVPSNEEQIKNLLQLEAQEHLQLDFWKSPTTPGETAHVRVPFVNVQAVKVFLESQGIAYSIMIEDVQVLLDKENEEMLFNRRRERSGNFNFGAYHTLEEISQEMDNLVAEHPGLVSKVNIGSSFENRPMNVLKFSTGGDKPAIWLDAGIHAREWVTQATALWTANKIVSDYGKDPSITSILDALDIFLLPVTNPDGYVFSQTKNRMWRKTRSKVSGSLCVGVDPNRNWDAGFGGPGASSNPCSDSYHGPSANSEVEVKSIVDFIKSHGKVKAFITLHSYSQLLMFPYGYKCTKYKVGPICSVIYQASGGSIDWSYDYGIKYSFAFELRDTGRYGFLLPARQILPTAEETWLGLKAIMEHVRDHPY

SEQ ID NO: 901656 - protein, 299 aa, Homo sapiens
IYSLETFQISQEMDNLVAEHPGLVSKVNIGSSFENRPMNVLKFSTGGDKPAIWLDAGIHAREWVTQATALWTANKIVSDYGKDPSITSILDALDIFLLPVTNPDGYVFSQTKNRMWRKTRSKVSGSLCVGVDPNRNWDAGFGGPGASSNPCSDSYHGPSANSEVEVKSIVDFIKSHGKVKAFITLHSYSQLLMFPYGYKCTKLDDFDELSEVAQKAAQSLRSLHGTKYKVGPICSVIYQASGGSIDWSYDYGIKYSFAFELRDTGRYGFLLPARQILPTAEETWLGLKAIMEHVRDHPY

SEQ ID NO: 901657 - protein, 276 aa, Homo sapiens
SLQIKFRKDSEFWTPGKPMAMRLILFFGALFGHIYCLETFVGDQVLEIVPSNEEQIKNLLQLEAQEHLQLDFWKSPTTPGETAHVRVPFVNVQAVKVFLESQGIAYSIMIEDVQVLLDKENEEMLFNRRRERSGNFNFGAYHTLEEISQEMDNLVAEHPGLVSKVNIGSSFENRPMNVLKFSTGGDKPAIWLDAGIHAREWVTQATALWTANKIVSDYGKDPSITSILDALDIFLLPVTNPDGYVFSQTKPGFCSLLQQGPKEMCRNFKSKIKILI

SEQ ID NO: 901658 - protein, 437 aa, Homo sapiens; identical to SEQ ID NO: 901654

SEQ ID NO: 901659 - protein, 437 aa, Homo sapiens; identical to SEQ ID NO: 901654

SEQ ID NO: 901660 - protein, 362 aa, Homo sapiens
SLQIKFRKDSEFWTPGKPMAMRLILFFGALFGHIYCLETFVGDQVLEIVPSNEEQIKNLLQLEAQEHLQLDFWKSPTTPGETAHVRVPFVNVQAVKVFLESQGIAYSIMIEDVQISQEMDNLVAEHPGLVSKVNIGSSFENRPMNVLKFSTGGDKPAIWLDAGIHAREWVTQATALWTANKIVSDYGKDPSITSILDALDIFLLPVTNPDGYVFSQTKHGPSANSEVEVKSIVDFIKSHGKVKAFITLHSYSQLLMFPYGYKCTKLDDFDELSEVAQKAAQSLRSLHGTKYKVGPICSVIYQASGGSIDWSYDYGIKYSFAFELRDTGRYGFLLPARQILPTAEETWLGLKAIMEHVRDHPY

SEQ ID NO: 901661 - protein, 1128 aa, Homo sapiens
MHSLPGVVAVGYINEAIDEGNPLRTLETLLLPTANISDVDPAHAQHYQDVLYHAKSQKLGDSESVSKVLWLDEIQQAVDEANVDEDRAKQWVTLVVDVNQCLEGKKSSDILSVLKSSTSNANDIIPECADKYYDALVKAKELKSERVSSDGSWLKLNLHKKYDYYYNTDSKESSWVTPESCLYKESWLTGKEIEDIIEEVTVGYIRENIWSASEELLLRFQATSSGPILREEFEARKSFLHEQEENVVKIQAFWKGYKQRKEYMHRRQTFIDNTDSIVKIQSWFRMATARKSYLSRLQYFRDHNNEIVKIQSLLRANKARDDYKTLVGSENPPLTVIRKFVYLLDQSDLDFQEELEVARLREEVVTKIRANQQLEKDLNLMDIKIGLLVKNRITLEDVISHSKKLNKKKGGEMEILNNTDNQGIKSLSKERRKTLETYQQLFYLLQTNPLYLAKLIFQMPQNKSTKFMDTVIFTLYNYASNQREEYLLLKLFKTALEEEIKSKVDQVQDIVTGNPTVIKMVVSFNRGARGQNTLRQLLAPVVKEIIDDKSLIINTNPVEVYKAWVNQLETQTGEASKLPYDVTTEQALTYPEVKNKLEASIENLRRVTDKVLNSIISSLDLLPYGLRYIAKVLKNSIHEKFPDATEDELLKIVGNLLYYRYMNPAIVAPDGFDIIDMTAGGQINSDQRRNLGSVAKVLQHAASNKLFEGENEHLSSMNNYLSETYQEFRKYFKEACNVPEPEEKFNMDKYTDLVTVSKPVIYISIEEIISTHSLLLEHQDAIAPEKNDLLSELLGSLGEVPTVESFLGEGAVDPNDPNKANTLSQLSKTEISLVLTSKYDIEDGEAIDSRSLMIKTKKLIIDVIRNQPGNTLTEILETPATAQQEVDHATDMVSRAMIDSRTPEEMKHSQSMIEDAQLPLEQKKRKIQRNLRTLEQTGHVSSENKYQDILNEIAKDIRNQRIYRKLRKAELAKLQQTLNALNKKAAFYEEQINYYDTYIKTCLDNLKRKNTRRSIKLDGKGEPKGAKRAKPVKYTAAKLHEKGVLLDIDDLQTNQFKNVTFDIIATEDVGIFDVRSKFLGVEMEKVQLNIQDLLQMQYEGVAVMKMFDKVKVNVNLLIYLLNKKFYGK

SEQ ID NO: 901662 - protein, 1110 aa, Homo sapiens
MHSLPGVVAVGYINEAIDEGNPLRTLETLLLPTANISDVDPAHAQHYQDVLYHAKSQKLGDSESVSKVLWLDEIQQAVDEANVDEDRAKQWVTLVVDVNQCLEGKKSSDILSVLKSSTSNANDIIPECADKYYDALVKAKELKSERVSSDGSWLKLNLHKKYDYYYNTDSKESSWVTPESCLYKESWLTGKEIEDIIEEVTVGYIRENIWSASEELLLRFQATSSGPILREEFEARKSFLHEQEENVVKIQAFWKGYKQRKEYMHRRQTFIDNTDSIVKIQSWFRMATARKSYLSRLQYFRDHNNEIVKIQSLLRANKARDDYKTLVGSENPPLTVIRKFVYLLDQSDLDFQEELEVARLREEVVTKIRANQQLEKDLNLMDIKIGLLVKNRITLEDVISHSKKLNKKKGGEMEILNNTDNQGIKSLSKERRKTLETYQQLFYLLQTNPLYLAKLIFQMPQNKSTKFMDTVIFTLYNYASNQREEYLLLKLFKTALEEEIKSKVDQVQDIVTGNPTVIKMVVSFNRGARGQNTLRQLLAPVVKEIIDDKSLIINTNPVEVYKAWVNQLETQTGEASKLPYDVTTEQALTYPEVKNKLEASIENLRRVTDKVLNSIISSLDLLPYGLRYIAKVLKNSIHEKFPDATEDELLKIVGNLLYYRYMNPAIVAPDGFDIIDMTAGGQINSDQRRNLGSVAKVLQHAASNKLFEGENEHLSSMNNYLSETYQEFRKYFKEACNVPEPEEKFNMDKYTDLVTVSKPVIYISIEEIISTHSLLLEHQDAIAPEKNDFREGAVDPNDPNKANTLSQLSKTEISLVLTSKYDIEDGEAIDSRSLMIKTKKLIIDVIRNQPGNTLTEILETPATAQQEVDHATDMVSRAMIDSRTPEEMKHSQSMIEDAQLPLEQKKRKIQRNLRTLEQTGHVSSENKYQDILNEIAKDIRNQRIYRKLRKAELAKLQQTLNALNKKAAFYEEQINYYDTYIKTCLDNLKRKNTRRSIKLDGKGEPKGAKRAKPVKYTAAKLHEKGVLLDIDDLQTNQFKNVTFDIIATEDVGIFDVRSKFLGVEMEKVQLNIQDLLQMQYEGVAVMKMFDKVKVNVNLLIYLLNKKFYGK

SEQ ID NO: 901663 - protein, 820 aa, Homo sapiens
AKRVTEVDGSGCLQNNSWFGSENPPLTVIRKFVYLLDQSDLDFQEELEVARLREEVVTKIRANQQLEKDLNLMDIKIGLLVKNRITLEDVISHSKKLNKKKGGEMEILNNTDNQGIKSLSKERRKTLETYQQLFYLLQTNPLYLAKLIFQMPQNKSTKFMDTVIFTLYNYASNQREEYLLLKLFKTALEEEIKSKVDQVQDIVTGNPTVIKMVVSFNRGARGQNTLRQLLAPVVKEIIDDKSLIINTNPVEVYKAWVNQLETQTGEASKLPYDVTTEQALTYPEVKNKLEASIENLRRVTDKVLNSIISSLDLLPYGLRYIAKVLKNSIHEKFPDATEDELLKIVGNLLYYRYMNPAIVAPDGFDIIDMTAGGQINSDQRRNLGSVAKVLQHAASNKLFEGENEHLSSMNNYLSETYQEFRKYFKEACNVPEPEEKFNMDKYTDLVTVSKPVIYISIEEIISTHSLLLEHQDAIAPEKNDLLSELLGSLGEVPTVESFLGEGAVDPNDPNKANTLSQLSKTEISLVLTSKYDIEDGEAIDSRSLMIKTKKLIIDVIRNQPGNTLTEILETPATAQQEVDHATDMVSRAMIDSRTPEEMKHSQSMIEDAQLPLEQKKRKIQRNLRTLEQTGHVSSENKYQDILNEIAKDIRNQRIYRKLRKAELAKLQQTLNALNKKAAFYEEQINYYDTYIKTCLDNLKRKNTRRSIKLDGKGEPKGAKRAKPVKYTAAKLHEKGVLLDIDDLQTNQFKNVTFDIIATEDVGIFDVRSKFLGVEMEKVQLNIQDLLQMQYEGVAVMKMFDKVKVNVNLLIYLLNKKFYGK

SEQ ID NO: 901664 - protein, 1128 aa, Homo sapiens; identical to SEQ ID NO: 901661

SEQ ID NO: 901665 - protein, 1128 aa, Homo sapiens; identical to SEQ ID NO: 901661

SEQ ID NO: 901666 - protein, 791 aa, Homo sapiens
MHSLPGVVAVGYINEAIDEGNPLRTLETLLLPTANISDVDPAHAQHYQDVLYHAKSQKLGDSESVSKVLWLDEIQQAVDEANVDEDRAKQWVTLVVDVNQCLEGKKSSDILSVLKSSTSNANDIIPECADKYYDALVKAKELKSERVSSDGSWLKLNLHKKYDYYYNTDSKESSWVTPESCLYKESWLTGKEIEDIIEEVTVGYIRENIWSASEELLLRFQATSSGPILREEFEARKSFLHEQEENVVKIQAFWKGYKQRKEYMHRRQTFIDNTDSIVKIQSWFRMATARKSYLSRLQYFRDHNNEIVKIQSLLRANKARDDYKTLVGSENPPLTVIRKFVYLLDQSDLDFQEELEVARLREEVVTKIRANQQLEKDLNLMDIKIGLLVKNRITLEDVISHSKKLNKKKGGEMEILNNTDNQGIKSLSKERRKTLETYQQLFYLLQTNPLYLAKLIFQMPQNKSTKFMDTVIFTLYNYASNQREEYLLLKLFKTALEEEIKSKVDQVQDIVTGNPTVIKMVVSFNRGARGQNTLRQLLAPVVKEIIDDKSLIINTNPVEVYKAWVNQLETQTGEASKLPYDVTTEQALTYPEVKNKLEASIENLRRVTDKVLNSIISSLDLLPYGLRYIAKVLKNSIHEKFPDATEDELLKIVGNLLYYRYMNPAIVAPDGFDIIDMTAGGQINSDQRRNLGSVAKVLQHAASNKLFEGENEHLSSMNNYLSETYQEFRKYFKEACNVPEPEEKFNMDKYTDLVTVSKPVIYISIEEIISTHSLLLEHQDAIAPEKNDLSE

SEQ ID NO: 901667 - protein, 400 aa, Homo sapiens
MHSLPGVVAVGYINEAIDEGNPLRTLETLLLPTANISDVDPAHAQHYQDVLYHAKSQKLGDSESVSKVLWLDEIQQAVDEANVDEDRAKQWVTLVVDVNQCLEGKKSSDILSVLKSSTSNANDIIPECADKYYDALVKAKELKSERVSSDGSWLKLNLHKKYDYYYNTDSKESSWVTPESCLYKESWLTGKEIEDIIEEVTVGYIRENIWSASEELLLRFQATSSGPILREEFEARKSFLHEQEENVVKIQAFWKGYKQRKEYMHRRQTFIDNTDSIVKIQSWFRMATARKSYLSRLQYFRDHNNEIVKIQSLLRANKARDDYKTLVGSENPPLTVIRKFVYLLDQSDLDFQEELEVARLREEVVTKIRANQQLEKDLNLMDIKIGLLVKNRITLEFSEN

SEQ ID NO: 901668 - protein, 1649 aa, Homo sapiens
REESSLLLQCQRAAAVAGSGERAPREWVADLRAARGNRREAGSERAGGGAEPASLASEGSRGGRAPGGPPETRRMPHEELPSLQRPRYGSIVDDERLSAEEMDERRRQNIAYEYLCHLEEAKRWMEVCLVEELPPTTELEEGLRNGVYLAKLAKFFAPKMVSEKKIYDVEQTRYKKSGLHFRHTDNTVQWLRAMESIGLPKIFYPETTDVYDRKNIPRMIYCIHALSLYLFKLGIAPQIQDLLGKVDFTEEEISNMRKELEKYGIQMPSFSKIGGILANELSVDEAALHAAVIAINEAVEKGIAEQTVVTLRNPNAVLTLVDDNLAPEYQKELWDAKKKKEENARLKNSCISEEERDAYEELLTQAEIQGNINKVNRQAAVDHINAVIPEGDPENTLLALKKPEAQLPAVYPFAAAMYQNELFNLQKQNTMNYLAHEELLIAVEMLSAVALLNQALESNDLVSVQNQLRSPAIGLNNLDKAYVERYANTLLSVKLEVLSQGQDNLSWNEIQNCIDMVNAQIQEENDRVVAVGYINEAIDEGNPLRTLETLLLPTANISDVDPAHAQHYQDVLYHAKSQKLGDSESVSKVLWLDEIQQAVDEANVDEDRAKQWVTLVVDVNQCLEGKKSSDILSVLKSSTSNANDIIPECADKYYDALVKAKELKSERVSSDGSWLKLNLHKKYDYYYNTDSKESSWVTPESCLYKESWLTGKEIEDIIEEVTVGYIRENIWSASEELLLRFQATSSGPILREEFEARKSFLHEQEENVVKIQAFWKGYKQRKEYMHRRQTFIDNTDSIVKIQSWFRMATARKSYLSRLQYFRDHNNEIVKIQSLLRANKARDDYKTLVGSENPPLTVIRKFVYLLDQSDLDFQEELEVARLREEVVTKIRANQQLEKDLNLMDIKIGLLVKNRITLEDVISHSKKLNKKKGGEMEILNNTDNQGIKSLSKERRKTLETYQQLFYLLQTNPLYLAKLIFQMPQNKSTKFMDTVIFTLYNYASNQREEYLLLKLFKTALEEEIKSKVDQVQDIVTGNPTVIKMVVSFNRGARGQNTLRQLLAPVVKEIIDDKSLIINTNPVEVYKAWVNQLETQTGEASKLPYDVTTEQALTYPEVKNKLEASIENLRRVTDKVLNSIISSLDLLPYGLRYIAKVLKNSIHEKFPDATEDELLKIVGNLLYYRYMNPAIVAPDGFDIIDMTAGGQINSDQRRNLGSVAKVLQHAASNKLFEGENEHLSSMNNYLSETYQEFRKYFKEACNVPEPEEKFNMDKYTDLVTVSKPVIYISIEEIISTHSLLLEHQDAIAPEKNDLLSELLGSLGEVPTVESFLGEGAVDPNDPNKANTLSQLSKTEISLVLTSKYDIEDGEAIDSRSLMIKTKKLIIDVIRNQPGNTLTEILETPATAQQEVDHATDMVSRAMIDSRTPEEMKHSQSMIEDAQLPLEQKKRKIQRNLRTLEQTGHVSSENKYQDILNEIAKDIRNQRIYRKLRKAELAKLQQTLNALNKKAAFYEEQINYYDTYIKTCLDNLKRKNTRRSIKLDGKGEPKGAKRAKPVKYTAAKLHEKGVLLDIDDLQTNQFKNVTFDIIATEDVGIFDVRSKFLGVEMEKVQLNIQDLLQMQYEGVAVMKMFDKVKVNVNLLIYLLNKKFYGK

SEQ ID NO: 901669 - protein, 1128 aa, Homo sapiens
MGCFKGVVAVGYINEAIDEGNPLRTLETLLLPTANISDVDPAHAQHYQDVLYHAKSQKLGDSESVSKVLWLDEIQQAVDEANVDEDRAKQWVTLVVDVNQCLEGKKSSDILSVLKSSTSNANDIIPECADKYYDALVKAKELKSERVSSDGSWLKLNLHKKYDYYYNTDSKESSWVTPESCLYKESWLTGKEIEDIIEEVTVGYIRENIWSASEELLLRFQATSSGPILREEFEARKSFLHEQEENVVKIQAFWKGYKQRKEYMHRRQTFIDNTDSIVKIQSWFRMATARKSYLSRLQYFRDHNNEIVKIQSLLRANKARDDYKTLVGSENPPLTVIRKFVYLLDQSDLDFQEELEVARLREEVVTKIRANQQLEKDLNLMDIKIGLLVKNRITLEDVISHSKKLNKKKGGEMEILNNTDNQGIKSLSKERRKTLETYQQLFYLLQTNPLYLAKLIFQMPQNKSTKFMDTVIFTLYNYASNQREEYLLLKLFKTALEEEIKSKVDQVQDIVTGNPTVIKMVVSFNRGARGQNTLRQLLAPVVKEIIDDKSLIINTNPVEVYKAWVNQLETQTGEASKLPYDVTTEQALTYPEVKNKLEASIENLRRVTDKVLNSIISSLDLLPYGLRYIAKVLKNSIHEKFPDATEDELLKIVGNLLYYRYMNPAIVAPDGFDIIDMTAGGQINSDQRRNLGSVAKVLQHAASNKLFEGENEHLSSMNNYLSETYQEFRKYFKEACNVPEPEEKFNMDKYTDLVTVSKPVIYISIEEIISTHSLLLEHQDAIAPEKNDLLSELLGSLGEVPTVESFLGEGAVDPNDPNKANTLSQLSKTEISLVLTSKYDIEDGEAIDSRSLMIKTKKLIIDVIRNQPGNTLTEILETPATAQQEVDHATDMVSRAMIDSRTPEEMKHSQSMIEDAQLPLEQKKRKIQRNLRTLEQTGHVSSENKYQDILNEIAKDIRNQRIYRKLRKAELAKLQQTLNALNKKAAFYEEQINYYDTYIKTCLDNLKRKNTRRSIKLDGKGEPKGAKRAKPVKYTAAKLHEKGVLLDIDDLQTNQFKNVTFDIIATEDVGIFDVRSKFLGVEMEKVQLNIQDLLQMQYEGVAVMKMFDKVKVNVNLLIYLLNKKFYGK

SEQ ID NO: 901670 - protein, 745 aa, Homo sapiens
  misc_feature (1)..(2): Xaa can be any naturally occurring amino acid
  misc_feature (4)..(4): Xaa can be any naturally occurring amino acid
  misc_feature (9)..(9): Xaa can be any naturally occurring amino acid
  misc_feature (11)..(11): Xaa can be any naturally occurring amino acid
XXSXGVPVXIXSTDVISHSKKLNKKKGGEMEILNNTDNQGIKSLSKERRKTLETYQQLFYLLQTNPLYLAKLIFQMPQNKSTKFMDTVIFTLYNYASNQREEYLLLKLFKTALEEEIKSKVDQVQDIVTGNPTVIKMVVSFNRGARGQNTLRQLLAPVVKEIIDDKSLIINTNPVEVYKAWVNQLETQTGEASKLPYDVTTEQALTYPEVKNKLEASIENLRRVTDKVLNSIISSLDLLPYGLRYIAKVLKNSIHEKFPDATEDELLKIVGNLLYYRYMNPAIVAPDGFDIIDMTAGGQINSDQRRNLGSVAKVLQHAASNKLFEGENEHLSSMNNYLSETYQEFRKYFKEACNVPEPEEKFNMDKYTDLVTVSKPVIYISIEEIISTHSLLLEHQDAIAPEKNDLLSELLGSLGEVPTVESFLGEGAVDPNDPNKANTLSQLSKTEISLVLTSKYDIEDGEAIDSRSLMIKTKKLIIDVIRNQPGNTLTEILETPATAQQEVDHATDMVSRAMIDSRTPEEMKHSQSMIEDAQLPLEQKKRKIQRNLRTLEQTGHVSSENKYQDILNEIAKDIRNQRIYRKLRKAELAKLQQTLNALNKKAAFYEEQINYYDTYIKTCLDNLKRKNTRRSIKLDGKGEPKGAKRAKPVKYTAAKLHEKGVLLDIDDLQTNQFKNVTFDIIATEDVGIFDVRSKFLGVEMEKVQLNIQDLLQMQYEGVAVMKMFDKVKVNVNLLIYLLNKKFYGK

SEQ ID NO: 901671 - protein, 103 aa, Homo sapiens
MLLPEMESHSAAQAGVQWWDLGSLQPPPPRFKNVTFDIIATEDVGIFDVRSKFLGVEMEKVQLNIQDLLQMQYEGVAVMKMFDKVKVNVNLLIYLLNKKFYGK

SEQ ID NO: 901672 - protein, 852 aa, Homo sapiens
MHSLPGVVAVGYINEAIDEGNPLRTLETLLLPTANISDVDPAHAQHYQDVLYHAKSQKLGDSESVSKVLWLDEIQQAVDEANVDEDRAKQWVTLVVDVNQCLEGKKSSDILSVLKSSTSNANDIIPECADKYYDALVKAKELKSERVSSDGSWLKLNLHKKYDYYYNTDSKESSWVTPESCLYKESWLTGKEIEDIIEEVTVGYIRENIWSASEELLLRFQATSSGPILREEFEARKSFLHEQEENVVKIQAFWKGYKQRKEYMHRRQTFIDNTDSIVKIQSWFRMATARKSYLSRLQYFRDHNNEIVKIQSLLRANKARDDYKTLVGSENPPLTVIRKFVYLLDQSDLDFQEELEVARLREEVVTKIRANQQLEKDLNLMDIKIGLLVKNRITLEDVISHSKKLNKKKGGEMEILNNTDNQGIKSLSKERRKTLETYQQLFYLLQTNPLYLAKLIFQMPQNKSTKFMDTVIFTLYNYASNQREEYLLLKLFKTALEEEIKSKVDQVQDIVTGNPTVIKMVVSFNRGARGQNTLRQLLAPVVKEIIDDKSLIINTNPVEVYKAWVNQLETQTGEASKLPYDVTTEQALTYPEVKNKLEASIENLRRVTDKVLNSIISSLDLLPYGLRYIAKVLKNSIHEKFPDATEDELLKIVGNLLYYRYMNPAIVAPDGFDIIDMTAGGQINSDQRRNLGSVAKVLQHAASNKLFEGENEHLSSMNNYLSETYQEFRKYFKEACNVPEPEEKFNMDKYTDLVTVSKPVIYISIEEIISTHSLLLEHQDAIAPEKNDLLSELLGSLGEVPTVESFLGEGAVDPNDPNKANTLSQLSKTEISLVLTSKYDIEDGEAIDRPRS

SEQ ID NO: 901673 - protein, 353 aa, Homo sapiens
AAIAGPAWPPCAAALRPLRGRSGSAGLTGNLPDRAHVSPRPEKSPARPASPAPRPGGTARAQENHIFVPAPEAPVGKIVSQRVPEAPPGQAGFPRAFPRSPAWPGGWTNSALAGGPNPAGEVDMRLAGPLRIVVLVVSVGVTWIVVSILLGGPGSGFPRIQQLFTSPESSVTAAPRARKYKCGLPQPCPEEHLAFRVVSGAANVIGPKICLEDKMLMSSVKDNVGRGLNIALVNGVSGELIEARAFDMWAGDVNDLLKFIRPLHEGTLVFVASYDDPATKMNEETRKLFSELGSRNAKELAFRDSWVFVGAKGVQNKSPFEQHVKNSKHSNKYEGWPEALEMEGCIPRRSTAS

SEQ ID NO: 901674 - protein, 156 aa, Homo sapiens
CPEEHLAFRVVSGAANVIGPKICLEDKMLMSSVKDNVGRGLNIALVNRASDEHIEARAFDIWTGDVNERPLRIVVLVVSVGVTWIVVSILLGGPGSGFPRIQQLFTSPESSVTAAPRARKYKCGLPQPCPEEHLAFRVVSGAANVIGPKICLEDKM

SEQ ID NO: 901675 - protein, 244 aa, Homo sapiens
MDRGQHPPGWAWQWLSSHPATLHQLECSGAISVHCNLYLLGSSDSSAPASRVAETTGPESSVTAAPRARKYKCGLPQPCPEEHLAFRVVSGAANVIGPKICLEDKMLMSSVKDNVGRGLNIALVNGVSGELIEARAFDMWAGDVNDLLKFIRPLHEGTLVFVASYDDPATKMNEETRKLFSELGSRNAKELAFRDSWVFVGAKGVQNKSPFEQHVKNSKHSNKYEGWPEALEMEGCIPRRSTAS

SEQ ID NO: 901676 - protein, 230 aa, Homo sapiens
MRLAGPLRIVVLVVSVGVTWIVVSILLGGPGSGFPRIQQLFTSPESSVTAAPRARKYKCGLPQPCPEEHLAFRVVSGAANVIGPKICLEDKMLMSSVKDNVGRGLNIALVNGVSGELIEARAFDMWAGDVNDLLKFIRPLHEGTLVFVASYDDPATKMNEETRKLFSELGSRNAKELAFRDSWVFVGAKGVQNKSPFEQHVKNSKHSNKYEGWPEALEMEGCIPRRSTAS

SEQ ID NO: 901677 - protein, 244 aa, Homo sapiens; identical to SEQ ID NO: 901675

SEQ ID NO: 901678 - protein, 361 aa, Homo sapiens
AAIAGPAWPPCAAALRPLRGRSGSAGLTGNLPDRAHVSPRPEKSPARPASPAPRPGGTARAQENHIFVPAPDPHPNLSFRFAPKQCTCRRSQPSRRSGHEVGRPSPHCGPSRQCGCHMDRGQHPPGWAWQWLSSHPATLHQLECSGAISVHCNLYLLGSSDSSAPASRVAETTGPESSVTAAPRARKYKCGLPQPCPEEHLAFRVVSGAANVIGPKICLEDKMLMSSVKDNVGRGLNIALVNGVSGELIEARAFDMWAGDVNDLLKFIRPLHEGTLVFVASYDDPATKMNEETRKLFSELGSRNAKELAFRDSWVFVGAKGVQNKSPFEQHVKNSKHSNKYEGWPEALEMEGCIPRRSTAS

SEQ ID NO: 901679 - protein, 315 aa, Homo sapiens
AAIAGPAWPPCAAALRPLRGRSGSAGLTGNLPDRAHVSPRPEKSPARPASPAPRPGGTARAQENHIFVPAPEAPVGKIVSQRVPEAPPGQAGFPRAFPRSPAWPGGWTNSALAGGPNPAGEVDMRLAGPESSVTAAPRARKYKCGLPQPCPEEHLAFRVVSGAANVIGPKICLEDKMLMSSVKDNVGRGLNIALVNGVSGELIEARAFDMWAGDVNDLLKFIRPLHEGTLVFVASYDDPATKMNEETRKLFSELGSRNAKELAFRDSWVFVGAKGVQNKSPFEQHVKNSKHSNKYEGWPEALEMEGCIPRRSTAS

SEQ ID NO: 901680 - protein, 230 aa, Homo sapiens; identical to SEQ ID NO: 901676

SEQ ID NO: 901681 - protein, 230 aa, Homo sapiens; identical to SEQ ID NO: 901676

SEQ ID NO: 901682 - protein, 203 aa, Homo sapiens
MRLAGPLRIVVLVVSVGVTWIVVSILLGGPGSGFPRIQQLFTSPESSVTAAPRARKYKCGLPQPCPEEHLAFRVVSGAANVIGPKICLEDKMLMSSVKDNVGRGLNIALVNGVSGELIEARAFDMWAGDVNDLLKFIRPLHEGTLVFVASYDDPATKMNEETRKLFSELGSRNAKELAFRDSWVFVGAKGVQNKSPFEQGCRG

SEQ ID NO: 901683 - protein, 192 aa, Homo sapiens
MRLAGPLRIVVLVVSVGVTWIVVSILLGGPGSGFPRIQQLFTSPESSVTAAPRARKYKCGLPQPCPEEHLAFRVVSGAANVIGPKICLEDKMTRRGNRQGIRQRDHKRKSRLAQERREQGDSGRQGPEEPLTCGPEMSTTLVEVYSATGTKAPLCVPVEHIRLRSLTSMASQDIERKKVAQNNTDYEVLGAY

SEQ ID NO: 901684 - protein, 230 aa, Homo sapiens; identical to SEQ ID NO: 901676

SEQ ID NO: 901685 - protein, 244 aa, Homo sapiens; identical to SEQ ID NO: 901675

SEQ ID NO: 901686 - protein, 189 aa, Homo sapiens
MDNTCYPCPAPRARKYKCGLPQPCPEEHLAFRVVSGAANVIGPKICLEDKMLMSSVKDNVGRGLNIALVNGVSGELIEARAFDMWAGDVNDLLKFIRPLHEGTLVFVASYDDPATKMNEETRKLFSELGSRNAKELAFRDSWVFVGAKGVQNKSPFEQHVKNSKHSNKYEGWPEALEMEGCIPRRSTAS

SEQ ID NO: 901687 - protein, 237 aa, Homo sapiens
MRLAGPLRIVVLVVSVGVTWIVVSILLGGPGSGFPRIQQLFTSPESSVTAAPRARKYKCGLPQPCPEEHLAFRVVSGAANVIGPKICLEDKMLMSSVKDNVGRGLNIALVNGPLPPDTGVSGELIEARAFDMWAGDVNDLLKFIRPLHEGTLVFVASYDDPATKMNEETRKLFSELGSRNAKELAFRDSWVFVGAKGVQNKSPFEQHVKNSKHSNKYEGWPEALEMEGCIPRRSTAS

SEQ ID NO: 901688 - protein, 189 aa, Homo sapiens; identical to SEQ ID NO: 901686

SEQ ID NO: 901689 - protein, 213 aa, Homo sapiens
MRLAGPLRIVVLVVSVGVTWIVVSILLGGPGSGFPRIQQLFTSPESSVTAAPRARKYKCGLPQPCPEEHLAFRVVSGAANVIGPKICLEDKMLMSSVKDNVGRGLNIALVNDVNDLLKFIRPLHEGTLVFVASYDDPATKMNEETRKLFSELGSRNAKELAFRDSWVFVGAKGVQNKSPFEQHVKNSKHSNKYEGWPEALEMEGCIPRRSTAS

SEQ ID NO: 901690 - protein, 227 aa, Homo sapiens
MDRGQHPPGWAWQWLSSHPATLHQLECSGAISVHCNLYLLGSSDSSAPASRVAETTGPESSVTAAPRARKYKCGLPQPCPEEHLAFRVVSGAANVIGPKICLEDKMLMSSVKDNVGRGLNIALVNDVNDLLKFIRPLHEGTLVFVASYDDPATKMNEETRKLFSELGSRNAKELAFRDSWVFVGAKGVQNKSPFEQHVKNSKHSNKYEGWPEALEMEGCIPRRSTAS

SEQ ID NO: 901691 - protein, 338 aa, Homo sapiens
MRLAGPLRIVVLVVSVGVTWIVVSILLGGPGSGFPRIQQLFTSPESSVTAAPRARKYKCGLPQPCPEEHLAFRVVSGAANVIGPKICLEDKMLMSSVKDNVGRGLNIALVNGVSGELIEARAFDMWAGDVNDLLKFIRPLHEGTLVFVASYDDPATKMNEETRKLFSELGSRNAKELAFRDSWVFVGAKGVQNKSPFEQHVKNSKHSNKYEGWPEALEMEGCIPRRSTANTSGLRGSDQNVVSRWWGLWGLQGVALPHFVTGAQGTRLLFVTLFPPVSPSSPVLHSSRHLHPHLESWNGPGCLPLTVQLWEQPGRLGRLPEPLPSGATLHCGLNMFPV

SEQ ID NO: 901692 - protein, 59 aa, Homo sapiens
GGCSVVPDDPCSVAPAPPDVNDLLKFIRPLHEGTLVFVASYDDPATKKVLGEASLSLAL

SEQ ID NO: 901693 - protein, 528 aa, Homo sapiens
SGDLQDYRCSRDSAPSPVPHELVITIELPLLRSAEQAALEVTRKLLCLDSRKPDYRLRLSLPYPVDDGRGKAQFNKARRQLVVTLPVVLPAARREPAVAVAAAAPEESADRSGTDGQACASAREGEAGPARSRAEDGGHDTCVAGAAGSGVTTLGDPEVAPPPAAAGEERVPKPGEQDLSRHAGSPPGSVEEPSPGGENSPGGGGSPCLSSRSLAWGSSAGRESARGDSSVETREESEGTGGQRSACAMGGPGTKSGEPLCPPLLCNQDKETLTLLIQVPRIQPQSLQGDLNPLWYKLRFSAQDLVYSFFLQFAPENKLSTTEPVISISSNNAVIELAKSPESHGHWREWYYGVNNDSLELQECSNSDQLQGKEERVNEESHLTEKEYIEHCNTPTTDSDSSIAVKALQIDSFGLVTCFQQESLDVSQMILGKSQQPESKMQSEFIKEKSATCSNEEKDNLNESVITEEKETDGDHLSSLLNKTTVHNIPGFDSIKETNMQDGSVQVIKDHVTNCAFSFQNSLLYDLD

SEQ ID NO: 901694 - protein, 576 aa, Homo sapiens
SGDLQDYRCSRDSAPSPVPHELVITIELPLLRSAEQAALEVTRKLLCLDSRKPDYRLRLSLPYPVDDGRGKAQFNKARRQLVVTLPVVLPAARREPAVAVAAAAPEESADRSGTDGQACASAREGEAGPARSRAEDGGHDTCVAGAAGSGVTTLGDPEVAPPPAAAGEERVPKPGEQDLSRHAGSPPGSVEEPSPGGENSPGGGGSPCLSSRSLAWGSSAGRESARGDSSVETREESEGTGGQRSACAMGGPGTKSGEPLCPPLLCNQDKETLTLLIQVPRIQPQSLQGDLNPLWYKLRFSAQDLVYSFFLQFAPENKLSTTEPVISISSNNAVIELAKSPESHGHWREWYYGVNNDSLEERLFVNEENVNEFLEEVLSSPFKQSMSLTPPLIEVLQVTDNKIQINAKLQECSNSDQLQGKEERVNEESHLTEKEYIEHCNTPTTDSDSSIAVKALQIDSFGLVTCFQQESLDVSQMILGKSQQPESKMQSEFIKEKSATCSNEEKDNLNESVITEEKETDGDHLSSLLNKTTVHNIPGFDSIKETNMQDGSVQVIKDHVTNCAFSFQNSLLYDLD

SEQ ID NO: 901695 - protein, 233 aa, Homo sapiens
NSLHNPLTLYINTTSVRERLFVNEENVNEFLEEVLSSPFKQSMSLTPPLIEVLQVTDNKIQINAKLQECSNSDQLQGKEERVNEESHLTEKEYIEHCNTPTTDSDSSIAVKALQIDSFGLVTCFQQESLDVSQMILGKSQQPESKMQSEFIKEKSATCSNEEKDNLNESVITEEKETDGDHLSSLLNKTTVHNIPGFDSIKETNMQDGSVQVIKDHVTNCAFSFQNSLLYDLD

SEQ ID NO: 901696 - protein, 576 aa, Homo sapiens; identical to SEQ ID NO: 901694

SEQ ID NO: 901697 - protein, 576 aa, Homo sapiens; identical to SEQ ID NO: 901694

SEQ ID NO: 901698 - protein, 110 aa, Homo sapiens
QVPRIQPQSLQGDLNPLWYKLRFSAQDLVYSFFLQFAPENKLSTTEPVISISSNNAVIELAKSPESHGHWREWYYGVNNDSLEVTVLSRVLIFEISHLTLKICYYRPGAV

SEQ ID NO: 901699 - protein, 212 aa, Homo sapiens
QALKNAENAYHIHQARTRSFDEDAKESRAAALRAANKSGTGFGESYSLANPSIRAGEDIPQPTIFNGKLKGYQLKGMNWLANLYEQGINGILADEMGLGKTVQSIALLAHLAERENIWGPFLIISPASTLNNWHQEFTRFVPKFKVLPYWGNPHDRKVIRRFWSQKTLYTQDAPFHVVITSYQLVVQDVKYFQRVKWQYMVLDEAQALKSSS

SEQ ID NO: 901700 - protein, 157 aa, Homo sapiens
QALKNAENAYHIHQARTRSFDEDAKESRAAALRAANKSGTGFGESYSLANPSIRAGEDIPQPTIFNGKLKGYQLKGMNWLANLYEQGINGILADEMGLGKTVQSIALLAHLAERENIWGPFLIISPASTLNNWHQEFTRFVPKFKVNISPTKTSIAL

SEQ ID NO: 901701 - protein, 423 aa, Homo sapiens
MEDKRSLSMARCEERNSRGQDHGLERVPFPPQLQSETYLHPADPSPAWDDPGSTGSPNLRLLTEEIAFQPLAEEASFRRPHPDGDVPPQGEDNLLSLPFPQKLWRLVSSNQFSSIWWDDSGACRVINQKLFEKEILKRDVAHKVFATTSIKSFFRQLNLYGFRKRRQCTFRTFTRIFSAKRLVSILNKLEFYCHPYFQRDSPHLLVRMKRRVGVKSAPRHQEEDKPEAAGSCLAPADTEQQDHTSPNENDQVTPQHREPAGPNTQIRSGSAPPATPVMVPDSAVASDNSPVTQPAGEWSEGSQAHVTPVAAVPGPAALPFLYVPGSPTQMNSYGPVVALPTASRSTLAMDTTGLPAPGMLPFCHLWVPVTLVAAGAAQPAASMVMFPHLPALHHHCPHSHRTSQYMPASDGPQAYPDYADQST

SEQ ID NO: 901702 - protein, 216 aa, Homo sapiens [sequence omitted]

SEQ ID NO: 901703 - protein, 134 aa, Homo sapiens
ATEPGPQAPPRQLFRSSHSRQTRLLSPMARAALSAAPSNPRLLRVALLLLLLVAAGRRAAGASVATELRCQCLQTLQGIHPKNIQSVNVKSPGPHCAQTEVIATLKNGRKACLNPASPIVKKIIEKMLNSDKSN

SEQ ID NO: 901704 - protein, 142 aa, Homo sapiens
ATEPGPQAPPRQLFRSSHSRQTRLLSPMARAALSAAPSNPRLLRVALLLLLLVAAGRRAAVSESPSSLGASVATELRCQCLQTLQGIHPKNIQSVNVKSPGPHCAQTEVIATLKNGRKACLNPASPIVKKIIEKMLNSDKSN

SEQ ID NO: 901705 - protein, 134 aa, Homo sapiens; identical to SEQ ID NO: 901703

SEQ ID NO: 901706 - protein, 85 aa, Homo sapiens
VCGSSLEKCSRAPCLIGSFLFMVELWEFWAYSGPPAPRVPRCSYWKTEFSHTVGELIEVHLRRQDSIPAFLSSLTLELFSRQTVA

SEQ ID NO: 901707 - protein, 352 aa, Homo sapiens
ARGYSDEDLAAYDSELTPAEYSPQLTRRMREAEEMVQKVHSHSAEMEAQLSQALEELGGQKQRADMLEMELKMLKSQSSSAEQSFLFSRGGGHAQVKVEELEGERSRLEEEKRMLEAQLERRALQGDYDQSRTKVLHMSLNPTSVARQRLHEDHSQLQAECERLRGLLRAMERGGTVPADLEAAAASLPSSKEVAELKKQVESAELKNQRLKEVFQTKIQEFRKACYTLTGYQIDITTENQYRLTSLYAEHPGDCLIFKATSPSGSKMQLLEDRVLTHRGRAHRGAPAAPGQHPCLPQLAHPRALQPPDRGVACRLGGIAGATLLGLTCRSPAPPATGWVHVLPLQPHRAAA

SEQ ID NO: 901708 - protein, 159 aa, Homo sapiens
LPHSVPLVRARWDTMGLGSGWWDQRLVRPLSPRHRVSTAHVAELEWGPGTHSLAHVFHGRAAEVPGPPGQALSASRGAGEPQARPGQPGSGLECSGHNGRRECLHEEPPAPRVPRCSYWETEFSHTVGELIEVHLRRQDSIPAFLSSLTLELFSRQTVA

SEQ ID NO: 901709 - protein, 217 aa, Homo sapiens
ARGYSDEDLAAYDSELTPAEYSPQLTRRMREAEEMVQKVHSHSAEMEAQLSQALEELGGQKQRADMLEMELKMLKSQSSSAEQSFLFSRGGGHAQVKVEELEGERSRLEEEKRMLEAQLERRALATSPSGSKMQLLEDRVLTHRGRAHRGAPAAPGQHPCLPQLAHPRALQPPDRGVACRLGGIAGATLLGLTCRSPAPPATGWVHVLPLQPHRAAA

SEQ ID NO: 901710 - protein, 259 aa, Homo sapiens
GSAKRARVLQPGLPSVGALCHRVMGPGGPWFQGDYDQSRTKVLHMSLNPTSVARQRLHEDHSQLQAECERLRGLLRAMERGGTVPADLEAAAASLPSSKEVAELKKQVESAELKNQRLKEVFQTKIQEFRKACYTLTGYQIDITTENQYRLTSLYAEHPGDCLIFKATSPSGSKMQLLEDRVLTHRGRAHRGAPAAPGQHPCLPQLAHPRALQPPDRGVACRLGGIAGATLLGLTCRSPAPPATGWVHVLPLQPHRAAA

SEQ ID NO: 901711 - protein, 85 aa, Homo sapiens; identical to SEQ ID NO: 901706

SEQ ID NO: 901712 - protein, 259 aa, Homo sapiens; identical to SEQ ID NO: 901710

SEQ ID NO: 901713 - protein, 159 aa, Homo sapiens; identical to SEQ ID NO: 901708

SEQ ID NO: 901714 - protein, 151 aa, Homo sapiens
MGVPNDLRALNSLVGVTSSLRFHFLMNLVTDQSFTEPLLHARSPVLGERICAESTVIFSRSTGENGQLLGCWEVVRSLWEEVICGLGTHFQGGEGDKAWEDSARCHCLTDFALEGHGHRIPTVLPHRWTKCDPPSGFRGTGPPGGDARLGE

SEQ ID NO: 901715 - protein, 737 aa, Homo sapiens
MQPRGAQAPGVQLLPALALMRLLLGAGPQGSSLANPVPAAPLSAPGPCAAQPCRNGGVCTSRPEPDPQHPAPAGEPGYSCTCPAGISGANCQLVADPCASNPCHHGNCSSSSSSSSDGYLCICNEGYEGPNCEQALPSLPATGWTESMAPRQLQPVPATQEPDKILPRSQATVTLPTWQPKTGQKVVEMKWDQVEVIPDIACGNASSNSSAGGRLVSFEVPQNTSVKIRQDATASLILLWKVTATGFQQCSLIDGRSVTPLQASGGLVLLEEMLALGNNHFIGFVNDSVTKSIVALRLTLVVKVSTCVPGESHANDLECSGKGKCTTKPSEATFSCTCEEQYVGTFCEEYDACQRKPCQNNASCIDANEKQDGSNFTCVCLPGYTGELCQSKIDYCILDPCRNGATCISSLSGFTCQCPEGYFGSACEEKVDPCASSPCQNNGTCYVDGVHFTCNCSPGFTGPTCAQLIDFCALSPCAHGTCRSVGTSYKCLCDPGYHGLYCEEEYNECLSAPCLNAATCRDLVNGYECVCLAEYKGTHCELYKDPCANVSCLNGATCDSDGLNGTCICAPGFTGEECDIDINECDSNPCHHGGSCLDQPNGYNCHCPHGWVGANCEIHLQWKSGHMAESLTNMPRHSLYIIIGALCVAFILMLIILIVGICRISRIEYQGSSRPAYEEFYNCRSIDSEFSNAIASIRHARFGKKSRPAMYDVSPIAYEDYSPDDKPLVTLIKTKDL

SEQ ID NO: 901716 - protein, 722 aa, Homo sapiens
QLSSPLPPPPPSLRPGSGSRPSRAAPLSAPGPCAAQPCRNGGVCTSRPEPDPQHPAPAGEPGYSCTCPAGISGANCQLVADPCASNPCHHGNCSSSSSSSSDGYLCICNEGYEGPNCEQALPSLPATGWTESMAPRQLQPVPATQEPDKILPRSQATVTLPTWQPKTGQKVVEMKWDQVEVIPDIACGNASSNSSAGGRLVSFEVPQNTSVKIRQDATASLILLWKVTATGFQQCSLIDGRSVTPLQASGGLVLLEEMLALGNNHFIGFVNDSVTKSIVALRLTLVVKVSTCVPGESHANDLECSGKGKCTTKPSEATFSCTCEEQYVGTFCEEYDACQRKPCQNNASCIDANEKQDGSNFTCVCLPGYTGELCQSKIDYCILDPCRNGATCISSLSGFTCQCPEGYFGSACEEKVDPCASSPCQNNGTCYVDGVHFTCNCSPGFTGPTCAQLIDFCALSPCAHGTCRSVGTSYKCLCDPGYHGLYCEEEYNECLSAPCLNAATCRDLVNGYECVCLAEYKGTHCELYKDPCANVSCLNGATCDSDGLNGTCICAPGFTGEECDIDINECDSNPCHHGGSCLDQPNGYNCHCPHGWVGANCEIHLQWKSGHMAESLTNMPRHSLYIIIGALCVAFILMLIILIVGICRISRIEYQGSSRPAYEEFYNCRSIDSEFSNAIASIRHARFGKKSRPAMYDVSPIAYEDYSPDDKPLVTLIKTKDL

SEQ ID NO: 901717 - protein, 681 aa, Homo sapiens
QLSSPLPPPPPSLRPGSGSRPSRAAPLSAPGPCAAQPCRNGGVCTSRPEPDPQHPAPAGEPGYSCTCPAGISGANCQLVADPCASNPCHHGNCSSSSSSSSDGYLCICNEGYEGPNCEQALPSLPATGWTESMAPRQLQPVPATQEPDKILPRSQATVTLPTWQPKTGQKVVEMKWDQVEVIPDIACGNASSNSSAGGRLVSFEVPQNTSVKIRQDATASLILLWKVTATGFQQCSLIDGRSVTPLQASGGLVLLEEMLALGNNHFIGFVNDSVTKSIVALRLTLVVKVSTCVPGESHANDLECSGKGKCTTKPSEATFSCTCEEQYVGTFCEEYDACQRKPCQNNASCIDANEKQDGSNFTCVCLPGYTGELCQSKIDYCILDPCRNGATCISSLSGFTCQCPEGYFGSACEEKVDPCASSPCQNNGTCYVDGVHFTCNCSPGFTGPTCAQLIDFCALSPCAHGTCRSVGTSYKCLCDPGTHCELYKDPCANVSCLNGATCDSDGLNGTCICAPGFTGEECDIDINECDSNPCHHGGSCLDQPNGYNCHCPHGWVGANCEIHLQWKSGHMAESLTNMPRHSLYIIIGALCVAFILMLIILIVGICRISRIEYQGSSRPAYEEFYNCRSIDSEFSNAIASIRHARFGKKSRPAMYDVSPIAYEDYSPDDKPLVTLIKTKDL

SEQ ID NO: 901718 - protein, 219 aa, Homo sapiens
MDAIKKKMQMLKLDKENAIDRAEQAEADKKQAEDRCKQLEEEQQALQKKLKGTEDEVEKYSESVKEAQEKLEQAEKKATDAEADVASLNRRIQLVEEELDRAQERLATALQKLEEAEKAADESERGMKVIENRAMKDEEKMELQEMQLKEAKHIAEDSDRKYEEVARKLVILEGELERSEERAEVAESRVQTAGGGTSNHGPGPQVPDGLRGGVFHQRR

SEQ ID NO: 901719 - protein, 284 aa, Homo sapiens
MDAIKKKMQMLKLDKENAIDRAEQAEADKKQAEDRCKQLEEEQQALQKKLKGTEDEVEKYSESVKEAQEKLEQAEKKATDAEADVASLNRRIQLVEEELDRAQERLATALQKLEEAEKAADESERGMKVIENRAMKDEEKMELQEMQLKEAKHIAEDSDRKYEEVARKLVILEGELERSEERAEVAESKCGDLEEELKIVTNNLKSLEAQADKYSTKEDKYEEEIKLLEEKLKEAETRAEFAERSVAKLEKTIDDLEDEVYAQKMKYKAISEELDNALNDITSL

SEQ ID NO: 901720 - protein, 218 aa, Homo sapiens
MDAIKKKMQMLKLDKENAIDRAEQAEADKKQAEDRCKQLEEEQQALQKKLKGTEDEVEKYSESVKEAQEKLEQAEKKATDAEADVASLNRRIQLVEEELDRAQERLATALQKLEEAEKAADESERGMKVIENRAMKDEEKMELQEMQLKEAKHIAEDSDRKYEEVARKLVILEGELERSEERAEVAESRVQTAGGGTSNHGPGPQVPDGLRGGVNVGT

SEQ ID NO: 901721 - protein, 188 aa, Homo sapiens
MDAIKKKMQMLKLDKENAIDRAEQAEADKKQAEDRCKQLEEEQQALQKKLKGTEDEVEKYSESVKEAQEKLEQAEKKATDAEADVASLNRRIQLVEEELDRAQERLATALQKLEEAEKAADESERGMKVIENRAMKDEEKMELQEMQLKEAKHIAEDSDRKYEEVARKLVILEGELERSEERAEVAER

SEQ ID NO: 901722 - protein, 284 aa, Homo sapiens; identical to SEQ ID NO: 901719

SEQ ID NO: 901723 - protein, 284 aa, Homo sapiens; identical to SEQ ID NO: 901719

SEQ ID NO: 901724 - protein, 219 aa, Homo sapiens; identical to SEQ ID NO: 901718

SEQ ID NO: 901725 - protein, 268 aa, Homo sapiens
LLLLNSRPRRPDKKQAEDRCKQLEEEQQALQKKLKGTEDEVEKYSESVKEAQEKLEQAEKKATDAEADVASLNRRIQLVEEELDRAQERLATALQKLEEAEKAADESERGMKVIENRAMKDEEKMELQEMQLKEAKHIAEDSDRKYEEVARKLVILEGELERSEERAEVAESKCGDLEEELKIVTNNLKSLEAQADKYSTKEDKYEEEIKLLEEKLKEAETRAEFAERSVAKLEKTIDDLEDEVYAQKMKYKAISEELDNALNDITSL

SEQ ID NO: 901726 - protein, 125 aa, Homo sapiens
MDAIKKKMQMLKLDKENAIDRAEQAEADKKQAEDRCKQLEEEQQALQKKLKGTEDEVEKYSESVKEAQEKLEQAEKKATDAEADVASLNRRIQLVEEELDRAQERLATALQKLEEAEKAADESES

SEQ ID NO: 901727 - protein, 152 aa, Homo sapiens
GPCSYEVGETGAARRRHDAEADVASLNRRIQLVEEELDRAQERLATALQKLEEAEKAADESERGMKVIENRAMKDEEKMELQEMQLKEAKHIAEDSDRKYEEVARKLVILEGELERSEERAEVAESRVQTAGGGTSNHGPGPQVPDGLRGGG

SEQ ID NO: 901728 - protein, 114 aa, Homo sapiens
MISETGTRSEAADEVAASKCGDLEEELKIVTNNLKSLEAQADKYSTKEDKYEEEIKLLEEKLKEAETRAEFAERSVAKLEKTIDDLEDEVYAQKMKYKAISEELDNALNDITSL

SEQ ID NO: 901729 - protein, 219 aa, Homo sapiens; identical to SEQ ID NO: 901718

SEQ ID NO: 901730 - protein, 308 aa, Homo sapiens
MDAIKKKMQMLKLDKENAIDRAEQAEADKKQAEDRCKQLEEEQQALQKKLKGTEDEVEKYSESVKEAQEKLEQAEKKATDAEADVASLNRRIQLVEEELDRAQERLATALQKLEEAEKAADESERGMKVIENRAMKDEEKMELQEMQLKEAKHIAEDSDRKYEEVARKLVILEGELERSEERAEVAESKCGDLEEELKIVTNNLKSLEAQADKYSTKEDKYEEEIKLLEEKLKEAETRAEFAERSVAKLEKTIDDLEESTSIATTEHWFTPDTLALTDTPSPCTEPTHKTPWPTLKPLCTGTPLAVAL

SEQ ID NO: 901731 - protein, 218 aa, Homo sapiens; identical to SEQ ID NO: 901720

SEQ ID NO: 901732 - protein, 214 aa, Homo sapiens
MDAIKKKMQMLKLDKENAIDRAEQAEADKKQAEDRCKQLEEEQQALQKKLKGTEDEVEKYSESVKEAQEKLEQAEKKATDAEADVASLNRRIQLVEEELDRAQERLATALQKLEEAEKAADESERGMKVIENRAMKDEEKMELQEMQLKEAKHIAEDSDRKYEEVARKLVILEGELERSEERAEVAESRVQTAGGGTSNHGPGPQVPDGLRGGG

SEQ ID NO: 901733 - protein, 240 aa, Homo sapiens
MDAIKKKMQMLKLDKENAIDRAEQAEADKKQAEDRCKQLEEEQQALQKKLKGTEDEVEKYSESVKEAQEKLEQAEKKATDAEADVASLNRRIQLVEEELDRAQERLATALQKLEEAEKAADESERGMKVIENRAMKDEEKMELQEMQLKEAKHIAEDSDRKYEEVARKLVILEGELLSSLLSFPFSLWGGEQAGGAEIANIAQPGWEQPRESPHHAHHPLWHWLHPLPIPFHPPLLLNKF

SEQ ID NO: 901734 - protein, 206 aa, Homo sapiens
MDAIKKKMQMLKLDKENAIDRAEQAEADKKQAEDRCKQLEEEQQALQKKLKGTEDEVEKYSESVKEAQEKLEQAEKKATDAEADVASLNRRIQLVEEELDRAQERLATALQKLEEAEKAADESERGMKVIENRAMKDEEKMELQEMQLKEAKHIAEDSDRKYEEVARKLVILEGELERSEERAEVAESRARQLWKGGGLLKEIDYH

SEQ ID NO: 901735 - protein, 128 aa, Homo sapiens
MGAGPQGRRSPVGGRRGRPHPPAGPCFCPYKVWAEVGEGPGCRPRPVPPRLLGARVAGTSQSRSVLLACHRCTQSAHPAQSVRSSPPAGRPTPHRSHGRHQEEDADAEAGQGERHRPRRAGRSRQEAS

SEQ ID NO: 901736 - protein, 155 aa, Homo sapiens
  misc_feature (137)..(137): Xaa can be any naturally occurring amino acid
  misc_feature (148)..(148): Xaa can be any naturally occurring amino acid
  misc_feature (152)..(152): Xaa can be any naturally occurring amino acid
MDAIKKKMQMLKLDKENAIDRAEQAEADKKQAEDRCKQLEEEQQALQKKLKGTEDEVEKYSESVKEAQEKLEQAEKKATDAEADVASLNRRIQLVEEELDRAQERLATALQKRQIRKYEEVARKLVIIEGDLERTEXRAELAESKCSXLEEXLEG

SEQ ID NO: 901737 - protein, 185 aa, Homo sapiens
MGAGPQGRRSPVGGRRGRPHPPAGPCFCPYKVWAEVGEGPGCRPRPVPPRLLGARVAGTSQSRSVLLACHRCTQSAHPAQSVRSSPPAGRPTPHRSHGRHQEEDADAEVTPTTTPTGTQTPTTTPITTTSRVTPTPTECLRVERVQARKTTKMIRMINASSSTAITAPTIPYTRLLAMLTFTGLS

SEQ ID NO: 901738 - protein, 219 aa, Homo sapiens; identical to SEQ ID NO: 901718

SEQ ID NO: 901739 - protein, 214 aa, Homo sapiens; identical to SEQ ID NO: 901732

SEQ ID NO: 901740 - protein, 214 aa, Homo sapiens; identical to SEQ ID NO: 901732

SEQ ID NO: 901741 - protein, 284 aa, Homo sapiens; identical to SEQ ID NO: 901719

SEQ ID NO: 901742 - protein, 214 aa, Homo sapiens; identical to SEQ ID NO: 901732

SEQ ID NO: 901743 - protein, 219 aa, Homo sapiens; identical to SEQ ID NO: 901718

SEQ ID NO: 901744 - protein, 158 aa, Homo sapiens
MKVIENRAMKDEEKMELQEMQLKEAKHIAEDSDRKYEEVARKLVILEGELERSEERAEVAESKCGDLEEELKIVTNNLKSLEAQADKYSTKEDKYEEEIKLLEEKLKEAETRAEFAERSVAKLEKTIDDLEDEVYAQKMKYKAISEELDNALNDITSL

SEQ ID NO: 901745 - protein, 219 aa, Homo sapiens; identical to SEQ ID NO: 901718

SEQ ID NO: 901746 - protein, 219 aa, Homo sapiens; identical to SEQ ID NO: 901718

SEQ ID NO: 901747 - protein, 219 aa, Homo sapiens; identical to SEQ ID NO: 901718

SEQ ID NO: 901748 - protein, 219 aa, Homo sapiens; identical to SEQ ID NO: 901718

SEQ ID NO: 901749 - protein, 301 aa, Homo sapiens
MDAIKKKMQMLKLDKENAIDRAEQAEADKKQAEDRCKQLEEEQQALQKKLKGTEDEVEKYSESVKEAQEKLEQAEKKATDAEADVASLNRRIQLVEEELDRAQERLATALQKLEEAEKAADESERGMKVIENRAMKDEEKMELQEMQLKEAKHIAEDSDRKYEEVARKLVILEGELERSEERAEVAESKCGDLEEELKIVTNNLKSLEAQADKYSTKEDKYEEEIKLLEEKLKEAETRAEFAERSVAKLEKTIDDLEGDLGQCQGGERRDSPDLGPDPAGTQQPVRASPTPSQAMVATPTQ

SEQ ID NO: 901750 - protein, 188 aa, Homo sapiens
MDAIKKKMQMLKLDKENAIDRAEQAEADKKQAEDRCKQLEEEQQALQKKLKGTEDEVEKYSESVKEAQEKLEQAEKKATDAEADVASLNRRIQLVEEELDRAQERLATALQKLEEAEKAADESERGMKVIENRAMKDEEKMELQEMQLKEAKHIAEDSDRKYEEGLGVQRRQDDQEPTGYNGEMKDLW

SEQ ID NO: 901751 - protein, 184 aa, Homo sapiens
MDAIKKKMQMLKLDKENAIDRAEQAEADKKQAEDRCKQLEEEQQALQKKLKGTEDEVEKYSESVKEAQEKLEQAEKKATDAEADVASLNRRIQLVEEELDRAQERLATALQKLEEAEKAADESERGMKVIENRAMKDEEKMELQEMQRAPLSPPRSTGSLLTPWHLLTPPAPALSPPTKHHGPR

SEQ ID NO: 901752 - protein, 136 aa, Homo sapiens
MGSMSGKEERSKLIMPYWVEVMMEVEIWCCEIVLGNSFSSQVRSKEGGKGKVLGAERLATALQKLEEAEKAADESERGMKVIENRAMKDEEKMELQEMQRAPLSPPRSTGSLLTPWHLLTPPAPALSPPTKHHGPR

SEQ ID NO: 901753 - protein, 950 aa, Homo sapiens
MLYSSRGDPEGQPLLLSLLILAMWVVGSGQLHYSVPEEAEHGTFVGRIAQDLGLELAELVPRLFQLDSKGRGDLLEVNLQNGILFVNSRIDREELCGRSAECSIHLEVIVDRPLQVFHVDVEVKDINDNPPVFPATQKNLFIAESRPLDSRFPLEGASDADIGENALLTYRLSPNEYFFLDVPTSNQQVKPLGLVLRKLLDREETPELHLLLTATDGGKPELTGTVQLLITVLDNNDNAPVFDRTLYTVKLPENVSIGTLVIHPNASDLDEGLNGDIIYSFSSDVSPDIKSKFHMDPLSGAITVIGHMDFEESRAHKIPVEAVDKGFPPLAGHCTVLVEVVDVNDNAPQLTIKTLSVPVKEDAQLGTVIALISVIDLDADANGQVTCSLTPHVPFKLVSTYKNYYSLVLDRALDRESVSAYELVVTARDGGSPSLWATARVSVEVADVNDNAPAFAQSEYTVFVKENNPPGCHIFTVSARDADAQENALVSYSLVERRLGERSLSSYVSVHAESGKVYALQPLDHEELELLQFQVSARDAGVPPLGSNVTLQVFVLDENDNAPALLTPRMRGTDGAVSEMVLRSVGAGVVVGKVRAVDADSGYNAWLSYELQPETASASIPFRVGLYTGEISTTRALDETDAPRQRLLVLVKDHGEPALTATATVLVSLVESGQAPKSSSRASVGATGPEVTLVDVNVYLIIAICAVSSLLVLTLLLYTVLRCSAMPTEGECAPGKPTLVCSSAVGSWSYSQQRRQRVCSGEGKQKTDLMAFSPGLSPCAGSTERTGEPSASSDSTGKPRQPNPDWRYSASLRAGMHSSVHLEEAGILRAGPGGPDQQWPTVSSATPEPEAGEVSPPVGAGVNSNSWTFKYGPGNPKQSGPGELPDKFIIPGSPAIISIRQEPTNSQIDKSDFITFGKKEETKKKKKKKKGNKTQEKKEKGNSTTDNSDQ

SEQ ID NO: 901754 - protein, 947 aa, Homo sapiens
MEFSWGSGQESRRLLLLLLLLAAWEAGNGQLHYSVSEEAKHGTFVGRIAQDLGLELAELVPRLFRVASKGRGGLLEVNLQNGILFVNSRIDREELCRRSAECSIHLEVIVDRPLQVFHVDVEVRDINDNPPVFPATQKNLSIAESRPLDSRFPLEGASDADIGENALLTYRLSPNEYFSLEKPPDDELVKGLGLILRKSLDREEAPEIFLVLTATDGGKPELTGTVQLLITVLDANDNAPAFDRTIYKVRLLENVPNGTLVIKLNASDLDEGLNGDIVYSFSNDISPNVKSKFHIDPITGQIIVKGYIDFEESKSYEIIVEGIDKGQLPLSGHCRVIVEVEDNNDNVPDLEFKSLSLPIREDAPLGTVIALISVSDKDMGVNGLVTCSLTSHVPFKLVSTFKNYYSLVLDSALDRESVSAYELVVTARDGGSPSLWATASVSVEVADVNDNAPAFAQPEYTVFVKENNPPGCHIFTVSAWDADAQENALVSYSLVERRVGERALSSYVSVHAESGKVYALQPLDHEELELLQFQVTARDAGVPPLGSNVTLQVFVLDENDNAPALLAPRAGGTGGAVSELVPWSVGVGHVVAKVRAVDADSGYNAWLSYELQPGTGGARIPFRVGLYTGEISTTRALDETDAPRHRLLVLVKDHGEPALTATATVLVSLVESGQAPKASSRALVGAVGPDAALVDVNVYLIIAICAVSSLLVLTLLLYTALRCSALPTEGACAPGKPTLVCSSAVGSWSYSQQRRPRVCSGEGPPKTDLMAFSPSLPDSRDREDQLQTTEESFAKPRQPNPDWRYSASLRAGMHSSVHLEEAGILRAGPGGPDQQWPTVSSATPEPEAGEVSPPVGAGVNSNSWTFKYGPGNPKQSGPGELPDKFIIPGSPAIISIRQEPTNSQIDKSDFITFGKKEETKKKKKKKKGNKTQEKKEKGNSTTDNSDQ

SEQ ID NO: 901755 - protein, 959 aa, Homo sapiens
MEIKPEVFDMVFTPEDRLGKQCLLLPLLLLAAWKVGSGQLHYSVPEEAKHGTFVGRIAQDLGLELAELVPRLFRMASKDREDLLEVNLQNGILFVNSRIDREELCGRSAECSIHLEVIVDRPLQVFHVDVEVRDINDNPPLFPVEEQRVLIYESRLPDSVFPLEGASDADVGSNSILTYKLSSSEYFGLDVKINSDDNKQIGLLLKKSLDREEAPAHNLFLTATDGGKPELTGTVQLLVTVLDVNDNAPTFEQSEYEVRIFENADNGTTVIRLNASDRDEGANGAISYSFNSLVAAMVIDHFSIDRNTGEIVIRGNLDFEQENLYKILIDATDKGHPPMAGHCTVLVRILDKNDNVPEIALTSLSLPVREDAQFGTVIALISVNDLDSGANGQVNCSLTPHVPFKLVSTFKNYYSLVLDSALDRESVSAYELVVTARDGGSPSLWATASLSVEVADMNDNAPAFAQPEYTVFVKENNPPGCHIFTVSARDADAQENALVSYSLVERRVGERALSSYISVHAESGKVYALQPLDHEELELLQFQVSARDAGVPPLGSNVTLQVFVLDENDNAPALLAPRVGGTGGAVSELVPRSLGAGQVVAKVRAVDADSGYNAWLSYELQPPASSARFPFRVGLYTGEISTTRVLDEADSPRHRLLVLVKDHGEPALTATATVLVSLVESGQAPKASSRASVGAAGPEAALVDVNVYLIIAICAVSSLLVLTLLLYTALRCSAPPTEGACTADKPTLVCSSAVGSWSYSQQRRQRVCSGEGPPKMDLMAFSPSLSPCPIMMGKAENQDLNEDHDAKPRQPNPDWRYSASLRAGMHSSVHLEEAGILRAGPGGPDQQWPTVSSATPEPEAGEVSPPVGAGVNSNSWTFKYGPGNPKQSGPGELPDKFIIPGSPAIISIRQEPTNSQIDKSDFITFGKKEETKKKKKKKKGNKTQEKKEKGNSTTDNSDQ

SEQ ID NO: 901756 - protein, 937 aa, Homo sapiens
MVCPNGYDPGGRHLLLFIIILAAWEAGRGQLHYSVPEEAKHGNFVGRIAQDLGLELAELVPRLFRAVCKFRGDLLEVNLQNGILFVNSRIDREELCGRSAECSIHLEVIVERPLQVFHVDVEVKDINDNPPVFPATQRNLFIAESRPLDSRFPLEGASDADIGENALLTYRLSPNEYFFLDVPTSNQQVKPLGLVLRKLLDREETPELHLLLTATDGGKPELTGTVQLLITVLDNNDNAPVFDRTLYTVKLPENVSIGTLVIHPNASDLDEGLNGDIIYSFSSDVSPDIKSKFHMDPLSGAITVIGHMDFEESRAHKIPVEAVDKGFPPLAGHCTVLVEVVDVNDNAPQLTLTSLSLPIPEDAQPGTVITLISVFDRDFGVNGQVTCSLTPRVPFKLVSTFKNYYSLVLDSALDRESVSAYELVVTARDGGSPSLWATASVSVEVADVNDNAPAFAQPEYTVFVKENNPPGCHIFTVSAGDADAQKNALVSYSLVELRVGERALSSYVSVHAESGKVYALQPLDHEELELLQFQVSARDAGVPPLGSNVTLQVFVLDENDNAPALLAPRVGGTGGAVRELVPRSVGAGHVVAKVRAVDADSGYNAWLSYELQPVAAGASIPFRVGLYTGEISTTRALDETDAPRHRLLVLVKDHGEPSLTATATVLVSLVESGQAPKASSRASLGIAGPETELVDVNVYLIIAICAVSSLLVLTLLLYTALRCSAPSSEGACSLVKPTLVCSSAVGSWSFSQQRRQRVCSGEGPPKTDLMAFSPSLPQGPSSTDNPRQPNPDWRYSASLRAGMHSSVHLEEAGILRAGPGGPDQQWPTVSSATPEPEAGEVSPPVGAGVNSNSWTFKYGPGNPKQSGPGELPDKFIIPGSPAIISIRQEPTNSQIDKSDFITFGKKEETKKKKKKKKGNKTQEKKEKGNSTTDNSDQ

SEQ ID NO: 901757 - protein, 950 aa, Homo sapiens
MVFSRRGGLGARDLLLWLLLLAAWEVGSGQLHYSIPEEAKHGTFVGRVAQDLGLELAELVPRLFRVASKTHRDLLEVNLQNGILFVNSRIDREELCQWSAECSIHLELIADRPLQVFHVEVKVKDINDNPPVFRGREQIIFIPESRLLNSRFPIEGAADADIGANALLTYTLSPSDYFSLDVEASDELSKSLWLELRKYLDREETPELHLLLTATDGGKPELQGTVELLITVLDVNDNAPLFDQAVYRVHLLETTANGTLVTTLNASDADEGVNGEVVFSFDSGISRDIQEKFKVDSSSGEIRLIDKLDYEETKSYEIQVKAVDKGSPPMSNHCKVLVKVLDVNDNAPELAVTSLYLPIREDAPLSTVIALITVSDRDSGANGQVTCSLMPHVPFKLVSTFKNYYSLVLDSALDRESLSVYELVVTARDGGSPSLWATARVSVEVADVNDNAPAFAQPEYTVFVKENNPPGCHIFTVSARDADAQENALVSYSLVERRVGERALSNYVSVHAESGKVYALQPLDHEELELLQFQVSARDAGVPPLGSNVTLQVFVLDENDNAPALLAPRVGGTIGAVSELVPRLVGAGHVVAKVRAVDADSGYNAWLSYELQPAAGGARIPFRVGLYTGEISTTRVLDEADLSRYRLLVLVKDHGEPALTATATVLVSLVESGQAPKASSRASVGVAGPEAALVDVNVYLIIAICAVSSLLVLTLLLYTALRCSVPPTEGAYVPGKPTLVCSSALGSWSNSQQRRQRVCSSEGPPKTDLMAFSPGLSPSLNTSERNEQPEANLDLSGNPRQPNPDWRYSASLRAGMHSSVHLEEAGILRAGPGGPDQQWPTVSSATPEPEAGEVSPPVGAGVNSNSWTFKYGPGNPKQSGPGELPDKFIIPGSPAIISIRQEPTNSQIDKSDFITFGKKEETKKKKKKKKGNKTQEKKEKGNSTTDNSDQ

SEQ ID NO: 901758 - protein, 936 aa, Homo sapiens
MVYSRRGSLGSRLLLLWLLLAYWKAGSGQLHYSIPEEAKHGTFVGRIAQDLGLELAELVPRLFRVASKGRGDLLEVNLQNGILFVNSRIDREELCRRRAECSIHLEVIVDRPLQVFHVEVAVKDINDNPPRFSRQEQRLFILESRMPDSRFPLEGASDLDIGANAQLRYRLNPNEYFDLDVKTNEEETNFLELVLRKSLDREETQEHRLLVIATDGGKPELTGTVQLLINVLDANDNAPEFDKSIYNVRLLENAPSGTLVIKLNASDADEGINKEIVYFFSNLVLDDVKSKFIINSNTGEIKVNGELDYEDYNSYEINIDAMDKSTFPLSGHCKVVVKLLDVNDNTPEMAITTLFLPVKEDAPLSTVIALISVSDRDSGANGQVTCSLMPHVPFKLVSTFKNYYSLVLDSALDRESVSVYELVVTARDGGSPSLWATASVSVEVADVNDNAPAFAQPQYTVFVKENNPPGCHIFTVSARDADAQENALVSYSLVERRVGERPLSSYVSVHAESGKVYALQPLDHEEVELLQFQVSARDAGVPPLGSNVTLQVFVLDENDNAPALLVPRVGGTGGAVSELVPRSVGAGHVVAKVRAVDPDSGYNAWLSYELQPAPGSARIPFRVGLYTGEISTTRSLDETEAPRHRLLVLVKDHGEPPLTATATVLVSLVESGQAPKASSRASAGAVGPEAALVDVNVYLIIAICAVSSLLVLTLLLYTALRCSAQPTEAVCTRGKPTLLCSSAVGSWSYSQQRRQRVCSGEAPPKTDLMAFSPSLPQGPTSTDNPRQPNPDWRYSASLRAGMHSSVHLEEAGILRAGPGGPDQQWPTVSSATPEPEAGEVSPPVGAGVNSNSWTFKYGPGNPKQSGPGELPDKFIIPGSPAIISIRQEPTNSQIDKSDFITFGKKEETKKKKKKKKGNKTQEKKEKGNSTTDNSDQ

SEQ ID NO: 901759 - protein, 950 aa, Homo sapiens
MLFSWREDPGAQCLLLSLLLLAASEVGSGQLHYSVSEEAKHGTFVGRIAQDLGLELAELVPRLFRVASKRHGDLLEVNLQNGILFVNSRIDREELCGRSAECSIHLEVIVDRPLQVFHVEVEVKDINDNAPVFPMAVKNLFISESRQPGSRFSLEGASDADIGTNSLLTYSLDSTEYFTLDVKRNDEEIKSLGLVLKKNLNREDTPKHYLLITAIDGGKPELTGTTQLKITVLDVNDNAPAFERTIYKVRLLENAPNGTLVVTVNATDLDEGVNKDIAYSFNTDMSADILSKFHLDPVNGQISVKGNIDFEESKSYEIQVEATDKGNPPMSDHCTVLLEIVDINDNVPELVIQSLSLPVLEDSPLSTVIALISVSDRDSGVNGQVTCSLTPHVPFKLVSTFKNYYSLVLDSPLDRESVSAYELVVTARDGGSPSLWATASVSVEVADVNDNAPAFSQSEYTVFVKENNPPGCHIFTVSARDADAQENALVSYSLVERRVGERALSSYVSVHAESGKVYALQPLDHEELELLQFQVSARDAGVPPLGSNVTLQVFVLDENDNAPALLMPRVGGIGGAVSELVPRSVGAGHVVAKVRAVDADSGYNAWLSYELQPGTGGARIPFRVGLYTGEISTTRALDEVDAPRHRLLVLVKDHGEPSLTATATVLVSLVESGQAPKASSQASAGATGPEAALVDVNVYLIVAICAVSSLLVLTLLLYTALRCSAPPTEGDCGPGKPTLVCSSAVGSWSYSQQRQQRVCSGEGLPKTDLMAFSPSLPPCPISRDREEKQDVDVDLSAKPRQPNPDWRYSASLRAGMHSSVHLEEAGILRAGPGGPDQQWPTVSSATPEPEAGEVSPPVGAGVNSNSWTFKYGPGNPKQSGPGELPDKFIIPGSPAIISIRQEPTNSQIDKSDFITFGKKEETKKKKKKKKGNKTQEKKEKGNSTTDNSDQ

SEQ ID NO: 901760 - protein, 842 aa, Homo sapiens
MLYSSRGDPEGQPLLLSLLILAMWVVGSGQLHYSVPEEAEHGTFVGRIAQDLGLELAELVPRLFQLDSKGRGDLLEVNLQNGILFVNSRIDREELCGRSAECSIHLEVIVDRPLQVFHVDVEVKDINDNPPVFPATQKNLFIAESRPLDSRFPLEGASDADIGENALLTYRLSPNEYFFLDVPTSNQQVKPLGLVLRKLLDREETPELHLLLTATDGGKPELTGTVQLLITVLDNNDNAPVFDRTLYTVKLPENVSIGTLVIHPNASDLDEGLNGDIIYSFSSDVSPDIKSKFHMDPLSGAITVIGHMDFEESRAHKIPVEAVDKGFPPLAGHCTVLVEVVDVNDNAPQLTIKTLSVPVKEDAQLGTVIALISVIDLDADANGQVTCSLTPHVPFKLVSTYKNYYSLVLDRALDRESVSAYELVVTARDGGSPSLWATARVSVEVADVNDNAPAFAQSEYTVFVKENNPPGCHIFTVSARDADAQENALVSYSLVERRLGERSLSSYVSVHAESGKVYALQPLDHEELELLQFQVSARDAGVPPLGSNVTLQVFVLDENDNAPALLTPRMRGTDGAVSEMVLRSVGAGVVVGKVRAVDADSGYNAWLSYELQPETASASIPFRVGLYTGEISTTRALDETDAPRQRLLVLVKDHGEPALTATATVLVSLVESGQAPKSSSRASVGATGPEVTLVDVNVYLIIAICAVSSLLVLTLLLYTVLRCSAMPTEGECAPGKPTLVCSSAVGSWSYSQQRRQRVCSGEGKQKTDLMAFSPGLSPCAGSTERTGEPSASSDSTGKVGFSSILFIYIIFFLERYYRLLPGAVQIVLFIFLEIQQIFFLIK

SEQ ID NO: 901761 - protein, 686 aa, Homo sapiens
MVFSRRGGLGARDLLLWLLLLAAWEVGSGQLHYSIPEEAKHGTFVGRVAQDLGLELAELVPRLFRVASKTHRDLLEVNLQNGILFVNSRIDREELCQWSAECSIHLELIADRPLQVFHVEVKVKDINDNPPVFRGREQIIFIPESRLLNSRFPIEGAADADIGANALLTYTLSPSDYFSLDVEASDELSKSLWLELRKYLDREETPELHLLLTATDGGKPELQGTVELLITVLDVNDNAPLFDQAVYRVHLLETTANGTLVTTLNASDADEGVNGEVVFSFDSGISRDIQEKFKVDSSSGEIRLIDKLDYEETKSYEIQVKAVDKGSPPMSNHCKVLVKVLDVNDNAPELAVTSLYLPIREDAPLSTVIALITVSDRDSGANGQVTCSLMPHVPFKLVSTFKNYYSLVLDSALDRESLSVYELVVTARDGGSPSLWATARVSVEVADVNDNAPAFAQPEYTVFVKENNPPGCHIFTVSARDADAQENALVSYSLVERRVGERALSNYVSVHAESGKVYALQPLDHEELELLQFQPRQPNPDWRYSASLRAGMHSSVHLEEAGILRAGPGGPDQQWPTVSSATPEPEAGEVSPPVGAGVNSNSWTFKYGPGNPKQSGPGELPDKFIIPGSPAIISIRQEPTNSQIDKSDFITFGKKEETKKKKKKKKGNKTQEKKEKGNSTTDNSDQ

SEQ ID NO: 901762 - protein, 685 aa, Homo sapiens
MVSRCSCLGVQCLLLSLLLLAAWEVGSGQLHYSVYEEARHGTFVGRIAQDLGLELAELVQRLFRVASKRHGDLLEVNLQNGILFVNSRIDREELCGRSVECSIHLEVIVDRPLQVFHVDVEVKDINDNPPRFSVTEQKLSIPESRLLDSRFPLEGASDADVGENALLTYKLSPNEYFVLDIINKKDKDKFPVLVLRKLLDREENPQLKLLLTATDGGKPEFTGSVSLLILVLDANDNAPIFDRPVYEVKMYENQVNQTLVIRLNASDSDEGINKEMMYSFSSLVPPTIRRKFWINERTGEIKVNDAIDFEDSNTYEIHVDVTDKGNPPMVGHCTVLVELLDENDNSPEVIVTSLSLPVKEDAQVGTVIALISVSDHDSGANGQVTCSLTPHVPFKLVSTYKNYYSLVLDSALDRERVSAYELVVTARDGGSPPLWATASVSVEVADVNDNAPAFAQSEYTVFVKENNPPGCHIFTVSAWDADAQENALVSYSLVERRLGERSLSSYVSVHAESGKVYALQPLDHEELELLQFQPRQPNPDWRYSASLRAGMHSSVHLEEAGILRAGPGGPDQQWPTVSSATPEPEAGEVSPPVGAGVNSNSWTFKYGPGNPKQSGPGELPDKFIIPGSPAIISIRQEPTNSQIDKSDFITFGKKEETKKKKKKKKGNKTQEKKEKGNSTTDNSDQ

SEQ ID NO: 901763 - protein, 810 aa, Homo sapiens
MFGFQRRGLGTPRLQLWLLLLEFWEVGSGQLHYSVSEEAKHGTFVGRIAQDLGLELAELVQRLFRVASKTHGDLLEVNLQNGILFVNSRIDREELCGQSAECSIHLEVIVDRPLQVFHVNVEVKDINDNPPVFSLREQKLLIAESKQSDSRFPLEGASDADIEENALLTYRLSKNEYFSLDSPTNGKQIKRLSLILKKSLDREKTPELNLLLTATDGGKPELTGTVRLLVQVLDVNDNDPEFDKSEYKVSLMENAAKETLVLKLNATDRDEGVNGEVTYSLMSIKPNGRHLFTLDQNNGEVRVNGTLDYEENKFYKIEVQATDKGTPPMAGHCTVWVEILDTNDNSPEVAVTSLSLPVREDAQPSTVIALISVSDRDSGVNGQVTCSLTPHVPFKLVSTFKNYYSLVLDSALDRENVWAYELVVTARDGGSPSLWATARVSVEVADVNDNAPAFAQPEYTVFVKENNPPGCHIFTVSARDADAQENALVSYSLVERRLGDRALSSYVSVHAESGKVYALQPLDHEELELLQFQVSARDAGVPPLSSNVTLQVFVLDENDNAPALLATQAGSAGGAVNKLVPRSVGAGHVVAKVRAVDADSGYNAWLSYELQPAAGGSRIPFRVGLYTGEISTTRALDEADSPRHRLLVLVKDHGEPALTATATVLVSLVESGQAPKASSRTLAGAASPEAALVDVNVYLIIAICVVSSLLVLTLLLYTALWWSATPTEGACAPGKPTLVCSRAVGSWSYSQQRRQRVCSEEGPPKTDLMAFSPSLPLGLNKEEEGERQEPGSNHPGQVSFLQIPPIRKCM

SEQ ID NO: 901764 - protein, 807 aa, Homo sapiens
MVFSRRGGLGARDLLLWLLLLAAWEVGSGQLHYSIPEEAKHGTFVGRVAQDLGLELAELVPRLFRVASKTHRDLLEVNLQNGILFVNSRIDREELCQWSAECSIHLELIADRPLQVFHVEVKVKDINDNPPVFRGREQIIFIPESRLLNSRFPIEGAADADIGANALLTYTLSPSDYFSLDVEASDELSKSLWLELRKYLDREETPELHLLLTATDGGKPELQGTVELLITVLDVNDNAPLFDQAVYRVHLLETTANGTLVTTLNASDADEGVNGEVVFSFDSGISRDIQEKFKVDSSSGEIRLIDKLDYEETKSYEIQVKAVDKGSPPMSNHCKVLVKVLDVNDNAPELAVTSLYLPIREDAPLSTVIALITVSDRDSGANGQVTCSLMPHVPFKLVSTFKNYYSLVLDSALDRESLSVYELVVTARDGGSPSLWATARVSVEVADVNDNAPAFAQPEYTVFVKENNPPGCHIFTVSARDADAQENALVSYSLVERRVGERALSNYVSVHAESGKVYALQPLDHEELELLQFQVSARDAGVPPLGSNVTLQVFVLDENDNAPALLAPRVGGTIGAVSELVPRLVGAGHVVAKVRAVDADSGYNAWLSYELQPAAGGARIPFRVGLYTGEISTTRVLDEADLSRYRLLVLVKDHGEPALTATATVLVSLVESGQAPKASSRASVGVAGPEAALVDVNVYLIIAICAVSSLLVLTLLLYTALRCSVPPTEGAYVPGKPTLVCSSALGSWSNSQQRRQRVCSSEGPPKTDLMAFSPGLSPSLNTSERNEQPEANLDLSGNVSPTFEFWL

SEQ ID NO: 901765 - protein, 807 aa, Homo sapiens
MLSSWQGGPRPRQLLLWLLILAAWETGSGQLHYSVPEEAKHGTFVGRIAQDLGLELAELVPRLFRVASKRHGDLLEVNLQNGILFVNSRIDREELCGRSAECSIHLEVIVDRPLQVFHVEVKVRDINDNPPIFPESKKRIIIAESRPPETRFPLDGASDADIGVNSALTYRLDPNDYFTLDAQNSLEQMSSLSLVLRKTLDREEIQEHSLLLTASDGGKPELTGTVQLLITILDVNDNAPEFYQSVYKVTVLENAFNGTLVIKLNATDPDDGTNGDIVYSFRRPVWPAVVYAFTINPNNGEIRTKGKLDFEEKKLYEISVEAVDKGNIPMAGHCTLLVEVLDVNDNAPEVTITSLSLPIREDTQPSAIIALISVSDRDSGSNGQVTCTLTPHVPFKLVSTYKNYYSLVLDSALDRESVSAYELVVTARDGGSPSLWATASVSVGVADVNDNAPAFAQPEYTVFVKENNPPGCHIFTVSAQDADAQENALVSYSLVERRVGERALSSYVSVHAESGKVYALQPLDHEELELLQFQVSARDSGVPPLGSNVTLQVFVLDENDNAPALLTPGAGSAGGTVSELMPRSVGAGHVVAKVRAVDADSGYNAWLSYELQLAAVGARIPFRVGLYTGEISTTRPLDEVDAPHHRLLVLVKDHGEPALTATATVLLSLVESGQAPQASSRASAGAVGPEAALVDVNVYLIIAICAVSSLLVLTLLLYTALRCSAPPTEGACAPGKPTLVCSSAAGSWSYSQQRRPRVCSGEGPHKTDLMAFSPSLPPCLGSAEGTGQREEDSECLKEVSLYFKKLS

SEQ ID NO: 901766 - protein, 824 aa, Homo sapiens
MLFSWREDPGAQCLLLSLLLLAASEVGSGQLHYSVSEEAKHGTFVGRIAQDLGLELAELVPRLFRVASKRHGDLLEVNLQNGILFVNSRIDREELCGRSAECSIHLEVIVDRPLQVFHVEVEVKDINDNAPVFPMAVKNLFISESRQPGSRFSLEGASDADIGTNSLLTYSLDSTEYFTLDVKRNDEEIKSLGLVLKKNLNREDTPKHYLLITAIDGGKPELTGTTQLKITVLDVNDNAPAFERTIYKVRLLENAPNGTLVVTVNATDLDEGVNKDIAYSFNTDMSADILSKFHLDPVNGQISVKGNIDFEESKSYEIQVEATDKGNPPMSDHCTVLLEIVDINDNVPELVIQSLSLPVLEDSPLSTVIALISVSDRDSGVNGQVTCSLTPHVPFKLVSTFKNYYSLVLDSPLDRESVSAYELVVTARDGGSPSLWATASVSVEVADVNDNAPAFSQSEYTVFVKENNPPGCHIFTVSARDADAQENALVSYSLVERRVGERALSSYVSVHAESGKVYALQPLDHEELELLQFQVSARDAGVPPLGSNVTLQVFVLDENDNAPALLMPRVGGIGGAVSELVPRSVGAGHVVAKVRAVDADSGYNAWLSYELQPGTGGARIPFRVGLYTGEISTTRALDEVDAPRHRLLVLVKDHGEPSLTATATVLVSLVESGQAPKASSQASAGATGPEAALVDVNVYLIVAICAVSSLLVLTLLLYTALRCSAPPTEGDCGPGKPTLVCSSAVGSWSYSQQRQQRVCSGEGLPKTDLMAFSPSLPPCPISRDREEKQDVDVDLSAKVSNFYLFFPKCLCFSFLNVSTPLEIH

SEQ ID NO: 901767 - protein, 884 aa, Homo sapiens; identical to SEQ ID NO: 750498

SEQ ID NO: 901768 - protein, 808 aa, Homo sapiens
MASSIRRGRGAWTRLLSLLLLAAWEVGSGQLRYSVPEEAKHGTFVGRIAQDLGLELEELVPRLFRVASKRHGDLLEVNLQNGILFVNSRIDREELCGRSAECSIHVEVIVDRPLQVFHVEVEVKDINDNPPIFPMTVKTIRFPESRLLDSRFPLEGASDADIGVNALLSYKLSSSEFFFLDIQANDELSESLSLVLGKSLDREETAEVNLLLVATDGGKPELTGTVQILIKVLDVNDNEPTFAQSVYKVKLLENTANGTLVVKLNASDADEGPNSEIVYSLGSDVSSTIQTKFTIDPISGEIRTKGKLDYEEAKSYEIQVTATDKGTPSMSGHCKISLKLVDINDNTPEVSITSLSLPISENASLGTVIALITVSDRDSGTNGHVTCSLTPHVPFKLVSTFKNYYSLVLDSALDRESVSAYELVVTARDGGSPSLWATTSVSIEVADVNDNAPAFAQPEYTVFVKENNPPGCHIFTVSAWDADAQENALVSYSLVERRVGERALSSYVSVHAESGKVYALQPLDHEEVELLQFQVSARDAGVPPLGSNVTLQVFVLDENDNAPALLAPRAGTAAGAVSELVPWSVGAGHVVAKVRAVDADSGYNAWLSYELQLGTGSARIPFRVGLYTGEISTTRALDEADSPRHRLLVLVKDHGEPALTATATVLVSLVESGQAPKASSRAWVGAAGSEATLVDVNVYLIIAICAVSSLLVLTVLLYTALRCSVPPTEGARAPGKPTLVCSSAVGSWSYSQQRRQRVCSGEDPPKTDLMAFSPSLSQGPDSAEEKQLSESEYVGKIWNFNLQIQLAS

SEQ ID NO: 901769 - protein, 983 aa, Homo sapiens
DCDAGKNLLNMYLQKRVTAHKIPQASDPLKLIVPTQRPSFSAMVIIGPRGPGSQRLLLSLLLLAAWEVGSGQLHYSVYEEAKHGTFVGRIAQDLGLELAELVPRLFRVASKRHGDLLEVNLQNGILFVNSRIDREKLCGRSAECSIHLEVIVDRPLQVFHVDVEVKDINDNPPVFREREQKVPVSESAPLDSHFPLEGASDADIGVNSLLTYALSLNENFELKIKTKKDKSILPELVLRKLLDREQTPKLNLLLMVIDGGKPELTGSVQIQITVLDVNDNGPAFDKPSYKVVLSENVQNDTRVIQLNASDPDEGLNGEISYGIKMILPVSEKCMFSINPDTGEIRIYGELDFEENNAYEIQVNAIDKGIPSMAGHSMVLVEVLDVNDNVPEVMVTSLSLPVQEDAQVGTVIALISVSDRDSGANGQVICSLTPHVPFKLVSTYKNYYSLVLDSALDRESVSAYELVVTARDGGSPSLWATARVSVEVADVNDNAPAFAQPEYTVFVKENNPPGCHIFTVSAWDADAQKNALVSYSLVERRVGEHALSSYVSVHAESGKVYALQPLDHEELELLQFQVSARDAGVPPLGSNVTLQVFVLDENDNAPALLATPAGSAGGAVSELVPRSVGAGHVVAKVRAVDADSGYNAWLSYELQPAAVGAHIPFHVGLYTGEISTTRILDEADAPRHRLLVLVKDHGEPALTSTATVLVSLVENGQAPKTSSRASVGAVDPEAALVDINVYLIIAICAVSSLLVLTLLLYTALRCSAPPTVSRCAPGKPTLVCSSAVGSWSYSQQRRQRVCSAESPPKTDLMAFSPSLQLSREDCLNPPSEPRQPNPDWRYSASLRAGMHSSVHLEEAGILRAGPGGPDQQWPTVSSATPEPEAGEVSPPVGAGVNSNSWTFKYGPGNPKQSGPGELPDKFIIPGSPAIISIRQEPTNSQIDKSDFITFGKKEETKKKKKKKKGNKTQEKKEKGNSTTDNSDQ

SEQ ID NO: 901770 - protein, 949 aa, Homo sapiens
MFGFQRRGLGTPRLQLWLLLLEFWEVGSGQLHYSVSEEAKHGTFVGRIAQDLGLELAELVQRLFRVASKTHGDLLEVNLQNGILFVNSRIDREELCGQSAECSIHLEVIVDRPLQVFHVNVEVKDINDNPPVFSLREQKLLIAESKQSDSRFPLEGASDADIEENALLTYRLSKNEYFSLDSPTNGKQIKRLSLILKKSLDREKTPELNLLLTATDGGKPELTGTVRLLVQVLDVNDNDPEFDKSEYKVSLMENAAKETLVLKLNATDRDEGVNGEVTYSLMSIKPNGRHLFTLDQNNGEVRVNGTLDYEENKFYKIEVQATDKGTPPMAGHCTVWVEILDTNDNSPEVAVTSLSLPVREDAQPSTVIALISVSDRDSGVNGQVTCSLTPHVPFKLVSTFKNYYSLVLDSALDRENVWAYELVVTARDGGSPSLWATARVSVEVADVNDNAPAFAQPEYTVFVKENNPPGCHIFTVSARDADAQENALVSYSLVERRLGDRALSSYVSVHAESGKVYALQPLDHEELELLQFQVSARDAGVPPLSSNVTLQVFVLDENDNAPALLATQAGSAGGAVNKLVPRSVGAGHVVAKVRAVDADSGYNAWLSYELQPAAGGSRIPFRVGLYTGEISTTRALDEADSPRHRLLVLVKDHGEPALTATATVLVSLVESGQAPKASSRTLAGAASPEAALVDVNVYLIIAICVVSSLLVLTLLLYTALWWSATPTEGACAPGKPTLVCSRAVGSWSYSQQRRQRVCSEEGPPKTDLMAFSPSLPLGLNKEEEGERQEPGSNHPGQPRQPNPDWRYSASLRAGMHSSVHLEEAGILRAGPGGPDQQWPTVSSATPEPEAGEVSPPVGAGVNSNSWTFKYGPGNPKQSGPGELPDKFIIPGSPAIISIRQEPTNSQIDKSDFITFGKKEETKKKKKKKKGNKTQEKKEKGNSTTDNSDQ

SEQ ID NO: 901771 - protein, 948 aa, Homo sapiens
MVSRCSCLGVQCLLLSLLLLAAWEVGSGQLHYSVYEEARHGTFVGRIAQDLGLELAELVQRLFRVASKRHGDLLEVNLQNGILFVNSRIDREELCGRSVECSIHLEVIVDRPLQVFHVDVEVKDINDNPPRFSVTEQKLSIPESRLLDSRFPLEGASDADVGENALLTYKLSPNEYFVLDIINKKDKDKFPVLVLRKLLDREENPQLKLLLTATDGGKPEFTGSVSLLILVLDANDNAPIFDRPVYEVKMYENQVNQTLVIRLNASDSDEGINKEMMYSFSSLVPPTIRRKFWINERTGEIKVNDAIDFEDSNTYEIHVDVTDKGNPPMVGHCTVLVELLDENDNSPEVIVTSLSLPVKEDAQVGTVIALISVSDHDSGANGQVTCSLTPHVPFKLVSTYKNYYSLVLDSALDRERVSAYELVVTARDGGSPPLWATASVSVEVADVNDNAPAFAQSEYTVFVKENNPPGCHIFTVSAWDADAQENALVSYSLVERRLGERSLSSYVSVHAESGKVYALQPLDHEELELLQFQVSARDGGVPPLGSNLTLQVFVLDENDNAPALLASPAGSAGGAVSELVLRSVVAGHVVAKVRAVDADSGYNAWLSYELQSAAVGARIPFRVGLYTGEISTTRALDETDSPRQRLLVLVKDHGEPSLTATATVLVSLVEGSQAPKASSRASVGVAPEVALVDVNVYLIIAICAVSSLLVLTLLLYTALRCSAAPTEGACGPVKPTLVCSSAVGSWSYSQQRRQRVCSGEGLPKADLMAFSPSLPPCPMVDVDGEDQSIGGDHSRKPRQPNPDWRYSASLRAGMHSSVHLEEAGILRAGPGGPDQQWPTVSSATPEPEAGEVSPPVGAGVNSNSWTFKYGPGNPKQSGPGELPDKFIIPGSPAIISIRQEPTNSQIDKSDFITFGKKEETKKKKKKKKGNKTQEKKEKGNSTTDNSDQ

SEQ ID NO: 901772 - protein, 950 aa, Homo sapiens
MLSSWQGGPRPRQLLLWLLILAAWETGSGQLHYSVPEEAKHGTFVGRIAQDLGLELAELVPRLFRVASKRHGDLLEVNLQNGILFVNSRIDREELCGRSAECSIHLEVIVDRPLQVFHVEVKVRDINDNPPIFPESKKRIIIAESRPPETRFPLDGASDADIGVNSALTYRLDPNDYFTLDAQNSLEQMSSLSLVLRKTLDREEIQEHSLLLTASDGGKPELTGTVQLLITILDVNDNAPEFYQSVYKVTVLENAFNGTLVIKLNATDPDDGTNGDIVYSFRRPVWPAVVYAFTINPNNGEIRTKGKLDFEEKKLYEISVEAVDKGNIPMAGHCTLLVEVLDVNDNAPEVTITSLSLPIREDTQPSAIIALISVSDRDSGSNGQVTCTLTPHVPFKLVSTYKNYYSLVLDSALDRESVSAYELVVTARDGGSPSLWATASVSVGVADVNDNAPAFAQPEYTVFVKENNPPGCHIFTVSAQDADAQENALVSYSLVERRVGERALSSYVSVHAESGKVYALQPLDHEELELLQFQVSARDSGVPPLGSNVTLQVFVLDENDNAPALLTPGAGSAGGTVSELMPRSVGAGHVVAKVRAVDADSGYNAWLSYELQLAAVGARIPFRVGLYTGEISTTRPLDEVDAPHHRLLVLVKDHGEPALTATATVLLSLVESGQAPQASSRASAGAVGPEAALVDVNVYLIIAICAVSSLLVLTLLLYTALRCSAPPTEGACAPGKPTLVCSSAAGSWSYSQQRRPRVCSGEGPHKTDLMAFSPSLPPCLGSAEGTGQREEDSECLKEPRQPNPDWRYSASLRAGMHSSVHLEEAGILRAGPGGPDQQWPTVSSATPEPEAGEVSPPVGAGVNSNSWTFKYGPGNPKQSGPGELPDKFIIPGSPAIISIRQEPTNSQIDKSDFITFGKKEETKKKKKKKKGNKTQEKKEKGNSTTDNSDQ

SEQ ID NO: 901773 - protein, 950 aa, Homo sapiens
MDYHWRGELGSWRLLLLLLLLAAWKVGSGQLHYSVPEEAKHGTFVGRIAQDLGLELAELVPRLFRVASKRHRDLLEVSLQNGILFVNSRIDREELCGRSAECSIHLEVIVDRPLQVFHVDVEVKDVNDNPPVFRVKDQKLFVSESRMPDSRFPLEGASDADVGANSVLTYRLSSHDYFMLDVNSKNDENKLVELVLRKSLDREDAPAHHLFLTATDGGKPELTGTVQLLVTVLDVNDNAPTFEQSEYEVRIFENADNGTTVIKLNASDPDEGANGAISYSFNSLVETMVIDHFSIDRNTGEIVIRGNLDFEQENLYKILIDATDKGHPPMAGHCTVLVRILDKNDNVPEIALTSLSLPVREDAQFGTVIALISVNDLDSGANGQVTCSLMPHVPFKLVSTFKNYYSLVLDSALDRERVSAYELVVTARDGGSPSLWATASLSVEVADVNDNAPAFAQPEYTVFVKENNPPGCHIFTVSARDADAQENALVSYSLVERRVGERSLSSYISVHTESGKVYALQPLDHEELELLQFQVSARDAGVPPLGSNVTLQVFVLDENDNAPALLEPRVGGTGGAASKLVPRSVGAGHVVAKVRAVDADSGYNAWLSYELQPAASSPRIPFRVGLYTGEISTTRVLDEADSPRHRLLVLVKDHGEPALTATATVLVSLVESGQAPKASSRQSAGVLGPEAALVDVNVYLIIAICAVSSLLVLTLLLYTALRCSALPTEGGCRAGKPTLVCSSAVGSWSYSQQQPQRVCSGEGPPKTDLMAFSPCLPPDLGSVDVGEEQDLNVDHGLKPRQPNPDWRYSASLRAGMHSSVHLEEAGILRAGPGGPDQQWPTVSSATPEPEAGEVSPPVGAGVNSNSWTFKYGPGNPKQSGPGELPDKFIIPGSPAIISIRQEPTNSQIDKSDFITFGKKEETKKKKKKKKGNKTQEKKEKGNSTTDNSDQ

SEQ ID NO: 901774 - protein, 695 aa, Homo sapiens
MEIKPEVFDMVFTPEDRLGKQCLLLPLLLLAAWKVGSGQLHYSVPEEAKHGTFVGRIAQDLGLELAELVPRLFRMASKDREDLLEVNLQNGILFVNSRIDREELCGRSAECSIHLEVIVDRPLQVFHVDVEVRDINDNPPLFPVEEQRVLIYESRLPDSVFPLEGASDADVGSNSILTYKLSSSEYFGLDVKINSDDNKQIGLLLKKSLDREEAPAHNLFLTATDGGKPELTGTVQLLVTVLDVNDNAPTFEQSEYEVRIFENADNGTTVIRLNASDRDEGANGAISYSFNSLVAAMVIDHFSIDRNTGEIVIRGNLDFEQENLYKILIDATDKGHPPMAGHCTVLVRILDKNDNVPEIALTSLSLPVREDAQFGTVIALISVNDLDSGANGQVNCSLTPHVPFKLVSTFKNYYSLVLDSALDRESVSAYELVVTARDGGSPSLWATASLSVEVADMNDNAPAFAQPEYTVFVKENNPPGCHIFTVSARDADAQENALVSYSLVERRVGERALSSYISVHAESGKVYALQPLDHEELELLQFQPRQPNPDWRYSASLRAGMHSSVHLEEAGILRAGPGGPDQQWPTVSSATPEPEAGEVSPPVGAGVNSNSWTFKYGPGNPKQSGPGELPDKFIIPGSPAIISIRQEPTNSQIDKSDFITFGKKEETKKKKKKKKGNKTQEKKEKGNSTTDNSDQ

SEQ ID NO: 901775 - protein, 1007 aa, Homo sapiens; identical to SEQ ID NO: 750495

SEQ ID NO: 901776 - protein, 844 aa, Homo sapiens
MVSRCSCLGVQCLLLSLLLLAAWEVGSGQLHYSVYEEARHGTFVGRIAQDLGLELAELVQRLFRVASKRHGDLLEVNLQNGILFVNSRIDREELCGRSVECSIHLEVIVDRPLQVFHVDVEVKDINDNPPRFSVTEQKLSIPESRLLDSRFPLEGASDADVGENALLTYKLSPNEYFVLDIINKKDKDKFPVLVLRKLLDREENPQLKLLLTATDGGKPEFTGSVSLLILVLDANDNAPIFDRPVYEVKMYENQVNQTLVIRLNASDSDEGINKEMMYSFSSLVPPTIRRKFWINERTGEIKVNDAIDFEDSNTYEIHVDVTDKGNPPMVGHCTVLVELLDENDNSPEVIVTSLSLPVKEDAQVGTVIALISVSDHDSGANGQVTCSLTPHVPFKLVSTYKNYYSLVLDSALDRERVSAYELVVTARDGGSPPLWATASVSVEVADVNDNAPAFAQSEYTVFVKENNPPGCHIFTVSAWDADAQENALVSYSLVERRLGERSLSSYVSVHAESGKVYALQPLDHEELELLQFQVSARDGGVPPLGSNLTLQVFVLDENDNAPALLASPAGSAGGAVSELVLRSVVAGHVVAKVRAVDADSGYNAWLSYELQSAAVGARIPFRVGLYTGEISTTRALDETDSPRQRLLVLVKDHGEPSLTATATVLVSLVEGSQAPKASSRASVGVAPEVALVDVNVYLIIAICAVSSLLVLTLLLYTALRCSAAPTEGACGPVKPTLVCSSAVGSWSYSQQRRQRVCSGEGLPKADLMAFSPSLPPCPMVDVDGEDQSIGGDHSRKVGYYVFIFLLCFMNNIFSYRIFSNMYQNISFLSTFHLCLNISSDTFVI

SEQ ID NO: 901777 - protein, 816 aa, Homo sapiens
MVYSRRGSLGSRLLLLWLLLAYWKAGSGQLHYSIPEEAKHGTFVGRIAQDLGLELAELVPRLFRVASKGRGDLLEVNLQNGILFVNSRIDREELCRRRAECSIHLEVIVDRPLQVFHVEVAVKDINDNPPRFSRQEQRLFILESRMPDSRFPLEGASDLDIGANAQLRYRLNPNEYFDLDVKTNEEETNFLELVLRKSLDREETQEHRLLVIATDGGKPELTGTVQLLINVLDANDNAPEFDKSIYNVRLLENAPSGTLVIKLNASDADEGINKEIVYFFSNLVLDDVKSKFIINSNTGEIKVNGELDYEDYNSYEINIDAMDKSTFPLSGHCKVVVKLLDVNDNTPEMAITTLFLPVKEDAPLSTVIALISVSDRDSGANGQVTCSLMPHVPFKLVSTFKNYYSLVLDSALDRESVSVYELVVTARDGGSPSLWATASVSVEVADVNDNAPAFAQPQYTVFVKENNPPGCHIFTVSARDADAQENALVSYSLVERRVGERPLSSYVSVHAESGKVYALQPLDHEEVELLQFQVSARDAGVPPLGSNVTLQVFVLDENDNAPALLVPRVGGTGGAVSELVPRSVGAGHVVAKVRAVDPDSGYNAWLSYELQPAPGSARIPFRVGLYTGEISTTRSLDETEAPRHRLLVLVKDHGEPPLTATATVLVSLVESGQAPKASSRASAGAVGPEAALVDVNVYLIIAICAVSSLLVLTLLLYTALRCSAQPTEAVCTRGKPTLLCSSAVGSWSYSQQRRQRVCSGEAPPKTDLMAFSPSLPQGPTSTDNVSFLILTSIFPSQFSNIKCHIHPLFLYLKIMS

SEQ ID NO: 901778 - protein, 814 aa, Homo sapiens
MDYHWRGELGSWRLLLLLLLLAAWKVGSGQLHYSVPEEAKHGTFVGRIAQDLGLELAELVPRLFRVASKRHRDLLEVSLQNGILFVNSRIDREELCGRSAECSIHLEVIVDRPLQVFHVDVEVKDVNDNPPVFRVKDQKLFVSESRMPDSRFPLEGASDADVGANSVLTYRLSSHDYFMLDVNSKNDENKLVELVLRKSLDREDAPAHHLFLTATDGGKPELTGTVQLLVTVLDVNDNAPTFEQSEYEVRIFENADNGTTVIKLNASDPDEGANGAISYSFNSLVETMVIDHFSIDRNTGEIVIRGNLDFEQENLYKILIDATDKGHPPMAGHCTVLVRILDKNDNVPEIALTSLSLPVREDAQFGTVIALISVNDLDSGANGQVTCSLMPHVPFKLVSTFKNYYSLVLDSALDRERVSAYELVVTARDGGSPSLWATASLSVEVADVNDNAPAFAQPEYTVFVKENNPPGCHIFTVSARDADAQENALVSYSLVERRVGERSLSSYISVHTESGKVYALQPLDHEELELLQFQVSARDAGVPPLGSNVTLQVFVLDENDNAPALLEPRVGGTGGAASKLVPRSVGAGHVVAKVRAVDADSGYNAWLSYELQPAASSPRIPFRVGLYTGEISTTRVLDEADSPRHRLLVLVKDHGEPALTATATVLVSLVESGQAPKASSRQSAGVLGPEAALVDVNVYLIIAICAVSSLLVLTLLLYTALRCSALPTEGGCRAGKPTLVCSSAVGSWSYSQQQPQRVCSGEGPPKTDLMAFSPCLPPDLGSVDVGEEQDLNVDHGLKVSPFKFRTHKFYLWKL

SEQ ID NO: 901779 - protein, 948 aa, Homo sapiens
MASSIRRGRGAWTRLLSLLLLAAWEVGSGQLRYSVPEEAKHGTFVGRIAQDLGLELEELVPRLFRVASKRHGDLLEVNLQNGILFVNSRIDREELCGRSAECSIHVEVIVDRPLQVFHVEVEVKDINDNPPIFPMTVKTIRFPESRLLDSRFPLEGASDADIGVNALLSYKLSSSEFFFLDIQANDELSESLSLVLGKSLDREETAEVNLLLVATDGGKPELTGTVQILIKVLDVNDNEPTFAQSVYKVKLLENTANGTLVVKLNASDADEGPNSEIVYSLGSDVSSTIQTKFTIDPISGEIRTKGKLDYEEAKSYEIQVTATDKGTPSMSGHCKISLKLVDINDNTPEVSITSLSLPISENASLGTVIALITVSDRDSGTNGHVTCSLTPHVPFKLVSTFKNYYSLVLDSALDRESVSAYELVVTARDGGSPSLWATTSVSIEVADVNDNAPAFAQPEYTVFVKENNPPGCHIFTVSAWDADAQENALVSYSLVERRVGERALSSYVSVHAESGKVYALQPLDHEEVELLQFQVSARDAGVPPLGSNVTLQVFVLDENDNAPALLAPRAGTAAGAVSELVPWSVGAGHVVAKVRAVDADSGYNAWLSYELQLGTGSARIPFRVGLYTGEISTTRALDEADSPRHRLLVLVKDHGEPALTATATVLVSLVESGQAPKASSRAWVGAAGSEATLVDVNVYLIIAICAVSSLLVLTVLLYTALRCSVPPTEGARAPGKPTLVCSSAVGSWSYSQQRRQRVCSGEDPPKTDLMAFSPSLSQGPDSAEEKQLSESEYVGKPRQPNPDWRYSASLRAGMHSSVHLEEAGILRAGPGGPDQQWPTVSSATPEPEAGEVSPPVGAGVNSNSWTFKYGPGNPKQSGPGELPDKFIIPGSPAIISIRQEPTNSQIDKSDFITFGKKEETKKKKKKKKGNKTQEKKEKGNSTTDNSDQ

SEQ ID NO: 901780 - protein, 824 aa, Homo sapiens
MASSIRRGRGAWTRLLSLLLLAAWEVGSGQLRYSVPEEAKHGTFVGRIAQDLGLELEELVPRLFRVASKRHGDLLEVNLQNGILFVNSRIDREELCGRSAECSIHVEVIVDRPLQVFHVEVEVKDINDNPPIFPMTVKTIRFPESRLLDSRFPLEGASDADIGVNALLSYKLSSSEFFFLDIQANDELSESLSLVLGKSLDREETAEVNLLLVATDGGKPELTGTVQILIKVLDVNDNEPTFAQSVYKVKLLENTANGTLVVKLNASDADEGPNSEIVYSLGSDVSSTIQTKFTIDPISGEIRTKGKLDYEEAKSYEIQVTATDKGTPSMSGHCKISLKLVDINDNTPEVSITSLSLPISENASLGTVIALITVSDRDSGTNGHVTCSLTPHVPFKLVSTFKNYYSLVLDSALDRESVSAYELVVTARDGGSPSLWATTSVSIEVADVNDNAPAFAQPEYTVFVKENNPPGCHIFTVSAWDADAQENALVSYSLVERRVGERALSSYVSVHAESGKVYALQPLDHEEVELLQFQVSARDAGVPPLGSNVTLQVFVLDENDNAPALLAPRAGTAAGAVSELVPWSVGAGHVVAKVRAVDADSGYNAWLSYELQLGTGSARIPFRVGLYTGEISTTRALDEADSPRHRLLVLVKDHGEPALTATATVLVSLVESGQAPKASSRAWVGAAGSEATLVDVNVYLIIAICAVSSLLVLTVLLYTALRCSVPPTEGARAPGKPTLVCSSAVGSWSYSQQRRQRVCSGEDPPKTDLMAFSPSLSQGPDSAEEKQLSESEYVGKVSLLLFLANSKIVLFKKFYMISTSYLDS

SEQ ID NO: 901781 - protein, 284 aa, Homo sapiens
PRLRYNGLRCWRILLRTRTASGRLFPRARSILYRARAKTTEVDSGARTQLRPASDPRIPRRPARVVWIAEGMPRRAENWDEAEVGAEEAGVEEYGPEEDGGEESGAEESGPEESGPEELGAEEEMEAGRPRPVLRSVNSREPSQVIFCNRSPRVVLPVWLNFDGEPQPYPTLPPGTGRRIHSYRGHLWLFRDAGTHDGLLVNQTELFVPSLNVDGQPIFANITLPVYTLKERCLQVVRSLVKPENYRRLDIVRSLYEDLEDHPNVQKDLERLTQERIAHQRMGD

SEQ ID NO: 901782 - protein, 284 aa, Homo sapiens; identical to SEQ ID NO: 901781

SEQ ID NO: 901783 - protein, 284 aa, Homo sapiens; identical to SEQ ID NO: 901781

SEQ ID NO: 901784 - protein, 284 aa, Homo sapiens; identical to SEQ ID NO: 901781

SEQ ID NO: 901785 - protein, 284 aa, Homo sapiens; identical to SEQ ID NO: 901781

SEQ ID NO: 901786 - protein, 284 aa, Homo sapiens; identical to SEQ ID NO: 901781

SEQ ID NO: 901787 - protein, 243 aa, Homo sapiens
PRLRYNGLRCWRILLRTRTASGRLFPRARSILYRARAKTTEVDSGARTQLRPASDPRIPRRPARVVWIAEGMPRRAENWDEAEVGAEEAGVEEYGPEEDGGEESGAEESGPEESGPEELGAEEEMEAGRPRPVLRSVNSREPSQVIFCNRSPRVVLPVWLNFDGEPQPYPTLPPGTGRRIHSYRVYTLKERCLQVVRSLVKPENYRRLDIVRSLYEDLEDHPNVQKDLERLTQERIAHQRMGD

SEQ ID NO: 901788 - protein, 284 aa, Homo sapiens; identical to SEQ ID NO: 901781

SEQ ID NO: 901789 - protein, 284 aa, Homo sapiens; identical to SEQ ID NO: 901781

SEQ ID NO: 901790 - protein, 284 aa, Homo sapiens; identical to SEQ ID NO: 901781

SEQ ID NO: 901791 - protein, 149 aa, Homo sapiens
VRLLRRLRRRRRRAARPRVVLPVWLNFDGEPQPYPTLPPGTGRRIHSYRGHLWLFRDAGTHDGLLVNQTELFVPSLNVDGQPIFANITLPVYTLKERCLQVVRSLVKPENYRRLDIVRSLYEDLEDHPNVQKDLERLTQERIAHQRMGD

SEQ ID NO: 901792 - protein, 284 aa, Homo sapiens; identical to SEQ ID NO: 901781

SEQ ID NO: 901793 - protein, 202 aa, Homo sapiens
PRLRYNGLRCWRILLRTRTASGRLFPRARSILYRARAKTTEVDSGARTQLRPASDPRIPRRPARVVWIAEGMPRRAENWDEAEVGAEEAGVEEYGPEEDGGEESGAEESGPEESGPEELGAEEEMEAGRPRPVLRSVNSREPSQVIFCNRSPRVVLPVWLNFDGEPQPYPTLPPGTGRRIHSYRGTGPALRPDPAGTIARSE

SEQ ID NO: 901794 - protein, 284 aa, Homo sapiens; identical to SEQ ID NO: 901781

SEQ ID NO: 901795 - protein, 284 aa, Homo sapiens; identical to SEQ ID NO: 901781

SEQ ID NO: 901796 - protein, 149 aa, Homo sapiens; identical to SEQ ID NO: 901791

SEQ ID NO: 901797 - protein, 284 aa, Homo sapiens; identical to SEQ ID NO: 901781

SEQ ID NO: 901798 - protein, 280 aa, Homo sapiens
PRLRYNGLRCWRILLRTRTASGRLFPRARSILYRARAKTTEVDSGARTQLRPASDPRIPRRPARVVWIAEGMPRRAENWDEAEVGAEEAGVEEYGPEEDGGEESGAEESGPEESGPEELGAEEEMEAGRPRPVLRSVNSREPSQVIFCNRSPRVVLPVWLNFDGEPQPYPTLPPGTGRRIHSYRESHCVTQAGVQWRVILAHCNLCLSGSSDSPASAAGTTVYTLKERCLQVVRSLVKPENYRRLDIVRSLYEDLEDHPNVQKDLERLTQERIAHQRMGD

SEQ ID NO: 901799 - protein, 284 aa, Homo sapiens; identical to SEQ ID NO: 901781

SEQ ID NO: 901800 - protein, 253 aa, Homo sapiens
PRLRYNGLRCWRILLRTRTASGRLFPRARSILYRARAKTTEVDSGARTQLRPASDPRIPRRPARVVWIAEGMPRRAENWDEAEVGAEEAGVEEYGPEEDGGEESGAEESGPEESGPEELGAEEEMEAGRPRPVLRSVNSREPSQVIFCNRSPRVVLPVWLNFDGEPQPYPTLPPGTGRRIHSYRVLMTPVGQFCVVPALVENTFLLGRLTDAKTGTSQGHVGAGRADRVWRGKLTYLPAGRWRGCGVWATVPG

SEQ ID NO: 901801 - protein, 149 aa, Homo sapiens; identical to SEQ ID NO: 901791

SEQ ID NO: 901802 - protein, 275 aa, Homo sapiens
ASTSWAQAILPAHADDLFPFFLRHAKQIFPVLDCKDDLRKISDLRIPPNWYPDARAMQRKIIFHSGPTNSGKTYHAIQKYFSAKSGVYCGPLKLLAHEIFEKSNAAGVPCDLVTGEERVTVQPNGKQASHVSCTVEMCSVTTPYEVAVIDEIQMIRDPARGWAWTRALLGLCAEEVHLCGEPAAIDLVMELMYTTGEEVEISLLFSPSSSCSSYSPTPLSSSTTRFFSSSLICTSSHFPLLYVPLITLYTSSSSTLHLPSIFSLSHFHSHPSPFL

SEQ ID NO: 901803 - protein, 806 aa, Homo sapiens
SGLSAAVSAAAPDSVEPAASMSFSRALLWARLPAGRQAGHRAAICSALRPHFGPFPGVLGQVSVLATASSSASGGSKIPNTSLFVPLTVKPQGPSADGDVGAELTRPLDKNEVKKVLDKFYKRKEIQKLGADYGLDARLFHQAFISFRNYIMQSHSLDVDIHIVLNDICFGAAHADDLFPFFLRHAKQIFPVLDCKDDLRKISDLRIPPNWYPDARAMQRKIIFHSGPTNSGKTYHAIQKYFSAKSGVYCGPLKLLAHEIFEKSNAAGVPCDLVTGEERVTVQPNGKQASHVSCTVEMCSVTTPYEVAVIDEIQMIRDPARGWAWTRALLGLCAEEVHLCGEPAAIDLVMELMYTTGEEVEVRDYKRLTPISVLDHALESLDNLRPGDCIVCFSKNDIYSVSRQIEIRGLESAVIYGSLPPGTKLAQAKKFNDPNDPCKILVATDAIGMGLNLSIRRIIFYSLIKPSINEKGERELEPITTSQALQIAGRAGRFSSRFKEGEVTTMNHEDLSLLKEILKRPVDPIRAAGLHPTAEQIEMFAYHLPDATLSNLIDIFVDFSQVDGQYFVCNMDDFKFSAELIQHIPLSLRVRYVFCTAPINKKQPFVCSSLLQFARQYSRNEPLTFAWLRRYIKWPLLPPKNIKDLMDLEAVHDVLDLYLWLSYRFMDMFPDASLIRDLQKELDGIIQDGVHNITKLIKMSETHKLLNLEGFPSGSQSRLSGTLKSQARRTRGTKALGSKATEPPSPDAGELSLASRLVQQGLLTPDMLKQLEKEWMTQQTEHNKEKTESGTHPKGTRRKKKEPDSD

SEQ ID NO: 901804 - protein, 851 aa, Homo sapiens
SVTVRRRVRGCARQCRTCGLDVLLPCPIVGSAPGGAPGWPPGSHLLCPSSPLWALSRGSGASFCPCHRLLLCLRWLQNTKHVLVRAPDCETSGPQRRRRRRGRANPASGQDYSNSPENVNVFAASCKKIELRHGFVSTRFSSGGESLELHWVCVPDEVKKVLDKFYKRKEIQKLGADYGLDARLFHQAFISFRNYIMQSHSLDVDIHIVLNDICFGAAHADDLFPFFLRHAKQIFPVLDCKDDLRKISDLRIPPNWYPDARAMQRKIIFHSGPTNSGKTYHAIQKYFSAKSGVYCGPLKLLAHEIFEKSNAAGVPCDLVTGEERVTVQPNGKQASHVSCTVEMCSVTTPYEVAVIDEIQMIRDPARGWAWTRALLGLCAEEVHLCGEPAAIDLVMELMYTTGEEVEVRDYKRLTPISVLDHALESLDNLRPGDCIVCFSKNDIYSVSRQIEIRGLESAVIYGSLPPGTKLAQAKKFNDPNDPCKILVATDAIGMGLNLSIRRIIFYSLIKPSINEKGERELEPITTSQALQIAGRAGRFSSRFKEGEVTTMNHEDLSLLKEILKRPVDPIRAAGLHPTAEQIEMFAYHLPDATLSNLIDIFVDFSQVDGQYFVCNMDDFKFSAELIQHIPLSLRVRYVFCTAPINKKQPFVCSSLLQFARQYSRNEPLTFAWLRRYIKWPLLPPKNIKDLMDLEAVHDVLDLYLWLSYRFMDMFPDASLIRDLQKELDGIIQDGVHNITKLIKMSETHKLLNLEGFPSGSQSRLSGTLKSQARRTRGTKALGSKATEPPSPDAGELSLASRLVQQGLLTPDMLKQLEKEWMTQQTEHNKEKTESGTHPKGTRRKKKEPDSD

SEQ ID NO: 901805 - protein, 612 aa, Homo sapiens
SGLSAAVSAAAPDSVEPAASMSFSRALLWARLPAGRQAGHRAAICSALRPHFGPFPGVLGQVSVLATASSSASGGSKIPNTSLFVPLTVKPQGPSADGDVGAELTRPLDKNEVAVIDEIQMIRDPARGWAWTRALLGLCAEEVHLCGEPAAIDLVMELMYTTGEEVEVRDYKRLTPISVLDHALESLDNLRPGDCIVCFSKNDIYSVSRQIEIRGLESAVIYGSLPPGTKLAQAKKFNDPNDPCKILVATDAIGMGLNLSIRRIIFYSLIKPSINEKGERELEPITTSQALQIAGRAGRFSSRFKEGEVTTMNHEDLSLLKEILKRPVDPIRAAGLHPTAEQIEMFAYHLPDATLSNLIDIFVDFSQVDGQYFVCNMDDFKFSAELIQHIPLSLRVRYVFCTAPINKKQPFVCSSLLQFARQYSRNEPLTFAWLRRYIKWPLLPPKNIKDLMDLEAVHDVLDLYLWLSYRFMDMFPDASLIRDLQKELDGIIQDGVHNITKLIKMSETHKLLNLEGFPSGSQSRLSGTLKSQARRTRGTKALGSKATEPPSPDAGELSLASRLVQQGLLTPDMLKQLEKEWMTQQTEHNKEKTESGTHPKGTRRKKKEPDSD

SEQ ID NO: 901806 - protein, 390 aa, Homo sapiens
SGLSAAVSAAAPDSVEPAASMSFSRALLWARLPAGRQAGHRAAICSALRPHFGPFPGVLGQVSVLATASSSASGGSKIPNTSLFVPLTVKPQGPSADGDVGAELTRPLDKNEVKKVLDKFYKRKEIQKLGADYGLDARLFHQAFISFRNYIMQSHSLDVDIHIVLNDICFGAAHADDLFPFFLRHAKQIFPVLDCKDDLRKISDLRIPPNWYPDARAMQRKIIFHSGPTNSGKTYHAIQKYFSAKSGVYCGPLKLLAHEIFEKSNAAGVPCDLVTGEERVTVQPNGKQASHVSCTVEMCSVTTPCMYMLFKKLWFGIFNFFFFSRQSLALLSRLECNGTISAHCDLCLPSSSDSPASASQVAGITGARHHTRLIFVFLLETGFLHVGQAG

SEQ ID NO: 901807 - protein, 806 aa, Homo sapiens; identical to SEQ ID NO: 901803

SEQ ID NO: 901808 - protein, 728 aa, Homo sapiens
MTLDSIGRIVYSKHENSILRHEGNTQEYPSHSLRVDLNILRTSYCIDSSYLRPTDFIIETILNKLTIMQLLNRSMELLEQFTLACLVIDIGFEAAHADDLFPFFLRHAKQIFPVLDCKDDLRKISDLRIPPNWYPDARAMQRKIIFHSGPTNSGKTYHAIQKYFSAKSGVYCGPLKLLAHEIFEKSNAAGVPCDLVTGEERVTVQPNGKQASHVSCTVEMCSVTTPYEVAVIDEIQMIRDPARGWAWTRALLGLCAEEVHLCGEPAAIDLVMELMYTTGEEVEVRDYKRLTPISVLDHALESLDNLRPGDCIVCFSKNDIYSVSRQIEIRGLESAVIYGSLPPGTKLAQAKKFNDPNDPCKILVATDAIGMGLNLSIRRIIFYSLIKPSINEKGERELEPITTSQALQIAGRAGRFSSRFKEGEVTTMNHEDLSLLKEILKRPVDPIRAAGLHPTAEQIEMFAYHLPDATLSNLIDIFVDFSQVDGQYFVCNMDDFKFSAELIQHIPLSLRVRYVFCTAPINKKQPFVCSSLLQFARQYSRNEPLTFAWLRRYIKWPLLPPKNIKDLMDLEAVHDVLDLYLWLSYRFMDMFPDASLIRDLQKELDGIIQDGVHNITKLIKMSETHKLLNLEGFPSGSQSRLSGTLKSQARRTRGTKALGSKATEPPSPDAGELSLASRLVQQGLLTPDMLKQLEKEWMTQQTEHNKEKTESGTHPKGTRRKKKEPDSD

SEQ ID NO: 901809 - protein, 334 aa, Homo sapiens
SGLSAAVSAAAPDSVEPAASMSFSRALLWARLPAGRQAGHRAAICSALRPHFGPFPGVLGQVSVLATASSSASGGSKIPNTSLFVPLTVKPQGPSADGDVGAELTRPLDKNEVKKVLDKFYKRKEIQKLGADYGLDARLFHQAFISFRNYIMQSHSLDVDIHIVLNDICFGAAHADDLFPFFLRHAKQIFPVLDCKDDLRKISDLRIPPNWYPDARAMQRKIIFHSGPTNSGKTYHAIQKYFSAKSGVYCGPLKLLAHEIFEKSNAAGVPCDLVTGEERVTVQPNGKQASHVSCTVEMCSVTTPYEVAVIDEIQMIRDPARGWAWTRALLGWWS

SEQ ID NO: 901810 - protein, 153 aa, Homo sapiens
MSIHIGHKQFMCQWCGKDFNMKQYFDEHMKTHTGEKPYICEICGKSFTSRPNMKRHRRTHTGEKPYPCDVCGQRFRFSNMLKAHKEKCFRVSHTLAGDGVPAAPGLPPTQPQAHALPLLPGLPQTLPPPPHLPPPPPLFPTTASPGGRMNANN

SEQ ID NO: 901811 - protein, 456 aa, Homo sapiens
EEEGGGSGREEEEEEEGGSQGEEEEEEEDGHSEQEEEEEEEEEEGPSEQDQESSEEEEGEEGEAGGKQGPRGSRSSRADPPPHSHMATRSRENARRRGTPEPEEAGRRGGKRPKPPPGVASASARGPPATDGLGAKVKLEEKQHHPCQKCPRVFNNRWYLEKHMNVTHSRMQICDQCGKRFLLESELLLHRQTDCERNIQCVTCGKAFKKLWSLHEHNKIVHGYAEKKFSCEICEKKFYTMAHVRKHMVAHTKDMPFTCETCGKSFKRSMSLKVHSLQHSGEKPFRCENCNERFQYKYQLRSHMSIHIGHKQFMCQWCGKDFNMKQYFDEHMKTHTGEKPYICEICGKSFTSRPNMKRHRRTHTGEKPYPCDVCGQRFRFSNMLKAHKEKCFRVSHTLAGDGVPAAPGLPPTQPQAHALPLLPGLPQTLPPPPHLPPPPPLFPTTASPGGRMNANN

SEQ ID NO: 901812 - protein, 456 aa, Homo sapiens; identical to SEQ ID NO: 901811

SEQ ID NO: 901813 - protein, 456 aa, Homo sapiens; identical to SEQ ID NO: 901811

SEQ ID NO: 901814 - protein, 456 aa, Homo sapiens; identical to SEQ ID NO: 901811

SEQ ID NO: 901815 - protein, 407 aa, Homo sapiens
MLFDKVKAFSVQLDGATAGVEPVFSGGQAVAGRVLLELSSAARVGALRLRARGRAHVHWTESRSAGSSTAYTQSYSERVEVVSHRATLLAPDTGETTTLPPGRHEFLFSFQLPPTLVTSFEGKHGSVRYCIKATLHRPWVPARRARKVFTVIEPVDINTPALLAPQAGAREKVARSWYCNRGLVSLSAKIDRKGYTPGEVIPVFAEIDNGSTRPVLPRAAVVQTQTFMARGARKQKRAVVASLAGEPVGPGQRALWQGRALRIPPVGPSILHCRVLHVDYALKVCVDIPGTSKLLLELPLVIGTIPLHPFGSRSSSVGSHASFLLDWRLGALPERPEAPPEYSEVVADTEEAALGQSPFPLPQDPDMSLEGPFFAYIQEFRYRPPPLYSEEDPNPLLGDMRPRCMTC

SEQ ID NO: 901816 - protein, 294 aa, Homo sapiens
PGSSPTTRPPWATGAGPSSPGGPGGSLGDATGERGNPGDLQARPGRVPSLRVSKPCPQPRAMRSGGVRSFALELARGPGGAYRGGERLCGRVLLEAAAPLRVRALEVKARGGAATHWLEGRSVGVNAVSSDYAAAETYLRRRQLLLRDTGETTTLPPGRHEFLFSFQLPPTLVTSFEGKHGSVRYCIKATLHRPWVPARRARKVFTVIEPVDINTPALLAPQAGAREKVARSWYCNRGLVSLSAKIDRKGYTPGEVIPVFAEIAGPCTPSIRPGWHVPEPTRPAPSPHPSSPLA

SEQ ID NO: 901817 - protein, 449 aa, Homo sapiens
MLFDKVKAFSVQLDGATAGVEPVFSGGQAVAGRVLLELSSAARVGALRLRARGRAHVHWTESRSAGSSTAYTQSYSERVEVVSHRATLLAPGTDGGPLLQHQLCASHHLDGGTSVSPGTPAQPLSRLLFLLPADTGETTTLPPGRHEFLFSFQLPPTLVTSFEGKHGSVRYCIKATLHRPWVPARRARKVFTVIEPVDINTPALLAPQAGAREKVARSWYCNRGLVSLSAKIDRKGYTPGEVIPVFAEIDNGSTRPVLPRAAVVQTQTFMARGARKQKRAVVASLAGEPVGPGQRALWQGRALRIPPVGPSILHCRVLHVDYALKVCVDIPGTSKLLLELPLVIGTIPLHPFGSRSSSVGSHASFLLDWRLGALPERPEAPPEYSEVVADTEEAALGQSPFPLPQDPDMSLEGPFFAYIQEFRYRPPPLYSEEDPNPLLGDMRPRCMTC

SEQ ID NO: 901818 - protein, 407 aa, Homo sapiens; identical to SEQ ID NO: 901815

SEQ ID NO: 901819 - protein, 515 aa, Homo sapiens
MLFDKVKAFSVQLDGATAGVEPVFSGGQAVAGRVLLELSSAARVGALRLRARGRAHVHWTESRSAGSSTAYTQSYSERVEVVSHRATLLAPGTDGGPLLQHQLCASHHLDGGTSVSPGTPAQPLSRLLFLLPADTGETTTLPPGRHEFLFSFQLPPPVSPLGCRVALSLQPLPDWYLQYWISGHLLSPKTLPLGGPRSVCVSFSLPACLCILSPEVPSLHPRTLVTSFEGKHGSVRYCIKATLHRPWVPARRARKVFTVIEPVDINTPALLAPQAGAREKVARSWYCNRGLVSLSAKIDRKGYTPGEVIPVFAEIDNGSTRPVLPRAAVVQTQTFMARGARKQKRAVVASLAGEPVGPGQRALWQGRALRIPPVGPSILHCRVLHVDYALKVCVDIPGTSKLLLELPLVIGTIPLHPFGSRSSSVGSHASFLLDWRLGALPERPEAPPEYSEVVADTEEAALGQSPFPLPQDPDMSLEGPFFAYIQEFRYRPPPLYSEEDPNPLLGDMRPRCMTC

SEQ ID NO: 901820 - protein, 174 aa, Homo sapiens
PGSSPTTRPPWATGAGPSSPGGPGGSLGDATGERGNPGDLQARPGRVPSLRVSKPCPQPRAMRSGGVRSFALELARGPGGAYRGGERLCGRVLLEAAAPLRVRALEVKARGGAATHWLEGRSVGVNAVSSDYAAAETYLRRRQLLLRDTGETTTLPPGRHEFLFSFQLPPDLQL

SEQ ID NO: 901821 - protein, 468 aa, Homo sapiens
PGSSPTTRPPWATGAGPSSPGGPGGSLGDATGERGNPGDLQARPGRVPSLRVSKPCPQPRAMRSGGVRSFALELARGPGGAYRGGERLCGRVLLEAAAPLRVRALEVKARGGAATHWLEGRSVGVNAVSSDYAAAETYLRRRQLLLRDTGETTTLPPGRHEFLFSFQLPPTLVTSFEGKHGSVRYCIKATLHRPWVPARRARKVFTVIEPVDINTPALLAPQAGAREKVARSWYCNRGLVSLSAKIDRKGYTPGEVIPVFAEIDNGSTRPVLPRAAVVQTQTFMARGARKQKRAVVASLAGEPVGPGQRALWQGRALRIPPVGPSILHCRVLHVDYALKVLCWISPGTYKSLMLDKHAHIGRIRPPISHMDTHYSGTRYTYPRRWEPSQKTQDNTRGMGTMDREPWERHQLGRDKPGPGQGIPYTVHDTVGTRVNKPRNTYDRKRKTQQRKPTNTHITRITPQGTPEH

SEQ ID NO: 901822 - protein, 179 aa, Homo sapiens
MLFDKVKAFSVQLDGATAGVEPVFSGGQAVAGRVLLELSSAARVGALRLRARGRAHVHWTESRSAGSSTAYTQSYSERVEVVSHRATLLAPGTDGGPLLQHQLCASHHLDGGTSVSLGPQRNRSVASFFSYLQIPGRPRRCLLGAMSSCSASSCPPGQAPNCRVPALAGAGPRPGTQHF

SEQ ID NO: 901823 - protein, 463 aa, Homo sapiens
PGSSPTTRPPWATGAGPSSPGGPGGSLGDATGERGNPGDLQARPGRVPSLRVSKPCPQPRAMRSGGVRSFALELARGPGGAYRGGERLCGRVLLEAAAPLRVRALEVKARGGAATHWLEGRSVGVNAVSSDYAAAETYLRRRQLLLRDTGETTTLPPGRHEFLFSFQLPPTLVTSFEGKHGSVRYCIKATLHRPWVPARRARKVFTVIEPVDINTPALLAPQAGAREKVARSWYCNRGLVSLSAKIDRKGYTPGEVIPVFAEIDNGSTRPVLPRAAVVQTQTFMARGARKQKRAVVASLAGEPVGPGQRALWQGRALRIPPVGPSILHCRVLHVDYALKVCVDIPGTSKLLLELPLVIGTIPLHPFGSRSSSVGSHASFLLDWRLGALPERPEAPPEYSEVVADTEEAALGQSPFPLPQDPDMSLEGPFFAYIQEFRYRPPPLYSEEDPNPLLGDMRPRCMTC

SEQ ID NO: 901824 - protein, 407 aa, Homo sapiens; identical to SEQ ID NO: 901815

SEQ ID NO: 901825 - protein, 407 aa, Homo sapiens; identical to SEQ ID NO: 901815

SEQ ID NO: 901826 - protein, 220 aa, Homo sapiens [sequence omitted]

SEQ ID NO: 901827 - protein, 690 aa, Homo sapiens
SPLSPALGSHPCVPGPNHSPERAAGGVWLGGPRRVKHLSPPYLKACPLSTSFTLIKTSRMQQDGLGVGTRNGSGKGRSVHPSWPWCAPRPLRYFGRDARARRAQTAAMALLAGGLSRGLGSHPAAAGRDAVVFVWLLLSTWCTAPARAIQVTVSNPYHVVILFQPVTLPCTYQMTSTPTQPIVIWKYKSFCRDRIADAFSPASVDNQLNAQLAAGNPGYNPYVECQDSVRTVRVVATKQGNAVTLGDYYQGRRITITGNADLTFDQTAWGDSGVYYCSVVSAQDLQGNNEAYAELIVLDWLFVVVVCLAAFLIFLLLGICWCQCCPHTCCCYVRCPCCPDKCCCPEALYAAGKAATSGVPSIYAPSTYAHLSPAKTPPPPAMIPMGPAYNGYPGGYPGDVDRSSSAGGQGSYVPLLRDTDSSVASEVRSGYRIQASQQDDSMRVLYYMEKELANFDPSRPGPPSGRVERAMSEVTSLHEDDWRSRPSRGPALTPIRDEEWGGHSPRSPRGWDQEPAREQAGGGWRARRPRARSVDALDDLTPPSTAESGSRSPTSNGGRRSRAYMPPRSRSRDDLYDQDDSRDFPRSRDPHYDDFRSRERPPADPRSHHHRTRDPRDNGSRSGDLPYDGRLLEEAVRKKGSEERRRPHKEEEEEAYYPPAPPPYSETDSQASRERRLKKNLALSRESLVV

SEQ ID NO: 901828 - protein, 709 aa, Homo sapiens
SPLSPALGSHPCVPGPNHSPERAAGGVWLGGPRRVKHLSPPYLKACPLSTSFTLIKTSRMQQDGLGVGTRNGSGKGRSVHPSWPWCAPRPLRYFGRDARARRAQTAAMALLAGGLSRGLGSHPAAAGRDAVVFVWLLLSTWCTAPARAIQVTVSNPYHVVILFQPVTLPCTYQMTSTPTQPIVIWKYKSFCRDRIADAFSPASVDNQLNAQLAAGNPGYNPYVECQDSVRTVRVVATKQGNAVTLGDYYQGRRITITGNADLTFDQTAWGDSGVYYCSVVSAQDLQGNNEAYAELIVLGRTSGVAELLPGFQAGPIEDWLFVVVVCLAAFLIFLLLGICWCQCCPHTCCCYVRCPCCPDKCCCPEALYAAGKAATSGVPSIYAPSTYAHLSPAKTPPPPAMIPMGPAYNGYPGGYPGDVDRSSSAGGQGSYVPLLRDTDSSVASEVRSGYRIQASQQDDSMRVLYYMEKELANFDPSRPGPPSGRVERAMSEVTSLHEDDWRSRPSRGPALTPIRDEEWGGHSPRSPRGWDQEPAREQAGGGWRARRPRARSVDALDDLTPPSTAESGSRSPTSNGGRRSRAYMPPRSRSRDDLYDQDDSRDFPRSRDPHYDDFRSRERPPADPRSHHHRTRDPRDNGSRSGDLPYDGRLLEEAVRKKGSEERRRPHKEEEEEAYYPPAPPPYSETDSQASRERRLKKNLALSRESLVV

SEQ ID NO: 901829 - protein, 660 aa, Homo sapiens
SPLSPALGSHPCVPGPNHSPERAAGGVWLGGPRRVKHLSPPYLKACPLSTSFTLIKTSRMQQDGLGVGTRNGSGKGRSVHPSWPWCAPRPLRYFGRDARARRAQTAAMALLAGGLSRGLGSHPAAAGRDAVVFVWLLLSTWCTAPARAIQVTVSNPYHVVILFQPVTLPCTYQMTSTPTQPIVIWKYKSFCRDRIADAFSPASVDNQLNAQLAAGNPGYNPYVECQDSVRTVRVVATKQGNAVTLGDYYQGRRITITGNADLTFDQTAWGDSGVYYCSVVSAQDLQGNNEAYAELIVLGRTSGVAELLPGFQAGPIEVYAAGKAATSGVPSIYAPSTYAHLSPAKTPPPPAMIPMGPAYNGYPGGYPGDVDRSSSAGGQGSYVPLLRDTDSSVASEVRSGYRIQASQQDDSMRVLYYMEKELANFDPSRPGPPSGRVERAMSEVTSLHEDDWRSRPSRGPALTPIRDEEWGGHSPRSPRGWDQEPAREQAGGGWRARRPRARSVDALDDLTPPSTAESGSRSPTSNGGRRSRAYMPPRSRSRDDLYDQDDSRDFPRSRDPHYDDFRSRERPPADPRSHHHRTRDPRDNGSRSGDLPYDGRLLEEAVRKKGSEERRRPHKEEEEEAYYPPAPPPYSETDSQASRERRLKKNLALSRESLVV

SEQ ID NO: 901830 - protein, 623 aa, Homo sapiens
PQWKWRSQAPPTSLSQPGLCLDSLLPAGAPRRVHRQPGRGVWAGREQVRGGTRPISTAPARAIQVTVSNPYHVVILFQPVTLPCTYQMTSTPTQPIVIWKYKSFCRDRIADAFSPASVDNQLNAQLAAGNPGYNPYVECQDSVRTVRVVATKQGNAVTLGDYYQGRRITITGNADLTFDQTAWGDSGVYYCSVVSAQDLQGNNEAYAELIVLGRTSGVAELLPGFQAGPIEDWLFVVVVCLAAFLIFLLLGICWCQCCPHTCCCYVRCPCCPDKCCCPEALYAAGKAATSGVPSIYAPSTYAHLSPAKTPPPPAMIPMGPAYNGYPGGYPGDVDRSSSAGGQGSYVPLLRDTDSSVASEVRSGYRIQASQQDDSMRVLYYMEKELANFDPSRPGPPSGRVERAMSEVTSLHEDDWRSRPSRGPALTPIRDEEWGGHSPRSPRGWDQEPAREQAGGGWRARRPRARSVDALDDLTPPSTAESGSRSPTSNGGRRSRAYMPPRSRSRDDLYDQDDSRDFPRSRDPHYDDFRSRERPPADPRSHHHRTRDPRDNGSRSGDLPYDGRLLEEAVRKKGSEERRRPHKEEEEEAYYPPAPPPYSETDSQASRERRLKKNLALSRESLVV

SEQ ID NO: 901831 - protein, 388 aa, Homo sapiens [sequence omitted]

SEQ ID NO: 901832 - protein, 442 aa, Homo sapiens
SPLSPALGSHPCVPGPNHSPERAAGGVWLGGPRRVKHLSPPYLKACPLSTSFTLIKTSRMQQDGLGVGTRNGSGKGRSVHPSWPWCAPRPLRYFGRDARARRAQTAAMALLAGGLSRGLGSHPAAAGRDAVVFVWLLLSTWCTAPARAIQVTVSNPYHVVILFQPVTLPCTYQMTSTPTQPIVIWKYKSFCRDRIADAFSPASVDNQLNAQLAAGNPGYNPYVECQDSVRTVRVVATKQGNAVTLGDYYQGRRITITGNADLTFDQTAWGDSGVYYCSVVSAQDLQGNNEAYAELIVLVYAAGKAATSGVPSIYAPSTYAHLSPAKTPPPPAMIPMGPAYNGYPGGYPGDVDRSSSAGGQGSYVPLLRDTDSSVASEVRSGYRIQASQQDDSMRVLYYMEKELANFDPSRPGPPSGRVERGGRPGRPHPAEHRRVREQVSHE

SEQ ID NO: 901833 - protein, 327 aa, Homo sapiens
SPLSPALGSHPCVPGPNHSPERAAGGVWLGGPRRVKHLSPPYLKACPLSTSFTLIKTSRMQQDGLGVGTRNGSGKGRSVHPSWPWCAPRPLRYFGRDARARRAQTAAMALLAGGLSRGLGSHPAAAGRDAVVFVWLLLSTWCTAPARAIQVTVSNPYHVVILFQPVTLPCTYQMTSTPTQPIVIWKYKSFCRDRIADAFSPASVDNQLNAQLAAGNPGYNPYVECQDSVRTVRVVATKQGNAVTLGDYYQGRRITITGNADLTFDQTAWGDSGVYYCSVVSAQDHKEEEEEAYYPPAPPPYSETDSQASRERRLKKNLALSRESLVV

SEQ ID NO: 901834 - protein, 516 aa, Homo sapiens
MTSTPTQPIVIWKYKSFCRDRIADAFSPASVDNQLNAQLAAGNPGYNPYVECQDSVRTVRVVATKQGNAVTLGDYYQGRRITITGNADLTFDQTAWGDSGVYYCSVVSAQDLQGNNEAYAELIVLGRTSGVAELLPGFQAGPIEDWLFVVVVCLAAFLIFLLLGICWCQCCPHTCCCYVRCPCCPDKCCCPEALYAAGKAATSGVPSIYAPSTYAHLSPAKTPPPPAMIPMGPAYNGYPGGYPGDVDRSSSEVRSGYRIQASQQDDSMRVLYYMEKELANFDPSRPGPPSGRVERAMSEVTSLHEDDWRSRPSRGPALTPIRDEEWGGHSPRSPRGWDQEPAREQAGGGWRARRPRARSVDALDDLTPPSTAESGSRSPTSNGGRRSRAYMPPRSRSRDDLYDQDDSRDFPRSRDPHYDDFRSRERPPADPRSHHHRTRDPRDNGSRSGDLPYDGRLLEEAVRKKGSEERRRPHKEEEEEAYYPPAPPPYSETDSQASRERRLKKNLALSRESLVV

SEQ ID NO: 901835 - protein, 641 aa, Homo sapiens
SPLSPALGSHPCVPGPNHSPERAAGGVWLGGPRRVKHLSPPYLKACPLSTSFTLIKTSRMQQDGLGVGTRNGSGKGRSVHPSWPWCAPRPLRYFGRDARARRAQTAAMALLAGGLSRGLGSHPAAAGRDAVVFVWLLLSTWCTAPARAIQVTVSNPYHVVILFQPVTLPCTYQMTSTPTQPIVIWKYKSFCRDRIADAFSPASVDNQLNAQLAAGNPGYNPYVECQDSVRTVRVVATKQGNAVTLGDYYQGRRITITGNADLTFDQTAWGDSGVYYCSVVSAQDLQGNNEAYAELIVLVYAAGKAATSGVPSIYAPSTYAHLSPAKTPPPPAMIPMGPAYNGYPGGYPGDVDRSSSAGGQGSYVPLLRDTDSSVASEVRSGYRIQASQQDDSMRVLYYMEKELANFDPSRPGPPSGRVERAMSEVTSLHEDDWRSRPSRGPALTPIRDEEWGGHSPRSPRGWDQEPAREQAGGGWRARRPRARSVDALDDLTPPSTAESGSRSPTSNGGRRSRAYMPPRSRSRDDLYDQDDSRDFPRSRDPHYDDFRSRERPPADPRSHHHRTRDPRDNGSRSGDLPYDGRLLEEAVRKKGSEERRRPHKEEEEEAYYPPAPPPYSETDSQASRERRLKKNLALSRESLVV

SEQ ID NO: 901836 - protein, 306 aa, Homo sapiens
MGPAYNGYPGGYPGDVDRSSSAGGQGSYVPLLRDTDSSVASEVRSGYRIQASQQDDSMRVLYYMEKELANFDPSRPGPPSGRVERAMSEVTSLHEDDWRSRPSRGPALTPIRDEEWGGHSPRSPRGWDQEPAREQAGGGWRARRPRARSVDALDDLTPPSTAESGSRSPTSNGGRRSRAYMPPRSRSRDDLYDQDDSRDFPRSRDPHYDDFRSRERPPADPRSHHHRTRDPRDNGSRSGDLPYDGRLLEEAVRKKGSEERRRPHKEEEEEAYYPPAPPPYSETDSQASRERRLKKNLALSRESLVV

SEQ ID NO: 901837 - protein, 601 aa, Homo sapiens
SPLSPALGSHPCVPGPNHSPERAAGGVWLGGPRRVKHLSPPYLKACPLSTSFTLIKTSRMQQDGLGVGTRNGSGKGRSVHPSWPWCAPRPLRYFGRDARARRAQTAAMALLAGGLSRGLGSHPAAAGRDAVVFVWLLLSTWCTAPARAIQVTVSNPYHVVILFQPVTLPCTYQMTSTPTQPIVIWKYKSFCRDRIADAFSPASVDNQLNAQLAAGNPGYNPYVECQDSVRTVRVVATKQGNAVTLGDYYQGRRITITGMYAAGKAATSGVPSIYAPSTYAHLSPAKTPPPPAMIPMGPAYNGYPGGYPGDVDRSSSAGGQGSYVPLLRDTDSSVASEVRSGYRIQASQQDDSMRVLYYMEKELANFDPSRPGPPSGRVERAMSEVTSLHEDDWRSRPSRGPALTPIRDEEWGGHSPRSPRGWDQEPAREQAGGGWRARRPRARSVDALDDLTPPSTAESGSRSPTSNGGRRSRAYMPPRSRSRDDLYDQDDSRDFPRSRDPHYDDFRSRERPPADPRSHHHRTRDPRDNGSRSGDLPYDGRLLEEAVRKKGSEERRRPHKEEEEEAYYPPAPPPYSETDSQASRERRLKKNLALSRESLVV

SEQ ID NO: 901838 - protein, 690 aa, Homo sapiens; identical to SEQ ID NO: 901827

SEQ ID NO: 901839 - protein, 682 aa, Homo sapiens
SPLSPALGSHPCVPGPNHSPERAAGGVWLGGPRRVKHLSPPYLKACPLSTSFTLIKTSRMQQDGLGVGTRNGSGKGRSVHPSWPWCAPRPLRYFGRDARARRAQTAAMALLAGGLSRGLGSHPAAAGRDAVVFVWLLLSTWCTAPARAIQVTVSNPYHVVILFQPVTLPCTYQMTSTPTQPIVIWKYKSFCRDRIADAFSPASVDNQLNAQLAAGNPGYNPYVECQDSVRTVRVVATKQGNAVTLGDYYQGRRITITGNADLTFDQTAWGDSGVYYCSVVSAQDLQGNNEAYAELIVLDWLFVVVVCLAAFLIFLLLGICWCQCCPHTCCCYVRCPCCPDKCCCPEALYAAGKAATSGVPSIYAPSTYAHLSPAKTPPPPAMIPMGPAYNGYPGGYPGDVDRSSSAGGQGSYVPLLRDTDSSVASEVRSGYRIQASQQDDSMRVLYYMEKELANFDPSRPGPPSGRVERAMSEVTSLHEDDWRSRPSRGPALTPIRDEEWGGHSPRSPRGWDQEPAREQAGGGWRARRPRARSVDALDDLTPPSTADNGGRRSRAYMPPRSRSRDDLYDQDDSRDFPRSRDPHYDDFRSRERPPADPRSHHHRTRDPRDNGSRSGDLPYDGRLLEEAVRKKGSEERRRPHKEEEEEAYYPPAPPPYSETDSQASRERRLKKNLALSRESLVV

SEQ ID NO: 901840 - protein, 124 aa, Homo sapiens
DPHYDDFRSRERPPADPRSHHHRTRDPRDNGSRSGDLPYDGRLLEEAVRKKGSEERRRPHKEEEEEAYYPPAPPPYSETDSQASRERRLKKVRAALPGVQTVPGPPAGPRGSYPSFFLPCRTWP

SEQ ID NO: 901841 - protein, 613 aa, Homo sapiens
YRRNNLLFRSAVVRRSNTSPMGFLRPGSCSPVPADTAQTVGRRLSTGSSRPYSPSPLVGTIPEQFSQCCCGHPQGHDSRSRNSSGSPVPQAQSPQSLLSGARLQSAPTLTDIYQNKQKLRKQHSDPVCPSHTGAGYSYSPQPSRPGSLGTSPTKHLGSSPRSSDWFFKTPLPTIIGSPTKTTAPFKIPKTQASSNLLALVTRHGPAEEQSKDGNEPRECAHCLLVQGSERQRAEQQSKAVFGRSVSTGKLSDQQGKTPICRHQGSTDSLNTERPMDIAPAGACGGVLAPPAGTAASSKAVLFTVGSPPHSAAAPTCTHMFLRTRTTSVGPSNSGGSLCAMSGRVCVGSPPGPGFGSSPPGAEAAPSLRYVPYGASPPSLEGLITFEAPELPEETLMEREHTDTLRHLNVMLMFTECVLDLTAMRGGNPELCTSAVSLYQIQESVVVDQISQLSKDWGRVEQLVLYMKAAQLLAASLHLAKAQIKSGKLSPSTAVKQVVKNLNERYKFCITMCKKLTEKLNRFFSDKQRFIDEINSVTAEKLIYNCAVEMVQSAALDEMFQQTEDIVYRYHKAALLLEGLSRILQDPADIENVHKYKCSIERRLSALCHSTATV

SEQ ID NO: 901842 - protein, 613 aa, Homo sapiens; identical to SEQ ID NO: 901841

SEQ ID NO: 901843 - protein, 646 aa, Homo sapiens
YRRNNLLFRSAVVRRSNTSPMGFLRPGSCSPVPADTAQTVGRRLSTGSSRPYSPSPLVGTIPEQFSQCCCGHPQGHDSRSRNSSGSPVPQAQSPQSLLSGARLQSAPTLTDIYQNKQKLRKQHSDPVCPSHTGAGYSYSPQPSRPGSLGTSPTKHLGSSPRSSDWFFKTPLPTIIGSPTKTTAPFKIPKTQASSNLLALVTRHGPAEEQSKDGNEPRECAHCLLVQGSERQRAEQQSKAVFGRSVSTGKLSDQQGKTPICRHQGSTDSLNTERPMDIAPAGACGGVLAPPAGTAASSKAVLFTVGSPPHSAAAPTCTHMFLRTRTTSVGPSNSGGSLCAMSGRVCVGSPPGPGFGSSPPGAEAAPSLRYVPYGASPPSLEGLITFEAPELPEETLMEREHTDTLRHLNVMLMFTECVLDLTAMRGGNPELCTSAVSLYQIQESVVVDQISQLSKDWGRVEQLVLYMKAAQLLAASLHLAKAQIKSGKLSPSTAVKQVVKNLNERYKFCITMCKKLTEKLNRFFSDKQRFIDEINSVTAEKLIYNCAVEMVQSAALDEMFQQTEDIVYRYHKAALLLEGLSRILQDPADIENVHKSPQPCEQQAHPVDRWWEREEEGKEGRAFPFGAPMSPAGPICLVEGSKISRNR

SEQ ID NO: 901844 - protein, 586 aa, Homo sapiens
YRRNNLLFRSAVVRRSNTSPMGFLRPGSCSPVPADTAQTVGRRLSTGSSRPYSPSPLVGTIPEQFSQCCCGHPQGHDSRSRNSSGSPVPQAQSPQSLLSGARLQSAPTLTDIYQNKQKLRKQHSDPVCPSHTGAGYSYSPQPSRPGSLGTSPTKHLGSSPRSSDWFFKTPLPTIIGSPTKTTAPFKIPKTQASSNLLALVTRHGPAEEQSKDGNEPRECAHCLLVQGSERQRAEQQSKAVFGRSVSTGKLSDQQGKTPICRHQGSTDSLNTERPMDIGSPPHSAAAPTCTHMFLRTRTTSVGPSNSGGSLCAMSGRVCVGSPPGPGFGSSPPGAEAAPSLRYVPYGASPPSLEGLITFEAPELPEETLMEREHTDTLRHLNVMLMFTECVLDLTAMRGGNPELCTSAVSLYQIQESVVVDQISQLSKDWGRVEQLVLYMKAAQLLAASLHLAKAQIKSGKLSPSTAVKQVVKNLNERYKFCITMCKKLTEKLNRFFSDKQRFIDEINSVTAEKLIYNCAVEMVQSAALDEMFQQTEDIVYRYHKAALLLEGLSRILQDPADIENVHKYKCSIERRLSALCHSTATV

SEQ ID NO: 901845 - protein, 357 aa, Homo sapiens [sequence omitted]

SEQ ID NO: 901846 - protein, 111 aa, Homo sapiens
PATGMREESGGLAGSNLSWGRVFLVFLGRRGGSASWDQRLGGAAEFTDGFSGKDNIFTPMSNVKTPRSRCVVYWICYNFTVLKEDALILCKMGLVNEKDQSCQEKRHNDEI

SEQ ID NO: 901847 - protein, 357 aa, Homo sapiens [sequence omitted]

SEQ ID NO: 901848 - protein, 474 aa, Homo sapiens
PPTHNLSPRNTHKRNSQPRGRVFLDEEKSAGKTLTHAQTCGRPWCAQRRAGFWEPPVDKTDKPACLRSPLPENHPLAPPSVRGARPPRDPGGVAGCGGEEVAARAGTSVSEAPQNSQMDSVEKTTNRSEQKSRKFLKSLIRKQPQELLLVIGTGVSAAVAPGIPALCSWRSCIEAVIEAAEQLEVLHPGDVAEFRRKVTKDRDLLVVAHDLIRKMSPRTGDAKPSFFQDCLMEVFDDLEQHIRSPLVLQSILSLMDRGAMVLTTNYDNLLEAFGRRQNKPMESLDLKDKTKVLEWARGHMKYGVLHIHGLYTDPCGVVLDPSGYKDVTQDAEVMEVLQNLYRTKSFLFVGCGETLRDQIFQALFLYSVPNKVDLEHYMLVLKENEDHFFKHQADMLLHGIKVVSYGDCFDHFPGYVQDLATQICKQQSPDADRVDSTTLLGNACQDCAKRKLEENGIEVSKKRTQSDTDDAGGS

SEQ ID NO: 901849 - protein, 183 aa, Homo sapiens
MKYGVLHIHGLYTDPCGVVLDPSGYKDVTQDAEVMVRPVLISMEVLQNLYRTKSFLFVGCGETLRDQIFQALFLYSVPNKVDLEHYMLVLKENEDHFFKHQADMLLHGIKVVSYGDCFDHFPGYVQDLATQICKQQSPDADRVDSTTLLGNACQDCAKRKLEENGIEVSKKRTQSDTDDAGGS

SEQ ID NO: 901850 - protein, 175 aa, Homo sapiens
MKYGVLHIHGLYTDPCGVVLDPSGYKDVTQDAEVMEVLQNLYRTKSFLFVGCGETLRDQIFQALFLYSVPNKVDLEHYMLVLKENEDHFFKHQADMLLHGIKVVSYGDCFDHFPGYVQDLATQICKQQSPDADRVDSTTLLGNACQDCAKRKLEENGIEVSKKRTQSDTDDAGGS

SEQ ID NO: 901851 - protein, 73 aa, Homo sapiens
NACQDCAKRKLEENGIEVSKKRTQSDTGNACQDCAKRKLEENGIEVSKKRTQSDTGVCAILMLAGVLAWDSPL

SEQ ID NO: 901852 - protein, 432 aa, Homo sapiens
MDSVEKTTNRSEQKSRKFLKSLIRKQPQELLLVIGTGVSAAVAPGIPALCSWRSCIEAVIEAAEQLEVLHPGDVAEFRRKVTKDRDLLVVAHDLIRKMSPRTGDAKPSFFQDCLMEVFDDLEQHIRSPLVLQSILSLMDRGAMVLTTNYDNLLEAFGRRQNKPMESLDLKDKTKVLEWARGHMKYGVLHIHGLYTDPCGVVLDPSGYKDVTQDAEVMVRPVLISMEVLQNLYRTKSFLFVGCGETLRDQIFQALFLYSVPNKVDLEHYMLVLKENEDHFFKHQADMLLHGIKVVSYGDCFDHFPGYVQDLATQICKQQSPDADRVDSTTLLGNACQDCAKRKLEENGIEVSKKRTQSDTGIVSVLFVGSCLGSLLLAGIFRDPCCALMPRALWWEDGAYVLSGPESTGGLLSRDPDLSPQPDSNCPELLVPL

SEQ ID NO: 901853 - protein, 377 aa, Homo sapiens
MDSVEKTTNRSEQKSRKFLKSLIRKQPQELLLVIGTGVSAAVAPGIPALCSWRSCIEAVIEAAEQLEVLHPGDVAEFRRKVTKDRDLLVVAHDLIRKMSPRTGDAKPSFFQDCLMEVFDDLEQHIRSPLVLQSILSLMDRGAMVLTTNYDNLLEAFGRRQNKPMESLDLKDKTKVLEWARGHMKYGVLHIHGLYTDPCGVVLDPSGYKDVTQDAEVMVRPVLISMEVLQNLYRTKSFLFVGCGETLRDQIFQALFLYSVPNKVDLEHYMLVLKENEDHFFKHQADMLLHGIKVVSYGDCFDHFPGYVQDLATQICKQQSPDADRVDSTTLLGNACQDCAKRKLEENGIEVSKKRTQSDTGVCAILMLAGVLAWDSPL

SEQ ID NO: 901854 - protein, 357 aa, Homo sapiens [sequence omitted]

SEQ ID NO: 901855 - protein, 357 aa, Homo sapiens [sequence omitted]

SEQ ID NO: 901856 - protein, 175 aa, Homo sapiens; identical to SEQ ID NO: 901850

SEQ ID NO: 901857 - protein, 115 aa, Homo sapiens
RGLPLTGVHIAGRAYCLVDLAVEHWAGVFFNTCEICAPRRHHLHLQPRLSPPSHVSLGRSSWPLLYRKPWPVLHVGERSQAWGSQRNRQAYSSPYLQQALTVCLLKLPHPQSTKK

SEQ ID NO: 901858 - protein, 357 aa, Homo sapiens [sequence omitted]

SEQ ID NO: 901859 - protein, 223 aa, Homo sapiens
MDSVEKTTNRSEQKSRKFLKSLIRKQPQELLLVIGTGVSAAVAPGIPALCSWRSCIEAVIEAAEQLEVLHPGDVAEFRRKVTKDRDLLVVAHDLIRKMSPRTGDAKPSFFQDCLMEVFDDLEQHIRSPLVLQSILSLMDRGAMVLTTNYDNLLEAFGRRQNKPMESLDLKDKTKVWAGGAGGLWPAAEQAHGVPGLEGQDQGMGWGCGRSLAGGRTSPWSPWT

SEQ ID NO: 901860 - protein, 238 aa, Homo sapiens
HQPEKLIFESCGYEANYLGSMLIKDLRGTESTQDACAKMRKSTEHMKKIPTIILSITYKGVKFIDASNKAGTENSDNGNRLGQGVPEACLSLRIPEHGFPQQNVIAEHEIRNISCAAQDPEDLCTFAYITKDLQTSHHYCHVFSTVDVNLTYEIILTLGQAFEVAYQLALQAQKSRATGASAAEMIETKSSKPVPKPRVGVRKSALEPPDMDQDAQSHASVSWVVDPKPDSKRSLSTN

SEQ ID NO: 901861 - protein, 205 aa, Homo sapiens
HQPEKLIFESCGYEANYLGSMLIKDLRGTESTQDACAKMRKSTEHMKKIPTIILSITYKGVKFIDASNKNVIAEHEIRNISCAAQDPEDLCTFAYITKDLQTSHHYCHVFSTVDVNLTYEIILTLGQAFEVAYQLALQAQKSRATGASAAEMIETKSSKPVPKPRVGVRKSALEPPDMDQDAQSHASVSWVVDPKPDSKRSLSTN

SEQ ID NO: 901862 - protein, 205 aa, Homo sapiens; identical to SEQ ID NO: 901861

SEQ ID NO: 901863 - protein, 205 aa, Homo sapiens; identical to SEQ ID NO: 901861

SEQ ID NO: 901864 - protein, 205 aa, Homo sapiens; identical to SEQ ID NO: 901861

SEQ ID NO: 901865 - protein, 205 aa, Homo sapiens; identical to SEQ ID NO: 901861

SEQ ID NO: 901866 - protein, 1613 aa, Homo sapiens
MGAVLRSLLACSFCVLLRAAPLLLYANRRDLRLVDATNGKENATIVVGGLEDAAAVDFVFSHGLIYWSDVSEEAIKRTEFNKTESVQNVVVSGLLSPDGLACDWLGEKLYWTDSETNRIEVSNLDGSLRKVLFWQELDQPRAIALDPSSGFMYWTDWGEVPKIERAGMDGSSRFIIINSEIYWPNGLTLDYEEQKLYWADAKLNFIHKSNLDGTNRQAVVKGSLPHPFALTLFEDILYWTDWSTHSILACNKYTGEGLREIHSDIFSPMDIHAFSQQRQPNATNPCGIDNGGCSHLCLMSPVKPFYQCACPTGVKLLENGKTCKDGATELLLLARRTDLRRISLDTPDFTDIVLQLEDIRHAIAIDYDPVEGYIYWTDDEVRAIRRSFIDGSGSQFVVTAQIAHPDGIAVDWVARNLYWTDTGTDRIEVTRLNGTMRKILISEDLEEPRAIVLDPMVGYMYWTDWGEIPKIERAALDGSDRVVLVNTSLGWPNGLALDYDEGKIYWGDAKTDKIEVMNTDGTGRRVLVEDKIPHIFGFTLLGDYVYWTDWQRRSIERVHKRSAEREVIIDQLPDLMGLKATNVHRVIGSNPCAEENGGCSHLCLYRPQGLRCACPIGFELISDMKTCIVPEAFLLFSRRADIRRISLETNNNNVAIPLTGVKEASALDFDVTDNRIYWTDISLKTISRAFMNGSALEHVVEFGLDYPEGMAVDWLGKNLYWADTGTNRIEVSKLDGQHRQVLVWKDLDSPRALALDPAEGFMYWTEWGGKPKIDRAAMDGSERTTLVPNVGRANGLTIDYAKRRLYWTDLDTNLIESSNMLGLNREVIADDLPHPFGLTQYQDYIYWTDWSRRSIERANKTSGQNRTIIQGHLDYVMDILVFHSSRQSGWNECASSNGHCSHLCLAVPVGGFVCGCPAHYSLNADNRTCSAPTTFLLFSQKSAINRMVIDEQQSPDIILPIHSLRNVRAIDYDPLDKQLYWIDSRQNMIRKAQEDGSQGFTVVVSSVPSQNLEIQPYDLSIDIYSRYIYWTCEATNVINVTRLDGRSVGVVLKGEQDRPRAIVVNPEKGYMYFTNLQERSPKIERAALDGTEREVLFFSGLSKPIALALDSRLGKLFWADSDLRRIESSDLSGANRIVLEDSNILQPVGLTVFENWLYWIDKQQQMIEKIDMTGREGRTKVQARIAQLSDIHAVKELNLQEYRQHPCAQDNGGCSHICLVKGDGTTRCSCPMHLVLLQDELSCGEPPTCSPQQFTCFTGEIDCIPVAWRCDGFTECEDHSDELNCPVCSESQFQCASGQCIDGALRCNGDANCQDKSDEKNCEVLCLIDQFRCANGQCIGKHKKCDHNVDCSDKSDELDCYPTEEPAPQATNTVGSVIGVIVTIFVSGTVYFICQRMLCPRMKGDGETMTNDYVVHGPASVPLGYVPHPSSLSGSLPGMSRGKSMISSLSIMGGSSGPPYDRAHVTGASSSSSSSTKGTYFPAILNPPPSPATERSHYTMEFGYSSNSPSTHRSYSYRPYSYRHFAPPTTPCSTDVCDSDYAPSRRMTSVATAKGYTSDLNYDSEPVPPPPTPRSQYLSAEENYESCPPSPYTERSYSHHLYPPPPSPCTDSS

SEQ ID NO: 901867 - protein, 1022 aa, Homo sapiens
MGAVLRSLLACSFCVLLRAAPLLLYANRRDLRLVDATNGKENATIVVGGLEDAAAVDFVFSHGLIYWSDVSEEAIKRTEFNKTESVQNVVVSGLLSPDGLACDWLGEKLYWTDSETNRIEVSNLDGSLRKVLFWQELDQPRAIALDPSSGFMYWTDWGEVPKIERAGMDGSSRFIIINSEIYWPNGLTLDYEEQKLYWADAKLNFIHKSNLDGTNRQAVVKGSLPHPFALTLFEDILYWTDWSTHSILACNKYTGEGLREIHSDIFSPMDIHAFSQQRQPNATNPCGIDNGGCSHLCLMSPVKPFYQCACPTGVKLLENGKTCKDGATELLLLARRTDLRRISLDTPDFTDIVLQLEDIRHAIAIDYDPVEGYIYWTDDEVRAIRRSFIDGSGSQFVVTAQIAHPDGIAVDWVARNLYWTDTGTDRIEVTRLNGTMRKILISEDLEEPRAIVLDPMVGYMYWTDWGEIPKIERAALDGSDRVVLVNTSLGWPNGLALDYDEGKIYWGDAKTDKIEVMNTDGTGRRVLVEDKIPHIFGFTLLGDYVYWTDWQRRSIERVHKRSAEREVIIDQLPDLMGLKATNVHRVIGSNPCAEENGGCSHLCLYRPQGLRCACPIGFELISDMKTCIVPEAFLLFSRRADIRRISLETNNNNVAIPLTGVKEASALDFDVTDNRIYWTDISLKTISRAFMNGSALEHVVEFGLDYPEGMAVDWLGKNLYWADTGTNRIEVSKLDGQHRQVLVWKDLDSPRALALDPAEGFMYWTEWGGKPKIDRAAMDGSERTTLVPNVGRANGLTIDYAKRRLYWTDLDTNLIESSNMLGLNREVIADDLPHPFGLTQYQDYIYWTDWSRRSIERANKTSGQNRTIIQGHLDYVMDILVFHSSRQSGWNECASSNGHCSHLCLAVPVGGFVCGCPAHYSLNADNRTCSAPTTFLLFSQKSAINRMVIDEQQSPDIILPIHSLRNVRAIDYDPLDKQLYWIDSRQNMIRKAQEDGSQVIESLVQNSFLLTNNWTHQPLCFT

SEQ ID NO: 901868 - protein, 1022 aa, Homo sapiens; identical to SEQ ID NO: 901867

SEQ ID NO: 901869 - protein, 1022 aa, Homo sapiens; identical to SEQ ID NO: 901867

SEQ ID NO: 901870 - protein, 1533 aa, Homo sapiens
MGAVLRSLLACSFCVLLRAAPLLLYANRRDLRLVDATNGKENATIVVGGLEDAAAVDFVFSHGLIYWSDVSEEAIKRTEFNKTESVQNVVVSGLLSPDGLACDWLGEKLYWTDSETNRIEVSNLDGSLRKVLFWQELDQPRAIALDPSSGFMYWTDWGEVPKIERAGMDGSSRFIIINSEIYWPNGLTLDYEEQKLYWADAKLNFIHKSNLDGTNRQAVVKGSLPHPFALTLFEDILYWTDWSTHSILACNKYTGEGLREIHSDIFSPMDIHAFSQQRQPNATNPCGIDNGGCSHLCLMSPVKPFYQCACPTGVKLLENGKTCKDGATELLLLARRTDLRRISLDTPDFTDIVLQLEDIRHAIAIDYDPVEGYIYWTDDEVRAIRRSFIDGSGSQFVVTAQIAHPDGIAVDWVARNLYWTDTGTDRIEVTRLNGTMRKILISEDLEEPRAIVLDPMVGYMYWTDWGEIPKIERAALDGSDRVVLVNTSLGWPNGLALDYDEGKIYWGDAKTDKIEVMNTDGTGRRVLVEDKIPHIFGFTLLGDYVYWTDWQRRSIERVHKRSAEREVIIDQLPDLMGLKATNVHRVIGSNPCAEENGGCSHLCLYRPQGLRCACPIGFELISDMKTCIVPEAFLLFSRRADIRRISLETNNNNVAIPLTGVKEASALDFDVTDNRIYWTDISLKTISRAFMNGSALEHVVEFGLDYPEGMAVDWLGKNLYWADTGTNRIEVSKLDGQHRQVLVWKDLDSPRALALDPAEGFMYWTEWGGKPKIDRAAMDGSERTTLVPNVGRANGLTIDYAKRRLYWTDLDTNLIESSNMLGLNREVIADDLPHPFGLTQYQDYIYWTDWSRRSIERANKTSGQNRTIIQGHLDYVMDILVFHSSRQSGWNECASSNGHCSHLCLAVPVGGFVCGCPAHYSLNADNRTCSAPTTFLLFSQKSAINRMVIDEQQSPDIILPIHSLRNVRAIDYDPLDKQLYWIDSRQNMIRKAQEDGSQGFTVVVSSVPSQNLEIQPYDLSIDIYSRYIYWTCEATNVINVTRLDGRSVGVVLKGEQDRPRAIVVNPEKGYMYFTNLQERSPKIERAALDGTEREVLFFSGLSKPIALALDSRLGKLFWADSDLRRIESSDLSGANRIVLEDSNILQPVGLTVFENWLYWIDKQQQMIEKIDMTGREGRTKVQARIAQLSDIHAVKELNLQEYRQHPCAQDNGGCSHICLVKGDGTTRCSCPMHLVLLQDELSCGEPPTCSPQQFTCFTGEIDCIPVAWRCDGFTECEDHSDELNCPVCSESQFQCASGQCIDGALRCNGDANCQDKSDEKNCEVLCLIDQFRCANGQCIGKHKKCDHNVDCSDKSDELDCYPTEEPAPQATNTVGSVIGVIVTIFVSGTVYFICQRMLCPRMKGDGETMTNDYVVHGPASVPLGYVPHPSSLSGSLPGMSRGKSMISSLSIMGGSSGPPYDRAHVTGASSSSSSSTKGTYFPAILNPPPSPATERSHYTMEFGYSSNSPSTHRSYSYRPYSYRPFTFPLHSPA

SEQ ID NO: 901871 - protein, 283 aa, Homo sapiens [sequence omitted]

SEQ ID NO: 901872 - protein, 1022 aa, Homo sapiens; identical to SEQ ID NO: 901867

SEQ ID NO: 901873 - protein, 1022 aa, Homo sapiens; identical to SEQ ID NO: 901867

SEQ ID NO: 901874 - protein, 916 aa, Homo sapiens
RPPRLLASPTSGHPSPVREENARREDGGRPEEPPGLQLLCAPERFMYWTDWGEVPKIERAGMDGSSRFIIINSEIYWPNGLTLDYEEQKLYWADAKLNFIHKSNLDGTNRQAVVKGSLPHPFALTLFEDILYWTDWSTHSILACNKYTGEGLREIHSDIFSPMDIHAFSQQRQPNATNPCGIDNGGCSHLCLMSPVKPFYQCACPTGVKLLENGKTCKDGATELLLLARRTDLRRISLDTPDFTDIVLQLEDIRHAIAIDYDPVEGYIYWTDDEVRAIRRSFIDGSGSQFVVTAQIAHPDGIAVDWVARNLYWTDTGTDRIEVTRLNGTMRKILISEDLEEPRAIVLDPMVGYMYWTDWGEIPKIERAALDGSDRVVLVNTSLGWPNGLALDYDEGKIYWGDAKTDKIEVMNTDGTGRRVLVEDKIPHIFGFTLLGDYVYWTDWQRRSIERVHKRSAEREVIIDQLPDLMGLKATNVHRVIGSNPCAEENGGCSHLCLYRPQGLRCACPIGFELISDMKTCIVPEAFLLFSRRADIRRISLETNNNNVAIPLTGVKEASALDFDVTDNRIYWTDISLKTISRAFMNGSALEHVVEFGLDYPEGMAVDWLGKNLYWADTGTNRIEVSKLDGQHRQVLVWKDLDSPRALALDPAEGFMYWTEWGGKPKIDRAAMDGSERTTLVPNVGRANGLTIDYAKRRLYWTDLDTNLIESSNMLGLNREVIADDLPHPFGLTQYQDYIYWTDWSRRSIERANKTSGQNRTIIQGHLDYVMDILVFHSSRQSGWNECASSNGHCSHLCLAVPVGGFVCGCPAHYSLNADNRTCSAPTTFLLFSQKSAINRMVIDEQQSPDIILPIHSLRNVRAIDYDPLDKQLYWIDSRQNMIRKAQEDGSQVIESLVQNSFLLTNNWTHQPLCFT

SEQ ID NO: 901875 - protein, 1430 aa, Homo sapiens
MGAVLRSLLACSFCVLLRAAPLLLYANRRDLRLVDATNGKENATIVVGGLEDAAAVDFVFSHGLIYWSDVSEEAIKRTEFNKTESVQNVVVSGLLSPDGLACDWLGEKLYWTDSETNRIEVSNLDGSLRKVLFWQELDQPRAIALDPSSGFMYWTDWGEVPKIERAGMDGSSRFIIINSEIYWPNGLTLDYEEQKLYWADAKLNFIHKSNLDGTNRQAVVKGSLPHPFALTLFEDILYWTDWSTHSILACNKYTGEGLREIHSDIFSPMDIHAFSQQRQPNATNPCGIDNGGCSHLCLMSPVKPFYQCACPTGVKLLENGKTCKDGATELLLLARRTDLRRISLDTPDFTDIVLQLEDIRHAIAIDYDPVEGYIYWTDDEVRAIRRSFIDGSGSQFVVTAQIAHPDGIAVDWVARNLYWTDTGTDRIEVTRLNGTMRKILISEDLEEPRAIVLDPMVGYMYWTDWGEIPKIERAALDGSDRVVLVNTSLGWPNGLALDYDEGKIYWGDAKTDKIEVMNTDGTGRRVLVEDKIPHIFGFTLLGDYVYWTDWQRRSIERVHKRSAEREVIIDQLPDLMGLKATNVHRVIGSNPCAEENGGCSHLCLYRPQGLRCACPIGFELISDMKTCIVPEAFLLFSRRADIRRISLETNNNNVAIPLTGVKEASALDFDVTDNRIYWTDISLKTISRAFMNGSALEHVVEFGLDYPEGMAVDWLGKNLYWADTGTNRIEVSKLDGQHRQVLVWKDLDSPRALALDPAEGFMYWTEWGGKPKIDRAAMDGSERTTLVPNVGRANGLTIDYAKRRLYWTDLDTNLIESSNMLGLNREVIADDLPHPFGLTQYQDYIYWTDWSRRSIERANKTSGQNRTIIQGHLDYVMDILVFHSSRQSGWNECASSNGHCSHLCLAVPVGGFVCGCPAHYSLNADNRTCSAPTTFLLFSQKSAINRMVIDEQQSPDIILPIHSLRNVRAIDYDPLDKQLYWIDSRQNMIRKAQEDGSQGFTVVVSSVPSQNLEIQPYDLSIDIYSRYIYWTCEATNVINVTRLDGRSVGVVLKGEQDRPRAIVVNPEKGYMYFTNLQERSPKIERAALDGTEREVLFFSGLSKPIALALDSRLGKLFWADSDLRRIESSDLSGANRIVLEDSNILQPVGLTVFENWLYWIDKQQQMIEKIDMTGREGRTKVQARIAQLSDIHAVKELNLQEYRQHPCAQDNGGCSHICLVKGDGTTRCSCPMHLVLLQDELSCGEPPTCSPQQFTCFTGEIDCIPVAWRCDGFTECEDHSDELNCPVCSESQFQCASGQCIDGALRCNGDANCQDKSDEKNCEVLCLIDQFRCANGQCIGKHKKCDHNVDCSDKSDELDCYPTEEPAPQATNTVGSVIGVIVTIFVSGTVYFICQRMLCPRMKGDGANINVGPCNNRELTQGFDVVDAGS

SEQ ID NO: 901876 - protein, 94 aa, Homo sapiens
DFVFSHGLIYWSDVSEEAIKRTEFNKTESVQNVVVSGLLSPDGLACDWLGEKLYWTDSETNRIEVSNLDGSLRKVLFWQELDQPRAIALDPSSG

SEQ ID NO: 901877 - protein, 282 aa, Homo sapiens
MSDVEENNFEGRESRSQSKSPTGTPARVKSESRSGSRSPSRVSKHSESHSRSRSKSRSRSRRHSHRRYTRSRSHSHSHRRRSRSRSYTPEYRRRRSRSHSPMSNRRRHTGSRANPDPNTCLGVFGLSLYTTERDLREVFSRYGPLSGVNVVYDQRTGRSRGFAFVYFERIDDSKEAMERANGMELDGRRIRVDYSITKRAHTPTPGIYMGRPTHSGGGGGGGGGGGGGGGGRRRDSYYDRGYDRGYDRYEDYDYRYRRRSPSPYYSRYRSRSRSRSYSPRRY

SEQ ID NO: 901878 - protein, 181 aa, Homo sapiens
MSNRRRHTGSRANPDPNTCLGVFGLSLYTTERDLREVFSRYGPLSGVNVVYDQRTGRSRGFAFVYFERIDDSKEAMERANGMELDGRRIRVDYSITKRAHTPTPGIYMGRPTHSGGGGGGGGGGGGGGGGRRRDSYYDRGYDRGYDRYEDYDYRYRRRSPSPYYSRYRSRSRSRSYSPRRY

SEQ ID NO: 901879 - protein, 181 aa, Homo sapiens; identical to SEQ ID NO: 901878

SEQ ID NO: 901880 - protein, 118 aa, Homo sapiens
MSNRRRHTGSRAMERANGMELDGRRIRVDYSITKRAHTPTPGIYMGRPTHSGGGGGGGGGGGGGGGGRRRDSYYDRGYDRGYDRYEDYDYRYRRRSPSPYYSRYRSRSRSRSYSPRRY

SEQ ID NO: 901881 - protein, 181 aa, Homo sapiens; identical to SEQ ID NO: 901878

SEQ ID NO: 901882 - protein, 181 aa, Homo sapiens; identical to SEQ ID NO: 901878

SEQ ID NO: 901883 - protein, 181 aa, Homo sapiens; identical to SEQ ID NO: 901878

SEQ ID NO: 901884 - protein, 231 aa, Homo sapiens
MYFSQRSRSRRHSHRRYTRSRSHSHSHRRRSRSRSYTPEYRRRRSRSHSPMSNRRRHTGSRANPDPNTCLGVFGLSLYTTERDLREVFSRYGPLSGVNVVYDQRTGRSRGFAFVYFERIDDSKEAMERANGMELDGRRIRVDYSITKRAHTPTPGIYMGRPTHSGGGGGGGGGGGGGGGGRRRDSYYDRGYDRGYDRYEDYDYRYRRRSPSPYYSRYRSRSRSRSYSPRRY

SEQ ID NO: 901885 - protein, 106 aa, Homo sapiens
MERANGMELDGRRIRVDYSITKRAHTPTPGIYMGRPTHSGGGGGGGGGGGGGGGGRRRDSYYDRGYDRGYDRYEDYDYRYRRRSPSPYYSRYRSRSRSRSYSPRRY

SEQ ID NO: 901886 - protein, 179 aa, Homo sapiens
  misc_feature (179)..(179): Xaa can be any naturally occurring amino acid
MSDVEENNFEGRESRSQSKSPTGTPARVKSESRSGSRSPSRVSKHSESHSRSRSKSRSRSRRHSHRRYTRSRSHSHSHRRRSRIFSRYGPLSGVNVVYDQRTGRSRGFAFVYFERIDDSKEAMERANGMELDGRRIRVDYSITKRAHTPTPGIYMGRPTHSGGGLVEEAAAVEVEVVAX

SEQ ID NO: 901887 - protein, 74 aa, Homo sapiens
RRPPPLRRALRRPGDFWRRRRHFAGACDRVGVEWSGCGCRLFPLPHGPVSGLIRPSALEPRLVSYLVLGSASST

SEQ ID NO: 901888 - protein, 180 aa, Homo sapiens
MSNRRRHTGSRANPDPNTCLGVFGLSLYTTERDLREVFSRYGPLSGVNVVYDQRTGRSRGFAFVYFERIDDSKEAMERANGMELDGRRIRVDYSITKRAHTPTPGIYMGRPTHSGGGGGGGGGGGGGGGGRRRDSYYDRGYDRGYDRYEDYDYRYRRRSPSPYYSRYRSRSRSRSYSPSM

SEQ ID NO: 901889 - protein, 181 aa, Homo sapiens; identical to SEQ ID NO: 901878

SEQ ID NO: 901890 - protein, 113 aa, Homo sapiens
MSNRRRHTGSRANPDPNTCLGVFGLSLYTTERDLREVFSRYGPLSGVNVVYDQRTGRSRGFAFVYFERIDDSKEAMERANGMELDGRRIRVDYSITKRAHTPTPGIYMGRPTQ

SEQ ID NO: 901891 - protein, 85 aa, Homo sapiens
MSNRRRHTGSRANPDPNTCLGVFGLSLYTTERDLREVFSRYGPLSGVNVVYDQRTGRSRGFAFVYFERIDDSKEVNLSFICLIIV

SEQ ID NO: 901892 - protein, 267 aa, Homo sapiens
MSDVEENNFEGRESRSQSKSPTGTPARVKSESRSGSRSPSRVSKHSESHSRSRSKSRSHSHSHRRRSRSRSYTPEYRRRRSRSHSPMSNRRRHTGSRANPDPNTCLGVFGLSLYTTERDLREVFSRYGPLSGVNVVYDQRTGRSRGFAFVYFERIDDSKEAMERANGMELDGRRIRVDYSITKRAHTPTPGIYMGRPTHSGGGGGGGGGGGGGGGGRRRDSYYDRGYDRGYDRYEDYDYRYRRRSPSPYYSRYRSRSRSRSYSPRRY

SEQ ID NO: 901893 - protein, 233 aa, Homo sapiens
  misc_feature (233)..(233): Xaa can be any naturally occurring amino acid
MSDVEENNFEGRESRSQSKSPTGTPARVKSESRSGSRSPSRVSKHSESHSRSRSKSRSRSRRHSHRRYTRSRSHSHSHRRRSRSRSYTPEYRRRRSRSHSPMSNRRRHTGSRANPDPNTCLGVFGLSLYTTERDLREVFSRYGPLSGVNVVYDQRTGRSRGFAFVYFERIDDSKEAMERANGMELDGRRIRVDYSITKRAHTPTPGIYMGRPTHSGGGLVEEAAAVEVEVVAX

SEQ ID NO: 901894 - protein, 219 aa, Homo sapiens
RTGLTAVSHNGSYVYFPKIGDKNKVTIWDLAEGEEQDSLDTSSEIRCLEVAEQRKLLFTGLVSGVVLVFPLNSRQDVICIPPPEARKAINCMSLSKCEDRLAIAYDNIVLVLDITSGDPCPVIDGPRYTFYTQLPETLSSVAILTDYRVVYSMTNGDLFLYECATSKAFPLETHRSRVACVEVSHKEQLVVSGSEDALLCLWDLQARKWKFEMSYTVGG

SEQ ID NO: 901895 - protein, 40 aa, Homo sapiens
MKIRGPVWKNLEKAEDPGKGGRHADRTAPPEIVTHCIEIA

SEQ ID NO: 901896 - protein, 233 aa, Homo sapiens
MSQSNRELVVDFLSYKLSQKGYSWSQFSDVEENRTEAPEGTESEMETPSAINGNPSWHLADSPAVNGATGHSSSLDAREVIPMAAVKQALREAGDEFELRYRRAFSDLTSQLHITPGTAYQSFEQVVNELFRDGVNWGRIVAFFSFGGALCVESVDKEMQVLVSRIAAWMATYLNDHLEPWIQENGGWDTFVELYGNNAAAESRKGQERFNRWFLTGMTVAGVVLLGSLFSRK

SEQ ID NO: 901897 - protein, 233 aa, Homo sapiens; identical to SEQ ID NO: 901896

SEQ ID NO: 901898 - protein, 233 aa, Homo sapiens; identical to SEQ ID NO: 901896

SEQ ID NO: 901899 - protein, 233 aa, Homo sapiens; identical to SEQ ID NO: 901896

SEQ ID NO: 901900 - protein, 233 aa, Homo sapiens; identical to SEQ ID NO: 901896

SEQ ID NO: 901901 - protein, 233 aa, Homo sapiens; identical to SEQ ID NO: 901896

SEQ ID NO: 901902 - protein, 200 aa, Homo sapiens
MSQSNRELVVDFLSYKLSQKGYSWSQFSDVEENRTEAPEGTESEMETPSAINGNPSWHLADSPAVNGATGHSSSLDAREVIPMAAVKQALREAGDEFELRYRRAFSDLTSQLHITPGTAYQSFEQVVNELFRDGVNWGRIVAFFSFGGALCVESVDKEMQVLVSRIAAWMATYLNDHLEPWIQENGGWVPDASFRFWLHH

SEQ ID NO: 901903 - protein, 175 aa, Homo sapiens
MSQSNRELVVDFLSYKLSQKGYSWSQFSDVEENRTEAPEGTESEMETPSAINGNPSWHLADSPAVNGATGHSSSLDAREVIPMAAVKQALREAGDEFELRYRRAFSDLTSQLHITPGTAYQSFEQVGYFCGTLWEQCSSREPKGPGTLQPLVPDGHDCGRRGSAGLTLQSEMTRH

SEQ ID NO: 901904 - protein, 175 aa, Homo sapiens; identical to SEQ ID NO: 901903

SEQ ID NO: 901905 - protein, 233 aa, Homo sapiens; identical to SEQ ID NO: 901896

SEQ ID NO: 901906 - protein, 233 aa, Homo sapiens; identical to SEQ ID NO: 901896

SEQ ID NO: 901907 - protein, 233 aa, Homo sapiens; identical to SEQ ID NO: 901896

SEQ ID NO: 901908 - protein, 233 aa, Homo sapiens; identical to SEQ ID NO: 901896

SEQ ID NO: 901909 - protein, 233 aa, Homo sapiens; identical to SEQ ID NO: 901896

SEQ ID NO: 901910 - protein, 233 aa, Homo sapiens; identical to SEQ ID NO: 901896

SEQ ID NO: 901911 - protein, 233 aa, Homo sapiens; identical to SEQ ID NO: 901896

SEQ ID NO: 901912 - protein, 233 aa, Homo sapiens; identical to SEQ ID NO: 901896

SEQ ID NO: 901913 - protein, 233 aa, Homo sapiens; identical to SEQ ID NO: 901896

SEQ ID NO: 901914 - protein, 233 aa, Homo sapiens; identical to SEQ ID NO: 901896

SEQ ID NO: 901915 - protein, 233 aa, Homo sapiens; identical to SEQ ID NO: 901896

SEQ ID NO: 901916 - protein, 233 aa, Homo sapiens; identical to SEQ ID NO: 901896

SEQ ID NO: 901917 - protein, 233 aa, Homo sapiens; identical to SEQ ID NO: 901896

SEQ ID NO: 901918 - protein, 115 aa, Homo sapiens
MSHDFCHQTQRRNQRRARASPSSTMKLAVTLTLVTLALCCSSASAEICPSFQRVIETLLMDTPSSYEAAMELFSPDQDMREAGAQLKKLVDTLPQKPRESIIKLMEKIAQSSLCN

SEQ ID NO: 901919 - protein, 80 aa, Homo sapiens
LLSSVSTASAEICPSFQRVIETLLMDTPSSYEAAMELFSPDQDMREAGAQLKKLVDTLPQKPRESIIKLMEKIAQSSLCN

SEQ ID NO: 901920 - protein, 80 aa, Homo sapiens; identical to SEQ ID NO: 901919

SEQ ID NO: 901921 - protein, 115 aa, Homo sapiens; identical to SEQ ID NO: 901918

SEQ ID NO: 901922 - protein, 115 aa, Homo sapiens; identical to SEQ ID NO: 901918

SEQ ID NO: 901923 - protein, 114 aa, Homo sapiens
QEKRRDVQRRRNQRRARASPSSTMKLAVTLTLVTLALCCSSASAEICPSFQRVIETLLMDTPSSYEAAMELFSPDQDMREAGAQLKKLVDTLPQKPRESIIKLMEKIAQSSLCN

SEQ ID NO: 901924 - protein, 115 aa, Homo sapiens; identical to SEQ ID NO: 901918

SEQ ID NO: 901925 - protein, 317 aa, Homo sapiens
TIERYRTEDDGPELDYTLMRVCKQMIKRFCPEADSKTMLQCLKQNKNSELMDPKCKQMITKRQITQNTDYRLNPMLRKACKADIPKFCHGILTKAKDDSELEGQVISCLKLRYADQRLSSDCEDQIRIIIQESALDYRLDPQLQLHCSDEISSLCAEEAAAQEQTGQVEECLKVNLLKIKTELCKKEVLNMLKESKADIFVDPVLHTACALDIKHHCAAITPGRGRQMSCLMEALEDKRVRLQPECKKRLNDRIEMWSYAAKVAPADGFSDLAMQVMTSPSKNYILSVISGSICILFLIGLMCGRITKRVTRELKDR

SEQ ID NO: 901926 - protein, 243 aa, Homo sapiens [sequence omitted]

SEQ ID NO: 901927 - protein, 317 aa, Homo sapiens; identical to SEQ ID NO: 901925

SEQ ID NO: 901928 - protein, 143 aa, Homo sapiens
VRVSATPGLGLTHSDVIAKDISLLFQVAPVLHTACALDIKHHCAAITPGRGRQMSCLMEALEDKRVRLQPECKKRLNDRIEMWSYAAKVAPADGFSDLAMQVMTSPSKNYILSVISGSICILFLIGLMCGRITKRVTRELKDR

SEQ ID NO: 901929 - protein, 67 aa, Homo sapiens
CIDYEFGVTQAKVAPADGFSDLAMQVMTSPSKNYILSVISGSICILFLIGLMCGRITKRVTRELKDR

SEQ ID NO: 901930 - protein, 317 aa, Homo sapiens; identical to SEQ ID NO: 901925

SEQ ID NO: 901931 - protein, 198 aa, Homo sapiens
TIERYRTEDDGPELDYTLMRVCKQMIKRFCPEADSKTMLQCLKQNKNSELMDPKCKQMITKRQITQNTDYRLNPMLRKACKADIPKFCHGILTKAKDDSELEGQVISCLKLRYADQRLSSDCEDQIRIIIQESALDYRLDPQLQLHCSDEISSLCAEEAAAQEQTGVTAFVWQTWVYLPVDKSLSYQQNFRYFQNQLT

SEQ ID NO: 901932 - protein, 186 aa, Homo sapiens
TIERYRTEDDGPELDYTLMRVCKQMIKRFCPEADSKTMLQCLKQNKNSELMDPKCKQMITKRQITQNTDYRLNPMLRKACKADIPKFCHGILTKAKDDSELEGQVISCLKLRYADQRLSSDCEDQIRIIIQESALDYRLDPQLQLHCSDEVGFACKTGYAQSCSEKFPLEKSCLLSLPSAVNDLVN

SEQ ID NO: 901933 - protein, 62 aa, Homo sapiens
MQRLSSDCEDQIRIIIQESALDYRLDPQLQLHCSDEVGFACKTGYAQSCSEKFPLEKSCLLS

SEQ ID NO: 901934 - protein, 317 aa, Homo sapiens; identical to SEQ ID NO: 901925

SEQ ID NO: 901935 - protein, 317 aa, Homo sapiens; identical to SEQ ID NO: 901925

SEQ ID NO: 901936 - protein, 93 aa, Homo sapiens
EFSLFFHWGVFLKKPLRLQPECKKRLNDRIEMWSYAAKVAPADGFSDLAMQVMTSPSKNYILSVISGSICILFLIGLMCGRITKRVTRELKDR

SEQ ID NO: 901937 - protein, 276 aa, Homo sapiens
TIERYRTEDDGPELDYTLMRVCKQMIKRFCPEADSKTMLQCLKQNKNSELMDPKCKQMITKRQITQNTDYRLNPMLRKACKADIPKFCHGILTKAKDDSELEGQVISCLKLRYADQRLSSDCEDQIRIIIQESALDYRLDPQLQLHCSDEISSLCAEEAAAQEQTGQVEECLKVNLLKIKTELCKKEVLNMLKESKADIFVDPVLHTACALDIKHHCAAITPGRGRQMSCLMEALEDKRVRLQPECKKRLNDRIEMWSYAAKGLLPLFGKLGFTCL

SEQ ID NO: 901938 - protein, 341 aa, Homo sapiens
TIERYRTEDDGPELDYTLMRVCKQMIKRFCPEADSKTMLQCLKQNKNSELMDPKCKQMITKRQITQNTDYRLNPMLRKACKADIPKFCHGILTKAKDDSELEGQVISCLKLRYADQRLSSDCEDQIRIIIQESALDYRLDPQLQLHCSDEISSLCAEEAAAQEQTGQVEECLKVNLLKIKTELCKKEVLNMLKESKADIFVDPVLHTACALDIKHHCAAITPGRGRQMSCLMEALEDKRVRLQPECKKRLNDRIEMWSYAAKVAPADGFSDLAMQVMTSPSKNYILSVISGSICILFLIGLMCGRITKRVTRELKDRLQYRSETMAYKGLVWSQDVTGSPA

SEQ ID NO: 901939 - protein, 104 aa, Homo sapiens
TIERYRTEDDGPELDYTLMRVCKQMIKRFCPEADSKTMLQCLKQNKNSELMDPKCKQMITKRQITQNTGKILAWLSWPRGVSEKEFSGCRVTCSNSQGFVAWEF

SEQ ID NO: 901940 - protein, 146 aa, Homo sapiens
ASYSLHTPSPPTPPETTARYEAGWCQRQPFQGSGCVIAILGKRCSRSVAHLARANPFNTPHLQLVHDGLGDLRSSSPGPTGQPRRPRNLAAAAVEEYSCEFGSAKYYALCGFGGVLSCGLTHTACGSPGFSEMPYAGGPPKVQGHI

SEQ ID NO: 901941 - protein, 132 aa, Homo sapiens
WLVRAGCVIGTRRQPFQGSGCVIAILGKRCSRSVAHLARANPFNTPHLQLVHDGLGDLRSSSPGPTGQPRRPRNLAAAAVEEYSCEFGSAKYYALCGFGGVLSCGLTHTACGSPGFSEMPYAGGPPKVQGHI

SEQ ID NO: 901942 - protein, 76 aa, Homo sapiens
GRVGPDAWVDPRVNHFFEGGLPAPPTQCIYTRTRKGLKEKPFLNQGGGFAPLLLGDLRNQDYHLPPHGLKSSGPGF

SEQ ID NO: 901943 - protein, 113 aa, Homo sapiens
GCVIAILGKRCSRSVAHLARANPFNTPHLQLVHDGLGDLRSSSPGPTGQPRRPRNLAAAAVEEYSCEFGSAKYYALCGFGGVLSCGLTHTACGSPGFSEMPYAGGPPKVQGHI

SEQ ID NO: 901944 - protein, 141 aa, Homo sapiens
ASYSLHTPSPPTPPETTARYEAGWCQGSGCVIAILGKRCSRSVAHLARANPFNTPHLQLVHDGLGDLRSSSPGPTGQPRRPRNLAAAAVEEYSCEFGSAKYYALCGFGGVLSCGLTHTACGSPGFSEMPYAGGPPKVQGHI

SEQ ID NO: 901945 - protein, 122 aa, Homo sapiens
APYRGYVTWCTWLLSIGKRCSRSVAHLARANPFNTPHLQLVHDGLGDLRSSSPGPTGQPRRPRNLAAAAVEEYSCEFGSAKYYALCGFGGVLSCGLTHTACGSPGFSEMPYAGGPPKVQGHI

SEQ ID NO: 901946 - protein, 132 aa, Homo sapiens
NHRLGTRLGGAQRQPFQGSGCVIAILGKRCSRSVAHLARANPFNTPHLQLVHDGLGDLRSSSPGPTGQPRRPRNLAAAAVEEYSCEFGSAKYYALCGFGGVLSCGLTHTACGSPGFSEMPYAGGPPKVQGHI

SEQ ID NO: 901947 - protein, 146 aa, Homo sapiens; identical to SEQ ID NO: 901940

SEQ ID NO: 901948 - protein, 131 aa, Homo sapiens
RLGEAVVIGRGRQPFQGSGCVIAILGKRCSRSVAHLARANPFNTPHLQLVHDGLGDLRSSSPGPTGQPRRPRNLAAAAVEEYSCEFGSAKYYALCGFGGVLSCGLTHTACGSPGFSEMPYAGGPPKVQGHI

SEQ ID NO: 901949 - protein, 132 aa, Homo sapiens
  misc_feature (5)..(5): Xaa can be any naturally occurring amino acid
RLVRXPYFIGTRRQPFQGSGCVIAILGKRCSRSVAHLARANPFNTPHLQLVHDGLGDLRSSSPGPTGQPRRPRNLAAAAVEEYSCEFGSAKYYALCGFGGVLSCGLTHTACGSPGFSEMPYAGGPPKVQGHI

SEQ ID NO: 901950 - protein, 132 aa, Homo sapiens; identical to SEQ ID NO: 901949
  misc_feature (5)..(5): Xaa can be any naturally occurring amino acid

SEQ ID NO: 901951 - protein, 132 aa, Homo sapiens; identical to SEQ ID NO: 901949
  misc_feature (5)..(5): Xaa can be any naturally occurring amino acid

SEQ ID NO: 901952 - protein, 132 aa, Homo sapiens; identical to SEQ ID NO: 901949
  misc_feature (5)..(5): Xaa can be any naturally occurring amino acid

SEQ ID NO: 901953 - protein, 132 aa, Homo sapiens; identical to SEQ ID NO: 901949
  misc_feature (5)..(5): Xaa can be any naturally occurring amino acid

SEQ ID NO: 901954 - protein, 132 aa, Homo sapiens; identical to SEQ ID NO: 901949
  misc_feature (5)..(5): Xaa can be any naturally occurring amino acid

SEQ ID NO: 901955 - protein, 132 aa, Homo sapiens; identical to SEQ ID NO: 901949
  misc_feature (5)..(5): Xaa can be any naturally occurring amino acid

SEQ ID NO: 901956 - protein, 132 aa, Homo sapiens; identical to SEQ ID NO: 901949
  misc_feature (5)..(5): Xaa can be any naturally occurring amino acid

SEQ ID NO: 901957 - protein, 132 aa, Homo sapiens; identical to SEQ ID NO: 901949
  misc_feature (5)..(5): Xaa can be any naturally occurring amino acid

SEQ ID NO: 901958 - protein, 132 aa, Homo sapiens; identical to SEQ ID NO: 901949
  misc_feature (5)..(5): Xaa can be any naturally occurring amino acid

SEQ ID NO: 901959 - protein, 128 aa, Homo sapiens
GGGKLMAEVRGLGGSGCVIAILGKRCSRSVAHLARANPFNTPHLQLVHDGLGDLRSSSPGPTGQPRRPRNLAAAAVEEYSCEFGSAKYYALCGFGGVLSCGLTHTACGSPGFSEMPYAGGPPKVQGHI

SEQ ID NO: 901960 - protein, 132 aa, Homo sapiens; identical to SEQ ID NO: 901949
  misc_feature (5)..(5): Xaa can be any naturally occurring amino acid

SEQ ID NO: 901961 - protein, 116 aa, Homo sapiens
  misc_feature (5)..(5): Xaa can be any naturally occurring amino acid
RLVRXPYFIGTRRQPFQGSGCVIAILGKRCSRSVAHLARANPFNTPHLQLVHDGLGEWTPKSTRAYLTDSQFTLNTRMVFVVWLHTDGLRLSLGLLHAGDSAKVWLSTERLYTGLV

SEQ ID NO: 901962 - protein, 132 aa, Homo sapiens; identical to SEQ ID NO: 901941

SEQ ID NO: 901963 - protein, 141 aa, Homo sapiens; identical to SEQ ID NO: 901944

SEQ ID NO: 901964 - protein, 105 aa, Homo sapiens
MVSGTSAAAPQGPRASPAALATWQPPPWKVRSDPAQYSRVVYLWAAQPLRPGPGLEDRKDESSPLHRRTAPSCLPWGIGLFHHRRVSDPWPSLKGVEALRPCVPS

SEQ ID NO: 901965 - protein, 157 aa, Homo sapiens
LHQWATRTCSGALCASRRRRAKGTHLRTRRTSGLCEPRQPFQGSGCVIAILGKRCSRSVAHLARANPFNTPHLQLVHDGLGDLRSSSPGPTGQPRRPRNLAAAAVEEYSCEFGSAKYYALCGFGGVLSCGLTHTACGSPGFSEMPYAGGPPKVQGHI

SEQ ID NO: 901966 - protein, 132 aa, Homo sapiens; identical to SEQ ID NO: 901949
  misc_feature (5)..(5): Xaa can be any naturally occurring amino acid

SEQ ID NO: 901967 - protein, 130 aa, Homo sapiens
MVEAVVIGRGRQPFQGSGCVIAILGKRCSRSVAHLARANPFNTPHLQLVHDGLGDLRSSSPGPTGQPRRPRNLAAAAVEEYSCEFGSAKYYALCGFGGVLSCGLTHTACGSPGFSEMPYAGGPPKVQGHI

SEQ ID NO: 901968 - protein, 113 aa, Homo sapiens; identical to SEQ ID NO: 901943

SEQ ID NO: 901969 - protein, 129 aa, Homo sapiens
SLIKLFPPPRQPFQGSGCVIAILGKRCSRSVAHLARANPFNTPHLQLVHDGLGDLRSSSPGPTGQPRRPRNLAAAAVEEYSCEFGSAKYYALCGFGGVLSCGLTHTACGSPGFSEMPYAGGPPKVQGHI

SEQ ID NO: 901970 - protein, 132 aa, Homo sapiens; identical to SEQ ID NO: 901949
  misc_feature (5)..(5): Xaa can be any naturally occurring amino acid

SEQ ID NO: 901971 - protein, 132 aa, Homo sapiens; identical to SEQ ID NO: 901941

SEQ ID NO: 901972 - protein, 133 aa, Homo sapiens
RTRGSGRVGRPTRRQPFQGSGCVIAILGKRCSRSVAHLARANPFNTPHLQLVHDGLGDLRSSSPGPTGQPRRPRNLAAAAVEEYSCEFGSAKYYALCGFGGVLSCGLTHTACGSPGFSEMPYAGGPPKVQGHI

SEQ ID NO: 901973 - protein, 132 aa, Homo sapiens; identical to SEQ ID NO: 901949
  misc_feature (5)..(5): Xaa can be any naturally occurring amino acid

SEQ ID NO: 901974 - protein, 132 aa, Homo sapiens; identical to SEQ ID NO: 901949
  misc_feature (5)..(5): Xaa can be any naturally occurring amino acid

SEQ ID NO: 901975 - protein, 132 aa, Homo sapiens; identical to SEQ ID NO: 901949
  misc_feature (5)..(5): Xaa can be any naturally occurring amino acid

SEQ ID NO: 901976 - protein, 132 aa, Homo sapiens; identical to SEQ ID NO: 901949
  misc_feature (5)..(5): Xaa can be any naturally occurring amino acid

SEQ ID NO: 901977 - protein, 132 aa, Homo sapiens; identical to SEQ ID NO: 901949
  misc_feature (5)..(5): Xaa can be any naturally occurring amino acid

SEQ ID NO: 901978 - protein, 132 aa, Homo sapiens; identical to SEQ ID NO: 901949
  misc_feature (5)..(5): Xaa can be any naturally occurring amino acid

SEQ ID NO: 901979 - protein, 132 aa, Homo sapiens; identical to SEQ ID NO: 901949
  misc_feature (5)..(5): Xaa can be any naturally occurring amino acid

SEQ ID NO: 901980 - protein, 132 aa, Homo sapiens; identical to SEQ ID NO: 901949
  misc_feature (5)..(5): Xaa can be any naturally occurring amino acid

SEQ ID NO: 901981 - protein, 141 aa, Homo sapiens; identical to SEQ ID NO: 901944

SEQ ID NO: 901982 - protein, 113 aa, Homo sapiens; identical to SEQ ID NO: 901943

SEQ ID NO: 901983 - protein, 133 aa, Homo sapiens
  misc_feature (5)..(5): Xaa can be any naturally occurring amino acid
RLVRXPYFIGTRRQPFQGSGCVIAILGKRCSRSVAHLARANPFNTPHLQLVHDGLGDLRSSSPGPTGQPRRPRNLAAAAVEEQYSCDYGSGRFFILCGLGGIISCGTTHTALVPLDLVKCRMQVCFACWTRAY

SEQ ID NO: 901984 - protein, 93 aa, Homo sapiens
RTRGSGRVGRPTRLLRVRISKNPGQVLFAQNHFFEGGLPAPPTQCTYTRTRKGLKEKPFLTQGGGFAPLLLGDLRNQDYQLPPHGLKSSGPGF

SEQ ID NO: 901985 - protein, 132 aa, Homo sapiens; identical to SEQ ID NO: 901941

SEQ ID NO: 901986 - protein, 361 aa, Homo sapiens
MFSSVAHLARANPFNTPHLQLVHDGLGDLRSSSPGPTGQPRRPRNLAAAAVEEYSCEFGSAKYYALCGFGGVLSCGLTHTAVVPLDLVKCRMQVDPQKYKGIFNGFSVTLKEDGVRGLAKGWAPTFLGYSMQGLCKFGFYEVFKVLYSNMLGEENTYLWRTSLYLAASASAEFFADIALAPMEAAKVRIQTQPGYANTLRDAAPKMYKEEGLKAFYKGVAPLWMRQIPYTMMKFACFERTVEALYKFVVPKPRSECSKPEQLVVTFVAGYIAGVFCAIVSHPADSVVSVLNKEKGSSASLVLKRLGFKGVWKGLFARIIMIGTLTALQWFIYDSVKVYFRLPRPPPPEMPESLKKKLGLTQ

SEQ ID NO: 901987 - protein, 201 aa, Homo sapiens
MAGKSSLFKVILLGDGGVGKSSLMNRYVTNKFDTQLFHTIGVEFLNKDLEVDGHFVTMQIWDTAGQERFRSLRTPFYRGSDCCLLTFSVDDSQSFQNLSNWKKEFIYYADVKEPESFPFVILGNKIDISERQVSTEEAQAWCRDNGDYPYFETSAKDATNVAAAFEEAVRRVLATEDRSDHLIQTDTVNLHRKPKPSSSCC

SEQ ID NO: 901988 - protein, 201 aa, Homo sapiens; identical to SEQ ID NO: 901987

SEQ ID NO: 901989 - protein, 266 aa, Homo sapiens
SGPCCSLRAGREQLEREPGCATAAASCCAGPRPSLCPHCAQTGRPRAPGSSFVWPRGFLKLLRLTMAGKSSLFKVILLGDGGVGKSSLMNRYVTNKFDTQLFHTIGVEFLNKDLEVDGHFVTMQIWDTAGQERFRSLRTPFYRGSDCCLLTFSVDDSQSFQNLSNWKKEFIYYADVKEPESFPFVILGNKIDISERQVSTEEAQAWCRDNGDYPYFETSAKDATNVAAAFEEAVRRVLATEDRSDHLIQTDTVNLHRKPKPSSSCC

SEQ ID NO: 901990 - protein, 150 aa, Homo sapiens
MSGELSNRFQGGKAFGLLKARQERRLAEINREFLCDQKYSDEENLPEKLTAFKEKYMEFDLNNEGEIDLMSLKRMMEKLGVPKTHLEMKKMISEVTGGVSDTISYRDFVNMMLGKRSAVLKLVMMFEGKANESSPKPVGPPPERDIASLP

SEQ ID NO: 901991 - protein, 150 aa, Homo sapiens; identical to SEQ ID NO: 901990

SEQ ID NO: 901992 - protein, 111 aa, Homo sapiens
PSVPRHTQLAGARTRRLCLLLVPRRVREAWSRREPRARHVGRAQQQVPRREGVRLAQSPAGEEAGRDQPEDGVREQCRRAMRGSQEERKSSTEPTRRRAASQAAEEGSSVS

SEQ ID NO: 901993 - protein, 196 aa, Homo sapiens
PLGPAAHAASRSPDQAPVPPPRPSPRPRSLEPAGAPRSPCRASSATGSKAASLSPPGGKAFGLLKARQERRLAEINREFLCDQKYSDEENLPEKLTAFKEKYMEFDLNNEGEIDLMSLKRMMEKLGVPKTHLEMKKMISEVTGGVSDTISYRDFVNMMLGKRSAVLKLVMMFEGKANESSPKPVGPPPERDIASLP

SEQ ID NO: 901994 - protein, 150 aa, Homo sapiens; identical to SEQ ID NO: 901990

SEQ ID NO: 901995 - protein, 150 aa, Homo sapiens; identical to SEQ ID NO: 901990

SEQ ID NO: 901996 - protein, 150 aa, Homo sapiens; identical to SEQ ID NO: 901990

SEQ ID NO: 901997 - protein, 150 aa, Homo sapiens; identical to SEQ ID NO: 901990

SEQ ID NO: 901998 - protein, 173 aa, Homo sapiens
EFLCDQKYSDEENLPEKLTAFKGKLGRAALHLFLGEVGWPLILAHRTPQPHRTRLWPCLSRMPFFLEKAWRQGPPERWGEAPPPASLPLRAPSPLACSPVLALPLSLPSLPTGLRLVPVRRCPGPVTPGPRTQSALCEQALPLPLPSRASQEPLRRMDVCVTAVGQGGRVSAH

SEQ ID NO: 901999 - protein, 107 aa, Homo sapiens
MSGELSNRFQGGKAFGLLKARQERRLAEINREFLCDQKYSDEENLPEKLTAFKEKYMEFDLNNEGEIDLMSLKRMMEKLGSRTLTSLAKGSASWDFNHLLSERPNLM

SEQ ID NO: 902000 - protein, 132 aa, Homo sapiens
VFLDCLDVGSLLFSIRWLQDSHSVPSYRALGTSGFPLQEFLCDQKYSDEENLPEKLTAFKEKYMEFDLNNEGEIDLMSLKRMMEKLGVPKTHLEMKKMISEVTGVMMFEGKANESSPKPVGPPPERDIASLP

SEQ ID NO: 902001 - protein, 125 aa, Homo sapiens
MSGELSNRFQGGKAFGLLKARQERRLAEINREFLCDQKYSDEENLPEKLTAFKEKYMEFDLNNEGEIDLMSLKRMMEKLGVPKTHLEMKKMISEVTGVMMFEGKANESSPKPVGPPPERDIASLP

SEQ ID NO: 902002 - protein, 107 aa, Homo sapiens
MSGELSNRFQGGKAFGLLKARQERRLAEINREFLCDQKYSDEENLPEKLTAFKEKYMEFDLNNEGEIDLMSLKRMMEKLGVPKTHLEMKKMISEVTGEDTEGTRMGE

SEQ ID NO: 902003 - protein, 150 aa, Homo sapiens; identical to SEQ ID NO: 901990

SEQ ID NO: 902004 - protein, 964 aa, Homo sapiens
GLHSRSATSQSGCGGGRSWLCSSLKMAAQPPRGIRLSALCPKFLHTNSTSHTWPFSAVAELIDNAYDPDVNAKQIWIDKTVINDHICLTFTDNGNGMTSDKLHKMLSFGFSDKVTMNGHVPVGLYGNGFKSGSMRLGKDAIVFTKNGESMSVGLLSQTYLEVIKAEHVVVPIVAFNKHRQMINLAESKASLAAILEHSLFSTEQKLLAELDAIIGKKGTRIIIWNLRSYKNATEFDFEKDKYDIRIPEDLDEITGKKGYKKQERMDQIAPESDYSLRAYCSILYLKPRMQIILRGQKVKTQLVSKSLAYIERDVYRPKFLSKTVRITFGFNCRNKDHYGIMMYHRNRLIKAYEKVGCQLRANNMGVGVVGIIECNFLKPTHNKQDFDYTNEYRLTITALGEKLNDYWNEMKVKKNTEYPLNLPVEDIQKRPDQTWVQCDACLKWRKLPDGMDQLPEKWYCSNNPDPQFRNCEVPEEPEDEDLVHPTYEKTYKKTNKEKFRIRQPEMIPRINAELLFRPTALSTPSFSSPKESVPRRHLSEGTNSYATRLLNNHQVPPQSEPESNSLKRRLSTRSSILNAKNRRLSSQFENSVYKGDDDDEDVIILEENSTPKPAVDHDIDMKSEQSHVEQGGVQVEFVGDSEPCGQTGSTSTSSSRCDQGNTAATQTEVPSLVVKKEETVEDEIDVRNDAVILPSCVEAEAKIHETQETTDKSADDAGCQLQELRNQLLLVTEEKENYKRQCHMFTDQIKVLQQRILEMNDKYVKKETCHQSTETDAVFLLESINGKSESPDHMVSQYQQALEEIERLKKQCSALQHVKAECSQCSNNESKSEMDEMAVQLDDVFRQLDKCSIERDQYKSEVELLEMEKSQIRSQCEELKTEVEQLKSTNQQTATDVSTSSNIEESVNHMDGESLKLRSLRVNVGQLLAMIVPDLDLQQVNYDVDVVDEILGQVVEQMSEISST

SEQ ID NO: 902005 - protein, 868 aa, Homo sapiens
MTSDKLHKMLSFGFSDKVTMNGHVPVGLYGNGFKSGSMRLGKDAIVFTKNGESMSVGLLSQTYLEVIKAEHVVVPIVAFNKHRQMINLAESKASLAAILEHSLFSTEQKLLAELDAIIGKKGTRIIIWNLRSYKNATEFDFEKDKYDIRIPEDLDEITGKKGYKKQERMDQIAPESDYSLRAYCSILYLKPRMQIILRGQKVKTQLVSKSLAYIERDVYRPKFLSKTVRITFGFNCRNKDHYGIMMYHRNRLIKAYEKVGCQLRANNMGVGVVGIIECNFLKPTHNKQDFDYTNEYRLTITALGEKLNDYWNEMKVKKNTEYPLNLPVEDIQKRPDQTWVQCDACLKWRKLPDGMDQLPEKWYCSNNPDPQFRNCEVPEEPEDEDLVHPTYEKTYKKTNKEKFRIRQPEMIPRINAELLFRPTALSTPSFSSPKESVPRRHLSEGTNSYATRLLNNHQVPPQSEPESNSLKRRLSTRSSILNAKNRRLSSQFENSVYKGDDDDEDVIILEENSTPKPAVDHDIDMKSEQSHVEQGGVQVEFVGDSEPCGQTGSTSTSSSRCDQGNTAATQTEVPSLVVKKEETVEDEIDVRNDAVILPSCVEAEAKIHETQETTDKSADDAGCQLQELRNQLLLVTEEKENYKRQCHMFTDQIKVLQQRILEMNDKYVKKETCHQSTETDAVFLLESINGKSESPDHMVSQYQQALEEIERLKKQCSALQHVKAECSQCSNNESKSEMDEMAVQLDDVFRQLDKCSIERDQYKSEVELLEMEKSQIRSQCEELKTEVEQLKSTNQQTATDVSTSSNIEESVNHMDGESLKLRSLRVNVGQLLAMIVPDLDLQQVNYDVDVVDEILGQVVEQMSEISST

SEQ ID NO: 902006 - protein, 344 aa, Homo sapiens
MKSEQSHVEQGGVQVEFVGDSEPCGQTGSTSTSSSRCDQGNTAATQTEVPSLVVKKEETVEDEIDVRNDAVILPSCVEAEAKIHETQETTDKSADDAGCQLQELRNQLLLVTEEKENYKRQCHMFTDQIKVLQQRILEMNDKYVKKETCHQSTETDAVFLLESINGKSESPDHMVSQYQQALEEIERLKKQCSALQHVKAECSQCSNNESKSEMDEMAVQLDDVFRQLDKCSIERDQYKSEVELLEMEKSQIRSQCEELKTEVEQLKSTNQQTATDVSTSSNIEESVNHMDGESLKLRSLRVNVGQLLAMIVPDLDLQQVNYDVDVVDEILGQVVEQMSEISST

SEQ ID NO: 902007 - protein, 378 aa, Homo sapiens
GLHSRSATSQSGCGGGRSWLCSSLKMAAQPPRGIRLSALCPKFLHTNSTSHTWPFSAVAELIDNAYDPDVNAKQIWIDKTVINDHICLTFTDNGNGMTSDKLHKMLSFGFSDKVTMNGHVPVGLYGNGFKSGSMRLGKDAIVFTKNGESMSVGLLSQTYLEVIKAEHVVVPIVAFNKHRQMINLAESKASLAAILEHSLFSTEQKLLAELDAIIGKKGTRIIIWNLRSYKNATEFDFEKDKYDIRIPEDLDEITGKKGYKKQERMDQIAPESDYSLRAYCSILYLKPRMQIILRGQKVKTQLVSKSLAYIERDVYRPKFLTDDYLAESKASLAAILEHSLFSTEQKLLAELDAIIGKKGTRIIIWNLRSYKNATEFDF

SEQ ID NO: 902008 - protein, 612 aa, Homo sapiens
MIYFLRLTITALGEKLNDYWNEMKVKKNTEYPLNLPVEDIQKRPDQTWVQCDACLKWRKLPDGMDQLPEKWYCSNNPDPQFRYHRVVVPFLERRKVLFTVYEKALVTCYSYVIFLNRNCEVPEEPEDEDLVHPTYEKTYKKTNKEKFRIRQPEMIPRINAELLFRPTALSTPSFSSPKESVPRRHLSEGTNSYATRLLNNHQVPPQSEPESNSLKRRLSTRSSILNAKNRRLSSQFENSVYKGDDDDEDVIILEENSTPKPAVDHDIDMKSEQSHVEQGGVQVEFVGDSEPCGQTGSTSTSSSRCDQGNTAATQTEVPSLVVKKEETVEDEIDVRNDAVILPSCVEAEAKIHETQETTDKSADDAGCQLQELRNQLLLVTEEKENYKRQCHMFTDQIKVLQQRILEMNDKYVKKETCHQSTETDAVFLLESINGKSESPDHMVSQYQQALEEIERLKKQCSALQHVKAECSQCSNNESKSEMDEMAVQLDDVFRQLDKCSIERDQYKSEVELLEMEKSQIRSQCEELKTEVEQLKSTNQQTATDVSTSSNIEESVNHMDGESLKLRSLRVNVGQLLAMIVPDLDLQQVNYDVDVVDEILGQVVEQMSEISST

SEQ ID NO: 902009 - protein, 488 aa, Homo sapiens
GLHSRSATSQSGCGGGRSWLCSSLKMAAQPPRGIRLSALCPKFLHTNSTSHTWPFSAVAELIDNAYDPDVNAKQIWIDKTVINDHICLTFTDNGNGMTSDKLHKMLSFGFSDKVTMNGHVPVGLYGNGFKSGSMRLGKDAIVFTKNGESMSVGLLSQTYLEVIKAEHVVVPIVAFNKHRQMINLAESKASLAAILEHSLFSTEQKLLAELDAIIGKKGTRIIIWNLRSYKNATEFDFEKDKYDIRIPEDLDEITGKKGYKKQERMDQIAPESDYSLRAYCSILYLKPRMQIILRGQKVKTQLVSKSLAYIERDVYRPKFLSKTVRITFGFNCRNKDHYGIMMYHRNRLIKAYEKVGCQLRANNMGVGVVGIIECNFLKPTHNKQDFDYTNEYRLTITALGEKLNDYWNEMKVKKNTEYPLNLPVEDIQKRPDQTWVQCDACLKWRKLPDGMDQLPEKWYCSNNPDPQFRYHRVGSTLFGKTESTVHSV

SEQ ID NO: 902010 - protein, 228 aa, Homo sapiens
GLHSRSATSQSGCGGGRSWLCSSLKMAAQPPRGIRLSALCPKFLHTNSTSHTWPFSAVAELIDNAYDPDVNAKQIWIDKTVINDHICLTFTDNGNGMTSDKLHKMLSFGFSDKVTMNGHVPVGLYGNGFKSGSMRLGKDAIVFTKNGESMSVGLLSQTYLEVIKAEHVVVPIVAFNKHRQMINLAESKASLAAILEHSLFSTEQKLLAELDAIIGKKGTRIIIWNLRR

SEQ ID NO: 902011 - protein, 135 aa, Homo sapiens
MVTPHKKSMLGNGNYDVNVIMAALQTKGYEAVWWDKRRDVGVIALTNVMGFIMNLPSSLCWGPLKLPLKRQHWICVREVGGAYYNLDSKLKMPEWIGGESELRKFLKHHLRGKNCELLLVVPEEVEAHQSWRTDV

SEQ ID NO: 902012 - protein, 177 aa, Homo sapiens
MSCVPWKGDKAKSESLELPQAAPPQIYHEKQRRELCALHALNNVFQDSNAFTRDTLQEIFQRLSPNTMVTPHKKSMLGNGNYDVNVIMAALQTKGYEAVWWDKRRDVGVIALTNVMGFIMNLPSSLCWGPLKLPLKRQHWICVREVGGAYYNLDSKLKMPEWIGGESELSRAQGFSL

SEQ ID NO: 902013 - protein, 202 aa, Homo sapiens
MSCVPWKGDKAKSESLELPQAAPPQIYHEKQRRELCALHALNNVFQDSNAFTRDTLQEIFQRLSPNTMVTPHKKSMLGNGNYDVNVIMAALQTKGYEAVWWDKRRDVGVIALTNVMGFIMNLPSSLCWGPLKLPLKRQHWICVREVGGAYYNLDSKLKMPEWIGGESELRKFLKHHLRGKNCELLLVVPEEVEAHQSWRTDV

SEQ ID NO: 902014 - protein, 202 aa, Homo sapiens; identical to SEQ ID NO: 902013

SEQ ID NO: 902015 - protein, 202 aa, Homo sapiens; identical to SEQ ID NO: 902013

SEQ ID NO: 902016 - protein, 202 aa, Homo sapiens; identical to SEQ ID NO: 902013

SEQ ID NO: 902017 - protein, 202 aa, Homo sapiens; identical to SEQ ID NO: 902013

SEQ ID NO: 902018 - protein, 202 aa, Homo sapiens; identical to SEQ ID NO: 902013

SEQ ID NO: 902019 - protein, 182 aa, Homo sapiens
MSCVPWKGDKAKSESLELPQAAPPQIYHEKQRRELCALHALNNVFQDSNAFTRDTLQEIFQRLSPNTMVTPHKKSMLGNGNYDVNVIMAALQTKGYEAVWWDKRSLCWGPLKLPLKRQHWICVREVGGAYYNLDSKLKMPEWIGGESELRKFLKHHLRGKNCELLLVVPEEVEAHQSWRTDV

SEQ ID NO: 902020 - protein, 202 aa, Homo sapiens; identical to SEQ ID NO: 902013

SEQ ID NO: 902021 - protein, 202 aa, Homo sapiens; identical to SEQ ID NO: 902013

SEQ ID NO: 902022 - protein, 202 aa, Homo sapiens; identical to SEQ ID NO: 902013

SEQ ID NO: 902023 - protein, 202 aa, Homo sapiens; identical to SEQ ID NO: 902013

SEQ ID NO: 902024 - protein, 443 aa, Homo sapiens
HGVSARDVLESRTRKQHSEATNSSNRVFVYCAFLDFSSGEGVWSNHGCALTRGNLTYSVCRCTHLTNFAILMQVVPLEVNIGILIAVTRVISQISADNYKIHGDPSAFKLTAKAVAVLLPILGTSWVFGVLAVNGCAVVFQYMFATLNSLQGLFIFLFHCLLNSEVRAAFKHKTKVWSLTSSSARTSNAKPFHSDLMNGTRPGMASTKLSPLGQEQPLCPPRRPVSRVSREAANQARLRSEHTPPNRMKCPTFAHGPSPCCCLDMGVVARDSCLPCDSGCRSTLLSPAADAQASVGPPALHPTRGLSDFLGGFPGHSGLTVMVPLSLPSSLSIRPSEARTLGAGPAAPGGDVQPLCLGGAWGLRAKEVVQVPTHPQSGAGSWGCVGKSMRSPQCLNPLSGEFPTAGASRGVCLCRWCRRGPTCAVSSVGGPCPSRARAVGGSR

SEQ ID NO: 902025 - protein, 92 aa, Homo sapiens
IKVFGTADSKHRYYYGMGWGFPLLICIISLSFAMDSYGTSNNCWLSLASGAIWAFVAPALFVIVVNIGILIAVTRVISQISADPKHSAVPKH

SEQ ID NO: 902026 - protein, 380 aa, Homo sapiens
GFLCAVSTGGHQELLVNIGILIAVTRVISQISADNYKIHGDPSAFKLTAKAVAVLLPILGTSWVFGVLAVNGCAVVFQYMFATLNSLQGLFIFLFHCLLNSEVRAAFKHKTKVWSLTSSSARTSNAKPFHSDLMNGTRPGMASTKLSPLGQEQPLCPPRRPVSRVSREAANQARLRSEHTPPNRMKCPTFAHGPSPCCCLDMGVVARDSCLPCDSGCRSTLLSPAADAQASVGPPALHPTRGLSDFLGGFPGHSGLTVMVPLSLPSSLSIRPSEARTLGAGPAAPGGDVQPLCLGGAWGLRAKEVVQVPTHPQSGAGSWGCVGKSMRSPQCLNPLSGEFPTAGASRGVCLCRWCRRGPTCAVSSVGGPCPSRARAVGGSR

SEQ ID NO: 902027 - protein, 243 aa, Homo sapiens
SCCVAQFLTGHELVLIVPQSWGPLVLTVSCTGEDGINWSISDKDIEAQIANNRTPGRWTQRYYSANKNIICRNCDKRGHLSKNCPLPRKVRRCFLCSRRGHLLYSCPAPLCEYCPVPKMLDHSCLFRHSWDKQCDRCHMLGHYTDACTEIWRQYHLTTKPGPPKKPKTPSRPSALAYCYHCAQKGHYGHECPEREVYDPSPVSPFICYYDDKYEIQEREKRLKQKIKVKVSRKWGFQSIQVLL

SEQ ID NO: 902028 - protein, 252 aa, Homo sapiens
VKYLVSCSQLINIFIFQACTEIWRQYHLTTKPGPPKKPKTPSRPSALAYCYHCAQKGHYGHECPEREVYDPSPVSPFICYYDDKYEIQEREKRLKQKIKAFTSYSKKTWGLFPKKPIPRLPFIIKKGRQIEKSPNIDYQERAPLPSMLKKPTRVAPPTNTLQESTIKEHLHETTKLENLGKNATRDRAGQDHSVNVGLNDFLPKGAPRRPNSFFLGKFFTKPKKGLLKAPFHPVSITYNPTRSNDERQRSSQ

SEQ ID NO: 902029 - protein, 543 aa, Homo sapiens
MMFGGYETIEAYEDDLYRDESSSELSVDSEVEFQLYSQIHYAQDLDDVIREEEHEEKNSGNSESSSSKPNQKKLIVLSDSEVIQLSDGSEVITLSDEDSIYRCKGKNVRVQAQENAHGLSSSLQSNELVDKKCKSDIEKPKSEERSGVIREVMIIEVSSSEEEESTISEGDNVESWMLLGCEVDDKDDDILLNLVGCENSVTEGEDGINWSISDKDIEAQIANNRTPGRWTQRYYSANKNIICRNCDKRGHLSKNCPLPRKVRRCFLCSRRGHLLYSCPAPLCEYCPVPKMLDHSCLFRHSWDKQCDRCHMLGHYTDACTEIWRQYHLTTKPGPPKKPKTPSRPSALAYCYHCAQKGHYGHECPEREVYDPSPVSPFICYYDDKYEIQEREKRLKQKIKVLKKNGVIPEPSKLPYIKAANENPHHDIRKGRASWKSNRWPQENKETQKEMKNKNRNWEKHRKADRHREVDEDFPRGPKTYSSPGSFKTQKPSKPFHRSSHYHTSREDKSPKEGKRGKQKKKERCWEDDDNDNLFLIKQRKKKS

SEQ ID NO: 902030 - protein, 543 aa, Homo sapiens; identical to SEQ ID NO: 902029

SEQ ID NO: 902031 - protein, 543 aa, Homo sapiens; identical to SEQ ID NO: 902029

SEQ ID NO: 902032 - protein, 418 aa, Homo sapiens
MMFGGYETIEAYEDDLYRDESSSELSVDSEVEFQLYSQIHYAQDLDDVIREEEHEEKNSGNSESSSSKPNQKKLIVLSDSEVIQLSDGSEVITLSDEDSIYRCKGKNVRVQAQENAHGLSSSLQSNELVDKKCKSDIEKPKSEERSGVIREVMIIEVSSSEEEESTISEGDNVESWMLLGCEVDDKDDDILLNLVGCENSVTEGEDGINWSISDKDIEAQIANNRTPGRWTQRYYSANKNIICRNCDKRGHLSKNCPLPRKVRRCFLCSRRGHLLYSCPAPLCEYCPVPKMLDHSCLFRHSWDKQCDRCHMLGHYTDACTEIWRQYHLTTKPGPPKKPKTPSRPSALAYCYHCAQKGHYGHECPEREVYDPSPVSPFICYYDDKYEIQEREKRLKQKIKVPHGKATGGLKKIKKHKKK

SEQ ID NO: 902033 - protein, 563 aa, Homo sapiens
MMFGGYETIEAYEDDLYRDESSSELSVDSEVEFQLYSQIHYAQDLDDVIREEEHEEKNSGNSESSSSKPNQKKLIVLSDSEVIQLSDGSEVITLSDEDSIYRCKGKNVRVQAQENAHGLSSSLQSNELVDKKCKSDIEKPKSEERSGVIREVMIIEVSSSEEEESTISEGDNVESWMLLGPSVTNLKDKQIDEMIPSYEPYVGDELKPLLVNLLCGGLCLPLGALNEIARHLPKTDINLPNLRQLEHKKAARRYYSANKNIICRNCDKRGHLSKNCPLPRKVRRCFLCSRRGHLLYSCPAPLCEYCPVPKMLDHSCLFRHSWDKQCDRCHMLGHYTDACTEIWRQYHLTTKPGPPKKPKTPSRPSALAYCYHCAQKGHYGHECPEREVYDPSPVSPFICYYDDKYEIQEREKRLKQKIKVLKKNGVIPEPSKLPYIKAANENPHHDIRKGRASWKSNRWPQENKETQKEMKNKNRNWEKHRKADRHREVDEDFPRGPKTYSSPGSFKTQKPSKPFHRSSHYHTSREDKSPKEGKRGKQKKKERCWEDDDNDNLFLIKQRKKKS

SEQ ID NO: 902034 - protein, 253 aa, Homo sapiens
MLDHSCLFRHSWDKQCDRCHMLGHYTDACTEIWRQYHLTTKPGPPKKPKTPSRPSALAYCYHCAQKGHYGHECPEREVYDPSPVSPFICYYDDKYEIQEREKRLKQKIKVLKKNGVIPEPSKLPYIKAANENPHHDIRKGRASWKSNRWPQENKETQKEMKNKNRNWEKHRKADRHREVDEDFPRGPKTYSSPGSFKTQKPSKPFHRSSHYHTSREDKSPKEGKRGKQKKKERCWEDDDNDNLFLIKQRKKKS

SEQ ID NO: 902035 - protein, 385 aa, Homo sapiens
SCVVPGSAFPPGSARTRPPYLICPRPSPSLYAFGSRLVLPVRSCGREDGINWSISDKDIEAQIANNRTPGRWTQRYYSANKNIICRNCDKRGHLSKNCPLPRKVRRCFLCSRRGHLLYSCPAPLCEYCPVPKMLDHSCLFRHSWDKQCDRCHMLGHYTDACTEIWRQYHLTTKPGPPKKPKTPSRPSALAYCYHCAQKGHYGHECPEREVYDPSPVSPFICYYDDKYEIQEREKRLKQKIKVLKKNGVIPEPSKLPYIKAANENPHHDIRKGRASWKSNRWPQENKETQKEMKNKNRNWEKHRKADRHREVDEDFPRGPKTYSSPGSFKTQKPSKPFHRSSHYHTSREDKSPKEGKRGKQKKKERCWEDDDNDNLFLIKQRKKKS

SEQ ID NO: 902036 - protein, 253 aa, Homo sapiens; identical to SEQ ID NO: 902034

SEQ ID NO: 902037 - protein, 243 aa, Homo sapiens
VKYLVSCSQLINIFIFQACTEIWRQYHLTTKPGPPKKPKTPSRPSALAYCYHCAQKGHYGHECPEREVYDPSPVSPFICYYDDKYEIQEREKRLKQKIKVLKKNGVIPEPSKLPYIKAANENPHHDIRKGRASWKSNRWPQENKETQKEMKNKNRNWEKHRKADRHREVDEDFPRGPKTYSSPGSFKTQKPSKPFHRSSHYHTSREDKSPKEGKRGKQKKKERCWEDDDNDNLFLIKQRKKKS

SEQ ID NO: 902038 - protein, 217 aa, Homo sapiens [sequence omitted]

SEQ ID NO: 902039 - protein, 226 aa, Homo sapiens
FYIFASLSPYSGTKPGPPKKPKTPSRPSALAYCYHCAQKGHYGHECPEREVYDPSPVSPFICYYDDKYEIQEREKRLKQKIKVLKKNGVIPEPSKLPYIKAANENPHHDIRKGRASWKSNRWPQENKETQKEMKNKNRNWEKHRKADRHREVDEDFPRGPKTYSSPGSFKTQKPSKPFHRSSHYHTSREDKSPKEGKRGKQKKKERCWEDDDNDNLFLIKQRKKKS

SEQ ID NO: 902040 - protein, 211 aa, Homo sapiens
VKYLVSCSQLINIFIFQACTEIWRQYHLTECPEREVYDPSPVSPFICYYDDKYEIQEREKRLKQKIKVLKKNGVIPEPSKLPYIKAANENPHHDIRKGRASWKSNRWPQENKETQKEMKNKNRNWEKHRKADRHREVDEDFPRGPKTYSSPGSFKTQKPSKPFHRSSHYHTSREDKSPKEGKRGKQKKKERCWEDDDNDNLFLIKQRKKKS

SEQ ID NO: 902041 - protein, 363 aa, Homo sapiens
MMFGGYETIEAYEDDLYRDESSSELSVDSEVEFQLYSQIHYAQDLDDVIREEEHEEKNSGNSESSSSKPNQKKLIVLSDSEVIQLSDGSEVITLSDEDSIYRCKGKNVRVQAQENAHGLSSSLQSNELVDKKCKSDIEKPKSEERSGVIREVMIIEVSSSEEEESTISEGDNVESWMLLGCEVDDKDDDILLNLVGCENSVTEGEDGINWSISDKDIEAQIANNRTPGRWTQRYYSANKNIICRNCDKRGHLSKNCPLPRKVRRCFLCSRRGHLLYSCPAPLCEYCPVPKMLDHSCLFRHSWDKQCDRCHMLGHYTDACTEIWRQYHLTTKPGPPKKPKTPSRPSALAYCYHCAQKGHYGHPV

SEQ ID NO: 902042 - protein, 232 aa, Homo sapiens
MMFGGYETIEAYEDDLYRDESSSELSVDSEVEFQLYSQIHYAQDLDDVIREEEHEEKNSGNSESSSSKPNQKKLIVLSDSEVIQLSDGSEVITLSDEDSIYRCKGKNVRVQAQENAHGLSSSLQSNELVDKKCKSDIEKPKSEERSGVIREVMIIEVSSSEEEESTISEGDNVESWMLLGCEVDDKDDDILLNLVGCENSVTEESSSLLPVLQERTSPVFLSSPPLRILSCA

SEQ ID NO: 902043 - protein, 237 aa, Homo sapiens
MMFGGYETIEAYEDDLYRDESSSELSVDSEVEFQLYSQIHYAQDLDDVIREEEHEEKNSGNSESSSSKPNQKKLIVLSDSEVIQLSDGSEVITLSDEDSIYRCKGKNVRVQAQENAHGLSSSLQSNELVDKKCKSDIEKPKSEERSGVIREVMIIEVSSSEEEESTISEGDNVESWMLLGCEVDDKDDDILLNLVGCENSVTEGCQTPYLKDPVGTCGNNTYKNVAAKLVRVQWCYN

SEQ ID NO: 902044 - protein, 101 aa, Homo sapiens
RAVLSPEVPSLPGLRGRGLLTSFVLAPPRPSTRLVPGWCFLFAAAAVSMCVTDPRRPRLGTPAYPPSCPPGCGTSACPLAGLDVSRPPLTRGRAQLLEKMV

SEQ ID NO: 902045 - protein, 543 aa, Homo sapiens; identical to SEQ ID NO: 902029

SEQ ID NO: 902046 - protein, 503 aa, Homo sapiens
MMFGGYETIEAYEDDLYRDESSSELSVDSEVEFQLYSQIHYAQDLDDVIREEEHEEKNSGNSESSSSKPNQKKLIVLSDSEVIQLSDGSEVITLSDEDSIYRCKGKNVRVQAQENAHGLSSSLQSNELVDKKCKSDIEKPKSEERSGVIREVMIIEVSSSEEEESTISEGDNVESWMLLGCEVDDKDDDILLNLVGCENSVTEGEDGINWSISDKDIEAQIANNRTPGRWTQRYYSANKNIICRNCDKRGHLSKNCPLPRKVRRCFLCSRRGHLLYSCPAPLCEYCPVPKMLDHSCLFRHSWDKQCDRCHMLGHYTDACTEIWRQYHLTTKPGPPKKPKTPSRPSALAYCYHCAQKGHYGHECPEREVYDPSPVSPFICYYDDKYEIQEREKRLKQKIKVLKKNGVIPEPSKLPYIKAANENPHHDIRKGRASWKSNRWPQENKETQKEMKNKNRNWEKHRKADRHREVDEDFPRGPKTYSSPGSFKTQKPSKPFHRSSRATQ

SEQ ID NO: 902047 - protein, 517 aa, Homo sapiens
MMFGGYETIEAYEDDLYRDESSSELSVDSEVEFQLYSQIHYAQDLDDVIREEEHEEKNSGNSESSSSKPNQKKLIVLSDSEVIQLSDGSEVITLSDEDSIYRCKGKNVRVQAQENAHGLSSSLQSNELVDKKCKSDIEKPKSEERSGVIREVMIIEVSSSEEEESTISEGDNVESWMLLGCEVDDKDDDILLNLVGCENSVTEGEDGINWSISDKDIEAQIANNRTPGRWTQRYYSANKNIICRNCDKRGHLSKNCPLPRKVRRCFLCSRRGHLLYSCPAPLCEYCPVPKMLDHSCLFRHSWDKQCDRCHMLGHYTDACTEIWRQYHLTTKPGPPKKPKTPSRPSALAYCYHCAQKGHYGHECPEREVYDPSPVSPFICYYDDKYEIQEREKRLKQKIKVLKKNGVIPEPSKLPYIKAANENPHHDIRKGRASWKSNRWPQENKETQKEMKNKNRNWEKHRKADRHREVDEDFPRGPKTYSSPGSFKTQKPSKPFHRSSLVVHQYLTGGDPSRKSTC

SEQ ID NO: 902048 - protein, 232 aa, Homo sapiens; identical to SEQ ID NO: 902042

SEQ ID NO: 902049 - protein, 253 aa, Homo sapiens; identical to SEQ ID NO: 902034

SEQ ID NO: 902050 - protein, 394 aa, Homo sapiens
MWPKEQLFSKRPGEHYQGLPLLPRLECGGAILAQRNLLDSSNPPTSAPRVAGTTREDGINWSISDKDIEAQIANNRTPGRWTQRYYSANKNIICRNCDKRGHLSKNCPLPRKVRRCFLCSRRGHLLYSCPAPLCEYCPVPKMLDHSCLFRHSWDKQCDRCHMLGHYTDACTEIWRQYHLTTKPGPPKKPKTPSRPSALAYCYHCAQKGHYGHECPEREVYDPSPVSPFICYYDDKYEIQEREKRLKQKIKVLKKNGVIPEPSKLPYIKAANENPHHDIRKGRASWKSNRWPQENKETQKEMKNKNRNWEKHRKADRHREVDEDFPRGPKTYSSPGSFKTQKPSKPFHRSSHYHTSREDKSPKEGKRGKQKKKERCWEDDDNDNLFLIKQRKKKS

SEQ ID NO: 902051 - protein, 343 aa, Homo sapiens
MLKREDGINWSISDKDIEAQIANNRTPGRWTQRYYSANKNIICRNCDKRGHLSKNCPLPRKVRRCFLCSRRGHLLYSCPAPLCEYCPVPKMLDHSCLFRHSWDKQCDRCHMLGHYTDACTEIWRQYHLTTKPGPPKKPKTPSRPSALAYCYHCAQKGHYGHECPEREVYDPSPVSPFICYYDDKYEIQEREKRLKQKIKVLKKNGVIPEPSKLPYIKAANENPHHDIRKGRASWKSNRWPQENKETQKEMKNKNRNWEKHRKADRHREVDEDFPRGPKTYSSPGSFKTQKPSKPFHRSSHYHTSREDKSPKEGKRGKQKKKERCWEDDDNDNLFLIKQRKKKS

SEQ ID NO: 902052 - protein, 253 aa, Homo sapiens; identical to SEQ ID NO: 902034

SEQ ID NO: 902053 - protein, 398 aa, Homo sapiens
MMFGGYETIEAYEDDLYRDESSSELSVDSEVEFQLYSQIHYAQDLDDVIREEEHEEKNSGNSESSSSKPNQKKLIVLSDSEVIQLSDGSEVITLSDEDSIYRCKGKNVRVQAQENAHGLSSSLQSNELVDKKCKSDIEKPKSEERSGVIREVMIIEVSSSEEEESTISEGDNVESWMLLGCEVDDKDDDILLNLVGCENSVTEGEDGINWSISDKDIEAQIANNRTPGRWTQRYYSANKNIICRNCDKRGHLSKNCPLPRKVRRCFLCSRRGHLLYSCPAPLCEYCPVPKMLDHSCLFRHSWDKQCDRCHMLGHYTDADRHREVDEDFPRGPKTYSSPGSFKTQKPSKPFHRSSHYHTSREDKSPKEGKRGKQKKKERCWEDDDNDNLFLIKQRKKKS

SEQ ID NO: 902054 - protein, 230 aa, Homo sapiens
MVPAPLGSTYRLSWYRIAPRRRCERRRGTLQTIALAIAIMRAKGLYGHECPEREVYDPSPVSPFICYYDDKYEIQEREKRLKQKIKVLKKNGVIPEPSKLPYIKAANENPHHDIRKGRASWKSNRWPQENKETQKEMKNKNRNWEKHRKADRHREVDEDFPRGPKTYSSPGSFKTQKPSKPFHRSSHYHTSREDKSPKEGKRGKQKKKERCWEDDDNDNLFLIKQRKKKS

SEQ ID NO: 902055 - protein, 108 aa, Homo sapiens
MLDHSCLFRHSWDKQCDRCHMLGHYTDADRHREVDEDFPRGPKTYSSPGSFKTQKPSKPFHRSSHYHTSREDKSPKEGKRGKQKKKERCWEDDDNDNLFLIKQRKKKS

SEQ ID NO: 902056 - protein, 206 aa, Homo sapiens
MMFGGYETIEAYEDDLYRDESSSELSVDSEVEFQLYSQIHYAQDLDDVIREEEHEEKNSGNSESSSSKPNQKKLIVLSDSEVIQLSDGSEVITLSDEDSIYRCKGKNVRVQAQENAHGLSSSLQSNELVDKKCKSDIEKPKSEERSGVIREVMIIEVSSSEEEESTISEGDNVESWMLLGCEVDDKDDDILLNLVGCENSVTEGNT

SEQ ID NO: 902057 - protein, 539 aa, Homo sapiens
MANCQAVILSVEDDTGHRIIIEYLLEATRSPEVGMRQAAAIILNIYCSRSKADYTSHLRSLVSGLIRLFNDSSPVVLEESWDALNAITKKLDAGNQLALIEELHKEIRLIGNESKGEHVPGFCLPKKGVTSILPVLREGVLTGSPEQKEEAAKALGLVIRLTSADALRPSVVSITGPLIRILGDRFSWNVKAALLETLSLLLAKVGIALKPFLPQLQTTFTKALQDSNRGVRLKAADALGKLISIHIKVDPLFTELLNGIRAMEDPGVRDTMLQALRFVIQGAGAKVDAVIRKNIVSLLLSMLGHDEDNTRISSAGCLGELCAFLTEEELSAVLQQCLLADVSGIDWMVRHGRSLALSVAVNVAPGRLCAGRYSSDVQEMILSSATADRIPIAVSGVRGMGFLMRHHIETGGGQLPAKLSSLFVKCLQNPSSDIRLVAEKMIWWANKDPLPPLDPQAIKPILKALLDNTKDKNTVVRAYSDQAIVNLLKMRQGEEVFQSLSKILDVASLEVLNEVNRRSLKKLASQADSTEQVDDTILT

SEQ ID NO: 902058 - protein, 539 aa, Homo sapiens; identical to SEQ ID NO: 902057

SEQ ID NO: 902059 - protein, 192 aa, Homo sapiens
MVRHGRSLALSVAVNVAPGRLCAGRYSSDVQEMILSSATADRIPIAVSGVRGMGFLMRHHIETGGGQLPAKLSSLFVKCLQNPSSDIRLVAEKMIWWANKDPLPPLDPQAIKPILKALLDNTKDKNTVVRAYSDQAIVNLLKMRQGEEVFQSLSKILDVASLEVLNEVNRRSLKKLASQADSTEQVDDTILT

SEQ ID NO: 902060 - protein, 539 aa, Homo sapiens; identical to SEQ ID NO: 902057

SEQ ID NO: 902061 - protein, 493 aa, Homo sapiens
AAQIIGNMYSLTDQKDLAPYLPSVTPGLKASLLDPVPEVRTVSAKALGAMVKGMGESCFEDLLPWLMETLTYEQSSVDRSGAAQGLAEVMAGLGVEKLEKLMPEIVATASKVDIAPHVRDGYIMMFNYLPITFGDKFTPYVGPIIPCILKALADENEFVRDTALRAGQRVISMYAETAIALLLPQLEQGLFDDLWRIRFSSVQLLGDLLFHISGVTGKMTTETASEDDNFGTAQSNKAIITALGVERRNRVLAGLYMGRSDTQLVVRQASLHVWKIVVSNTPRTLREILPTLFGLLLGFLASTCADKRTIAARTLGDLVRKLGEKILPEIIPILEEGLRSQKSDERQGVCIGLSEIMKSTSRDAVLYFSESLVPTARKALCDPLEEVREAAAKTFEQLHSTIGHQALEDILPFLLKQLDDEEVSEFALDGLKQVMAIKSRVVLPYLVPKLTTPPVNTRVLAFLSSVAGDALTRHLGVILPAVMLALKEKLGTP

SEQ ID NO: 902062 - protein, 503 aa, Homo sapiens
SLRSWMLAFRASQALLQNHRAGVIEEADQARDQAPQVAGVSAFERDALNAITKKLDAGNQLALIEELHKEIRLIGNESKGEHVPGFCLPKKGVTSILPVLREGVLTGSPEQKEEAAKALGLVIRLTSADALRPSVVSITGPLIRILGDRFSWNVKAALLETLSLLLAKVGIALKPFLPQLQTTFTKALQDSNRGVRLKAADALGKLISIHIKVDPLFTELLNGIRAMEDPGVRDTMLQALRFVIQGAGAKVDAVIRKNIVSLLLSMLGHDEDNTRISSAGCLGELCAFLTEEELSAVLQQCLLADVSGIDWMVRHGRSLALSVAVNVAPGRLCAGRYSSDVQEMILSSATADRIPIAVSGVRGMGFLMRHHIETGGGQLPAKLSSLFVKCLQNPSSDIRLVAEKMIWWANKDPLPPLDPQAIKPILKALLDNTKDKNTVVRAYSDQAIVNLLKMRQGEEVFQSLSKILDVASLEVLNEVNRRSLKKLASQADSTEQVDDTILT

SEQ ID NO: 902063 - protein, 539 aa, Homo sapiens; identical to SEQ ID NO: 902057

SEQ ID NO: 902064 - protein, 380 aa, Homo sapiens
MANCQAVILSVEDDTGHRIIIEYLLEATRSPEVGMRQAAAIILNIYCSRSKADYTSHLRSLVSGLIRLFNDSSPVVLEESWDALNAITKKLDAGNQLALIEELHKEIRLIGNESKGEHVPGFCLPKKGVTSILPVLREGVLTGSPEQKEEAAKALGLVIRLTSADALRPSVVSITGPLIRILGDRFSWNVKAALLETLSLLLAKVGIALKPFLPQLQTTFTKALQDSNRGVRLKAADALGKLISIHIKVDPLFTELLNGIRAMEDPGVRDTMLQALRFVIQGAGAKVDAVIRKNIVSLLLSMLGHDEDNTRISSAGCLGELCAFLTEEELSAVLQQCLLADVSRLDWLFGPGGPGPPGPGFGPGRLGPGIIRGPRIPPAR

SEQ ID NO: 902065 - protein, 916 aa, Homo sapiens [sequence omitted]

SEQ ID NO: 902066 - protein, 834 aa, Homo sapiens
MSYTLDSLGNPSAYRRVTETRSSFSRVSGSPSSGFRSQSWSRGSPSTVSSSYKRSMLAPRLAYSSAMLSSAESSLDFSQSSSLLNGGSGPGGDYKLSRSNEKEQLQGLNDRFAGYIEKVHYLEQQNKEIEAEIQALRQKQASHAQLGDAYDQEIRELRATLEMVNHEKAQVQLDSDHLEEDIHRLKERFEEEARLRDDTEAAIRALRKDIEEASLVKVELDKKVQSLQDEVAFLRSNHEEEVADLLAQIQASHITVERKDYLKTDISTALKEIRSQLESHSDQNMHQAEEWFKCRYAKLTEAAEQNKEAIRSAKEEIAEYRRQLQSKSIELESVRGTKESLERQLSDIEERHNHDLSSYQDTIQQLENELRGTKWEMARHLREYQDLLNVKMALDIEIAAYRKLLEGEETRFSTFAGSITGPLYTHRPPITISSKIQKTKVEAPKLKVQHKFVEEIIEETKVEDEKSEMEEALTAITEELAVSMKEEKKEAAEEKEEEPEAEEEEVAAKKSPVKATAPEVKEEEGEKEEEEGQEEEEEEDEGAKSDQAEEGGSEKEGSSEKEEGEQEEGETEAEAEGEEAEAKEEKKVEEKSEEVATKEELVADAKVEKPEKAKSPVPKSPVEEKGKSPVPKSPVEEKGKSPVPKSPVEEKGKSPVPKSPVEEKGKSPVSKSPVEEKAKSPVPKSPVEEAKSKAEVGKGEQKEEGSDKGAKGSRKEDIAVNGEVEGKEEVEQETKEKGSGREEEKGVVTNGLDLSPADEKKGGDKSEEKVVVTKTVEKITSEGGDGATKYITKSVTVTQKVEEHEETFEEKLVSTKKVEKVTSHAIVKEVTQSD

SEQ ID NO: 902067 - protein, 723 aa, Homo sapiens
  misc_feature (31)..(31): Xaa can be any naturally occurring amino acid
KRPPSLGTQTSPSCHHVKKNVASPSSMIISXLGPLQPCRTESVKSLSFINYPVSAVPYNSIENGLIQDYRGKKNYIARAEFGTLESHSDQNMHQAEEWFKCRYAKLTEAAEQNKEAIRSAKEEIAEYRRQLQSKSIELESVRGTKESLERQLSDIEERHNHDLSSYQDTIQQLENELRGTKWEMARHLREYQDLLNVKMALDIEIAAYRKLLEGEETRFSTFAGSITGPLYTHRPPITISSKIQKTKVEAPKLKVQHKFVEEIIEETKVEDEKSEMEEALTAITEELAVSMKEEKKEAAEEKEEEPEAEEEEVAAKKSPVKATAPEVKEEEGEKEEEEGQEEEEEEDEGAKSDQAEEGGSEKEGSSEKEEGEQEEGETEAEAEGEEAEAKEEKKVEEKSEEVATKEELVADAKVEKPEKAKSPVPKSPVEEKGKSPVPKSPVEEKGKSPVPKSPVEEKGKSPVPKSPVEEKGKSPVSKSPVEEKAKSPVPKSPVEEAKSKAEVGKGEQKEEEEKEVKEAPKEEKVEKKEEKPKDVPEKKKAESPVKEEAVAEVVTITKSVKVHLEKETKEEGKPLQQEKEKEKAGGEGGSEEEGSDKGAKGSRKEDIAVNGEVEGKEEVEQETKEKGSGREEEKGVVTNGLDLSPADEKKGGDKSEEKVVVTKTVEKITSEGGDGATKYITKSVTVTQKVEEHEETFEEKLVSTKKVEKVTSHAIVKEVTQSD

SEQ ID NO: 902068 - protein, 632 aa, Homo sapiens
MHQAEEWFKCRYAKLTEAAEQNKEAIRSAKEEIAEYRRQLQSKSIELESVRGTKESLERQLSDIEERHNHDLSSYQDTIQQLENELRGTKWEMARHLREYQDLLNVKMALDIEIAAYRKLLEGEETRFSTFAGSITGPLYTHRPPITISSKIQKTKVEAPKLKVQHKFVEEIIEETKVEDEKSEMEEALTAITEELAVSMKEEKKEAAEEKEEEPEAEEEEVAAKKSPVKATAPEVKEEEGEKEEEEGQEEEEEEDEGAKSDQAEEGGSEKEGSSEKEEGEQEEGETEAEAEGEEAEAKEEKKVEEKSEEVATKEELVADAKVEKPEKAKSPVPKSPVEEKGKSPVPKSPVEEKGKSPVPKSPVEEKGKSPVPKSPVEEKGKSPVSKSPVEEKAKSPVPKSPVEEAKSKAEVGKGEQKEEEEKEVKEAPKEEKVEKKEEKPKDVPEKKKAESPVKEEAVAEVVTITKSVKVHLEKETKEEGKPLQQEKEKEKAGGEGGSEEEGSDKGAKGSRKEDIAVNGEVEGKEEVEQETKEKGSGREEEKGVVTNGLDLSPADEKKGGDKSEEKVVVTKTVEKITSEGGDGATKYITKSVTVTQKVEEHEETFEEKLVSTKKVEKVTSHAIVKEVTQSD

SEQ ID NO: 902069 - protein, 916 aa, Homo sapiens [sequence omitted]

SEQ ID NO: 902070 - protein, 916 aa, Homo sapiens [sequence omitted]

SEQ ID NO: 902071 - protein, 349 aa, Homo sapiens
MAVAVPPGRAAGSGWAWRPVARDALLARAFHSCTELRGRFYLVGGLLAGGAREPSSDTVVFDPARGQAVRLGARGSPPRSHHDAAPVDGRWLCVVGGWDGSRRLATVTALDTERGVWEAWTGTPGDCPPAGLSSHTCTRISDRELQVAGREGGIHTQRRYGSIYTLRLDPSARTYCYKQEGCHTASRSGHCAALLQTPGPHPGHQLLLFGGCNLAEPEVAGHWSHGKIKEEPPVAPHLMEQLARLVSSGQGSQKGPHGLRHHSCSVVGPFAVLFGGETLTRARDTICNDLYIYDTRTSPPLWFHFPCADRGMKRMGHRTCLWNDQLYLVGGFGEDGRTASPQVCILDFI

SEQ ID NO: 902072 - protein, 111 aa, Homo sapiens
MEQLARLVSSGQGSQKGPHGLRHHSCSVVGPFAVLFGGETLTRARDTICNDLYIYDTRTSPPLWFHFPCADRGMKRMGHRTCLWNDQLYLVGGFGEDGRTASPQVCILDFI

SEQ ID NO: 902073 - protein, 111 aa, Homo sapiens; identical to SEQ ID NO: 902072

SEQ ID NO: 902074 - protein, 302 aa, Homo sapiens
MAVAVPPGRAAGSGWAWRPVARDALLARAFHSCTELRGRFYLVGGLLAGGAREPSSDTVVFDPARGQAVRLGARGSPPRSHHDAAPVDGRWLCVVGGWDGSRRLATVTALDTERGVWEAWTGTPGDCPPAGLSSHTCTRISDRELQVAGREGGIHTQRRYGSIYTLRLDPSARTYCYKQEGCHTASRSGHCAALLQTPGPHPGHQLLLFGGCNLAEPEVAGHWSHGKIKEEPPVAPHLMEQLARLVSSGQGSQKGPHGLRHHSCSVVGPFAVLFGGETLTRARDTICNDLYIYDTRESQTNG

SEQ ID NO: 902075 - protein, 111 aa, Homo sapiens; identical to SEQ ID NO: 902072

SEQ ID NO: 902076 - protein, 111 aa, Homo sapiens; identical to SEQ ID NO: 902072

SEQ ID NO: 902077 - protein, 355 aa, Homo sapiens
MAVAVPPGRAAGSGWAWRPVARDALLARAFHSCTELRGRFYLVGGLLAGGAREPSSDTVVFDPARGQAVRLGARGSPPRSHHDAAPVDGRWLCVVGGWDGSRRLATVTALDTERGVWEAWTGTPGDCPPAGLSSHTCTRISDRELQVAGREGGIHTQRRYGSIYTLRLDPSARTYCYKQEGCHTASRSGHCAALLQTPGPHPGHQLLLFGGCNLAEPEVAGHWSHGKIKSFFLPKEEPPVAPHLMEQLARLVSSGQGSQKGPHGLRHHSCSVVGPFAVLFGGETLTRARDTICNDLYIYDTRTSPPLWFHFPCADRGMKRMGHRTCLWNDQLYLVGGFGEDGRTASPQVCILDFI

SEQ ID NO: 902078 - protein, 349 aa, Homo sapiens; identical to SEQ ID NO: 902071

SEQ ID NO: 902079 - protein, 118 aa, Homo sapiens
QEGAEASVRKDCDILDRELGPRGGGATSSPQLPLTHSPPSGPLQVWFKNRRAKCRQQQQSGSGTKSRPAKKKSSPVRESSGSESSGQFTPPAVSSSASSSSSASSSSANPAAAAAAGL

SEQ ID NO: 902080 - protein, 597 aa, Homo sapiens
MSYLKQPPYGMNGLGLAGPAMDLLHPSVGYPATPRKQRRERTTFTRSQLDVLEALFAKTRYPDIFMREEVALKINLPESRVQVWFKNRRAKCRQQQQSGSGTKSRPAKKKSSPVRESSGSESSGQFTPPAVSSSASSSSSASSSSANPAAAAAAGLGGNPVAAASSLSTPAASSIWSPASISPGSAPASVSVPEPLAAPSNTSCMQRSVAAGAATAAASYPMSYGQGGSYGQGYPTPSSSYFGGVDCSSYLAPMHSHHHPHQLSPMAPSSMAGHHHHHPHAHHPLSQSSGHHHHHHHHHHQGYGGSGLAFNSADCLDYKEPGAAAASSAWKLNFNSPDCLDYKDQAIMAVPGLVSPGMKEEKKRNYLRPPWSRSCCCCCTARLCLVFSKTEFSPPKKMSIACTAAPIFVPLAWGDVQTHPAPWMGGRCFGLAYTFYTGEMYYFPPSAPTKLLSLPFQSFWTAIKHLQPSEALRSDPLFEPNTLIYSFWTLESLTGVFLPIGAPAHYSKSKPLRVPPAQTAAPSAALDFAPRLPARASRRFFRPSGVRWGAPGLGPPEERVPSLPRTEPHPAPPCAGLVQASASAGTLYIVRSVPGTT

SEQ ID NO: 902081 - protein, 1483 aa, Homo sapiens
MPSEQKQLFCDEKQTTLKKDYDVKNEIVDRSAPKPKISGSIHYALKNVKIDLPKINIPNEVLLKHEVDKYRKLFQSKQQTARKSISIKTVSCVEECTLLHKSERAEEEGVKMSAKILNFSCLKCRDNTRYSPNDLQKHFQMWHHGELPSYPCEMCNFSANDFQVFKQHRRTHRSTLVKCDICNNESVYTLLNLTKHFTSTHCVNGNFQCEKCKFSTQDVGTFVQHIHRHNEIHYKCGKCHHVCFTKGELQKHLHIHSGTFPFTCQYCSYGATRREHLVRHVITLHKEHLYAKEKLEKDKYEKRMAKTSAGLKLILKRYKIGASRKTFWKRKKINSGSDRSIEKNTQVLKKMNKTQTKSEDQSHVVQEHLSEEKDERLHCENNDKAPESESEKPTPLSTGQGNRAEEGPNASSGFMKTAVLGPTLKNVMMKNNKLAVSPNYNATFMGFKMMDGKQHIVLKLVPIKQNVCSPGSQSGAAKDGTANLQPQTLDTNGFLTGVTTELNDTVYMKAATPFSCSSSILSGKASSEKEMTLISQRNNMLQTMDYEKSVSSLSATSELVTASVNLTTKFETRDNVDFWGNHLTQSHPEVLGTTIKSPDKVNCVAKPNAYNSGDMHNYCINYGNCELPVESSNQGSLPFHNYSKVNNSNKRRRFSGTAVYENPQRESSSSKTVVQQPISESFLSLVRQESSKPDSLLASISLLNDKDGTLKAKSEIEEQYVLEKGQNIDGQNLYSNENQNLECATEKSKWEDFSNVDSPMMPRITSVFSLQSQQASEFLPPEVNQLLQDVLKIKPDVKQDSSNTPNKGLPLHCDQSFQKHEREGKIVESSKDFKVQGIFPVPPGSVGINVPTNDLNLKFGKEKQVSSIPQDVRDSEKMPRISGFGTLLKTQSDAIITQQLVKDKLRATTQNLGSFYMQSPLLNSEQKKTIIVQTSKGFLIPLNITNKPGLPVIPGNALPLVNSQGIPASLFVNKKPGMVLTLNNGKLEGVSAVKTEGAPARGTVTKEPCKTPILKVEPNNNCLTPGLCSSIGSCLSMKSSSENTLPLKGPYILKPTSSVKAVLIPNMLSEQQSTKLNISDSVKQQNEIFPKPPLYTFLPDGKQAVFLKCVMPNKTELLKPKLVQNSTYQNIQPKKPEGTPQRILLKIFNPVLNVTAANNLSVSNSASSLQKDNVPSNQIIGGEQKEPESRDALPFLLDDLMPANEIVITSTATCPESSEEPICVSDCSESRVLRCKTNCRIERNFNRKKTSKKIFSKTKTHGSKDSETAFVSRNRNCKRKCRDSYQEPPRRKATLHRKCKEKAKPEDVRETFGFSRPRLSKDSIRTLRLFPFSSKQLVKCPRRNQPVVVLNHPDADAPEVVSVMKTIAKFNGHVLKVSLSKRTINALLKPVCYNPPKTTYDDFSKRHKTFKPVSSVKERFVLKLTLKKTSKNNYQIVKTTSENILKAKFNCWFCGRVFDNQDTWAGHGQRHLMEATRDWNMLE

SEQ ID NO: 902082 - protein, 1483 aa, Homo sapiens; identical to SEQ ID NO: 902081

SEQ ID NO: 902083 - protein, 1483 aa, Homo sapiens; identical to SEQ ID NO: 902081

SEQ ID NO: 902084 - protein, 1378 aa, Homo sapiens
MPSEQKQLFCDEKQTTLKKDYDVKNEIVDRSAPKPKISGSIHYALKNVKIDLPKINIPNEVLLKHEVDKYRKLFQSKQQTARKSISIKTVSCVEECTLLHKSERAEEEGVKMSAKILNFSCLKCRDNTRYSPNDLQKHFQMWHHGELPSYPCEMCNFSANDFQVFKQHRRTHRSTLVKCDICNNESVYTLLNLTKHFTSTHCVNGNFQCEKCKFSTQDVGTFVQHIHRHNEIHYKCGKCHHVCFTKGELQKHLHIHSGTFPFTCQYCSYGATRREHLVRHVITLHKEHLYAKEKLEKDKYEKRMAKTSAGLKLILKRYKIGASRKTFWKRKKINSGSDRSIEKNTQVLKKMNKTQTKSEDQSHVVQEHLSEEKDERLHCENNDKAPESESEKPTPLSTGQGNRAEEGPNASSGFMKTAVLGPTLKNVMMKNNKLAVSPNYNATFMGFKMMDGKQHIVLKLVPIKQNVCSPGSQSGAAKDGTANLQPQTLDTNGFLTGVTTELNDTVYMKAATPFSCSSSILSGKASSEKEMTLISQRNNMLQTMDYEKSVSSLSATSELVTASVNLTTKFETRDNVDFWGNHLTQSHPEVLGTTIKSPDKVNCVAKPNAYNSGDMHNYCINYGNCELPVESSNQGSLPFHNYSKVNNSNKRRRFSGTAVYENPQRESSSSKTVVQQPISESFLSLVRQESSKPDSLLASISLLNDKDGTLKAKSEIEEQYVLEKGQNIDGQNLYSNENQNLECATEKSKWEDFSNVDSPMMPRITSVFSLQSQQASEFLPPEVNQLLQDVLKIKPDVKQDSSNTPNKGLPLHCDQSFQKHEREGKIVESSKDFKVQGIFPVPPGSVGINVPTNDLNLKFGKEKQVSSIPQDVRDSEKMPRISGFGTLLKTQSDAIITQQLVKDKLRATTQNLGSFYMQSPLLNSEQKKTIIVQTSKGFLIPLNITNKPGLPVIPGNALPLVNSQGIPASLFVNKKPGMVLTLNNGKLEGVSAVKTEGAPARGTVTKEPCKTPILKVEPNNNCLTPGLCSSIGSCLSMKSSSENTLPLKGPYILKPTSSVKAVLIPNMLSEQQSTKLNISDSVKQQNEIFPKPPLYTFLPDGKQAVFLKCVMPNKTELLKPKLVQNSTYQNIQPKKPEGTPQRILLKIFNPVLNVTAANNLSVSNSASSLQKDNVPSNQIIGGEQKEPESRDALPFLLDDLMPANEIVITSTATCPESSEEPICVSDCSESRVLRCKTNCRIERNFNRKKTSKKIFSKTKTHGSKDSETAFVSRNRNCKRKCRDSYQEPPRRKATLHRKCKEKAKPEDVRETFGFSRPRLSKDSIRTLRLFPFSSKQLVKCPRRNQPVVVLNHPVAVCFRGSTLQHECKETREHSVTFT

SEQ ID NO: 902085 - protein, 1483 aa, Homo sapiens; identical to SEQ ID NO: 902081

SEQ ID NO: 902086 - protein, 1483 aa, Homo sapiens; identical to SEQ ID NO: 902081

SEQ ID NO: 902087 - protein, 1483 aa, Homo sapiens; identical to SEQ ID NO: 902081

SEQ ID NO: 902088 - protein, 549 aa, Homo sapiens
MLENYKNLATVGYQLFKPSLISWLEQEESRTVQRGDFQASEWKVQLKTKELALQQDVLGEPTSSGIQMIGSHNGGEVSDVKQCGDVSSEHSCLKTHVRTQNSENTFECYLYGVDFLTLHKKTSTGEQRSVFSQCGKAFSLNPDVVCQRTCTGEKAFDCSDSGKSFINHSHLQGHLRTHNGESLHEWKECGRGFIHSTDLAVRIQTHRSEKPYKCKECGKGFRYSAYLNIHMGTHTGDNPYECKECGKAFTRSCQLTQHRKTHTGEKPYKCKDCGRAFTVSSCLSQHMKIHVGEKPYECKECGIAFTRSSQLTEHLKTHTAKDPFECKICGKSFRNSSCLSDHFRIHTGIKPYKCKDCGKAFTQNSDLTKHARTHSGERPYECKECGKAFARSSRLSEHTRTHTGEKPFECVKCGKAFAISSNLSGHLRIHTGEKPFECLECGKAFTHSSSLNNHMRTHSAKKPFTCMECGKAFKFPTCVNLHMRIHTGEKPYKCKQCGKSFSYSNSFQLHERTHTGEKPYECKECGKAFSSSSSFRNHERRHADERLSA

SEQ ID NO: 902089 - protein, 830 aa, Homo sapiens
GRVFFFLVAFGLNTALARSDDGWEPAVEGVAKVPVCPRPPRGLLRETLPAPLASAGAARVLLAPPGSKSHSSCHCDGPGPGAVSGSVKQRVFVVRIRLTGPSSPQSPVPGESSSSRIPLTLDKENGGYLCPCRFLSCPGVILGVKERCFEAHSAISPVEMAATDLSYGLYRDPVCLQEKTEVERVVADCLTNCYQVCRKYILLQNIILASPGRHISFYTELSSELLKANKASSRTESLVEFPEGVEPVILDSVTFDDLAVDFTPEEWTLLDPTQRNLYRDVMLENYKNLATVGYQLFKPSLISWLEQEESRTVQRGDFQASEWKVQLKTKELALQQDVLGEPTSSGIQMIGSHNGGEVSDVKQCGDVSSEHSCLKTHVRTQNSENTFECYLYGVDFLTLHKKTSTGEQRSVFSQCGKAFSLNPDVVCQRTCTGEKAFDCSDSGKSFINHSHLQGHLRTHNGESLHEWKECGRGFIHSTDLAVRIQTHRSEKPYKCKECGKGFRYSAYLNIHMGTHTGDNPYECKECGKAFTRSCQLTQHRKTHTGEKPYKCKDCGRAFTVSSCLSQHMKIHVGEKPYECKECGIAFTRSSQLTEHLKTHTAKDPFECKICGKSFRNSSCLSDHFRIHTGIKPYKCKDCGKAFTQNSDLTKHARTHSGERPYECKECGKAFARSSRLSEHTRTHTGEKPFECVKCGKAFAISSNLSGHLRIHTGEKPFECLECGKAFTHSSSLNNHMRTHSAKKPFTCMECGKAFKFPTCVNLHMRIHTGEKPYKCKQCGKSFSYSNSFQLHERTHTGEKPYECKECGKAFSSSSSFRNHERRHADERLSA

SEQ ID NO: 902090 - protein, 498 aa, Homo sapiens
VPEHSCPGGATSSGIQMIGSHNGGEVSDVKQCGDVSSEHSCLKTHVRTQNSENTFECYLYGVDFLTLHKKTSTGEQRSVFSQCGKAFSLNPDVVCQRTCTGEKAFDCSDSGKSFINHSHLQGHLRTHNGESLHEWKECGRGFIHSTDLAVRIQTHRSEKPYKCKECGKGFRYSAYLNIHMGTHTGDNPYECKECGKAFTRSCQLTQHRKTHTGEKPYKCKDCGRAFTVSSCLSQHMKIHVGEKPYECKECGIAFTRSSQLTEHLKTHTAKDPFECKICGKSFRNSSCLSDHFRIHTGIKPYKCKDCGKAFTQNSDLTKHARTHSGERPYECKECGKAFARSSRLSEHTRTHTGEKPFECVKCGKAFAISSNLSGHLRIHTGEKPFECLECGKAFTHSSSLNNHMRTHSAKKPFTCMECGKAFKFPTCVNLHMRIHTGEKPYKCKQCGKSFSYSNSFQLHERTHTGEKPYECKECGKAFSSSSSFRNHERRHADERLSA

SEQ ID NO: 902091 - protein, 143 aa, Homo sapiens
ARVFFFLVAFGLNTALARSDDGWEPAVEGVAKVPVCPRPPRGLLRETLPAPLASAGAARVLLAPPGSKSHSSCHCDGPGPGAVSGSVKQRVFVVRIRLTVVLHPPNLPYLASPARRGLYLPTELQNGLLGRRNGGFEAMLRKE

SEQ ID NO: 902092 - protein, 549 aa, Homo sapiens; identical to SEQ ID NO: 902088

SEQ ID NO: 902093 - protein, 549 aa, Homo sapiens; identical to SEQ ID NO: 902088

SEQ ID NO: 902094 - protein, 227 aa, Homo sapiens
VGGASRLLLRISVDLMEAKTLGTVTPRKPVLSVSARKIKDNAADWHNLILKWETLNDAGFTTANNIANLKISLLNKDKIELDSSSPASKENEEKVCLEYNEELEKLCEELQATLDGLTKIQVKMEKLSSTTKGICELENYHYGEESKRPPLFHTWPTTHFYEVSHKLLEMYRKELLLKRTVAKELAHTGDPDLTLSYLSMWLHQPYVESDSRLHLESMLLETGHRAL

SEQ ID NO: 902095 - protein, 225 aa, Homo sapiens
VNRPRLLRISVDLMEAKTLGTVTPRKPVLSVSARKIKDNAADWHNLILKWETLNDAGFTTANNIANLKISLLNKDKIELDSSSPASKENEEKVCLEYNEELEKLCEELQATLDGLTKIQVKMEKLSSTTKGICELENYHYGEESKRPPLFHTWPTTHFYEVSHKLLEMYRKELLLKRTVAKELAHTGDPDLTLSYLSMWLHQPYVESDSRLHLESMLLETGHRAL

SEQ ID NO: 902096 - protein, 225 aa, Homo sapiens; identical to SEQ ID NO: 902095

SEQ ID NO: 902097 - protein, 156 aa, Homo sapiens
VNRPRLLRISVDLMEAKTLGTVTPRKPVLSVSARKIKDNAADWHNLILKWETLNDAGFTTANNIANLKISLLNKDKIELDSSSPASKENEEKVCLEYNEELEKLCEELQATLDGLTKIQVKMEKLSSTTKGICELENYHYMRFRISSWRCTGRSCS

SEQ ID NO: 902098 - protein, 119 aa, Homo sapiens
APARVVNSIGPFFPSVLLLILVFNQELLKCSSSQVDTMFLNHCHEGRFTFLSDEVSHKLLEMYRKELLLKRTVAKELAHTGDPDLTLSYLSMWLHQPYVESDSRLHLESMLLETGHRAL

SEQ ID NO: 902099 - protein, 225 aa, Homo sapiens; identical to SEQ ID NO: 902095

SEQ ID NO: 902100 - protein, 225 aa, Homo sapiens; identical to SEQ ID NO: 902095

SEQ ID NO: 902101 - protein, 225 aa, Homo sapiens; identical to SEQ ID NO: 902095

SEQ ID NO: 902102 - protein, 225 aa, Homo sapiens; identical to SEQ ID NO: 902095

SEQ ID NO: 902103 - protein, 307 aa, Homo sapiens
EAPHQPRFCPPAGHSRKMRIFAVFIFMTYWHLLNAFTVTVPKDLYVVEYGSNMTIECKFPVEKQLDLAALIVYWEMEDKNIIQFVHGEEDLKVQHSSYRQRARLLKDQLSLGNAALQITDVKLQDAGVYRCMISYGGADYKRITVKVNAPYNKINQRILVVDPVTSEHELTCQAEGYPKAEVIWTSSDHQVLSGKTTTTNSKREEKLFNVTSTLRINTTTNEIFYCTFRRLDPEENHTAELVIPELPLAHPPNERTHLVILGAILLCLGVALTFIFRLRKGRMMDVKKCGIQDTNSKKQSDTHLEET

SEQ ID NO: 902104 - protein, 262 aa, Homo sapiens
EAPHQPRFCPPAGHSRKMRIFAVFIFMTYWHLLNAFTVTVPKDLYVVEYGSNMTIECKFPVEKQLDLAALIVYWEMEDKNIIQFVHGEEDLKVQHSSYRQRARLLKDQLSLGNAALQITDVKLQDAGVYRCMISYGGADYKRITVKVNAPYNKINQRILVVDPVTSEHELTCQAEGYPKAEVIWTSSDHQVLSGKTTTTNSKREEKLFNVTSTLRINTTTNEIFYCTFRRLDPEENHTAELVIPGNILNVSIKICLTLSPST

SEQ ID NO: 902105 - protein, 307 aa, Homo sapiens; identical to SEQ ID NO: 902103

SEQ ID NO: 902106 - protein, 2319 aa, Homo sapiens
MLTMSVTLSPLRSQDLDPMATDASPMAINMTPTVEQGEGEEAMKDMDSDQQYEKPPPLHTGADWKIVLHLPEIETWLRMTSERVRDLTYSVQQDSDSKHVDVHLVQLKDICEDISDHVEQIHALLETEFSLKLLSYSVNVIVDIHAVQLLWHQLRVSVLVLRERILQGLQDANGNYTRQTDILQAFSEETKEGRLDSLTEVDDSGQLTIKCSQNYLSLDCGITAFELSDYSPSEDLLSGLGDMTSSQVKTKPFDSWSYSEMEKEFPELIRSVGLLTVAADSISTNGSEAVTEEVSQVSLSVDDKGGCEEDNASAVEEQPGLTLGVSSSSGEALTNAAQPSSETVQQESSSSSHHDAKNQQPVPCENATPKRTIRDCFNYNEDSPTQPTLPKRGLFLKEETFKNDLKGNGGKRQMVDLKPEMSRSTPSLVDPPDRSKLCLVLQSSYPNSPSAASQSYECLHKVGNGNLENTVKFHIKEISSSLGRLNDCYKEKSRLKKPHKTSEEVPPCRTPKRGTGSGKQAKNTKSSAVPNGELSYTSKAIEGPQTNSASTSSLEPCNQRSWNAKLQLQSETSSSPAFTQSSESSVGSDNIMSPVPLLSKHKSKKGQASSPSHVTRNGEVVEAWYGSDEYLALPSHLKQTEVLALKLENLTKLLPQKPRGETIQNIDDWELSEMNSDSEIYPTYHVKKKHTRLGRVSPSSSSDIASSLGESIESGPLSDILSDEESSMPLAGMKKYADEKSERASSSEKNESHSATKSALIQKLMQDIQHQDNYEAIWEKIEGFVNKLDEFIQWLNEAMETTENWTPPKAEMDDLKLYLETHLSFKLNVDSHCALKEAVEEEGHQLLELIASHKAGLKDMLRMIASQWKELQRQIKRQHSWILRALDTIKAEILATDVSVEDEEGTGSPKAEVQLCYLEAQRDAVEQMSLKLYSEQYTSSSKRKEEFADMSKVHSVGSNGLLDFDSEYQELWDWLIDMESLVMDSHDLMMSEEQQQHLYKRYSVEMSIRHLKKTELLSKVEALKKGGVLLPNDLLEKVDSINEKWELLGKTLGEKIQDTMAGHSGSSPRDLLSPESGSLVRQLEVRIKELKGWLRDTELFIFNSCLRQEKEGTMNTEKQLQYFKSLCREIKQRRRGVASILRLCQHLLDDRETCNLNADHQPMQLIIVNLERRWEAIVMQAVQWQTRLQKKMGKESETLNVIDPGLMDLNGMSEDALEWDEMDISNKLISLNEESNDLDQELQPVIPSLKLGETSNEDPGYDEEADNHGGSQYASNITAPSSPHIYQVYSLHNVELYEDNHMPFLKNNPKVTGMTQPNVLTKSLSKDSSFSSTKSLPDLLGGSNLVKPCACHGGDMSQNSGSESGIVSEGDTETTTNSEMCLLNAVDGSPSNLETEHLDPQMGDAVNVLKQKFTDEGESIKLPNSSQSSISPVGCVNGKVGDLNSITKHTPDCLGEELQGKHDVFTFYDYSYLQGSKLKLPMIMKQSQSEKAHVEDPLLRGFYFDKKSCKSKHQTTELQPDVPPHERILASASHEMDRISYKSGNIEKTFTGMQNAKQLSLLSHSSSIESLSPGGDLFGLGIFKNGSDSLQRSTSLESWLTSYKSNEDLFSCHSSGDISVSSGSVGELSKRTLDLLNRLENIQSPSEQKIKRSVSDITLQSSSQKMSFTGQMSLDIASSINEDSAASLTELSSSDELSLCSEDIVLHKNKIPESNASFRKRLTRSVADESDVNVSMIVNVSCTSACTDDEDDSDLLSSSTLTLTEEELCIKDEDDDSSIATDDEIYEDCTLMSGLDYIKNELQTWIRPKLSLTRDKKRCNVSDEMKGSKDISSSEMTNPSDTLNIETLLNGSVKRVSENNGNGKNSSHTHELGTKRENKKTIFKVNKDPYVADMENGNIEGIPERQKGKPNVTSKVSENLGSHGKEISESEHCKCKALMDSLDDSNTAGKEFVSQDVRHLPKKCPNHHHFENQSTASTPTEKSFSELALETRFNNRQDSDALKSSDDAPSMAGKSAGCCLALEQNGTEENASISNISCCNCEPDVFHQKDAEDCSVHNFVKEIIDMASTALKSKSQPENEVAAPTSLTQIKEKVLEHSHRPIQLRKGDFYSYLSLSSHDSDCGEVTNYIEEKSSTPLPLDTTDSGLDDKEDIECFFEACVEGDSDGEEPCFSSAPPNESAVPSEAAMPLQATACSSEFSDSSLSADDADTVALSSPSSQERAEVGKEVNGLPQTSSGCAENLEFTPSKLDSEKESSGKPGESGMPEEHNAASAKSKVQDLSLKANQPTDKAALHPSPKTLTCEENLLNLHEKRHRNMHR

SEQ ID NO: 902107 - protein, 1198 aa, Homo sapiens
MLQSLCREIKQRRRGVASILRLCQHLLDDRETCNLNADHQPMQLIIVNLERRWEAIVMQAVQWQTRLQKKMGKESETLNVIDPGLMDLNGMSEDALEWDEMDISNKLISLNEESNDLDQELQPVIPSLKLGETSNEDPGYDEEADNHGGSQYASNITAPSSPHIYQVYSLHNVELYEDNHMPFLKNNPKVTGMTQPNVLTKSLSKDSSFSSTKSLPDLLGGSNLVKPCACHGGDMSQNSGSESGIVSEGDTETTTNSEMCLLNAVDGSPSNLETEHLDPQMGDAVNVLKQKFTDEGESIKLPNSSQSSISPVGCVNGKVGDLNSITKHTPDCLGEELQGKHDVFTFYDYSYLQGSKLKLPMIMKQSQSEKAHVEDPLLRGFYFDKKSCKSKHQTTELQPDVPPHERILASASHEMDRISYKSGNIEKTFTGMQNAKQLSLLSHSSSIESLSPGGDLFGLGIFKNGSDSLQRSTSLESWLTSYKSNEDLFSCHSSGDISVSSGSVGELSKRTLDLLNRLENIQSPSEQKIKRSVSDITLQSSSQKMSFTGQMSLDIASSINEDSAASLTELSSSDELSLCSEDIVLHKNKIPESNASFRKRLTRSVADESDVNVSMIVNVSCTSACTDDEDDSDLLSSSTLTLTEEELCIKDEDDDSSIATDDEIYEDCTLMSGLDYIKNELQTWIRPKLSLTRDKKRCNVSDEMKGSKDISSSEMTNPSDTLNIETLLNGSVKRVSENNGNGKNSSHTHELGTKRENKKTIFKVNKDPYVADMENGNIEGIPERQKGKPNVTSKVSENLGSHGKEISESEHCKCKALMDSLDDSNTAGKEFVSQDVRHLPKKCPNHHHFENQSTASTPTEKSFSELALETRFNNRQDSDALKSSDDAPSMAGKSAGCCLALEQNGTEENASISNISCCNCEPDVFHQKDAEDCSVHNFVKEIIDMASTALKSKSQPENEVAAPTSLTQIKEKVLEHSHRPIQLRKGDFYSYLSLSSHDSDCGEVTNYIEEKSSTPLPLDTTDSGLDDKEDIECFFEACVEGDSDGEEPCFSSAPPNESAVPSEAAMPLQATACSSEFSDSSLSADDADTVALSSPSSQERAEVGKEVNGLPQTSSGCAENLEFTPSKLDSEKESSGKPGESGMPEEHNAASAKSKVQDLSLKANQPTDKAALHPSPKTLTCEENLLNLHEKRHRNMHR

SEQ ID NO: 902108 - protein, 1222 aa, Homo sapiens
MSVTLSPLRSQDLDPMATDASPMAINMTPTVEQGEGEEAMKDMDSDQQYEKPPPLHTGADWKIVLHLPEIETWLRMTSERVRDLTYSVQQDSDSKHVDVHLVQLKDICEDISDHVEQIHALLETEFSLKLLSYSVNVIVDIHAVQLLWHQLRVSVLVLRERILQGLQDANGNYTRQTDILQAFSEETKEGRLDSLTEVDDSGQLTIKCSQNYLSLDCGITAFELSDYSPSEDLLSGLGDMTSSQVKTKPFDSWSYSEMEKEFPELIRSVGLLTVAADSISTNGSEAVTEEVSQVSLSVDDKGGCEEDNASAVEEQPGLTLGVSSSSGEALTNAAQPSSETVQQESSSSSHHDAKNQQPVPCENATPKRTIRDCFNYNEDSPTQPTLPKRGLFLKEETFKNDLKGNGGKRQMVDLKPEMSRSTPSLVDPPDRSKLCLVLQSSYPNSPSAASQSYECLHKVGNGNLENTVKFHIKEISSSLGRLNDCYKEKSRLKKPHKTSEEVPPCRTPKRGTGSGKQAKNTKSSAVPNGELSYTSKAIEGPQTNSASTSSLEPCNQRSWNAKLQLQSETSSSPAFTQSSESSVGSDNIMSPVPLLSKHKSKKGQASSPSHVTRNGEVVEAWYGSDEYLALPSHLKQTEVLALKLENLTKLLPQKPRGETIQNIDDWELSEMNSDSEIYPTYHVKKKHTRLGRVSPSSSSDIASSLGESIESGPLSDILSDEESSMPLAGMKKYADEKSERASSSEKNESHSATKSALIQKLMQDIQHQDNYEAIWEKIEGFVNKLDEFIQWLNEAMETTENWTPPKAEMDDLKLYLETHLSFKLNVDSHCALKEAVEEEGHQLLELIASHKAGLKDMLRMIASQWKELQRQIKRQHSWILRALDTIKAEILATDVSVEDEEGTGSPKAEVQLCYLEAQRDAVEQMSLKLYSEQYTSSSKRKEEFADMSKVHSVGSNGLLDFDSEYQELWDWLIDMESLVMDSHDLMMSEEQQQHLYKRYSVEMSIRHLKKTELLSKVEALKKGGVLLPNDLLEKVDSINEKWELLGKTLGEKIQDTMAGHSGSSPRDLLSPESGSLVRQLEVRIKELKGWLRDTELFIFNSCLRQEKEGTMNTEKQLQYFKSLCREIKQRRRGVASILRLCQHLLDDRETCNLNADHQPMQLIIVNLERRWEAIVMQAVQWQTRLQKKMGKESVSDAFFKHNCLSFSQTKNNSFRLGNGVHA

SEQ ID NO: 902109 - protein, 108 aa, Homo sapiens
HSGNVVDSANRQGRIASRPGLASGSINVVTAVYYIDFSQAMKIISLKDTPGCNSGVASSSRPGLASGSITFVTAVYYIDFSQDENHLTERYAWLQLRGGLILPDHVCH

SEQ ID NO: 902110 - protein, 2319 aa, Homo sapiens; identical to SEQ ID NO: 902106

SEQ ID NO: 902111 - protein, 67 aa, Homo sapiens
KESSGKPGESGMPEEHNAASAKSKVQDLSLKANQPTDKAALHPSPKTLTCEENLLNLHEKRHRNMHR

SEQ ID NO: 902112 - protein, 1300 aa, Homo sapiens
MEFYESAYFIVLIPSIVITVIFLFFWLFMKETLYDEVLAKQKREQKLIPTKTDKKKAEKKKNKKKEIQNGNLHESDSESVPRDFKLSDALAVEDDQVAPVPLNVVETSSSVRERKKKEKKQKPVLEEQVIKESDASKIPGKKVEPVPVTKQPTPPSEAAASKKKPGQKKSKNGSDDQDKKVETLMVPSKRQEALPLHQETKQESGSGKKKASSKKQKTENVFVDEPLIHATTYIPLMDNADSSPVVDKREVIDLLKPDQVEGIQKSGTKKLKTETDKENAEVKFKDFLLSLKTMMFSEDEALCVVDLLKEKSGVIQDALKKSSKGELTTLIHQLQEKDKLLAAVKEDAAATKDRCKQLTQEMMTEKERSNVVITRMKDRIGTLEKEHNVFQNKIHVSYQETQQMQMKFQQVREQMEAEIAHLKQENGILRDAVSNTTNQLESKQSAELNKLRQDYARLVNELTEKTGKLQQEEVQKKNAEQAATQLKVQLQEAERRWEEVQSYIRKRTAEHEAAQQDLQSKFVAKENEVQSLHSKLTDTLVSKQQLEQRLMQLMESEQKRVNKEESLQMQVQDILEQNEALKAQIQQFHSQIAAQTSASVLAEELHKVIAEKDKQIKQTEDSLASERDRLTSKEEELKDIQNMNFLLKAEVQKLQALANEQAAAAHELEKMQQSVYVKDDKIRLLEEQLQHEISNKMEEFKILNDQNKALKSEVQKLQTLVSEQPNKDVVEQMEKCIQEKDEKLKTVEELLETGLIQVATKEEELNAIRTENSSLTKEVQDLKAKQNDQVSFASLVEELKKVIHEKDGKIKSVEELLEAELLKVANKEKTVQDLKQEIKALKEEIGNVQLEKAQQLSITSKVQELQNLLKGKEEQMNTMKAVLEEKEKDLANTGKWLQDLQEENESLKAHVQEVAQHNLKEASSASQFEELEIVLKEKENELKRLEAMLKERESDLSSKTQLLQDVQDENKLFKSQIEQLKQQNYQQASSFPPHEELLKVISEREKEISGLWNELDSLKDAVEHQRKKNNERQQQVEAVELEAKEVLKKLFPKVSVPSNLSYGEWLHGFEKKAKECMAGTSGSEEVKVLEHKLKEADEMHTLLQLECEKYKSVLAETEGILQKLQRSVEQEENKWKVKVDESHKTIKQMQSSFTSSEQELERLRSENKDIENLRREREHLEMELEKAEMERSTYVTEVRELKAQLNETLTKLRTEQNERQKVAGDLHKAQQSLELIQSKIVKAAGDTTVIENSDVSPETESSEKETMSVSLNQTVTQLQQLLQAVNQQLTKEKEHYQVLE

SEQ ID NO: 902113 - protein, 1357 aa, Homo sapiens
MEFYESAYFIVLIPSIVITVIFLFFWLFMKETLYDEVLAKQKREQKLIPTKTDKKKAEKKKNKKKEIQNGNLHESDSESVPRDFKLSDALAVEDDQVAPVPLNVVETSSSVRERKKKEKKQKPVLEEQVIKESDASKIPGKKVEPVPVTKQPTPPSEAAASKKKPGQKKSKNGSDDQDKKVETLMVPSKRQEALPLHQETKQESGSGKKKASSKKQKTENVFVDEPLIHATTYIPLMDNADSSPVVDKREVIDLLKPDQVEGIQKSGTKKLKTETDKENAEVKFKDFLLSLKTMMFSEDEALCVVDLLKEKSGVIQDALKKSSKGELTTLIHQLQEKDKLLAAVKEDAAATKDRCKQLTQEMMTEKERSNVVITRMKDRIGTLEKEHNVFQNKIHVSYQETQQMQMKFQQVREQMEAEIAHLKQENGILRDAVSNTTNQLESKQSAELNKLRQDYARLVNELTEKTGKLQQEEVQKKNAEQAATQLKVQLQEAERRWEEVQSYIRKRTAEHEAAQQDLQSKFVAKENEVQSLHSKLTDTLVSKQQLEQRLMQLMESEQKRVNKEESLQMQVQDILEQNEALKAQIQQFHSQIAAQTSASVLAEELHKVIAEKDKQIKQTEDSLASERDRLTSKEEELKDIQNMNFLLKAEVQKLQALANEQAAAAHELEKMQQSVYVKDDKIRLLEEQLQHEISNKMEEFKILNDQNKALKSEVQKLQTLVSEQPNKDVVEQMEKCIQEKDEKLKTVEELLETGLIQVATKEEELNAIRTENSSLTKEVQDLKAKQNDQVSFASLVEELKKVIHEKDGKIKSVEELLEAELLKVANKEKTVQDLKQEIKALKEEIGNVQLEKAQQLSITSKVQELQNLLKGKEEQMNTMKAVLEEKEKDLANTGKWLQDLQEENESLKAHVQEVAQHNLKEASSASQFEELEIVLKEKENELKRLEAMLKERESDLSSKTQLLQDVQDENKLFKSQIEQLKQQNYQQASSFPPHEELLKVISEREKEISGLWNELDSLKDAVEHQRKKNNDLREKNWEAMEALASTEKMLQDKVNKTSKERQQQVEAVELEAKEVLKKLFPKVSVPSNLSYGEWLHGFEKKAKECMAGTSGSEEVKVLEHKLKEADEMHTLLQLECEKYKSVLAETEGILQKLQRSVEQEENKWKVKVDESHKTIKQMQSSFTSSEQELERLRSENKDIENLRREREHLEMELEKAEMERSTYVTEVRELKDLLTELQKKLDDSYSEAVRQNEELNLLKAQLNETLTKLRTEQNERQKVAGDLHKAQQSLELIQSKIVKAAGDTTVIENSDVSPETESSEKETMSVSLNQTVTQLQQLLQAVNQQLTKEKEHYQVLE

SEQ ID NO: 902114 - protein, 122 aa, Homo sapiens
MFWFRISEREKEISGLWNELDSLKDAVEHQRKKNNDLREKNWEAMEALASTEKMLQDKVNKTSKERQQQVEAVELEAKEVLKKLFPKVSVPSNLSYGEWLHGFEKKAKECMAGTSGSEEVKV

SEQ ID NO: 902115 - protein, 1300 aa, Homo sapiens; identical to SEQ ID NO: 902112

SEQ ID NO: 902116 - protein, 1300 aa, Homo sapiens; identical to SEQ ID NO: 902112

SEQ ID NO: 902117 - protein, 1300 aa, Homo sapiens; identical to SEQ ID NO: 902112

SEQ ID NO: 902118 - protein, 1224 aa, Homo sapiens
MAGFSQVGQRSDALAVEDDQVAPVPLNVVETSSSVRERKKKEKKQKPVLEEQVIKESDASKIPGKKVEPVPVTKQPTPPSEAAASKKKPGQKKSKNGSDDQDKKVETLMVPSKRQEALPLHQETKQESGSGKKKASSKKQKTENVFVDEPLIHATTYIPLMDNADSSPVVDKREVIDLLKPDQVEGIQKSGTKKLKTETDKENAEVKFKDFLLSLKTMMFSEDEALCVVDLLKEKSGVIQDALKKSSKGELTTLIHQLQEKDKLLAAVKEDAAATKDRCKQLTQEMMTEKERSNVVITRMKDRIGTLEKEHNVFQNKIHVSYQETQQMQMKFQQVREQMEAEIAHLKQENGILRDAVSNTTNQLESKQSAELNKLRQDYARLVNELTEKTGKLQQEEVQKKNAEQAATQLKVQLQEAERRWEEVQSYIRKRTAEHEAAQQDLQSKFVAKENEVQSLHSKLTDTLVSKQQLEQRLMQLMESEQKRVNKEESLQMQVQDILEQNEALKAQIQQFHSQIAAQTSASVLAEELHKVIAEKDKQIKQTEDSLASERDRLTSKEEELKDIQNMNFLLKAEVQKLQALANEQAAAAHELEKMQQSVYVKDDKIRLLEEQLQHEISNKMEEFKILNDQNKALKSEVQKLQTLVSEQPNKDVVEQMEKCIQEKDEKLKTVEELLETGLIQVATKEEELNAIRTENSSLTKEVQDLKAKQNDQVSFASLVEELKKVIHEKDGKIKSVEELLEAELLKVANKEKTVQDLKQEIKALKEEIGNVQLEKAQQLSITSKVQELQNLLKGKEEQMNTMKAVLEEKEKDLANTGKWLQDLQEENESLKAHVQEVAQHNLKEASSASQFEELEIVLKEKENELKRLEAMLKERESDLSSKTQLLQDVQDENKLFKSQIEQLKQQNYQQASSFPPHEELLKVISEREKEISGLWNELDSLKDAVEHQRKKNNERQQQVEAVELEAKEVLKKLFPKVSVPSNLSYGEWLHGFEKKAKECMAGTSGSEEVKVLEHKLKEADEMHTLLQLECEKYKSVLAETEGILQKLQRSVEQEENKWKVKVDESHKTIKQMQSSFTSSEQELERLRSENKDIENLRREREHLEMELEKAEMERSTYVTEVRELKAQLNETLTKLRTEQNERQKVAGDLHKAQQSLELIQSKIVKAAGDTTVIENSDVSPETESSEKETMSVSLNQTVTQLQQLLQAVNQQLTKEKEHYQVLE

SEQ ID NO: 902119 - protein, 1270 aa, Homo sapiens
MEFYESAYFIVLIPSIVITVIFLFFWLFMKETLYDEVLAKQKREQKLIPTKTDKKKAEKKKNKKKEIQNGNLHESDSESVPRDFKLSDALAVEDDQVAPVPLNVVETSSSVRERKKKEKKQKPVLEEQVIKESDASKIPGKKVEPVPVTKQPTPPSEAAASKKKPGQKKSKNGSDDQDKKVETLMVPSKRQEALPLHQETKQESGSGKKKASSKKQKTENVFVDEPLIHATTYIPLMDNADSSPVVDKREVIDLLKPDQVEGIQKSGTKKLKTETDKENAEVKFKDFLLSLKTMMFSEDEALCVVDLLKEKSGVIQDALKKSSKGELTTLIHQLQEKDKLLAAVKEDAAATKDRCKQLTQEMMTEKERSNVVITRMKDRIGTLEKEHNVFQNKIHVSYQETQQMQMKFQQVREQMEAEIAHLKQENGILRDAVSNTTNQLESKQSAELNKLRQDYARLVNELTEKTGKLQQEEVQKKNAEQAATQLKVQLQEAERRWEEVQSYIRKRTAEHEAAQQDLQSKFVAKENEVQSLHSKLTDTLVSKQQLEQRLMQLMESEQKRVNKEESLQMQVQDILEQNEALKAQIQQFHSQIAAQTSASVLAEELHKVIAEKDKQIKQTEDSLASERDRLTSKEEELKDIQNMNFLLKAEVQKLQALANEQAAAAHELEKMQQSVYVKDDKIRLLEEQLQHEISNKMEEFKILNDQNKALKSEVQKLQTLVSEQPNKDVVEQMEKCIQEKDEKLKTVEELLETGLIQVATKEEELNAIRTENSSLTKEVQDLKAKQNDQVSFASLVEELKKVIHEKDGKIKSVEELLEAELLKVANKEKTVQDLKQEIKALKEEIGNVQLEKAQQLSITSKVQELQNLLKGKEEQMNTMKAVLEEKEKDLANTGKWLQDLQEENESLKAHVQEVAQHNLKEASSASQFEELEIVLKEKENELKRLEAMLKERESDLSSKTQLLQDVQDENKLFKSQIEQLKQQNYQQASSFPPHEELLKVISEREKEISGLWNELDSLKDAVEHQRKKNNSYGEWLHGFEKKAKECMAGTSGSEEVKVLEHKLKEADEMHTLLQLECEKYKSVLAETEGILQKLQRSVEQEENKWKVKVDESHKTIKQMQSSFTSSEQELERLRSENKDIENLRREREHLEMELEKAEMERSTYVTEVRELKAQLNETLTKLRTEQNERQKVAGDLHKAQQSLELIQSKIVKAAGDTTVIENSDVSPETESSEKETMSVSLNQTVTQLQQLLQAVNQQLTKEKEHYQVLE

SEQ ID NO: 902120 - protein, 1300 aa, Homo sapiens; identical to SEQ ID NO: 902112

SEQ ID NO: 902121 - protein, 1300 aa, Homo sapiens; identical to SEQ ID NO: 902112

SEQ ID NO: 902122 - protein, 657 aa, Homo sapiens
  misc_feature (43)..(43): Xaa can be any naturally occurring amino acid
MDILVIRCCWGATLNKDATKAATAAADFTAKVWDAVSGDELMXLAHKHIVKTVDFTQDSNYLLTGGQDKLLRIYDLNQPEAEPKEVVEQMEKCIQEKDEKLKTVEELLETGLIQVATKEEELNAIRTENSSLTKEVQDLKAKQNDQVSFASLVEELKKVIHEKDGKIKSVEELLEAELLKVANKEKTVQDLKQEIKALKEEIGNVQLEKAQQLSITSKVQELQNLLKGKEEQMNTMKAVLEEKEKDLANTGKWLQDLQEENESLKAHVQEVAQHNLKEASSASQFEELEIVLKEKENELKRLEAMLKERESDLSSKTQLLQDVQDENKLFKSQIEQLKQQNYQQASSFPPHEELLKVISEREKEISGLWNELDSLKDAVEHQRKKNNERQQQVEAVELEAKEVLKKLFPKVSVPSNLSYGEWLHGFEKKAKECMAGTSGSEEVKVLEHKLKEADEMHTLLQLECEKYKSVLAETEGILQKLQRSVEQEENKWKVKVDESHKTIKQMQSSFTSSEQELERLRSENKDIENLRREREHLEMELEKAEMERSTYVTEVRELKAQLNETLTKLRTEQNERQKVAGDLHKAQQSLELIQSKIVKAAGDTTVIENSDVSPETESSEKETMSVSLNQTVTQLQQLLQAVNQQLTKEKEHYQVLE

SEQ ID NO: 902123 - protein, 570 aa, Homo sapiens
RTRGSTHASGYRLLFLNSLIRMLWTNGKCIQEKDEKLKTVEELLETGLIQVATKEEELNAIRTENSSLTKEVQDLKAKQNDQVSFASLVEELKKVIHEKDGKIKSVEELLEAELLKVANKEKTVQLSITSKVQELQNLLKGKEEQMNTMKAVLEEKEKDLANTGKWLQDLQEENESLKAHVQEVAQHNLKEASSASQFEELEIVLKEKENELKRLEAMLKERESDLSSKTQLLQDVQDENKLFKSQIEQLKQQNYQQASSFPPHEELLKVISEREKEISGLWNELDSLKDAVEHQRKKNNERQQQVEAVELEAKEVLKKLFPKVSVPSNLSYGEWLHGFEKKAKECMAGTSGSEEVKVLEHKLKEADEMHTLLQLECEKYKSVLAETEGILQKLQRSVEQEENKWKVKVDESHKTIKQMQSSFTSSEQELERLRSENKDIENLRREREHLEMELEKAEMERSTYVTEVRELKAQLNETLTKLRTEQNERQKVAGDLHKAQQSLELIQSKIVKAAGDTTVIENSDVSPETESSEKETMSVSLNQTVTQLQQLLQAVNQQLTKEKEHYQVLE

SEQ ID NO: 902124 - protein, 287 aa, Homo sapiens
  misc_feature (6)..(6): Xaa can be any naturally occurring amino acid
  misc_feature (12)..(13): Xaa can be any naturally occurring amino acid
GGPPWXEDWFFXXPSGKERQQQVEAVELEAKEVLKKLFPKVSVPSNLSYGEWLHGFEKKAKECMAGTSGSEEVKVLEHKLKEADEMHTLLQLECEKYKSVLAETEGILQKLQRSVEQEENKWKVKVDESHKTIKQMQSSFTSSEQELERLRSENKDIENLRREREHLEMELEKAEMERSTYVTEVRELKAQLNETLTKLRTEQNERQKVAGDLHKAQQSLELIQSKIVKAAGDTTVIENSDVSPETESSEKETMSVSLNQTVTQLQQLLQAVNQQLTKEKEHYQVLE

SEQ ID NO: 902125 - protein, 287 aa, Homo sapiens
DDHATLCAVNDSQTPSKERQQQVEAVELEAKEVLKKLFPKVSVPSNLSYGEWLHGFEKKAKECMAGTSGSEEVKVLEHKLKEADEMHTLLQLECEKYKSVLAETEGILQKLQRSVEQEENKWKVKVDESHKTIKQMQSSFTSSEQELERLRSENKDIENLRREREHLEMELEKAEMERSTYVTEVRELKAQLNETLTKLRTEQNERQKVAGDLHKAQQSLELIQSKIVKAAGDTTVIENSDVSPETESSEKETMSVSLNQTVTQLQQLLQAVNQQLTKEKEHYQVLE

SEQ ID NO: 902126 - protein, 292 aa, Homo sapiens
LFSFFMDQQASSFPPHEELLKVISEREKEISGLWNELDSLKDAVEHQRKKNNSYGEWLHGFEKKAKECMAGTSGSEEVKVLEHKLKEADEMHTLLQLECEKYKSVLAETEGILQKLQRSVEQEENKWKVKVDESHKTIKQMQSSFTSSEQELERLRSENKDIENLRREREHLEMELEKAEMERSTYVTEVRELKAQLNETLTKLRTEQNERQKVAGDLHKAQQSLELIQSKIVKAAGDTTVIENSDVSPETESSEKETMSVSLNQTVTQLQQLLQAVNQQLTKEKEHYQVLE

SEQ ID NO: 902127 - protein, 1310 aa, Homo sapiens
MEFYESAYFIVLIPSIVITVIFLFFWLFMKETLYDEVLAKQKREQKLIPTKTDKKKAEKKKNKKKEIQNGNLHESDSESVPRDFKLSDALAVEDDQVAPVPLNVVETSSSVRERKKKEKKQKPVLEEQVIKESDASKIPGKKVEPVPVTKQPTPPSEAAASKKKPGQKKSKNGSDDQDKKVETLMVPSKRQEALPLHQETKQESGSGKKKASSKKQKTENVFVDEPLIHATTYIPLMDNADSSPVVDKREVIDLLKPDQVEGIQKSGTKKLKTETDKENAEVKFKDFLLSLKTMMFSEDEALCVVDLLKEKSGVIQDALKKSSKGELTTLIHQLQEKDKLLAAVKEDAAATKDRCKQLTQEMMTEKERSNVVITRMKDRIGTLEKEHNVFQNKIHVSYQETQQMQMKFQQVREQMEAEIAHLKQENGILRDAVSNTTNQLESKQSAELNKLRQDYARLVNELTEKTGKLQQEEVQKKNAEQAATQLKVQLQEAERRWEEVQSYIRKRTAEHEAAQQDLQSKFVAKENEVQSLHSKLTDTLVSKQQLEQRLMQLMESEQKRVNKEESLQMQVQDILEQNEALKAQIQQFHSQIAAQTSASVLAEELHKVIAEKDKQIKQTEDSLASERDRLTSKEEELKDIQNMNFLLKAEVQKLQALANEQAAAAHELEKMQQSVYVKDDKIRLLEEQLQHEISNKMEEFKILNDQNKALKSEVQKLQTLVSEQPNKDVVEQMEKCIQEKDEKLKTVEELLETGLIQVATKEEELNAIRTENSSLTKEVQDLKAKQNDQVSFASLVEELKKVIHEKDGKIKSVEELLEAELLKVANKEKTVQDLKQEIKALKEEIGNVQLEKAQQLSITSKVQELQNLLKGKEEQMNTMKAVLEEKEKDLANTGKWLQDLQEENESLKAHVQEVAQHNLKEASSASQFEELEIVLKEKENELKRLEAMLKERESDLSSKTQLLQDVQDENKLFKSQIEQLKQQNYQQASSFPPHEELLKVISEREKEISGLWNELDSLKDAVEHQRKKNNERQQQVEAVELEAKEVLKKLFPKVSVPSNLSYGEWLHGFEKKAKECMAGTSGSEEVKVLEHKLKEADEMHTLLQLECEKYKSVLAETEGILQKLQRSVEQEENKWKVKVDESHKTIKQMQSSFTSSEQELERLRSENKDIENLRREREHLEMELEKAEMERSTYVTEVRELKAQLNETLTKLRTEQNERQKVAGDLHKAQQSLELIQSKIVKAAGDTTVIENSDVSPETESSEKETMSVSLNQTVTQLQQLLQAVNQQLTKEKEHYQVLDTMVGDAAAIL

SEQ ID NO: 902128 - protein, 246 aa, Homo sapiens
PGSKTMNQQPPSRELDDELNQFTIAAKKLKSLVIYLTKESKDRYMYNYKTLLKKITDNANKWKHIPCSWMGRTSIVKMTIPLKAIYKFNAILIGMQSSFTSSEQELERLRSENKDIENLRREREHLEMELEKAEMERSTYVTEVRELKAQLNETLTKLRTEQNERQKVAGDLHKAQQSLELIQSKIVKAAGDTTVIENSDVSPETESSEKETMSVSLNQTVTQLQQLLQAVNQQLTKEKEHYQVLE

SEQ ID NO: 902129 - protein, 1030 aa, Homo sapiens
MEFYESAYFIVLIPSIVITVIFLFFWLFMKETLYDEVLAKQKREQKLIPTKTDKKKAEKKKNKKKEIQNGNLHESDSESVPRDFKLSDALAVEDDQVAPVPLNVVETSSSVRERKKKEKKQKPVLEEQVIKESDASKIPGKKVEPVPVTKQPTPPSEAAASKKKPGQKKSKNGSDDQDKKVETLMVPSKRQEALPLHQETKQESGSGKKKASSKKQKTENVFVDEPLIHATTYIPLMDNADSSPVVDKREVIDLLKPDQVEGIQKSGTKKLKTETDKENAEVKFKDFLLSLKTMMFSEDEALCVVDLLKEKSGVIQDALKKSSKGELTTLIHQLQEKDKLLAAVKEDAAATKDRCKQLTQEMMTEKERSNVVITRMKDRIGTLEKEHNVFQNKIHVSYQETQQMQMKFQQVREQMEAEIAHLKQENGILRDAVSNTTNQLESKQSAELNKLRQDYARLVNELTEKTGKLQQEEVQKKNAEQAATQLKVQLQEAERRWEEVQSYIRKRTAEHEAAQQDLQSKFVAKENEVQSLHSKLTDTLVSKQQLEQRLMQLMESEQKRVNKEESLQMQVQDILEQNEALKAQIQQFHSQIAAQTSASVLAEELHKVIAEKDKQIKQTEDSLASERDRLTSKEEELKDIQNMNFLLKAEVQKLQALANEQAAAAHELEKMQQSVYVKDDKIRLLEEQLQHEISNKMEEFKILNDQNKALKSEVQKLQTLVSEQPNKDVVEQMEKCIQEKDEKLKTVEELLETGLIQVATKEEELNAIRTENSSLTKEVQDLKAKQNDQVSFASLVEELKKVIHEKDGKIKSVEELLEAELLKVANKEKTVQDLKQEIKALKEEIGNVQLEKAQQLSITSKVQELQNLLKGKEEQMNTMKAVLEEKEKDLANTGKWLQDLQEENESLKAHVQEVAQHNLKEASSASQFEELEIVLKEKENELKRLEAMLKERESDLSSKTQLLQDVQDENKLFKSQIEQLKQQNYQQASSFPPHEELLKVISEREKEISGLWNELDSLKDAVEHQRKKNN

SEQ ID NO: 902130 - protein, 1240 aa, Homo sapiens
MEFYESAYFIVLIPSIVITVIFLFFWLFMKETLYDEVLAKQKREQKLIPTKTDKKKAEKKKNKKKEIQNGNLHESDSESVPRDFKLSDALAVEDDQVAPVPLNVVETSSSVRERKKKEKKQKPVLEEQVIKESDASKIPGKKVEPVPVTKQPTPPSEAAASKKKPGQKKSKNGSDDQDKKVETLMVPSKRQEALPLHQETKQESGSGKKKASSKKQKTENVFVDEPLIHATTYIPLMDNADSSPVVDKREVIDLLKPDQVEGIQKSGTKKLKTETDKENAEVKFKDFLLSLKTMMFSEDEALCVVDLLKEKSGVIQDALKKSSKGELTTLIHQLQEKDKLLAAVKEDAAATKDRCKQLTQEMMTEKERSNVVITRMKDRIGTLEKEHNVFQNKIHVSYQETQQMQMKFQQVREQMEAEIAHLKQENGILRDAVSNTTNQLESKQSAELNKLRQDYARLVNELTEKTGKLQQEEVQKKNAEQAATQLKVQLQEAERRWEEVQSYIRKRTAEHEAAQQDLQSKFVAKENEVQSLHSKLTDTLVSKQQLEQRLMQLMESEQKRVNKEESLQMQVQDILEQNEALKAQIQQFHSQIAAQTSASVLAEELHKVIAEKDKQIKQTEDSLASERDRLTSKEEELKDIQNMNFLLKAEVQKLQALANEQAAAAHELEKMQQSVYVKDDKIRLLEEQLQHEISNKMEEFKILNDQNKALKSEVQKLQTLVSEQPNKDVVEQMEKCIQEKDEKLKTVEELLETGLIQVATKEEELNAIRTENSSLTKEVQDLKAKQNDQVSFASLVEELKKVIHEKDGKIKSVEELLEAELLKVANKEKTVQDLKQEIKALKEEIGNVQLEKAQQLSITSKVQELQNLLKGKEEQMNTMKAVLEEKEKDLANTGKWLQDLQEENESLKAHVQEVAQHNLKEASSASQFEELEIVLRRTGTCLDEVRTRLKRGAGTFSKPGGTVAHETLCGHGRVNKFTGPFPPEENVPSRENGRVKTRDDAKTPARAVPTDLVDYMMESMFFLYSWCHYSAHSTGAQTPHHTYDADNDPTSRHHRSRGDQSDGRTSHQRAAQGGKTTPVAQRRESETKTTNTRHRPHQATQRRAQQKAERTKPPTTRRPPSAKEAQSTTRAMRQTETTAHEGTGDGQEESEGTQTRGTEAEGTQRALGPRRAGERDTTENRRRKSTRDRADATAERATEDRADSHRQNDRETEAARTEEATERATQPSSEKRPTVRGATE

SEQ ID NO: 902131 - protein, 806 aa, Homo sapiens
MEFYESAYFIVLIPSIVITVIFLFFWLFMKETLYDEVLAKQKREQKLIPTKTDKKKAEKKKNKKKEIQNGNLHESDSESVPRDFKLSDALAVEDDQVAPVPLNVVETSSSVRERKKKEKKQKPVLEEQVIKESDASKIPGKKVEPVPVTKQPTPPSEAAASKKKPGQKKSKNGSDDQDKKVETLMVPSKRQEALPLHQETKQESGSGKKKASSKKQKTENVFVDEPLIHATTYIPLMDNADSSPVVDKREVIDLLKPDQVEGIQKSGTKKLKTETDKENAEVKFKDFLLSLKTMMFSEDEALCVVDLLKEKSGVIQDALKKSSKGELTTLIHQLQEKDKLLAAVKEDAAATKDRCKQLTQEMMTEKERSNVVITRMKDRIGTLEKEHNVFQNKIHVSYQETQQMQMKFQQVREQMEAEIAHLKQENGILRDAVSNTTNQLESKQSAELNKLRQDYARLVNELTEKTGKLQQEEVQKKNAEQAATQLKVQLQEAERRWEEVQSYIRKRTAEHEAAQQDLQSKFVAKENEVQSLHSKLTDTLVSKQQLEQRLMQLMESEQKRVNKEESLQMQVQDILEQNEALKAQIQQFHSQIAAQTSASVLAEELHKVIAEKDKQIKQTEDSLASERDRLTSKEEELKDIQNMNFLLKAEVQKLQALANEQAAAAHELEKMQQSVYVKDDKIRLLEEQLQHEISNKMEEFKILNDQNKALKSEVQKLQTLVSEQLIRMLWNNGAFRNDEKSTGTILNGLSGGYRRRIINQSLVKSIKHQRVAPLDNRSTGYRQPHTNRGNDRKIMRSRKRGTPRDI

SEQ ID NO: 902132 - protein, 612 aa, Homo sapiens
MEFYESAYFIVLIPSIVITVIFLFFWLFMKETLYDEVLAKQKREQKLIPTKTDKKKAEKKKNKKKEIQNGNLHESDSESVPRDFKLSDALAVEDDQVAPVPLNVVETSSSVRERKKKEKKQKPVLEEQVIKESDASKIPGKKVEPVPVTKQPTPPSEAAASKKKPGQKKSKNGSDDQDKKVETLMVPSKRQEALPLHQETKQESGSGKKKASSKKQKTENVFVDEPLIHATTYIPLMDNADSSPVVDKREVIDLLKPDQVEGIQKSGTKKLKTETDKENAEVKFKDFLLSLKTMMFSEDEALCVVDLLKEKSGVIQDALKKSSKGELTTLIHQLQEKDKLLAAVKEDAAATKDRCKQLTQEMMTEKERSNVVITRMKDRIGTLEKEHNVFQNKIHVSYQETQQMQMKFQQVREQMEAEIAHLKQENGILRDAVSNTTNQLESKQSAELNKLRQDYARLVNELTEKTGKLQQEEVQKKNAEQAATQLKVQLQEAERRWEEVQSYIRKRTAEHEAAQQDLQSKFVAKENEVQSLHSKLTDTLVSKQQLEQRLMQLMESEQKRVNKEESLQMQVQDILEQNEALKAQIQQFHSQIAAQTSASVLAKTPKGVTSSS

SEQ ID NO: 902133 - protein, 625 aa, Homo sapiens
MEFYESAYFIVLIPSIVITVIFLFFWLFMKETLYDEVLAKQKREQKLIPTKTDKKKAEKKKNKKKEIQNGNLHESDSESVPRDFKLSDALAVEDDQVAPVPLNVVETSSSVRERKKKEKKQKPVLEEQVIKESDASKIPGKKVEPVPVTKQPTPPSEAAASKKKPGQKKSKNGSDDQDKKVETLMVPSKRQEALPLHQETKQESGSGKKKASSKKQKTENVFVDEPLIHATTYIPLMDNADSSPVVDKREVIDLLKPDQVEGIQKSGTKKLKTETDKENAEVKFKDFLLSLKTMMFSEDEALCVVDLLKEKSGVIQDALKKSSKGELTTLIHQLQEKDKLLAAVKEDAAATKDRCKQLTQEMMTEKERSNVVITRMKDRIGTLEKEHNVFQNKIHVSYQETQQMQMKFQQVREQMEAEIAHLKQENGILRDAVSNTTNQLESKQSAELNKLRQDYARLVNELTEKTGKLQQEEVQKKNAEQAATQLKVQLQEAERRWEEVQSYIRKRTAEHEAAQQDLQSKFVAKENEVQSLHSKLTDTLVSKQQLEQRLMQLMESEQKRVNKEESLQMQVQDILEQNEALKAQIQQFHSQIAAQYLLLHVLARRNYDKVHCTINHVLEIRTWYL

SEQ ID NO: 902134 - protein, 580 aa, Homo sapiens
MEFYESAYFIVLIPSIVITVIFLFFWLFMKETLYDEVLAKQKREQKLIPTKTDKKKAEKKKNKKKEIQNGNLHESDSESVPRDFKLSDALAVEDDQVAPVPLNVVETSSSVRERKKKEKKQKPVLEEQVIKESDASKIPGKKVEPVPVTKQPTPPSEAAASKKKPGQKKSKNGSDDQDKKVETLMVPSKRQEALPLHQETKQESGSGKKKASSKKQKTENVFVDEPLIHATTYIPLMDNADSSPVVDKREVIDLLKPDQVEGIQKSGTKKLKTETDKENAEVKFKDFLLSLKTMMFSEDEALCVVDLLKEKSGVIQDALKKSSKGELTTLIHQLQEKDKLLAAVKEDAAATKDRCKQLTQEMMTEKERSNVVITRMKDRIGTLEKEHNVFQNKIHVSYQETQQMQMKFQQVREQMEAEIAHLKQENGILRDAVSNTTNQLESKQSAELNKLRQDYARLVNELTEKTGKLQQEEVQKKNAEQAATQLKVQLQEAERRWEEVQSYIRKRTAEHEAAQQDLQSKFVAKENEVQSLHSKLTDTLVSKQQLEQRLMQLMESEQKRVNKEESLQMQVQDILEQNST

SEQ ID NO: 902135 - protein, 172 aa, Homo sapiens
MEFYESAYFIVLIPSIVITVIFLFFWLFMKETLYDEVLAKQKREQKLIPTKTDKKKAEKKKNKKKEIQNGNLHESDSESVPRDFKLSDALAVEDDQVAPVPLNVVETSSSVRERKKKEKKQKPVLEEQVIKESDASKIPGKKVEPVPAVHPSPAPKPGFNKFTFISKKKKKK

SEQ ID NO: 902136 - protein, 1300 aa, Homo sapiens; identical to SEQ ID NO: 902112

SEQ ID NO: 902137 - protein, 83 aa, Homo sapiens
TTTKIRGRVDKAQQSLELIQSKIVKAAGDTTVIENSDVSPETESSEKETMSVSLNQTVTQLQQLLQAVNQQLTKEKEHYQVLE

SEQ ID NO: 902138 - protein, 1329 aa, Homo sapiens
MEFYESAYFIVLIPSIVITVIFLFFWLFMKETLYDEVLAKQKREQKLIPTKTDKKKAEKKKNKKKEIQNGNLHESDSESVPRDFKLSDALAVEDDQVAPVPLNVVETSSSVRERKKKEKKQKPVLEEQVIKESDASKIPGKKVEPVPVTKQPTPPSEAAASKKKPGQKKSKNGSDDQDKKVETLMVPSKRQEALPLHQETKQESGSGKKKASSKKQKTENVFVDEPLIHATTYIPLMDNADSSPVVDKREVIDLLKPDQVEGIQKSGTKKLKTETDKENAEVKFKDFLLSLKTMMFSEDEALCVVDLLKEKSGVIQDALKKSSKGELTTLIHQLQEKDKLLAAVKEDAAATKDRCKQLTQEMMTEKERSNVVITRMKDRIGTLEKEHNVFQNKIHVSYQETQQMQMKFQQVREQMEAEIAHLKQENGILRDAVSNTTNQLESKQSAELNKLRQDYARLVNELTEKTGKLQQEEVQKKNAEQAATQLKVQLQEAERRWEEVQSYIRKRTAEHEAAQQDLQSKFVAKENEVQSLHSKLTDTLVSKQQLEQRLMQLMESEQKRVNKEESLQMQVQDILEQNEALKAQIQQFHSQIAAQTSASVLAEELHKVIAEKDKQIKQTEDSLASERDRLTSKEEELKDIQNMNFLLKAEVQKLQALANEQAAAAHELEKMQQSVYVKDDKIRLLEEQLQHEISNKMEEFKILNDQNKALKSEVQKLQTLVSEQPNKDVVEQMEKCIQEKDEKLKTVEELLETGLIQVATKEEELNAIRTENSSLTKEVQDLKAKQNDQVSFASLVEELKKVIHEKDGKIKSVEELLEAELLKVANKEKTVQDLKQEIKALKEEIGNVQLEKAQQLSITSKVQELQNLLKGKEEQMNTMKAVLEEKEKDLANTGKWLQDLQEENESLKAHVQEVAQHNLKEASSASQFEELEIVLKEKENELKRLEAMLKERESDLSSKTQLLQDVQDENKLFKSQIEQLKQQNYQQASSFPPHEELLKVISEREKEISGLWNELDSLKDAVEHQRKKNNDLREKNWEAMEALASTEKMLQDKVNKTSKERQQQVEAVELEAKEVLKKLFPKVSVPSNLSYGEWLHGFEKKAKECMAGTSGSEEVKVLEHKLKEADEMHTLLQLECEKYKSVLAETEGILQKLQRSVEQEENKWKVKVDESHKTIKQMQSSFTSSEQELERLRSENKDIENLRREREHLEMELEKAEMERSTYVTEVRELKAQLNETLTKLRTEQNERQKVAGDLHKAQQSLELIQSKIVKAAGDTTVIENSDVSPETESSEKETMSVSLNQTVTQLQQLLQAVNQQLTKEKEHYQVLE

SEQ ID NO: 902139 - protein, 1300 aa, Homo sapiens; identical to SEQ ID NO: 902112

SEQ ID NO: 902140 - protein, 1272 aa, Homo sapiens [sequence omitted]

SEQ ID NO: 902141 - protein, 1328 aa, Homo sapiens
MEFYESAYFIVLIPSIVITVIFLFFWLFMKETLYDEVLAKQKREQKLIPTKTDKKKAEKKKNKKKEIQNGNLHESDSESVPRDFKLSDALAVEDDQVAPVPLNVVETSSSVRERKKKEKKQKPVLEEQVIKESDASKIPGKKVEPVPVTKQPTPPSEAAASKKKPGQKKSKNGSDDQDKKVETLMVPSKRQEALPLHQETKQESGSGKKKASSKKQKTENVFVDEPLIHATTYIPLMDNADSSPVVDKREVIDLLKPDQVEGIQKSGTKKLKTETDKENAEVKFKDFLLSLKTMMFSEDEALCVVDLLKEKSGVIQDALKKSSKGELTTLIHQLQEKDKLLAAVKEDAAATKDRCKQLTQEMMTEKERSNVVITRMKDRIGTLEKEHNVFQNKIHVSYQETQQMQMKFQQVREQMEAEIAHLKQENGILRDAVSNTTNQLESKQSAELNKLRQDYARLVNELTEKTGKLQQEEVQKKNAEQAATQLKVQLQEAERRWEEVQSYIRKRTAEHEAAQQDLQSKFVAKENEVQSLHSKLTDTLVSKQQLEQRLMQLMESEQKRVNKEESLQMQVQDILEQNEALKAQIQQFHSQIAAQTSASVLAEELHKVIAEKDKQIKQTEDSLASERDRLTSKEEELKDIQNMNFLLKAEVQKLQALANEQAAAAHELEKMQQSVYVKDDKIRLLEEQLQHEISNKMEEFKILNDQNKALKSEVQKLQTLVSEQPNKDVVEQMEKCIQEKDEKLKTVEELLETGLIQVATKEEELNAIRTENSSLTKEVQDLKAKQNDQVSFASLVEELKKVIHEKDGKIKSVEELLEAELLKVANKEKTVQDLKQEIKALKEEIGNVQLEKAQQLSITSKVQELQNLLKGKEEQMNTMKAVLEEKEKDLANTGKWLQDLQEENESLKAHVQEVAQHNLKEASSASQFEELEIVLKEKENELKRLEAMLKERESDLSSKTQLLQDVQDENKLFKSQIEQLKQQNYQQASSFPPHEELLKVISEREKEISGLWNELDSLKDAVEHQRKKNNERQQQVEAVELEAKEVLKKLFPKVSVPSNLSYGEWLHGFEKKAKECMAGTSGSEEVKVLEHKLKEADEMHTLLQLECEKYKSVLAETEGILQKLQRSVEQEENKWKVKVDESHKTIKQMQSSFTSSEQELERLRSENKDIENLRREREHLEMELEKAEMERSTYVTEVRELKDLLTELQKKLDDSYSEAVRQNEELNLLKAQLNETLTKLRTEQNERQKVAGDLHKAQQSLELIQSKIVKAAGDTTVIENSDVSPETESSEKETMSVSLNQTVTQLQQLLQAVNQQLTKEKEHYQVLE

SEQ ID NO: 902142 - protein, 997 aa, Homo sapiens
AVSVGPGVTSGVNVNILSGMGNGTISSSAAVSSVPNAAAGMTGGWFQVSSNNQQLTQEMMTEKERSNVVITRMKDRIGTLEKEHNVFQNKIHVSYQETQQMQMKFQQVREQMEAEIAHLKQENGILRDAVSNTTNQLESKQSAELNKLRQDYARLVNELTEKTGKLQQEEVQKKNAEQAATQLKVQLQEAERRWEEVQSYIRKRTAEHEAAQQDLQSKFVAKENEVQSLHSKLTDTLVSKQQLEQRLMQLMESEQKRVNKEESLQMQVQDILEQNEALKAQIQQFHSQIAAQTSASVLAEELHKVIAEKDKQIKQTEDSLASERDRLTSKEEELKDIQNMNFLLKAEVQKLQALANEQAAAAHELEKMQQSVYVKDDKIRLLEEQLQHEISNKMEEFKILNDQNKALKSEVQKLQTLVSEQPNKDVVEQMEKCIQEKDEKLKTVEELLETGLIQVATKEEELNAIRTENSSLTKEVQDLKAKQNDQVSFASLVEELKKVIHEKDGKIKSVEELLEAELLKVANKEKTVQDLKQEIKALKEEIGNVQLEKAQQLSITSKVQELQNLLKGKEEQMNTMKAVLEEKEKDLANTGKWLQDLQEENESLKAHVQEVAQHNLKEASSASQFEELEIVLKEKENELKRLEAMLKERESDLSSKTQLLQDVQDENKLFKSQIEQLKQQNYQQASSFPPHEELLKVISEREKEISGLWNELDSLKDAVEHQRKKNNERQQQVEAVELEAKEVLKKLFPKVSVPSNLSYGEWLHGFEKKAKECMAGTSGSEEVKVLEHKLKEADEMHTLLQLECEKYKSVLAETEGILQKLQRSVEQEENKWKVKVDESHKTIKQMQSSFTSSEQELERLRSENKDIENLRREREHLEMELEKAEMERSTYVTEVRELKAQLNETLTKLRTEQNERQKVAGDLHKAQQSLELIQSKIVKAAGDTTVIENSDVSPETESSEKETMSVSLNQTVTQLQQLLQAVNQQLTKEKEHYQVLE

SEQ ID NO: 902143 - protein, 1300 aa, Homo sapiens; identical to SEQ ID NO: 902112

SEQ ID NO: 902144 - protein, 1300 aa, Homo sapiens; identical to SEQ ID NO: 902112

SEQ ID NO: 902145 - protein, 1307 aa, Homo sapiens
MEFYESAYFIVLIPSIVITVIFLFFWLFMKETLYDEVLAKQKREQKLIPTKTDKKKAEKKKNKKKEIQNGNLHESDSESVPRDFKLSDALAVEDDQVAPVPLNVVETSSSVRERKKKEKKQKPVLEEQVIKESDASKIPGKKVEPVPVTKQPTPPSEAAASKKKPGQKKSKNGSDDQDKKVETLMVPSKRQEALPLHQETKQESGSGKKKASSKKQKTENVFVDEPLIHATTYIPLMDNADSSPVVDKREVIDLLKPDQVEGIQKSGTKKLKTETDKENAEVKFKDFLLSLKTMMFSEDEALCVVDLLKEKSGVIQDALKKSSKGELTTLIHQLQEKDKLLAAVKEDAAATKDRCKQLTQEMMTEKERSNVVITRMKDRIGTLEKEHNVFQNKIHVSYQETQQMQMKFQQVREQMEAEIAHLKQENGILRDAVSNTTNQLESKQSAELNKLRQDYARLVNELTEKTGKLQQEEVQKKNAEQAATQLKVQLQEAERRWEEVQSYIRKRTAEHEAAQQDLQSKFVAKENEVQSLHSKLTDTLVSKQQLEQRLMQLMESEQKRVNKEESLQMQVQDILEQNEALKAQIQQFHSQIAAQTSASVLAEELHKVIAEKDKQIKQTEDSLASERDRLTSKEEELKDIQNMNFLLKAEVQKLQALANEQAAAAHELEKMQQSVYVKDDKIRLLEEQLQHEISNKMEEFKILNDQNKALKSEVQKLQTLVSEQPNKDVVEQMEKCIQEKDEKLKTVEELLETGLIQVATKEEELNAIRTENSSLTKEVQDLKAKQNDQVSFASLVEELKKVIHEKDGKIKSVEELLEAELLKVANKEKTVQDLKQEIKALKEEIGNVQLEKAQQLSITSKVQELQNLLKGKEEQMNTMKAVLEEKEKDLANTGKWLQDLQEENESLKAHVQEVAQHNLKEASSASQFEELEIVLKEKENELKRLEAMLKERESDLSSKTQLLQDVQDENKLFKSQIEQLKQQNYQQASSFPPHEELLKVISEREKEISGLWNELDSLKDAVEHQRKKNNERQQQVEAVELEAKEVLKKLFPKVSVPSNLSYGEWLHGFEKKAKECMAGTSGSEEVKVLEHKLKEADEMHTLLQLECEKYKSVLAETEGILQKLQRSVEQEENKWKVKVDESHKTIKQMQSSFTSSEQELERLRSENKDIENLRREREHLEMELEKAEMERSTYVTEVRELKAQLNETLTKLRTEQNERQKVAGDLHKAQQSLELIQSKIVKAAGDTTVIENSDVSPETESSEKETMSVSLNQTVTQLQQLLQAVNQQLTKEKEHYQVLGAFCLTLE

SEQ ID NO: 902146 - protein, 1300 aa, Homo sapiens; identical to SEQ ID NO: 902112

SEQ ID NO: 902147 - protein, 265 aa, Homo sapiens
TSYIGRSTISAYTVPFPKVSVPSNMSYGEWLHGFEKKAKECMAGTSGSEEVKVLEHKLKEADEMHTLLQLECEKYKSVLAETEGILQKLQRSVEQEENKWKVKVDESHKTIKQMQSSFTSSEQELERLRSENKDIENLRREREHLEMELEKAEMERSTYVTEVRELKAQLNETLTKLRTEQNERQKVAGDLHKAQQSLELIQSKIVKAAGDTTVIENSDVSPETESSEKETMSVSLNQTVTQLQQLLQAVNQQLTKEKEHYQVLE

SEQ ID NO: 902148 - protein, 1267 aa, Homo sapiens
MEFYESAYFIVLIPSIVITVIFLFFWLFMKETLYDEVLAKQKREQKLIPTKTDKKKAEKKKNKKKEIQNGNLHESDSESVPRDFKLSDALAVEDDQVAPVPLNVVETSSSVRERKKKEKKQKPVLEEQVIKESDASKIPGKKVEPVPVTKQPTPPSEAAASKKKPGQKKSKNGSDDQDKKVETLMVPSKRQEALPLHQETKQESGSGKKKASSKKQKTENVFVDEPLIHATTYIPLMDNADSSPVVDKREVIDLLKPDQVEGIQKSGTKKLKTETDKENAEVKFKDFLLSLKTMMFSEDEALCVVDLLKEKSGVIQDALKKSSKGELTTLIHQLQEKDKLLAAVKEDAAATKDRCKQLTQEMMTEKERSNVVITRMKDRIGTLEKEHNVFQNKIHVSYQETQQMQMKFQQVREQMEAEIAHLKQENGILRDAVSNTTNQLESKQSAELNKLRQDYARLVNELTEKTGKLQQEEVQKKNAEQAATQLKVQLQEAERRWEEVQSYIRKRTAEHEAAQQDLQSKFVAKENEVQSLHSKLTDTLVSKQQLEQRLMQLMESEQKRVNKEESLQMQVQDILEQNEALKAQIQQFHSQIAAQTSASVLAEELHKVIAEKDKQIKQTEDSLASERDRLTSKEEELKDIQNMNFLLKAEVQKLQALANEQAAAAHELEKMQQSVYVKDDKIRLLEEQLQHEISNKMEEFKILNDQNKALKSEVQKLQTLVSEQPNKDVVEQMEKCIQEKDEKLKTVEELLETGLIQVATKEEELNAIRTENSSLTKEVQDLKAKQNDQVSFASLVEELKKVIHEKDGKIKSVEELLEAELLKVANKEKTVQDLKQEIKALKEEIGNVQLEKAQQLSITSKVQELQNLLKGKEEQMNTMKAVLEEKEKDLANTGKWLQDLQEENESLKAHVQEVAQHNLKEASSASQFEELEIVLKEKENELKRLEAMLKERESDLSSKTQLLQDVQDENKLFKSQIEQLKQQNYQQASSFPPHEELLKVISEREKEISGLWNELDSLKDAVEHQRKKNNERQQQVEAVELEAKEVLKKLFPKVSVPSNLSYGEWLHGFEKKAKECMAGTSGSEEVKVLEHKLKEADEMHTLLQLECEKYKSVLAETEGILQKLQRSVEQEENKWKVKVDESHKTIKQMQSSFTSSEQELERLRSENKDIENLRREREHLEMELEKAEMERSTYVTEVRELKDLLTELQKKLDDSYSEAVRQNEELNLLKAQLNETLTKLRTEQNERQKVAGDLHKAHSHWSYPSKC

SEQ ID NO: 902149 - protein, 1044 aa, Homo sapiens
MEFYESAYFIVLIPSIVITVIFLFFWLFMKETLYDEVLAKQKREQKLIPTKTDKKKAEKKKNKKKEIQNGNLHESDSESVPRDFKLSDALAVEDDQVAPVPLNVVETSSSVRERKKKEKKQKPVLEEQVIKESDASKIPGKKVEPVPVTKQPTPPSEAAASKKKPGQKKSKNGSDDQDKKVETLMVPSKRQEALPLHQETKQESGSGKKKASSKKQKTENVFVDEPLIHATTYIPLMDNADSSPVVDKREVIDLLKPDQVEGIQKSGTKKLKTETDKENAEVKFKDFLLSLKTMMFSEDEALCVVDLLKEKSGVIQDALKKSSKGELTTLIHQLQEKDKLLAAVKEDAAATKDRCKQLTQEMMTEKERSNVVITRMKDRIGTLEKEHNVFQNKIHVSYQETQQMQMKFQQVREQMEAEIAHLKQENGILRDAVSNTTNQLESKQSAELNKLRQDYARLVNELTEKTGKLQQEEVQKKNAEQAATQLKVQLQEAERRWEEVQSYIRKRTAEHEAAQQDLQSKFVAKENEVQSLHSKLTDTLVSKQQLEQRLMQLMESEQKRVNKEESLQMQVQDILEQNEALKAQIQQFHSQIAAQTSASVLAEELHKVIAEKDKQIKQTEDSLASERDRLTSKEEELKDIQNMNFLLKAEVQKLQALANEQAAAAHELEKMQQSVYVKDDKIRLLEEQLQHEISNKMEEFKILNDQNKALKSEVQKLQTLVSEQPNKDVVEQMEKCIQEKDEKLKTVEELLETGLIQVATKEEELNAIRTENSSLTKEVQDLKAKQNDQVSFASLVEELKKVIHEKDGKIKSVEELLEAELLKVANKEKTVQDLKQEIKALKEEIGNVQLEKAQQLSITSKVQELQNLLKGKEEQMNTMKAVLEEKEKDLANTGKWLQDLQEENESLKAHVQEVAQHNLKEASSASQFEELEIVLKEKENELKRLEAMLKERESDLSSKTQLLQDVQDENKLFKSQIEQLKQQNYQQASSFPPHEELLKVISEREKEISGLWNELDSLKDAVEHQRKKNNEGMVMQQQQQRWRH

SEQ ID NO: 902150 - protein, 802 aa, Homo sapiens
MEFYESAYFIVLIPSIVITVIFLFFWLFMKETLYDEVLAKQKREQKLIPTKTDKKKAEKKKNKKKEIQNGNLHESDSESVPRDFKLSDALAVEDDQVAPVPLNVVETSSSVRERKKKEKKQKPVLEEQVIKESDASKIPGKKVEPVPVTKQPTPPSEAAASKKKPGQKKSKNGSDDQDKKVETLMVPSKRQEALPLHQETKQESGSGKKKASSKKQKTENVFVDEPLIHATTYIPLMDNADSSPVVDKREVIDLLKPDQVEGIQKSGTKKLKTETDKENAEVKFKDFLLSLKTMMFSEDEALCVVDLLKEKSGVIQDALKKSSKGELTTLIHQLQEKDKLLAAVKEDAAATKDRCKQLTQEMMTEKERSNVVITRMKDRIGTLEKEHNVFQNKIHVSYQETQQMQMKFQQVREQMEAEIAHLKQENGILRDAVSNTTNQLESKQSAELNKLRQDYARLVNELTEKTGKLQQEEVQKKNAEQAATQLKVQLQEAERRWEEVQSYIRKRTAEHEAAQQDLQSKFVAKENEVQSLHSKLTDTLVSKQQLEQRLMQLMESEQKRVNKEESLQMQVQDILEQNEALKAQIQQFHSQIAAQTSASVLAEELHKVIAEKDKQIKQTEDSLASERDRLTSKEEELKDIQNMNFLLKAEVQKLQALANEQAAAAHELEKMQQSVYVKDDKIRLLEEQLQHEISNKMEEFKILNDQNKALKSEVQKLQTLVSEQPNKDVVEQMEKCIQEKDEKLKTVEELLETGLIQVATKEEELNAIRTENSSLTKEVQDLKAKQNDQVSFASLVEELKKV

SEQ ID NO: 902151 - protein, 736 aa, Homo sapiens
MEFYESAYFIVLIPSIVITVIFLFFWLFMKETLYDEVLAKQKREQKLIPTKTDKKKAEKKKNKKKEIQNGNLHESDSESVPRDFKLSDALAVEDDQVAPVPLNVVETSSSVRERKKKEKKQKPVLEEQVIKESDASKIPGKKVEPVPVTKQPTPPSEAAASKKKPGQKKSKNGSDDQDKKVETLMVPSKRQEALPLHQETKQESGSGKKKASSKKQKTENVFVDEPLIHATTYIPLMDNADSSPVVDKREVIDLLKPDQVEGIQKSGTKKLKTETDKENAEVKFKDFLLSLKTMMFSEDEALCVVDLLKEKSGVIQDALKKSSKGELTTLIHQLQEKDKLLAAVKEDAAATKDRCKQLTQEMMTEKERSNVVITRMKDRIGTLEKEHNVFQNKIHVSYQETQQMQMKFQQVREQMEAEIAHLKQENGILRDAVSNTTNQLESKQSAELNKLRQDYARLVNELTEKTGKLQQEEVQKKNAEQAATQLKVQLQEAERRWEEVQSYIRKRTAEHEAAQQDLQSKFVAKENEVQSLHSKLTDTLVSKQQLEQRLMQLMESEQKRVNKEESLQMQVQDILEQNEALKAQIQQFHSQIAAQTSASVLAEELHKVIAEKDKQIKQTEDSLASERDRLTSKEEELKDIQNMNFLLKAEVQKLQALANEQAAAAHELEKMQQSVYVKDDKIRLLEEQLQHEISNKMEEFKILNDQNKALKSEVQKLQTLVSEQPNKDVVDKWKMH

SEQ ID NO: 902152 - protein, 585 aa, Homo sapiens
MEFYESAYFIVLIPSIVITVIFLFFWLFMKETLYDEVLAKQKREQKLIPTKTDKKKAEKKKNKKKEIQNGNLHESDSESVPRDFKLSDALAVEDDQVAPVPLNVVETSSSVRERKKKEKKQKPVLEEQVIKESDASKIPGKKVEPVPVTKQPTPPSEAAASKKKPGQKKSKNGSDDQDKKVETLMVPSKRQEALPLHQETKQESGSGKKKASSKKQKTENVFVDEPLIHATTYIPLMDNADSSPVVDKREVIDLLKPDQVEGIQKSGTKKLKTETDKENAEVKFKDFLLSLKTMMFSEDEALCVVDLLKEKSGVIQDALKKSSKGELTTLIHQLQEKDKLLAAVKEDAAATKDRCKQLTQEMMTEKERSNVVITRMKDRIGTLEKEHNVFQNKIHVSYQETQQMQMKFQQVREQMEAEIAHLKQENGILRDAVSNTTNQLESKQSAELNKLRQDYARLVNELTEKTGKLQQEEVQKKNAEQAATQLKVQLQEAERRWEEVQSYIRKRTAEHEAAQQDLQSKFVAKENEVQSLHSKLTDTLVSKQQLEQRLMQLMESEQKRVNKEESLQMQVQDILEQNEGRLERI

SEQ ID NO: 902153 - protein, 454 aa, Homo sapiens
MEFYESAYFIVLIPSIVITVIFLFFWLFMKETLYDEVLAKQKREQKLIPTKTDKKKAEKKKNKKKEIQNGNLHESDSESVPRDFKLSDALAVEDDQVAPVPLNVVETSSSVRERKKKEKKQKPVLEEQVIKESDASKIPGKKVEPVPVTKQPTPPSEAAASKKKPGQKKSKNGSDDQDKKVETLMVPSKRQEALPLHQETKQESGSGKKKASSKKQKTENVFVDEPLIHATTYIPLMDNADSSPVVDKREVIDLLKPDQVEGIQKSGTKKLKTETDKENAEVKFKDFLLSLKTMMFSEDEALCVVDLLKEKSGVIQDALKKSSKGELTTLIHQLQEKDKLLAAVKEDAAATKDRCKQLTQEMMTEKERSNVVITRMKDRIGTLEKEQKLIPTKTDKKKAEKKKNKKKEIQNGNLHESDSESVPRDFKLSDALAVEDDQVAPVPLNVVETSSSVR

SEQ ID NO: 902154 - protein, 250 aa, Homo sapiens
MGSQHSAAARPSSCRRKQEDDRDGLLAEREQEEAIAQFPYVEFTGRDSITCLTCQGTGYIPTEQVNELVALIPHSDQRLRPQRTKQYVLLSILLCLLASGLVVFFLFPHSVLVDDDGIKVVKVTFNKQDSLVILTIMATLKIRNSNFYTVAVTSLSSQIQYMNTVVSTYVTTNVSLIPPRSEQLVNFTGKAEMGGPFSYVYFFCTVPEILVHNIVIFMRTSVKISYIGLMTQSSLETHHYVDCGGNSTAI

SEQ ID NO: 902155 - protein, 250 aa, Homo sapiens; identical to SEQ ID NO: 902154

SEQ ID NO: 902156 - protein, 250 aa, Homo sapiens; identical to SEQ ID NO: 902154

SEQ ID NO: 902157 - protein, 250 aa, Homo sapiens; identical to SEQ ID NO: 902154

SEQ ID NO: 902158 - protein, 250 aa, Homo sapiens; identical to SEQ ID NO: 902154

SEQ ID NO: 902159 - protein, 171 aa, Homo sapiens
MVEVEDMMVTNEGGNLAVVTMVVVFFLFPHSVLVDDDGIKVVKVTFNKQDSLVILTIMATLKIRNSNFYTVAVTSLSSQIQYMNTVVSTYVTTNVSLIPPRSEQLVNFTGKAEMGGPFSYVYFFCTVPEILVHNIVIFMRTSVKISYIGLMTQSSLETHHYVDCGGNSTAI

SEQ ID NO: 902160 - protein, 196 aa, Homo sapiens
MGSQHSAAARPSSCRRKQEDDRDGLLAEREQEEAIAQFPYVEFTGRDSITCLTCQGTGYIPTEQVNELVALIPHSDQRLRPQRTKQYVLLSILLCLLASGLVVFFLFPHSVLVDDDGIKVVKVTFNKQDSLVILTIMATLKIRNSNFYTVAVTSLSSQIQYMNTVVSTYVTTNVSLIPPRSEQLVCCSFRNLAPQA

SEQ ID NO: 902161 - protein, 152 aa, Homo sapiens
MGSQHSAAARPSSCRRKQEDDRDGLLAEREQEEAIAQFPYVEFTGRDSITCLTCQGTGYIPTEQVNELVALIPHSDQRLRPQRTKQYVLLSILLCLLASGLVVFFLFPHSVLVDDDGIKVVKVTFNKQDSLVILTIMPDSVHEHSGQYICDY

SEQ ID NO: 902162 - protein, 267 aa, Homo sapiens
MGSQHSAAARPSSCRRKQEDDRDGLLAEREQEEAIAQFPYVEFTGRDSITCLTCQGTGYIPTEQVNELVALIPHSDQRLRPQRTKQYVLLSILLCLLASGLVVFFLFPHSVLVDDDGIKVVKVTFNKQDSLVILTIMATLKIRNSNFYTVAVTSLSSQIQYMNTVVSTYVTTNVSLIPPRSEQLVNFTGKAEMGGPFSYVYSKDTVLSVCALYWRKGIQSHTPLIGAWSCLRSQLLAYRFPGFGCLEIYLKNVLLLCVYLKNVLFDM

SEQ ID NO: 902163 - protein, 198 aa, Homo sapiens
MGSQHSAAARPSSCRRKQEDDRDGLLAEREQEEAIAQFPYVEFTGRDSITCLTCQGTGYIPTEQVNELVALIPHSDQRLRPQRTKQYVLLSILLCLLASGLVVFFLFPHSVLVDDDGIKVVKVTFNKQDSLVILTIMATLKIRNSNFYTVAVTSLSSQIQYMNTVVNFTGKAEMGGPFSYVYSGPTPTWCKQRRNWFT

SEQ ID NO: 902164 - protein, 89 aa, Homo sapiens
  misc_feature (4)..(4): Xaa can be any naturally occurring amino acid
TSSXNSAEGSSTSVSLTVSGSVGLSQVLDLPPRGVSRGGIGSLNSQQTSSCHLGGNTSLWYHLCFSEPAESVPSLCPANSWHSIKICRI

SEQ ID NO: 902165 - protein, 214 aa, Homo sapiens
MGSQHSAAARPSSCRRKQEDDRDGLLAEREQEEAIAQFPYVEFTGRDSITCLTCQGTGYIPTEQVNELVALIPHSDQRLRPQRTKQYVLLSILLCLLASGLVVFFLFPHSVLVDDDGIKVVKVTFNKQDSLVILTIMATLKIRNSNFYTVAVTSLSSQIQYMNTVVSTYVTTNVSLIPPRSEQLVNFTGKAEMGGPFSYVYFLLDGYPEILGTT

SEQ ID NO: 902166 - protein, 114 aa, Homo sapiens
QGSRLPGALCRPLPEPREPDSCDIGKASGAAKSARASARPRSPGGLGIWRLRAECVPLRRPKRLVSPQAGRWSGERPERSCREFVPCRSATLAFAPAWATLVGSEHRFLPRGVT

SEQ ID NO: 902167 - protein, 231 aa, Homo sapiens
MGSQHSAAARPSSCRRKQEDDRDGLLAEREQEEAIAQFPYVEFTGRDSITCLTCQGTGYIPTEQVNELVALIPHSDQRLRPQRTKQYVLLSILLCLLASGLVVFFLFPHSVLVDDDGIKVVKVTFNKQDSLVILTIMATLKIRNSNFYTVAVTSLSSQIQYMNTVVNFTGKAEMGGPFSYVYFFCTVPEILVHNIVIFMRTSVKISYIGLMTQSSLETHHYVDCGGNSTAI

SEQ ID NO: 902168 - protein, 231 aa, Homo sapiens; identical to SEQ ID NO: 902167

SEQ ID NO: 902169 - protein, 173 aa, Homo sapiens [sequence omitted]

SEQ ID NO: 902170 - protein, 196 aa, Homo sapiens; identical to SEQ ID NO: 902160

SEQ ID NO: 902171 - protein, 152 aa, Homo sapiens; identical to SEQ ID NO: 902161

SEQ ID NO: 902172 - protein, 230 aa, Homo sapiens
MGSQHSAAARPSSCRRKQEDDRDGLLAEREQEEAIAQFPYVEFTGRDSITCLTCQGTGYIPTEQVNELVALIPHSDQRLRPQRTKQYVLLSILLCLLASGLVVFFLFPHSVLVDDDGIKVVKVTFNKQDSLVILTIMATLKIRNSNFYTVAVTSLSSQIQYMNTVVNFTGKAEMGGPFSYVYFFCTVPEILVHNIVIFMRACRREHSICSQGLSSGPTPTWCKQRRNWFT

SEQ ID NO: 902173 - protein, 267 aa, Homo sapiens; identical to SEQ ID NO: 902162

SEQ ID NO: 902174 - protein, 109 aa, Homo sapiens
MTGTVCWLNESRKKPLLSSHMWNSPGEIASPVSRARGQATFQQVNFTGKAEMGGPFSYVYFFCTVPEILVHNIVIFMRTSVKISYIGLMTQSSLETHHYVDCGGNSTAI

SEQ ID NO: 902175 - protein, 110 aa, Homo sapiens
MCCVICSKQYVLLSILLCLLASGLVVFFLFPHSVLVDDDGIKVVKVTFNKQDSLVILTIMVSLRVSFPGLCTCQAGTQDTYTCFLTCPDVGHPENQELQLLHGGSDQPVQ

SEQ ID NO: 902176 - protein, 766 aa, Homo sapiens
MFLPEDKSYNGGGIGSSNRIMDFLEEPIPGVGTYDDFNTIDWVREKSRDRDRHREITNKSKESTWALIHSVSDAFSGWLLMLLIGLLSGSLAGLIDISAHWMTDLKEGICTGGFWFNHEHCCWNSEHVTFEERDKCPEWNSWSQLIISTDEGAFAYIVNYFMYVLWALLFAFLAVSLVKVFAPYACGSGIPEIKTILSGFIIRGYLGKWTLVIKTITLVLAVSSGLSLGKEGPLVHVACCCGNILCHCFNKYRKNEAKRREVLSAAAAAGVSVAFGAPIGGVLFSLEEVSYYFPLKTLWRSFFAALVAAFTLRSINPFGNSRLVLFYVEFHTPWHLFELVPFILLGIFGGLWGALFIRTNIAWCRKRKTTQLGKYPVIEVLVVTAITAILAFPNEYTRMSTSELISELFNDCGLLDSSKLCDYENRFNTSKGGELPDRPAGVGVYSAMWQLALTLILKIVITIFTFGMKIPSGLFIPSMAVGAIAGRLLGVGMEQLAYYHQEWTVFNSWCSQGADCITPGLYAMVGAAACLGGVTRMTVSLVVIMFELTGGLEYIVPLMAAAMTSKWVADALGREGIYDAHIRLNGYPFLEAKEEFAHKTLAMDVMKPRRNDPLLTVLTQDSMTVEDVETIISETTYSGFPVVVSRESQRLVGFVLRRDLIISIENARKKQDGVVSTSIIYFTEHSPPLPPYTPPTLKLRNILDLSPFTVTDLTPMEIVVDIFRKLGLRQCLVTHNGRLLGIITKKDVLKHIAQMANQDPDSILFN

SEQ ID NO: 902177 - protein, 496 aa, Homo sapiens
MGTQKVTPALIFAITVATIGSFQFGYNTGVINAPEKIIKEFINKTLTDKGNAPPSEVLLTSLWSLSVAIFSVGGMIGSFSVGLFVNRFGRRNSMLIVNLLAVTGGCFMGLCKVAKSVEMLILGRLVIGLFCGLCTGFVPMYIGEISPTALRGAFGTLNQLGIVVGILVAQIFGLEFILGSEELWPLLLGFTILPAILQSAALPFCPESPRFLLINRKEEENAKQILQRLWGTQDVSQDIQEMKDESARMSQEKQVTVLELFRVSSYRQPIIISIVLQLSQQLSGINAVFYYSTGIFKDAGVQEPIYATIGAGVVNTIFTVVSLFLVERAGRRTLHMIGLGGMAFCSTLMTVSLLLKDNYNGMSFVCIGAILVFVAFFEIGPGPIPWFIVAELFSQGPRPAAMAVAGCSNWTSNFLVGLLFPSAAHYLGAYVFIIFTGFLITFLAFTFFKVPETRGRTFEDITRAFEGQAHGADRSGKDGVMEMNSIEPAKETTTNV

SEQ ID NO: 902178 - protein, 496 aa, Homo sapiens; identical to SEQ ID NO: 902177

SEQ ID NO: 902179 - protein, 172 aa, Homo sapiens
MGTQKVTPALIFAITVATIGSFQFGYNTGVINAPEKIIKEFINKTLTDKGNAPPSEVLLTSLWSLSVAIFSVGGMIGSFSVGLFVNRFGRRNSMLIVNLLAVTGGCFMGLCKVAKSVEMLILGRLVIGLFCGLCTGFVPMYIGEISPTALRGAFGTLNQLGIVVGILVAQVL

SEQ ID NO: 902180 - protein, 403 aa, Homo sapiens [sequence omitted]

SEQ ID NO: 902181 - protein, 255 aa, Homo sapiens
MKDESARMSQEKQVTVLELFRVSSYRQPIIISIVLQLSQQLSGINAVFYYSTGIFKDAGVQEPIYATIGAGVVNTIFTVVSLFLVERAGRRTLHMIGLGGMAFCSTLMTVSLLLKDNYNGMSFVCIGAILVFVAFFEIGPGPIPWFIVAELFSQGPRPAAMAVAGCSNWTSNFLVGLLFPSAAHYLGAYVFIIFTGFLITFLAFTFFKVPETRGRTFEDITRAFEGQAHGADRSGKDGVMEMNSIEPAKETTTNV

SEQ ID NO: 902182 - protein, 161 aa, Homo sapiens [sequence omitted]

SEQ ID NO: 902183 - protein, 496 aa, Homo sapiens; identical to SEQ ID NO: 902177

SEQ ID NO: 902184 - protein, 104 aa, Homo sapiens
  misc_feature (8)..(8): Xaa can be any naturally occurring amino acid
PTRPDPRXRPRVRPTRPRTRGSPTRPLFPSAAHYLGAYVFIIFTGFLITFLAFTFFKVPETRGRTFEDITRAFEGQAHGADRSGKDGVMEMNSIEPAKETTTNV

SEQ ID NO: 902185 - protein, 453 aa, Homo sapiens
MGTQKVTPALIFAITVATIGSFQFGYNTGVINAPEKIIKEFINKTLTDKGNAPPSEVLLTSLWSLSVAIFSVGGMIGSFSVGLFVNRFGRRNSMLIVNLLAVTGGCFMGLCKVAKSVEMLILGRLVIGLFCGLCTGFVPMYIGEISPTALRGAFGTLNQLGIVVGILVAQIFGLEFILGSEELWPLLLGFTILPAILQSAALPFCPESPRFLLINRKEEENAKQILQRLWGTQDVSQDIQEMKDESARMSQEKQVTVLELFRVSSYRQPIIISIVLQLSQQLSGINAVFYYSTGIFKDAGVQEPIYATIGAGVVNTIFTVVSLFLVERAGRRTLHMIGLGGMAFCSTLMTVSLLLKDNYNGMSFVCIGAILVFVAFFEIGPGPIPWFIVAWSNFKEGSTDPMPGSAPQPAYACSGLEGSSPSGHHWLRAHLSSSPRAETQGQWVVEWGLRRGG

SEQ ID NO: 902186 - protein, 496 aa, Homo sapiens; identical to SEQ ID NO: 902177

SEQ ID NO: 902187 - protein, 496 aa, Homo sapiens; identical to SEQ ID NO: 902177

SEQ ID NO: 902188 - protein, 255 aa, Homo sapiens; identical to SEQ ID NO: 902181

SEQ ID NO: 902189 - protein, 496 aa, Homo sapiens; identical to SEQ ID NO: 902177

SEQ ID NO: 902190 - protein, 496 aa, Homo sapiens; identical to SEQ ID NO: 902177

SEQ ID NO: 902191 - protein, 292 aa, Homo sapiens
MGTQKVTPALIFAITVATIGSFQFGYNTGVINAPEKIIKEFINKTLTDKGNAPPSEVLLTSLWSLSVAIFSVGGMIGSFSVGLFVNRFGRRNSMLIVNLLAVTGGCFMGLCKVAKSVEMLILGRLVIGLFCGLCTGFVPMYIGEISPTALRGAFGTLNQLGIVVGILVAQIFGLEFILGSEELWPLLLGFTILPAILQSAALPFCPESPRFLLINRKEEENAKQILQRLWGTQDVSQDIQEMKDESARMSQEKQVTVLELFRVSSYRQPIIISIVLQLSQQLSGINAVSVIL

SEQ ID NO: 902192 - protein, 191 aa, Homo sapiens [sequence omitted]

SEQ ID NO: 902193 - protein, 852 aa, Homo sapiens
MCSRQERIQKDIDVVIQKSRAEKDCLFADFRYSDSTFTFTYVGGPRSVSYSVHVSEDYPDNTYVSSSENDEDVLVTTEPIPVIFHRIATELRKTNDINCCLSIKSKLQKENGEESRQNSTVEEDSEGDNDSEEFYYGGQVNYDGELHKHPQLEADLSAVREIYGPHAVSLREYGAIDDVDIDLHIDVSFLDEEIAVAWEVIRTEPIIVRLHCSLTQYLNGPVPTVDVFQISTKERFGLGHQLKKIMQTFVTQQWKQSKEKSNCLHNKKLSEKKVKSPLHLFSTLRRSPSYPPPGCGKSKSKLKSEQDGISKTHKLLRRTCSSTVKTDDVCVTKSHRTFGRSLSSDPRAEQAMTAIKSHKLLNRPCPAAVKSEECLTLKSHRLLTRSCSGDPRCEHNTNLKPHKLLSRSYSSNLRMEELYGLKNHKLLSKSYSSAPKSSKTELFKEPNAEGRRLSLTSGLIGILTPSSSSSSQLAPNGAKCIPVRDRGFLVQTIEFAEQRIPVLNEYCVVCDEPHVFQNGPMLRPTVCERELCVFAFQTLGVMNEAADEIATGAQVVDLLVSMCRSALESPRKVVIFEPYPSVVDPNDPQMLAFNPRKKNYDRVMKALDSITSIREMTQAPYLEIKKQMDKQDPLAHPLLQWVISSNRSHIVKLPVNRQLKFMHTPHQFLLLSSPPAKESNFRAAKKLFGSTFAFHGSHIENWHSILRNGLVVASNTRLQLHGAMYGSGIYLSPMSSISFGYSGMNKKQKVSAKDEPASSSKSSNTSQSQKKGQQSQFLQSRNLKCIALCEVITSSDLHKHGEIWVVPNTDHVCTRFFFVYEDGQVGDANINTQEGGIHKEILRVIGNQTATG

SEQ ID NO: 902194 - protein, 742 aa, Homo sapiens
MQQESRQNSTVEEDSEGDNDSEEFYYGGQVNYDGELHKHPQLEADLSAVREIYGPHAVSLREYGAIDDVDIDLHIDVSFLDEEIAVAWEVIRTEPIIVRLHCSLTQYLNGPVPTVDVFQISTKERFGLGHQLKKIMQTFVTQQWKQSKEKSNCLHNKKLSEKKVKSPLHLFSTLRRSPSYPPPGCGKSKSKLKSEQDGISKTHKLLRRTCSSTVKTDDVCVTKSHRTFGRSLSSDPRAEQAMTAIKSHKLLNRPCPAAVKSEECLTLKSHRLLTRSCSGDPRCEHNTNLKPHKLLSRSYSSNLRMEELYGLKNHKLLSKSYSSAPKSSKTELFKEPNAEGRRLSLTSGLIGILTPSSSSSSQLAPNGAKCIPVRDRGFLVQTIEFAEQRIPVLNEYCVVCDEPHVFQNGPMLRPTVCERELCVFAFQTLGVMNEAADEIATGAQVVDLLVSMCRSALESPRKVVIFEPYPSVVDPNDPQMLAFNPRKKNYDRVMKALDSITSIREMTQAPYLEIKKQMDKQDPLAHPLLQWVISSNRSHIVKLPVNRQLKFMHTPHQFLLLSSPPAKESNFRAAKKLFGSTFAFHGSHIENWHSILRNGLVVASNTRLQLHGAMYGSGIYLSPMSSISFGYSGMNKKQKVSAKDEPASSSKSSNTSQSQKKGQQSQFLQSRNLKCIALCEVITSSDLHKHGEIWVVPNTDHVCTRFFFVYEDGQVGDANINTQEGGIHKEILRVIGNQTATG

SEQ ID NO: 902195 - protein, 373 aa, Homo sapiens
SSTMKGHSKKINCGLTVTLVYESADGPSSGTESPDIFIFPAFKTPTVCERELCVFAFQTLGVMNEAADEIATGAQVVDLLVSMCRSALESPRKVVIFEPYPSVVDPNDPQMLAFNPRKKNYDRVMKALDSITSIREMTQAPYLEIKKQMDKQDPLAHPLLQWVISSNRSHIVKLPVNRQLKFMHTPHQFLLLSSPPAKESNFRAAKKLFGSTFAFHGSHIENWHSILRNGLVVASNTRLQLHGAMYGSGIYLSPMSSISFGYSGMNKKQKVSAKDEPASSSKSSNTSQSQKKGQQSQFLQSRNLKCIALCEVITSSDLHKHGEIWVVPNTDHVCTRFFFVYEDGQVGDANINTQEGGIHKEILRVIGNQTATG

SEQ ID NO: 902196 - protein, 769 aa, Homo sapiens
MCSRQERIQKDIDVVIQKSRAEKDCLFADFRYSDSTFTFTYVGGPRSVSYSVHVSEDYPDNTYVSSSENDEDVLVTTEPIPVIFHRIATELRKTNDINCCLSIKSKLQKENGEESRQNSTVEEDSEGDNDSEEFYYGGQVNYDGELHKHPQLEADLSAVREIYGPHAVSLREYGAIDDVDIDLHIDVSFLDEEIAVAWEVIRTEPIIVRLHCSLTQYLNGPVPTVDVFQISTKERFGLGHQLKKIMQTFVTQQWKQSKEKSNCLHNKKLSEKKVKSPLHLFSTLRRSPSYPPPGCGKSKSKLKSEQDGISKTHKLLRRTCSSTVKTDDVCVTKSHRTFGRSLSSDPRAEQAMTAIKSHKLLNRPCPAAVKSEECLTLKSHRLLTRSCSGDPRCEHNTNLKPHKLLSRSYSSNLRMEELYGLKNHKLLSKSYSSAPKSSKTELFKEPNAEGRRLSLTSGLIGILTPSSSSSSQLAPNGAKCIPVRDRGFLVQTIEFAEQRIPVLNEYCVVCDEPHVFQNGPMLRPTVCERELCVFAFQTLGVMNEAADEIATGAQVVDLLVSMCRSALESPRKVVIFEPYPSVVDPNDPQMLAFNPRKKNYDRVMKALDSITSIREMTQAPYLEIKKQMDKQDPLAHPLLQWVISSNRSHIVKLPVNRQLKFMHTPHQFLLLSSPPAKESNFRAAKKLFGSTFAFHGSHIENWHSILRNGLVVASNTRLQLHGAMYGSGIYLSPMSSISFGYSGMNKKQKVSAKDEPASSSKSSNTSQVL

SEQ ID NO: 902197 - protein, 267 aa, Homo sapiens
MCSRQERIQKDIDVVIQKSRAEKDCLFADFRYSDSTFTFTYVGGPRSVSYSVHVSEDYPDNTYVSSSENDEDVLVTTEPIPVIFHRIATELRKTNDINCCLSIKSKLQKENGEESRQNSTVEEDSEGDNDSEEFYYGGQVNYDGELHKHPQLEADLSAVREIYGPHAVSLREYGAIDDVDIDLHIDVSFLDEEIAVAWEVIRTEPIIVRLHCSLTQYLNGPVYPTQYMYAEDYPDNTYVSSSENDEDVLVTTEPIPVIFHRIAKTPK

SEQ ID NO: 902198 - protein, 85 aa, Homo sapiens
PTTTKFAAASINCCLSIKSKLQKENGEESRQNSTVEEDSEGDNDSEEFYYGGQVNYDGELHKHPQLEADLSAVREIYGPHAVSLR

SEQ ID NO: 902199 - protein, 847 aa, Homo sapiens
MRIQKDIDVVIQKSRAEKDCLFADFRYSDSTFTFTYVGGPRSVSYSVHVSEDYPDNTYVSSSENDEDVLVTTEPIPVIFHRIATELRKTNDINCCLSIKSKLQKENGEESRQNSTVEEDSEGDNDSEEFYYGGQVNYDGELHKHPQLEADLSAVREIYGPHAVSLREYGAIDDVDIDLHIDVSFLDEEIAVAWEVIRTEPIIVRLHCSLTQYLNGPVPTVDVFQISTKERFGLGHQLKKIMQTFVTQQWKQSKEKSNCLHNKKLSEKKVKSPLHLFSTLRRSPSYPPPGCGKSKSKLKSEQDGISKTHKLLRRTCSSTVKTDDVCVTKSHRTFGRSLSSDPRAEQAMTAIKSHKLLNRPCPAAVKSEECLTLKSHRLLTRSCSGDPRCEHNTNLKPHKLLSRSYSSNLRMEELYGLKNHKLLSKSYSSAPKSSKTELFKEPNAEGRRLSLTSGLIGILTPSSSSSSQLAPNGAKCIPVRDRGFLVQTIEFAEQRIPVLNEYCVVCDEPHVFQNGPMLRPTVCERELCVFAFQTLGVMNEAADEIATGAQVVDLLVSMCRSALESPRKVVIFEPYPSVVDPNDPQMLAFNPRKKNYDRVMKALDSITSIREMTQAPYLEIKKQMDKQDPLAHPLLQWVISSNRSHIVKLPVNRQLKFMHTPHQFLLLSSPPAKESNFRAAKKLFGSTFAFHGSHIENWHSILRNGLVVASNTRLQLHGAMYGSGIYLSPMSSISFGYSGMNKKQKVSAKDEPASSSKSSNTSQSQKKGQQSQFLQSRNLKCIALCEVITSSDLHKHGEIWVVPNTDHVCTRFFFVYEDGQVGDANINTQEGGIHKEILRVIGNQTATG

SEQ ID NO: 902200 - protein, 291 aa, Homo sapiens [sequence omitted]

SEQ ID NO: 902201 - protein, 789 aa, Homo sapiens
MCSRQERIQKDIDVVIQKSRAEKDCLFADFRYSDSTFTFTYVGGPRSVSYSVHVSEDYPDNTYVSSSENDEDVLVTTEPIPVIFHRIATELRKTNDINCCLSIKSKLQKENGEESRQNSTVEEDSEGDNDSEEFYYGGQVNYDGELHKHPQLEADLSAVREIYGPHAVSLREYGAIDDVDIDLHIDVSFLDEEIAVAWEVIRTEPIIVRLHCSLTQYLNGPVPTVDVFQISTKERFGLGHQLKKIMQTFVTQQWKQSKEKSNCLHNKKLSEKKVKSPLHLFSTLRRSPSYPPPGCGKSKSKLKSEQDGISKTHKLLRRTCSSTVKTDDVCVTKSHRTFGRSLSSDPRAEQAMTAIKSHKLLNRPCPAAVKSEECLTLKSHRLLTRSCSGDPRCEHNTNLKPHKLLSRSYSSNLRMEELYGLKNHKLLSKSYSSAPKSSKTELFKEPNAEGRRLSLTSGLIGILTPSSSSSSQLAPNGAKCIPVRDRGFLVQTIEFAEQRIPVLNEYCVVCDEPHVFQNGPMLRPTVCERELCVFAFQTLGVMNEAADEIATGAQVVDLLVSMCRSALESPRKVVIFEPYPSVVDPNDPQMLAFNPRKKNYDRVMKALDSITSIREMTQAPYLEIKKQMDKQDPLAHPLLQWVISSNRSHIVKLPVNRQLKFMHTPHQFLLLSSPPAKESNFRAAKKLFGSTFAFHGSHIENWHSILRNGLVVASNTRLQLHGAMYGSGIYLSPMSSISFGYSGMTRNRSVTKDAPASSSNTPIHHSHSDRSSQADTPTAELKASGTELD

SEQ ID NO: 902202 - protein, 820 aa, Homo sapiens
MAGELADKKDRDASPSKEERKRSRTPDRERDRDRDRKSSPSKDRKRHRSRDRRRGGSRSRSRSRSKSAERERRHKERERDKERDRNKKDRDRDKDGHRRDKDRKRSSLSPGRGKDFKSRKDRDSKKDEEDEHGDKKPKAQPLSLEELLAKKKAEEEAEAKPKFLSKAEREAEALKRRQQEVEERQRMLEEERKKRKQFQDLGRKMLEDPQERERRERRERMERETNGNEDEEGRQKIREEKDKSKELHAIKERYLGGIKKRRRTRHLNDRKFVFEWDASEDTSIDYNPLYKERHQVQLLGRGFIAGIDLKQQKREQSRFYGDLMEKRRTLEEKEQEEARLRKLRKKEAKQRWDDRHWSQKKLDEMTDRDWRIFREDYSITTKGGKIPNPIRSWKDSSLPPHILEVIDKCGYKEPTPIQRQAIPIGLQNRDIIGVAETGSGKTAAFLIPLLVWITTLPKIDRIEESDQGPYAIILAPTRELAQQIEEETIKFGKPLGIRTVAVIGGISREDQGFRLRMGCEIVIATPGRLIDVLENRYLVLSRCTYVVLDEADRMIDMGFEPDVQKILEHMPVSNQKPDTDEAEDPEKMLANFESGKHKYRQTVMFTATMPPAVERLARSYLRRPAVVYIGSAGKPHERVEQKVFLMSESEKRKKLLAILEQGFDPPIIIFVNQKKGCDVLAKSLEKMGYNACTLHGGKGQEQREFALSNLKAGAKDILVATDVAGRGIDIQDVSMVVNYDMAKNIEDYIHRIGRTGRAGKSGVAITFLTKEDSAVFYELKQAILESPVSSCPPELANHPDAQHKPGTILTKKRREETIFA

SEQ ID NO: 902203 - protein, 820 aa, Homo sapiens; identical to SEQ ID NO: 902202

SEQ ID NO: 902204 - protein, 820 aa, Homo sapiens; identical to SEQ ID NO: 902202

SEQ ID NO: 902205 - protein, 799 aa, Homo sapiens
RLRKLRLGSEELVVRKSSPSKDRKRHRSRDRRRGGSRSRSRSRSKSAERERRHKERERDKERDRNKKDRDRDKDGHRRDKDRKRSSLSPGRGKDFKSRKDRDSKKDEEDEHGDKKPKAQPLSLEELLAKKKAEEEAEAKPKFLSKAEREAEALKRRQQEVEERQRMLEEERKKRKQFQDLGRKMLEDPQERERRERRERMERETNGNEDEEGRQKIREEKDKSKELHAIKERYLGGIKKRRRTRHLNDRKFVFEWDASEDTSIDYNPLYKERHQVQLLGRGFIAGIDLKQQKREQSRFYGDLMEKRRTLEEKEQEEARLRKLRKKEAKQRWDDRHWSQKKLDEMTDRDWRIFREDYSITTKGGKIPNPIRSWKDSSLPPHILEVIDKCGYKEPTPIQRQAIPIGLQNRDIIGVAETGSGKTAAFLIPLLVWITTLPKIDRIEESDQGPYAIILAPTRELAQQIEEETIKFGKPLGIRTVAVIGGISREDQGFRLRMGCEIVIATPGRLIDVLENRYLVLSRCTYVVLDEADRMIDMGFEPDVQKILEHMPVSNQKPDTDEAEDPEKMLANFESGKHKYRQTVMFTATMPPAVERLARSYLRRPAVVYIGSAGKPHERVEQKVFLMSESEKRKKLLAILEQGFDPPIIIFVNQKKGCDVLAKSLEKMGYNACTLHGGKGQEQREFALSNLKAGAKDILVATDVAGRGIDIQDVSMVVNYDMAKNIEDYIHRIGRTGRAGKSGVAITFLTKEDSAVFYELKQAILESPVSSCPPELANHPDAQHKPGTILTKKRREETIFA

SEQ ID NO: 902206 - protein, 820 aa, Homo sapiens; identical to SEQ ID NO: 902202

SEQ ID NO: 902207 - protein, 304 aa, Homo sapiens
MGCEIVIATPGRLIDVLENRYLVLSRCTYVVLDEADRMIDMGFEPDVQKILEHMPVSNQKPDTDEAEDPEKMLANFESGKHKYRQTVMFTATMPPAVERLARSYLRRPAVVYIGSAGKPHERVEQKVFLMSESEKRKKLLAILEQGFDPPIIIFVNQKKGCDVLAKSLEKMGYNACTLHGGKGQEQREFALSNLKAGAKDILVATDVAGRGIDIQDVSMVVNYDMAKNIEDYIHRIGRTGRAGKSGVAITFLTKEDSAVFYELKQAILESPVSSCPPELANHPDAQHKPGTILTKKRREETIFA

SEQ ID NO: 902208 - protein, 823 aa, Homo sapiens
MAGELADKKDRDASPSKEERKRSRTPDRERDRDRDRKSSPSKDRKRHRSRDRRRGGSRSRSRSRSKSAERERRHKERERDKERDRNKKDRDRDKDGHRRDKDRKRSSLSPGRGKDFKSRKDRDSKKDEEDEHGDKKPKAQPLSLEELLAKKKAEEEAEAKPKFLSKAEREAEALKRRQQEVEERQRMLEEERKKRKQFQDLGRKMLEDPQERERRERRERMERETNGNEDEEGRQKIREEKDKSKELHAIKERYLGGIKKRRRTRHLNDRKFVFEWDASEDTSIDYNPLYKERHQVQLLGRGFIAGIDLKQQKREQSRFYGDLMEKRRTLEEKEQEEARLRKLRKKEAKQRWDDRHWSQKKLDEMTDRDWRIFREDYSITTKGGKIPNPIRSWKDSSLPPHILEVIDKCGYKEPTPIQRQAIPIGLQNRDIIGVAETGSGKTAAFLIPLLVWITTLPKIDRIEESDQGPYAIILAPTRELAQQIEEETIKFGKPLGIRTVAVIGGISREDQGFRLRMGCEIVIATPGRLIDVLENRYLVLSRCTYVVLDEADRMIDMGFEPDVQKILEHMPVSNQKPDTDEAEDPEKMLANFESGKHKYRQTVMFTATMPPAVERLARSYLRRPAVVYIGSAGKPHERVEQKVFLMSESEKRKKLLAILEQGFDPPIIIFVNQKKGCDVLAKSLEKMGYNACTLHGGKGQEQREFALSNLKAGAKDILVATDVAGRGIDIQDVSMVVNYDMAKNIEDYIHRIGRTGRAGKSGVAITFLTKEDSAVFYELKQAILESPVSSCPPELANHPDAQLNRNLAAGWDLLWHRLDCVTA

SEQ ID NO: 902209 - protein, 211 aa, Homo sapiens
MAGELADKKDRDASPSKEERKRSRTPDRERDRDRDRKSSPSKDRKRHRSRDRRRGGSRSRSRSRSKSAERERRHKERERDKERDRNKKDRDRDKDGHRRDKDRKRSSLSPGRGKDFKSRKDRDSKKDEEDEHGDKKPKAQPLSLEELLAKKKAEEEAEAKPKFLSKAEREAEALKRRQQEVEERQRMLEEERKKRKHFLSPRTSQPPRCPA

SEQ ID NO: 902210 - protein, 525 aa, Homo sapiens
MAGELADKKDRDASPSKEERKRSRTPDRERDRDRDRKSSPSKDRKRHRSRDRRRGGSRSRSRSRSKSAERERRHKERERDKERDRNKKDRDRDKDGHRRDKDRKRSSLSPGRGKDFKSRKDRDSKKDEEDEHGDKKPKAQPLSLEELLAKKKAEEEAEAKPKFLSKAEREAEALKRRQQEVEERQRMLEEERKKRKQFQDLGRKMLEDPQERERRERRERMERETNGNEDEEGRQKIREEKDKSKELHAIKERYLGGIKKRRRTRHLNDRKFVFEWDASEDTSIDYNPLYKERHQVQLLGRGFIAGIDLKQQKREQSRFYGDLMEKRRTLEEKEQEEARLRKLRKKEAKQRWDDRHWSQKKLDEMTDRDWRIFREDYSITTKGGKIPNPIRSWKDSSLPPHILEVIDKCGYKEPTPIQRQAIPIGLQNRDIIGVAETGSGKTAAFLIPLLVWITTLPKIDRIEESDQGPYAIILAPTRELAQQIEEETIKFGKPLGIRTVAVIGGISREDQGFRLRMGCEVCFSI

SEQ ID NO: 902211 - protein, 335 aa, Homo sapiens
MAGELADKKDRDASPSKEERKRSRTPDRERDRDRDRKSSPSKDRKRHRSRDRRRGGSRSRSRSRSKSAERERRHKERERDKERDRNKKDRDRDKDGHRRDKDRKRSSLSPGRGKDFKSRKDRDSKKDEEDEHGDKKPKAQPLSLEELLAKKKAEEEAEAKPKFLSKAEREAEALKRRQQEVEERQRMLEEERKKRKQFQDLGRKMLEDPQERERRERRERMERETNGNEDEEGRQKIREEKDKSKELHAIKERYLGGIKKRRRTRHLNDRKFVFEWDASEDTSIDYNPLYKERHQVQLLGRGFIAGIDLKQQKREQSRFYGDLMEKRVHGGTELI

SEQ ID NO: 902212 - protein, 229 aa, Homo sapiens
MAGELADKKDRDASPSKEERKRSRTPDRERDRDRDRKSSPSKDRKRHRSRDRRRGGSRSRSRSRSKSAERERRHKERERDKERDRNKKDRDRDKDGHRRDKDRKRSSLSPGRGKDFKSRKDRDSKKDEEDEHGDKKPKAQPLSLEELLAKKKAEEEAEAKPKFLSKAEREAEALKRRQQEVEERQRMLEEERKKRKQFQDLGRKMLVDPQERARRGRRERIDNRDTPVN

SEQ ID NO: 902213 - protein, 31 aa, Homo sapiens
MTDRDWRIFREDYSITTKGGKIPNPIRSWKD

SEQ ID NO: 902214 - protein, 799 aa, Homo sapiens
LRQGKLRLGARPGGRKSSPSKDRKRHRSRDRRRGGSRSRSRSRSKSAERERRHKERERDKERDRNKKDRDRDKDGHRRDKDRKRSSLSPGRGKDFKSRKDRDSKKDEEDEHGDKKPKAQPLSLEELLAKKKAEEEAEAKPKFLSKAEREAEALKRRQQEVEERQRMLEEERKKRKQFQDLGRKMLEDPQERERRERRERMERETNGNEDEEGRQKIREEKDKSKELHAIKERYLGGIKKRRRTRHLNDRKFVFEWDASEDTSIDYNPLYKERHQVQLLGRGFIAGIDLKQQKREQSRFYGDLMEKRRTLEEKEQEEARLRKLRKKEAKQRWDDRHWSQKKLDEMTDRDWRIFREDYSITTKGGKIPNPIRSWKDSSLPPHILEVIDKCGYKEPTPIQRQAIPIGLQNRDIIGVAETGSGKTAAFLIPLLVWITTLPKIDRIEESDQGPYAIILAPTRELAQQIEEETIKFGKPLGIRTVAVIGGISREDQGFRLRMGCEIVIATPGRLIDVLENRYLVLSRCTYVVLDEADRMIDMGFEPDVQKILEHMPVSNQKPDTDEAEDPEKMLANFESGKHKYRQTVMFTATMPPAVERLARSYLRRPAVVYIGSAGKPHERVEQKVFLMSESEKRKKLLAILEQGFDPPIIIFVNQKKGCDVLAKSLEKMGYNACTLHGGKGQEQREFALSNLKAGAKDILVATDVAGRGIDIQDVSMVVNYDMAKNIEDYIHRIGRTGRAGKSGVAITFLTKEDSAVFYELKQAILESPVSSCPPELANHPDAQHKPGTILTKKRREETIFA

SEQ ID NO: 902215 - protein, 915 aa, Homo sapiens
MAGELADKKDRDASPSKEERKRSRTPDRERDRDRDRKSSPSKDRKRHRSRDRRRGGSRSRSRSRSKSAERERRHKERERDKERDRNKKDRDRDKDGHRRDKDRKRSSLSPGRGKDFKSRKDRDSKKDEEDEHGDKKPKAQPLSLEELLAKKKAEEEAEAKPKFLSKAEREAEALKRRQQEVEERQRMLEEERKKRKQFQDLGRKMLGLLFYPVSAPRWKRKEWDEIQCLLGEKKPVHSGVWKGEGWWEFMRKHFSVRSPFTPYHKSTPFFLHLGFLVWIPSIPSPLFFHELFCSFAFFGAAEDPQERERRERRERMERETNGNEDEEGRQKIREEKDKSKELHAIKERYLGGIKKRRRTRHLNDRKFVFEWDASEDTSIDYNPLYKERHQVQLLGRGFIAGIDLKQQKREQSRFYGDLMEKRRTLEEKEQEEARLRKLRKKEAKQRWDDRHWSQKKLDEMTDRDWRIFREDYSITTKGGKIPNPIRSWKDSSLPPHILEVIDKCGYKEPTPIQRQAIPIGLQNRDIIGVAETGSGKTAAFLIPLLVWITTLPKIDRIEESDQGPYAIILAPTRELAQQIEEETIKFGKPLGIRTVAVIGGISREDQGFRLRMGCEIVIATPGRLIDVLENRYLVLSRCTYVVLDEADRMIDMGFEPDVQKILEHMPVSNQKPDTDEAEDPEKMLANFESGKHKYRQTVMFTATMPPAVERLARSYLRRPAVVYIGSAGKPHERVEQKVFLMSESEKRKKLLAILEQGFDPPIIIFVNQKKGCDVLAKSLEKMGYNACTLHGGKGQEQREFALSNLKAGAKDILVATDVAGRGIDIQDVSMVVNYDMAKNIEDYIHRIGRTGRAGKSGVAITFLTKEDSAVFYELKQAILESPVSSCPPELANHPDAQHKPGTILTKKRREETIFA

SEQ ID NO: 902216 - protein, 820 aa, Homo sapiens; identical to SEQ ID NO: 902202

SEQ ID NO: 902217 - protein, 314 aa, Homo sapiens
GTCWAINDYTATPQIVIATPGRLIDVLENRYLVLSRCTYVVLDEADRMIDMGFEPDVQKILEHMPVSNQKPDTDEAEDPEKMLANFESGKHKYRQTVMFTATMPPAVERLARSYLRRPAVVYIGSAGKPHERVEQKVFLMSESEKRKKLLAILEQGFDPPIIIFVNQKKGCDVLAKSLEKMGYNACTLHGGKGQEQREFALSNLKAGAKDILVATDVAGRGIDIQDVSMVVNYDMAKNIEDYIHRIGRTGRAGKSGVAITFLTKEDSAVFYELKQAILESPVSSCPPELANHPDAQHKPGTILTKKRREETIFA

SEQ ID NO: 902218 - protein, 823 aa, Homo sapiens; identical to SEQ ID NO: 902208

SEQ ID NO: 902219 - protein, 697 aa, Homo sapiens
MAGELADKKDRDASPSKEERKRSRTPDRERDRDRDRKSSPSKDRKRHRSRDRRRGGSRSRSRSRSKSAERERRHKERERDKERDRNKKDRDRDKDGHRRDKDRKRSSLSPGRGKDFKSRKDRDSKKDEEDEHGDKKPKAQPLSLEELLAKKKAEEEAEAKPKFLSKAEREAEALKRRQQEVEERQRMLEEERKKRKQFQDLGRKMLEDPQERERRERRERMERETNGNEDEEGRQKIREEKDKSKELHAIKERYLGGIKKRRRTRHLNDRKFVFEWDASEDTSIDYNPLYKERHQVQLLGRGFIAGIDLKQQKREQSRFYGDLMEKRRTLEEKEQEEARLRKLRKKEAKQRWDDRHWSQKKLDEMTDRDWRIFREDYSITTKGGKIPNPIRSWKDSSLPPHILEVIDKCGYKEPTPIQRQAIPIGLQNRDIIGVAETGSGKTAAFLIPLLVWITTLPKIDRIEESDQGPYAIILAPTRELAQQIEEETIKFGKPLGIRTVAVIGGISREDQGFRLRMGCEIVIATPGRLIDVLENRYLVLSRCTYVVLDEADRMIDMGFEPDVQKILEHMPVSNQKPDTDEAEDPEKMLANFESGKHKYRQTVMFTATMPPAVERLARSYLRRPAVVYIGSAGKPHERVEQKVFLMSESEKRKKLLAILEQGFDPPIIIFVNQKKGCDVLAKSLEKMGVCLAGENKV

SEQ ID NO: 902220 - protein, 684 aa, Homo sapiens
MAGELADKKDRDASPSKEERKRSRTPDRERDRDRDRKSSPSKDRKRHRSRDRRRGGSRSRSRSRSKSAERERRHKERERDKERDRNKKDRDRDKDGHRRDKDRKRSSLSPGRGKDFKSRKDRDSKKDEEDEHGDKKPKAQPLSLEELLAKKKAEEEAEAKPKFLSKAEREAEALKRRQQEVEERQRMLEEERKKRKQFQDLGRKMLEDPQERERRERRERMERETNGNEDEEGRQKIREEKDKSKELHAIKERYLGGIKKRRRTRHLNDRKFVFEWDASEDTSIDYNPLYKERHQVQLLGRGFIAGIDLKQQKREQSRFYGDLMEKRRTLEEKEQEEARLRKLRKKEAKQRWDDRHWSQKKLDEMTDRDWRIFREDYSITTKGGKIPNPIRSWKDSSLPPHILEVIDKCGYKEPTPIQRQAIPIGLQNRDIIGVAETGSGKTAAFLIPLLVWITTLPKIDRLECSGVILAYSNRCLPGSYPPTSASQVAVDYRIEESDQGPYAIILAPTRELAQQIEEETIKFGKPLGIRTVAVIGGISREDQGFRLRMGCEIVIATPGRLIDVLENRYLVLSRCTYVVLDEADRMIDMGFEPDVQKILEHMPVSNQKPDTDEAEDPEKMLANFESGKHKYRQTVMFTATMAQGGSVGQEYLRELAGGTWVRREPSGVDKSSPWGAKGERGGLG

SEQ ID NO: 902221 - protein, 90 aa, Homo sapiens
ERETNGNEDEEGRQKIREEKDKSKELHAIKVQALAPSSLLSHTKMRFSYLAIVISACENWASKLMCFVFCPWVGALPGWHQKAAPNETSQ

SEQ ID NO: 902222 - protein, 160 aa, Homo sapiens
MDKLKKVLSGQDTEDRSGLSEVVEASSLSWSTRIKGFIACFAIGILCSLLGTVLLWVPRKGLHLFAVFYTFGNIASIGSTIFLMGPVKQLKRMFEPTRLIATIMVLLCFALTLCSAFWWHNKGLALIFCILQSLALTWYSLSFIPFARDAVKKCFAVCLA

SEQ ID NO: 902223 - protein, 107 aa, Homo sapiens
RWAGAWAGRAAVGAWAAGRLPSTRKSRQLSERNRLPLRSWSWWGLGRNGQAEEGAERAGHGGPERPVRDKPCQSHYHSSSYEQARPILLPLFSSHLQLVLFAPWQGC

SEQ ID NO: 902224 - protein, 108 aa, Homo sapiens
MDKLKKVLSGQDTEDRSGLSEVVEASSLSWSTRIKGFIACFAIGILCSLLGTVLLWVPRKGLHLFAVFYTFGNIASIGSCVLHLPCVLPFGGITRDLHLSSAFCSLWH

SEQ ID NO: 902225 - protein, 160 aa, Homo sapiens; identical to SEQ ID NO: 902222

SEQ ID NO: 902226 - protein, 756 aa, Homo sapiens
GRGPAARALLGGGCCDGEAAAEPEPRSLSHLRHLGPGPHRAGAAKAMSVPSSLSQSAINANSHGGPALSLPLPLHAAHNQLLNAKLQATAVGPKDLRSAMGEGGGPEPGPANAKWLKEGQNQLRRAATAHRDQNRNVTLTLAEEASQEPEMAPLGPKGLIHLYSELELSAHNAANRGLRGPGLIISTQEQGPDEGEEKAAGEAEEEEEDDDDEEEEEDLSSPPGLPEPLESVEAPPRPQALTDGPREHSKSASLLFGMRNSAASDEDSSWATLSQGSPSYGSPEDTDSFWNPNAFETDSDLPAGWMRVQDTSGTYYWHIPTGTTQWEPPGRASPSQGSSPQEESQLTWTGFAHGEGFEDGEFWKDEPSDEAPMELGLKEPEEGTLTFPAQSLSPEPLPQEEEKLPPRNTNPGIKCFAVRSLGWVEMTEEELAPGRSSVAVNNCIRQLSYHKNNLHDPMSGGWGEGKDLLLQLEDETLKLVEPQSQALLHAQPIISIRVWGVGRDSGRERDFAYVARDKLTQMLKCHVFRCEAPAKNIATSLHEICSKIMAERRNARCLVNGLSLDHSKLVDVPFQVEFPAPKNELVQKFQVYYLGNVPVAKPVGVDVINGALESVLSSSSREQWTPSHVSVAPATLTILHQQTEAVLGECRVRFLSFLAVGRDVHTFAFIMAAGPASFCCHMFWCEPNAASLSEAVQAACMLRYQKCLDARSQASTSCLPAPPAESVARRVGWTVRRGVQSLWGSLKPKRLGAHTP

SEQ ID NO: 902227 - protein, 311 aa, Homo sapiens
GRGPAARALLGGGCCDGEAAAEPEPRSLSHLRHLGPGPHRAGAAKAMSVPSSLSQSAINANSHGGPALSLPLPLHAAHNQLLNAKLQATAVGPKDLRSAMGEGGGPEPGPANAKWLKEGQNQLRRAATAHRDQNRNVTLTLAEEASQEPEMAPLGPKGLIHLYSELELSAHNAANRGLRGPGLIISTQEQGPDEGEEKAAGEAEEEEEDDDDEEEEEDLSSPPGLPEPLESVEAPPRPQALTDGPREHSKSASLLFGMRNSAASDEDSSWATLSQGSLRSHTTFSSEPSFRRSTAADDEVRPHDYYGLPRT

SEQ ID NO: 902228 - protein, 887 aa, Homo sapiens
GRGPAARALLGGGCCDGEAAAEPEPRSLSHLRHLGPGPHRAGAAKAMSVPSSLSQSAINANSHGGPALSLPLPLHAAHNQLLNAKLQATAVGPKDLRSAMGEGGGPEPGPANAKWLKEGQNQLRRAATAHRDQNRNVTLTLAEEASQEPEMAPLGPKGLIHLYSELELSAHNAANRGLRGPGLIISTQEQGPDEGEEKAAGEAEEEEEDDDDEEEEEDLSSPPGLPEPLESVEAPPRPQALTDGPREHSKSASLLFGMRNSAASDEDSSWATLSQGSPSYGSPEDTDSFWNPNAFETDSDLPAGWMRVQDTSGTYYWHIPTGTTQWEPPGRASPSQGSSPQEESQLTWTGFAHGEGFEDGEFWKDEPSDEAPMELGLKEPEEGTLTFPAQSLSPEPLPQEEEKLPPRNTNPGIKCFAVRSLGWVEMTEEELAPGRSSVAVNNCIRQLSYHKNNLHDPMSGGWGEGKDLLLQLEDETLKLVEPQSQALLHAQPIISIRVWGVGRDSGRERWERAWDSRVGVHPASESSSLTLLFASLVLLDPERGTMPIFPLLHLDQMPGSTQAPLFCPAPSPPAMLHHYPPPQHACLSTPPPQEGSTYGGPAVGRSPGGAVMGREDVGGVGTRLSTGWYWETLRCPFPNRDFAYVARDKLTQMLKCHVFRCEAPAKNIATSLHEICSKIMAERRNARCLVNGLSLDHSKLVDVPFQVEFPAPKNELVQKFQVYYLGNVPVAKPVGVDVINGALESVLSSSSREQWTPSHVSVAPATLTILHQQTEAVLGECRVRFLSFLAVGRDVHTFAFIMAAGPASFCCHMFWCEPNAASLSEAVQAACMLRYQKCLDARSQASTSCLPAPPAESVARRVGWTVRRGVQSLWGSLKPKRLGAHTP

SEQ ID NO: 902229 - protein, 512 aa, Homo sapiens
RVPPGNPSPRGRGAAQPPPFGLQPRPRVSRRGCGTRALRGAQDSFWNPNAFETDSDLPAGWMRVQDTSGTYYWHIPTGTTQWEPPGRASPSQGSSPQEESQLTWTGFAHGEGFEDGEFWKDEPSDEAPMELGLKEPEEGTLTFPAQSLSPEPLPQEEEKLPPRNTNPGIKCFAVRSLGWVEMTEEELAPGRSSVAVNNCIRQLSYHKNNLHDPMSGGWGEGKDLLLQLEDETLKLVEPQSQALLHAQPIISIRVWGVGRDSGRERDFAYVARDKLTQMLKCHVFRCEAPAKNIATSLHEICSKIMAERRNARCLVNGLSLDHSKLVDVPFQVEFPAPKNELVQKFQVYYLGNVPVAKPVGVDVINGALESVLSSSSREQWTPSHVSVAPATLTILHQQTEAVLGECRVRFLSFLAVGRDVHTFAFIMAAGPASFCCHMFWCEPNAASLSEAVQAACMLRYQKCLDARSQASTSCLPAPPAESVARRVGWTVRRGVQSLWGSLKPKRLGAHTP

SEQ ID NO: 902230 - protein, 487 aa, Homo sapiens
MFSQDFFLAIILQDSSADSFWNPNAFETDSDLPAGWMRVQDTSGTYYWHIPTGTTQWEPPGRASPSQGSSPQEESQLTWTGFAHGEGFEDGEFWKDEPSDEAPMELGLKEPEEGTLTFPAQSLSPEPLPQEEEKLPPRNTNPGIKCFAVRSLGWVEMTEEELAPGRSSVAVNNCIRQLSYHKNNLHDPMSGGWGEGKDLLLQLEDETLKLVEPQSQALLHAQPIISIRVWGVGRDSGRERDFAYVARDKLTQMLKCHVFRCEAPAKNIATSLHEICSKIMAERRNARCLVNGLSLDHSKLVDVPFQVEFPAPKNELVQKFQVYYLGNVPVAKPVGVDVINGALESVLSSSSREQWTPSHVSVAPATLTILHQQTEAVLGECRVRFLSFLAVGRDVHTFAFIMAAGPASFCCHMFWCEPNAASLSEAVQAACMLRYQKCLDARSQASTSCLPAPPAESVARRVGWTVRRGVQSLWGSLKPKRLGAHTP

SEQ ID NO: 902231 - protein, 306 aa, Homo sapiens
APCLTTTSRKGAPILHGADQHLEDETLKLVEPQSQALLHAQPIISIRVWGVGRDSGRERDFAYVARDKLTQMLKCHVFRCEAPAKNIATSLHEICSKIMAERRNARCLVNGLSLDHSKLVDVPFQVEFPAPKNELVQKFQVYYLGNVPVAKPVGVDVINGALESVLSSSSREQWTPSHVSVAPATLTILHQQTEAVLGECRVRFLSFLAVGRDVHTFAFIMAAGPASFCCHMFWCEPNAASLSEAVQAACMLRYQKCLDARSQASTSCLPAPPAESVARRVGWTVRRGVQSLWGSLKPKRLGAHTP

SEQ ID NO: 902232 - protein, 190 aa, Homo sapiens [sequence omitted]

SEQ ID NO: 902233 - protein, 573 aa, Homo sapiens
GRGPAARALLGGGCCDGEAAAEPEPRSLSHLRHLGPGPHRAGAAKAMSVPSSLSQSAINANSHGGPALSLPLPLHAAHNQLLNAKLQATAVGPKDLRSAMGEGGGPEPGPANAKWLKEGQNQLRRAATAHRDQNRNVTLTLAEEASQEPEMAPLGPKGLIHLYSELELSAHNAANRGLRGPGLIISTQEQGPDEGEEKAAGEAEEEEEDDDDEEEEEDLSSPPGLPEPLESVEAPPRPQALTDGPREHSKSASLLFGMRNSAASDEDSSWATLSQGSPSYGSPEDTDSFWNPNAFETDSDLPAGWMRVQDTSGTYYWHIPTGTTQWEPPGRASPSQGSSPQEESQLTWTGFAHGEGFEDGEFWKDEPSDEAPMELGLKEPEEGTLTFPAQSLSPEPLPQEEEKLPPRNTNPGIKCFAVRSLGWVEMTEEELAPGRSSVAVNNCIRQLSYHKNNLHDPMSGGWGEGKDLLLQLEDETLKLVEPQSQALLHAQPIISIRVWGVGRDSGRERDFAYVARDKLTQMLKCHVFRCEAPAKNIATSLHEICSKIMAERRNARCLGINFTHSTCYDQDFR

SEQ ID NO: 902234 - protein, 757 aa, Homo sapiens
RVPPGNPSPRGRGAAQPPPFGLQPRPRVSRRGCGTRALRGAQGAAKAMSVPSSLSQSAINANSHGGPALSLPLPLHAAHNQLLNAKLQATAVGPKDLRSAMGEGGGPEPGPANAKWLKEGQNQLRRAATAHRDQNRNVTLTLAEEASQEPEMAPLGPKGLIHLYSELELSAHNAANRGLRGPGLIISTQEQGPDEGEEKAAGEAEEEEEDDDDEEEEEDLSSPPGLPEPLESVEAPPRPQALTDGPREHSKSASLLFGMRNSAASDEDSSWATLSQGSPSYGSPEDTDSFWNPNAFETDSDLPAGWMRVQDTSGTYYWHIPTGTTQWEPPGRASPSQGSSPQEESQLTWTGFAHGEGFEDGEFWKDEPSDEAPMELGLKEPEEGTLTFPAQSLSPEPLPQEEEKLPPRNTNPGIKCFAVRSLGWVEMTEEELAPGRSSVAVNNCIRQLSYHKNNLHDPMSGGWGEGKDLLLQLEDETLKLVEPQSQALLHAQPIISIRVWGVGRDSGRERDFAYVARDKLTQMLKCHVFRCEAPAKNIATSLHEICSKIMAERRNARCLVNGLSLDHSKLVDVPFQVEFPAPKNELVQKFQVYYLGNVPVAKPVGVDVINGALESVLSSSSREQWTPSHVSVAPATLTILHQQTEAVLGECRVRFLSFLAVGRDVHTFAFIMAAGPASFCCHMFWCEPNAASLSEAVQAACMLRYQKCLDARSQASTSCLPAPPAESVARRVGWTVRRGVQSLWGSLKPKRLGAHTP

SEQ ID NO: 902235 - protein, 496 aa, Homo sapiens
SGVWALPAGPGAAVAEETLQPSWALADSFWNPNAFETDSDLPAGWMRVQDTSGTYYWHIPTGTTQWEPPGRASPSQGSSPQEESQLTWTGFAHGEGFEDGEFWKDEPSDEAPMELGLKEPEEGTLTFPAQSLSPEPLPQEEEKLPPRNTNPGIKCFAVRSLGWVEMTEEELAPGRSSVAVNNCIRQLSYHKNNLHDPMSGGWGEGKDLLLQLEDETLKLVEPQSQALLHAQPIISIRVWGVGRDSGRERDFAYVARDKLTQMLKCHVFRCEAPAKNIATSLHEICSKIMAERRNARCLVNGLSLDHSKLVDVPFQVEFPAPKNELVQKFQVYYLGNVPVAKPVGVDVINGALESVLSSSSREQWTPSHVSVAPATLTILHQQTEAVLGECRVRFLSFLAVGRDVHTFAFIMAAGPASFCCHMFWCEPNAASLSEAVQAACMLRYQKCLDARSQASTSCLPAPPAESVARRVGWTVRRGVQSLWGSLKPKRLGAHTP

SEQ ID NO: 902236 - protein, 511 aa, Homo sapiens
GRGPAARALLGGGCCDGEAAAEPEPRSLSHLRHLGPGPHRADSFWNPNAFETDSDLPAGWMRVQDTSGTYYWHIPTGTTQWEPPGRASPSQGSSPQEESQLTWTGFAHGEGFEDGEFWKDEPSDEAPMELGLKEPEEGTLTFPAQSLSPEPLPQEEEKLPPRNTNPGIKCFAVRSLGWVEMTEEELAPGRSSVAVNNCIRQLSYHKNNLHDPMSGGWGEGKDLLLQLEDETLKLVEPQSQALLHAQPIISIRVWGVGRDSGRERDFAYVARDKLTQMLKCHVFRCEAPAKNIATSLHEICSKIMAERRNARCLVNGLSLDHSKLVDVPFQVEFPAPKNELVQKFQVYYLGNVPVAKPVGVDVINGALESVLSSSSREQWTPSHVSVAPATLTILHQQTEAVLGECRVRFLSFLAVGRDVHTFAFIMAAGPASFCCHMFWCEPNAASLSEAVQAACMLRYQKCLDARSQASTSCLPAPPAESVARRVGWTVRRGVQSLWGSLKPKRLGAHTP

SEQ ID NO: 902237 - protein, 478 aa, Homo sapiens
QGCMTQMRDSFWNPNAFETDSDLPAGWMRVQDTSGTYYWHIPTGTTQWEPPGRASPSQGSSPQEESQLTWTGFAHGEGFEDGEFWKDEPSDEAPMELGLKEPEEGTLTFPAQSLSPEPLPQEEEKLPPRNTNPGIKCFAVRSLGWVEMTEEELAPGRSSVAVNNCIRQLSYHKNNLHDPMSGGWGEGKDLLLQLEDETLKLVEPQSQALLHAQPIISIRVWGVGRDSGRERDFAYVARDKLTQMLKCHVFRCEAPAKNIATSLHEICSKIMAERRNARCLVNGLSLDHSKLVDVPFQVEFPAPKNELVQKFQVYYLGNVPVAKPVGVDVINGALESVLSSSSREQWTPSHVSVAPATLTILHQQTEAVLGECRVRFLSFLAVGRDVHTFAFIMAAGPASFCCHMFWCEPNAASLSEAVQAACMLRYQKCLDARSQASTSCLPAPPAESVARRVGWTVRRGVQSLWGSLKPKRLGAHTP

SEQ ID NO: 902238 - protein, 725 aa, Homo sapiens
GRGPAARALLGGGCCDGEAAAEPEPRSLSHLRHLGPGPHRAGAAKAMSVPSSLSQSAINANSHGGPALSLPLPLHAAHNQLLNAKLQATAVGPKDLRSAMGEGGGPEPGPANAKWLKEGQNQLRRAATAHRDQNRNVTLTLAEEASQEPEMAPLGPKGLIHLYSELELSAHNAANRGLRGPGLIISTQEQGPDEGEEKAAGEAEEEEEDDDDEEEEEDLSSPPGLPEPLESVEAPPRPQALTDGPREHSKSASLLFGMRNSAASDEDSSWATLSQGSPSYGSPEDTDSFWNPNAFETDSDLPAGWMRVQDTSGTYYWHIPTGTTQWEPPGRASPSQGSSPQEESQLTWTGFAHGEGFEDGEFWKDEPSDEAPMELGLKEPEEGTLTFPAQSLSPEPLPQEEEKLPPRNTNPGIKCFAVRSLGWVEMTEEELAPGRSSVAVNNCIRQLSYHKNNLHDPMSGGWGEGKDLLLQLEDETLKLVEPQSQALLHAQPIISIRVWGVGRDSGRERDFAYVARDKLTQMLKCHVFRCEAPAKNIATSLHEICSKIMAERRNARCLVNGLSLDHSKLVDVPFQVEFPAPKNELVQKFQVYYLGNVPVAKPVGVDVINGALESVLSSSSREQWTPSHVSVAPATLTILHQQTEAVLGECRVRFLSFLAVGRDVHTFAFIMAAGPASFCCHMFWCEPNAASLSEAVQAACMLRYQKCLDARSQASKAVVGRVLTV

SEQ ID NO: 902239 - protein, 367 aa, Homo sapiens
GRGPAARALLGGGCCDGEAAAEPEPRSLSHLRHLGPGPHRAGAAKAMSVPSSLSQSAINANSHGGPALSLPLPLHAAHNQLLNAKLQATAVGPKDLRSAMGEGGGPEPGPANAKWLKEGQNQLRRAATAHRDQNRNVTLTLAEEASQEPEMAPLGPKGLIHLYSELELSAHNAANRGLRGPGLIISTQEQGPDEGEEKAAGEAEEEEEDDDDEEEEEDLSSPPGLPEPLESVEAPPRPQALTDGPREHSKSASLLFGMRNSAASDEDSSWATLSQGSPSYGSPEDTDSFWNPNAFETDSDLPAGWMRVQDTSGTYYWHIPTGTTQWEPPGRASPSQGSSPQEESQLTWTGFAHGEGFEDGEFWKGEI

SEQ ID NO: 902240 - protein, 577 aa, Homo sapiens
MLGFPPGRPQLPVQLRPQTRMATALRDPASVPIATEVLFKLTQGSVTFEDVAVYFSWEEWDLLDEAQKHLYFDVMLENFALTSSLGCWCGVEHEETPSEQRISGERVPQFRTSKEGSSSQNADSCEICCLVLRDILHLAEHQGTNCGQKLHTCGKQFYISANLQQHQRQHITEAPFRSYVDTASFTQSCIVHVSEKPFTCREIRKDFLANMRFLHQDATQTGEKPNNSNKCAVAFYSGKSHHNWGKCSKAFSHIDTLVQDQRILTREGLFECSKCGKACTRRCNLIQHQKVHSEERPYECNECGKFFTYYSSFIIHQRVHTGERPYACPECGKSFSQIYSLNSHRKVHTGERPYECGECGKSFSQRSNLMQHRRVHTGERPYECSECGKSFSQNFSLIYHQRVHTGERPHECNECGKSFSRSSSLIHHRRLHTGERPYECSKCGKSFKQSSSFSSHRKVHTGERPYVCGECGKSFSHSSNLKNHQRVHTGERPVECSECSKSFSCKSNLIKHLRVHTGERPYECSECGKSFSQSSSLIQHRRVHTGKRPYQCSQCGKSFGCKSVLIQHQRVHIGEKP

SEQ ID NO: 902241 - protein, 629 aa, Homo sapiens
MLGFPPGRPQLPVQLRPQTRMATALRDPASVPIATEVLFKLTQGSVTFEDVAVYFSWEEWDLLDEAQKHLYFDVMLENFALTSSLGLISSWSHVVAQLGLGEVPSVLHRMFMTPASARWDQRGPGLHEWHLGKGMSSGCWCGVEHEETPSEQRISGERVPQFRTSKEGSSSQNADSCEICCLVLRDILHLAEHQGTNCGQKLHTCGKQFYISANLQQHQRQHITEAPFRSYVDTASFTQSCIVHVSEKPFTCREIRKDFLANMRFLHQDATQTGEKPNNSNKCAVAFYSGKSHHNWGKCSKAFSHIDTLVQDQRILTREGLFECSKCGKACTRRCNLIQHQKVHSEERPYECNECGKFFTYYSSFIIHQRVHTGERPYACPECGKSFSQIYSLNSHRKVHTGERPYECGECGKSFSQRSNLMQHRRVHTGERPYECSECGKSFSQNFSLIYHQRVHTGERPHECNECGKSFSRSSSLIHHRRLHTGERPYECSKCGKSFKQSSSFSSHRKVHTGERPYVCGECGKSFSHSSNLKNHQRVHTGERPVECSECSKSFSCKSNLIKHLRVHTGERPYECSECGKSFSQSSSLIQHRRVHTGKRPYQCSQCGKSFGCKSVLIQHQRVHIGEKP

SEQ ID NO: 902242 - protein, 564 aa, Homo sapiens
MLGFPPGRPQLPVQLRPQTRMATALRDPASGSVTFEDVAVYFSWEEWDLLDEAQKHLYFDVMLENFALTSSLGCWCGVEHEETPSEQRISGERVPQFRTSKEGSSSQNADSCEICCLVLRDILHLAEHQGTNCGQKLHTCGKQFYISANLQQHQRQHITEAPFRSYVDTASFTQSCIVHVSEKPFTCREIRKDFLANMRFLHQDATQTGEKPNNSNKCAVAFYSGKSHHNWGKCSKAFSHIDTLVQDQRILTREGLFECSKCGKACTRRCNLIQHQKVHSEERPYECNECGKFFTYYSSFIIHQRVHTGERPYACPECGKSFSQIYSLNSHRKVHTGERPYECGECGKSFSQRSNLMQHRRVHTGERPYECSECGKSFSQNFSLIYHQRVHTGERPHECNECGKSFSRSSSLIHHRRLHTGERPYECSKCGKSFKQSSSFSSHRKVHTGERPYVCGECGKSFSHSSNLKNHQRVHTGERPVECSECSKSFSCKSNLIKHLRVHTGERPYECSECGKSFSQSSSLIQHRRVHTGKRPYQCSQCGKSFGCKSVLIQHQRVHIGEKP

SEQ ID NO: 902243 - protein, 628 aa, Homo sapiens
MRTLRQREVEYFSKATQLVRGSTKDRGAQVPIATEVLFKLTQGSVTFEDVAVYFSWEEWDLLDEAQKHLYFDVMLENFALTSSLGLISSWSHVVAQLGLGEVPSVLHRMFMTPASARWDQRGPGLHEWHLGKGMSSGCWCGVEHEETPSEQRISGERVPQFRTSKEGSSSQNADSCEICCLVLRDILHLAEHQGTNCGQKLHTCGKQFYISANLQQHQRQHITEAPFRSYVDTASFTQSCIVHVSEKPFTCREIRKDFLANMRFLHQDATQTGEKPNNSNKCAVAFYSGKSHHNWGKCSKAFSHIDTLVQDQRILTREGLFECSKCGKACTRRCNLIQHQKVHSEERPYECNECGKFFTYYSSFIIHQRVHTGERPYACPECGKSFSQIYSLNSHRKVHTGERPYECGECGKSFSQRSNLMQHRRVHTGERPYECSECGKSFSQNFSLIYHQRVHTGERPHECNECGKSFSRSSSLIHHRRLHTGERPYECSKCGKSFKQSSSFSSHRKVHTGERPYVCGECGKSFSHSSNLKNHQRVHTGERPVECSECSKSFSCKSNLIKHLRVHTGERPYECSECGKSFSQSSSLIQHRRVHTGKRPYQCSQCGKSFGCKSVLIQHQRVHIGEKP

SEQ ID NO: 902244 - protein, 333 aa, Homo sapiens
MSGDEMIFDPTMSKKKKKKKKPFMLDEEGDTQTEETQPSETKEVEPEPTEDKDLEADEEDTRKKDASDDLDDLNFFNQKKKKKKTKKIFDIDEAEEGVKDLKIESDVQEPTEPEDDLDIMLGNKKKKKKNVKFPDEDEILEKDEALEDEDNKKDDGISFSNQTGPAWAGSERDYTYEELLNRVFNIMREKNPDMVAGEKRKFVMKPPQVVRVGTKKTSFVNFTDICKLLHRQPKHLLAFLLAELGTSGSIDGNNQLVIKGRFQQKQIENVLRRYIKEYVTCHTCRSPDTILQKDTRLYFLQCETCHSRCSVASIKTGFQAVTGKRAQLRAKAN

SEQ ID NO: 902245 - protein, 333 aa, Homo sapiens; identical to SEQ ID NO: 902244

SEQ ID NO: 902246 - protein, 166 aa, Homo sapiens
MTLGETMLRDDATMILSFFNPARRKTTGRRLIFDIDEAEEGVKDLKIESDVQEPTEPEDDLDIMLGNKKKKKKNVKFPDEDEILEKDEALEDEDNKKDDGISFSNQTGPAWAGSERDYTYEELLNRVFNIMRGRSQAARGNEKEKDGTTDSGIKLEPVPGLPGALP

SEQ ID NO: 902247 - protein, 328 aa, Homo sapiens
MIFDPTMSKKKKKKKKPFMLDEEGDTQTEETQPSETKEVEPEPTEDKDLEADEEDTRKKDASDDLDDLNFFNQKKKKKKTKKIFDIDEAEEGVKDLKIESDVQEPTEPEDDLDIMLGNKKKKKKNVKFPDEDEILEKDEALEDEDNKKDDGISFSNQTGPAWAGSERDYTYEELLNRVFNIMREKNPDMVAGEKRKFVMKPPQVVRVGTKKTSFVNFTDICKLLHRQPKHLLAFLLAELGTSGSIDGNNQLVIKGRFQQKQIENVLRRYIKEYVTCHTCRSPDTILQKDTRLYFLQCETCHSRCSVASIKTGFQAVTGKRAQLRAKAN

SEQ ID NO: 902248 - protein, 303 aa, Homo sapiens
MPPKSLRPSETKEVEPEPTEDKDLEADEEDTRKKDASDDLDDLNFFNQKKKKKKTKKIFDIDEAEEGVKDLKIESDVQEPTEPEDDLDIMLGNKKKKKKNVKFPDEDEILEKDEALEDEDNKKDDGISFSNQTGPAWAGSERDYTYEELLNRVFNIMREKNPDMVAGEKRKFVMKPPQVVRVGTKKTSFVNFTDICKLLHRQPKHLLAFLLAELGTSGSIDGNNQLVIKGRFQQKQIENVLRRYIKEYVTCHTCRSPDTILQKDTRLYFLQCETCHSRCSVASIKTGFQAVTGKRAQLRAKAN

SEQ ID NO: 902249 - protein, 214 aa, Homo sapiens [sequence omitted]

SEQ ID NO: 902250 - protein, 333 aa, Homo sapiens; identical to SEQ ID NO: 902244

SEQ ID NO: 902251 - protein, 262 aa, Homo sapiens
RVSPYQIINLDTSDIQFLEDAGNNVEVDESLFQEMDDLELENDETVQTTLKFTTVKNTQMKLPFMKYSPRKDEALEDEDNKKDDGISFSNQTGPAWAGSERDYTYEELLNRVFNIMREKNPDMVAGEKRKFVMKPPQVVRVGTKKTSFVNFTDICKLLHRQPKHLLAFLLAELGTSGSIDGNNQLVIKGRFQQKQIENVLRRYIKEYVTCHTCRSPDTILQKDTRLYFLQCETCHSRCSVASIKTGFQAVTGKRAQLRAKAN

SEQ ID NO: 902252 - protein, 147 aa, Homo sapiens
MREKNPDMVAGEKRKFVMKPPQVVRVGTKKTSFVNFTDICKLLHRQPKHLLAFLLAELGTSGSIDGNNQLVIKGRFQQKQIENVLRRYIKEYVTCHTCRSPDTILQKDTRLYFLQCETCHSRCSVASIKTGFQAVTGKRAQLRAKAN

SEQ ID NO: 902253 - protein, 333 aa, Homo sapiens; identical to SEQ ID NO: 902244

SEQ ID NO: 902254 - protein, 281 aa, Homo sapiens
  misc_feature (255)..(255): Xaa can be any naturally occurring amino acid
MSGDEMIFDPTMSKKKKKKKKPFMLDEEGDTQTEETQPSETKEVEPEPTEDKDLEADEEDTRKKDASDDLDDLNFFNQKKKKKKTKKIFDIDEAEEGVKDLKIESDVQEPTEPEDDLDIMLGNKKKKKKNVKFPDEDEILEKDEALEDEDNKKDDGISFSNQTGPAWAGSERDYTYEELLNRVFNIMREKNPDMVAGEKRKFVMKPPQVVRVGTKKTSFVNFTDICKLLHRQPKHLLAFLLAELGTSYRWYNQLXSRKIHRTDEMLGNYRIALPSVRTSEK

SEQ ID NO: 902255 - protein, 67 aa, Homo sapiens
VILCVALFAEEYVTCHTCRSPDTILQKDTRLYFLQCETCHSRCSVASIKTGFQAVTGKRAQLRAKAN

SEQ ID NO: 902256 - protein, 309 aa, Homo sapiens
GTREEDTRKKDASPSETKEVEPEPTEDKDLEADEEDTRKKDASDDLDDLNFFNQKKKKKKTKKIFDIDEAEEGVKDLKIESDVQEPTEPEDDLDIMLGNKKKKKKNVKFPDEDEILEKDEALEDEDNKKDDGISFSNQTGPAWAGSERDYTYEELLNRVFNIMREKNPDMVAGEKRKFVMKPPQVVRVGTKKTSFVNFTDICKLLHRQPKHLLAFLLAELGTSGSIDGNNQLVIKGRFQQKQIENVLRRYIKEYVTCHTCRSPDTILQKDTRLYFLQCETCHSRCSVASIKTGFQAVTGKRAQLRAKAN

SEQ ID NO: 902257 - protein, 131 aa, Homo sapiens
FLVPTRTTCGGFMTTSFVNLTDICKLLHRQPKHLLAFLLAELGTSGSIDGNNQLVIKGRFQQKQIENVLRRYIKEYVTCHTCRSPDTILQKDTRLYFLQCETCHSRCSVASIKTGFQAVTGKRAQLRAKAN

SEQ ID NO: 902258 - protein, 328 aa, Homo sapiens; identical to SEQ ID NO: 902247

SEQ ID NO: 902259 - protein, 341 aa, Homo sapiens
MSGDEMIFDPTMSKKKKKKKKPFMLDEEGDTQTEETQPSETKEVEPEPTEDKDLEADEEDTRKKDASDDLDDLNFFNQKKKKKKTKKIFDIDEAEEGVKVVLLSCVKDLKIESDVQEPTEPEDDLDIMLGNKKKKKKNVKFPDEDEILEKDEALEDEDNKKDDGISFSNQTGPAWAGSERDYTYEELLNRVFNIMREKNPDMVAGEKRKFVMKPPQVVRVGTKKTSFVNFTDICKLLHRQPKHLLAFLLAELGTSGSIDGNNQLVIKGRFQQKQIENVLRRYIKEYVTCHTCRSPDTILQKDTRLYFLQCETCHSRCSVASIKTGFQAVTGKRAQLRAKAN

SEQ ID NO: 902260 - protein, 249 aa, Homo sapiens
LKKVKRILRLKVMFKVILWFSWFLNITFNLKILDIMLGNKKKKKKNVKFPDEDEILEKDEALEDEDNKKDDGISFSNQTGPAWAGSERDYTYEELLNRVFNIMREKNPDMVAGEKRKFVMKPPQVVRVGTKKTSFVNFTDICKLLHRQPKHLLAFLLAELGTSGSIDGNNQLVIKGRFQQKQIENVLRRYIKEYVTCHTCRSPDTILQKDTRLYFLQCETCHSRCSVASIKTGFQAVTGKRAQLRAKAN

SEQ ID NO: 902261 - protein, 333 aa, Homo sapiens; identical to SEQ ID NO: 902244

SEQ ID NO: 902262 - protein, 314 aa, Homo sapiens
MSGDEMIFDPTMSKKKKKKKKPFMLDEEGDTQTEETQPSETKEVEPEPTEDKDLEADEEDTRKKDASDDLDDLNFFNQKKKKKKTKKIFDIDEAEEGVKDLKIESDVQEPTEPEDDLDIMLGNKKKKKKNVKFPDEDEILEKDEALEDEDNKKDDGISFSNQTGPAWAGSERDYTYEELLNRVFNIMREKNPDMVAGEKRKFVMKPPQVVRVGTKKTSFVNFTDICKLGSIDGNNQLVIKGRFQQKQIENVLRRYIKEYVTCHTCRSPDTILQKDTRLYFLQCETCHSRCSVASIKTGFQAVTGKRAQLRAKAN

SEQ ID NO: 902263 - protein, 333 aa, Homo sapiens; identical to SEQ ID NO: 902244

SEQ ID NO: 902264 - protein, 291 aa, Homo sapiens
MSGDEMIFDPTMSKKKKKKKKPFMLDEEGDTQTEETQPSETKEVEPEPTEDKDLEADEEDTRKKDASDDLDDLNFFNQKKKKKKTKKIFDIDEAEEGVKDLKIESDVQEPTEPEDDLDIMLGNKKKKKKNVKFPDEDEILEKDEALEDEDNKKDDGISFSNQTGPAWAGSERDYTYEELLNRVFNIMREKNPDMVAGEKRKFVMKPPQVVRVGTKKTSFVNFTDICKLLHRQPKHLLAFLLAELGTSFIEITAYKFKVYNPGESHSDVRLSRKTELFFLFCLLNLHPWTPP

SEQ ID NO: 902265 - protein, 310 aa, Homo sapiens
MRPLQIVPSRLISQLYCGLKPPASTRNQICLKMARPSSSMADFRKFFAKAKHIVIISGAGVSAESGVPTFRGAGGYWRKWQAQDLATPLAFAHNPSRVWEFYHYRREVMGSKEPNAGHRAIAECETRLGKQGRRVVVITQNIDELHRKAGTKNLLEIHGSLFKTRCTSCGVVAENYKSPICPALSGKGAPEPGTQDASIPVEKLPRCEEAGCGGLLRPHVVWFGENLDPAILEEVDRELAHCDLCLVVGTSSVVYPAAMFAPQVAARGVPVAEFNTETTPATNRFRFHFQGPCGTTLPEALACHENETVS

SEQ ID NO: 902266 - protein, 299 aa, Homo sapiens
MRPLQIVPSRLISQLYCGLKPPASTRNQICLKMARPSSSMADFRKFFAKAKHIVIISGAGVSAESGVPTFRGAGGYWRKWQAQDLATPLAFAHNPSRVWEFYHYRREVMGSKEPNAGHRAIAECETRLGKQGRRVVVITQNIDELHRKAGTKNLLEIHGSLFKTRCTSCGVVAENYKSPICPALSGKGAPEPGTQDASIPVEKLPRCEEAGCGGLLRPHVVWFGENLDPAILEEVDRELAHCDLCLVVGTSSVVYPAAMFAPQVAARGVPVAEFNTETTPATNRFSHLISISSLIIIKN

SEQ ID NO: 902267 - protein, 223 aa, Homo sapiens
MRPLQIVPSRLISQLYCGLKPPASTRNQICLKMARPSSSMADFRKFFAKAKHIVIISGAGVSAESGVPTFRGAGGYWRKWQAQDLATPLAFAHNPSRVWEFYHYRREVMGSKEPNAGHRAIAECETRLGKQGRRVVVITQNIDELHRKAGTKNLLEIHGSLFKTRCTSCGVVAENYKSPICPALSGKGAPEPGTQDASIPVEKLPRDEVSPCWPGWSRALDLR

SEQ ID NO: 902268 - protein, 253 aa, Homo sapiens
MRPLQIVPSRLISQLYCGLKPPASTRNQICLKMARPSSSMADFRKFFAKAKHIVIISGAGVSAESGVPTFRGAGGYWRKWQAQDLATPLAFAHNPSRVWEFYHYRREVMGSKEPNAGHRAIAECETRLGKQGRRVVVITQNIDELHRKAGTKNLLEIHGSLFKTRCTSCGVVAENYKSPICPALSGKGAPEPGTQDASIPVEKLPRCEEAGCGGLLRPHVVWFGENLDPAILEEVDRELAHCDLCLVVGHALP

SEQ ID NO: 902269 - protein, 206 aa, Homo sapiens
MRPLQIVPSRLISQLYCGLKPPASTRNQICLKMARPSSSMADFRKFFAKAKHIVIISGAGVSAESGVPTFRGAGGYWRKWQAQDLATPLAFAHNPSRVWEFYHYRREVMGSKEPNAGHRAIAECETRLGKQGRRVVVITQNIDELHRKAGTKNLLEIHGSLFKTRCTSCGVVAENYKSPICPALSGKGAPEPGTQDASIPVEKLPR

SEQ ID NO: 902270 - protein, 167 aa, Homo sapiens
MRPLQIVPSRLISQLYCGLKPPASTRNQICLKMARPSSSMADFRKFFAKAKHIVIISGAGVSAESGVPTFRGAGGYWRKWQAQNIPSWPFAVRALPSHWLRKSLALEDKELFDCLRWRFALVAQAGVQWRDLGSLQPLPPRFSCLSLPSSWDYRHAPPHPANFCIFQ

SEQ ID NO: 902271 - protein, 310 aa, Homo sapiens; identical to SEQ ID NO: 902265

SEQ ID NO: 902272 - protein, 202 aa, Homo sapiens
MGSKEPNAGHRAIAECETRLGKQGRRVVVITQNIDELHRKAGTKNLLEIHGSLFKTRCTSCGVVAENYKSPICPALSGKGAPEPGTQDASIPVEKLPRCEEAGCGGLLRPHVVWFGENLDPAILEEVDRELAHCDLCLVVGTSSVVYPAAMFAPQVAARGVPVAEFNTETTPATNRFRFHFQGPCGTTLPEALACHENETVS

SEQ ID NO: 902273 - protein, 223 aa, Homo sapiens; identical to SEQ ID NO: 902267

SEQ ID NO: 902274 - protein, 107 aa, Homo sapiens
YFSFVPLCFPSLYVLWFLAHNVLHVSTCCPRCRGRVFISSARIALPVFYVPSLLIVVSSVLTYFFCVPPIFGAPSCVCFFVCLPPFFFFSFFFFFFFFFFLGECFNA

SEQ ID NO: 902275 - protein, 724 aa, Homo sapiens
KAGACLQRAGHLHEATRPHGAAAAAADPGGGGGARSQPGGPGVPAPVDARLGRSPWAGAEAARGGGARGRGRGRGPEAAAQEEAEEVGRSGPGRRAAQRRSPGLAMLLASAVVVWEWLNEHGRWRPYSPAVSHHIEAVVRAGPRAGGSVVLGQVDSRLAPYIIDLQSMNQFRQDTGTLRPVRRNYYDPSSAPGKGVVWEWENDNGSWTPYDMEVGITIQHAYEKQHPWIDLTSIGFSYVIDFNTMGQINRQTQRQRRVRRRLDLIYPMVTGTLPKAQSWPVSPGPATSPPMSPCSCPQCVLVMSVKAAVVNGSTGPLQLPVTRKNMPPPGVVKLPPLPGSGAKPLDSTGTIRGPLKTAPSQVIRRQASSMPTGTTMGSPASPPGPNSKTGRVALATLNRTNLQRLAIAQSRVLIASGVPTVPVKNLNGSSPVNPALAGITGILMSAAGLPVCLTRPPKLVLHPPPVSKSEIKSIPGVSNTSRKTTKKQAKKGKTPEEVLKKYLQKVRHPPDEDCTICMERLTAPSGYKGPQPTVKPDLVGKLSRCGHVYHIYCLVAMYNNGNKDGSLQCPTCKTIYGVKTGTQPPGKMEYHLIPHSLPGHPDCKTIRIIYSIPPGIQGPEHPNPGKSFSARGFPRHCYLPDSEKGRKVLKLLLVAWDRRLIFAIGTSSTTGESDTVIWNEVHHKTEFGSNLTGHGYPDANYLDNVLAELAAQGISEDSTAQEKD

SEQ ID NO: 902276 - protein, 142 aa, Homo sapiens
MQLGTRTSSLGPHSLPGHPDCKTIRIIYSIPPGIQGPEHPNPGKSFSARGFPRHCYLPDSEKGRKVLKLLLVAWDRRLIFAIGTSSTTGESDTVIWNEVHHKTEFGSNLTGHGYPDANYLDNVLAELAAQGISEDSTAQEKD

SEQ ID NO: 902277 - protein, 724 aa, Homo sapiens; identical to SEQ ID NO: 902275

SEQ ID NO: 902278 - protein, 724 aa, Homo sapiens; identical to SEQ ID NO: 902275

SEQ ID NO: 902279 - protein, 261 aa, Homo sapiens
MTPCVGSCPRELVPSSGTGASLTYPSAWSMGPVVEFTSYYFGESRNSLGDWAGREKLRSITHQGAFCSPGPSSLVPFGTGWESYYQNCFPIWLLLALAPQDGSLQCPTCKTIYGVKTGTQPPGKMEYHLIPHSLPGHPDCKTIRIIYSIPPGIQGPEHPNPGKSFSARGFPRHCYLPDSEKGRKVLKLLLVAWDRRLIFAIGTSSTTGESDTVIWNEVHHKTEFGSNLTGHGYPDANYLDNVLAELAAQGISEDSTAQEKD

SEQ ID NO: 902280 - protein, 724 aa, Homo sapiens; identical to SEQ ID NO: 902275

SEQ ID NO: 902281 - protein, 74 aa, Homo sapiens
PVSKSEIKSIPGVSNTSRKTTKKQAKKGTSLLSRGVLRVKDLAVSPESASTSKGHSHGFTLCASISASVSGPNQ

SEQ ID NO: 902282 - protein, 60 aa, Homo sapiens
KVVQGHLIDCLLLCHPVEDRSRGCCFNATTRREAEGLCRARVLREGVTSTLAVLQADSSL

SEQ ID NO: 902283 - protein, 229 aa, Homo sapiens
GIPPPGRSMGRFRGGLRCIKYLLLGFNLLFWLAGSAVIAFGLWFRFGGAIKELSSEDKSPEYFYVGLYVLVGAGALMMAVGFFGCCGAMRESQCVLGSFFTCLLVIFAAEVTTGVFAFIGKGVAIRHVQTMYEEAYNDYLKDRGKGNGTLITFHSTFQCCGKESSEQVQPTCPKELLGHKNCIDEIETIISVKLQLIGIVGIGIAGLTIFGMIFSMVLCCAIRNSRDVI

SEQ ID NO: 902284 - protein, 201 aa, Homo sapiens
GIPPPGRSMGRFRGGLRCIKYLLLGFNLLFWLAGSAVIAFGLWFRFGGAIKELSSEDKSPEYFYVGLYVLVGAGALMMAVGFFGCCGAMRESQCVLGSFFTCLLVIFAAEVTTGVFAFIGKGVAIRHVQTMYEEAYNDYLKDRGKGNGTLITFHSTFQCCGKESSEQVQPTCPKELLGHKIFGMIFSMVLCCAIRNSRDVI

SEQ ID NO: 902285 - protein, 229 aa, Homo sapiens; identical to SEQ ID NO: 902283

SEQ ID NO: 902286 - protein, 246 aa, Homo sapiens
VTTAAARGLGAMEEEMHTDAKIRAENGTGSSPRGPGCSLRHFACEQNLLSRPDGSASFLQGDTSVLAGVYGPAEVKVSKEIFNKATLEVILRPKIGLPGVAEKSRERLIRNTCEAVVLGTLHPRTSITVVLQVVSDAGSLLACCLNAACMALVDAGVPMRALFCGVACALDSDGTLVLDPTSKQEKEARAVLTFALDSVERKLLMSSTKGLYSDTELQQCLAAAQAASQHVFRFYRESLQRRYSKS

SEQ ID NO: 902287 - protein, 246 aa, Homo sapiens; identical to SEQ ID NO: 902286

SEQ ID NO: 902288 - protein, 208 aa, Homo sapiens
VTTAAARGLGAMEEEMHTDAKIRAENGTGSSPRGPGCSLRHFACEQNLLSRPDGSASFLQGVAEKSRERLIRNTCEAVVLGTLHPRTSITVVLQVVSDAGSLLACCLNAACMALVDAGVPMRALFCGVACALDSDGTLVLDPTSKQEKEARAVLTFALDSVERKLLMSSTKGLYSDTELQQCLAAAQAASQHVFRFYRESLQRRYSKS

SEQ ID NO: 902289 - protein, 142 aa, Homo sapiens
VTTAAARGLGAMEEEMHTDAKIRAENGTGSSPRGPGCSLRHFACEQNLLSRPDGSASFLQGDTSVLAGVYGPAEVKVSKEIFNKATLEVILRPKIGLPAAWHWWMQVCPCGLSSVGSPAPWTLMGPSCWILHPSKKRRPGQS

SEQ ID NO: 902290 - protein, 109 aa, Homo sapiens
VTTAAARGLGAMEEEMHTDAKIRAENGTGSSPRGPGCSLRHFACEQNLLSRPDGSASFLQGDTSVLAGVYGPAEVKVSKEIFNKATLEVILRPKIGLPAQPCLSDPWAP

SEQ ID NO: 902291 - protein, 241 aa, Homo sapiens
KALQWAGVGLAFRGRRFDHENGTGSSPRGPGCSLRHFACEQNLLSRPDGSASFLQGDTSVLAGVYGPAEVKVSKEIFNKATLEVILRPKIGLPGVAEKSRERLIRNTCEAVVLGTLHPRTSITVVLQVVSDAGSLLACCLNAACMALVDAGVPMRALFCGVACALDSDGTLVLDPTSKQEKEARAVLTFALDSVERKLLMSSTKGLYSDTELQQCLAAAQAASQHVFRFYRESLQRRYSKS

SEQ ID NO: 902292 - protein, 268 aa, Homo sapiens
VTTAAARGLGAMEEEMHTDAKIRAENGTGSSPRGPGCSLRHFACEQNLLSRPDGSASFLQGDTSVLAGVYGPAEVKVSKEIFNKATLEVILRPKIGLPAGVSGWQSGLAFFPLESSIIPAGVAEKSRERLIRNTCEAVVLGTLHPRTSITVVLQVVSDAGSLLACCLNAACMALVDAGVPMRALFCGVACALDSDGTLVLDPTSKQEKEARAVLTFALDSVERKLLMSSTKGLYSDTELQQCLAAAQAASQHVFRFYRESLQRRYSKS

SEQ ID NO: 902293 - protein, 246 aa, Homo sapiens; identical to SEQ ID NO: 902286

SEQ ID NO: 902294 - protein, 82 aa, Homo sapiens
AELCGRVAVVGAVEAAATLRPRLLMEAGPHPRPGHCCKPGGRLDMNHGFVHHIRRNQIARYRPALRRRRHHSWPGLARPDSP

SEQ ID NO: 902295 - protein, 190 aa, Homo sapiens
AELCGRVAVVGAVEAAATLRPRLLMEAGPHPRPGHCCKPGGRLDMNHGFVHHIRRNQIARDDYDKKVKQAAKEKVRRRHTPAPTRPRKPDLQVYLPRHRDVSAHPRNPDYEESGESSSSGGSELEPSGHQLFCLEYEADSGEVTSVIVYQGDDPGKVSEKVSAHTPLDPPMREALKLRIQEEIAKRQSQH

SEQ ID NO: 902296 - protein, 182 aa, Homo sapiens
AELCGRVAVVGAVEAAATLRPRLLMEAGPHPRPGHCCKPGGRLDMNHGFVHHIRRNQIARDDYDKKVKQAAKEKVRRRHTPAPTRPRKPDLQVYLPRHRGSAHLVSFRNLHLSAPKSPLNDSHQELGRLISPQLSIAVRVSGSQQEVYLPVCPTVLYFSKVLRYLAKRKSGTAMSDQHIIAE

SEQ ID NO: 902297 - protein, 99 aa, Homo sapiens
FLLWFILPDVSAHPRNPDYEESGESSSSGGSELEPSGHQLFCLEYEADSGEVTSVIVYQGDDPGKVSEKVSAHTPLDPPMREALKLRIQEEIAKRQSQH

SEQ ID NO: 902298 - protein, 151 aa, Homo sapiens
AELCGRVAVVGAVEAAATLRPRLLMEAGPHPRPGHCCKPGGRLDMNHGFVHHIRRNQIARDDYDKKVKQAAKEKVRRRHTPAPTRPRKPDLQVYLPRHRGEAARPACLQPARSSCNALPFSIGKNHFLLLRFSSSRLFPEPPPQRSQISAE

SEQ ID NO: 902299 - protein, 82 aa, Homo sapiens; identical to SEQ ID NO: 902294

SEQ ID NO: 902300 - protein, 190 aa, Homo sapiens; identical to SEQ ID NO: 902295

SEQ ID NO: 902301 - protein, 432 aa, Homo sapiens
MQPMSFGWDHSLHKRKRLPPVKRSLVYYLKNREVRLQNETSYSRVLHGYAAQQLPSLLKEREFHLGTLNKVFASQWLNHRQVVCGTKCNTLFVVDVQTSQITKIPILKDREPGGVTQQGCGIHAIELNPSRTLLATGGDNPNSLAIYRLPTLDPVCVGDDGHKDWIFSIAWISDTMAVSGSRDGSMGLWEVTDDVLTKSDARHNVSRVPVYAHITHKALKDIPKEDTNPDNCKVRALAFNNKNKELGAVSLDGYFHLWKAENTLSKLLSTKLPYCRENVCLAYGSEWSVYAVGSQAHVSFLDPRQPSYNVKSVCSRERGSGIRSVSFYEHIITVGTGQGSLLFYDIRAQRFLEERLSACYGSKPRLAGENLKLTTGKGWLNHDETWRNYFSDIDFFPNAVYTHCYDSSGTKLFVAGGPLPSGLHGNYAGLWS

SEQ ID NO: 902302 - protein, 428 aa, Homo sapiens
MFGWDHSLHKRKRLPPVKRSLVYYLKNREVRLQNETSYSRVLHGYAAQQLPSLLKEREFHLGTLNKVFASQWLNHRQVVCGTKCNTLFVVDVQTSQITKIPILKDREPGGVTQQGCGIHAIELNPSRTLLATGGDNPNSLAIYRLPTLDPVCVGDDGHKDWIFSIAWISDTMAVSGSRDGSMGLWEVTDDVLTKSDARHNVSRVPVYAHITHKALKDIPKEDTNPDNCKVRALAFNNKNKELGAVSLDGYFHLWKAENTLSKLLSTKLPYCRENVCLAYGSEWSVYAVGSQAHVSFLDPRQPSYNVKSVCSRERGSGIRSVSFYEHIITVGTGQGSLLFYDIRAQRFLEERLSACYGSKPRLAGENLKLTTGKGWLNHDETWRNYFSDIDFFPNAVYTHCYDSSGTKLFVAGGPLPSGLHGNYAGLWS

SEQ ID NO: 902303 - protein, 257 aa, Homo sapiens
MAVSGSRDGSMGLWEVTDDVLTKSDARHNVSRVPVYAHITHKALKDIPKEDTNPDNCKVRALAFNNKNKELGAVSLDGYFHLWKAENTLSKLLSTKLPYCRENVCLAYGSEWSVYAVGSQAHVSFLDPRQPSYNVKSVCSRERGSGIRSVSFYEHIITVGTGQGSLLFYDIRAQRFLEERLSACYGSKPRLAGENLKLTTGKGWLNHDETWRNYFSDIDFFPNAVYTHCYDSSGTKLFVAGGPLPSGLHGNYAGLWS

SEQ ID NO: 902304 - protein, 453 aa, Homo sapiens
MARKVVSRKRKAPASPGAGSDAQGPQFGWDHSLHKRKRLPPVKRSLVYYLKNREVRLQNETSYSRVLHGYAAQQLPSLLKEREFHLGTLNKVFASQWLNHRQVVCGTKCNTLFVVDVQTSQITKIPILKDREPGGVTQQGCGIHAIELNPSRTLLATGGDNPNSLAIYRLPTLDPVCVGDDGHKDWIFSIAWISDTMAVSGSRDGSMGLWEVTDDVLTKSDARHNVSRVPVYAHITHKALKDIPKEDTNPDNCKVRALAFNNKNKELGAVSLDGYFHLWKAENTLSKLLSTKLPYCRENVCLAYGSEWSVYAVGSQAHVSFLDPRQPSYNVKSVCSRERGSGIRSVSFYEHIITVGTGQGSLLFYDIRAQRFLEERLSACYGSKPRLAGENLKLTTGKGWLNHDETWRNYFSDIDFFPNAVYTHCYDSSGTKLFVAGGPLPSGLHGNYAGLWS

SEQ ID NO: 902305 - protein, 453 aa, Homo sapiens; identical to SEQ ID NO: 902304

SEQ ID NO: 902306 - protein, 194 aa, Homo sapiens [sequence omitted]

SEQ ID NO: 902307 - protein, 453 aa, Homo sapiens; identical to SEQ ID NO: 902304

SEQ ID NO: 902308 - protein, 425 aa, Homo sapiens
MRPRAHKRKRLPPVKRSLVYYLKNREVRLQNETSYSRVLHGYAAQQLPSLLKEREFHLGTLNKVFASQWLNHRQVVCGTKCNTLFVVDVQTSQITKIPILKDREPGGVTQQGCGIHAIELNPSRTLLATGGDNPNSLAIYRLPTLDPVCVGDDGHKDWIFSIAWISDTMAVSGSRDGSMGLWEVTDDVLTKSDARHNVSRVPVYAHITHKALKDIPKEDTNPDNCKVRALAFNNKNKELGAVSLDGYFHLWKAENTLSKLLSTKLPYCRENVCLAYGSEWSVYAVGSQAHVSFLDPRQPSYNVKSVCSRERGSGIRSVSFYEHIITVGTGQGSLLFYDIRAQRFLEERLSACYGSKPRLAGENLKLTTGKGWLNHDETWRNYFSDIDFFPNAVYTHCYDSSGTKLFVAGGPLPSGLHGNYAGLWS

SEQ ID NO: 902309 - protein, 343 aa, Homo sapiens
MARKVVSRKRKAPASPGAGSDAQGPQFGWDHSLHKRKRLPPVKRSLVYYLKNREVRLQNETSYSRVLHGYAAQQLPSLLKEREFHLGTLNKVFASQWLNHRQVVCGTKCNTLFVVDVQTSQITKIPILKDREPGGVTQQGCGIHAIELNPSRTLLATGGDNPNSLAIYRLPTLDPVCVGDDGHKDWIFSIAWISDTMAVSGSRDGSMGLWEVTDDVLTKSDARHNVSRVPVYAHITHKALKDIPKEDTNPDNCKVRALAFNNKNKELGAVSLDGYFHLWKAENTLSKLLSTKLPYCRENVCLAYGSEWSVYAVGSQAHVSFLDPRQPSYNVKSVCSRERGSES

SEQ ID NO: 902310 - protein, 175 aa, Homo sapiens
MVISLLYFQLLSTKLPYCRENVCLAYGSEWSVYAVGSQAHVSFLDPRQPSYNVKSVCSRERGSGIRSVSFYEHIITVGTGQGSLLFYDIRAQRFLEERLSACYGSKPRLAGENLKLTTGKGWLNHDETWRNYFSDIDFFPNAVYTHCYDSSGTKLFVAGGPLPSGLHGNYAGLWS

SEQ ID NO: 902311 - protein, 382 aa, Homo sapiens
MGPTSVPLVKAHRSSVSDYVNYDIIVRHYNYTGKLNISADKENSIKLTSVVFILICCFIILENIFVLLTIWKTKKFHRPMYYFIGNLALSDLLAGVAYTANLLLSGATTYKLTPAQWFLREGSMFVALSASVFSLLAIAIERYITMLKMKLHNGSNNFRLFLLISACWVISLILGGLPIMGWNCISALSSCSTVLPLYHKHYILFCTTVFTLLLLSIVILYCRIYSLVRTRSRRLTFRKNISKASRSSEKSLALLKTVIIVLSVFIACWAPLFILLLLDVGCKVKTCDILFRAEYFLVLAVLNSGTNPIIYTLTNKEMRRAFIRIMSCCKCPSGDSAGKFKRPIIAGMEFSRSKSDNSSHPQKDEGDNPETIMSSGNVNSSS

SEQ ID NO: 902312 - protein, 441 aa, Homo sapiens
MAIRRLRFPRPSPAKEKLHKKPGSLIEPPLKPVKALSPRPLAFVWSSATPASWGHRVGTMGPTSVPLVKAHRSSVSDYVNYDIIVRHYNYTGKLNISADKENSIKLTSVVFILICCFIILENIFVLLTIWKTKKFHRPMYYFIGNLALSDLLAGVAYTANLLLSGATTYKLTPAQWFLREGSMFVALSASVFSLLAIAIERYITMLKMKLHNGSNNFRLFLLISACWVISLILGGLPIMGWNCISALSSCSTVLPLYHKHYILFCTTVFTLLLLSIVILYCRIYSLVRTRSRRLTFRKNISKASRSSEKSLALLKTVIIVLSVFIACWAPLFILLLLDVGCKVKTCDILFRAEYFLVLAVLNSGTNPIIYTLTNKEMRRAFIRIMSCCKCPSGDSAGKFKRPIIAGMEFSRSKSDNSSHPQKDEGDNPETIMSSGNVNSSS

SEQ ID NO: 902313 - protein, 382 aa, Homo sapiens; identical to SEQ ID NO: 902311

SEQ ID NO: 902314 - protein, 382 aa, Homo sapiens; identical to SEQ ID NO: 902311

SEQ ID NO: 902315 - protein, 474 aa, Homo sapiens
MAAASVSAASGSHLSNSFAEPSRSNGSMVRHSSSPYVVYPSDKPFLNSDLRRSPSKPTLAYPESNSRAIFSALKNLQDKIRRLELERIQAEESVKTLSRETIEYKKVLDEQIQERENSKNEESKHNQELTSQLLAAENKCNLLEKQLEYMRNMIKHAEMERTSVLEKQVSLERERQHDQTHVQSQLEKLDLLEQEYNKLTTMQALAEKKMQELEAKLHEEEQERKRMQAKAAELQTGLETNRLIFEDKATPCVPNARRIKKKKSKPPEKSTSPSHAVVANVQLVLHLMKQHSKALCNDRVINSIPLAKQVSSRGGKSKKLSVTPPSSNGINEELSEVLQTLQDEFGQMSFDHQQLAKLIQESPTVELKDKLECELEALVGRMEAKANQITKVRKYQAQLEKQKLEKQKKELKATKKTLDEERNSSSRSGITGTTNKKDFMKLRPGEKRRKNLQLLKDMQSIQNSLQSSSLCWDY

SEQ ID NO: 902316 - protein, 500 aa, Homo sapiens
MAAASVSAASGSHLSNSFAEPSRSNGSMVRHSSSPYVVYPSDKPFLNSDLRRSPSKPTLAYPESNSRAIFSALKNLQDKIRRLELERIQAEESVKTLSRETIEYKKVLDEQIQERENSKNEESKHNQELTSQLLAAENKCNLLEKQLEYMRNMIKHAEMERTSVLEKQVSLERERQHDQTHVQSQLEKLDLLEQEYNKLTTMQALAEKKMQELEAKLHEEEQERKRMQAKAAELQTGLETNRLIFEDKATPCVPNARRIKKKKSKPPEKKSSRNYFGAQPHYRLCLGDMPFVAGKSTSPSHAVVANVQLVLHLMKQHSKALCNDRVINSIPLAKQVSSRGGKSKKLSVTPPSSNGINEELSEVLQTLQDEFGQMSFDHQQLAKLIQESPTVELKDKLECELEALVGRMEAKANQITKVRKYQAQLEKQKLEKQKKELKATKKTLDEERNSSSRSGITGTTNKKDFMKLRPGEKRRKNLQLLKDMQSIQNSLQSSSLCWDY

SEQ ID NO: 902317 - protein, 500 aa, Homo sapiens; identical to SEQ ID NO: 902316

SEQ ID NO: 902318 - protein, 500 aa, Homo sapiens; identical to SEQ ID NO: 902316

SEQ ID NO: 902319 - protein, 438 aa, Homo sapiens
MAAASVSAASGSHLSNSFAEPSRSNGSMVRHSSSPYVVYPSDKPFLNSDLRRSPSKPTLAYPESNSRAIFSALKNLQDKIRRLELERIQAEESVKTLSRETIEYKKVLDEQIQERENSKNEESKHNQELTSQLLAAENKCNLLEKQLEYMRNMIKHAEMERTSVLEKQVSLERERQHDQTHVQSQLEKLDLLEQEYNKLTTMQALAEKKMQELEAKLHEEEQERKRMQAKAAESTSPSHAVVANVQLVLHLMKQHSKALCNDRVINSIPLAKQVSSRGGKSKKLSVTPPSSNGINEELSEVLQTLQDEFGQMSFDHQQLAKLIQESPTVELKDKLECELEALVGRMEAKANQITKVRKYQAQLEKQKLEKQKKELKATKKTLDEERNSSSRSGITGTTNKKDFMKLRPGEKRRKNLQLLKDMQSIQNSLQSSSLCWDY

SEQ ID NO: 902320 - protein, 348 aa, Homo sapiens
MIKHAEMERTSVLEKQVSLERERQHDQTHVQSQLEKLDLLEQEYNKLTTMQALAEKKMQELEAKLHEEEQERKRMQAKAAELQTGLETNRLIFEDKATPCVPNARRIKKKKSKPPEKKSSRNYFGAQPHYRLCLGDMPFVAGKSTSPSHAVVANVQLVLHLMKQHSKALCNDRVINSIPLAKQVSSRGGKSKKLSVTPPSSNGINEELSEVLQTLQDEFGQMSFDHQQLAKLIQESPTVELKDKLECELEALVGRMEAKANQITKVRKYQAQLEKQKLEKQKKELKATKKTLDEERNSSSRSGITGTTNKKDFMKLRPGEKRRKNLQLLKDMQSIQNSLQSSSLCWDY

SEQ ID NO: 902321 - protein, 388 aa, Homo sapiens
WQKQKVEAEEGIKSYQERLLMKKETAAAVLESQVGDYMRNMIKHAEMERTSVLEKQVSLERERQHDQTHVQSQLEKLDLLEQEYNKLTTMQALAEKKMQELEAKLHEEEQERKRMQAKAAELQTGLETNRLIFEDKATPCVPNARRIKKKKSKPPEKKSSRNYFGAQPHYRLCLGDMPFVAGKSTSPSHAVVANVQLVLHLMKQHSKALCNDRVINSIPLAKQVSSRGGKSKKLSVTPPSSNGINEELSEVLQTLQDEFGQMSFDHQQLAKLIQESPTVELKDKLECELEALVGRMEAKANQITKVRKYQAQLEKQKLEKQKKELKATKKTLDEERNSSSRSGITGTTNKKDFMKLRPGEKRRKNLQLLKDMQSIQNSLQSSSLCWDY

SEQ ID NO: 902322 - protein, 270 aa, Homo sapiens
MAAASVSAASGSHLSNSFAEPSRSNGSMVRHSSSPYVVYPSDKPFLNSDLRRSPSKPTLAYPESNSRAIFSALKNLQDKIRRLELERIQAEESVKTLSRETIEYKKVLDEQIQERENSKNEESKHNQELTSQLLAAENKCNLLEKQLEYMRNMIKHAEMERTSVLEKQVSLERERQHDQTHVQSQLEKLDLLEQEYNKLTTMQALAEKKMQELEAKLHEEEQERKRMQAKAAELQTGLETNRLIFEDKATPCVPNARRIKKKKSKPPEKV

SEQ ID NO: 902323 - protein, 270 aa, Homo sapiens; identical to SEQ ID NO: 902322

SEQ ID NO: 902324 - protein, 329 aa, Homo sapiens
MAAASVSAASGSHLSNSFAEPSRSNGSMVRHSSSPYVVYPSDKPFLNSDLRRSPSKPTLAYPESNSRAIFSALKNLQDKIRRLELERIQAEESVKTLSRETIEYKKVLDEQIQERENSKNEESKHNQELTSQLLAAENKCNLLEKQLEYMRNMIKHAEMERTSVLEKQVSLERERQHDQTHVQSQLEKLDLLEQEYNKLTTMQALAEKKMQELEAKLHEEEQERKRMQAKAAELQTGLETNRLIFEDKATPCVPNARRIKKKKSKPPEKKSSRNYFGAQPHYRLCLGDMPFVAGKIFFFFFFFTIRPSAGYPFFWEWGGQPAAGRGGSS

SEQ ID NO: 902325 - protein, 500 aa, Homo sapiens; identical to SEQ ID NO: 902316

SEQ ID NO: 902326 - protein, 270 aa, Homo sapiens; identical to SEQ ID NO: 902322

SEQ ID NO: 902327 - protein, 491 aa, Homo sapiens
MLTRIDNSFAEPSRSNGSMVRHSSSPYVVYPSDKPFLNSDLRRSPSKPTLAYPESNSRAIFSALKNLQDKIRRLELERIQAEESVKTLSRETIEYKKVLDEQIQERENSKNEESKHNQELTSQLLAAENKCNLLEKQLEYMRNMIKHAEMERTSVLEKQVSLERERQHDQTHVQSQLEKLDLLEQEYNKLTTMQALAEKKMQELEAKLHEEEQERKRMQAKAAELQTGLETNRLIFEDKATPCVPNARRIKKKKSKPPEKKSSRNYFGAQPHYRLCLGDMPFVAGKSTSPSHAVVANVQLVLHLMKQHSKALCNDRVINSIPLAKQVSSRGGKSKKLSVTPPSSNGINEELSEVLQTLQDEFGQMSFDHQQLAKLIQESPTVELKDKLECELEALVGRMEAKANQITKVRKYQAQLEKQKLEKQKKELKATKKTLDEERNSSSRSGITGTTNKKDFMKLRPGEKRRKNLQLLKDMQSIQNSLQSSSLCWDY

SEQ ID NO: 902328 - protein, 212 aa, Homo sapiens [sequence omitted]

SEQ ID NO: 902329 - protein, 187 aa, Homo sapiens [sequence omitted]

SEQ ID NO: 902330 - protein, 270 aa, Homo sapiens; identical to SEQ ID NO: 902322

SEQ ID NO: 902331 - protein, 224 aa, Homo sapiens [sequence omitted]

SEQ ID NO: 902332 - protein, 258 aa, Homo sapiens
PNKPFLQIYREGRGNECDYRKLEEMHQRFLVSERSKDDLQLRLTRAENRIKQLETDSSEEISRYQEMIQKLQNVLESERENCGLVSEQRLKLQQENKQLRKETESLRKIALEAQKKAKVKISTMEHEFSIKERGFEVQLREMEDSNRNSIVELRHLLATQQKAANRWKEETKKLTESAEIRINNLKSELSRQKLHTQELLSQLEMANEKVAENEKLILEHQEKANRLQRRLSQAEERAASASQQLQCALQCREEKQPP

SEQ ID NO: 902333 - protein, 268 aa, Homo sapiens
PNKPFLQIYREGRGNECDYRKLEEMHQRFLVSERSKDDLQLRLTRAENRIKQLETDSSEEISRYQEMIQKLQNVLESERENCGLVSEQRLKLQQENKQLRKETESLRKIALEAQKKAKVKISTMEHEFSIKERGFEVQLREMEDSNRNSIVELRHLLATQQKAANRWKEETKKLTESAEIRINNLKSELSRQKLHTQELLSQLEMANEKVAENEKLILEHQEKANRLQRRLSQAEERAASASQQVGSILLSLDNKQFKDKFFRSSQGT

SEQ ID NO: 902334 - protein, 258 aa, Homo sapiens; identical to SEQ ID NO: 902332

SEQ ID NO: 902335 - protein, 167 aa, Homo sapiens
APAAASATINKWYFMFSSVDSHILKKFSEISTMEHEFSIKERGFEVQLREMEDSNRNSIVELRHLLATQQKAANRWKEETKKLTESAEIRINNLKSELSRQKLHTQELLSQLEMANEKVAENEKLILEHQEKANRLQRRLSQAEERAASASQQLQCALQCREEKQPP

SEQ ID NO: 902336 - protein, 68 aa, Homo sapiens
MGFRLGTCGDESDQVELGSGKRSLSHWHLEACPRFLGRLADTLEPWGATGKLSWIGPYRGYLTRVVSS

SEQ ID NO: 902337 - protein, 125 aa, Homo sapiens
RTCWCDGRSKWTCDEKWYQRMLTRTGLLVIEFLQYAEYLLSSSRMAVEAVAQIVIGCRYSKRCPYSCWLTTEYPGHYGEEMDMISYNYDYYIRGATTTFSAVERDRQWKFIMCRMTEYDCEFANV

SEQ ID NO: 902338 - protein, 212 aa, Homo sapiens
RVTLFAKIPGSMDLSLLWVLLPLVTMAWGQYGDYGYPYQQYHDYSDDGWVNLNRQGFSYQCPQGQVIVAVRSIFSKKEGSDRQWNYACMPTPQSLGEPTECWWEEINRAGMEWYQTCSNNGLVAGFQSRYFESVLDREWQFYCCRYSKRCPYSCWLTTEYPGHYGEEMDMISYNYDYYIRGATTTFSAVERDRQWKFIMCRMTEYDCEFANV

SEQ ID NO: 902339 - protein, 212 aa, Homo sapiens; identical to SEQ ID NO: 902338

SEQ ID NO: 902340 - protein, 213 aa, Homo sapiens
RVTLFAKIPGSMDLSLLWVLLPLVTMAWGQYGDYGYPYQQYHDYSDDGWVNLNRQGFSYQCPQGQVIVAVRSIFSKKEGSDRQWNYACMPTPQSLGEPTECWWEEINRAGMEWYQTCSNNGLVAGFQSRYFESVLDREWQFYCCRYSKRCPYSCWLTTEYPGHYGEEMDMISYNYDYYIRGATTTFSAVERDRQWKSYRQSRDGPELDSLPRS

SEQ ID NO: 902341 - protein, 1078 aa, Homo sapiens
SNRNRSYENRCPLLARDPLCSKGKNCILADEMGLGKTIQSITFLSEIFLRGIHGPFLIIAPLSTITNWEREFRTWTEMNAIVYHGSQISRQMIQQYEMVYRDAQGNPLSGVFKFHVVITTFEMILADCPELKKIHWSCVIIDEAHRLKNRNCKLLEGLKLMALEHKVLLTGTPLQNSVEELFSLLNFLEPSQFPSETAFLEEFGDLKTEEQVKKLQSILKPMMLRRLKDDVEKNLAPKQETIIEVELTNIQKKYYRAILEKNFSFLTKGANQHNMPNLINTMMELRKCCNHPYLINGAEEKILEDFRKTHSPDAPDFQLQAMIQAAGKLVLIDKLLPKLIAGGHKVLIFSQMVRCLDILEDYLIQRRYTYERIDGRVRGNLRQAAIDRFCKPDSDRFVFLLCTRAGGLGINLTAADTCIIFDSDWNPQNDLQAQARCHRIGQSKAVKVYRLITRNSYEREMFDKASLKLGLDKAVLQDINRKGGTNGVQQLSKMEVEDLLRKGAYGALMDEEDEGSKFCEEDIDQILQRRTHTITIQSEGKGSTFAKASFVASGNRTDISLDDPNFWQKWAKIAELDTEAKNEKESLVIDRPRVRKQTKHYNSFEEDELMEFSELDSDSDERPTRSRRLNDKARRYLRAECFRVEKNLLIFGWGRWKDILTHGRFKWHLNEKDMEMICRALLVYCVKHYKGDEKIKSFIWELITPTKDGQAQTLQNHSGLSAPVPRGRKGKKTKNQLLIPELKDADWLATCNPEVVLHDDGYKKHLKQHCNKVLLRVRMLYYLKAEILGEAAEKAFEGSPARELDVPLPDIDYMEIPVDWWDAEADKSLLIGVFKHGYERYNAMRADPALCFLEKVGMPDEKSLSAEQGVTDGTSDIPERGNTDKEDNAEDKVDGLQKQTESSSDGGDGVFSEKKDDSRAAQDGSDPDKSPWPVSSALTARLRRLVTVYQRCNRKELCRPEILGPGNQGYWVQEEMFRRTSEMDLINKEAQKRWTRREQADFYRTVSSFGVVYDQEKKTFDWTQFRIISRLDKKSDESLEQYFYSFVAMCRNVCRLPTWKDGGPPDTTIYVRVSLQGV

SEQ ID NO: 902342 - protein, 834 aa, Homo sapiens
RIVTVRTRIAVLSLLEKNFSFLTKGANQHNMPNLINTMMELRKCCNHPYLINGAEEKILEDFRKTHSPDAPDFQLQAMIQAAGKLVLIDKLLPKLIAGGHKVLIFSQMVRCLDILEDYLIQRRYTYERIDGRVRGNLRQAAIDRFCKPDSDRFVFLLCTRAGGLGINLTAADTCIIFDSDWNPQNDLQAQARCHRIGQSKAVKVYRLITRNSYEREMFDKASLKLGLDKAVLQDINRKGGTNGVQQLSKMEVEDLLRKGAYGALMDEEDEGSKFCEEDIDQILQRRTHTITIQSEGKGSTFAKASFVASGNRTDISLDDPNFWQKWAKIAELDTEAKNEKESLVIDRPRVRKQTKHYNSFEEDELMEFSELDSDSDERPTRSRRLNDKARRYLRAECFRVEKNLLIFGWGRWKDILTHGRFKWHLNEKDMEMICRALLVYCVKHYKGDEKIKSFIWELITPTKDGQAQTLQNHSGLSAPVPRGRKGKKTKNQLLIPELKDADWLATCNPEVVLHDDGYKKHLKQHCNKVLLRVRMLYYLKAEILGEAAEKAFEGSPARELDVPLPDIDYMEIPVDWWDAEADKSLLIGVFKHGYERYNAMRADPALCFLEKVGMPDEKSLSAEQGVTDGTSDIPERGNTDKEDNAEDKVDGLQKQTESSSDGGDGVFSEKKDDSRAAQDGSDPDKSPWPVSSALTARLRRLVTVYQRCNRKELCRPEILGPGNQGYWVQEEMFRRTSEMDLINKEAQKRWTRREQADFYRTVSSFGVVYDQEKKTFDWTQFRIISRLDKKSDESLEQYFYSFVAMCRNVCRLPTWKDGGPPDTTIYVRVSLQGV

SEQ ID NO: 902343 - protein, 807 aa, Homo sapiens
SNRNRSYENRCPLLARDPLCSKGKNCILADEMGLGKTIQSITFLSEIFLRGIHGPFLIIAPLSTITNWEREFRTWTEMNAIVYHGSQISRQMIQQYEMVYRDAQGNPLSGVFKFHVVITTFEMILADCPELKKIHWSCVIIDEAHRLKNRNCKLLEGLKLMALEHKVLLTGTPLQNSVEELFSLLNFLEPSQFPSETAFLEEFGDLKTEEQTKDLLEDKAHIFSQVVFVVLTSTMSGIIVNSKWFKVKKLQSILKPMMLRRLKDDVEKNLAPKQETIIEVELTNIQKKYYRAILEKNFSFLTKGANQHNMPNLINTMMELRKCCNHPYLINGAEEKILEDFRKTHSPDAPDFQLQAMIQAAGKLVLIDKLLPKLIAGGHKVLIFSQMVRCLDILEDYLIQRRYTYERIDGRVRGNLRQAAIDRFCKPDSDRFVFLLCTRAGGLGINLTAADTCIIFDSDWNPQNDLQAQARCHRIGQSKAVKVYRLITRNSYEREMFDKASLKLGLDKAVLQDINRKGGTNGVQQLSKMEVEDLLRKGAYGALMDEEDEGSKFCEEDIDQILQRRTHTITIQSEGKGSTFAKASFVASGNRTDISLDDPNFWQKWAKIAELDTEAKNEKESLVIDRPRVRKQTKHYNSFEEDELMEFSELDSDSDERPTRSRRLNDKARRYLRAECFRVEKNLLIFGWGRWKDILTHGRFKWHLNEKDMEMICRALLVYCVKHYKGDEKIKSFIWELITPTKDGQAQTLQNHSGLSAPVPRGRKGKKTKNQLLIPELKDADWLATCNPEVVLHDDGYKKHLKQHCNK

SEQ ID NO: 902344 - protein, 471 aa, Homo sapiens
SNRNRSYENRCPLLARDPLCSKGKNCILADEMGLGKTIQSITFLSEIFLRGIHGPFLIIAPLSTITNWEREFRTWTEMNAIVYHGSQISRQMIQQYEMVYRDAQGNPLSGVFKFHVVITTFEMILADCPELKKIHWSCVIIDEAHRLKNRNCKLLEGLKLMALEHKVLLTGTPLQNSVEELFSLLNFLEPSQFPSETAFLEEFGDLKTEEQTKDLLEDKAHIFSQVVFVVLTSTMSGIIVNSKWFKVKKLQSILKPMMLRRLKDDVEKNLAPKQETIIEVELTNIQKKYYRAILEKNFSFLTKGANQHNMPNLINTMMELRKCCNHPYLINGAEEKILEDFRKTHSPDAPDFQLQAMIQAAGKLVLIDKLLPKLIAGGHKVLIFSQMVRCLDILEDYLIQRRYTYERIDGRVRGNLRQAAIDRFCKPDSDRFVFLLCTRAGGLGINLTAAEFHHTGGRKERTAILVRTGSH

SEQ ID NO: 902345 - protein, 496 aa, Homo sapiens
SNRNRSYENRCPLLARDPLCSKGKNCILADEMGLGKTIQSITFLSEIFLRGIHGPFLIIAPLSTITNWEREFRTWTEMNAIVYHGSQISRQMIQQYEMVYRDAQGNPLSGVFKFHVVITTFEMILADCPELKKIHWSCVIIDEAHRLKNRNCKLLEGLKLMALEHKVLLTGTPLQNSVEELFSLLNFLEPSQFPSETAFLEEFGDLKTEEQTKDLLEDKAHIFSQVVFVVLTSTMSGIIVNSKWFKVKKLQSILKPMMLRRLKDDVEKNLAPKQETIIEVELTNIQKKYYRAILEKNFSFLTKGANQHNMPNLINTMMELRKCCNHPYLINGAEEKILEDFRKTHSPDAPDFQLQAMIQAAGKLVLIDKLLPKLIAGGHKVLIFSQMVRCLDILEDYLIQRRYTYERIDGRVRGNLRQAAIDRFCKPDSDRFVFLLCTRAGGLGINLTAADTCIIFDSDWNPQNDLQVTTRMIAVYLSCPGSQNIMIGPGLATEHP

SEQ ID NO: 902346 - protein, 496 aa, Homo sapiens; identical to SEQ ID NO: 902345

SEQ ID NO: 902347 - protein, 300 aa, Homo sapiens
MLYYLKAEILGEAAEKAFEGSPARELDVPLPDIDYMEIPVDWWDAEADKSLLIGVFKHGYERYNAMRADPALCFLEKVGMPDEKSLSAEQGVTDGTSDIPERGNTDKEDNAEDKVDGLQKQTESSSDGGDGVFSEKKDDSRAAQDGSDPDKSPWPVSSALTARLRRLVTVYQRCNRKELCRPEILGPGNQGYWVQEEMFRRTSEMDLINKEAQKRWTRREQADFYRTVSSFGVVYDQEKKTFDWTQFRIISRLDKKSDESLEQYFYSFVAMCRNVCRLPTWKDGGPPDTTIYVRVSLQGV

SEQ ID NO: 902348 - protein, 1113 aa, Homo sapiens
SNRNRSYENRCPLLARDPLCSKGKNCILADEMGLGKTIQSITFLSEIFLRGIHGPFLIIAPLSTITNWEREFRTWTEMNAIVYHGSQISRQMIQQYEMVYRDAQGNPLSGVFKFHVVITTFEMILADCPELKKIHWSCVIIDEAHRLKNRNCKLLEGLKLMALEHKVLLTGTPLQNSVEELFSLLNFLEPSQFPSETAFLEEFGDLKTEEQTKDLLEDKAHIFSQVVFVVLTSTMSGIIVNSKWFKVKKLQSILKPMMLRRLKDDVEKNLAPKQETIIEVELTNIQKKYYRAILEKNFSFLTKGANQHNMPNLINTMMELRKCCNHPYLINGAEEKILEDFRKTHSPDAPDFQLQAMIQAAGKLVLIDKLLPKLIAGGHKVLIFSQMVRCLDILEDYLIQRRYTYERIDGRVRGNLRQAAIDRFCKPDSDRFVFLLCTRAGGLGINLTAADTCIIFDSDWNPQNDLQAQARCHRIGQSKAVKVYRLITRNSYEREMFDKASLKLGLDKAVLQDINRKGGTNGVQQLSKMEVEDLLRKGAYGALMDEEDEGSKFCEEDIDQILQRRTHTITIQSEGKGSTFAKASFVASGNRTDISLDDPNFWQKWAKIAELDTEAKNEKESLVIDRPRVRKQTKHYNSFEEDELMEFSELDSDSDERPTRSRRLNDKARRYLRAECFRVEKNLLIFGWGRWKDILTHGRFKWHLNEKDMEMICRALLVYCVKHYKGDEKIKSFIWELITPTKDGQAQTLQNHSGLSAPVPRGRKGKKTKNQLLIPELKDADWLATCNPEVVLHDDGYKKHLKQHCNKVLLRVRMLYYLKAEILGEAAEKAFEGSPARELDVPLPDIDYMEIPVDWWDAEADKSLLIGVFKHGYERYNAMRADPALCFLEKVGMPDEKSLSAEQGVTDGTSDIPERGNTDKEDNAEDKVDGLQKQTESSSDGGDGVFSEKKDDSRAAQDGSDPDKSPWPVSSALTARLRRLVTVYQRCNRKELCRPEILGPGNQGYWVQEEMFRRTSEMDLINKEAQKRWTRREQADFYRTVSSFGVVYDQEKKTFDWTQFRIISRLDKKSDESLEQYFYSFVAMCRNVCRLPTWKDGGPPDTTIYVRVSLQGV

SEQ ID NO: 902349 - protein, 1184 aa, Homo sapiens
SNRNRSYENRCPLLARDPLCSKGKNCILADEMGLGKTIQSITFLSEIFLRGIHGPFLIIAPLSTITNWEREFRTWTEMNAIVYHGSQISRQMIQQYEMVYRDAQGNPLSGVFKFHVVITTFEMILADCPELKKIHWSCVIIDEAHRLKNRNCKLLEGLKLMALEHKVLLTGTPLQNSVEELFSLLNFLEPSQFPSETAFLEEFGDLKTEEQTKDLLEDKAHIFSQVVFVVLTSTMSGIIVNSKWFKVKKLQSILKPMMLRRLKDDVEKNLAPKQETIIEVELTNIQKKYYRAILEKNFSFLTKGANQHNMPNLINTMMELRKCCNHPYLINGAEEKILEDFRKTHSPDAPDFQLQAMIQAAGKLVLIDKLLPKLIAGGHKVLIFSQMVRCLDILEDYLIQRRYTYERIDGRVRGNLRQAAIDRFCKPDSDRFVFLLCTRAGGLGINLTAADTCIIFDSDWNPQNDLQAQARCHRIGQSKAVKVYRLITRNSYEREMFDKASLKLGLDKAVLQDINRKGGTNGVQQLSKMEVEDLLRKGAYGALMDEEDEGSKFCEEDIDQILQRRTHTITIQSEGKGSTFAKASFVASGNRTDISLDDPNFWQKWAKIAELDTEAKNEKESLVIDRPRVRKQTKHYNSFEEDELMEFSELDSDSDERPTRSRRLNDKARRYLRAECFRVEKNLLIFGWGRWKDILTHGRFKWHLNEKDMEMICRALLVYCVKHYKGDEKIKSFIWELITPTKDGQAQTLQNHSGLSAPVPRGRKGKKTKNQLLIPELKDADWLATCNPEVVLHDDGYKKHLKQHCNKVLLRVRMLYYLKAEILGEAAEKAFEGSPARELDVPLPDIDYMEIPVDWWDAEADKSLLIGVFKHGYERYNAMRADPALCFLEKVGMPDEKSLSAEQGVTDGTSDIPERGNTDKEDNAEDKVDGLQKQTESSSDGGDGVFSEKKDDSRAAQDGSDPDKSPWPVSSALTARLRRLVTVYQRCNRKELCRPEILGPGNQGYWVQEEMFRRTSEMDLINKEAQKRWTRREQADFYRTVSSFGVVYDQEKKTFDWTQFRIISRLDKKSDESLEQYFYSFVAMCRNVCRLPTWKDGGPPDTTIYVEPITEERAARTLYRIELLRKVREQVLKCPQLHERLQLCRPSLYLPVWWECGKHDRDLLIGTAKHGLNRTDCYIMNDPQ

SEQ ID NO: 902350 - protein, 837 aa, Homo sapiens
SNRNRSYENRCPLLARDPLCSKGKNCILADEMGLGKTIQSITFLSEIFLRGIHGPFLIIAPLSTITNWEREFRTWTEMNAIVYHGSQISRQMIQQYEMVYRDAQGNPLSGVFKFHVVITTFEMILADCPELKKIHWSCVIIDEAHRLKNRNCKLLEGLKLMALEHKVLLTGTPLQNSVEELFSLLNFLEPSQFPSETAFLEEFGDLKTEEQTKDLLEDKAHIFSQVVFVVLTSTMSGIIVNSKWFKVKKLQSILKPMMLRRLKDDVEKNLAPKQETIIEVELTNIQKKYYRAILEKNFSFLTKGANQHNMPNLINTMMELRKCCNHPYLINGAEEKILEDFRKTHSPDAPDFQLQAMIQAAGKLVLIDKLLPKLIAGGHKVLIFSQMVRCLDILEDYLIQRRYTYERIDGRVRGNLRQAAIDRFCKPDSDRFVFLLCTRAGGLGINLTAADTCIIFDSDWNPQNDLQAQARCHRIGQSKAVKVYRLITRNSYEREMFDKASLKLGLDKAVLQDINRKGGTNGVQQLSKMEVEDLLRKGAYGALMDEEDEGSKFCEEDIDQILQRRTHTITIQSEGKGSTFAKASFVASGNRTDISLDDPNFWQKWAKIAELDTEAKNEKESLVIDRPRVRKQTKHYNSFEEDELMEFSELDSDSDERPTRSRRLNDKARRYLRAECFRVEKNLLIFGWGRWKDILTHGRFKWHLNEKDMEMICRALLVYCVKHYKGDEKIKSFIWELITPTKDGQAQTLQNHSGLSAPVPRGRKGKKTKNQLLIPELKDADWLATCNPEVVLHDDGYKKHLKQHCNKVLLRVRMLYYLKAEILGEAAEKAFEGSPAR

SEQ ID NO: 902351 - protein, 1048 aa, Homo sapiens
SNRNRSYENRCPLLARDPLCSKGKNCILADEMGLGKTIQSITFLSEIFLRGIHGPFLIIAPLSTITNWEREFRTWTEMNAIVYHGSQISRQMIQQYEMVYRDAQGNPLSGVFKFHVVITTFEMILADCPELKKIHWSCVIIDEAHRLKNRNCKLLEGLKLMALEHKVLLTGTPLQNSVEELFSLLNFLEPSQFPSETAFLEEFGDLKTEEQTKDLLEDKAHIFSQVVFVVLTSTMSGIIVNSKWFKVKKLQSILKPMMLRRLKDDVEKNLAPKQETIIEVELTNIQKKYYRAILEKNFSFLTKGANQHNMPNLINTMMELRKCCNHPYLINGAEEKILEDFRKTHSPDAPDFQLQAMIQAAGKLVLIDKLLPKLIAGGHKVLIFSQMVRCLDILEDYLIQRRLRPECHRIGQSKAVKVYRLITRNSYEREMFDKASLKLGLDKAVLQDINRKGGTNGVQQLSKMEVEDLLRKGAYGALMDEEDEGSKFCEEDIDQILQRRTHTITIQSEGKGSTFAKASFVASGNRTDISLDDPNFWQKWAKIAELDTEAKNEKESLVIDRPRVRKQTKHYNSFEEDELMEFSELDSDSDERPTRSRRLNDKARRYLRAECFRVEKNLLIFGWGRWKDILTHGRFKWHLNEKDMEMICRALLVYCVKHYKGDEKIKSFIWELITPTKDGQAQTLQNHSGLSAPVPRGRKGKKTKNQLLIPELKDADWLATCNPEVVLHDDGYKKHLKQHCNKVLLRVRMLYYLKAEILGEAAEKAFEGSPARELDVPLPDIDYMEIPVDWWDAEADKSLLIGVFKHGYERYNAMRADPALCFLEKVGMPDEKSLSAEQGVTDGTSDIPERGNTDKEDNAEDKVDGLQKQTESSSDGGDGVFSEKKDDSRAAQDGSDPDKSPWPVSSALTARLRRLVTVYQRCNRKELCRPEILGPGNQGYWVQEEMFRRTSEMDLINKEAQKRWTRREQADFYRTVSSFGVVYDQEKKTFDWTQFRIISRLDKKSDESLEQYFYSFVAMCRNVCRLPTWKDGGPPDTTIYVRVSLQGV

SEQ ID NO: 902352 - protein, 469 aa, Homo sapiens
MEFSELDSDSDERPTRSRRLNDKARRYLRAECFRVEKNLLIFGWGRWKDILTHGRFKWHLNEKDMEMICRALLVYCVKHYKGDEKIKSFIWELITPTKDGQAQTLQNHSGLSAPVPRGRKGKKTKNQLLIPELKDADWLATCNPEVVLHDDGYKKHLKQHCNKVLLRVRMLYYLKAEILGEAAEKAFEGSPARELDVPLPDIDYMEIPVDWWDAEADKSLLIGVFKHGYERYNAMRADPALCFLEKVGMPDEKSLSAEQGVTDGTSDIPERGNTDKEDNAEDKVDGLQKQTESSSDGGDGVFSEKKDDSRAAQDGSDPDKSPWPVSSALTARLRRLVTVYQRCNRKELCRPEILGPGNQGYWVQEEMFRRTSEMDLINKEAQKRWTRREQADFYRTVSSFGVVYDQEKKTFDWTQFRIISRLDKKSDESLEQYFYSFVAMCRNVCRLPTWKDGGPPDTTIYVRVSLQGV

SEQ ID NO: 902353 - protein, 174 aa, Homo sapiens
MFRRTSEMDLINKEAQKRWTRREQADFYRTVSSFGVVYDQEKKTFDWTQFRIISRLDKKSDESLEQYFYSFVAMCRNVCRLPTWKDGGPPDTTIYVEPITEERAARTLYRIELLRKVREQVLKCPQLHERLQLCRPSLYLPVWWECGKHDRDLLIGTAKHGLNRTDCYIMNDPQ

SEQ ID NO: 902354 - protein, 624 aa, Homo sapiens
MENSDSNDKGSGDQSAAQRRSQMDRLDREEAFYQFVNNLSEEDYRLMRDNNLLGTPGESTEEELLRRLQQIKEGPPPQNSDENRGGDSSDDVSNGDSIIDWLNSVRQTGNTTRSGQRGNQSWRAVSRTNPNSGDFRFSLEINVNRNNGSQNSENENEPSARRSSGENVENNSQRQVENPRSESTSARPSRSERNSTEALTEVPPTRGQRRARSRSPDHRRTRARAERSRSPLHPMSEIPRRSHHSISSQTFEHPLVNETEGSSRTRHHVTLRQQISGPELLSRGLFAASGTRNASQGAGSSDTAASGESTGSGQRPPTIVLDLQVRRVRPGEYRQRDSIASRTRSRSQTPNNTVTYESERGGFRRTFSRSERAGVRTYVSTIRIPIRRILNTGLSETTSVAIQTMLRQIMTGFGELSYFMYSDSDSEPTGSVSNRNMERAESRSGRGGSGGGSSSGSSSSSSSSSSSSSSSSSSSSPSSSSGGESSETSSDLFEGSNEGSSSSGSSGARREGRHRAPVTFDESGSLPFLSLAQFFLLNEDDDDQPRGLTKEQIDNLAMRSFGENDALKTCSVCITEYTEGNKLRKLPCSHEYHVHCIDRWLSENSTCPICRRAVLASGNRESVV

SEQ ID NO: 902355 - protein, 624 aa, Homo sapiens; identical to SEQ ID NO: 902354

SEQ ID NO: 902356 - protein, 624 aa, Homo sapiens; identical to SEQ ID NO: 902354

SEQ ID NO: 902357 - protein, 390 aa, Homo sapiens [sequence omitted]

SEQ ID NO: 902358 - protein, 624 aa, Homo sapiens; identical to SEQ ID NO: 902354

SEQ ID NO: 902359 - protein, 624 aa, Homo sapiens; identical to SEQ ID NO: 902354

SEQ ID NO: 902360 - protein, 632 aa, Homo sapiens
MENSDSNDKGSGDQSAAQRRSQMDRLDREEAFYQFVNNLSEEDYRLMRDNNLLGTPGESTEEELLRRLQQIKEGPPPQNSDENRGGDSSDDVSNGDSIIDWLNSVRQTGNTTRSGQRGNQSWRAVSRTNPNSGDFRFSLEINVNRNNGSQNSENENEPSARRSSGENVENNSQRQVENPRSESTSARPSRSERNSTEALTEVPPTRGQRRARSRSPDHRRTRARAERSRSPLHPMSEIPRRSHHSISSQTFEHPLVNETEGSSRTRHHVTLRQQISGPELLSRGLFAASGTRNASQGAGSSDTAASGESTGSGQRPPTIVLDLQVRRVRPGEYRQRDSIASRTRSRSQTPNNTVTYESERGGFRRTFSRSERAGVRTYVSTIRIPIRRILNTGLSETTSVAIQTMLRQIMTGFGELSYFMYSDSDSEPTGSVSNRNMERAESRSGRGGSGGGSSSGSSSSSSSSSSSSSSSSSSSSPSSSSGGESSETSSDLFEGSNEGSSSSGSSGARREGRHRAPVTFDESGSLPFLSLAQFFLLNEDDDDQPRGLTKEQIDNLAMRSFGENDALKTCSVCITEYTEGNKLRKLPCSHEYHVHCIDRWLSENSTCPICRRAVLASGNRGVWNLTLHMLLY

SEQ ID NO: 902361 - protein, 453 aa, Homo sapiens
MRIPVDASTSRRFTPPSTALSPGKMSEALPLGAPDAGAALAGKLRSGDRSMVEVLADHPGELVRTDSPNFLCSVLPTHWRCNKTLPIAFKVVALGDVPDGTLVTVMAGNDENYSAELRNATAAMKNQVARFNDLRFVGRSGRGKSFTLTITVFTNPPQVATYHRAIKITVDGPREPRRHRQKLDDQTKPGSLSFSERLSELEQLRRTAMRVSPHHPAPTPNPRASLNHSTAFNPQPQSQMQDTRQIQPSPPWSYDQSYQYLGSIASPSVHPATPISPGRASGMTTLSAELSSRLSTAPDLTAFSDPRQFPALPSISDPRMHYPGAFTYSPTPVTSGIGIGMSAMGSATRYHTYLPPPYPGSSQAQGGPFQASSPSYHLYYGASAGSYQFSMVGGERSPPRILPPCTNASTGSALLNPSLPNQSDVVEAEGSHSNSPTNMAPSARLEEAVWRPY

SEQ ID NO: 902362 - protein, 250 aa, Homo sapiens
MRIPVDASTSRRFTPPSTALSPGKMSEALPLGAPDAGAALAGKLRSGDRSMVEVLADHPGELVRTDSPNFLCSVLPTHWRCNKTLPIAFKVVALGDVPDGTLVTVMAGNDENYSAELRNATAAMKNQVARFNDLRFVGRSGRGKSFTLTITVFTNPPQVATYHRAIKITVDGPREPRRHRQKLDDQTKPGSLSFSERLSELEQLRRTAMRVSPHHPAPTPNPRASLNHSTAFNPQPQSQMQEEDTAPWRC

SEQ ID NO: 902363 - protein, 348 aa, Homo sapiens
MAGNDENYSAELRNATAAMKNQVARFNDLRFVGRSGRGKSFTLTITVFTNPPQVATYHRAIKITVDGPREPRRHRQKLDDQTKPGSLSFSERLSELEQLRRTAMRVSPHHPAPTPNPRASLNHSTAFNPQPQSQMQDTRQIQPSPPWSYDQSYQYLGSIASPSVHPATPISPGRASGMTTLSAELSSRLSTAPDLTAFSDPRQFPALPSISDPRMHYPGAFTYSPTPVTSGIGIGMSAMGSATRYHTYLPPPYPGSSQAQGGPFQASSPSYHLYYGASAGSYQFSMVGGERSPPRILPPCTNASTGSALLNPSLPNQSDVVEAEGSHSNSPTNMAPSARLEEAVWRPY

SEQ ID NO: 902364 - protein, 453 aa, Homo sapiens; identical to SEQ ID NO: 902361

SEQ ID NO: 902365 - protein, 88 aa, Homo sapiens
VGRSGRGKSFTLTITVFTNPPQVATYHRAIKITVDGPREPRSKCIHLGLVHPPGWYTLQAGILRDHVSDSLGSTFPPGGCQAPVKPKS

SEQ ID NO: 902366 - protein, 389 aa, Homo sapiens
MRIPVDASTSRRFTPPSTALSPGKMSEALPLGAPDAGAALAGKLRSGDRSMVEVLADHPGELVRTDSPNFLCSVLPTHWRCNKTLPIAFKVVALGDVPDGTLVTVMAGNDENYSAELRNATAAMKNQVARFNDLRFVGRSGRGKSFTLTITVFTNPPQVATYHRAIKITVDGPREPRNTRQIQPSPPWSYDQSYQYLGSIASPSVHPATPISPGRASGMTTLSAELSSRLSTAPDLTAFSDPRQFPALPSISDPRMHYPGAFTYSPTPVTSGIGIGMSAMGSATRYHTYLPPPYPGSSQAQGGPFQASSPSYHLYYGASAGSYQFSMVGGERSPPRILPPCTNASTGSALLNPSLPNQSDVVEAEGSHSNSPTNMAPSARLEEAVWRPY

SEQ ID NO: 902367 - protein, 480 aa, Homo sapiens
MASDSIFESFPSYPQCFMRECILGMNPSRDVHDASTSRRFTPPSTALSPGKMSEALPLGAPDAGAALAGKLRSGDRSMVEVLADHPGELVRTDSPNFLCSVLPTHWRCNKTLPIAFKVVALGDVPDGTLVTVMAGNDENYSAELRNATAAMKNQVARFNDLRFVGRSGRGKSFTLTITVFTNPPQVATYHRAIKITVDGPREPRRHRQKLDDQTKPGSLSFSERLSELEQLRRTAMRVSPHHPAPTPNPRASLNHSTAFNPQPQSQMQDTRQIQPSPPWSYDQSYQYLGSIASPSVHPATPISPGRASGMTTLSAELSSRLSTAPDLTAFSDPRQFPALPSISDPRMHYPGAFTYSPTPVTSGIGIGMSAMGSATRYHTYLPPPYPGSSQAQGGPFQASSPSYHLYYGASAGSYQFSMVGGERSPPRILPPCTNASTGSALLNPSLPNQSDVVEAEGSHSNSPTNMAPSARLEEAVWRPY

SEQ ID NO: 902368 - protein, 134 aa, Homo sapiens
MHYPGAFTYSPTPVTSGIGIGMSAMGSATRYHTYLPPPYPGSSQAQGGPFQASSPSYHLYYGASAGSYQFSMVGGERSPPRILPPCTNASTGSALLNPSLPNQSDVVEAEGSHSNSPTNMAPSARLEEAVWRPY

SEQ ID NO: 902369 - protein, 480 aa, Homo sapiens; identical to SEQ ID NO: 902367

SEQ ID NO: 902370 - protein, 480 aa, Homo sapiens; identical to SEQ ID NO: 902367

SEQ ID NO: 902371 - protein, 480 aa, Homo sapiens; identical to SEQ ID NO: 902367

SEQ ID NO: 902372 - protein, 480 aa, Homo sapiens; identical to SEQ ID NO: 902367

SEQ ID NO: 902373 - protein, 182 aa, Homo sapiens
MRIPVDASTSRRFTPPSTALSPGKMSEALPLGAPDAGAALAGKLRSGDRSMVEVLADHPGELVRTDSPNFLCSVLPTHWRCNKTLPIAFKVVALGDVPDGTLVTVMAGNDENYSAELRNATAAMKNQVARFNDLRFVGRSGRGKSFTLTITVFTNPPQVATYHRAIKITVDGPREPRTASKL

SEQ ID NO: 902374 - protein, 307 aa, Homo sapiens
MRIPVDASTSRRFTPPSTALSPGKMSEALPLGAPDAGAALAGKLRSGDRSMVEVLADHPGELVRTDSPNFLCSVLPTHWRCNKTLPIAFKVVALGDVPDGTLVTVMAGNDENYSAELRNATAAMKNQVARFNDLRFVGRSGRGKSFTLTITVFTNPPQVATYHRAIKITVDGPREPRRHRQKLDDQTKPGSLSFSERLSELEQLRRTAMRVSPHHPAPTPNPRASLNHSTAFNPQPQSQMQDTRQIQPSPPWSYDQSYQYLGSIASPSVHPATPISPGRASGMTTLSAELSSRLSNSCDYFRFHQMP

SEQ ID NO: 902375 - protein, 480 aa, Homo sapiens; identical to SEQ ID NO: 902367

SEQ ID NO: 902376 - protein, 529 aa, Homo sapiens
MRIPVDASTSRRFTPPSTALSPGKMSEALPLGAPDAGAALAGKLRSGDRSMVEVLADHPGELVRTDSPNFLCSVLPTHWRCNKTLPIAFKVVALGDVPDGTLVTVMAGNDENYSAELRNATAAMKNQVARFNDLRFVGRSGRGKSFTLTITVFTNPPQVATYHRAIKITVDGPREPRRHRQKLDDQTKPGSLSFSERLSELEQLRRTAMRVSPHHPAPTPNPRASLNHSTAFNPQPQSQMQDTRQIQPSPPWSYDQSYQYLGSIASPSVHPATPISPGRASGMTTLSAELSSRLSTAPDLTAFSDPRQFPALPSISDPRMHYPGAFTYSPTPVTSGIGIGMSAMGSATRYHTYLPPPYPGSSQAQGGPFQASSPSYHLYYGASAGSYQFSMVGGERSPPRILPPCTNASTGSALLNPSLPNQSDVVEAEGSHSNSPTNMGAGLLFATSPPGSRALGPATVLGPRAPDGQDLAVGQARAASCPRSPRRRRLLAPRPSRRCPRRRTSRVSAGPSTQGTRWKANRKIPGGKL

SEQ ID NO: 902377 - protein, 257 aa, Homo sapiens
MRIPVDASTSRRFTPPSTALSPGKMSEALPLGAPDAGAALAGKLRSGDRSMVEVLADHPGELVRTDSPNFLCSVLPTHWRCNKTLPIAFKVVALGDVPDGTLVTVMAGNDENYSAELRNATAAMKNQVARFNDLRFVGRSGRGKSFTLTITVFTNPPQVATYHRAIKITVDGPREPRRHRQKLDDQTKPGSLSFSERLSELEQLRRTAMRVSPHHPAPTPNPRASLNHSTAFNPQPQSQMQDTRQIQPSPPWSYDQS

SEQ ID NO: 902378 - protein, 480 aa, Homo sapiens; identical to SEQ ID NO: 902367

SEQ ID NO: 902379 - protein, 480 aa, Homo sapiens; identical to SEQ ID NO: 902367

SEQ ID NO: 902380 - protein, 171 aa, Homo sapiens [sequence omitted]

SEQ ID NO: 902381 - protein, 202 aa, Homo sapiens
CLAGQTPRRIPRILDNVVHPATPISPGRASGMTTLSAELSSRLSTAPDLTAFSDPRQFPALPSISDPRMHYPGAFTYSPTPVTSGIGIGMSAMGSATRYHTYLPPPYPGSSQAQGGPFQASSPSYHLYYGASAGSYQFSMVGGERSPPRILPPCTNASTGSALLNPSLPNQSDVVEAEGSHSNSPTNMAPSARLEEAVWRPY

SEQ ID NO: 902382 - protein, 480 aa, Homo sapiens; identical to SEQ ID NO: 902367

SEQ ID NO: 902383 - protein, 246 aa, Homo sapiens
MRIPVDASTSRRFTPPSTALSPGKMSEALPLGAPDAGAALAGKLRSGDRSMVEVLADHPGELVRTDSPNFLCSVLPTHWRCNKTLPIAFKVVALGDVPDGTLVTVMAGNDENYSAELRNATAAMKNQVARFNDLRFVGRSGRGKSFTLTITVFTNPPQVATYHRAIKITVDGPREPRRHRQKLDDQTKPGSLSFSERLSELEQLRRTAMRVSPHHPAPTPNPRASLNHSTAFNPQPQSQMQAHLSP

SEQ ID NO: 902384 - protein, 182 aa, Homo sapiens [sequence omitted]

SEQ ID NO: 902385 - protein, 365 aa, Homo sapiens
MASDSIFESFPSYPQCFMRECILGMNPSRDVHDASTSRRFTPPSTALSPGKMSEALPLGAPDAGAALAGKLRSGDRSMVEVLADHPGELVRTDSPNFLCSVLPTHWRCNKTLPIAFKVVALGDVPDGTLVTVMAGNDENYSAELRNATAAMKNQVARFNDLRFVGRSGRGKSFTLTITVFTNPPQVATYHRAIKITVDGPREPRRHRQKLDDQTKPGSLSFSERLSELEQLRRTAMRVSPHHPAPTPNPRASLNHSTAFNPQPQSQMQEIMDAANFEQFLQERIKVNGKAGNLGGGVVTIERSKSKITVTSEVPFSKRYLKYLTKKYLKKNNLRDWLRVVANSKESYELRYFQINQDEEEEEDED

SEQ ID NO: 902386 - protein, 519 aa, Homo sapiens
HPPPPSRRRLVPPGRTRSSVGSRENKNNRPRRRRHPNVASGAWGRGAECSERTGAAATRRGARAPWGRRAPAARGSPGAAASAPAASAASASRAARLGNEEQDAASVGPGPNGCGHLGAEEPSAAASGMDQCVTVERELEKVLHKFSGYGQLCERGLEELIDYTGGLKHEILQSHGQDAELSGTLSLVLTQCCKRIKDTVQKLASDHKDIHSSVSRVGKAIDKNFDSDISSVGIDGCWQADSQRLLNEVMVEHFFRQGMLDVAEELCQESGLSVDPSQKEPFVELNRILEALKVRVLRPALEWAVSNREMLIAQNSSLEFKLHRLYFISLLMGGTTNQREALQYAKNFQPFALNHQKDIQVLMGSLVYLRQGIENSPYVHLLDANQWADICDIFTRDACALLGLSVESPLSVSFSAGCVALPALINIKAVIEQRQCTGVWNQKDELPIEVDLGKKCWYHSIFACPILRQQTTDNNPPMKLVCGHIISRDALNKMFNGSKLKCPYCPMEQSPGDAKQIFF

SEQ ID NO: 902387 - protein, 519 aa, Homo sapiens; identical to SEQ ID NO: 902386

SEQ ID NO: 902388 - protein, 226 aa, Homo sapiens
HPPPPSRRRLVPPGRTRSSVGSRENKNNRPRRRRHPNVASGAWGRGAECSERTGAAATRRGARAPWGRRAPAARGSPGAAASAPAASAASASRAARLGNEEQDAASVGPGPNGCGHLGAEEPSAAASGMDQCVTVERELEKVLHKFSGYGQLCERGLEELIDYTGGLKHEILQSHGQDAELSGTLSLVLTQCCKRIKDTVQKLASDHKDIHSSVSRVGKAIDKDSL

SEQ ID NO: 902389 - protein, 270 aa, Homo sapiens
MVEHFFRQGMLDVAEELCQESGLSVDPSQKEPFVELNRILEALKVRVLRPALEWAVSNREMLIAQNSSLEFKLHRLYFISLLMGGTTNQREALQYAKNFQPFALNHQKDIQVLMGSLVYLRQGIENSPYVHLLDANQWADICDIFTRDACALLGLSVESPLSVSFSAGCVALPALINIKAVIEQRQCTGVWNQKDELPIEVDLGKKCWYHSIFACPILRQQTTDNNPPMKLVCGHIISRDALNKMFNGSKLKCPYCPMEQSPGDAKQIFF

SEQ ID NO: 902390 - protein, 270 aa, Homo sapiens; identical to SEQ ID NO: 902389

SEQ ID NO: 902391 - protein, 260 aa, Homo sapiens
MNDMNHEVMSLIWSEDLRVQDVRRLLQSAHPVRVNVVQYPELSDHEFIEEKENRLLQLCQRTMALPVGRGMFTLFSYHPVPTEPLPIPKLNLTGRAPPRNTTVDLNSGNIDVPPNMTSWASFHNGVAAGLKIAPASQIDSAWIVYNKPKHAELANEYAGFLMALGLNGHLTKLATLNIHDYLTKGHEMTSIGLLLGVSAAKLGTMDMSITRLLSIRIPALLPPTSTELDVPHNVQVAAVVGIGLVYQGTAHRHTAEVLLG

SEQ ID NO: 902392 - protein, 316 aa, Homo sapiens
MNDMNHEVMSLIWSEDLRVQDVRRLLQSAHPVRVNVVQYPELSDHEFIEEKENRLLQLCQRTMALPVGRGMFTLFSYHPVPTEPLPIPKLNLTGRAPPRNTTVDLNSGNIDVPPNMTSWASFHNGVAAGLKIAPASQIDSAWIVYNKPKHAELANEYAGFLMALGLNGHLTKLATLNIHDYLTKGHEMTSIGLLLGVSAAALLPPTSTELDVPHNVQVAAVVGIGLVYQGTAHRHTAEVLLAEIGRPPGPEMEYCTDRESYSLAAGLALGMVCLGHGSNLIGMSDLNVPEQLYQYMVGGRRRFQTGMHREKHKSPS

SEQ ID NO: 902393 - protein, 226 aa, Homo sapiens; identical to SEQ ID NO: 902388

SEQ ID NO: 902394 - protein, 519 aa, Homo sapiens; identical to SEQ ID NO: 902386

SEQ ID NO: 902395 - protein, 519 aa, Homo sapiens; identical to SEQ ID NO: 902386

SEQ ID NO: 902396 - protein, 519 aa, Homo sapiens; identical to SEQ ID NO: 902386

SEQ ID NO: 902397 - protein, 260 aa, Homo sapiens; identical to SEQ ID NO: 902391

SEQ ID NO: 902398 - protein, 411 aa, Homo sapiens
GICERSRLVVLSIALYILGDESLVSDESSQYLTRITIAPQKLQVEQEENRFSFRHSTSVSSLAERLVVWMTNVGFTLRDLETLPFGIALPIRDAIYHCREQPASDWPEAVCLLIGRQDLSKQACEGNLPKGKSVLSSDVPSGTETEEEDDGMNDMNHEVMSLIWSEDLRVQDVRRLLQSAHPVRVNVVQYPELSDHEFIEEKENRLLQLCQRTMALPVGRGMFTLFSYHPVPTEPLPIPKLNLTGRAPPRNTTVDLNSGNIDVPPNMTSWASFHNGVAAGLKIAPASQIDSAWIVYNKPKHAELANEYAGFLMALGLNGHLTKLATLNIHDYLTKGHEMTSIGLLLGVSAAKLGTMDMSITRLLSIRIPALLPPTSTELDVPHNVQVAAVVGIGLVYQGTAHRHTAEVLLG

SEQ ID NO: 902399 - protein, 145 aa, Homo sapiens
MTSWASFHNGVAAGLKIAPASQIDSAWIVYNKPKHAELANEYAGFLMALGLNGHLTKLATLNIHDYLTKGHEMTSIGLLLGVSAAKLGTMDMSITRLLSIRIPALLPPTSTELDVPHNVQVAAVVGIGLVYQGTAHRHTAEVLLG

SEQ ID NO: 902400 - protein, 648 aa, Homo sapiens
MEMEQEKMTMNKELSPDAAAYCCSACHGDETWSYNHPIRGRAKSRSLSASPALGSTKEFRRTRSLHGPCPVTTFGPKACVLQNPQTIIATPLSLASQLLPSPAVSHSGQGGVTGQVHVLPQPSDQGVLSGPRAARGQTAPQEEAVTQEEVEALVCGHTQRWVPGPVYDAAAGGSGWAQLSLRAGMGVGQATGHIQDPASQRLTWNKSPKSVLVIKKMRDASLLQPFKELCTHLMEARGAGGKGAWGAHGVGGASIHITAPRVGSAGGMSRLALCFQENMIVYVEKKVLEDPAIASDESFGAVKKKFCTFREDYDDISNQIDFIICLGGDGTLLYASSLFQGSVPPVMAFHLGSLGFLTPFSFENFQSQVTQVIEGNAAVVLRSRLKVRVVKELRGKKTAVHNGLGENGSQAAGLDMDVGKQAMQYQVLNEVVIDRGPSSYLSNVDVYLDGHLITTVQGDGVIVSTPTGSTAYAAAAGASMIHPNVPAIMITPICPHSLSFRPIVVPAGVELKIMLSPEARNTAWVSFDGRKRQEIRHGDSISITTSCYPLPSICVRDPVSDWFESLAQCLHWNVRKKQAHFEGGGGGGGGGLGQAPIQARILPLPSKRPLGTDQSACVCDRLSQWHGHFLSVAGLEPGSAFCPDQLFF

SEQ ID NO: 902401 - protein, 255 aa, Homo sapiens
  misc_feature (249)..(249): Xaa can be any naturally occurring amino acid
  misc_feature (251)..(251): Xaa can be any naturally occurring amino acid
SGRARRIAARRRRRRGPGGHGATGGQGAKGQVATAGGGAAAGPAGSVRHVDAPAGARGSERHQCFSDRSSHFLTMEMEQEKMTMNKELSPDAAAYCCSACHGDETWSYNHPIRGRAKSRSLSASPALGSTKEFRRTRSLHGPCPVTTFGPKACVLQNPQTIMHIQDPASQRLTWNKSPKSVLVIKKMRDASLLQPFKELCTHLMEENMIVYVEKKVLEDPAIASDESFGAVKKKEKFLVPFSKERIIEXTXFPQF

SEQ ID NO: 902402 - protein, 501 aa, Homo sapiens
MEQEKMTMNKELSPDAAAYCCSACHGDETWSYNHPIRGRAKSRSLSASPALGSTKEFRRTRSLHGPCPVTTFGPKACVLQNPQTIMHIQDPASQRLTWNKSPKSVLVIKKMRDASLLQPFKELCTHLMEENMIVYVEKKVLEDPAIASDESFGAVKKKFCTFREDYDDISNQIDFIICLGGDGTLLYASSLFQGSVPPVMAFHLGSLGFLTPFSFENFQSQVTQVIEGNAAVVLRSRLKVRVVKELRGKKTAVHNGLGENGSQAAGLDMDVGKQAMQYQVLNEVVIDRGPSSYLSNVDVYLDGHLITTVQGDGVIVSTPTGSTAYAAAAGASMIHPNVPAIMITPICPHSLSFRPIVVPAGVELKIMLSPEARNTAWVSFDGRKRQEIRHGDSISITTSCYPLPSICVRDPVSDWFESLAQCLHWNVRKKQAHFEGGGGGGGGGLGQAPIQARILPLPSKRPLGTDQSACVCDRLSQWHGHFLSVAGLEPGSAFCPDQLFF

SEQ ID NO: 902403 - protein, 381 aa, Homo sapiens
MSRLALCFQENMIVYVEKKVLEDPAIASDESFGAVKKKFCTFREDYDDISNQIDFIICLGGDGTLLYASSLFQGSVPPVMAFHLGSLGFLTPFSFENFQSQVTQVIEGNAAVVLRSRLKVRVVKELRGKKTAVHNGLGENGSQAAGLDMDVGKQAMQYQVLNEVVIDRGPSSYLSNVDVYLDGHLITTVQGDGVIVSTPTGSTAYAAAAGASMIHPNVPAIMITPICPHSLSFRPIVVPAGVELKIMLSPEARNTAWVSFDGRKRQEIRHGDSISITTSCYPLPSICVRDPVSDWFESLAQCLHWNVRKKQAHFEGGGGGGGGGLGQAPIQARILPLPSKRPLGTDQSACVCDRLSQWHGHFLSVAGLEPGSAFCPDQLFF

SEQ ID NO: 902404 - protein, 795 aa, Homo sapiens
MEQEKMTMNKELSPDAAAYCCSACHGDETWSYNHPIRGRAKSRSLSASPALGSTKEFRRTRSLHGPCPVTTFGPKACVLQNPQTIIATPLSLASQLLPSPAVSHSGQGGVTGQVHVLPQPSDQGVLSGPRAARGQTAPQEEAVTQEEVEALVCGHTQRWVPGPVYDAAAGGSGWAQLSLRAGMGVGQATGHIQDPASQRLTWNKSPKSVLVIKKMRDASLLQPFKELCTHLMEARGAGGKGAWGAHGVGGASIHITAPGDHGNHLKCWATAACLELGTEWGSAGCLGLCVPPWQAPDWVTNNELVGSWPGGREVRDQGATSDWAFLLCLLFRRAGVGVAAPRKATPEITALVNSWREPPPPSHLLKVLLPPGALVMKFQRETWGGGHAGHDARSLTTAPVSREPPCRRVGSAGGMSRLALCFQENMIVYVEKKVLEDPAIASDESFGAVKKKFCTFREDYDDISNQIDFIICLGGDGTLLYASSLFQGSVPPVMAFHLGSLGFLTPFSFENFQSQVTQVIEGNAAVVLRSRLKVRVVKELRGKKTAVHNGLGENGSQAAGLDMDVGKQAMQYQVLNEVVIDRGPSSYLSNVDVYLDGHLITTVQGDGVIVSTPTGSTAYAAAAGASMIHPNVPAIMITPICPHSLSFRPIVVPAGVELKIMLSPEARNTAWVSFDGRKRQEIRHGDSISITTSCYPLPSICVRDPVSDWFESLAQCLHWNVRKKQAHFEGGGGGGGGGLGQAPIQARILPLPSKRPLGTDQSACVCDRLSQWHGHFLSVAGLEPGSAFCPDQLFF

SEQ ID NO: 902405 - protein, 503 aa, Homo sapiens
MEMEQEKMTMNKELSPDAAAYCCSACHGDETWSYNHPIRGRAKSRSLSASPALGSTKEFRRTRSLHGPCPVTTFGPKACVLQNPQTIMHIQDPASQRLTWNKSPKSVLVIKKMRDASLLQPFKELCTHLMEENMIVYVEKKVLEDPAIASDESFGAVKKKFCTFREDYDDISNQIDFIICLGGDGTLLYASSLFQGSVPPVMAFHLGSLGFLTPFSFENFQSQVTQVIEGNAAVVLRSRLKVRVVKELRGKKTAVHNGLGENGSQAAGLDMDVGKQAMQYQVLNEVVIDRGPSSYLSNVDVYLDGHLITTVQGDGVIVSTPTGSTAYAAAAGASMIHPNVPAIMITPICPHSLSFRPIVVPAGVELKIMLSPEARNTAWVSFDGRKRQEIRHGDSISITTSCYPLPSICVRDPVSDWFESLAQCLHWNVRKKQAHFEGGGGGGGGGLGQAPIQARILPLPSKRPLGTDQSACVCDRLSQWHGHFLSVAGLEPGSAFCPDQLFF

SEQ ID NO: 902406 - protein, 205 aa, Homo sapiens
MEMEQEKMTMNKELSPDAAAYCCSACHGDETWSYNHPIRGRAKSRSLSASPALGSTKEFRRTRSLHGPCPVTTFGPKACVLQNPQTIMHIQDPASQRLTWNKSPKSVLVIKKMRDASLLQPFKELCTHLMEENMIVYVEKKVLEDPAIASDESFGAVKKKFCTFREDYDDISNQIDFIICLGGDGTLLYASSLFQGTQLLFSGVG

SEQ ID NO: 902407 - protein, 512 aa, Homo sapiens
MEMEQEKMTMNKELSPDAAAYCCSACHGDETWSYNHPIRGRAKSRSLSASPALGSTKEFRRTRSLHGPCPVTTFGPKACVLQNPQTIMHIQDPASQRLTWNKSPKSVLVIKKMRDASLLQPFKELCTHLMEENMIVYVEKKVLEDPAIASDESFGAVKKKFCTFREDYDDISNQIDFIICLGGDGTLLYASSLFQGSVPPVMAFHLGSLGFLTPFSFENFQSQVTQVIEGNAAVVLRSRLKVRVVKELRGKKTAVHNGLGENGSQAAGLDMDVGKQAMQYQVLNEVVIDRGPSSYLSNVDVYLDGHLITTVQGDGVIVSTPTGSTAYAAAAGASMIHPNVPAIMITPICPHSLSFRPIVVPAGVELKVRANDTPFPIMLSPEARNTAWVSFDGRKRQEIRHGDSISITTSCYPLPSICVRDPVSDWFESLAQCLHWNVRKKQAHFEGGGGGGGGGLGQAPIQARILPLPSKRPLGTDQSACVCDRLSQWHGHFLSVAGLEPGSAFCPDQLFF

SEQ ID NO: 902408 - protein, 319 aa, Homo sapiens [sequence omitted]

SEQ ID NO: 902409 - protein, 466 aa, Homo sapiens
MEMEQEKMTMNKELSPDAAAYCCSACHGDETWSYNHPIRGRAKSRSLSASPALGSTKEFRRTRSLHGPCPVTTFGPKACVLQNPQTIMHIQDPASQRLTWNKSPKSVLVIKKMRDASLLQPFKELCTHLMEENMIVYVEKKVLEDPAIASDESFGAVKKKFCTFREDYDDISNQIDFIICLGGDGTLLYASSLFQGSVPPVMAFHLGSLGFLTPFSFENFQSQVTQVIEGNAAVVLRSRLKVRVVKELRGKKTAVHNGLGENGSQAAGLDMDVGKQAMQYQVLNEVVIDRGPSSYLSNVDVYLDGHLITTVQGDGVIVSTPTGSTAYAAAAGASMIHPNVPAIMITPICPHSLSFRPIVVPAGVELKIMLSPEARNTAWVSFDGRKRQEIRHGDSISITTSCYPLPSICVRDPVSDWFESLAQCLHWNVRKKQAHFEGGGGGGGGGQTNLRVSVTACLSGTATSFL

SEQ ID NO: 902410 - protein, 503 aa, Homo sapiens; identical to SEQ ID NO: 902405

SEQ ID NO: 902411 - protein, 503 aa, Homo sapiens; identical to SEQ ID NO: 902405

SEQ ID NO: 902412 - protein, 507 aa, Homo sapiens
MEMEQEKMTMNKELSPDAAAYCCSACHGDETWSYNHPIRGRAKSRSLSASPALGSTKEFRRTRSLHGPCPVTTFGPKACVLQNPQTIMHIQDPASQRLTWNKSPKSVLVIKKMRDASLLQPFKELCTHLMEENMIVYVEKKVLEDPAIASDESFGAVKKKFCTFREDYDDISNQIDFIICLGGDGTLLYASSLFQGSVPPVMAFHLGSLGFLTPFSFENFQSQVTQVIEGNAAVVLRSRLKVRVVKELRGKKTAVHNGLGENGSQAAGLDMDVGKQAMQYQVLNEVVIDRGPSSYLSNVDVYLDGHLITTVQGDGVIVSTPTGSTAYAAAAGASMIHPNVPAIMITPICPHSLSFRPIVVPAGVELKIMLSPEARNTAWVSFDGRKRQEIRHGDSISITTSCYPLPSICVRDPVSDWFESLAQCLHWNVRKKQAHFEGGGGGGGGGLGQAPIQARILPLPSKRPLGTDQSACVCDRLSQWHGHFLSVAGLEPGSAFCPDQLNVDFCF

SEQ ID NO: 902413 - protein, 117 aa, Homo sapiens
WGGGHAGHDARSLTTAPVSREPPCRRVGSAGGMSRLALCFQENMIVYVEKKVLEDPAIASDESFGAVKKKFCTFREGGLSAALSLVSPAQFPAPLEASGTVALVIGVCALRHRGATV

SEQ ID NO: 902414 - protein, 577 aa, Homo sapiens
SGRARRIAARRRRRRGPGGHGATGGQGAKGQVATAGGGAAAGPAGSVRHVDAPAGARGSERHQCFSDRSSHFLTMEMEQEKMTMNKELSPDAAAYCCSACHGDETWSYNHPIRGRAKSRSLSASPALGSTKEFRRTRSLHGPCPVTTFGPKACVLQNPQTIMHIQDPASQRLTWNKSPKSVLVIKKMRDASLLQPFKELCTHLMEENMIVYVEKKVLEDPAIASDESFGAVKKKFCTFREDYDDISNQIDFIICLGGDGTLLYASSLFQGSVPPVMAFHLGSLGFLTPFSFENFQSQVTQVIEGNAAVVLRSRLKVRVVKELRGKKTAVHNGLGENGSQAAGLDMDVGKQAMQYQVLNEVVIDRGPSSYLSNVDVYLDGHLITTVQGDGVIVSTPTGSTAYAAAAGASMIHPNVPAIMITPICPHSLSFRPIVVPAGVELKIMLSPEARNTAWVSFDGRKRQEIRHGDSISITTSCYPLPSICVRDPVSDWFESLAQCLHWNVRKKQAHFEGGGGGGGGGLGQAPIQARILPLPSKRPLGTDQSACVCDRLSQWHGHFLSVAGLEPGSAFCPDQLFF

SEQ ID NO: 902415 - protein, 503 aa, Homo sapiens; identical to SEQ ID NO: 902405

SEQ ID NO: 902416 - protein, 370 aa, Homo sapiens
MIVYVEKKVLEDPAIASDESFGAVKKKFCTFREDYDDISNQIDFIICLGGDGTLLYASSLFQGSVPPVMAFHLGSLGFLTPFSFENFQSQVTQVIEGNAAVVLRSRLKVRVVKELRGKKTAVHNGLGENGSQAAGLDMDVGKQAMQYQVLNEVVIDRGPSSYLSNVDVYLDGHLITTVQGDGVIVSTPTGSTAYAAAAGASMIHPNVPAIMITPICPHSLSFRPIVVPAGVELKIMLSPEARNTAWVSFDGRKRQEIRHGDSISITTSCYPLPSICVRDPVSDWFESLAQCLHWNVRKKQAHFEGGGGGGGGGLGQAPIQARILPLPSKRPLGTDQSACVCDRLSQWHGHFLSVAGLEPGSAFCPDQLFF

SEQ ID NO: 902417 - protein, 322 aa, Homo sapiens
MEQEKMTMNKELSPDAAAYCCSACHGDETWSYNHPIRGRAKSRSLSASPALGSTKEFRRTRSLHGPCPVTTFGPKACVLQNPQTIMHIQDPASQRLTWNKSPKSVLVIKKMRDASLLQPFKELCTHLMEENMIVYVEKKVLEDPAIASDESFGAVKKKFCTFREDYDDISNQIDFIICLGGDGTLLYASSLFQGSVPPVMAFHLGSLGFLTPFSFENFQSQVTQVIEGNAAVVLRSRLKVRVVKELRGKKTAVHNGLGENGSQAAGLDMDVGKQAMQYQVLNEVVIDRGPSSYLSNVDVYLDGHLITTVQGDGKARSTVLGP

SEQ ID NO: 902418 - protein, 390 aa, Homo sapiens
MEMEQEKMTMNKELSPDAAAYCCSACHGDETWSYNHPIRGRAKSRSLSASPALGSTKEFRRTRSLHGPCPVTTFGPKACVLQNPQTIMHIQDPASQRLTWNKSPKSVLVIKKMRDASLLQPFKELCTHLMEENMIVYVEKKVLEDPAIASDESFGAVKKKFCTFREDYDDISNQIDFIICLGGDGTLLYASSLFQGSVPPVMAFHLGSLGFLTPFSFENFQSQVTQVIEGNAAVVLRSRLKVRVVKELRGKKTAVHNGLGENGSQAAGLDMDVGKQAMQYQVLNEVVIDRGPSSYLSNVDVYLDGHLITTVQGDGVIVSTPTGSTAYAAAAGASMIHPNVPAIMITPICPHSLSFRPIVVPAGVELKVRANDTPFPVCESFDPVQHKAGT

SEQ ID NO: 902419 - protein, 390 aa, Homo sapiens
MEMEQEKMTMNKELSPDAAAYCCSACHGDETWSYNHPIRGRAKSRSLSASPALGSTKEFRRTRSLHGPCPVTTFGPKACVLQNPQTIMHIQDPASQRLTWNKSPKSVLVIKKMRDASLLQPFKELCTHLMEENMIVYVEKKVLEDPAIASDESFGAVKKKFCTFREDYDDISNQIDFIICLGGDGTLLYASSLFQGSVPPVMAFHLGSLGFLTPFSFENFQSQVTQVIEGNAAVVLRSRLKVRVVKELRGKKTAVHNGLGENGSQAAGLDMDVGKQAMQYQVLNEVVIDRGPSSYLSNVDVYLDGHLITTVQGDGVIVSTPTGSTAYAAAAGASMIHPNVPAIMITPICPHSLSFRPIVVPAGVELKHQHHYLMLPAPLHLCAGPRERLV

SEQ ID NO: 902420 - protein, 205 aa, Homo sapiens; identical to SEQ ID NO: 902406

SEQ ID NO: 902421 - protein, 503 aa, Homo sapiens; identical to SEQ ID NO: 902405

SEQ ID NO: 902422 - protein, 503 aa, Homo sapiens; identical to SEQ ID NO: 902405

SEQ ID NO: 902423 - protein, 151 aa, Homo sapiens
PPGPAVALSRHPVLAVSLAPHRASPPLPGALPALPGPGRATPLSLASQLLPSPAVSHSGQGGVTGQVHVLPQPSDQGVLSGPRAARGQTAPQEEAVGLWGSLEGHAAFSAPPWEHAPSGLCVSGIITSRFPSPLWRGRASHASELPSSLIV

SEQ ID NO: 902424 - protein, 772 aa, Homo sapiens
MLSLKKYLTEGLLQFTILLSLIGVRVDVDTYLTSQLPPLREIILGPSSAYTQTQFHNLRNTLDGYGIHPKSIDLDNYFTARRLLSQVRALDRFQVPTTEVNAWLVHRDPEGSVSGSQPNSGLALESSSGLQDVTGPDNGVRESETEQGFGEDLEDLGAVAPPVSGDLTKEDIDLIDILWRQDIDLGAGREVFDYSHRQKEQDVEKELRDGGEQDTWAGEGAEALARNLLVDGETGESFPAQVPSGEDQTALSLEECLRLLEATCPFGENAEFPADISSITEAVPSESEPPALQNNLLSPLLTGTESPFDLEQQWQDLMSIMEMQAMEVNTSASEILYSAPPGDPLSTNYSLAPNTPINQNVSLHQASLGGCSQDFLLFSPEVESLPVASSSTLLPLAPSNSTSLNSTFGSTNLTGLFFPPQLNGTANDTAGPELPDPLGGLLDEAMLDEISLMDLAIEEGFNPVQASQLEEEFDSDSGLSLDSSHSPSSLSSSEGSSSSSSSSSSSSSSASSSASSSFSEEGAVGYSSDSETLDLEEAEGAVGYQPEYSKFCRMSYQDPAQLSCLPYLEHVGHNHTYNMAPSALDSADLPPPSALKKGSKEKQADFLDKQMSRDEHRARAMKIPFTNDKIINLPVEEFNELLSKYQLSEAQLSLIRDIRRRGKNKMAAQNCRKRKLDTILNLERDVEDLQRDKARLLREKVEFLRSLRQMKQKVQSLYQEVFGRLRDENGRPYSPSQYALQYAGDGSVLLIPRTMADQQARRQERKPKDRRK

SEQ ID NO: 902425 - protein, 742 aa, Homo sapiens
MLSLKKYLTEGLLQFTILLSLIGVRVDVDTYLTSQLPPLREIILGPSSAYTQTQFHNLRNTLDGYGIHPKSIDLDNYFTARRLLSQVRALDRFQVPTTEVNAWLVHRDPEGSVSGSQPNSGLALESSSGLQDVTGPDNGVRESETEQGFGEDLEDLGAVAPPVSGDLTKEDIDLIDILWRQDIDLGAGREVFDYSHRQKEQDVEKELRDGGEQDTWAGEGAEALARNLLVDGETGESFPAQFPADISSITEAVPSESEPPALQNNLLSPLLTGTESPFDLEQQWQDLMSIMEMQAMEVNTSASEILYSAPPGDPLSTNYSLAPNTPINQNVSLHQASLGGCSQDFLLFSPEVESLPVASSSTLLPLAPSNSTSLNSTFGSTNLTGLFFPPQLNGTANDTAGPELPDPLGGLLDEAMLDEISLMDLAIEEGFNPVQASQLEEEFDSDSGLSLDSSHSPSSLSSSEGSSSSSSSSSSSSSSASSSASSSFSEEGAVGYSSDSETLDLEEAEGAVGYQPEYSKFCRMSYQDPAQLSCLPYLEHVGHNHTYNMAPSALDSADLPPPSALKKGSKEKQADFLDKQMSRDEHRARAMKIPFTNDKIINLPVEEFNELLSKYQLSEAQLSLIRDIRRRGKNKMAAQNCRKRKLDTILNLERDVEDLQRDKARLLREKVEFLRSLRQMKQKVQSLYQEVFGRLRDENGRPYSPSQYALQYAGDGSVLLIPRTMADQQARRQERKPKDRRK

SEQ ID NO: 902426 - protein, 761 aa, Homo sapiens
MLSLKKYLTEGLLQFTILLSLIGVRVDVDTYLTSQLPPLREIILGPSSAYTQTQFHNLRNTLDGYGIHPKSIDLDNYFTARRLLSQVRALDRFQVPTTEVNAWLVHRDPEGSVSGSQPNSGLALESSSGLQDVTGPDNGVRESETEQGFGEDLEDLGAVAPPVSGDLTKEDIDLGAGREVFDYSHRQKEQDVEKELRDGGEQDTWAGEGAEALARNLLVDGETGESFPAQVPSGEDQTALSLEECLRLLEATCPFGENAEFPADISSITEAVPSESEPPALQNNLLSPLLTGTESPFDLEQQWQDLMSIMEMQAMEVNTSASEILYSAPPGDPLSTNYSLAPNTPINQNVSLHQASLGGCSQDFLLFSPEVESLPVASSSTLLPLAPSNSTSLNSTFGSTNLTGLFFPPQLNGTANDTAGPELPDPLGGLLDEAMLDEISLMDLAIEEGFNPVQASQLEEEFDSDSGLSLDSSHSPSSLSSSEGSSSSSSSSSSSSSSASSSASSSFSEEGAVGYSSDSETLDLEEAEGAVGYQPEYSKFCRMSYQDPAQLSCLPYLEHVGHNHTYNMAPSALDSADLPPPSALKKGSKEKQADFLDKQMSRDEHRARAMKIPFTNDKIINLPVEEFNELLSKYQLSEAQLSLIRDIRRRGKNKMAAQNCRKRKLDTILNLERDVEDLQRDKARLLREKVEFLRSLRQMKQKVQSLYQEVFGRLRDENGRPYSPSQYALQYAGDGSVLLIPRTMADQQARRQERKPKDRRK

SEQ ID NO: 902427 - protein, 621 aa, Homo sapiens
MLSLKKYLTEGLLQFTILLSLIGVRVDVDTYLTSQLPPLREIILGPSSAYTQTQFHNLRNTLDGYGIHPKSIDLDNYFTARRLLSQVRALDRFQVPTTEVNAWLVHRDPEGSVSGSQPNSGLALESSSGLQDVTGPDNGVRESETEQGFGEDLEDLGAVAPPVSGDLTKEDIDLIDILWRQDIDLGAGREVFDYSHRQKEQDVEKELRDGGEQDTWAGEGAEALARNLLVDGETGESFPAQFPADISSITEAVPSESEPPALQNNLLSPLLTGTESPFDLEQQWQDLMSIMEMQAMEVNTSASEILYSAPPGDPLSTNYSLAPNTPINQNVSLHQASLGGCSQDFLLFSPEVESLPVASSSTLLPLAPSNSTSLNSTFGSTNLTGLFFPPQLNGTANDTAGPELPDPLGGLLDEAMLDEISLMDLAIEEGFNPVQASQLEEEFDSDSGLSLDSSHSPSSLSSSEGSSSSSSSSSSSSSSASSSASSSFSEEGAVGYSSDSETLDLEEAEGAVGYQPEYSKFCRMSYQDPAQLSCLPYLEHVGHNHTYNMAPSALDSADLPPPSALKKGSKEKQADFLDKQMSRDEHRARAMKIPFTNDKIINLPVEELCGAKADRGEGMDL

SEQ ID NO: 902428 - protein, 270 aa, Homo sapiens
EQLRVRYSYGGGTATGEVQLRVRYSSDSETLDLEEAEGAVGYQPEYSKFCRMSYQDPAQLSCLPYLEHVGHNHTYNMAPSALDSADLPPPSALKKGSKEKQADFLDKQMSRDEHRARAMKIPFTNDKIINLPVEEFNELLSKYQLSEAQLSLIRDIRRRGKNKMAAQNCRKRKLDTILNLERDVEDLQRDKARLLREKVEFLRSLRQMKQKVQSLYQEVFGRLRDENGRPYSPSQYALQYAGDGSVLLIPRTMADQQARRQERKPKDRRK

SEQ ID NO: 902429 - protein, 742 aa, Homo sapiens; identical to SEQ ID NO: 902425

SEQ ID NO: 902430 - protein, 742 aa, Homo sapiens; identical to SEQ ID NO: 902425

SEQ ID NO: 902431 - protein, 742 aa, Homo sapiens; identical to SEQ ID NO: 902425

SEQ ID NO: 902432 - protein, 772 aa, Homo sapiens; identical to SEQ ID NO: 902424

SEQ ID NO: 902433 - protein, 772 aa, Homo sapiens; identical to SEQ ID NO: 902424

SEQ ID NO: 902434 - protein, 742 aa, Homo sapiens; identical to SEQ ID NO: 902425

SEQ ID NO: 902435 - protein, 742 aa, Homo sapiens; identical to SEQ ID NO: 902425

SEQ ID NO: 902436 - protein, 742 aa, Homo sapiens; identical to SEQ ID NO: 902425

SEQ ID NO: 902437 - protein, 772 aa, Homo sapiens; identical to SEQ ID NO: 902424

SEQ ID NO: 902438 - protein, 742 aa, Homo sapiens; identical to SEQ ID NO: 902425

SEQ ID NO: 902439 - protein, 601 aa, Homo sapiens
MLSLKKYLTEGLLQFTILLSLIGVRVDVDTYLTSQLPPLREIILGPSSAYTQTQFHNLRNTLDGYGIHPKSIDLDNYFTARRLLSQVRALDRFQVPTTEVNAWLVHRDPEGSVSGSQPNSGLALESSSGLQDVTGPDNGVRESETEQGFGEDLEDLGAVAPPVSGDLTKEDIDLIDILWRQDIDLGAGREVFDYSHRQKEQDVEKELRDGGEQDTWAGEGAEALARNLLVDGETGESFPAQFPADISSITEAVPSESEPPALQNNLLSPLLTGTESPFDLEQQWQDLMSIMEMQAMEVNTSASEILYSAPPGDPLSTNYSLAPNTPINQNVSLHQASLGGCSQDFLLFSPEVESLPVASSSTLLPLAPSNSTSLNSTFGSTNLTGLFFPPQLNGTANDTAGPELPDPLGGLLDEAMLDEISLMDLAIEEGFNPVQASQLEEEFDSDSGLSLDSSHSPSSLSSSEGSSSSSSSSSSSSSSASSSASSSFSEEGAVGYSSDSETLDLEEAEGAVGYQPEYSKFCRMSYQDPAQLSCLPYLEHVGHNHTYNMAPSALDSADLPPPSALKKGSKEKQADFLDKQMSRDEHRARAMKIPFTNDKIK

SEQ ID NO: 902440 - protein, 84 aa, Homo sapiens
MLSLKKYLTEGLLQFTILLSLIGVRVDVDTYLTSQLPPLREIILGPSSAYTQTQFHNLRNTLDGYGIHPKSIDPDQLTGSSRST

SEQ ID NO: 902441 - protein, 772 aa, Homo sapiens; identical to SEQ ID NO: 902424

SEQ ID NO: 902442 - protein, 548 aa, Homo sapiens
MLSLKKYLTEGLLQFTILLSLIGVRVDVDTYLTSQLPPLREIILGPSSAYTQTQFHNLRNTLDGYGIHPKSIDLDNYFTARRLLSQVRALDRFQVPTTEVNAWLVHRDPEGSVSGSQPNSGLALESSSGLQDVTGPDNGVRESETEQGFGEDLEDLGAVAPPVSGDLTKEDIDLIDILWRQDIDLGAGREVFDYSHRQKEQDVEKELRDGGEQDTWAGEGAEALARNLLVDGETGESFPAQFPADISSITEAVPSESEPPALQNNLLSPLLTGTESPFDLEQQWQDLMSIMEMQAMEVNTSASEILYSAPPGDPLSTNYSLAPNTPINQNVSLHQASLGGCSQDFLLFSPEVESLPVASSSTLLPLAPSNSTSLNSTFGSTNLTGLFFPPQLNGTANDTAGPELPDPLGGLLDEAMLDEISLMDLAIEEGFNPVQASQLEEEFDSDSGLSLDSSHSPSSLSSSEGSSSSSSSSSSSSSSASSSASSSFSEEGAVGYSSDSETLDLEEAEGAVGYQPEYSKFCRMSYQDPVSRPATTQCPQERQQGEAG

SEQ ID NO: 902443 - protein, 299 aa, Homo sapiens
YYLIQIVSSSEAGEQLCSSLLVHSSSSSSSSSSSSSASSSASSSFSEEGAVGYSSDSETLDLEEAEGAVGYQPEYSKFCRMSYQDPAQLSCLPYLEHVGHNHTYNMAPSALDSADLPPPSALKKGSKEKQADFLDKQMSRDEHRARAMKIPFTNDKIINLPVEEFNELLSKYQLSEAQLSLIRDIRRRGKNKMAAQNCRKRKLDTILNLERDVEDLQRDKARLLREKVEFLRSLRQMKQKVQSLYQEVFGRLRDENGRPYSPSQYALQYAGDGSVLLIPRTMADQQARRQERKPKDRRK

SEQ ID NO: 902444 - protein, 742 aa, Homo sapiens; identical to SEQ ID NO: 902425

SEQ ID NO: 902445 - protein, 742 aa, Homo sapiens; identical to SEQ ID NO: 902425

SEQ ID NO: 902446 - protein, 77 aa, Homo sapiens
CYARNYWESRSELMCLVLASVLVVRGHVTRAECACMWSAGVCDSLDKHVSLETPLVSVEEAGHSDPRRKACSSSQRK

SEQ ID NO: 902447 - protein, 742 aa, Homo sapiens; identical to SEQ ID NO: 902425

SEQ ID NO: 902448 - protein, 742 aa, Homo sapiens; identical to SEQ ID NO: 902425

SEQ ID NO: 902449 - protein, 742 aa, Homo sapiens; identical to SEQ ID NO: 902425

SEQ ID NO: 902450 - protein, 772 aa, Homo sapiens; identical to SEQ ID NO: 902424

SEQ ID NO: 902451 - protein, 742 aa, Homo sapiens; identical to SEQ ID NO: 902425

SEQ ID NO: 902452 - protein, 298 aa, Homo sapiens
MLSLKKYLTEGLLQFTILLSLIGVRVDVDTYLTSQLPPLREIILGPSSAYTQTQFHNLRNTLDGYGIHPKSIDLDNYFTARRLLSQVRALDRFQVPTTEVNAWLVHRDPEGSVSGSQPNSGLALESSSGLQDVTGPDNGVRESETEQGFGEDLEDLGAVAPPVSGDLTKEDIDLIDILWRQDIDLGAGREVFDYSHRQKEQDVEKELRDGGEQDTWAGEGAEALARNLLVDGETGESFPAQFPADISSITEAVPSESEPPALQNNLLSPLLTGTESPFDLEQQWQDLMSIMEMQAGVQ

SEQ ID NO: 902453 - protein, 55 aa, Homo sapiens
MNSEVPMNSEVPMNSEVPMNSEVPMNSEVPMNSEPRYFIGTISSRGPCITDIIRV

SEQ ID NO: 902454 - protein, 481 aa, Homo sapiens
EKWPGLCRQRRPGAERDRALAEACRHGPAPPPPPVTRAARAVSVMALAGAPAGGPCAPALEALLGAGALRLLDSSQIVIISAAQDASAPPAPTGPAAPAAGPCDPDLLLFATPQAPRPTPSAPRPALGRPPVKRRLDLETDHQYLAESSGPARGRGRHPGKGVKSPGEKSRYETSLNLTTKRFLELLSHSADGVVDLNWAAEVLKVQKRRIYDITNVLEGIQLIAKKSKNHIQWLGSHTTVGVGGRLEGLTQDLRQLQESEQQLDHLMNICTTQLRLLSEDTDSQRLAYVTCQDLRSIADPAEQMVMVIKAPPETQLQAVDSSENFQISLKSKQGPIDVFLCPEETVGGISPGKTPSQEVTSEEENRATDSATIVSPPPSSPPSSLTTDPSQSLLSLEQEPLLSRMGSLRAPVDEDRLSPLVAADSLLEHVREDFSGLLPEEFISLSPPHEALDYHFGLEEGEGIRDLFDCDFGDLTPLDF

SEQ ID NO: 902455 - protein, 294 aa, Homo sapiens
  misc_feature (1)..(2): Xaa can be any naturally occurring amino acid
  misc_feature (5)..(6): Xaa can be any naturally occurring amino acid
  misc_feature (14)..(14): Xaa can be any naturally occurring amino acid
  misc_feature (28)..(28): Xaa can be any naturally occurring amino acid
  misc_feature (31)..(32): Xaa can be any naturally occurring amino acid
  misc_feature (36)..(36): Xaa can be any naturally occurring amino acid
  misc_feature (48)..(48): Xaa can be any naturally occurring amino acid
  misc_feature (58)..(58): Xaa can be any naturally occurring amino acid
  misc_feature (75)..(75): Xaa can be any naturally occurring amino acid
  misc_feature (82)..(82): Xaa can be any naturally occurring amino acid
XXLLXXSAEGVVEXNWDAEVLKVQKRRXYKXXKVLXGIKLIEKKSKNXIKWLGKTKKXASADGYEGLKQDLRKMXKAKKWKXMNICTSNGCSQRTLTESLAYVTCQDLRSIADPAEQMVMVIKAPPETQLQAVDSSENFQISLKSKQGPIDVFLCPEETVGGISPGKTPSQEVTSEEENRATDSATIVSPPPSSPPSSLTTDPSQSLLSLEQEPLLSRMGSLRAPVDEDRLSPLVAADSLLEHVREDFSGLLPEEFISLSPPHEALDYHFGLEEGEGIRDLFDCDFGDLTPLDF

SEQ ID NO: 902456 - protein, 523 aa, Homo sapiens
EKWPGLCRQRRPGAERDRALAEACRHGPAPPPPPVTRAARAVSVMALAGAPAGGPCAPALEALLGAGALRLLDSSQIVIISAAQDASAPPAPTGPAAPAAGPCDPDLLLFATPQAPRPTPSAPRPALGRPPVKRRLDLETDHQYLAESSGPARGRGRHPGKGVKSPGEKSRYETSLNLTTKRFLELLSHSADGVVDLNWAAEVLKVQKRRIYDITNVLEGIQLIAKKSKNHIQWLGSHTTVGVGGRLEGLTQDLRQLQESEQQLDHLMNICTTQLRLLSEDTDSQRLAYVTCQDLRSIADPAEQMVMVIKAPPETQLQAVDSSENFQISLKSKQGPIDVFLCPEETVGGISPGKTPSQEVTSEEENRATDSATIVSPPPSSPPSSLTTDPSQSLLSLEQGGVMGRWVGWGRAPLLGGGQARQPLPSSLLGHPRPVMLPVSPEPLLSRMGSLRAPVDEDRLSPLVAADSLLEHVREDFSGLLPEEFISLSPPHEALDYHFGLEEGEGIRDLFDCDFGDLTPLDF

SEQ ID NO: 902457 - protein, 481 aa, Homo sapiens; identical to SEQ ID NO: 902454

SEQ ID NO: 902458 - protein, 475 aa, Homo sapiens
VKVAGTLQAAAAGGGAGSSPRRGLPPWARAAAAACHPGRAGRERHGLGRGPCGRPMRAGAGGPARGRRRCGCSTPRRSSSSPPRRTPAPRRLPPAPRHPDLLLFATPQAPRPTPSAPRPALGRPPVKRRLDLETDHQYLAESSGPARGRGRHPGKGVKSPGEKSRYETSLNLTTKRFLELLSHSADGVVDLNWAAEVLKVQKRRIYDITNVLEGIQLIAKKSKNHIQWLGSHTTVGVGGRLEGLTQDLRQLQESEQQLDHLMNICTTQLRLLSEDTDSQRLAYVTCQDLRSIADPAEQMVMVIKAPPETQLQAVDSSENFQISLKSKQGPIDVFLCPEETVGGISPGKTPSQEVTSEEENRATDSATIVSPPPSSPPSSLTTDPSQSLLSLEQEPLLSRMGSLRAPVDEDRLSPLVAADSLLEHVREDFSGLLPEEFISLSPPHEALDYHFGLEEGEGIRDLFDCDFGDLTPLDF

SEQ ID NO: 902459 - protein, 523 aa, Homo sapiens; identical to SEQ ID NO: 902456

SEQ ID NO: 902460 - protein, 481 aa, Homo sapiens; identical to SEQ ID NO: 902454

SEQ ID NO: 902461 - protein, 1121 aa, Homo sapiens
MSLENEDKRARTRSKALRGPPETTAADLSCPTPGCTGSGHVRGKYSRHRSLQSCPLAKKRKLEGAEAEHLVSKRKSHPLKLALDEGYGVDSDGSEDTEVKDASVSDESEGTLEGAEAETSGQDEIHRPETAEGRSPVKSHFGSNPIGSATASSKGSYSSYQGIIATSLLNLGQIAEETLVEEDLGQAAKPGPGIVHLLQEAAEGAASEEGEKGLFIQPEDAEEVVEVTTERSQDLCPQSLEDAASEESSKQKGILSHEEEDEEEEEEEEEEEEDEEEEEEEEEEEEEEEEEEEEEEEEEEEEEEEEAAPDVIFQEDTSHTSAQKAPELRGPESPSPKPEYSVIVEVRSDDDKDEDTHSRKSTVTDESEMQDMMTRGNLGLLEQAIALKAEQVRTVCEPGCPPAEQSQLGLGEPGKAAKPLDTVRKSYYSKDPSRAEKREIKCPTPGCDGTGHVTGLYPHHRSLSGCPHKDRIPPEILAMHENVLKCPTPGCTGQGHVNSNRNTHRSLSGCPIAAAEKLAKSHEKQQPQTGDPSKSSSNSDRILRPMCFVKQLEVPPYGSYRPNVAPATPRANLAKELEKFSKVTFDYASFDAQVFGKRMLAPKIQTSETSPKAFQCFDYSQDAEAAHMAATAILNLSTRCWEMPENLSTKPQDLPSKSVDIEVDENGTLDLSMHKHRKRENAFPSSSSCSSSPGVKSPDASQRHSSTSAPSSSMTSPQSSQASRQDEWDRPLDYTKPSRLREEEPEESEPAAHSFASSEADDQEVSEENFEERKYPGEVTLTNFKLKFLSKDIKKELLTCPTPGCDGSGHITGNYASHRSLSGCPLADKSLRNLMAAHSADLKCPTPGCDGSGHITGNYASHRSLSGCPRAKKSGVKVAPTKDDKEDPELMKCPVPGCVGLGHISGKYASHRSASGCPLAARRQKEGSLNGSSFSWKSLKNEGPTCPTPGCDGSGHANGSFLTHRSLSGCPRATFAGKKGKLSGDEVLSPKFKTSDVLENDEEIKQLNQEIRDLNESNSEMEAAMVQLQSQISSMEKNLKNIEEENKLIEEQNEALFLELSGLSQALIQSLANIRLPHMEPICEQNFDAYVSTLTDMYSNQDPENKDLLESIKQAVRGIQV

SEQ ID NO: 902462 - protein, 421 aa, Homo sapiens
RRRGGGGGGGGGCLRRPRLERRCSAADTRGTRPRSCRWQPRRSEPVGRPSLEYCLSVILNMGGAVSAGEDNDELIDNLKEAQYIRTELVEQAFRAIDRADYYLEEFKENAYKDLAWKHGNIHLSAPCIYSEVMEALDLQPGLSFLNLGSGTGYLSSMVGLILGPFGVNHGVELHSDVIEYAKQKLDFFIRTSDSFDKFDFCEPSFVTGNCLEISPDCSQYDRVYCGAGVQKEHEEYMKNLLKVGGILVMPLEEKLTKITRTGPSAWETKKILAVSFAPLIQPCHSESGKSRLVQLPPVAVRSLQDLARIAIRGTIKKIIHQETVSKNGNGLKNTPRFKRRRVRRRRMETIVFLDKEVFASRISNPSDDNSCEDLEEERREEEEKTPPETKPDPPVNFLRQKVLSLPLPDPLKYYLLYYREK

SEQ ID NO: 902463 - protein, 1595 aa, Homo sapiens
MSLENEDKRARTRSKALRGPPETTAADLSCPTPGCTGSGHVRGKYSRHRSLQSCPLAKKRKLEGAEAEHLVSKRKSHPLKLALDEGYGVDSDGSEDTEVKDASVSDESEGTLEGAEAETSGQDEIHRPETAEGRSPVKSHFGSNPIGSATASSKGSYSSYQGIIATSLLNLGQIAEETLVEEDLGQAAKPGPGIVHLLQEAAEGAASEEGEKGLFIQPEDAEEVVEVTTERSQDLCPQSLEDAASEESSKQKGILSHEEEDEEEEEEEEEEEEDEEEEEEEEEEEEEEEEEEEEEEEEEEEEEEEEAAPDVIFQEDTSHTSAQKAPELRGPESPSPKPEYSVIVEVRSDDDKDEDTHSRKSTVTDESEMQDMMTRGNLGLLEQAIALKAEQVRTVCEPGCPPAEQSQLGLGEPGKAAKPLDTVRKSYYSKDPSRAEKREIKCPTPGCDGTGHVTGLYPHHRSLSGCPHKDRIPPEILAMHENVLKCPTPGCTGQGHVNSNRNTHRSLSGCPIAAAEKLAKSHEKQQPQTGDPSKSSSNSDRILRPMCFVKQLEVPPYGSYRPNVAPATPRANLAKELEKFSKVTFDYASFDAQVFGKRMLAPKIQTSETSPKAFQCFDYSQDAEAAHMAATAILNLSTRCWEMPENLSTKPQDLPSKSVDIEVDENGTLDLSMHKHRKRENAFPSSSSCSSSPGVKSPDASQRHSSTSAPSSSMTSPQSSQASRQDEWDRPLDYTKPSRLREEEPEESEPAAHSFASSEADDQEVSEENFEERKYPGEVTLTNFKLKFLSKDIKKELLTCPTPGCDGSGHITGNYASHRSLSGCPLADKSLRNLMAAHSADLKCPTPGCDGSGHITGNYASHRSLSGCPRAKKSGVKVAPTKDDKEDPELMKCPVPGCVGLGHISGKYASHRSASGCPLAARRQKEGSLNGSSFSWKSLKNEGPTCPTPGCDGSGHANGSFLTHRSLSGCPRATFAGKKGKLSGDEVLSPKFKTSDVLENDEEIKQLNQEIRDLNESNSEMEAAMVQLQSQISSMEKNLKNIEEENKLIEEQNEALFLELSGLSQALIQSLANIRLSAHGANMRTEFRCLCEHPHRHVLQPGPGEQGPPGEHQAGCEGHPGLGRVVPRSVPAHHTVYLPRPAPHRGDAQLTVTSRLGPGVAAGGFIQRDGWKLAAPTRLPPGLGRGGPICVHRGTEELQSDLFLFSERNLKSSSKSPVEAHGQGSQYCLSVILNMGGAVSAGEDNDELIDNLKEAQYIRTELVEQAFRAIDRADYYLEEFKENAYKDLAWKHGNIHLSAPCIYSEVMEALDLQPGLSFLNLGSGTGYLSSMVGLILGPFGVNHGVELHSDVIEYAKQKLDFFIRTSDSFDKFDFCEPSFVTGNCLEISPDCSQYDRVYCGAGVQKEHEEYMKNLLKVGGILVMPLEEKLTKITRTGPSAWETKKILAVSFAPLIQPCHSESGKSRLVQLPPVAVRSLQDLARIAIRGTIKKIIHQETVSKNGNGLKNTPRFKRRRVRRRRMETIVFLDKEVFASRISNPSDDNSCEDLEEERREEEEKTPPETKPDPPVNFLRQKVLSLPLPDPLKYYLLYYREK

SEQ ID NO: 902464 - protein, 1324 aa, Homo sapiens
MSLENEDKRARTRSKALRGPPETTAADLSCPTPGCTGSGHVRGKYSRHRSLQSCPLAKKRKLEGAEAEHLVSKRKSHPLKLALDEGYGVDSDGSEDTEVKDASVSDESEGTLEGAEAETSGQDEIHRPETAEDPSRAEKREIKCPTPGCDGTGHVTGLYPHHRSLSGCPHKDRIPPEILAMHENVLKCPTPGCTGQGHVNSNRNTHRSLSGCPIAAAEKLAKSHEKQQPQTGDPSKSSSNSDRILRPMCFVKQLEVPPYGSYRPNVAPATPRANLAKELEKFSKVTFDYASFDAQVFGKRMLAPKIQTSETSPKAFQSKPFPKASSPRHSPSSSYVRSTSSSSAGFDYSQDAEAAHMAATAILNLSTRCWEMPENLSTKPQDLPSKSVDIEVDENGTLDLSMHKHRKRENAFPSSSSCSSSPGVKSPDASQRHSSTSAPSSSMTSPQSSQASRQDEWDRPLDYTKPSRLREEEPEESEPAAHSFASSEADDQEVSEENFEERKYPGEVTLTNFKLKFLSKDIKKELLTCPTPGCDGSGHITGNYASHRSLSGCPLADKSLRNLMAAHSADLKCPTPGCDGSGHITGNYASHRSLSGCPRAKKSGVKVAPTKDDKEDPELMKCPVPGCVGLGHISGKYASHRSASGCPLAARRQKEGSLNGSSFSWKSLKNEGPTCPTPGCDGSGHANGSFLTHRSLSGCPRATFAGKKGKLSGDEVLSPKFKTSDVLENDEEIKQLNQEIRDLNESNSEMEAAMVQLQSQISSMEKNLKNIEEENKLIEEQNEALFLELSGLSQALIQSLANIRLSAHGANMRTEFRCLCEHPHRHVLQPGPGEQGPPGEHQAGCEGHPGLGRVVPRSVPAHHTVYLPRPAPHRGDAQLTVTSRLGPGVAAGGFIQRDGWKLAAPTRLPPGLGRGGPICVHRGTEELQSDLFLFSERNLKSSSKSPVEAHGQGSQYCLSVILNMGGAVSAGEDNDELIDNLKEAQYIRTELVEQAFRAIDRADYYLEEFKENAYKDLAWKHGNIHLSAPCIYSEVMEALDLQPGLSFLNLGSGTGYLSSMVGLILGPFGVNHGVELHSDVIEYAKQKLDFFIRTSDSFDKFDFCEPSFVTGNCLEISPDCSQYDRVYCGAGVQKEHEEYMKNLLKVGGILVMPLEEKLTKITRTGPSAWETKKILAVSFAPLIQPCHSESGKSRLVQLPPVAVRSLQDLARIAIRGTIKKIIHQETVSKNGNGLKNTPRFKRRRVRRRRMETIVFLDKEVFASRISNPSDDNSCEDLEEERREEEEKTPPETKPDPPVNFLRQKVLSLPLPDPLKYYLLYYREK

SEQ ID NO: 902465 - protein, 1109 aa, Homo sapiens
MSLENEDKRARTRSKALRGPPETTAADLSCPTPGCTGSGHVRGKYSRHRSLQSCPLAKKRKLEGAEAEHLVSKRKSHPLKLALDEGYGVDSDGSEDTEVKDASVSDESEGTLEGAEAETSGQDEIHRPETAEGRSPVKSHFGSNPIGSATASSKGSYSSYQGIIATSLLNLGQIAEETLVEEDLGQAAKPGPGIVHLLQEAAEGAASEEGEKGLFIQPEDAEEVVEVTTERSQDLCPQSLEDAASEESSKQKGILSHEEEDEEEEEEEEEEEEDEEEEEEEEEEEEEEEEEEEEEEEEEEEEEEEEAAPDVIFQEDTSHTSAQKAPELRGPESPSPKPEYSVIVEVRSDDDKDEDTHSRKSTVTDESEMQDMMTRGNLGLLEQAIALKAETDPSRAEKREIKCPTPGCDGTGHVTGLYPHHRSLSGCPHKDRIPPEILAMHENVLKCPTPGCTGQGHVNSNRNTHRSLSGCPIAAAEKLAKSHEKQQPQTGDPSKSSSNSDRILRPMCFVKQLEVPPYGSYRPNVAPATPRANLAKELEKFSKVTFDYASFDAQVFGKRMLAPKIQTSETSPKAFQSKPFPKASSPRHSPSSSYVRSTSSSSAGFDYSQDAEAAHMAATAILNLSTRCWEMPENLSTKPQDLPSKSVDIEVDENGTLDLSMHKHRKRENAFPSSSSCSSSPGVKSPDASQRHSSTSAPSSSMTSPQSSQASRQDEWDRPLDYTKPSRLREEEPEESEPAAHSFASSEADDQEVSEENFEERKYPGEVTLTNFKLKFLSKDIKKELLTCPTPGCDGSGHITGNYASHRSLSGCPLADKSLRNLMAAHSADLKCPTPGCDGSGHITGNYASHRSLSGCPRAKKSGVKVAPTKDDKEDPELMKCPVPGCVGLGHISGKYASHRSASGCPLAARRQKEGSLNGSSFSWKSLKNEGPTCPTPGCDGSGHANGSFLTHRSLSGCPRATFAGKKGKLSGDEVLSPKFKTSDVLENDEEIKQLNQEIRDLNESNSEMEAAMVQLQSQISSMEKNLKNIEEENKLIEEQNEALFLELSGLSQALIQSLANIRLPHMEPICEQNFDAYVSTLTDMYSNQDPENKDLLESIKQAVRGIQV

SEQ ID NO: 902466 - protein, 439 aa, Homo sapiens
RRRGGGGGGGGGCLRRPRLERRCSAADTRGTRPRSCRWQPRRSEPVGRPSLEVEPPPPPPPLGPACGERVYCLSVILNMGGAVSAGEDNDELIDNLKEAQYIRTELVEQAFRAIDRADYYLEEFKENAYKDLAWKHGNIHLSAPCIYSEVMEALDLQPGLSFLNLGSGTGYLSSMVGLILGPFGVNHGVELHSDVIEYAKQKLDFFIRTSDSFDKFDFCEPSFVTGNCLEISPDCSQYDRVYCGAGVQKEHEEYMKNLLKVGGILVMPLEEKLTKITRTGPSAWETKKILAVSFAPLIQPCHSESGKSRLVQLPPVAVRSLQDLARIAIRGTIKKIIHQETVSKNGNGLKNTPRFKRRRVRRRRMETIVFLDKEVFASRISNPSDDNSCEDLEEERREEEEKTPPETKPDPPVNFLRQKVLSLPLPDPLKYYLLYYREK

SEQ ID NO: 902467 - protein, 174 aa, Homo sapiens
LILSLGYLTKITRTGPSAWETKKILAVSFAPLIQPCHSESGKSRLVQLPPVAVRSLQDLARIAIRGTIKKIIHQETVSKNGNGLKNTPRFKRRRVRRRRMETIVFLDKEVFASRISNPSDDNSCEDLEEERREEEEKTPPETKPDPPVNFLRQKVLSLPLPDPLKYYLLYYREK

SEQ ID NO: 902468 - protein, 421 aa, Homo sapiens; identical to SEQ ID NO: 902462

SEQ ID NO: 902469 - protein, 1595 aa, Homo sapiens; identical to SEQ ID NO: 902463

SEQ ID NO: 902470 - protein, 421 aa, Homo sapiens; identical to SEQ ID NO: 902462

SEQ ID NO: 902471 - protein, 319 aa, Homo sapiens
RRRGGGGGGGGGCLRRPRLERRCSAADTRGTRPRSCRWQPRRSEPVGRPSLEYCLSVILNMGGAVSAGEDNDELIDNLKEAQYIRTELVEQAFRAIDRADYYLEEFKENAYKDLAWKHGNIHLSAPCIYSEVMEALDLQPGLSFLNLGSGTGYLSSMVGLILGPFGVNHGVELHSDVIEYAKQKLDFFIRTSDSFDKFDFCEPSFVTGNCLEISPDCSQYDRVYCGAGVQKEHEEYMKNLLKVGGILVMPLEEKLTKITRTGPSAWETKKILAVSFAPLIQPCHSESGKSRLVQLRSPSFVQGWSVVVLSQLTAASTFQ

SEQ ID NO: 902472 - protein, 900 aa, Homo sapiens
MSLENEDKRARTRSKALRGPPETTAADLSCPTPGCTGSGHVRGKYSRHRSLQSCPLAKKRKLEGAEAEHLVSKRKSHPLKLALDEGYGVDSDGSEDTEVKDASVSDESEGTLEGAEAETSGQDEIHRPETAEGRSPVKSHFGSNPIGSATASSKGSYSSYQGIIATSLLNLGQIAEETLVEEDLGQAAKPGPGIVHLLQEAAEGAASEEGEKGLFIQPEDAEEVVEVTTERSQDLCPQSLEDAASEESSKQKGILSHEEEDEEEEEEEEEEEEDEEEEEEEEEEEEEEEEEEEEEEEEEEEEEEEEAAPDVIFQEDTSHTSAQKAPELRGPESPSPKPEYSVIVEVRSDDDKDEDTHSRKSTVTDESEMQDMMTRGNLGLLEQAIALKAETDPSRAEKREIKCPTPGCDGTGHVTGLYPHHRSLSGCPHKDRIPPEILAMHENVLKCPTPGCTGQGHVNSNRNTHRSLSGCPIAAAEKLAKSHEKQQPQTGDPSKSSSNSDRILRPMCFVKQLEVPPYGSYRPNVAPATPRANLAKELEKFSKVTFDYASFDAQVFGKRMLAPKIQTSETSPKAFQSKPFPKASSPRHSPSSSYVRSTSSSSAGFDYSQDAEAAHMAATAILNLSTRCWEMPENLSTKPQDLPSKSVDIEVDENGTLDLSMHKHRKRENAFPSSSSCSSSPGVKSPDASQRHSSTSAPSSSMTSPQSSQASRQDEWDRPLDYTKPSRLREEEPEESEPAAHSFASSEADDQEVSEENFEERKYPGEVTLTNFKLKFLSKDIKKELLTCPTPGCDGSGHITGNYASHRSLSGCPLADKSLRNLMAAHSADLKCPTPGCDGSGHITGNYASHRSLSGCPRAKKSGVKVAPTKDDKEDPELMKYVGPCWLFHCIAELRFSCVL

SEQ ID NO: 902473 - protein, 1595 aa, Homo sapiens; identical to SEQ ID NO: 902463

SEQ ID NO: 902474 - protein, 1583 aa, Homo sapiens
MSLENEDKRARTRSKALRGPPETTAADLSCPTPGCTGSGHVRGKYSRHRSLQSCPLAKKRKLEGAEAEHLVSKRKSHPLKLALDEGYGVDSDGSEDTEVKDASVSDESEGTLEGAEAETSGQDEIHRPETAEGRSPVKSHFGSNPIGSATASSKGSYSSYQGIIATSLLNLGQIAEETLVEEDLGQAAKPGPGIVHLLQEAAEGAASEEGEKGLFIQPEDAEEVVEVTTERSQDLCPQSLEDAASEESSKQKGILSHEEEDEEEEEEEEEEEEDEEEEEEEEEEEEEEEEEEEEEEEEEEEEEEEEAAPDVIFQEDTSHTSAQKAPELRGPESPSPKPEYSVIVEVRSDDDKDEDTHSRKSTVTDESEMQDMMTRGNLGLLEQAIALKAETDPSRAEKREIKCPTPGCDGTGHVTGLYPHHRSLSGCPHKDRIPPEILAMHENVLKCPTPGCTGQGHVNSNRNTHRSLSGCPIAAAEKLAKSHEKQQPQTGDPSKSSSNSDRILRPMCFVKQLEVPPYGSYRPNVAPATPRANLAKELEKFSKVTFDYASFDAQVFGKRMLAPKIQTSETSPKAFQSKPFPKASSPRHSPSSSYVRSTSSSSAGFDYSQDAEAAHMAATAILNLSTRCWEMPENLSTKPQDLPSKSVDIEVDENGTLDLSMHKHRKRENAFPSSSSCSSSPGVKSPDASQRHSSTSAPSSSMTSPQSSQASRQDEWDRPLDYTKPSRLREEEPEESEPAAHSFASSEADDQEVSEENFEERKYPGEVTLTNFKLKFLSKDIKKELLTCPTPGCDGSGHITGNYASHRSLSGCPLADKSLRNLMAAHSADLKCPTPGCDGSGHITGNYASHRSLSGCPRAKKSGVKVAPTKDDKEDPELMKCPVPGCVGLGHISGKYASHRSASGCPLAARRQKEGSLNGSSFSWKSLKNEGPTCPTPGCDGSGHANGSFLTHRSLSGCPRATFAGKKGKLSGDEVLSPKFKTSDVLENDEEIKQLNQEIRDLNESNSEMEAAMVQLQSQISSMEKNLKNIEEENKLIEEQNEALFLELSGLSQALIQSLANIRLSAHGANMRTEFRCLCEHPHRHVLQPGPGEQGPPGEHQAGCEGHPGLGRVVPRSVPAHHTVYLPRPAPHRGDAQLTVTSRLGPGVAAGGFIQRDGWKLAAPTRLPPGLGRGGPICVHRGTEELQSDLFLFSERNLKSSSKSPVEAHGQGSQYCLSVILNMGGAVSAGEDNDELIDNLKEAQYIRTELVEQAFRAIDRADYYLEEFKENAYKDLAWKHGNIHLSAPCIYSEVMEALDLQPGLSFLNLGSGTGYLSSMVGLILGPFGVNHGVELHSDVIEYAKQKLDFFIRTSDSFDKFDFCEPSFVTGNCLEISPDCSQYDRVYCGAGVQKEHEEYMKNLLKVGGILVMPLEEKLTKITRTGPSAWETKKILAVSFAPLIQPCHSESGKSRLVQLPPVAVRSLQDLARIAIRGTIKKIIHQETVSKNGNGLKNTPRFKRRRVRRRRMETIVFLDKEVFASRISNPSDDNSCEDLEEERREEEEKTPPETKPDPPVNFLRQKVLSLPLPDPLKYYLLYYREK

SEQ ID NO: 902475 - protein, 261 aa, Homo sapiens
MEAWKHSPLSPVHHSDVIEYAKQKLDFFIRTSDSFDKFDFCEPSFVTGNCLEISPDCSQYDRVYCGAGVQKEHEEYMKNLLKVGGILVMPLEEKLTKITRTGPSAWETKKILAVSFAPLIQPCHSESGKSRLVQLPPVAVRSLQDLARIAIRGTIKKIIHQETVSKNGNGLKNTPRFKRRRVRRRRMETIVFLDKEVFASRISNPSDDNSCEDLEEERREEEEKTPPETKPDPPVNFLRQKVLSLPLPDPLKYYLLYYREK

SEQ ID NO: 902476 - protein, 361 aa, Homo sapiens
MGGAVSAGEDNDELIDNLKEAQYIRTELVEQAFRAIDRADYYLEEFKENAYKDLAWKHGNIHLSAPCIYSEVMEALDLQPGLSFLNLGSGTGYLSSMVGLILGPFGVNHGVELHSDVIEYAKQKLDFFIRTSDSFDKFDFCEPSFVTGNCLEISPDCSQYDRVYCGAGVQKEHEEYMKNLLKVGGILVMPLEEKLTKITRTGPSAWETKKILAVSFAPLIQPCHSESGKSRLVQLPPVAVRSLQDLARIAIRGTIKKIIHQETVSKNGNGLKNTPRFKRRRVRRRRMETIVFLDKEVFASRISNPSDDNSCEDLEEERREEEEKTPPETKPDPPVNFLRQKVLSLPLPDPLKYYLLYYREK

SEQ ID NO: 902477 - protein, 1109 aa, Homo sapiens; identical to SEQ ID NO: 902465

SEQ ID NO: 902478 - protein, 850 aa, Homo sapiens
MSLENEDKRARTRSKALRGPPETTAADLSCPTPGCTGSGHVRGKYSRHRSLQSCPLAKKRKLEGAEAEHLVSKRKSHPLKLALDEGYGVDSDGSEDTEVKDASVSDESEGTLEGAEAETSGQDEIHRPETAEDPSRAEKREIKCPTPGCDGTGHVTGLYPHHRSLSGCPHKDRIPPEILAMHENVLKCPTPGCTGQGHVNSNRNTHRSLSGCPIAAAEKLAKSHEKQQPQTGDPSKSSSNSDRILRPMCFVKQLEVPPYGSYRPNVAPATPRANLAKELEKFSKVTFDYASFDAQVFGKRMLAPKIQTSETSPKAFQSKPFPKASSPRHSPSSSYVRSTSSSSAGFDYSQDAEAAHMAATAILNLSTRCWEMPENLSTKPQDLPSKSVDIEVDENGTLDLSMHKHRKRENAFPSSSSCSSSPGVKSPDASQRHSSTSAPSSSMTSPQSSQASRQDEWDRPLDYTKPSRLREEEPEESEPAAHSFASSEADDQEVSEENFEERKYPGEVTLTNFKLKFLSKDIKKELLTCPTPGCDGSGHITGNYASHRSLSGCPLADKSLRNLMAAHSADLKCPTPGCDGSGHITGNYASHRSLSGCPRAKKSGVKVAPTKDDKEDPELMKCPVPGCVGLGHISGKYASHRSASGCPLAARRQKEGSLNGSSFSWKSLKNEGPTCPTPGCDGSGHANGSFLTHRSLSGCPRATFAGKKGKLSGDEVLSPKFKTSDVLENDEEIKQLNQEIRDLNESNSEMEAAMVQLQSQISSMEKNLKNIEEENKLIEEQNEALFLELSGLSQALIQSLANIRLPHMEPICEQNFDAYVSTLTDMYSNQDPENKDLLESIKQAVRGIQV

SEQ ID NO: 902479 - protein, 315 aa, Homo sapiens
RRRGGGGGGGGGCLRRPRLERRCSAADTRGTRPRSCRWQPRRSEPVGRPSLEYCLSVILNMGGAVSAGEDNDELIDNLKEAQYIRTELVEQAFRAIDRADYYLEEFKENAYKDLAWKHGNIHLSAPCIYSEVMEALDLQPGLSFLNLGSGTGYLSSMVGLILGPFGVNHGVELHSDVIEYAKQKLDFFIRTSDSFDKFDFCEPSFVTGNCLEISPDCSQYDRVYCGAGVQKEHEEYMKNLLKVGGILVMPLEEKLTKITRTGPSAWETKKILAVSFAPLIQPCHSESGKSRLVQLRKYTNLYLFYLLDLFSLVRF

SEQ ID NO: 902480 - protein, 259 aa, Homo sapiens
RRRGGGGGGGGGCLRRPRLERRCSAADTRGTRPRSCRWQPRRSEPVGRPSLEYCLSVILNMGGAVSAGEDNDELIDNLKEAQYIRTELVEQAFRAIDRADYYLEEFKENAYKDLAWKHGNIHLSAPCIYSEVMEALDLQPGLSFLNLGSGTGYLSSMVGLILGPFGVNHGVELHSDVIEYAKQKLDFFIRTSDSFDKFDFCEPSFVTGNCLEISPDCSQYDRVYCGAGVQKEHEEYMKNLLKVGGILVMPLEEKVRFPS

SEQ ID NO: 902481 - protein, 139 aa, Homo sapiens
PHTPPPPTPPQLKARYELVVQPPVASSARVSLFRLAPGFLRSQRGRVITRSGLSPSCRQVLRPRGPRLPARAVWQPGAFRGPPPARGPTTPYWASTISEDRGSGPSAFDSRRSRVRGPTGLSWRSTSRRCVQQHPPGGA

SEQ ID NO: 902482 - protein, 326 aa, Homo sapiens
PTPPPPPPPPNLRLGTRLVVAAARCQFCACESLSPCSGLSSLAARQGYHQIWAFPFLPSGATATWPAASRSRSLAARSLPRSPARPGPNDALLGEHDFRGQGVRAQRFRFSEEPGPGADGAVLEVHVPQVLHLQYGMYVWPCAVVLAQYLWFHRRSLPGKAILEIGAGVSLPGILAAKCGAEVILSDSSELPHCLEVCRQSCQMNNLPHLQVVGLTWGHISWDLLALPPQDIILASDVFFEPEDFEDILATIYFLMHKNPKVQLWSTYQVRSADWSLEALLYKWDMKCVHIPLESFDADKEDIAESTLPGRHTVEMLVISFAKDSL

SEQ ID NO: 902483 - protein, 291 aa, Homo sapiens
PTPPPPPPPPNLRLGTRLVVAAARCQFCACESLSPCSGLSSLAARQGYHQIWAFPFLPSGATATWPAASRSRSLAARSLPRSPARPGPNDALLGEHDFRGQGVRAQRFRFSEEPGPGADGAVLEVHVPQIGAGVSLPGILAAKCGAEVILSDSSELPHCLEVCRQSCQMNNLPHLQVVGLTWGHISWDLLALPPQDIILASDVFFEPEDFEDILATIYFLMHKNPKVQLWSTYQVRSADWSLEALLYKWDMKCVHIPLESFDADKEDIAESTLPGRHTVEMLVISFAKDSL

SEQ ID NO: 902484 - protein, 139 aa, Homo sapiens; identical to SEQ ID NO: 902481

SEQ ID NO: 902485 - protein, 284 aa, Homo sapiens
PTPPPPPPPPNLRLGTRLVVAAARCQFCACESLSPCSGLSSLAARQGYHQIWAFPFLPSGATATWPAASRSRSLAARSLPRSPARPGPNDALLGEHDFRGQGVLAQYLWFHRRSLPGKAILEIGAGVSLPGILAAKCGAEVILSDSSELPHCLEVCRQSCQMNNLPHLQVVGLTWGHISWDLLALPPQDIILASDVFFEPEDFEDILATIYFLMHKNPKVQLWSTYQVRSADWSLEALLYKWDMKCVHIPLESFDADKEDIAESTLPGRHTVEMLVISFAKDSL

SEQ ID NO: 902486 - protein, 131 aa, Homo sapiens
PHTPPPPTPPQLKARYEAGWLQPPVASSARVSLFRLAPGFLRSQRGRVITRSGLSPSCRQVLRPRGPRLPARAVWQPGAFRGPPPARGPTTPYWASTISEDRGSGPSAFDSRRSRVRGPTGLSWRSTSRRF

SEQ ID NO: 902487 - protein, 139 aa, Homo sapiens; identical to SEQ ID NO: 902481

SEQ ID NO: 902488 - protein, 190 aa, Homo sapiens
MYVWPCAVVLAQYLWFHRRSLPGKAILEIGAGVSLPGILAAKCGAEVILSDSSELPHCLEVCRQSCQMNNLPHLQVVGLTWGHISWDLLALPPQDIILASDVFFEPEDFEDILATIYFLMHKNPKVQLWSTYQVRSADWSLEALLYKWDMKCVHIPLESFDADKEDIAESTLPGRHTVEMLVISFAKDSL

SEQ ID NO: 902489 - protein, 227 aa, Homo sapiens
PHTPPPPTPPQLKARYEAGWLQPPVASSARVLHLQYGMYVWPCAVVLAQYLWFHRRSLPGKAILEIGAGVSLPGILAAKCGAEVILSDSSELPHCLEVCRQSCQMNNLPHLQVVGLTWGHISWDLLALPPQDIILASDVFFEPEDFEDILATIYFLMHKNPKVQLWSTYQVRSADWSLEALLYKWDMKCVHIPLESFDADKEDIAESTLPGRHTVEMLVISFAKDSL

SEQ ID NO: 902490 - protein, 179 aa, Homo sapiens
MSHCAGPAFSTSNLSCQIGAGVSLPGILAAKCGAEVILSDSSELPHCLEVCRQSCQMNNLPHLQVVGLTWGHISWDLLALPPQDIILASDVFFEPEDFEDILATIYFLMHKNPKVQLWSTYQVRSADWSLEALLYKWDMKCVHIPLESFDADKEDIAESTLPGRHTVEMLVISFAKDSL

SEQ ID NO: 902491 - protein, 119 aa, Homo sapiens
MYVWPCAVVLAQYLWFHRRSLPGKAILEIGAGVSLPGILAAKCGAEVILSDSSELPHCLEVCRQSCQMNNLPHLQVVGLTWGHISWDLLALPPQDIILASDVFFEPEGKLFWLNSTFGQ

SEQ ID NO: 902492 - protein, 170 aa, Homo sapiens
CAHHFRSRQPPVASSARVLHLQYGMYVWPCAVVLAQYLWFHRRSLPGKAILEIGAGVSLPGILAAKCGAEVILSDSSELPHCLEVCRQSCQMNNLPHLQVVGLTWGHISWDLLALPPQDIILASDVFFEPEDFEDILATIYFLMHKNPKVQLWSTYQVRRQVWMTLTFYM

SEQ ID NO: 902493 - protein, 235 aa, Homo sapiens
RSIAPLVITEEPGVWRDHGERRRSKKGRYQATFWVEKEGKQKKTRKYATMKRMLSLRDQRLKEKDRLKPKKKEKKDPSALKEREVPQHPSCLFFQYNTQLGPPYHILVDTNFINFSIKAKLDLVQSMMDCLYAKCIPCITDCVMAEIEKLGQKYRVALRIAKDPRFERLPCTHKGTYADDCLVQRVTQHKCYIVATVDRDLKRRIRKIPGVPIMYISNHRYNIERMPDDYGAPRF

SEQ ID NO: 902494 - protein, 198 aa, Homo sapiens
MGKQKKTRKYATMKRMLSLRDQRLKEKDRLKPKKKEKKDPSALKEREVPQHPSCLFFQYNTQLGPPYHILVDTNFINFSIKAKLDLVQSMMDCLYAKCIPCITDCVMAEIEKLGQKYRVALRIAKDPRFERLPCTHKGTYADDCLVQRVTQHKCYIVATVDRDLKRRIRKIPGVPIMYISNHRYNIERMPDDYGAPRF

SEQ ID NO: 902495 - protein, 180 aa, Homo sapiens
MGKQKKTRKYATMKRMLSLRDQRLKEKDRLKPKKKEKKDPSALKEREVPQHPSCLFFQYNTQLGPPYHILVDTNFINFSIKAKLDLVQSMMDCLYAKCIPCITDCVMAEIEKLGQKYRVALRIAKDPRFERLPCTHKGTYADDCLVQRVTQHKCYIVATVDRDLKYNIERMPDDYGAPRF

SEQ ID NO: 902496 - protein, 183 aa, Homo sapiens
MGKQKKTRKYATMKRMLSLRDQRLKEKDRLKPKKKEKKDPSALKEREVPQHPSCLFFQYNTQLGPPYHILVDTNFINFSIKAKLDLVQSMMDCLYAKCIPCITDCVMAEIEKLGQKYRVALRIAKDPRFERLPCTHKGTYADDCLVQRVTQHKCYIVATVDRDLKRRIRKIPGVPIMYISNHR

SEQ ID NO: 902497 - protein, 162 aa, Homo sapiens
MGKQKKTRKYATMKRMLSLRDQRLKEKDRLKPKKKEKKDPSALKEREVPQHPSCLFFQYNTQLGPPYHILVDTNFINFSIKAKLDLVQSMMDCLYAKCIPCITDCVMAEIEKLGQKYRVALRIAKDPRFERLPCTHKGTYADDCLVQRVTQVLSVHNCLLCA

SEQ ID NO: 902498 - protein, 198 aa, Homo sapiens; identical to SEQ ID NO: 902494

SEQ ID NO: 902499 - protein, 198 aa, Homo sapiens; identical to SEQ ID NO: 902494

SEQ ID NO: 902500 - protein, 192 aa, Homo sapiens
RKNQEFGVTMGKQKKTRNKEKDRLKPKKKEKKDPSALKEREVPQHPSCLFFQYNTQLGPPYHILVDTNFINFSIKAKLDLVQSMMDCLYAKCIPCITDCVMAEIEKLGQKYRVALRIAKDPRFERLPCTHKGTYADDCLVQRVTQHKCYIVATVDRDLKRRIRKIPGVPIMYISNHRYNIERMPDDYGAPRF

SEQ ID NO: 902501 - protein, 224 aa, Homo sapiens
PTPNNESPLDKLRGKYPPIKTNLEIVRKLKLLMGENNLETERMPSHKEERWKKRYEVVNGKLTNTGTVKMLPPLETPLFSGSAYFVVSREYVGYVLQNEKIQKLMEWAQDTYSPDEYLWATIQRIPEVPGSLPASHKYDLSDMQAVARFVKWQYFEGDVSKGAPYPPCDGVHVRSVCIFGAGDLNWMLRKHHLFANKFDVDVDLFAIQCLDEHLRHKALETLKH

SEQ ID NO: 902502 - protein, 428 aa, Homo sapiens
MLRTLLRRRLFSYPTKYYFMVLVLSLITFSVLRIHQKPEFVSVRHLELAGENPSSDINCTKVLQGDVNEIQKVKLEILTVKFKKRPRWTPDDYINMTSDCSSFIKRRKYIVEPLSKEEAEFPIAYSIVVHHKIEMLDRLLRAIYMPQNFYCIHVDTKSEDSYLAAVMGIASCFSNVFVASRLESVVYASWSRVQADLNCMKDLYAMSANWKYLINLCGMDFPIKTNLEIVRKLKLLMGENNLETERMPSHKEERWKKRYEVVNGKLTNTGTVKMLPPLETPLFSGSAYFVVSREYVGYVLQNEKIQKLMEWAQDTYSPDEYLWATIQRIPEVPGSLPASHKYDLSDMQAVARFVKWQYFEGDVSKGAPYPPCDGVHVRSVCIFGAGDLNWMLRKHHLFANKFDVDVDLFAIQCLDEHLRHKALETLKH

SEQ ID NO: 902503 - protein, 428 aa, Homo sapiens; identical to SEQ ID NO: 902502

SEQ ID NO: 902504 - protein, 88 aa, Homo sapiens
RGVTRKSTRGSAPPAHGEVGSDRPAELLQSFAPSSPSPPTSCSSSCLDLHWATWLECIWLRTMIYQTVAKKLEEIKKDLDAKKKPPSA

SEQ ID NO: 902505 - protein, 88 aa, Homo sapiens; identical to SEQ ID NO: 902504

SEQ ID NO: 902506 - protein, 88 aa, Homo sapiens; identical to SEQ ID NO: 902504

SEQ ID NO: 902507 - protein, 72 aa, Homo sapiens
DRPAEPPFWGPWQSFAPSSPSPPTSCSSSCLDLHWATWLECIWLRTMIYQTVAKKLEEIKKDLDAKKKPPSA

SEQ ID NO: 902508 - protein, 131 aa, Homo sapiens
DRPAEPPFWGPWQSFAPSSPSPPTSCSSSWVSGAAEERGPLPGACLGPHFPLEDCRPRRPGLGVGPAVPSSPAPGRRLAGRPFSSCLPRKSLCQYFSAAIQVPKTLRCQRVCVSRASYCVPRPALIVQSLY

SEQ ID NO: 902509 - protein, 72 aa, Homo sapiens; identical to SEQ ID NO: 902507

SEQ ID NO: 902510 - protein, 91 aa, Homo sapiens
NSRPRRHGCAEDDRRGPAHGEVGSDRPAELLQSFAPSSPSPPTSCSSSCLDLHWATWLECIWLRTMIYQTVAKKLEEIKKDLDAKKKPPSA

SEQ ID NO: 902511 - protein, 113 aa, Homo sapiens
MLQFLVLGFTRGNVVWKCIVAQNLCIYPKTGGSLKKKTFCKKENTFFNQHDGGTLVAKFGPIREDGKKAAPLKVGHLTHLAFPGNCGPFTRGTYLPVDFHNRGPPFGRASFTI

SEQ ID NO: 902512 - protein, 907 aa, Homo sapiens
MATPDQKSPNVLLQNLCCRILGRSEADVAQQFQYAVRVIGSNFAPTVERDEFLVAEKIKKELIRQRREADAALFSELHRKLHSQGVLKNKWSILYLLLSLSEDPRRQPSKVSSYATLFAQALPRDAHSTPYYYARPQTLPLSYQDRSAQSAQSSGSVGSSGISSIGLCALSGPAPAPQSLLPGQSNQAPGVGDCLRQQLGSRLAWTLTANQPSSQATTSKGVPSAVSRNMTRSRREGDTGGTMEITEAALVRDILYVFQGIDGKNIKMNNTENCYKVEGKANLSRSLRDTAVRLSELGWLHNKIRRYTDQRSLDRSFGLVGQSFCAALHQELREYYRLLSVLHSQLQLEDDQGVNLGLESSLTLRRLLVWTYDPKIRLKTLAALVDHCQGRKGGELASAVHAYTKTGDPYMRSLVQHILSLVSHPVLSFLYRWIYDGELEDTYHEFFVASDPTVKTDRLWHDKYTLRKSMIPSFMTMDQSRKVLLIGKSINFLHQVCHDQTPTTKMIAVTKSAESPQDAADLFTDLENAFQGKIDAAYFETSKYLLDVLNKKYSLLDHMQAMRRYLLLGQGDFIRHLMDLLKPELVRPATTLYQHNLTGILETAVRATNAQFDSPEILRRLDVRLLEVSPGDTGWDVFSLDYHVDGPIATVFTRECMSHYLRVFNFLWRAKRMEYILTDIRKGHMCNAKLLRNMPEFSGVLHQCHILASEMVHFIHQMQYYITFEVLECSWDELWNKVQQAQDLDHIIAAHEVFLDTIISRCLLDSDSRALLNQLRAVFDQIIELQNAQDAIYRAALEELQRRLQFEEKKKQREIEGQWGVTAAEEEEENKRIGEFKESIPKMCSQLRILTHFYQGIVQQFLVLLTTSSDESLRFLSFRLDFNEHYKAREPRLRVSLGTRGRRSSHT

SEQ ID NO: 902513 - protein, 434 aa, Homo sapiens
MATPDQKSPNVLLQNLCCRILGRSEADVAQQFQYAVRVIGSNFAPTVERDEFLVAEKIKKELIRQRREADAALFSELHRKLHSQGVLKNKWSILYLLLSLSEDPRRQPSKVSSYATLFAQALPRDAHSTPYYYARPQTLPLSYQDRSAQSAQSSGSVGSSGISSIGLCALSGPAPAPQSLLPGQSNQAPGVGDCLRQQLGSRLAWTLTANQPSSQATTSKGVPSAVSRNMTRSRREGDTGGTMEITEAALVRDILYVFQGIDGKNIKMNNTENCYKVEGKANLSRSLRDTAVRLSELGWLHNKIRRYTDQRSLDRSFGLVGQSFCAALHQELREYYRLLSVLHSQLQLEDDQGVNLGLESSLTLRRLLVWTYDPKIRLKTLAALVDHCQGPTRVFPTHVFPTRDFPTRDFPTHVFPTRVFPTRVWHSLCFRTRL

SEQ ID NO: 902514 - protein, 907 aa, Homo sapiens; identical to SEQ ID NO: 902512

SEQ ID NO: 902515 - protein, 678 aa, Homo sapiens
MTRSRREGDTGGTMEITEAALVRDILYVFQGIDGKNIKMNNTENCYKVEGKANLSRSLRDTAVRLSELGWLHNKIRRYTDQRSLDRSFGLVGQSFCAALHQELREYYRLLSVLHSQLQLEDDQGVNLGLESSLTLRRLLVWTYDPKIRLKTLAALVDHCQGRKGGELASAVHAYTKTGDPYMRSLVQHILSLVSHPVLSFLYRWIYDGELEDTYHEFFVASDPTVKTDRLWHDKYTLRKSMIPSFMTMDQSRKVLLIGKSINFLHQVCHDQTPTTKMIAVTKSAESPQDAADLFTDLENAFQGKIDAAYFETSKYLLDVLNKKYSLLDHMQAMRRYLLLGQGDFIRHLMDLLKPELVRPATTLYQHNLTGILETAVRATNAQFDSPEILRRLDVRLLEVSPGDTGWDVFSLDYHVDGPIATVFTRECMSHYLRVFNFLWRAKRMEYILTDIRKGHMCNAKLLRNMPEFSGVLHQCHILASEMVHFIHQMQYYITFEVLECSWDELWNKVQQAQDLDHIIAAHEVFLDTIISRCLLDSDSRALLNQLRAVFDQIIELQNAQDAIYRAALEELQRRLQFEEKKKQREIEGQWGVTAAEEEEENKRIGEFKESIPKMCSQLRILTHFYQGIVQQFLVLLTTSSDESLRFLSFRLDFNEHYKAREPRLRVSLGTRGRRSSHT

SEQ ID NO: 902516 - protein, 534 aa, Homo sapiens [sequence omitted]

SEQ ID NO: 902517 - protein, 468 aa, Homo sapiens
MPLCFQFFVASDPTVKTDRLWHDKYTLRKSMIPSFMTMDQSRKVLLIGKSINFLHQVCHDQTPTTKMIAVTKSAESPQDAADLFTDLENAFQGKIDAAYFETSKYLLDVLNKKYSLLDHMQAMRRYLLLGQGDFIRHLMDLLKPELVRPATTLYQHNLTGILETAVRATNAQFDSPEILRRLDVRLLEVSPGDTGWDVFSLDYHVDGPIATVFTRECMSHYLRVFNFLWRAKRMEYILTDIRKGHMCNAKLLRNMPEFSGVLHQCHILASEMVHFIHQMQYYITFEVLECSWDELWNKVQQAQDLDHIIAAHEVFLDTIISRCLLDSDSRALLNQLRAVFDQIIELQNAQDAIYRAALEELQRRLQFEEKKKQREIEGQWGVTAAEEEEENKRIGEFKESIPKMCSQLRILTHFYQGIVQQFLVLLTTSSDESLRFLSFRLDFNEHYKAREPRLRVSLGTRGRRSSHT

SEQ ID NO: 902518 - protein, 120 aa, Homo sapiens
MINDIIMNKLQLRCLTADYPQLTVPNWWVRAMQGLDECCVHIEGVPTRGVLCSEFCPMVIVCDLVVYQGIVQQFLVLLTTSSDESLRFLSFRLDFNEHYKAREPRLRVSLGTRGRRSSHT

SEQ ID NO: 902519 - protein, 452 aa, Homo sapiens
MATPDQKSPNVLLQNLCCRILGRSEADVAQQFQYAVRVIGSNFAPTVERDEFLVAEKIKKELIRQRREADAALFSELHRKLHSQGVLKNKWSILYLLLSLSEDPRRQPSKVSSYATLFAQALPRDAHSTPYYYARPQTLPLSYQDRSAQSAQSSGSVGSSGISSIGLCALSGPAPAPQSLLPGQSNQAPGVGDCLRQQLGSRLAWTLTANQPSSQATTSKGVPSAVSRNMTRSRREGDTGGTMEITEAALVRDILYVFQGIDGKNIKMNNTENCYKVEGKANLSRSLRDTAVRLSELGWLHNKIRRYTDQRSLDRSFGLVGQSFCAALHQELREYYRLLSVLHSQLQLEDDQGVNLGLESSLTLRRLLVWTYDPKIRLKTLAALVDHCQGRKGGELASAVHAYTKTGDPYMRSLVQHILSLVSHPVLSFLYRWIYDGELEDTYHEVRIGVRF

SEQ ID NO: 902520 - protein, 824 aa, Homo sapiens
MATPDQKSPNVLLQNLCCRILGRSEADVAQQFQYAVRVIGSNFAPTVERDEFLVAEKIKKELIRQRREADAALFSELHRKLHSQGVLKNKWSILYLLLSLSEDPRRQPSKVSSYATLFAQALPRDAHSTPYYYARPQTLPLSYQDRSAQSAQSSGSVGSSGISSIGLCALSGPAPAPQSLLPGQSNQAPGVGDCLRQQLGSRLAWTLTANQPSSQATTSKGVPSAVSRNMTRSRREGDTGGTMEITEAALVRDILYVFQGIDGKNIKMNNTENCYKVEGKANLSRSLRDTAVRLSELGWLHNKIRRYTDQRSLDRSFGLVGQSFCAALHQELREYYRLLSVLHSQLQLEDDQGVNLGLESSLTLRRLLVWTYDPKIRLKTLAALVDHCQGRKGGELASAVHAYTKTGDPYMRSLVQHILSLVSHPVLSFLYRWIYDGELEDTYHEFFVASDPTVKTDRLWHDKYTLRKSMIPSFMTMDQSRKVLLIGKSINFLHQVCHDQTPTTKMIAVTKSAESPQDAADLFTDLENAFQGKIDAAYFETSKYLLDVLNKKYSLLDHMQAMRRYLLLGQGDFIRHLMDLLKPELVRPATTLYQHNLTGILETAVRATNAQFDSPEILRRLDVRLLEVSPGDTGWDVFSLDYHVDGPIATVFTRECMSHYLRVFNFLWRAKRMEYILTDIRKGHMCNAKLLRNMPEFSGVLHQCHILASEMVHFIHQMQYYITFEVLECSWDELWNKVQQAQDLDHIIAAHEVFLDTIISRCLLDSDSRALLNQLRAVFDQIIELQNAQDAIYRAALEELQRRLQFEEKKKQREIEVEMCLYCV

SEQ ID NO: 902521 - protein, 611 aa, Homo sapiens
MATPDQKSPNVLLQNLCCRILGRSEADVAQQFQYAVRVIGSNFAPTVERDEFLVAEKIKKELIRQRREADAALFSELHRKLHSQGVLKNKWSILYLLLSLSEDPRRQPSKVSSYATLFAQALPRDAHSTPYYYARPQTLPLSYQDRSAQSAQSSGSVGSSGISSIGLCALSGPAPAPQSLLPGQSNQAPGVGDCLRQQLGSRLAWTLTANQPSSQATTSKGVPSAVSRNMTRSRREGDTGGTMEITEAALVRDILYVFQGIDGKNIKMNNTENCYKVEGKANLSRSLRDTAVRLSELGWLHNKIRRYTDQRSLDRSFGLVGQSFCAALHQELREYYRLLSVLHSQLQLEDDQGVNLGLESSLTLRRLLVWTYDPKIRLKTLAALVDHCQGRKGGELASAVHAYTKTGDPYMRSLVQHILSLVSHPVLSFLYRWIYDGELEDTYHEFFVASDPTVKTDRLWHDKYTLRKSMIPSFMTMDQSRKVLLIGKSINFLHQVCHDQTPTTKMIAVTKSAESPQDAADLFTDLENAFQGKIDAAYFETSKYLLDVLNKKYSLLDHMQAMRRYLLLGQGDFIRHLMDLLKSLQVTLDGMSSASIIMLTDQLQLCLLENV

SEQ ID NO: 902522 - protein, 890 aa, Homo sapiens
MVENRTFYADVAQQFQYAVRVIGSNFAPTVERDEFLVAEKIKKELIRQRREADAALFSELHRKLHSQGVLKNKWSILYLLLSLSEDPRRQPSKVSSYATLFAQALPRDAHSTPYYYARPQTLPLSYQDRSAQSAQSSGSVGSSGISSIGLCALSGPAPAPQSLLPGQSNQAPGVGDCLRQQLGSRLAWTLTANQPSSQATTSKGVPSAVSRNMTRSRREGDTGGTMEITEAALVRDILYVFQGIDGKNIKMNNTENCYKVEGKANLSRSLRDTAVRLSELGWLHNKIRRYTDQRSLDRSFGLVGQSFCAALHQELREYYRLLSVLHSQLQLEDDQGVNLGLESSLTLRRLLVWTYDPKIRLKTLAALVDHCQGRKGGELASAVHAYTKTGDPYMRSLVQHILSLVSHPVLSFLYRWIYDGELEDTYHEFFVASDPTVKTDRLWHDKYTLRKSMIPSFMTMDQSRKVLLIGKSINFLHQVCHDQTPTTKMIAVTKSAESPQDAADLFTDLENAFQGKIDAAYFETSKYLLDVLNKKYSLLDHMQAMRRYLLLGQGDFIRHLMDLLKPELVRPATTLYQHNLTGILETAVRATNAQFDSPEILRRLDVRLLEVSPGDTGWDVFSLDYHVDGPIATVFTRECMSHYLRVFNFLWRAKRMEYILTDIRKGHMCNAKLLRNMPEFSGVLHQCHILASEMVHFIHQMQYYITFEVLECSWDELWNKVQQAQDLDHIIAAHEVFLDTIISRCLLDSDSRALLNQLRAVFDQIIELQNAQDAIYRAALEELQRRLQFEEKKKQREIEGQWGVTAAEEEEENKRIGEFKESIPKMCSQLRILTHFYQGIVQQFLVLLTTSSDESLRFLSFRLDFNEHYKAREPRLRVSLGTRGRRSSHT

SEQ ID NO: 902523 - protein, 484 aa, Homo sapiens
PYPLLSGTLSCCETQLEDTYHEFFVASDPTVKTDRLWHDKYTLRKSMIPSFMTMDQSRKVLLIGKSINFLHQVCHDQTPTTKMIAVTKSAESPQDAADLFTDLENAFQGKIDAAYFETSKYLLDVLNKKYSLLDHMQAMRRYLLLGQGDFIRHLMDLLKPELVRPATTLYQHNLTGILETAVRATNAQFDSPEILRRLDVRLLEVSPGDTGWDVFSLDYHVDGPIATVFTRECMSHYLRVFNFLWRAKRMEYILTDIRKGHMCNAKLLRNMPEFSGVLHQCHILASEMVHFIHQMQYYITFEVLECSWDELWNKVQQAQDLDHIIAAHEVFLDTIISRCLLDSDSRALLNQLRAVFDQIIELQNAQDAIYRAALEELQRRLQFEEKKKQREIEGQWGVTAAEEEEENKRIGEFKESIPKMCSQLRILTHFYQGIVQQFLVLLTTSSDESLRFLSFRLDFNEHYKAREPRLRVSLGTRGRRSSHT

SEQ ID NO: 902524 - protein, 439 aa, Homo sapiens
MATPDQKSPNVLLQNLCCRILGRSEADVAQQFQYAVRVIGSNFAPTVERDEFLVAEKIKKELIRQRREADAALFSELHRKLHSQGVLKNKWSILYLLLSLSEDPRRQPSKVSSYATLFAQALPRDAHSTPYYYARPQTLPLSYQDRSAQSAQSSGSVGSSGISSIGLCALSGPAPAPQSLLPGQSNQAPGVGDCLRQQLGSRLAWTLTANQPSSQATTSKGVPSAVSRNMTRSRREGDTGGTMEITEAALVRDILYVFQGIDGKNIKMNNTENCYKVEGKANLSRSLRDTAVRLSELGWLHNKIRRYTDQRSLDRSFGLVGQSFCAALHQELREYYRLLSVLHSQLQLEDDQGVNLGLESSLTLRRLLVWTYDPKIRLKTLAALVDHCQGPTRVFPTHVFPTRDFPTRDFPTRDFPMHVFPTRVFPTRVWHSLCFRTRL

SEQ ID NO: 902525 - protein, 133 aa, Homo sapiens [sequence omitted]

SEQ ID NO: 902526 - protein, 715 aa, Homo sapiens
HGRFQAALTVLACPLASVWRKAVPVSSAVGAPGSASPGIPQNPRALLFREVLRADPHSCRCPDSTPSSLLGPYPRAGLPMRPLSGRLPTAAPDIGPCAQGWSLGLGEGTDGWRGSCRKRGERRPPPVPPQLLRVGKAAPAALTFLPSGCEACSQRAVGFPECLSVHKLDPQEAPTGRSSSPSPALRPALAVLAQWVPIVRALSAQMGPSGPEDLWGRLGPQEEPGCSGAPVGAGCGCFPACHEEVGRPACHAQLWVLQLGHSLVLPLRPPAMVSRDQAHLGPKYVGLWDFKSRTDEELSFRAGDVFHVARKEEQWWWATLLDEAGGAVAQGYVPHNYLAERETVESEPWFFGCISRSEAVRRLQAEGNATGAFLIRVSEKPSADYVLSVRDTQAVRHYKIWRRAGGRLHLNEAVSFLSLPELVNYHRAQSLSHGLRLAAPCRKHEPEPLPHWDDWERPREEFTLCRKLGSGYFGEVFEGLWKDRVQVAIKVISRDAAVGDPAMKKLRHKHILALYAVVSVGDPVYIITELMAKGSLLELLRDSDEKVLPVSELLDIAWQVAEGMCYLESQNYIHRDLAARNILVGENTLCKVGDFGLARLIKEDVYLSHDHNIPYKWTAPEALSRGHYSTKSDVWSFGILLHEMFSRGQVPYPGMSNHEAFLRVDAGYRMPCPLECPPSVHKLMLTCWCRDPEQRPCFKALRERLSSFTSYENPT

SEQ ID NO: 902527 - protein, 656 aa, Homo sapiens
HGRFQAALTVLACPLASVWRKAVPVSSAVGAPGSASPGIPQNPRALLFREVLRADPHSCRCPDSTPSSLLGPYPRAGLPMRPLSGRLPTAAPDIGPCAQGWSLGLGEGTDGWRGSCRKRGERRPPPVPPQLLRVGKAAPAALTFLPSGCEACSQRAVGFPECLSVHKLDPQEAPTGRSSSPSPALRPALAVLAQWVPIVRALSAQMGPSGPEDLWGRLGPQEEPGCSGAPVGAGCGCFPACHEEVGRPACHAQLWVLQLGHSLVLPLRPPAMVSRDQAHLGPKYVGLWDFKSRTDEELSFRAGDVFHVARKEEQWWWATLLDEAGGAVAQGYVPHNYLAERETVESEPWFFGCISRSEAVRRLQAEGNATGAFLIQVRDTQAVRHYKIWRRAGGRLHLNEAVSFLSLPELVNYHRAQSLSHGLRLAAPCRKHEPEPLPHWDDWERPREEFTLCRKLGSGYFGEVFEGLWKDRVQVAIKVISRDSDEKVLPVSELLDIAWQVAEGMCYLESQNYIHRDLAARNILVGENTLCKVGDFGLARLIKEDVYLSHDHNIPYKWTAPEALSRGHYSTKSDVWSFGILLHEMFSRGQVPYPGMSNHEAFLRVDAGYRMPCPLECPPSVHKLMLTCWCRDPEQRPCFKALRERLSSFTSYENPT

SEQ ID NO: 902528 - protein, 681 aa, Homo sapiens
HGRFQAALTVLACPLASVWRKAVPVSSAVGAPGSASPGIPQNPRALLFREVLRADPHSCRCPDSTPSSLLGPYPRAGLPMRPLSGRLPTAAPDIGPCAQGWSLGLGEGTDGWRGSCRKRGERRPPPVPPQLLRVGKAAPAALTFLPSGCEACSQRAVGFPECLSVHKLDPQEAPTGRSSSPSPALRPALAVLAQWVPIVRALSAQMGPSGPEDLWGRLGPQEEPGCSGAPVGAGCGCFPACHEEVGRPACHAQLWVLQLGHSLVLPLRPPAMVSRDQAHLGPKYVGLWDFKSRTDEELSFRAGDVFHVARKEEQWWWATLLDEAGGAVAQGYVPHNYLAERETVESEPWFFGCISRSEAVRRLQAEGNATGAFLIRVSEKPSADYVLSVRDTQAVRHYKIWRRAGGRLHLNEAVSFLSLPELVNYHRAQSLSHGLRLAAPCRKHEPEPLPHWDDWERPREEFTLCRKLGSGYFGEVFEGLWKDRVQVAIKVISRDAAVGDPAMKKLRHKHILALYAVVSVGDPVYIITELMAKGSLLELLRDSDEKVLPVSELLDIAWQVAEGMCYLESQNYIHRDLAARNILVGENTLCKVGDFGLARLIKEDVYLSHDHNIPYKWTAPEALSRGHYSTKSDVWSFGILLHEMFSRGQVPYPGDSGSCYVAQAGLELLGSSNPPASGLQA

SEQ ID NO: 902529 - protein, 722 aa, Homo sapiens
HGRFQAALTVLACPLASVWRKAVPVSSAVGAPGSASPGIPQNPRALLFREVLRADPHSCRCPDSTPSSLLGPYPRAGLPMRPLSGRLPTAAPDIGPCAQGWSLGLGEGTDGWRGSCRKRGERRPPPVPPQLLRVGKAAPAALTFLPSGCEACSQRAVGFPECLSVHKLDPQEAPTGRSSSPSPALRPALAVLAQWVPIVRALSAQMGPSGPEDLWGRLGPQEEPGCSGAPVGAGCGCFPACHEEVGRPACHAQLWVLQLGHSLVLPLRPPAMVSRDQAHLGPKYVGLWDFKSRTDEELSFRAGDVFHVARKEEQWWWATLLDEAGGAVAQGYVPHNYLAERETVESEPWFFGCISRSEAVRRLQAEGNATGAFLIRVSEKPSADYVLSVRDTQAVRHYKIWRRAGGRLHLNEAVSFLSLPELVNYHRAQSLSHGLRLAAPCRKHEPEPLPHWDDWERPREEFTLCRKLGSGYFGEVFEGLWKDRVQVAIKVISRDNLLHQQMLQSEIQAMKKLRHKHILALYAVVSVGDPVYIITELMAKGSLLELLRDSDEKVLPVSELLDIAWQVAEGMCYLESQNYIHRDLAARNILVGENTLCKVGDFGLARLIKEDVYLSHDHNIPYKWTAPEALSRGHYSTKSDVWSFGILLHEMFSRGQVPYPGMSNHEAFLRVDAGYRMPCPLECPPSVHKLMLTCWCRDPEQRPCFKALRERLSSFTSYENPT

SEQ ID NO: 902530 - protein, 374 aa, Homo sapiens
VTGCVGLAPGGPKQQAGEAVKRPSGRGPWWRPLYYVQTHDLVSRVTRRPTTSLVSRGAGVGSGRRLVSSQVQKTLSPENSPRWFFGCISRSEAVRRLQAEGNATGAFLIRCGTRRLCGTTRSGYFGEVFEGLWKDRVQVAIKVISRDNLLHQQMLQSEIQAMKKLRHKHILALYAVVSVGDPVYIITELMAKGSLLELLRDSDEKVLPVSELLDIAWQVAEGMCYLESQNYIHRDLAARNILVGENTLCKVGDFGLARLIKEDVYLSHDHNIPYKWTAPEALSRGHYSTKSDVWSFGILLHEMFSRGQVPYPGMSNHEAFLRVDAGYRMPCPLECPPSVHKLMLTCWCRDPEQRPCFKALRERLSSFTSYENPT

SEQ ID NO: 902531 - protein, 546 aa, Homo sapiens
HGRFQAALTVLACPLASVWRKAVPVSSAVGAPGSASPGIPQNPRALLFREVLRADPHSCRCPDSTPSSLLGPYPRAGLPMRPLSGRLPTAAPDIGPCAQGWSLGLGEGTDGWRGSCRKRGERRPPPVPPQLLRVGKAAPAALTFLPSGCEACSQRAVGFPECLSVHKLDPQEAPTGRSSSPSPALRPALAVLAQWVPIVRALSAQMGPSGPEDLWGRLGPQEEPGCSGAPVGAGCGCFPACHEEVGRPACHAQLWVLQLGHSLVLPLRPPAMVSRDQAHLGPKYVGLWDFKSRTDEELSFRAGDVFHVARKEEQWWWATLLDEAGGAVAQGYVPHNYLAERETVESEPWFFGCISRSEAVRRLQAEGNATGAFLIRVSEKPSADYVLSVRDTQAVRHYKIWRRAGGRLHLNEAVSFLSLPELVNYHRAQSLSHGLRLAAPCRKHEPEPLPHWDDWERPREEFTLCRKLGSGYFGEVFEGLWKDRVQVAIKVISRGEWAPIRALCGPVPALGHPPTPPTGTSGLEPQAAPTASMREWFPFNCTYVFT

SEQ ID NO: 902532 - protein, 1369 aa, Homo sapiens [sequence omitted]

SEQ ID NO: 902533 - protein, 500 aa, Homo sapiens
MRPEAAAGAAPELRTRKRPGRGRGVPASLRRGYRVHGAVTAPISLPAPQPRARPSGRYPSCSAAAVAVAAAAAAMANDSGGPGGPSPSERDRQYCELCGKMENLLRCSRCRSSFYCCKEHQRQDWKKHKLVCQGSEGALGHGVGPHQHSGPAPPAAVPPPRAGAREPRKAAARRDNASGDAAKGKVKAKPPADPAAAASPCRAAAGGQGSAVAAEAEPGKEEPPARSSLFQEKANLYPPSNTPGDALSPGGGLRPNGQTKPLPALKLALEYIVPCMNKHGICVVDDFLGKETGQQIGDEVRALHDTGKFTDGQLVSQKSDSSKDIRGDKITWIEGKEPGCETIGLLMSSMDDLIRHCNGKLGSYKINGRTKAMVACYPGNGTGYVRHVDNPNGDGRCVTCIYYLNKDWDAKVSGGILRIFPEGKAQFADIEPKFDRLLFFWSDRRNPHEVQPAYATRYAITVWYFDADERARAKVKYLTGEKGVRVELNKPSDSVGKDVF

SEQ ID NO: 902534 - protein, 500 aa, Homo sapiens; identical to SEQ ID NO: 902533

SEQ ID NO: 902535 - protein, 500 aa, Homo sapiens; identical to SEQ ID NO: 902533

SEQ ID NO: 902536 - protein, 302 aa, Homo sapiens
ARSVYFEKIRCSAVAAEAEPGKEEPPARSSLFQEKANLYPPSNTPGDALSPGGGLRPNGQTKPLPALKLALEYIVPCMNKHGICVVDDFLGKETGQQIGDEVRALHDTGKFTDGQLVSQKSDSSKDIRGDKITWIEGKEPGCETIGLLMSSMDDLIRHCNGKLGSYKINGRTKAMVACYPGNGTGYVRHVDNPNGDGRCVTCIYYLNKDWDAKVSGGILRIFPEGKAQFADIEPKFDRLLFFWSDRRNPHEVQPAYATRYAITVWYFDADERARAKVKYLTGEKGVRVELNKPSDSVGKDVF

SEQ ID NO: 902537 - protein, 439 aa, Homo sapiens
MRPEAAAGAAPELRTRKRPGRGRGVPASLRRGYRVHGAVTAPISLPAPQPRARPSGRYPSCSAAAVAVAAAAAAMANDSGGPGGPSPSERDRQYCELCGKMENLLRCSRCRSSFYCCKEHQRQDWKKHKLVCQGSEGALGHGVGPHQHSGPAPPAAVPPPRAGAREPRKAAARRDNASGDAAKGKVKAKPPADPAAAASPCRAAAGGQGSAVAAEAEPGKEEPPARSSLFQEKANLYPPSNTPGDALSPGGGLRPNGQTKPLPALKLALEYIVPCMNKHGICVVDDFLGKETGQQIGDEVRALHDTGKFTDGQLVSQKSDSSKDIRGDKITWIEGKEPGCETIGLLMSSMDDLIRHCNGKLGSYKINGRTKAMVACYPGNGTGYVRHVDNPNGDGRCVTCIYYLNKDWDAKPNLIDCCFSGLTVATLMKYNQHMLQGTQ

SEQ ID NO: 902538 - protein, 500 aa, Homo sapiens; identical to SEQ ID NO: 902533

SEQ ID NO: 902539 - protein, 473 aa, Homo sapiens
MRPEAAAGAAPELRTRKRPGRGRGVPASLRRGYRVHGAVTAPISLPAPQPRARPSGRYPSCSAAAVAVAAAAAAMANDSGGPGGPSPSERDRQYCELCGKMENLLRCSRCRSSFYCCKEHQRQDWKKHKLVCQGSEGALGHGVGPHQHSGPAPPAAVPPPRAGAREPRKAAARRDNASGDAAKGKVKAKPPADPAAAASPCRAAAGGQGSAVAAEAEPGKEEPPARSSLFQEKANLYPPSNTPGDALSPGGGLRPNGQTKPLPALKLALEYIVPCMNKHGICVVDDFLGKETGQQIGDEVRALHDTGKFTDGQLVSQKSDSSKDIRGDKITWIEGKEPGCETIGLLMSSMDDLIRHCNGKLGSYKINGRTKAMVACYPGNGTGYVRHVDNPNGDGRCVTCIYYLNKDWDAKVSGGILRIFPEGKAQFADIEPKFDRLLFFWSDRRNPHEVQPAYATSYPELLCTCDVDIPDSL

SEQ ID NO: 902540 - protein, 112 aa, Homo sapiens
  misc_feature (20)..(20): Xaa can be any naturally occurring amino acid
  misc_feature (23)..(23): Xaa can be any naturally occurring amino acid
QLLPVYRPPRNPPRNETFLXEDXVSGGILRIFPEGKAQFADIEPKFDRLLFFWSDRRNPHEVQPAYATRYAITVWYFDADERARAKVKYLTGEKGVRVELNKPSDSVGKDVF

SEQ ID NO: 902541 - protein, 500 aa, Homo sapiens; identical to SEQ ID NO: 902533

SEQ ID NO: 902542 - protein, 128 aa, Homo sapiens
MVACYPGNGTGYVRHVDNPNGDGRCVTCIYYLNKDWDAKVSGGILRIFPEGKAQFADIEPKFDRLLFFWSDRRNPHEVQPAYATRYAITVWYFDADERARAKVKYLTGEKGVRVELNKPSDSVGKDVF

SEQ ID NO: 902543 - protein, 416 aa, Homo sapiens
MELRVGNKYRLGRKIGSGSFGDIYLGANIASGEEVAIKLECVKTKHPQLHIESKFYKMMQGGVGIPSIKWCGAEGDYNVMVMELLGPSLEDLFNFCSRKFSLKTVLLLADQMISRIEYIHSKNFIHRDVKPDNFLMGLGKKGNLVYIIDFGLAKKYRDARTHQHIPYRENKNLTGTARYASINTHLGIEQSRRDDLESLGYVLMYFNLGSLPWQGLKAATKRQKYERISEKKMSTPIEVLCKGYPSEFSTYLNFCRSLRFDDKPDYSYLRQLFRNLFHRQGFSYDYVFDWNMLKFGAARNPEDVDRERREHEREERMGQLRGSATRALPPGPPTGATANRLRSAAEPVASTPASRIQPAGNTSPRAISRVDRERKVSMRLHRGAPANVSSSDLTGRQEVSRIPASQTSVPFDHLGK

SEQ ID NO: 902544 - protein, 416 aa, Homo sapiens; identical to SEQ ID NO: 902543

SEQ ID NO: 902545 - protein, 416 aa, Homo sapiens; identical to SEQ ID NO: 902543

SEQ ID NO: 902546 - protein, 416 aa, Homo sapiens; identical to SEQ ID NO: 902543

SEQ ID NO: 902547 - protein, 408 aa, Homo sapiens
LKLIVVMAAQACEYTKNGANIASGEEVAIKLECVKTKHPQLHIESKFYKMMQGGVGIPSIKWCGAEGDYNVMVMELLGPSLEDLFNFCSRKFSLKTVLLLADQMISRIEYIHSKNFIHRDVKPDNFLMGLGKKGNLVYIIDFGLAKKYRDARTHQHIPYRENKNLTGTARYASINTHLGIEQSRRDDLESLGYVLMYFNLGSLPWQGLKAATKRQKYERISEKKMSTPIEVLCKGYPSEFSTYLNFCRSLRFDDKPDYSYLRQLFRNLFHRQGFSYDYVFDWNMLKFGAARNPEDVDRERREHEREERMGQLRGSATRALPPGPPTGATANRLRSAAEPVASTPASRIQPAGNTSPRAISRVDRERKVSMRLHRGAPANVSSSDLTGRQEVSRIPASQTSVPFDHLGK

SEQ ID NO: 902548 - protein, 416 aa, Homo sapiens; identical to SEQ ID NO: 902543

SEQ ID NO: 902549 - protein, 416 aa, Homo sapiens; identical to SEQ ID NO: 902543

SEQ ID NO: 902550 - protein, 416 aa, Homo sapiens; identical to SEQ ID NO: 902543

SEQ ID NO: 902551 - protein, 416 aa, Homo sapiens; identical to SEQ ID NO: 902543

SEQ ID NO: 902552 - protein, 431 aa, Homo sapiens [sequence omitted]

SEQ ID NO: 902553 - protein, 416 aa, Homo sapiens; identical to SEQ ID NO: 902543

SEQ ID NO: 902554 - protein, 369 aa, Homo sapiens
MELRVGNKYRLGRKIGSGSFGDIYLGANIASGEEVAIKLECVKTKHPQLHIESKFYKMMQGGVGIPSIKWCGAEGDYNVMVMELLGPSLEDLFNFCSRKFSLKTVLLLADQMISRIEYIHSKNFIHRDVKPDNFLMGLGKKGNLVYIIDFGLAKKYRDARTHQHIPYRENKNLTGTARYASINTHLGIEQSRRDDLESLGYVLMYFNLGSLPWQGLKAATKRQKYERISEKKMSTPIEVLCKGYPSEFSTYLNFCRSLRFDDKPDYSYLRQLFRNLFHRQGFSYDYVFDWNMLKFGASSSQAQPRDSPMTAKGPFCPRPCPCAGPTYSPTYWCPAPLGTQSPPDRPVEEVEELSPQNYWPVVWTPGPHF

SEQ ID NO: 902555 - protein, 336 aa, Homo sapiens
MELRVGNKYRLGRKIGSGSFGDIYLGANIASGEEVAIKLECVKTKHPQLHIESKFYKMMQGGVGIPSIKWCGAEGDYNVMVMELLGPSLEDLFNFCSRKFSLKTVLLLADQMISRIEYIHSKNFIHRDVKPDNFLMGLGKKGNLVYIIDFGLAKKYRDARTHQHIPYRENKNLTGTARYASINTHLGIEQSRRDDLESLGYVLMYFNLGSLPWQGLKAATKRQKYERISEKKMSTPIEVLCKGYPSEFSTYLNFCRSLRFDDKPDYSYLRQLFRNLFHRQGFSYDYVFDWNMLKFMRPPSCQPPALPCGRPQDELGCSPESRGCGPGAARTRTRGR

SEQ ID NO: 902556 - protein, 351 aa, Homo sapiens
LASLPRAGANIASGEEVAIKLECVKTKHPQLHIESKFYKMMQGGVGIPSIKWCGAEGDYNVMVMELLGPSLEDLFNFCSRKFSLKTVLLLADQMISRIEYIHSKNFIHRDVKPDNFLMGLGKKGNLVYIIDFGLAKKYRDARTHQHIPYRENKNLTGTARYASINTHLGIEQSRRDDLESLGYVLMYFNLGSLPWQGLKAATKRQKYERISEKKMSTPIEVLCKGYPSEFSTYLNFCRSLRFDDKPDYSYLRQLFRNLFHRQGFSYDYVFDWNMLKFGASSSQAQPRDSPMTAKGPFCPRPCPCAGPTYSPTYWCPAPLGTQSPPDRPVEEVEELSPQNYWPVVWTPGPHF

SEQ ID NO: 902557 - protein, 419 aa, Homo sapiens
MELRVGNKYRLGRKIGSGSFGDIYLGANIASGEEVAIKLECVKTKHPQLHIESKFYKMMQGGVGIPSIKWCGAEGDYNVMVMELLGPSLEDLFNFCSRKFSLKTVLLLADQMISRIEYIHSKNFIHRDVKPDNFLMGLGKKGNLVYIIDFGLAKKYRDARTHQHIPYRENKNLTGTARYASINTHLGIEQSRRDDLESLGYVLMYFNLGSLPWQGLKAATKRQKYERISEKKMSTPIEVLCKGYPSEFSTYLNFCRSLRFDDKPDYSYLRQLFRNLFHRQGFSYDYVFDWNMLKFGAARNPEDVDRERREHEREERMGQLRGSATRALPPGPPTGATANRLRSAAEPVASTPASRIQPAGNTSPRAISRVDRERKVSMRLHRGAPANVSSSDLTGRQEVSRIPASQVSCPPASPSGPQN

SEQ ID NO: 902558 - protein, 369 aa, Homo sapiens; identical to SEQ ID NO: 902554

SEQ ID NO: 902559 - protein, 498 aa, Homo sapiens
MELRVGNKYRLGRKIGSGSFGDIYLGANIASGEEVAIKLECVKTKHPQLHIESKFYKMMQGGVGIPSIKWCGAEGDYNVMVMELLGPSLEDLFNFCSRKFSLKTVLLLADQMISRIEYIHSKNFIHRDVKPDNFLMGLGKKGNLVYIIDFGLAKKYRDARTHQHIPYRENKNLTGTARYASINTHLGIEQSRRDDLESLGYVLMYFNLGSLPWQGLKAATKRQKYERISEKKMSTPIEVLCKGYPSEFSTYLNFCRSLRFDDKPDYSYLRQLFRNLFHRQGFSYDYVFDWNMLKFVSHLEAKAGLGDWMGKALTQRARVSWWREGLPTDGRYELDSVVDLTGVQSPPASSVLTACATMGSRARQGAVSRRNKEDLASPGVPPGCPQQGMGGAGGAPCCPDCCLHRPAAPVLHIPGGYLHHGPSGQPGPSHGACFLLGHGPLGLARQLFCFPLLRVPGVGLGGEQHWPAVPRALESVKLYVLFHISSGKGGFLEPGSAP

SEQ ID NO: 902560 - protein, 117 aa, Homo sapiens
MTVADFPCWAFPLSPWPPGSSSASPWSGWGGGGGRRPLRVCVCVCVCGCIDLCFPRQQVPRPAPPASPNSRSPVSTNKDMGVGGDLRIPQSSEGPRCHRSPPSPSSAGGSSIFHSWF

SEQ ID NO: 902561 - protein, 101 aa, Homo sapiens
DCINAADCINAADCINAADCIQRRCNGNLHPEARPFPCYPTVDRTPCVVGCTGVLGSVDPWGLEATLSTYSHCVPRSSQLAGKEFNTAKDRGPYDDGWMLV

SEQ ID NO: 902562 - protein, 105 aa, Homo sapiens
LGSEGSSLCPSQFELQGKEEEVFALRFSTGGECMSPGYLSGPCVDIPSCLLKSLALNQPGLCSLRHSEPGGGLSLQQSNIFCSVVNSRLFSQGPSALPGEERDPG

SEQ ID NO: 902563 - protein, 416 aa, Homo sapiens; identical to SEQ ID NO: 902543

SEQ ID NO: 902564 - protein, 416 aa, Homo sapiens; identical to SEQ ID NO: 902543

SEQ ID NO: 902565 - protein, 416 aa, Homo sapiens; identical to SEQ ID NO: 902543

SEQ ID NO: 902566 - protein, 416 aa, Homo sapiens; identical to SEQ ID NO: 902543

SEQ ID NO: 902567 - protein, 416 aa, Homo sapiens; identical to SEQ ID NO: 902543

SEQ ID NO: 902568 - protein, 416 aa, Homo sapiens; identical to SEQ ID NO: 902543

SEQ ID NO: 902569 - protein, 498 aa, Homo sapiens; identical to SEQ ID NO: 902559

SEQ ID NO: 902570 - protein, 260 aa, Homo sapiens
LLDPATWQRLLATVRRSSLALKAAEALLTGRLGFHHSRIGKAMALLPPFLASHRLEVSRDSGWLGQCWLQGVWERGPHSGLLYPLQHPPAEFSTYLNFCRSLRFDDKPDYSYLRQLFRNLFHRQGFSYDYVFDWNMLKFGAARNPEDVDRERREHEREERMGQLRGSATRALPPGPPTGATANRLRSAAEPVASTPASRIQPAGNTSPRAISRVDRERKVSMRLHRGAPANVSSSDLTGRQEVSRIPASQTSVPFDHLGK

SEQ ID NO: 902571 - protein, 498 aa, Homo sapiens; identical to SEQ ID NO: 902559

SEQ ID NO: 902572 - protein, 369 aa, Homo sapiens; identical to SEQ ID NO: 902554

SEQ ID NO: 902573 - protein, 498 aa, Homo sapiens; identical to SEQ ID NO: 902559

SEQ ID NO: 902574 - protein, 158 aa, Homo sapiens
  misc_feature (152)..(152): Xaa can be any naturally occurring amino acid
MELRVGNKYRLGRKIGSGSFGDIYLGANIASGEEVAIKLECVKTKHPQLHIESKFYKMMQGGVGIPSIKWCGAEGDYNVMVMELLGPSLEDLFNFCSRKFSLKTVLLLADQMISRIEYIHPKNFLQTVRKILSRLFRVFVHVYIHHFDRIAXMGSEAH

SEQ ID NO: 902575 - protein, 323 aa, Homo sapiens
ERRSHTWVPAPQRSRDSPRRRARRPELPKPSRAAHTPGLHSLFQHPLVLAAARVPETELPQRPRRRRCEGPMRAPLLPPAPVVLSLLILGSGHYAAGLDLNDTYSGKREPFSGDHSADGFEVTSRSEMSSGSEISPVSEMPSSSEPSSGADYDYSEEYDNEPQIPGYIVDDSVRVEQVVKPPQNKTESENTSDKPKRKKKGGKNGKNRRNRKKKNPCNAEFQNFCIHGECKYIEHLEAVTCKCQQEYFGERCGEKSMKTHSMIDSSLSKIALAAIAAFMSAVILTAVAVITVQLRRQYVRKYEGEAEERKKLRQENGNVHAIA

SEQ ID NO: 902576 - protein, 323 aa, Homo sapiens; identical to SEQ ID NO: 902575

SEQ ID NO: 902577 - protein, 262 aa, Homo sapiens
ERRSHTWVPAPQRSRDSPRRRARRPELPKPSRAAHTPGLHSLFQHPLVLAAARVPETELPQRPRRRRCEGPMRAPLLPPAPVVLSLLILGSGHYAAGLDLNDTYSGKREPFSGDHSADGFEVTSRSEMSSGSEISPVSEMPSSSEPSSGADYDYSEEYDNEPQIPGYIVDDSVRVEQVVKPPQNKTESENTSDKPKRKKKGGKNGKNRRNRKKKNPCNAEFQNFCIHGECKYIEHLEAVTCKCQQEYFVTVLGYIGILYITS

SEQ ID NO: 902578 - protein, 106 aa, Homo sapiens
MSSLSEYAFRMSRLSARLFGEVTRPTNSKSMKVVKLFSELPLAKKKETYDWYPNHHTYAELMQTLRFLGLYRDEHQDFMDEQKRLKKLRGKEKPKKGEGKRAAKRK

SEQ ID NO: 902579 - protein, 106 aa, Homo sapiens; identical to SEQ ID NO: 902578

SEQ ID NO: 902580 - protein, 106 aa, Homo sapiens; identical to SEQ ID NO: 902578

SEQ ID NO: 902581 - protein, 106 aa, Homo sapiens; identical to SEQ ID NO: 902578

SEQ ID NO: 902582 - protein, 223 aa, Homo sapiens
MEDVKLEFPSLPQCKEDAEEWTYPMRREMQEILPGLFLGPYSSAMKSKLPVLQKHGITHIICIRQNIEANFIKPNFQQLFRYLVLDIADNPVENIIRFFPMTKEFIDGSLQMGGKVLVHGNAGISRSAAFVIAYIMETFGMKYRDAFAYVQERRFCINPNAGFVHQLQEYEAIYLAKLTIQMMSPLQIERSLSVHSGTTGSLKRTHEEEDDFGTMQVATAQNG

SEQ ID NO: 902583 - protein, 164 aa, Homo sapiens
MEDVKLEFPSLPQCKEDAEEWTYPMRREMQEILPGLFLGPYSSAMKSKLPVLQKHGITHIICIRQNIEANFIKPNFQQLFRYLVLDIADNPVENIIRFFPMTKEFIDGSLQNGRFPSLPQCKEDAEEWTYPMRREMQEILPGLFLGPYSSAMKSKLPVLQKHLE

SEQ ID NO: 902584 - protein, 72 aa, Homo sapiens
MCWDICWLNSKGELCLHFKKVEAEGMVSILVCNSKKFSWLKFKGKICGMDEPFSYAWVWTFSVVFLRLGVKC

SEQ ID NO: 902585 - protein, 223 aa, Homo sapiens; identical to SEQ ID NO: 902582

SEQ ID NO: 902586 - protein, 534 aa, Homo sapiens
GQGGCDQISRGSGKRPGNWAAGPAPASGGKMAAQALALLREVARLEAPLEELRALHSVLQAVPLNELRQQAAELRLGPLFSLLNENHREKTTLCVSILERLLQAMEPVHVARNLRVDLQRGLIHPDDSVKILTLSQIGRIVENSDAVTEILNNAELLKQIVYCIGGENLSVAKAAIKSLSRISLTQAGLEALFESNLLDDLKSVMKTNDIVRYRVYELIIEISSVSPESLNYCTTSGLVTQLLRELTGEDVLVRATCIEMVTSLAYTHHGRQYLAQEGVIDQISNIIVGADSDPFSSFYLPGFVKFFGNLAVMDSPQQICERYPIFVEKVFEMIESQDPTMIGVAVDTVGILGSNVEGKQVLQKTGTRFERLLMRIGHQSKNAPVELKIRCLDAISSLLYLPPEQQTDDLLRMTESWFSSLSRDPLELFRGISSQPFPELHCAALKVFTAIANQPWAQKLMFNSPGFVEYVVDRSVEHDKASKDAKYELVKALANSKTIAEIFGNPNYLRLRTYLSEGPYYVKPVSTTAVEGAE

SEQ ID NO: 902587 - protein, 182 aa, Homo sapiens
GQGGCDQISRGSGKRPGNWAAGPAPASGGKMAAQALALLREVARLEAPLEELRALHSVLQAVPLNELRQQAAELRLGPLFSLLNENHREKTTLCVSILERLLQAMEPVHVARNLRVDLQRGLIHPDDSVKILTLSQIGRIVENSDAVTEILNNAELLKQIVYCIGGENLSVAKAVSLLESLT

SEQ ID NO: 902588 - protein, 534 aa, Homo sapiens; identical to SEQ ID NO: 902586

SEQ ID NO: 902589 - protein, 330 aa, Homo sapiens [sequence omitted]

SEQ ID NO: 902590 - protein, 416 aa, Homo sapiens
GQGGCDQISRGSGKRPGNWAAGPAPASGGKMAAQALALLREVARLEAPLEELRALHSVLQAVPLNELRQQAAELRLGPLFSLLNENHREKTTLCVSILERLLQAMEPVHVARNLRVDLQRGLIHPDDSVKILTLSQIGRIVENSDAVTEILNNAELLKQIVYCIGGENLSVAKAAIKSLSRISLTQAGLEALFESNLLDDLKSVMKTNDIVRYRVYELIIEISSVSPESLNYCTTSGLVTQLLRELTGEDVLVRATCIEMVTSLAYTHHGRQYLAQEGVIDQISNIIVGADSDPFSSFYLPGFVKFFGNLAVMDSPQQICERYPIFVEKVFEMIESQDPTMIGVAVDTVGILGSNVEGKQVLQKTGWYDLALFRDILIFDRGSICKFICWWVNYIVETILWVAVLLTMTLYSCLKI

SEQ ID NO: 902591 - protein, 243 aa, Homo sapiens
GQGGCDQISRGSGKRPGNWAAGPAPASGGKMAAQALALLREVARLEAPLEELRALHSVLQAVPLNELRQQAAELRLGPLFSLLNENHREKTTLCVSILERLLQAMEPVHVARNLRVDLQRGLIHPDDSVKILTLSQIGRIVENSDAVTEILNNAELLKQIVYCIGGENLSVAKAAIKSLSRISLTQAGLEALFESNLLDDLKSVMKTNDIVRYRVYESHLYRNGDITGIYSSWATISCSRRSN

SEQ ID NO: 902592 - protein, 303 aa, Homo sapiens
GQGGCDQISRGSGKRPGNWAAGPAPASGGKMAAQALALLREVARLEAPLEELRALHSVLQAVPLNELRQQAAELRLGPLFSLLNENHREKTTLCVSILERLLQAMEPVHVARNLRVDLQRGLIHPDDSVKILTLSQIGRIVENSDAVTEILNNAELLKQIVYCIGGENLSVAKAAIKSLSRISLTQAGLEALFESNLLDDLKSVMKTNDIVRYRVYELIIEISSVSPESLNYCTTSGLVTQLLRELTGEDVLVRATCIEMVTSLAYTHHGRQYLAQEGVIDQISNIIVGADSDPFSSFYLPES

SEQ ID NO: 902593 - protein, 534 aa, Homo sapiens; identical to SEQ ID NO: 902586

SEQ ID NO: 902594 - protein, 534 aa, Homo sapiens; identical to SEQ ID NO: 902586

SEQ ID NO: 902595 - protein, 470 aa, Homo sapiens
GQGGCDQISRGSGKRPGNWAAGPAPASGGKMAAQALALLREVARLEAPLEELRALHSVLQAVPLNELRQQAAELRLGPLFSLLNENHREKTTLCVSILERLLQAMEPVHVARNLRVDLQRGLIHPDDSVKILTLSQIGRIVENSDAVTEILNNAELLKQIVYCIGGENLSVAKAAIKSLSRISLTQAGLEALFESNLLDDLKSVMKTNDIVRYRVYELIIEISSVSPESLNYCTTSGLVTQLLRELTGEDVLVRATCIEMVTSLAYTHHGRQYLAQEGVIDQISNIIVGADSDPFSSFYLPGFVKFFGNLAVMDSPQQICERYPIFVEKVFEMIESQDPTMIGVAVDTVGILGSNVEGKQVLQKTGTRFERLLMRIGHQSKNAPVELKIRCLDAISSLLYLPPEQQTDDLLRMTESWFSSLSRDPLELFRGISSQPFPELHCAALKVFTGRKHLHLEELVGGNQVKNTVE

SEQ ID NO: 902596 - protein, 67 aa, Homo sapiens
MILLLNDYAFNIVVGALMMTSMSGSPVPVERARMRSWVTGPSRELCGCLHQRFPSALLALAALGDGL

SEQ ID NO: 902597 - protein, 124 aa, Homo sapiens
HGVHREQIYRGICRWEDGGQSQVHPPYRNNICWGNEGWHVSRRGNPVLPQRKPIRRHLGKRIGHKGMAQLTNMDPPRKIPKGYYDCGDGFYNPVTRVVKDYRNRFLRNADDDEHEWITRTCRKG

SEQ ID NO: 902598 - protein, 150 aa, Homo sapiens
MSSSRMEGKAKYILPTETIYVGEMKDGMFHGEGTLYFPSGSQYDAIWENGLAIKGTYTFSDGLHYDEKNWHYCDGYDRRFYTEILNGLKPAGMAQLTNMDPPRKIPKGYYDCGDGFYNPVTRVVKDYRNRFLRNADDDEHEWITRTCRKG

SEQ ID NO: 902599 - protein, 161 aa, Homo sapiens
MEYTGSKYIGEYVDGRMEGKAKYILPTETIYVGEMKDGMFHGEGTLYFPSGSQYDAIWENGLAIKGTYTFSDGLHYDEKNWHYCDGYDRRFYTEILNGLKPAGMAQLTNMDPPRKIPKGYYDCGDGFYNPVTRVVKDYRNRFLRNADDDEHEWITRTCRKG

SEQ ID NO: 902600 - protein, 170 aa, Homo sapiens
VRGLNSDVQFKDGGQSKYILPTETIYVGEMKDGMFHGEGTLYFPSGSQYDAIWENGLAIKGTYTFSDGLHYDEKNWHYCDGYDRRFYTEILNGLKPAGMAQLTNMDPPRKIPKGYYDCGDGFYNPVTRVVKDYRNRFLRNAGRFLPTLQHVFSSPTYEYVHLYVQMYAHT

SEQ ID NO: 902601 - protein, 244 aa, Homo sapiens
LSRGSAAGGRALGRPWPGRRVACVGSAGDSGGSGAGGACATAWVCEMAADISESSGADCKGDPRNSAKLDADYPLRVLYCGVCSLPTEYCEYMPDVAKCRQWLEKNFPNEFAKLTVENSPKQEAGISEGQGTAGEEEEKKKQKRGGRGQIKQKKKTVPQKVTIAKIPRAKKKYVTRVCGLATFEIDLKEAQRFFAQKFSCGASVTGEDEIIIQGDFTDDIIDVIQEKWPEVDDDSIEDLGEVKK

SEQ ID NO: 902602 - protein, 68 aa, Homo sapiens
CLAGALLAVGRSGGPGRGDELHVLVQLAIAAGAEPAGPVRPPGFVKWLLTFLNPAGLTAKETQGTVPS

SEQ ID NO: 902603 - protein, 244 aa, Homo sapiens; identical to SEQ ID NO: 902601

SEQ ID NO: 902604 - protein, 244 aa, Homo sapiens; identical to SEQ ID NO: 902601

SEQ ID NO: 902605 - protein, 185 aa, Homo sapiens
LSRGSAAGGRALGRPWPGRRVACVGSAGDSGGSGAGGACATAWVCEMAADISESSGADCKGDPRNSAKLDADYPLRVLYCGVCSLPTEYCEYMPDVAKCRQWLEKNFPNEFAKLTVENSPKQEAGISEGQGTAGEEEEKKKQKRGGRGQIKQKKKTVPQKVTIAKIPRAKKKYVTRVCGLATFGR

SEQ ID NO: 902606 - protein, 244 aa, Homo sapiens; identical to SEQ ID NO: 902601

SEQ ID NO: 902607 - protein, 244 aa, Homo sapiens; identical to SEQ ID NO: 902601

SEQ ID NO: 902608 - protein, 244 aa, Homo sapiens; identical to SEQ ID NO: 902601

SEQ ID NO: 902609 - protein, 782 aa, Homo sapiens
MLENYWNLVSLGLCHFDMNIISMLEEGKEPWTVKSCVKIARKPRTRECVKGVVTDIPPKCTIKDLLPKEKSSTEAVFHTVVLERHESPDIEDFSFKEPQKNVHDFECQWRDDTGNYKGVLMAQKEGKRDQRDRRDIENKLMNNQLGVSFHSHLPELQLFQGEGKMYECNQVEKSTNNGSSVSPLQQIPSSVQTHRSKKYHELNHFSLLTQRRKANSCGKPYKCNECGKAFTQNSNLTSHRRIHSGEKPYKCSECGKTFTVRSNLTIHQVIHTGEKPYKCHECGKVFRHNSYLATHRRIHTGEKPYKCNECGKAFRGHSNLTTHQLIHTGEKPFKCNECGKLFTQNSHLISHWRIHTGEKPYKCNECGKAFSVRSSLAIHQTIHTGEKPYKCNECGKVFRYNSYLGRHRRVHTGEKPYKCNECGKAFSMHSNLATHQVIHTGTKPFKCNECSKVFTQNSQLANHRRIHTGEKPYKCNECGKAFSVRSSLTTHQAIHSGEKPYKCIECGKSFTQKSHLRSHRGIHSGEKPYKCNECGKVFAQTSQLARHWRVHTGEKPYKCNDCGRAFSDRSSLTFHQAIHTGEKPYKCHECGKVFRHNSYLATHRRIHTGEKPYKCNECGKAFSMHSNLTTHKVIHTGEKPYKCNQCGKVFTQNSHLANHQRTHTGEKPYRCNECGKAFSVRSSLTTHQAIHTGKKPYKCNECGKVFTQNAHLANHRRIHTGEKPYRCTECGKAFRVRSSLTTHMAIHTGEKRYKCNECGKVFRQSSNLASHHRMHTGEKPYK

SEQ ID NO: 902610 - protein, 67 aa, Homo sapiens
AHRPGSGSCGASITPWRMSVPLCRLNLRLAVPHSHTRCPGVATDLKSPHRTLHLRNVPGSEHCPLTT

SEQ ID NO: 902611 - protein, 67 aa, Homo sapiens; identical to SEQ ID NO: 902610

SEQ ID NO: 902612 - protein, 818 aa, Homo sapiens
MALTQVRLTFRDVAIEFSQEEWKCLDPAQRILYRDVMLENYWNLVSLGLCHFDMNIISMLEEGKEPWTVKSCVKIARKPRTRECVKGVVTDIPPKCTIKDLLPKEKSSTEAVFHTVVLERHESPDIEDFSFKEPQKNVHDFECQWRDDTGNYKGVLMAQKEGKRDQRDRRDIENKLMNNQLGVSFHSHLPELQLFQGEGKMYECNQVEKSTNNGSSVSPLQQIPSSVQTHRSKKYHELNHFSLLTQRRKANSCGKPYKCNECGKAFTQNSNLTSHRRIHSGEKPYKCSECGKTFTVRSNLTIHQVIHTGEKPYKCHECGKVFRHNSYLATHRRIHTGEKPYKCNECGKAFRGHSNLTTHQLIHTGEKPFKCNECGKLFTQNSHLISHWRIHTGEKPYKCNECGKAFSVRSSLAIHQTIHTGEKPYKCNECGKVFRYNSYLGRHRRVHTGEKPYKCNECGKAFSMHSNLATHQVIHTGTKPFKCNECSKVFTQNSQLANHRRIHTGEKPYKCNECGKAFSVRSSLTTHQAIHSGEKPYKCIECGKSFTQKSHLRSHRGIHSGEKPYKCNECGKVFAQTSQLARHWRVHTGEKPYKCNDCGRAFSDRSSLTFHQAIHTGEKPYKCHECGKVFRHNSYLATHRRIHTGEKPYKCNECGKAFSMHSNLTTHKVIHTGEKPYKCNQCGKVFTQNSHLANHQRTHTGEKPYRCNECGKAFSVRSSLTTHQAIHTGKKPYKCNECGKVFTQNAHLANHRRIHTGEKPYRCTECGKAFRVRSSLTTHMAIHTGEKRYKCNECGKVFRQSSNLASHHRMHTGEKPYK

SEQ ID NO: 902613 - protein, 818 aa, Homo sapiens; identical to SEQ ID NO: 902612

SEQ ID NO: 902614 - protein, 817 aa, Homo sapiens
MALTQVRLTFRDVAIEFSQEEWKCLDPAQRILYRDVMLENYWNLVSLGLCHFDMNIISMLEEGKEPWTVKSCVKIARKPRTRECVKGVVTDIPPKCTIKDLLPKEKSSTEAVFHTVVLERHESPDIEDFSFKEPQKNVHDFECQWRDDTGNYKGVLMAQKEGKRDQRDRRDIENKLMNNQLGVSFHSHLPELQLFQGEGKMYECNQVEKSTNNGSSVSPLQQIPSSVQTHRSKKYHELNHFSLLTQRRKANSCGKPYKCNECGKAFTQNSNLTSHRRIHSGEKPYKCSECGKTFTVRSNLTIHQVIHTGEKPYKCHECGKVFRHNSYLATHRRIHTGEKPYKCNECGKAFRGHSNLTTHQLIHTGEKPFKCNECGKLFTQNSHLISHWRIHTGEKPYKCNECGKAFSVRSSLAIHQTIHTGEKPYKCNECGKVFRYNSYLGRHRRVHTGEKPYKCNECGKAFSMHSNLATHQVIHTGTKPFKCNECSKVFTQNSQLANHRRIHTGEKPYKCNECGKAFSVRSSLTTHQAIHSGEKPYKCIECGKSFTQKSHLRSHRGIHSGEKPYKCNECGKVFAQTSQLARHWRVHTGEKPYKCNDCGRAFSDRSSLTFHQAIHTGEKPYKCHECGKVFRHNSYLATHRRIHTGEKPYKCNECGKAFSMHSNLTTHKVIHTGEKPYKCNQCGKVFTQNSHLANHQRTHTGEKPYRCNECGKAFSVRSSLTTHQAIHTGKKPYKCNECGKVFTQNAHLANHRRIHTGEKPYRCTECGKAFRVRSSLTTHMAIHTGEKRYKCNECGKVFRQTACSSSIWLLFHSCYEN

SEQ ID NO: 902615 - protein, 147 aa, Homo sapiens
MALTQVRLTFRDVAIEFSQEEWKCLDPAQRILYRDVMLENYWNLVSLGLCHFDMNIISMLEEGKEPWTVKSCVKIARKPRTRECVKGVVTDLLRRWKHWLLLLGICCPKPHGRVSSRLRLSRSLGHFFHSAFATFMGVCDKRVGSIF

SEQ ID NO: 902616 - protein, 67 aa, Homo sapiens; identical to SEQ ID NO: 902610

SEQ ID NO: 902617 - protein, 818 aa, Homo sapiens; identical to SEQ ID NO: 902612

SEQ ID NO: 902618 - protein, 179 aa, Homo sapiens
MALTQVRLTFRDVAIEFSQEEWKCLDPAQRILYRDVMLENYWNLVSLGLCHFDMNIISMLEEGKEPWTVKSCVKIARKPRTRECVKGVVTDIPPKCTIKDLLPKEKSSTEAVFHTVVLERHESPDIEDFSFKEPQKNVHDFECQWRDDTGNYKGVLMAQKEGKRDQRDRRDIEPTKIKQ

SEQ ID NO: 902619 - protein, 685 aa, Homo sapiens [sequence omitted]

SEQ ID NO: 902620 - protein, 667 aa, Homo sapiens
MAEWLLSASWQRRAKAMTAAAGSAGRAAVPLLLCALLAPGGAYVLDDSDGLGREFDGIGAVSGGGATSRLLVNYPEPYRSQILDYLFKPNFGASLHILKVEIGGDGQTTDGTEPSHMHYALDENYFRGYEWWLMKEAKKRNPNITLIGLPWSFPGWLGKGFDWPYVNLQLTAYYVVTWIVGAKRYHDLDIDYIGIWNERSYNANYIKILRKMLNYQGLQRVKIIASDNLWESISASMLLDAELFKVVDVIGAHYPGTHSALNSDMGAGCWGRILNQNYINGYMTSTIAWNLVASYYEQLPYGRCGLMTAQEPWSGHYVVESPVWVSAHTTQFTQPGWYYLKTVGHLEKGGSYVALTDGLGNLTIIIETMSHKHSKCIRPFLPYFNVSQQFATFVLKGSFSEIPELQVWYTKLGKTSERFLFKQLDSLWLLDSDGSFTLSLHEDELFTLTTLTTGRKGSYPLPPKSQPFPSTYKDDFNVDYPFFSEAPNFADQTGVFEYFTNIEDPGEHHFTLRQVLNQRPITWAADASNTISIIGDYNWTNLTIKCDVYIETPDTGGVFIAGRVNKGGILIRSARGIFFWIFANGSYRVTGDLAGWIIYALGRVEVTAKKWYTLTLTIKGHFASGMLNDKSLWTDIPVNFPKNGWAAIGTHSFEFAQFDNFLVEATR

SEQ ID NO: 902621 - protein, 611 aa, Homo sapiens
MGFMVADLWATSRLLVNYPEPYRSQILDYLFKPNFGASLHILKVEIGGDGQTTDGTEPSHMHYALDENYFRGYEWWLMKEAKKRNPNITLIGLPWSFPGWLGKGFDWPYVNLQLTAYYVVTWIVGAKRYHDLDIDYIGIWNERSYNANYIKILRKMLNYQGLQRVKIIASDNLWESISASMLLDAELFKVVDVIGAHYPGTHSALNSDMGAGCWGRILNQNYINGYMTSTIAWNLVASYYEQLPYGRCGLMTAQEPWSGHYVVESPVWVSAHTTQFTQPGWYYLKTVGHLEKGGSYVALTDGLGNLTIIIETMSHKHSKCIRPFLPYFNVSQQFATFVLKGSFSEIPELQVWYTKLGKTSERFLFKQLDSLWLLDSDGSFTLSLHEDELFTLTTLTTGRKGSYPLPPKSQPFPSTYKDDFNVDYPFFSEAPNFADQTGVFEYFTNIEDPGEHHFTLRQVLNQRPITWAADASNTISIIGDYNWTNLTIKCDVYIETPDTGGVFIAGRVNKGGILIRSARGIFFWIFANGSYRVTGDLAGWIIYALGRVEVTAKKWYTLTLTIKGHFASGMLNDKSLWTDIPVNFPKNGWAAIGTHSFEFAQFDNFLVEATR

SEQ ID NO: 902622 - protein, 685 aa, Homo sapiens [sequence omitted]

SEQ ID NO: 902623 - protein, 569 aa, Homo sapiens
MHYALDENYFRGYEWWLMKEAKKRNPNITLIGLPWSFPGWLGKGFDWPYVNLQLTAYYVVTWIVGAKRYHDLDIDYIGIWNERSYNANYIKILRKMLNYQGLQRVKIIASDNLWESISASMLLDAELFKVVDVIGAHYPGTHSAKDAKLTGKKLWSSEDFSTLNSDMGAGCWGRILNQNYINGYMTSTIAWNLVASYYEQLPYGRCGLMTAQEPWSGHYVVESPVWVSAHTTQFTQPGWYYLKTVGHLEKGGSYVALTDGLGNLTIIIETMSHKHSKCIRPFLPYFNVSQQFATFVLKGSFSEIPELQVWYTKLGKTSERFLFKQLDSLWLLDSDGSFTLSLHEDELFTLTTLTTGRKGSYPLPPKSQPFPSTYKDDFNVDYPFFSEAPNFADQTGVFEYFTNIEDPGEHHFTLRQVLNQRPITWAADASNTISIIGDYNWTNLTIKCDVYIETPDTGGVFIAGRVNKGGILIRSARGIFFWIFANGSYRVTGDLAGWIIYALGRVEVTAKKWYTLTLTIKGHFASGMLNDKSLWTDIPVNFPKNGWAAIGTHSFEFAQFDNFLVEATR

SEQ ID NO: 902624 - protein, 667 aa, Homo sapiens
MAEWLLSASWQRRAKAMTAAAGSAGRAAVPLLLCALLAPGGAYVLDDSDGLGREFDGIGAVSGGGATSRLLVNYPEPYRSQILDYLFKPNFGASLHILKVEIGGDGQTTDGTEPSHMHYALDENYFRGYEWWLMKEAKKRNPNITLIGLPWSFPGWLGTWIVGAKRYHDLDIDYIGIWNERSYNANYIKILRKMLNYQGLQRVKIIASDNLWESISASMLLDAELFKVVDVIGAHYPGTHSAKDAKLTGKKLWSSEDFSTLNSDMGAGCWGRILNQNYINGYMTSTIAWNLVASYYEQLPYGRCGLMTAQEPWSGHYVVESPVWVSAHTTQFTQPGWYYLKTVGHLEKGGSYVALTDGLGNLTIIIETMSHKHSKCIRPFLPYFNVSQQFATFVLKGSFSEIPELQVWYTKLGKTSERFLFKQLDSLWLLDSDGSFTLSLHEDELFTLTTLTTGRKGSYPLPPKSQPFPSTYKDDFNVDYPFFSEAPNFADQTGVFEYFTNIEDPGEHHFTLRQVLNQRPITWAADASNTISIIGDYNWTNLTIKCDVYIETPDTGGVFIAGRVNKGGILIRSARGIFFWIFANGSYRVTGDLAGWIIYALGRVEVTAKKWYTLTLTIKGHFASGMLNDKSLWTDIPVNFPKNGWAAIGTHSFEFAQFDNFLVEATR

SEQ ID NO: 902625 - protein, 685 aa, Homo sapiens [sequence omitted]

SEQ ID NO: 902626 - protein, 685 aa, Homo sapiens [sequence omitted]

SEQ ID NO: 902627 - protein, 685 aa, Homo sapiens [sequence omitted]

SEQ ID NO: 902628 - protein, 499 aa, Homo sapiens
MAEWLLSASWQRRAKAMTAAAGSAGRAAVPLLLCALLAPGGAYVLDDSDGLGREFDGIGAVSGGGATSRLLVNYPEPYRSQILDYLFKPNFGASLHILKVEIGGDGQTTDGTEPSHMHYALDENYFRGYEWWLMKEAKKRNPNITLIGLPWSFPGWLGKGFDWPYVNLQLTAYYVVTWIVGAKRYHDLDIDYIGIWNERSYNANYIKILRKMLNYQGLQRVKIIASDNLWESISASMLLDAELFKVVDVIGAHYPGTHSAKDAKLTGKKLWSSEDFSTLNSDMGAGCWGRILNQNYINGYMTSTIAWNLVASYYEQLPYGRCGLMTAQEPWSGHYVVESPVWVSAHTTQFTQPGWYYLKTVGHLEKGGSYVALTDGLGNLTIIIETMSHKHSKCIRPFLPYFNVSQQFATFVLKGSFSEIPELQVWYTKLGKTSERFLFKQLDSLWLLDSDGSFTLSLHEDELFTLTTLTTGRKGSYPLPPKSQPFPSTYKDDFNVGPI

SEQ ID NO: 902629 - protein, 685 aa, Homo sapiens [sequence omitted]

SEQ ID NO: 902630 - protein, 644 aa, Homo sapiens
RVEEGFESYEDILVTEGTWEVGQKATSRLLVNYPEPYRSQILDYLFKPNFGASLHILKVEIGGDGQTTDGTEPSHMHYALDENYFRGYEWWLMKEAKKRNPNITLIGLPWSFPGWLGKGFDWPYVNLQLTAYYVVTWIVGAKRYHDLDIDYIGIWNERSYNANYIKILRKMLNYQGLQRVKIIASDNLWESISASMLLDAELFKVVDVIGAHYPGTHSAKDAKLTGKKLWSSEDFSTLNSDMGAGCWGRILNQNYINGYMTSTIAWNLVASYYEQLPYGRCGLMTAQEPWSGHYVVESPVWVSAHTTQFTQPGWYYLKTVGHLEKGGSYVALTDGLGNLTIIIETMSHKHSKCIRPFLPYFNVSQQFATFVLKGSFSEIPELQVWYTKLGKTSERFLFKQLDSLWLLDSDGSFTLSLHEDELFTLTTLTTGRKGSYPLPPKSQPFPSTYKDDFNVDYPFFSEAPNFADQTGVFEYFTNIEDPGEHHFTLRQVLNQRPITWAADASNTISIIGDYNWTNLTIKCDVYIETPDTGGVFIAGRVNKGGILIRSARGIFFWIFANGSYRVTGDLAGWIIYALGRVEVTAKKWYTLTLTIKGHFASGMLNDKSLWTDIPVNFPKNGWAAIGTHSFEFAQFDNFLVEATR

SEQ ID NO: 902631 - protein, 146 aa, Homo sapiens
RNCQFQKQPISIIGDYNWTNLTIKCDVYIETPDTGGVFIAGRVNKGGILIRSARGIFFWIFANGSYRVTGDLAGWIIYALGRVEVTAKKWYTLTLTIKGHFASGMLNDKSLWTDIPVNFPKNGWAAIGTHSFEFAQFDNFLVEATR

SEQ ID NO: 902632 - protein, 407 aa, Homo sapiens
MAEWLLSASWQRRAKAMTAAAGSAGRAAVPLLLCALLAPGGAYVLDDSDGLGREFDGIGAVSGGGATSRLLVNYPEPYRSQILDYLFKPNFGASLHILKVEIGGDGQTTDGTEPSHMHYALDENYFRGYEWWLMKEAKKRNPNITLIGLPWSFPGWLGKGFDWPYVNLQLTAYYVVTWIVGAKRYHDLDIDYIGIWNERSYNANYIKILRKMLNYQGLQRVKIIASDNLWESISASMLLDAELFKVVDVIGAHYPGTHSAKDAKLTGKKLWSSEDFSTLNSDMGAGCWGRILNQNYINGYMTSTIAWNLVASYYEQLPYGRCGLMTAQEPWSGHYVVESPVWVSAHTTQFTQPGWYYLKTVGHLEKGGSYVALTDGLGNLTIIIETMVNFCCCYWINSLLYYWKNKI

SEQ ID NO: 902633 - protein, 358 aa, Homo sapiens
MAGQDAGCGRGGDDYSEDEGDSSVSRAAVEVFGKLKDLNCPFLEGLYITEPKTIQELLCSPSEYRLEILEWMCTRVWPSLQDRFSSLKGVPTEVKIQEMTKLGHELMLCAPDDQELLKGCACAQKQLHFMDQLLDTIRSLTIGCSSCSSLMEHFEDTREKNEALLGELFSSPHLQMLLNPECDPWPLDMQPLLNKQSDDWQWASASAKSEEEEKLAELARQLQESAAKLHALRTEYFAQHEQGAAAGAADISTLDQKLRLVTSDFHQLILAFLQVYDDELGECCQRPGPDLHPCGPIIQATHQNLTSYSQLLQVVMAVADTSAKAVETVKKQQGEQICWGGSSSVMSLATKMNELMEK

SEQ ID NO: 902634 - protein, 358 aa, Homo sapiens; identical to SEQ ID NO: 902633

SEQ ID NO: 902635 - protein, 328 aa, Homo sapiens
MAGQDAGCGRGGDDYSEDEGDSSVSRAAVEVFGKLKDLNCPFLEGLYITEPKTIQELLCSPSEYRLEILEWMCTRVWPSLQDRFSSLKGVPTEVKIQEMTKLGHELMLCAPDDQELLKGCACAQKQLHFMDQLLDTIRSLTIGCSSCSSLMEHFEDTREKNEALLGELFSSPHLQMLLNPECDPWPLDMQPLLNKQSDDWQWASASAKSEEEEKLAELARQLQESAAKLHALRTEYFAQHEQGAAAGAADISTLDQKLRLVTSDFHQLILAFLQVYDDELGECCQRPGPDLHPCGPIIQATHQNLTSYSQVRVPFPSPLTAPSPVHSD

SEQ ID NO: 902636 - protein, 328 aa, Homo sapiens; identical to SEQ ID NO: 902635

SEQ ID NO: 902637 - protein, 451 aa, Homo sapiens
MSSTSACTISLTSSSKATRGFQFSFCFALVQSPCRKSSAAACDPLSNAAVDVSSRAAAKREFFLGGGFGLFVPTVKSVHVASRTHAFIKRKLEFHEAILRLSVQERCRRSILFYPYSTRFDSVPKKMPISTHLYFHERSCSQQLCRTPHCPPPSPLAVPSSSRFPQLLHSRKPEDRFSSLKGVPTEVKIQEMTKLGHELMLCAPDDQELLKGCACAQKQLHFMDQLLDTIRSLTIGCSSCSSLMEHFEDTREKNEALLGELFSSPHLQMLLNPECDPWPLDMQPLLNKQSDDWQWASASAKSEEEEKLAELARQLQESAAKLHALRTEYFAQHEQGAAAGAADISTLDQKLRLVTSDFHQLILAFLQVYDDELGECCQRPGPDLHPCGPIIQATHQNLTSYSQLLQVVMAVADTSAKAVETVKKQQGEQICWGGSSSVMSLATKMNELMEK

SEQ ID NO: 902638 - protein, 265 aa, Homo sapiens
MAGQDAGCGRGGDDYSEDEGDSSVSRAAVEVFGKLKDLNCPFLEGLYITEPKTIQELLCSPSEYRLEILEWMCTRVWPSLQDRFSSLKGVPTEVKIQEMTKLGHELMLCAPDDQELLKGCACAQKQLHFMDQLLDTIRSLTIGCSSCSSLMEHFEDTREKNEALLGELFSSPHLQMLLNPECDPWPLDMQPLLNKQSDDWQWASASAKSEEEEKLAELARQLQESAAKLHALRTESTTTSWASAASAQALTSTRAAPSSRPRTRI

SEQ ID NO: 902639 - protein, 230 aa, Homo sapiens
MTKLGHELMLCAPDDQELLKGCACAQKQLHFMDQLLDTIRSLTIGCSSCSSLMEHFEDTREKNEALLGELFSSPHLQMLLNPECDPWPLDMQPLLNKQSDDWQWASASAKSEEEEKLAELARQLQESAAKLHALRTEYFAQHEQGAAAGAADISTLDQKLRLVTSDFHQLILAFLQVYDDELGECCQRPGPDLHPCGPIIQATHQNLTSYSQVRVPFPSPLTAPSPVHSD

SEQ ID NO: 902640 - protein, 99 aa, Homo sapiens
MDDCGSRSRCSPTLCSRQGPLAPLGRERQTGGLTWTQRKPWFLKQKKQQERSKEQTEHENKRKKAQGGPQKRDRREATGHNTHTKEYSKGDAQQGNRQH

SEQ ID NO: 902641 - protein, 236 aa, Homo sapiens
MSEAPRAETFVFLDLEATGLPSVEPEIAELSLFAVHRSSLENPEHDESGALVLPRVLDKLTLCMCPERPFTAKASEITGLSSEGLARCRKAGFDGAVVRTLQAFLSRQAGPICLVAHNGFDYDFPLLCAELRRLGARLPRDTVCLDTLPALRGLDRAHSHGTRARGRQGYSLGSLFHRYFRAEPSAAHSAEGDVHTLLLIFLHRAAELLAWADEQARGWAHIEPMYLPPDDPSLEA

SEQ ID NO: 902642 - protein, 174 aa, Homo sapiens
MAGQDAGCGRGGDDYSEDEGDSSVSRAAVEVFGKLKDLNCPFLEGLYITEPKTIQELLCSPSEYRLEILEWMCTRVWPSLQDRFSSLKGVPTEVKIQEMTKLGHELMLCAPDDQELLKGCACAQKQLHFMDQLLDTIRSLTIGCSSCSSLMEHFEDTKESAAKCTRLERSTCTA

SEQ ID NO: 902643 - protein, 196 aa, Homo sapiens
AGCGRGGDDYSEDEGDSSVSRAAVEVFGKLKVLLAQKATPGRGTGEGPARGPGGLAAEVRGATRPPSPVPAAPCSLAAGGACGSFIFALWCAPGLRSCCLHGPCLVVGASTACGTAVPALGARSKCRHRGPRPGLRDLAGSGGTDGQSLVPLCQVSETRAWCQLVSDARGDSLQKPSTAPQDRALTAAVRKAGPRG

SEQ ID NO: 902644 - protein, 417 aa, Homo sapiens
MAGQDAGCGRGGDDYSEDEGDSSVSRAAVEVFGKLKDLNCPFLEGLYITEPKTIQELLCSPSEYRLEILEWMCTRVWPSLQDRFSSLKGVPTEVKIQEMTKLGHELMLCAPDDQELLKGCACAQKQLHFMDQLLDTIRSLTIGCSSCSSLMEHFEDTREKNEALLGELFSSPHLQMLLNPECDPWPLDMQPLLNKQSDDWQWASASAKSEEEEKLAELARQLQESAAKLHALRTEYFAQHEQGAAAGAADISTLDQKLRLVTSDFHQLILAFLQVYDDELGECCQRPGPDLHPCGPIIQATHQNLTSYSQIPRGQPKKPALVTMTTVPTCATLPLAQGFRDVHFGFLSERLRAFQPLTGWSCETPRSGMLLQVVMAVADTSAKAVETVKKQQGEQICWGGSSSVMSLATKMNELMEK

SEQ ID NO: 902645 - protein, 358 aa, Homo sapiens; identical to SEQ ID NO: 902633

SEQ ID NO: 902646 - protein, 263 aa, Homo sapiens
MDDCGSRSRCSPTLCSLRTCYPRGNITMSEAPRAETFVFLDLEATGLPSVEPEIAELSLFAVHRSSLENPEHDESGALVLPRVLDKLTLCMCPERPFTAKASEITGLSSEGLARCRKAGFDGAVVRTLQAFLSRQAGPICLVAHNGFDYDFPLLCAELRRLGARLPRDTVCLDTLPALRGLDRAHSHGTRARGRQGYSLGSLFHRYFRAEPSAAHSAEGDVHTLLLIFLHRAAELLAWADEQARGWAHIEPMYLPPDDPSLEA

SEQ ID NO: 902647 - protein, 417 aa, Homo sapiens; identical to SEQ ID NO: 902644

SEQ ID NO: 902648 - protein, 417 aa, Homo sapiens; identical to SEQ ID NO: 902644

SEQ ID NO: 902649 - protein, 412 aa, Homo sapiens
MAGQDAGCGRGGDDYSEDEGDSSVSRAAVEVFGKLKDLNCPFLEGLYITEPKTIQELLCSPSEYRLEILEWMCTRVWPSLQDRFSSLKGVPTEVKIQEMTKLGHELMLCAPDDQELLKGCACAQKQLHFMDQLLDTIRSLTIGCSSCSSLMEHFEDTREKNEALLGELFSSPHLQMLLNPECDPWPLDMQPLLNKQSDDWQWASASAKSEEEEKLAELARQLQESAAKLHALRTEYFAQHEQGAAAGAADISTLDQKLRLVTSDFHQLILAFLQVYDDELGECCQRPGPDLHPCGPIIQATHQNLTSYSQIPRGQPKKPALVTMTTVPTRQGPLAPLGRERQTGGLTWTQRKPWFLKQKKQQERSKEQTEHENKRKKAQGGPQKRDRREATGHNTHTKEYSKGDAQQGNRQH

SEQ ID NO: 902650 - protein, 111 aa, Homo sapiens
MGGARLGARNMAGQDAGCGRGGDDYSEDEGDSSVSRAAVEVFGKLKDLNCPFLEGLYITEPKTIQECCGRSRHQHPRPEAASGHFRLPPANLGFSPSLRRRAGRVLPAPRP

SEQ ID NO: 902651 - protein, 254 aa, Homo sapiens
MAGQDAGCGRGGDDYSEDEGDSSVSRAAVEVFGKLKDLNCPFLEGLYITEPKTIQELLCSPSEYRLEILEWMCTRVWPSLQDRFSSLKGVPTEVKIQEMTKLGHELMLCAPDDQELLKGCACAQKQLHFMDQLLDTIRSLTIGCSSCSSLMEHFEDTREKNEALLGELFSSPHLQMLLNPECDPWPLDMQPLLNKQSDDWQWASASAKSEEEEKLAELARQLQESAAKLHALRTEYFCQHGPGACAGAPHLSTS

SEQ ID NO: 902652 - protein, 149 aa, Homo sapiens
MAGQDAGCGRGGDDYSEDEGDSSVSRAAVEVFGKLKDLNCPFLEGLYITEPKTIQELLCSPSEYRLEILEWMCTRVWPSLQDRFSSLKGVPTEVKIQEMTKLGHELMLCAPDDQELLKGCACAQKQLHFMDQLLDTIRSLTIGCSSCSR

SEQ ID NO: 902653 - protein, 564 aa, Homo sapiens
MEATGTWALLLALALLLLLTLALSGTRARGHLPPGPTPLPLLGNLLQLRPGALYSGLMRLSKKYGPVFTIYLGPWRPVVVLVGQEAVREALGGQAEEFSGRGTVAMLEGTFDGHGVFFSNGERWRQLRKFTMLALRDLGMGKREGEELIQAEARCLVETFQGTEGRPFDPSLLLAQATSNVVCSLLFGLRFSYEDKEFQAVVRAAGGTLLGVSSQGGQTYEMFSWFLRPLPGPHKQLLHHVSTLAAFTVRQVQQHQGNLDASGPARDLVDAFLLKMAQEEQNPGTEFTNKNMLMTVIYLLFAGTMTVSTTVGYTLLLLMKYPHVQKWVREELNRELGAGQAPSLGDRTRLPYTDAVLHEAQRLLALVPMGIPRTLMRTTRFRGYTLPQGTEVFPLLGSILHDPNIFKHPEEFNPDRFLDADGRFRKHEAFLPFSLGKRVCLGEGLAKAELFLFFTTILQAFSLESPCPPDTLSLKPTVSGLFNIPPASTVGMDRVNVSRVYTAGSHIYTPAVVFRSLSHGPHAHLTHAAKMHNRTPIHNYKGHKATAGLAFHRHKYSPSAITST

SEQ ID NO: 902654 - protein, 390 aa, Homo sapiens
MEATGTWALLLALALLLLLTLALSGTRARGHLPPGPTPLPLLGNLLQLRPGALYSGLMRLSKKYGPVFTIYLGPWRPVVVLVGQEAVREALGGQAEEFSGRGTVAMLEGTFDGHGVFFSNGERWRQLRKFTMLALRDLGMGKREGEELIQAEARCLVETFQGTEGGTKPGTEFTNKNMLMTVIYLLFAGTMTVSTTVGYTLLLLMKYPHVQKWVREELNRELGAGQAPSLGDRTRLPYTDAVLHEAQRLLALVPMGIPRTLMRTTRFRGYTLPQGTEVFPLLGSILHDPNIFKHPEEFNPDRFLDADGRFRKHEAFLPFSLGKRVCLGEGLAKAELFLFFTTILQAFSLESPCPPDTLSLKPTVSGLFNIPPAFQLQVRPTDLHSTTQTR

SEQ ID NO: 902655 - protein, 504 aa, Homo sapiens
MEATGTWALLLALALLLLLTLALSGTRARGHLPPGPTPLPLLGNLLQLRPGALYSGLMRLSKKYGPVFTIYLGPWRPVVVLVGQEAVREALGGQAEEFSGRGTVAMLEGTFDGHGVFFSNGERWRQLRKFTMLALRDLGMGKREGEELIQAEARCLVETFQGTEGRPFDPSLLLAQATSNVVCSLLFGLRFSYEDKEFQAVVRAAGGTLLGVSSQGGQTYEMFSWFLRPLPGPHKQLLHHVSTLAAFTVRQVQQHQGNLDASGPARDLVDAFLLKMAQEEQNPGTEFTNKNMLMTVIYLLFAGTMTVSTTVGYTLLLLMKYPHVQKWVREELNRELGAGQAPSLGDRTRLPYTDAVLHEAQRLLALVPMGIPRTLMRTTRFRGYTLPQGTEVFPLLGSILHDPNIFKHPEEFNPDRFLDADGRFRKHEAFLPFSLGKRVCLGEGLAKAELFLFFTTILQAFSLESPCPPDTLSLKPTVSGLFNIPPAFQLQVRPTDLHSTTQTR

SEQ ID NO: 902656 - protein, 571 aa, Homo sapiens
MEATGTWALLLALALLLLLTLALSGTRARGHLPPGPTPLPLLGNLLQLRPGALYSGLMRLSKKYGPVFTIYLGPWRPVVVLVGQEAVREALGGQAEEFSGRGTVAMLEGTFDGHGVFFSNGERWRQLRKFTMLALRDLGMGKREGEELIQAEARCLVETFQGTEGRPFDPSLLLAQATSNVVCSLLFGLRFSYEDKEFQAVVRAAGGTLLGVSSQGGQTYEMFSWFLRPLPGPHKQLLHHVSTLAAFTVRQVQQHQGNLDASGPARDLVDAFLLKMAQEEQNPGTEFTNKNMLMTVIYLLFAGTMTVSTTVGYTLLLLMKYPHVQKWVREELNRELGAGQAPSLGDRTRLPYTDAVLHEAQRLLALVPMGIPRTLMRTTRFRGYTLPQGTEVFPLLGSILHDPNIFKHPEEFNPDRFLDADGRFRKHEAFLPFSLGKRVCLGEGLAKAELFLFFTTICMSPLGLSLAWEPGYWGPFPTLPLTCCVTLGSLCPSLSLSVPRAPKHSILVEEFLAEISNSPPHLNCHQLTKGLYHIEHIFLKALLSAEERQEDVLVTHELPIPSSVLPLVSVT

SEQ ID NO: 902657 - protein, 504 aa, Homo sapiens; identical to SEQ ID NO: 902655

SEQ ID NO: 902658 - protein, 147 aa, Homo sapiens [sequence omitted]

SEQ ID NO: 902659 - protein, 232 aa, Homo sapiens
AHEVAAPSGSGKIAGAQEFEHFVGSRCPHVGVWLSPSQATETATHVHSSHALSIHRTSQCPCPWCLAQGTACPLRGHATQRLSLSMAPTHAPSLGYTTLPACDHRCPHTPNHLSTQLPTYDIVLAPQSIFPLRHAAPTEAQSPATSATAALSHPFLSTLILPNANTSGSAIMHRDFGHTRTLRPEEHLPNPNTCLCNHVESGPCCPSTHTYTLTDLQPLFGVRVPTRPSGRG

SEQ ID NO: 902660 - protein, 464 aa, Homo sapiens
PRQVHLGKDPMSFKLKKELTEEWQKACAKYKLDRGDPILDEEFQRLKTEVSHKRVVRNQEEKIKEFHPTFDPLINNTWLSRSRAQKRFQQVARKVMIQGRLFNMLSAVREMDKESILRKIGQAKQSIAQEANFFKFFLRRISQDDYTSRFSVSPKEVLPFAFPDCSPPQDSNELAPDGLGLVPIKSSEVQIKQSYSFFNLQVPQLYKIKRYQPFSVHKSSTSYRPQKLARALKQGAEDEVTTITALPKQDSTTQLSGKTSILSMKPPEALAMSLDYDPLYVFNPNPGLFAVMHPLTYAETLIDYHLCSHPKYKFTKESRHGSSIPVTQKQFLHHTDIIPGIMHWKSFQSLVLSSLPDPSKMETTKSCDSFNSFMLPIDVPAILDALPEEDRLETVERELCEQNVEVMLTPEMIKVEFPMLNYKDIRKEKEVKDQAQPAEKAGEKLLEEMRNLRGKALNTYLILE

SEQ ID NO: 902661 - protein, 412 aa, Homo sapiens
PRQVHLGKDPMSFKLKKELTEEWQKACAKYKLDRGDPILDEEFQRLKTEVSHKRVVRNQEEKIKEFHPTFDPLINNTWLSRSRAQKRFQQVARKVMIQGRLFNMLSAVREMDKESILRKIGQAKQSIAQEANFFKFFLRRISQDDYTSRFSVSPKEVLPFAFPDCSPPQDSNELAPDGLGLVPIKSSEVQIKQSYSFFNLQVPQLYKIKRYQPFSVHKSSTSYRPQKLARALKQGAEDEVTTITALPKQDSTTQLSGKTSILSMKPPEALAMSLDYDPLYVFNPNPGLFAVMHPLTYAETLIDYHLCSHPKYKFTKESRHGSSIPVTQKQFLHHTDIIPGIMHWKSFQSLVLSSLPDPSKMETTKSCDSFNSFMLPIDVPAILDALPEEDRLETVERSTWICCCICDDRVGV

SEQ ID NO: 902662 - protein, 302 aa, Homo sapiens
PRQVHLGKDPMSFKLKKELTEEWQKACAKYKLDRGDPILDEEFQRLKTEVSHKRVVRNQEEKIKEFHPTFDPLINNTWLSRSRAQKRFQQVARKVMIQGRLFNMLSAVREMDKESILRKIGQAKQSIAQEANFFKFFLRRISQDDYTSRFSVSPKEVLPFAFPDCSPPQDSNELAPDGLGLVPIKSSEVQIKQSYSFFNLQVPQLYKIKRYQPFSVHKSSTSYRPQKLARALKQGAEDEVTTITALPKQDSTTQLSGKTSILSMKPPEALAMSLDYDPLYVFVSDNWQKPCFLCSFISAITL

SEQ ID NO: 902663 - protein, 433 aa, Homo sapiens
PRQVHLGKDPMSFKLKKELTEEWQKACAKYKLDRGDPILDEEFQRLKTEVSHKRVVRNQEEKIKEFHPTFDPLINNTWLSRSRAQKRFQQVARKVMIQGRLFNMLSAVREMDKESILRKIGQAKQSIAQEANFFKFFLRRISQDDYTSRFSVSPKEVLPFAFPDCSPPQDSNELAPDGLGLVPIKSSEVQIKQSYSFFNLQVPQLYKIKRYQPFSVHKSSTSYRPQKLARALKQGAEDEVTTITALPKQDSTTQLSGKTSILSMKPPEALAMSLDYDPLYVFNPNPGLFAVMHPLTYAETLIDYHLCSHPKYKFTKESRHGSSIPVTQKQFLHHTDIIPGIMHWKSFQSLVLSSLPDPSKMETTKSELCEQNVEVMLTPEMIKVEFPMLNYKDIRKEKEVKDQAQPAEKAGEKLLEEMRNLRGKALNTYLILE

SEQ ID NO: 902664 - protein, 637 aa, Homo sapiens
MASNERDAISWYQKKIGAYDQQIWEKSIEQTQIKGLKNKPKKMGHIKPDLIDVDLIRGSTFAKAKPEIPWTSLTRKGLVRVVFFPLFSNWWIQVTSLRIFVWLLLLYFMQVIAIVLYLMMPIVNISEVLGPLCLMLLMGTVHCQIVSTQITRPSGNNGNRRRRKLRKTVNGDGSRENGNNSSDKVRGIETLESVPIIGGFWETIFGNRIKRVKLISNKGTETDNDPSCVHPIIKRRQCRPEIRMWQTREKAKFSDGEKCRREAFRRLGNGVSDDLSSEEDGEARTQMILLRRSVEGASSDNGCEVKNRKSILSRHLNSQVKKTTTRWCHIVRDSDSLAESEFESAAFSQGSRSGVSGGSRSLNMSRRDSESTRHDSETEDMLWDDLLHGPECRSSVTSDSEGAHVNTLHSGTKRDPKEDVFQQNHLFWLQNSSPSSDRVSAIIWEGNECKKMDMSVLEISGIIMSRVNAYQQGVGYQMLGNVVTIGLAFFPFLHRLFREKSLDQLKSISAEEILTLFCGAPPVTPIIVLSIINFFERLCLTWMFFFMMCVAERTYKQRFLFAKLFSHITSARKARKYEIPHFRLKKVENIKIWLSLRSYLKRRGPQRSVDVVVSSVFLLTLSIAFICCAQVKVSHLL

SEQ ID NO: 902665 - protein, 762 aa, Homo sapiens
MASNERDAISWYQKKIGAYDQQIWEKSIEQTQIKGLKNKPKKMGHIKPDLIDVDLIRGSTFAKAKPEIPWTSLTRKGLVRVVFFPLFSNWWIQVTSLRIFVWLLLLYFMQVIAIVLYLMMPIVNISEVLGPLCLMLLMGTVHCQIVSTQITRPSGNNGNRRRRKLRKTVNGDGSRENGNNSSDKVRGIETLESVPIIGGFWETIFGNRIKRVKLISNKGTETDNDPSCVHPIIKRRQCRPEIRMWQTREKAKFSDGEKCRREAFRRLGNGVSDDLSSEEDGEARTQMILLRRSVEGASSDNGCEVKNRKSILSRHLNSQVKKTTTRWCHIVRDSDSLAESEFESAAFSQGSRSGVSGGSRSLNMSRRDSESTRHDSETEDMLWDDLLHGPECRSSVTSDSEGAHVNTLHSGTKRDPKEDVFQQNHLFWLQNSSPSSDRVSAIIWEGNECKKMDMSVLEISGIIMSRVNAYQQGVGYQMLGNVVTIGLAFFPFLHRLFREKSLDQLKSISAEEILTLFCGAPPVTPIIVLSIINFFERLCLTWMFFFMMCVAERTYKQRFLFAKLFSHITSARKARKYEIPHFRLKKVENIKIWLSLRSYLKRRGPQRSVDVVVSSVFLLTLSIAFICCAQVLQGHKTFLNDAYNWEFLIWETALLLFLLRLASLGSETNKKYSNVSILLTEQINLYLKMEKKPNKKEQLTLVNNVLKLSTKLLKELDTPFRLYGLTMNPLIYNITRVVILSAVSGVISDLLGFNIRLWKIKS

SEQ ID NO: 902666 - protein, 651 aa, Homo sapiens
MGRYWVYFVTMGGSSNVLGPLCLMLLMGTVHCQIVSTQITRPSGNNGNRRRRKLRKTVNGDGSRENGNNSSDKVRGIETLESVPIIGGFWETIFGNRIKRVKLISNKGTETDNDPSCVHPIIKRRQCRPEIRMWQTREKAKFSDGEKCRREAFRRLGNGVSDDLSSEEDGEARTQMILLRRSVEGASSDNGCEVKNRKSILSRHLNSQVKKTTTRWCHIVRDSDSLAESEFESAAFSQGSRSGVSGGSRSLNMSRRDSESTRHDSETEDMLWDDLLHGPECRSSVTSDSEGAHVNTLHSGTKRDPKEDVFQQNHLFWLQNSSPSSDRVSAIIWEGNECKKMDMSVLEISGIIMSRVNAYQQGVGYQMLGNVVTIGLAFFPFLHRLFREKSLDQLKSISAEEILTLFCGAPPVTPIIVLSIINFFERLCLTWMFFFMMCVAERTYKQRFLFAKLFSHITSARKARKYEIPHFRLKKVENIKIWLSLRSYLKRRGPQRSVDVVVSSVFLLTLSIAFICCAQVLQGHKTFLNDAYNWEFLIWETALLLFLLRLASLGSETNKKYSNVSILLTEQINLYLKMEKKPNKKEQLTLVNNVLKLSTKLLKELDTPFRLYGLTMNPLIYNITRVVILSAVSGVISDLLGFNIRLWKIKS

SEQ ID NO: 902667 - protein, 763 aa, Homo sapiens
MASNERDAISWYQKKIGAYDQQIWEKSIEQTQIKGLKNKPKKMGHIKPDLIDVDLIRGSTFAKAKPEIPWTSLTRKGLVRVVFFPLFSNWWIQVTSLRIFVWLLLLYFMQVIAIVLYLMMPIVNISEVLGPLCLMLLMGTVHCQIVSTQITRPSGNNGNRRRRKLRKTVNGDGSRENGNNSSDKVRGIETLESVPIIGGFWETIFGNRIKRVKLISNKGTETDNDPSCVHPIIKRRQCRPEIRMWQTREKAKFSDGEKCRREAFRRLGNGVSDDLSSEEDGEARTQMILLRRSVEGASSDNGCEVKNRKSILSRHLNSQVKKTTTRWCHIVRDSDSLAESEFESAAFSQGSRSGVSGGSRSLNMSRRDSESTRHDSETEDMLWDDLLHGPECRSSVTSDSEGAHVNTLHSGTKRDPKEDVFQQNHLFWLQNSSPSSDRVSAIIWEGNECKKMDMSVLEISGIIMSRVNAYQQGVGYQMLGNVVTIGLAFFPFLHRLFREKSLDQLKSISAEEILTLFCGAPPVTPIIVLSIINFFERLCLTWMFFFMMCVAERTYKQRFLFAKLFSHITSARKARKYEIPHFRLKKVENIKIWLSLRSYLKRRGPQRSVDVVVSSVFLLTLSIAFICCAQVLQGHKTFLNDAYNWEFLIWETALLLFLLRLASLGSETNKKYSNVSILLTEQINLYLKMEKKPNKKEQLTLVNNVLKLSTKLLKELDTPFRLYGLTMNPLIYNITRVVILSAVSGVISDLLGFNIRVSITTTL

SEQ ID NO: 902668 - protein, 575 aa, Homo sapiens
MASNERDAISWYQKKIGAYDQQIWEKSIEQTQIKGLKNKPKKMGHIKPDLIDVDLIRGSTFAKAKPEIPWTSLTRKGLVRVVFFPLFSNWWIQVTSLRIFVWLLLLYFMQVIAIVLYLMMPIVNISEVLGPLCLMLLMGTVHCQIVSTQITRPSGNNGNRRRRKLRKTVNGDGSRENGNNSSDKVRGIETLESVPIIGGFWETIFGNRIKRVKLISNKGTETDNDPSCVHPIIKRRQCRPEIRMWQTREKAKFSDGEKCRREAFRRLGNGVSDDLSSEEDGEARTQMILLRRSVEGASSDNGCEVKNRKSILSRHLNSQVKKTTTRWCHIVRDSDSLAESEFESAAFSQGSRSGVSGGSRSLNMSRRDSESTRHDSETEDMLWDDLLHGPECRSSVTSDSEGAHVNTLHSGTKRDPKEDVFQQNHLFWLQNSSPSSDRVSAIIWEGNECKKMDMSVLEISGIIMSRVNAYQQGVGYQMLGNVVTIGLAFFPFLHRLFREKSLDQLKSISAEEILTLFCGAPPVTPIIVLSIINFFERLCLTWMFFFMMCVAERTYKQVSGEIRKIFYLFLYMIFH

SEQ ID NO: 902669 - protein, 224 aa, Homo sapiens
MASNERDAISWYQKKIGAYDQQIWEKSIEQTQIKGLKNKPKKMGHIKPDLIDVDLIRGSTFAKAKPEIPWTSLTRKGLVRVVFFPLFSNWWIQVTSLRIFVWLLLLYFMQVIAIVLYLMMPIVNISEVLGPLCLMLLMGTVHCQIVSTQITRPSGNNGNRRRRVSLLLPRLECNGAISAHCNRYLLSSSDSPASASQVAGITCVCHHTQLIFFLEFSRDGISPC

SEQ ID NO: 902670 - protein, 762 aa, Homo sapiens; identical to SEQ ID NO: 902665

SEQ ID NO: 902671 - protein, 575 aa, Homo sapiens; identical to SEQ ID NO: 902668

SEQ ID NO: 902672 - protein, 691 aa, Homo sapiens
MASNERDAISWYQKKIGAYDQQIWEKSIEQTQIKGLKNKPKKMGHIKPDLIDVDLIRGSTFAKAKPEIPWTSLTRKGLVRVVFFPLFSNWWIQVTSLRIFVWLLLLYFMQVIAIVLYLMMPIVNISEVLGPLCLMLLMGTVHCQIVSTQITRPSGNNGNRRRRKLRKTVNGDGSRENGNNSSDKVRGIETLESVPIIGGFWETIFGNRIKRVKLISNKGTETDNDPSCVHPIIKRRQCRPEIRMWQTREKAKFSDGEKCRREAFRRLGNGVSDDLSSEEDGEARTQMILLRRSVEGASSDNGCEVKNRKSILSRHLNSQVKKTTTRWCHIVRDSDSLAESEFESAAFSQGSRSGVSGGSRSLNMSRRDSESTRHDSETEDMLWDDLLHGPECRSSVTSDSEGAHVNTLHSGTKRDPKEDVFQQNHLFWLQNSSPSSDRVSAIIWEGNECKKMDMSVLEISGIIMSRVNAYQQGVGYQMLGNVVTIGLAFFPFLHRLFREKSLDQLKSISAEEILTLFCGAPPVTPIIVLSIINFFERLCLTWMFFFMMCVAERTYKQRFLFAKLFSHITSARKARKYEIPHFRLKKVENIKIWLSLRSYLKRRGPQRSVDVVVSSVFLLTLSIAFICCAQVLQGHKTFLNDAYNWEFLIWETALLLFLLRLASLGSETNKKYSNVSILLTEQVLISPVNWV

SEQ ID NO: 902673 - protein, 637 aa, Homo sapiens; identical to SEQ ID NO: 902664

SEQ ID NO: 902674 - protein, 177 aa, Homo sapiens
MASNERDAISWYQKKIGAYDQQIWEKSIEQTQIKGLKNKPKKMGHIKPDLIDVDLIRGSTFAKAKPEIPWTSLTRKGLVRVVFFPLFSNWWIQVTSLRIFVWLLLLYFMQDNKTIRKQWKSKKKSFALVAQAGVQWRNLGSLQPIPPEFKRFSCLSLSSSWDYLRMPPHPANFFFGI

SEQ ID NO: 902675 - protein, 619 aa, Homo sapiens
MLLSWLTVLGAGMVVLHFLQKLLFPYFWDDFWFVLKVVLIIIRLKKYEKRGELVTVLDKFLSHAKRQPRKPFIIYEGDIYTYQDVDKRSSRVAHVFLNHSSLKKGDTVALLMSNEPDFVHVWFGLAKLGCVVAFLNTNIRSNSLLNCIRACGPRALVVGADLLGTVEEILPSLSENISVWGMKDSVPQGVISLKEKLSTSPDEPVPRSHHVVSLLKSTCLYIFTSGTTGLPKAAVISQLQVLRGSAVLWAFGCTAHDIVYITLPLYHSSAAILGISGCVELGATCVLKKKFSASQFWSDCKKYDVTVFQYIGELCRYLCKQSKREGEKDHKVRLAIGNGIRSDVWREFLDRFGNIKVCELYAATESSISFMNYTGRIGAIGRTNLFYKLLSTFDLIKYDFQKDEPMRNEQGWCIHVKKGEPGLLISRVNAKNPFFGYAGPYKHTKDKLLCDVFKKGDVYLNTGDLIVQDQDNFLYFWDRTGDTFRWKGENVATTEVADVIGMLDFIQEANVYGVAISGYEGRAGMASIILKPNTSLDLEKVYEQVVTFLPAYACPRFLRIQEKMEATGTFKLLKHQLVEDGFNPLKISEPLYFMDNLKKSYVLLTRELYDQIMLGEIKL

SEQ ID NO: 902676 - protein, 438 aa, Homo sapiens [sequence omitted]

SEQ ID NO: 902677 - protein, 104 aa, Homo sapiens
KAIFSSSAKIVKPNGEKPDEFESGISQALLELEMNSDLKAQLRELNITAAKEIEVGGGRKAIIIFVPVPQLKSFQKIQVRLVRRIGEKVQWEACRLYRSEENSA

SEQ ID NO: 902678 - protein, 104 aa, Homo sapiens; identical to SEQ ID NO: 902677

SEQ ID NO: 902679 - protein, 104 aa, Homo sapiens; identical to SEQ ID NO: 902677

SEQ ID NO: 902680 - protein, 450 aa, Homo sapiens
MAASKTQGAVARMQEDRDGSCSTVGGVGYGDSKDCILEPLSLPESPGGTTTLEGSPSVPCIFCEEHFPVAEQDKLLKHMIIEHKIVIADVKLVADFQRYILYWRKRFTEQPITDFCSVIRINSTAPFEEQENYFLLCDVLPEDRILREELQKQRLREILEQQQQERNDTNFHGVCMFCNEEFLGNRSVILNHMAREHAFNIGLPDNIVNCNEFLCTLQKKLDNLQCLYCEKTFRDKNTLKDHMRKKQHRKINPKNREYDRFYVINYLELGKSWEEVQLEDDRELLDHQEDDWSDWEEHPASAVCLFCEKQAETIEKLYVHMEDAHEFDLLKIKSELGLNFYQQVKLVNFIRRQVHQCRCYGCHVKFKSKADLRTHMEETKHTSLLPDRKTWDQLEYYFPTYENDTLLCTLSDSESDLTAQEQNENVPIISEDTSKLYALKQSSILNQLLL

SEQ ID NO: 902681 - protein, 450 aa, Homo sapiens; identical to SEQ ID NO: 902680

SEQ ID NO: 902682 - protein, 407 aa, Homo sapiens
MAASKTQGAVARMQEDRDGSCSTVGGVGYGDSKDCILEPLSLPESPGGTTTLEGSPSVPCIFCEEHFPVAEQDKLLKHMIIEHKIVIADVKLVADFQRYILYWRKRFTEQPITDFCSVIRINSTAPFEEQENYFLLCDVLPEDRILREELQKQRLREILEQQQQERNDTNFHGVCMFCNEEFLGNRSVILNHMAREHAFNIGLPDNIVNCNEFLCTLQKKLDNLQCLYCEKTFRDKNTLKDHMRKKQHRKINPKNREYDRFYVINYLELGKSWEEVQLEDDRELLDHQEDDWSDWEEHPASAVCLFCEKQAETIEKLYVHMEDAHEFDLLKIKSELGLNFYQQVKLVNFIRRYYFPTYENDTLLCTLSDSESDLTAQEQNENVPIISEDTSKLYALKQSSILNQLLL

SEQ ID NO: 902683 - protein, 450 aa, Homo sapiens; identical to SEQ ID NO: 902680

SEQ ID NO: 902684 - protein, 450 aa, Homo sapiens; identical to SEQ ID NO: 902680

SEQ ID NO: 902685 - protein, 290 aa, Homo sapiens
MAASKTQGAVARMQEDRDGSCSTVGGVGYGDSKDCILEPLSLPESPGGTTTLEGSPSVPCIFCEEHFPVAEQDKLLKHMIIEHKIVIADVKLVADFQRYILYWRKRFTEQPITDFCSVIRINSTAPFEEQENYFLLCDVLPEDRILREELQKQRLREILEQQQQERNDTNFHGVCMFCNEEFLGNRSVILNHMAREHAFNIGLPDNIVNCNEFLCTLQKKLDNLQCLYCEKTFRDKNTLKDHMRKKQHRKINPKNREYDRFYVINYLVRLSFHNLKFDCSTANKIFLRTN

SEQ ID NO: 902686 - protein, 283 aa, Homo sapiens
MNWTGLYTLLSGVNRHSTAIGRVWLSVIFIFRIMVLVVAAESVWGDEKSSFICNTLQPGCNSVCYDQFFPISHVRLWSLQLILVSTPALLVAMHVAHQQHIEKKMLRLEGHGDPLHLEEVKRHKVHISGTLWWTYVISVVFRLLFEAVFMYVFYLLYPGYAMVRLVKCDVYPCPNTVDCFVSRPTEKTVFTVFMLAASGICIILNVAEVVYLIIRACARRAQRRSNPPSRKGSGFGHRLSPEYKQNEINKLLSEQDGSLKDILRRSPGTGAGLAEKSDRCSAC

SEQ ID NO: 902687 - protein, 283 aa, Homo sapiens; identical to SEQ ID NO: 902686

SEQ ID NO: 902688 - protein, 283 aa, Homo sapiens; identical to SEQ ID NO: 902686

SEQ ID NO: 902689 - protein, 283 aa, Homo sapiens; identical to SEQ ID NO: 902686

SEQ ID NO: 902690 - protein, 283 aa, Homo sapiens; identical to SEQ ID NO: 902686

SEQ ID NO: 902691 - protein, 283 aa, Homo sapiens; identical to SEQ ID NO: 902686

SEQ ID NO: 902692 - protein, 167 aa, Homo sapiens
MNWTGLYTLLSGVNRHSTAIGRVWLSVIFIFRIMVLVVAAESVWGDEKSSFICNTLQPGCNSVCYDQFFPISHVRLWSLQLILVSTPALLVAMHVAHQQHIEKKMLRLEGHGDPLHLEEVKRHKVHISGTLWWTYVISVVFRLLFEAVFMYVFYLLYPGYAMVRLCL

SEQ ID NO: 902693 - protein, 240 aa, Homo sapiens
MNWTGLYTLLSGVNRHSTAIGRVWLSVIFIFRIMVLVVAAESVWGDEKSSFICNTLQPGCNSVCYDQFFPISHVRLWSLQLILVSTPALLVAMHVAHQQHIEKKMLRLEGHGDPLHLEEVKRHKVHISGTLWWTYVISVVFRLLFEAVFMYVFYLLYPGYAMVRLVKCDVYPCPNTVDCFVSRPTEKTVFTVFMLAASGICIILNVAEVVYLIIRACARRAQGVNHTSEGGWPAFLGQGV

SEQ ID NO: 902694 - protein, 283 aa, Homo sapiens; identical to SEQ ID NO: 902686

SEQ ID NO: 902695 - protein, 283 aa, Homo sapiens; identical to SEQ ID NO: 902686

SEQ ID NO: 902696 - protein, 283 aa, Homo sapiens; identical to SEQ ID NO: 902686

SEQ ID NO: 902697 - protein, 283 aa, Homo sapiens; identical to SEQ ID NO: 902686

SEQ ID NO: 902698 - protein, 288 aa, Homo sapiens
MHAKHRGHEAMHAEMVLILIATLVVAQLLLVQWKQRHPRSYNMVTLFQMWVVPLYFTVKLHWWRFLVIWILFSAVTAFVTFRATRKPLVQTTPRLVYKWFLLIYKISYATGIVGYMAVMFTLFGLNLLFKIKPEDAMDFGISLLFYGLYYGVLERDFAEMCADYMASTIGFYSESGMPTKHLSDSVCAVCGQQIFVDVSEEGIIENTYRLSCNHVFHEFCIRGWCIVGKKQTCPYCKEKVDLKRMFSNPWERPHVMYGQLLDWLRYLVAWQPVIIGVVQGINYILGLE

SEQ ID NO: 902699 - protein, 373 aa, Homo sapiens
MAAVVEVEVGGGAAGERELDEVDMSDLSPEEQWRVEHARMHAKHRGHEAMHAEMVLILIATLVVAQLLLVQWKQRHPRSYNRDGVSLCWPGWSRSPDLVIRLGLPKCWDYRREATAPGRFLQPILKKMVTLFQMWVVPLYFTVKLHWWRFLVIWILFSAVTAFVTFRATRKPLVQTTPRLVYKWFLLIYKISYATGIVGYMAVMFTLFGLNLLFKIKPEDAMDFGISLLFYGLYYGVLERDFAEMCADYMASTIGFYSESGMPTKHLSDSVCAVCGQQIFVDVSEEGIIENTYRLSCNHVFHEFCIRGWCIVGKKQTCPYCKEKVDLKRMFSNPWERPHVMYGQLLDWLRYLVAWQPVIIGVVQGINYILGLE

SEQ ID NO: 902700 - protein, 232 aa, Homo sapiens
PVLSAGDTELDKTWSLPSRSTLFNGGDGQEKLLLQCSWLVYKWFLLIYKISYATGIVGYMAVMFTLFGLNLLFKIKPEDAMDFGISLLFYGLYYGVLERDFAEMCADYMASTIGFYSESGMPTKHLSDSVCAVCGQQIFVDVSEEGIIENTYRLSCNHVFHEFCIRGWCIVGKKQTCPYCKEKVDLKRMFSNPWERPHVMYGQLLDWLRYLVAWQPVIIGVVQGINYILGLE

SEQ ID NO: 902701 - protein, 336 aa, Homo sapiens
TAVRGRAVKMAAVVEVEVGGGAAGERELDEVDMSDLSPEEQWRVEHARMHAKHRGHEAMHAEMVLILIATLVVAQLLLVQWKQRHPRSYNMVTLFQMWVVPLYFTVKLHWWRFLVIWILFSAVTAFVTFRATRKPLVQTTPRLVYKWFLLIYKISYATGIVGYMAVMFTLFGLNLLFKIKPEDAMDFGISLLFYGLYYGVLERDFAEMCADYMASTIGFYSESGMPTKHLSDSVCAVCGQQIFVDVSEEGIIENTYRLSCNHVFHEFCIRGWCIVGKKQTCPYCKEKVDLKRMFSNPWERPHVMYGQLLDWLRYLVAWQPVIIGVVQGINYILGLE

SEQ ID NO: 902702 - protein, 152 aa, Homo sapiens
TAVRGRAVKMAAVVEVEVGGGAAGERELDEVDMSDLSPEEQWRVEHARMHAKHRGHEAMHAEMVLILIATLVVAQLLLVQWKQRHPRSYNMVTLFQMWVVPLYFTVKLHWWRFLVIWILFSAVTAFVTFRATRKPLVQTTPSPPAVSDWGGI

SEQ ID NO: 902703 - protein, 319 aa, Homo sapiens
TAVRGRAVKMAAVVEVEVGGGAAGERELDEVDMSDLSPEEQWRVEHARMHAKHRGHEAMHAEMVLILIATLVVAQLLLVQWKQRHPRSYNMVTLFQMWVVPLYFTVKLHWWRFLVIWILFSAVTAFVTFRATRKPLVQTTPRLVYKWFLLIYKISYATGIVGYMAVMFTLFGLNLLFKIKPEDAMDFGISLLFYGLYYGVLERDFAEMCADYMASTIGFYSESGMPTKHLSDSVCAVCGQQIFVDVSEEGIIENTYRLSCNHVYPASSSWATSLLQSAHCSEREKEGGHDPRHAVQTLECRRATRGPPSLPFPTDQSHS

SEQ ID NO: 902704 - protein, 336 aa, Homo sapiens; identical to SEQ ID NO: 902701

SEQ ID NO: 902705 - protein, 235 aa, Homo sapiens
MPSTVAMKLCMLKWSSSSSQPWWWPSCSWCSGSRGTHAPTMLVYKWFLLIYKISYATGIVGYMAVMFTLFGLNLLFKIKPEDAMDFGISLLFYGLYYGVLERDFAEMCADYMASTIGFYSESGMPTKHLSDSVCAVCGQQIFVDVSEEGIIENTYRLSCNHVFHEFCIRGWCIVGKKQTCPYCKEKVDLKRMFSNPWERPHVMYGQLLDWLRYLVAWQPVIIGVVQGINYILGLE

SEQ ID NO: 902706 - protein, 336 aa, Homo sapiens; identical to SEQ ID NO: 902701

SEQ ID NO: 902707 - protein, 220 aa, Homo sapiens
MRLICQISLQKSNGGSSTHACMPSTVAMKLCMLKWSSSSSQPWWWPSCSWCSGSRGTHAPTMIKPEDAMDFGISLLFYGLYYGVLERDFAEMCADYMASTIGFYSESGMPTKHLSDSVCAVCGQQIFVDVSEEGIIENTYRLSCNHVFHEFCIRGWCIVGKKQTCPYCKEKVDLKRMFSNPWERPHVMYGQLLDWLRYLVAWQPVIIGVVQGINYILGLE

SEQ ID NO: 902708 - protein, 192 aa, Homo sapiens
TAVRGRAVKMAAVVEVEVGGGAAGERELDEVDMSDLSPEEQWRVEHARMHAKHRGHEAMHAEMVLILIATLVVAQLLLVQWKQRHPRSYNMVTLFQMWVVPLYFTVKLHWWRFLVIWILFSAVTAFVTFRATRKPLVQTTPRGESLSSGKSPGFPKLMGWNAWEEHRFRLKKFLVLSAKIIWHGASLKQADW

SEQ ID NO: 902709 - protein, 259 aa, Homo sapiens
MGDAAADPPGPALPCEFLRPGCGAPLSPGAQLGRGAPTSAFPPPAAEAHPAARRGLRSPQLPSGAMSQNGAPGMQEESLQGSWVELHFSNNGNGGSVPASVSIYNGDMEKILLDAQHESGRSSSKSSHCDSPPRSQTPQDTNRASETDTHSIGEKNSSQSEEDDIERRKEVESILKKNSDWIWDWSSRPENIPPKEFLFKHPKRTATLSMRNTSVMKKGGIFSAEFLKVFLPSLLLSHLLAIGLGIYIGRRLTTSTSTF

SEQ ID NO: 902710 - protein, 288 aa, Homo sapiens
MGDAAADPPGPALPCEFLRPGCGAPLSPGAQLGRGAPTSAFPPPAAEAHPAARRGLRSPQLPSGAMSQNGAPGMQEESLQGSWVELHFSNNGNGGSVPASVSIYNGDMEKILLDAQHESGRSSSKSSHCDSPPRSQTPQDTNRASETDTHSIGEKNSSQSEEDDIERRKEVESILKKNSDWIWDWSSRPENIPPKEFLFKHPKRTATLSMRNTSVMKKGGIFSAEFLKVFLPSLLLSHLLAIGLGSILEGVENLTDFDENGSAGRRNNLSVIVLRGYLGRPGMVKGLL

SEQ ID NO: 902711 - protein, 168 aa, Homo sapiens
MGDAAADPPGPALPCEFLRPGCGAPLSPGAQLGRGAPTSAFPPPAAEAHPAARRGLRSPQLPSGAMSQNGAPGMQEESLQGSWVELHFSNNGNGGSVPASVSIYNGDMEKILLDAQHESGRSSSKSSHCDSPPRSQTPQDTNRASETDTHSIGEKNSSQVSWKENVQL

SEQ ID NO: 902712 - protein, 259 aa, Homo sapiens; identical to SEQ ID NO: 902709

SEQ ID NO: 902713 - protein, 259 aa, Homo sapiens; identical to SEQ ID NO: 902709

SEQ ID NO: 902714 - protein, 254 aa, Homo sapiens
MGDAAADPPGPALPCEFLRPGCGAPLSPGAQLGRGAPTSAFPPPAAEAHPAARRGLRSPQLPSGAMSQNGAPGMQEESLQGSWVELHFSNNGNGGSVPASVSIYNGDMEKILLDAQHESGRSSSKSSHCDSPPRSQTPQDTNRASETDTHSIGEKNSSQSEEDDIERRKEVESILKKNSDWIWDWSSRPENIPPKEFLFKHPKRTATLSMRNTSVMKKGGIFSAEFLKVFLPSLLLSHLLAIGLGDGASPRCPG

SEQ ID NO: 902715 - protein, 259 aa, Homo sapiens; identical to SEQ ID NO: 902709

SEQ ID NO: 902716 - protein, 259 aa, Homo sapiens; identical to SEQ ID NO: 902709

SEQ ID NO: 902717 - protein, 125 aa, Homo sapiens
YGEVQLRVRYSYVVRYSYVVRYSSQSEEDDIERRKEVESILKKNSDWIWDWSSRPENIPPKEFLFKHPKRTATLSMRNTSVMKKGGIFSAEFLKVFLPSLLLSHLLAIGLGIYIGRRLTTSTSTF

SEQ ID NO: 902718 - protein, 254 aa, Homo sapiens; identical to SEQ ID NO: 902714

SEQ ID NO: 902719 - protein, 315 aa, Homo sapiens
FKKELFLSCYWCLGCPVLKHHDPSLPYLEQYQIDCQQFRALYHLLSPWAHSANKDSLALWTFRLLDENSDCLINFKEFSSAIDIMCNGSFTEKLKLLFKLHIPPAYTEVKSKDASKGDELSKEELLYFSQLHVSKPANEKEAESAKHSPEKGKGKIDIQAYLSQWQDELFKKEENIKDLPRMNQSQFIQFSKTLYNLFHEDPEEESLYQAIAVVTSLLLRMEEVGRKLHSPTSSAKGFSGTVCGSGGPSEEKTGSHLEKDPCSFREEPQWSFAFEQILASLLNEPALVRFFEKPIDVKAKLENARISQLRSRTKM

SEQ ID NO: 902720 - protein, 528 aa, Homo sapiens
RWCCCRDCLPHWRRAERRNVQLLTAAETWEPRGPLSSQPPPPSSRAGPPRPRLLLTPRPGARFCGSIILCHYEMSSLGASFVQIKFDDLQFFENCGGGSFGSVYRAKWISQDKEVAVKKLLKIEKEAEILSVLSHRNIIQFYGVILEPPNYGIVTEYASLGSLYDYINSNRSEEMDMDHIMTWATDVAKGMHYLHMEAPVKVIHRDLKSRNVVIAADGVLKICDFGASRFHNHTTHMSLVGTFPWMAPEVIQSLPVSETCDTYSYGVVLWEMLTREVPFKGLEGLQVAWLVVEKNERLTIPSSCPRSFAELLHQCWEADAKKRPSFKQIISILESMSNDTSLPDKCNSFLHNKAEWRCEIEATLERLKKLERDLSFKEQELKERERRLKMWEQKLTEQSNTPLLLPLAARMSEESYFESKTEESNSAEMSCQITATSNGEGHGMNPSLQAMMLMGFGDIFSMNKAGAVMHSGMQINMQAKQNSSKTTSKRRGKKVNMALGFSDFDLSEGDDDDDDDGEEEDNDMDNSE

SEQ ID NO: 902721 - protein, 873 aa, Homo sapiens
RWCCCRDCLPHWRRAERRNVQLLTAAETWEPRGPLSSQPPPPSSRAGPPRPRLLLTPRPGARFCGSIILCHYEMSSLGASFVQIKFDDLQFFENCGGGSFGSVYRAKWISQDKEVAVKKLLKIEKEAEILSVLSHRNIIQFYGVILEPPNYGIVTEYASLGSLYDYINSNRSEEMDMDHIMTWATDVAKGMHYLHMEAPVKVIHRDLKSRNVVIAADGVLKICDFGASRFHNHTTHMSLVGTFPWMAPEVIQSLPVSETCDTYSYGVVLWEMLTREVPFKGLEGLQVAWLVVEKNERLTIPSSCPRSFAELLHQCWEADAKKRPSFKQIISILESMSNDTSLPDKCNSFLHNKAEWRCEIEATLERLKKLERDLSFKEQELKERERRLKMWEQKLTEQSNTPLLPSFEIGAWTEDDVYCWVQQLVRKGDSSAEMSVYASLFKENNITGKRLLLLEEEDLKDMGIVSKGHIIHFKSAIEKLTHDYINLFHFPPLIKDSGGEPEENEEKIVNLELVFGFHLKPGTGPQDCKWKMYMEMDGDEIAITYIKDVTFNTNLPDAEILKMTKPPFVMEKWIVGIAKSQTVECTVTYESDVRTPKSTKHVHLIQWSRTKPQDEVKAVQLAIQTLFTNSDGNPGSRSDSSADCQWLDTLRMRQIASNTSLQRSQSNPILGSPFFSHFDGQDSYAAAVRRPQVPIKYQQITPVNQSRSSSPTQYGLTKNFSSLHLNSRDSGFSSGNTDTSSERGRYSDRSRNKYGRGSISLNSSPRGRYSGKSQHSTPSRGRYPGKFYRVSQSALNPHQSPDFKRSPRDLHQPNTIPGMPLHPETDSRASEEDSKVSEGGWTKVEYRKKPHRPSPAKTNKERARGDHRGWRNF

SEQ ID NO: 902722 - protein, 528 aa, Homo sapiens; identical to SEQ ID NO: 902720

SEQ ID NO: 902723 - protein, 503 aa, Homo sapiens
RWCCCRDCLPHWRRAERRNVQLLTAAETWEPRGPLSSQPPPPSSRAGPPRPRLLLTPRPGARFCGSIILCHYEMSSLGASFVQIKFDDLQFFENCGGGSFGSVYRAKWISQDKEVAVKKLLKIEKEAEILSVLSHRNIIQFYGVILEPPNYGIVTEYASLGSLYDYINSNRSEEMDMDHIMTWATDVAKGMHYLHMEAPVKVIHRDLKSRNVVIAADGVLKICDFGASRFHNHTTHMSLVGTFPWMAPEVIQSLPVSETCDTYSYGVVLWEMLTREVPFKGLEGLQVAWLVVEKNERLTIPSSCPRSFAELLHQCWEADAKKRPSFKQIISILESMSNDTSLPDKCNSFLHNKAEWRCEIEATLERLKKLERDLSFKEQELKERERRLKMWEQKLTEQSNTPSQHSTPSRGRYPGKFYRVSQSALNPHQSPDFKRSPRDLHQPNTIPGMPLHPETDSRASEEDSKVSEGGWTKVEYRKKPHRPSPAKTNKERARGDHRGWRNF

SEQ ID NO: 902724 - protein, 697 aa, Homo sapiens
MDHIMTWATDVAKGMHYLHMEAPVKVIHRDLKSRNVVIAADGVLKICDFGASRFHNHTTHMSLVGTFPWMAPEVIQSLPVSETCDTYSYGVVLWEMLTREVPFKGLEGLQVAWLVVEKNERLTIPSSCPRSFAELLHQCWEADAKKRPSFKQIISILESMSNDTSLPDKCNSFLHNKAEWRCEIEATLERLKKLERDLSFKEQELKERERRLKMWEQKLTEQSNTPLLPSFEIGAWTEDDVYCWVQQLVRKGDSSAEMSVYASLFKENNITGKRLLLLEEEDLKDMGIVSKGHIIHFKSAIEKLTHDYINLFHFPPLIKDSGGEPEENEEKIVNLELVFGFHLKPGTGPQDCKWKMYMEMDGDEIAITYIKDVTFNTNLPDAEILKMTKPPFVMEKWIVGIAKSQTVECTVTYESDVRTPKSTKHVHLIQWSRTKPQDEVKAVQLAIQTLFTNSDGNPGSRSDSSADCQWLDTLRMRQIASNTSLQRSQSNPILGSPFFSHFDGQDSYAAAVRRPQVPIKYQQITPVNQSRSSSPTQYGLTKNFSSLHLNSRDSGFSSGNTDTSSERGRYSDRSRNKYGRGSISLNSSPRGRYSGKSQHSTPSRGRYPGKFYRVSQSALNPHQSPDFKRSPRDLHQPNTIPGMPLHPETDSRASEEDSKVSEGGWTKVEYRKKPHRPSPAKTNKERARGDHRGWRNF

SEQ ID NO: 902725 - protein, 538 aa, Homo sapiens [sequence omitted]

SEQ ID NO: 902726 - protein, 324 aa, Homo sapiens
RWCCCRDCLPHWRRAERRNVQLLTAAETWEPRGPLSSQPPPPSSRAGPPRPRLLLTPRPGARFCGSIILCHYEMSSLGASFVQIKFDDLQFFENCGGGSFGSVYRAKWISQDKEVAVKKLLKIEKEAEILSVLSHRNIIQFYGVILEPPNYGIVTEYASLGSLYDYINSNRSEEMDMDHIMTWATDVAKGMHYLHMEAPVKVIHRDLKSRNVVIAADGVLKICDFGASRFHNHTTHMSLVGTFPWMAPEVIQSLPVSETCDTYSYGVVLWEMLTREVPFKGLEGLQVAWLVVEKNEVRLRFSIQVHRSENSIGVLQKTFSSSSN

SEQ ID NO: 902727 - protein, 284 aa, Homo sapiens
RWCCCRDCLPHWRRAERRNVQLLTAAETWEPRGPLSSQPPPPSSRAGPPRPRLLLTPRPGARFCGSIILCHYEMSSLGASFVQIKFDDLQFFENCGGGSFGSVYRAKWISQDKEVAVKKLLKIEKEAEILSVLSHRNIIQFYGVILEPPNYGIVTEYASLGSLYDYINSNRSEEMDMDHIMTWATDVAKGMHYLHMEAPVKVIHRDLKSRNVVIAADGVLKICDFGASRFHNHTTHMSLVGTFPWMAPEVIQSLPVSETCDTYSYGVVLMGHSLCEHLPSTGRE

SEQ ID NO: 902728 - protein, 873 aa, Homo sapiens; identical to SEQ ID NO: 902721

SEQ ID NO: 902729 - protein, 873 aa, Homo sapiens; identical to SEQ ID NO: 902721

SEQ ID NO: 902730 - protein, 800 aa, Homo sapiens
MSSLGASFVQIKFDDLQFFENCGGGSFGSVYRAKWISQDKEVAVKKLLKIEKEAEILSVLSHRNIIQFYGVILEPPNYGIVTEYASLGSLYDYINSNRSEEMDMDHIMTWATDVAKGMHYLHMEAPVKVIHRDLKSRNVVIAADGVLKICDFGASRFHNHTTHMSLVGTFPWMAPEVIQSLPVSETCDTYSYGVVLWEMLTREVPFKGLEGLQVAWLVVEKNERLTIPSSCPRSFAELLHQCWEADAKKRPSFKQIISILESMSNDTSLPDKCNSFLHNKAEWRCEIEATLERLKKLERDLSFKEQELKERERRLKMWEQKLTEQSNTPLLPSFEIGAWTEDDVYCWVQQLVRKGDSSAEMSVYASLFKENNITGKRLLLLEEEDLKDMGIVSKGHIIHFKSAIEKLTHDYINLFHFPPLIKDSGGEPEENEEKIVNLELVFGFHLKPGTGPQDCKWKMYMEMDGDEIAITYIKDVTFNTNLPDAEILKMTKPPFVMEKWIVGIAKSQTVECTVTYESDVRTPKSTKHVHLIQWSRTKPQDEVKAVQLAIQTLFTNSDGNPGSRSDSSADCQWLDTLRMRQIASNTSLQRSQSNPILGSPFFSHFDGQDSYAAAVRRPQVPIKYQQITPVNQSRSSSPTQYGLTKNFSSLHLNSRDSGFSSGNTDTSSERGRYSDRSRNKYGRGSISLNSSPRGRYSGKSQHSTPSRGRYPGKFYRVSQSALNPHQSPDFKRSPRDLHQPNTIPGMPLHPETDSRASEEDSKVSEGGWTKVEYRKKPHRPSPAKTNKERARGDHRGWRNF

SEQ ID NO: 902731 - protein, 503 aa, Homo sapiens
RWCCCRDCLPHWRRAERRNVQLLTAAETWEPRGPLSSQPPPPSSRAGPPRPRLLLTPRPGARFCGSIILCHYEMSSLGASFVQIKFDDLQFFENCGGGSFGSVYRAKWISQDKEVAVKKLLKIEKEAEILSVLSHRNIIQFYGVILEPPNYGIVTEYASLGSLYDYINSNRSEEMDMDHIMTWATDVAKGMHYLHMEAPVKVIHRDLKSRNVVIAADGVLKICDFGASRFHNHTTHMSLVGTFPWMAPEVIQSLPVSETCDTYSYGVVLWEMLTREVPFKGLEGLQVAWLVVEKNEKRPSFKQIISILESMSNDTSLPDKCNSFLHNKAEWRCEIEATLERLKKLERDLSFKEQELKERERRLKMWEQKLTEQSNTPLLLPLAARMSEESYFESKTEESNSAEMSCQITATSNGEGHGMNPSLQAMMLMGFGDIFSMNKAGAVMHSGMQINMQAKQNSSKTTSKRRGKKVNMALGFSDFDLSEGDDDDDDDGEEEDNDMDNSE

SEQ ID NO: 902732 - protein, 783 aa, Homo sapiens
VVLLPGLSSSLAPCREAECSTPNCGGNVGAARAAVVPTPAALVARGASAPPAAAHAPPGSQAEILSVLSHRNIIQFYGVILEPPNYGIVTEYASLGSLYDYINSNRSEEMDMDHIMTWATDVAKGMHYLHMEAPVKVIHRDLKSRNVVIAADGVLKICDFGASRFHNHTTHMSLVGTFPWMAPEVIQSLPVSETCDTYSYGVVLWEMLTREVPFKGLEGLQVAWLVVEKNEKRPSFKQIISILESMSNDTSLPDKCNSFLHNKAEWRCEIEATLERLKKLERDLSFKEQELKERERRLKMWEQKLTEQSNTPLLPSFEIGAWTEDDVYCWVQQLVRKGDSSAEMSVYASLFKENNITGKRLLLLEEEDLKDMGIVSKGHIIHFKSAIEKLTHDYINLFHFPPLIKDSGGEPEENEEKIVNLELVFGFHLKPGTGPQDCKWKMYMEMDGDEIAITYIKDVTFNTNLPDAEILKMTKPPFVMEKWIVGIAKSQTVECTVTYESDVRTPKSTKHVHLIQWSRTKPQDEVKAVQLAIQTLFTNSDGNPGSRSDSSADCQWLDTLRMRQIASNTSLQRSQSNPILGSPFFSHFDGQDSYAAAVRRPQVPIKYQQITPVNQSRSSSPTQYGLTKNFSSLHLNSRDSGFSSGNTDTSSERGRYSDRSRNKYGRGSISLNSSPRGRYSGKSQHSTPSRGRYPGKFYRVSQSALNPHQSPDFKRSPRDLHQPNTIPGMPLHPETDSRASEEDSKVSEGGWTKVEYRKKPHRPSPAKTNKERARGDHRGWRNF

SEQ ID NO: 902733 - protein, 221 aa, Homo sapiens
MSKSWDQCWEADAKKRPSFKQIISILESMSNDTSLPDKCNSFLHNKAEWRCEIEATLERLKKLERDLSFKEQELKERERRLKMWEQKLTEQSNTPLLLPLAARMSEESYFESKTEESNSAEMSCQITATSNGEGHGMNPSLQAMMLMGFGDIFSMNKAGAVMHSGMQINMQAKQNSSKTTSKRRGKKVNMALGFSDFDLSEGDDDDDDDGEEEDNDMDNSE

SEQ ID NO: 902734 - protein, 376 aa, Homo sapiens
MARGPGPLGRPRPDTVAMPKRGKRLKFRAHDACSGRVTVADYANSDPAVVRSGRVKKAVANAVQQEVKSLCGLEASQVPAEEALSGAGEPCDIIDSSDEMDAQEESIHERTVSRKKKSKRHKEELDGAGGEEYPMDIWLLLASYIRPEDIVNFSLICKNAWTVTCTAAFWTRLYRRHYTLDASLPLRLRPESMEKLRCLRACVIRSLYHMYEPFAARISKNPAIPESTPSTLKNSKCLLFWCRKIVGNRQEPMWEFNFKFKKQSPRLKSKCTGGLQPPVQYEDVHTNPDQDCCLLQVTTLNFIFIPIVMGMIFTLFTINVSTDMRHHRVRLVFQDSPVHGGRKLRSEQGVQVILDPVHSVRLFDWWHPQYPFSLRA

SEQ ID NO: 902735 - protein, 376 aa, Homo sapiens; identical to SEQ ID NO: 902734

SEQ ID NO: 902736 - protein, 376 aa, Homo sapiens; identical to SEQ ID NO: 902734

SEQ ID NO: 902737 - protein, 376 aa, Homo sapiens; identical to SEQ ID NO: 902734

SEQ ID NO: 902738 - protein, 320 aa, Homo sapiens
MSRFPLLFLSCGDSGQVALPFQASQSAGNNRRADLRGPRTGLCLLRLAEARSLLPRRSCRIRHERRGAGRSWLAAPGAGSPAGDMARGPGPLGRPRPDTVAMPKRGKRLKFRAHDACSGRVTVADYANSDPAVVRSGRVKKAVANAVQQEVKSLCGLEASQVPAEEALSGAGEPCDIIDSSDEMDAQEESIHERTVSRKKKSKRHKEELDGAGGEEYPMDIWLLLASYIRPEDIVNFSLICKNAWTVTCTAAFWTRLYRRHYTLDASLPLRLRPESMEKLRCLRACVIRSLYHMYEPFAARISKNPAIPESTPSTLKNSK

SEQ ID NO: 902739 - protein, 259 aa, Homo sapiens
MRWMPRRKASMRELSPDMDIWLLLASYIRPEDIVNFSLICKNAWTVTCTAAFWTRLYRRHYTLDASLPLRLRPESMEKLRCLRACVIRSLYHMYEPFAARISKNPAIPESTPSTLKNSKCLLFWCRKIVGNRQEPMWEFNFKFKKQSPRLKSKCTGGLQPPVQYEDVHTNPDQDCCLLQVTTLNFIFIPIVMGMIFTLFTINVSTDMRHHRVRLVFQDSPVHGGRKLRSEQGVQVILDPVHSVRLFDWWHPQYPFSLRA

SEQ ID NO: 902740 - protein, 124 aa, Homo sapiens [sequence omitted]

SEQ ID NO: 902741 - protein, 149 aa, Homo sapiens
STGIMQIFQNLKKWETLLAPSVLDKGYSIRSAMKKKSPRLKSKCTGGLQPPVQYEDVHTNPDQDCCLLQVTTLNFIFIPIVMGMIFTLFTINVSTDMRHHRVRLVFQDSPVHGGRKLRSEQGVQVILDPVHSVRLFDWWHPQYPFSLRA

SEQ ID NO: 902742 - protein, 320 aa, Homo sapiens; identical to SEQ ID NO: 902738

SEQ ID NO: 902743 - protein, 376 aa, Homo sapiens; identical to SEQ ID NO: 902734

SEQ ID NO: 902744 - protein, 460 aa, Homo sapiens
MSRFPLLFLSCGDSGQVALPFQASQSAGNNRRADLRGPRTGLCLLRLAEARSLLPRRSCRIRHERRGAGRSWLAAPGAGSPAGDMARGPGPLGRPRPDTVAMPKRGKRLKFRAHDACSGRVTVADYANSDPAVVRSGRVKKAVANAVQQEVKSLCGLEASQVPAEEALSGAGEPCDIIDSSDEMDAQEESIHERTVSRKKKSKRHKEELDGAGGEEYPMDIWLLLASYIRPEDIVNFSLICKNAWTVTCTAAFWTRLYRRHYTLDASLPLRLRPESMEKLRCLRACVIRSLYHMYEPFAARISKNPAIPESTPSTLKNSKCLLFWCRKIVGNRQEPMWEFNFKFKKQSPRLKSKCTGGLQPPVQYEDVHTNPDQDCCLLQVTTLNFIFIPIVMGMIFTLFTINVSTDMRHHRVRLVFQDSPVHGGRKLRSEQGVQVILDPVHSVRLFDWWHPQYPFSLRA

SEQ ID NO: 902745 - protein, 376 aa, Homo sapiens; identical to SEQ ID NO: 902734

SEQ ID NO: 902746 - protein, 277 aa, Homo sapiens
MDAQEESIHERTVSRKKKSKRHKEELDGAGGEEYPMDIWLLLASYIRPEDIVNFSLICKNAWTVTCTAAFWTRLYRRHYTLDASLPLRLRPESMEKLRCLRACVIRSLYHMYEPFAARISKNPAIPESTPSTLKNSKCLLFWCRKIVGNRQEPMWEFNFKFKKQSPRLKSKCTGGLQPPVQYEDVHTNPDQDCCLLQVTTLNFIFIPIVMGMIFTLFTINVSTDMRHHRVRLVFQDSPVHGGRKLRSEQGVQVILDPVHSVRLFDWWHPQYPFSLRA

SEQ ID NO: 902747 - protein, 342 aa, Homo sapiens
MSRFPLLFLSCGDSGQVALPFQASQSAGNNRRADLRGPRTGLCLLRLAEARSLLPRRSCRIRHERRGAGRSWLAAPGAGSPAGDMARGPGPLGRPRPDTVAMPKRGKRLKFRAHDACSGRVTVADYANSDPAVVRSGRVKKAVANAVQQEVKSLCGLEASQVPAEEALSGAGEPCDIIDSSDEMDAQEESIHERTVSRKKKSKRHKEELDGAGGEEYPMDIWLLLASYIRPEDIVNFSLICKNAWTVTCTAAFWTRLYRRHYTLDASLPLRLRPESMEKLRCLRACVIRSLYHMYEPFAARISKNPAIPESTPSTLKNSKKDCWEQTGTNVGIQLQVQKTVP

SEQ ID NO: 902748 - protein, 124 aa, Homo sapiens [sequence omitted]

SEQ ID NO: 902749 - protein, 320 aa, Homo sapiens; identical to SEQ ID NO: 902738

SEQ ID NO: 902750 - protein, 299 aa, Homo sapiens
MSRFPLLFLSCGDSGQVALPFQASQSAGNNRRADLRGPRTGLCLLRLAEARSLLPRRSCRIRHERRGAGRSWLAAPGAGSPAGDMARGPGPLGRPRPDTVAMPKRGKRLKFRAHDACSGRVTVADYANSDPAVVRSGRVKKAVANAVQQEVKSLCGLEASQVPAEEALSGAGEPCDIIDSSDEMDAQEESIHERTVSRKKKSKRHKEELDGAGGEEYPMDIWLLLASYIRPEDIVNFSLICKNAWTVTCTAAFWTRLYRRCDHRELTLLSVWLISLLFVIWSYSLDGDLFSLSLLHVWA

SEQ ID NO: 902751 - protein, 314 aa, Homo sapiens
YPSPALHLSTFSARPEALDPSPLAPARPGARPRGANAASHWLCGPPLSLMCQFEGLRRRVAAERRSPRSLEVRRPGARGGRRAEPAGAGRAAAAAVPGRTGAGGRMELNSLLILLEAAEYLERRDREAEHGYASVLPFDGDFAREKTKAAGLVRKAPNNRSSHNELEKHRRAKLRLYLEQLKQLVPLGPDSTRHTTLSLLKRAKVHIKKLEEQDRRALSIKEQLQQEHRFLKRRLEQLSVQSVERVRTDSTGSAVSTDDSEQEVDIEGMEFGPGELDSVGSSSDADDHYSLQSGTGGDSGFGPHCRRLGRPALS

SEQ ID NO: 902752 - protein, 242 aa, Homo sapiens
MAGGRAGAPRKCLAVTRCGFAGHGELGASARCLGAVGVGLLLGVGDGGSQPGQEGILREGPSAHVQQWMVGVGLCRALETACCPPPPQPDGSVSGSFRRAKLRLYLEQLKQLVPLGPDSTRHTTLSLLKRAKVHIKKLEEQDRRALSIKEQLQQEHRFLKRRLEQLSVQSVERVRTDSTGSAVSTDDSEQEVDIEGMEFGPGELDSVGSSSDADDHYSLQSGTGGDSGFGPHCRRLGRPALS

SEQ ID NO: 902753 - protein, 231 aa, Homo sapiens
MPGGDALGFAGHGELGASARCLGAVGVGLLLGVGDGGSQPGQEGILREGPSAHVQQWMVGVGLCRALETACCPPPPQPDGSVSGSFRRAKLRLYLEQLKQLVPLGPDSTRHTTLSLLKRAKVHIKKLEEQDRRALSIKEQLQQEHRFLKRRLEQLSVQSVERVRTDSTGSAVSTDDSEQEVDIEGMEFGPGELDSVGSSSDADDHYSLQSGTGGDSGFGPHCRRLGRPALS

SEQ ID NO: 902754 - protein, 231 aa, Homo sapiens; identical to SEQ ID NO: 902753

SEQ ID NO: 902755 - protein, 163 aa, Homo sapiens
YPSPALHLSTFSARPEALDPSPLAPARPGARPRGANAASHWLCGPPLSLMCQFEGLRRRVAAERRSPRSLEVRRPGARGGRRAEPAGAGRAAAAAVPGRTGAGGRMELNSLLILLEAAEYLERRDREAEHGYASVLPFDGDFAREKTKAAGLVRKAPNNRPPQ

SEQ ID NO: 902756 - protein, 176 aa, Homo sapiens
YPSPALHLSTFSARPEALDPSPLAPARPGARPRGANAASHWLCGPPLSLMCQFEGLRRRVAAERRSPRSLEVRRPGARGGRRAEPAGAGRAAAAAVPGRTGAGGRMELNSLLILLEAAEYLERRDREAEHGYASVLPFDGDFAREKTKAAGLVRKAPNNRSSHNELEKHRKVFRDF

SEQ ID NO: 902757 - protein, 231 aa, Homo sapiens; identical to SEQ ID NO: 902753

SEQ ID NO: 902758 - protein, 231 aa, Homo sapiens; identical to SEQ ID NO: 902753

SEQ ID NO: 902759 - protein, 231 aa, Homo sapiens; identical to SEQ ID NO: 902753

SEQ ID NO: 902760 - protein, 197 aa, Homo sapiens
YPSPALHLSTFSARPEALDPSPLAPARPGARPRGANAASHWLCGPPLSLMCQFEGLRRRVAAERRSPRSLEVRRPGARGGRRAEPAGAGRAAAAAVPGRTGAGGRMELNSLLILLEAAEYLERRDREAEHGYASVLPFDGDFAREKTKAAGLVRKAPNNRSSHNELEKHRDRIPGTQRLSHILHCSPRALTLPMRLG

SEQ ID NO: 902761 - protein, 316 aa, Homo sapiens
MPGGDALGFAGHGELGASARCLGAVGVGLLLGVGDGGSQPGQEGILREGPSAHVQQWMVGVGLCRALETACCPPPPQPDGSVSGSFRRAKLRLYLEQLKQLVPLGPDSTRHTTLSLLKRAKVHIKKLEEQDRRALSIKEQLQQEHRFLKRRLEQLSVQSVERVRTDSTGSAVSTDDSEQEVDIEGMEFGPGELDSVGSSSDADDHYSLQSGTGGDSGFGPHCRRLGRPALAVSTDDSEQEVDIEGMEFGPGELDSVGSSSDADDQLCHSGSSSCCWAAWHCPLAGQGLPSCLPLPAGQSPLQGGRAQLPHPEPWSA

SEQ ID NO: 902762 - protein, 255 aa, Homo sapiens
MPGGDALGFAGHGELGASARCLGAVGVGLLLGVGDGGSQPGQEGILREGPSAHVQQWMVGVGLCRALETACCPPPPQPDGSVSGSFRRAKLRLYLEQLKQLVPLGPDSTRHTTLSLLKRAKVHIKKLEEQDRRALSIKEQLQQEHRFLKRRLEQLSVQSVERVRTDSTGSAVSTDDSEQEVDIEGMEFGPGELDAVPFWKLQLLLGCLALPACRSGPAELPAPSSWAESPARRQGPASTSGALVSIAAHGLFSDS

SEQ ID NO: 902763 - protein, 105 aa, Homo sapiens
VLLRPGSQPEPSWRLLPQGPDSALRTSAPLPRASASRKGRNGLAPSEWPDPIPTLFSLEVDIEGMEFGPGELDSVGSSSDADDHYSLQSGTGGDSGFGPHCRRLG

SEQ ID NO: 902764 - protein, 231 aa, Homo sapiens; identical to SEQ ID NO: 902753

SEQ ID NO: 902765 - protein, 276 aa, Homo sapiens
MSGSFQISVQPERHPRLTPPLPACGLQGGDGGWGMAGGRAGAPRKCLAVTRCGFAGHGELGASARCLGAVGVGLLLGVGDGGSQPGQEGILREGPSAHVQQWMVGVGLCRALETACCPPPPQPDGSVSGSFRRAKLRLYLEQLKQLVPLGPDSTRHTTLSLLKRAKVHIKKLEEQDRRALSIKEQLQQEHRFLKRRLEQLSVQSVERVRTDSTGSAVSTDDSEQEVDIEGMEFGPGELDSVGSSSDADDHYSLQSGTGGDSGFGPHCRRLGRPALS

SEQ ID NO: 902766 - protein, 255 aa, Homo sapiens; identical to SEQ ID NO: 902762

SEQ ID NO: 902767 - protein, 197 aa, Homo sapiens; identical to SEQ ID NO: 902760

SEQ ID NO: 902768 - protein, 274 aa, Homo sapiens
YPSPALHLSTFSARPEALDPSPLAPARPGARPRGANAASHWLCGPPLSLMCQFEGLRRRVAAERRSPRSLEVRRPGARGGRRAEPAGAGRAAAAAVPGRTGAGGRMELNSLLILLEAAEYLERRDRGCAILEAPAAAGLPGTARLPVRACRAACPFQLGRVPCKEAGPSFHIRSPGQHSRPRSVLRFLIIPEVLNVIAANLGRCRVRGLMTTTGSSDPNPGSQEKGVDRGRKEGKAVCPSVRLSTYLSVHIGSWRGQGVCEGRELGEHLGQVGG

SEQ ID NO: 902769 - protein, 231 aa, Homo sapiens; identical to SEQ ID NO: 902753

SEQ ID NO: 902770 - protein, 231 aa, Homo sapiens; identical to SEQ ID NO: 902753

SEQ ID NO: 902771 - protein, 314 aa, Homo sapiens; identical to SEQ ID NO: 902751

SEQ ID NO: 902772 - protein, 197 aa, Homo sapiens; identical to SEQ ID NO: 902760

SEQ ID NO: 902773 - protein, 168 aa, Homo sapiens
MGKGDPNKPRGKMSSYAFFVQTCREEHKKKHPDSSVNFAEFSKKCSERWKTMSAKEKSKFEDMAKSDKARYDREMKNYVPPKGDKKGKKKDPNAPKRPPSAFFLFCSEHRPKIKSEHPGLSIGDTAKKLGEMWSEQSAKDKQPYEQKAAKLKEKYEQGYCCISCQGQK

SEQ ID NO: 902774 - protein, 168 aa, Homo sapiens; identical to SEQ ID NO: 902773

SEQ ID NO: 902775 - protein, 168 aa, Homo sapiens; identical to SEQ ID NO: 902773

SEQ ID NO: 902776 - protein, 168 aa, Homo sapiens; identical to SEQ ID NO: 902773

SEQ ID NO: 902777 - protein, 168 aa, Homo sapiens; identical to SEQ ID NO: 902773

SEQ ID NO: 902778 - protein, 168 aa, Homo sapiens; identical to SEQ ID NO: 902773

SEQ ID NO: 902779 - protein, 168 aa, Homo sapiens; identical to SEQ ID NO: 902773

SEQ ID NO: 902780 - protein, 117 aa, Homo sapiens
MSAKEKSKFEDMAKSDKARYDREMKNYVPPKGDKKGKKKDPNAPKRPPSAFFLFCSEHRPKIKSEHPGLSIGDTAKKLGEMWSEQSAKDKQPYEQKAAKLKEKYEQGYCCISCQGQK

SEQ ID NO: 902781 - protein, 173 aa, Homo sapiens
MGKGDPNKPRGKMSSYAFFVQTCREEHKKKHPDSSVNFAEFSKKCSERWKTMSAKEKSKFEDMAKSDKARYDREMKNYVPPKGDKKGKKKDPNAPKRPPSAFFLFCSEHRPKIKSEHPGLSIGDTAKKLGEMWSEQSAKDKQPYEQKAAKLKEKYEQGYSVIFFKAVDKTRYR

SEQ ID NO: 902782 - protein, 103 aa, Homo sapiens
MGKGDPNKPRGKMSSYAFFVQTCREEHKKKHPDSSVNFAEFSKKCSERWKTMSAKEKSKFEDMAKSDKARYDREMKNYVPPKGDKKGKKKDPNAPKRPPVSLK

SEQ ID NO: 902783 - protein, 134 aa, Homo sapiens
MGKGDPNKPRGKMSSYAFFVQTCREEHKKKHPDSSVNFAEFSKKCSERWKTMSAKEKSKFEDMAKSDKARYDREMKNYVPPKDLPSSCFALNIAQRSKVNTLAYPLGILQRNWVKCGLSSQPKINNHMNRKQLS

SEQ ID NO: 902784 - protein, 123 aa, Homo sapiens
MSAKEKSKFEDMAKSDKARYDREMKNYVPPKGDKKGKKKDPNAPKRPPKFKITQIALGFFLQFIKLCCFLSDLPSSCFALNIAQRSKVNTLAYPLGILQRNWVKCGLSSQPKINNHMNRKQLS

SEQ ID NO: 902785 - protein, 168 aa, Homo sapiens; identical to SEQ ID NO: 902773

SEQ ID NO: 902786 - protein, 164 aa, Homo sapiens
MGKGDPNKPRGKMSSYAFFVQTCREEHKKKHPDSSVNFAEFSKKCSERWKTMSAKEKSKFEDMAKSDKARYDREMKNYVPPKGDKKGKKKDPNAPKRPPSAFFLFCSEHRPKIKSEHPGLSIGDTAKKLGEMWSEQSAKDKQPYEQKAAKLKEKYEQAVDSRDP

SEQ ID NO: 902787 - protein, 143 aa, Homo sapiens
MGKGDPNKPRGKMSSYAFFVQTCREEHKKKHPDSSVNFAEFSKKCSERWKTMSAKEKSKFEDMAKSDKARYDREMKNYVPPKGDKKGKKKDPNAPKRPPSAFFLFCSEHRPKIKSEHPGLSIGDTAKKLGEMWSEQSAKDKQP

SEQ ID NO: 902788 - protein, 168 aa, Homo sapiens; identical to SEQ ID NO: 902773

SEQ ID NO: 902789 - protein, 168 aa, Homo sapiens; identical to SEQ ID NO: 902773

SEQ ID NO: 902790 - protein, 168 aa, Homo sapiens; identical to SEQ ID NO: 902773

SEQ ID NO: 902791 - protein, 168 aa, Homo sapiens; identical to SEQ ID NO: 902773

SEQ ID NO: 902792 - protein, 156 aa, Homo sapiens
MSSYAFFVQTCREEHKKKHPDSSVNFAEFSKKCSERWKTMSAKEKSKFEDMAKSDKARYDREMKNYVPPKGDKKGKKKDPNAPKRPPSAFFLFCSEHRPKIKSEHPGLSIGDTAKKLGEMWSEQSAKDKQPYEQKAAKLKEKYEQGYCCISCQGQK

SEQ ID NO: 902793 - protein, 117 aa, Homo sapiens; identical to SEQ ID NO: 902780

SEQ ID NO: 902794 - protein, 168 aa, Homo sapiens; identical to SEQ ID NO: 902773

SEQ ID NO: 902795 - protein, 173 aa, Homo sapiens
MGKGDPNKPRGKMSSYAFFVQTCREEHKKKHPDSSVNFAEFSKKCSERWKTMSAKEKSKFEDMAKSDKARYDREMKNYVPPKGDKKGKKKDPNAPKRPPSAFFLFCSEHRPKIKSEHPGLSIGDTAKKLGEMWSEQSAKDKQPYEQKAAKLKEKYEQGPWQANRLKEEERTRR

SEQ ID NO: 902796 - protein, 168 aa, Homo sapiens; identical to SEQ ID NO: 902773

SEQ ID NO: 902797 - protein, 173 aa, Homo sapiens; identical to SEQ ID NO: 902781

SEQ ID NO: 902798 - protein, 181 aa, Homo sapiens
MGKGDPNKPRGKMSSYAFFVQTCREEHKKKHPDSSVNFAEFSKKCSERWKTMSAKEKSKFEDMAKSDKARYEKKKKKKNRRTQCVGARPGPPEKRAFEKTMGGGAEGTRKANSKQGAKRVYPSEKPGTIHKGRGLSPDRKKTREGNREGSGERARGEPEGHKRENAKQGSPSGTQETNVTR

SEQ ID NO: 902799 - protein, 69 aa, Homo sapiens
ERGIKGAGGRLVPVLQTPPATRRGKPCTISHGQPHRVLRHCRRRRALGPRHPLSCLQTRSQRQQKIFVL

SEQ ID NO: 902800 - protein, 77 aa, Homo sapiens
EKRERERKQEYEPDAEELRKKADKRAEPLEPRLLRAVCRQGPKEQQNFRALSTGEKGFGYKGSCFHRIIPGLYVSGW

SEQ ID NO: 902801 - protein, 69 aa, Homo sapiens; identical to SEQ ID NO: 902799

SEQ ID NO: 902802 - protein, 92 aa, Homo sapiens
GGKLTAKERGWVVATRRGKPCTISHGQPHRVLRHCRRRRALGPRHPLSCLQTRSQRQQAFTELFQGFMCQGGDFTRHNGTGGKSIYGEKFER

SEQ ID NO: 902803 - protein, 123 aa, Homo sapiens
MALVASPSMGRNLNDENFILKHTGSWHLCPWANAWTQHKWFPVFHLHCQALSDWISLLSPRLECSGAISAHCNLLPGSSNSSASASQVAGTTGMHHHSQLNCVLLVERDLPCCPGWSRTPGLK

SEQ ID NO: 902804 - protein, 123 aa, Homo sapiens; identical to SEQ ID NO: 902803

SEQ ID NO: 902805 - protein, 103 aa, Homo sapiens
MALVASPSMGRNLNDENFILKHTGSWHLCPWANAWTQHKWFPVFHLHCQALSDWISLLSPRLECSGAISAHCNLLPGSSNSSASASQVAGTTGWMASMWCLAK

SEQ ID NO: 902806 - protein, 69 aa, Homo sapiens
LLSLLSPSLSFALPLLTCSAWQALDGKHVVFGKVKEGMNIRGRPWSACGSRNWQDQQEDHHVLTVDNSN

SEQ ID NO: 902807 - protein, 84 aa, Homo sapiens
MALVASPSMGTEDEEEDDEDEDDDDDDRSRRRPHDARMTEGRRHEAGTHEETDNRTHPHTRPPPRHWHPTNALTTATTKWKAQN

SEQ ID NO: 902808 - protein, 69 aa, Homo sapiens; identical to SEQ ID NO: 902799

SEQ ID NO: 902809 - protein, 103 aa, Homo sapiens; identical to SEQ ID NO: 902805

SEQ ID NO: 902810 - protein, 123 aa, Homo sapiens; identical to SEQ ID NO: 902803

SEQ ID NO: 902811 - protein, 194 aa, Homo sapiens [sequence omitted]

SEQ ID NO: 902812 - protein, 194 aa, Homo sapiens [sequence omitted]

SEQ ID NO: 902813 - protein, 194 aa, Homo sapiens [sequence omitted]

SEQ ID NO: 902814 - protein, 214 aa, Homo sapiens
MVGGGGRRRTACRVTRQHGAQHTAVPRGKHPRNKKMRPGGGFPPNNKKNAAGGEQPEGLLWETTNRRGVDRRNRRLAFKTGGDPHRERRHLTMTPTRTGGEKMSKTQKKRQTSNQGSEVKVEALFIKTRSEYEKIRKQQKTKEDITNSSERYTDQIKIRNAKCEKNTHYGRSIKNVDSQRENNTTNKKKTTKTINKEYIRREAEKKRKKQHRIL

SEQ ID NO: 902815 - protein, 194 aa, Homo sapiens [sequence omitted]

SEQ ID NO: 902816 - protein, 66 aa, Homo sapiens
GSLTVRSLYDGLSKIKWLGRCAVRCMANMKSARMNMVFISQGEFPQEIPGSPADVDPLTHYFIPVI

SEQ ID NO: 902817 - protein, 106 aa, Homo sapiens [sequence omitted]

SEQ ID NO: 902818 - protein, 194 aa, Homo sapiens [sequence omitted]

SEQ ID NO: 902819 - protein, 194 aa, Homo sapiens [sequence omitted]

SEQ ID NO: 902820 - protein, 194 aa, Homo sapiens [sequence omitted]

SEQ ID NO: 902821 - protein, 372 aa, Homo sapiens
ETSTGFHIPLPKPHGSDYRYCSFHHNTHLCCRNEARQQISISRMWGLKVLLLPVVSFALYPEEILDTHWELWKKTHRKQYNNKVDEISRRLIWEKNLKYISIHNLEASLGVHTYELAMNHLGDMTSEEVVQKMTGLKVPLSHSRSNDTLYIPEWEGRAPDSVDYRKKGYVTPVKNQGQCGSCWAFSSVGALEGQLKKKTGKLLNLSPQNLVDCVSENDGCGGGYMTNAFQYVQKNRGIDSEDAYPYVGQEESCMYNPTGKAAKCRGYREIPEGNEKALKRAVARVGPVSVAIDASLTSFQFYSKGVYYDESCNSDNLNHAVLAVGYGIQKGNKHWIIKNSWGENWGNKGYILMARNKNNACGIANLASFPKM

SEQ ID NO: 902822 - protein, 329 aa, Homo sapiens
MWGLKVLLLPVVSFALYPEEILDTHWELWKKTHRKQYNNKVDEISRRLIWEKNLKYISIHNLEASLGVHTYELAMNHLGDMTSEEVVQKMTGLKVPLSHSRSNDTLYIPEWEGRAPDSVDYRKKGYVTPVKNQGQCGSCWAFSSVGALEGQLKKKTGKLLNLSPQNLVDCVSENDGCGGGYMTNAFQYVQKNRGIDSEDAYPYVGQEESCMYNPTGKAAKCRGYREIPEGNEKALKRAVARVGPVSVAIDASLTSFQFYSKGVYYDESCNSDNLNHAVLAVGYGIQKGNKHWIIKNSWGENWGNKGYILMARNKNNACGIANLASFPKM

SEQ ID NO: 902823 - protein, 329 aa, Homo sapiens; identical to SEQ ID NO: 902822

SEQ ID NO: 902824 - protein, 341 aa, Homo sapiens
MEEFSLTTFFCRMWGLKVLLLPVVSFALYPEEILDTHWELWKKTHRKQYNNKVDEISRRLIWEKNLKYISIHNLEASLGVHTYELAMNHLGDMTSEEVVQKMTGLKVPLSHSRSNDTLYIPEWEGRAPDSVDYRKKGYVTPVKNQGQCGSCWAFSSVGALEGQLKKKTGKLLNLSPQNLVDCVSENDGCGGGYMTNAFQYVQKNRGIDSEDAYPYVGQEESCMYNPTGKAAKCRGYREIPEGNEKALKRAVARVGPVSVAIDASLTSFQFYSKGVYYDESCNSDNLNHAVLAVGYGIQKGNKHWIIKNSWGENWGNKGYILMARNKNNACGIANLASFPKM

SEQ ID NO: 902825 - protein, 311 aa, Homo sapiens
MWGLKVLLLPVVSFALYPEEILDTHWELWKKTHRKQYNNKVDEISRRLIWEKYELAMNHLGDMTSEEVVQKMTGLKVPLSHSRSNDTLYIPEWEGRAPDSVDYRKKGYVTPVKNQGQCGSCWAFSSVGALEGQLKKKTGKLLNLSPQNLVDCVSENDGCGGGYMTNAFQYVQKNRGIDSEDAYPYVGQEESCMYNPTGKAAKCRGYREIPEGNEKALKRAVARVGPVSVAIDASLTSFQFYSKGVYYDESCNSDNLNHAVLAVGYGIQKGNKHWIIKNSWGENWGNKGYILMARNKNNACGIANLASFPKM

SEQ ID NO: 902826 - protein, 300 aa, Homo sapiens
MEEFSLTTFFCRMWGLKVLLLPVVSFALYPEEILDTHWELWKKTHRKQYNNKTSEEVVQKMTGLKVPLSHSRSNDTLYIPEWEGRAPDSVDYRKKGYVTPVKNQGQCGSCWAFSSVGALEGQLKKKTGKLLNLSPQNLVDCVSENDGCGGGYMTNAFQYVQKNRGIDSEDAYPYVGQEESCMYNPTGKAAKCRGYREIPEGNEKALKRAVARVGPVSVAIDASLTSFQFYSKGVYYDESCNSDNLNHAVLAVGYGIQKGNKHWIIKNSWGENWGNKGYILMARNKNNACGIANLASFPKM

SEQ ID NO: 902827 - protein, 329 aa, Homo sapiens; identical to SEQ ID NO: 902822

SEQ ID NO: 902828 - protein, 329 aa, Homo sapiens; identical to SEQ ID NO: 902822

SEQ ID NO: 902829 - protein, 346 aa, Homo sapiens
VVEDPVRRSVEQISISRMWGLKVLLLPVVSFALYPEEILDTHWELWKKTHRKQYNNKVDEISRRLIWEKNLKYISIHNLEASLGVHTYELAMNHLGDMTSEEVVQKMTGLKVPLSHSRSNDTLYIPEWEGRAPDSVDYRKKGYVTPVKNQGQCGSCWAFSSVGALEGQLKKKTGKLLNLSPQNLVDCVSENDGCGGGYMTNAFQYVQKNRGIDSEDAYPYVGQEESCMYNPTGKAAKCRGYREIPEGNEKALKRAVARVGPVSVAIDASLTSFQFYSKGVYYDESCNSDNLNHAVLAVGYGIQKGNKHWIIKNSWGENWGNKGYILMARNKNNACGIANLASFPKM

SEQ ID NO: 902830 - protein, 329 aa, Homo sapiens; identical to SEQ ID NO: 902822

SEQ ID NO: 902831 - protein, 391 aa, Homo sapiens
EEEMHKENEEIYNVSENRKHCPIFPCPLLTRSGKVPEFRHEREERLEEMIRRQNLDGNLSFVMWGLKVLLLPVVSFALYPEEILDTHWELWKKTHRKQYNNKVDEISRRLIWEKNLKYISIHNLEASLGVHTYELAMNHLGDMTSEEVVQKMTGLKVPLSHSRSNDTLYIPEWEGRAPDSVDYRKKGYVTPVKNQGQCGSCWAFSSVGALEGQLKKKTGKLLNLSPQNLVDCVSENDGCGGGYMTNAFQYVQKNRGIDSEDAYPYVGQEESCMYNPTGKAAKCRGYREIPEGNEKALKRAVARVGPVSVAIDASLTSFQFYSKGVYYDESCNSDNLNHAVLAVGYGIQKGNKHWIIKNSWGENWGNKGYILMARNKNNACGIANLASFPKM

SEQ ID NO: 902832 - protein, 148 aa, Homo sapiens
MTNAFQYVQKNRGIDSEDAYPYVGQEESCMYNPTGKAAKCRGYREIPEGNEKALKRAVARVGPVSVAIDASLTSFQFYSKGVYYDESCNSDNLNHAVLAVGYGIQKGNKHWIIKNSWGENWGNKGYILMARNKNNACGIANLASFPKM

SEQ ID NO: 902833 - protein, 307 aa, Homo sapiens
RVPGCSASSATGRNITSKVDEISRRLIWEKNLKYISIHNLEASLGVHTYELAMNHLGDMTSEEVVQKMTGLKVPLSHSRSNDTLYIPEWEGRAPDSVDYRKKGYVTPVKNQGQCGSCWAFSSVGALEGQLKKKTGKLLNLSPQNLVDCVSENDGCGGGYMTNAFQYVQKNRGIDSEDAYPYVGQEESCMYNPTGKAAKCRGYREIPEGNEKALKRAVARVGPVSVAIDASLTSFQFYSKGVYYDESCNSDNLNHAVLAVGYGIQKGNKHWIIKNSWGENWGNKGYILMARNKNNACGIANLASFPKM

SEQ ID NO: 902834 - protein, 68 aa, Homo sapiens
PHLLINHDNLSLCADEQLVISESFIGTTHCYNCTIAGELIRRYLGYILMARNKNNACGIANLASFPKM

SEQ ID NO: 902835 - protein, 242 aa, Homo sapiens
MWGLKVLLLPVVSFALYPEEILDTHWELWKKTHRKQYNNKVDEISRRLIWEKNLKYISIHNLEASLGVHTYELAMNHLGDMTSEEVVQKMTGLKVPLSHSRSNDTLYIPEWEGRAPDSVDYRKKGYVTPVKNQGQCGSCWAFSSVGALEGQLKKKTGKLLNLSPQNLVDCVSENDGCGGGYMTNAFQYVQKNRGIDSEDAYPYVGQEESCMYNPTGKAAKCRGYRDRSHSGHCIFRAFSFPS

SEQ ID NO: 902836 - protein, 636 aa, Homo sapiens
AGLHASNARSDAQAPPPPARLPEVAGPELWGGLRAVSGGVGESDQGERIRQGRSFGAGGWAAHLRARSGVDRELVTMAGPQPLALQLEQLLNPRPSEADPEADPEEATAARVIDRFDEGEDGEGDFLVVGSIRKLASASLLDTDKRYCGKTTSRKAWNEDHWEQTLPGSSDEEISDEEGSGDEDSEGLGLEEYDEDDLGAAEEQECGDHRESKKSRSHSAKTPGFSVQSISDFEKFTKGMDDLGSSEEEEDEESGMEEGDDAEDSQGESEEDRAGDRNSEDDGVVMTFSSVKVSEEVEKGRAVKNQIALWDQLLEGRIKLQKALLTTNQLPQPDVFPLFKDKGGPEFSSALKNSHKALKALLRSLVGLQEELLFQYPDTRYLVDGTKPNAGSEEISSEDDELVEEKKQQRRRVPAKRKLEMEDYPSFMAKRFADFTVYRNRTLQKWHDKTKLASGKLGKGFGAFERSILTQIDHILMDKERLLRRTQTKRSVYRVLGKPEPAAQPVPESLPGEPEILPQAPANAHLKDLDEEIFDDDDFYHQLLRELIERKTSSLDPNDQVAMGRQWLAIQKLRSKIHKKVDRKASKGRKLRFHVLSKLLSFMAPIDHTTMNDDARTELYRSLFGQLHPPDEGHGD

SEQ ID NO: 902837 - protein, 636 aa, Homo sapiens; identical to SEQ ID NO: 902836

SEQ ID NO: 902838 - protein, 636 aa, Homo sapiens; identical to SEQ ID NO: 902836

SEQ ID NO: 902839 - protein, 636 aa, Homo sapiens; identical to SEQ ID NO: 902836

SEQ ID NO: 902840 - protein, 636 aa, Homo sapiens; identical to SEQ ID NO: 902836

SEQ ID NO: 902841 - protein, 636 aa, Homo sapiens; identical to SEQ ID NO: 902836

SEQ ID NO: 902842 - protein, 622 aa, Homo sapiens
AGLHASNARSDAQAPPPPARLPEVAGPELWGGLRAVSGGVGESDQGERIRQGRSFGAGGWAAHLRARSGVDRELVTMAGPQPLALQLEQLLNPRPSEADPEADPEEATAARVIDRFDEGEDGEGDFLVVGSIRKLASASLLDTDKRYCGKTTSRKAWNEDHWEQTLPGSSDEEISDEEGSGDEDSEGLGLEEYDEDDLGAAEEQECGDHRESKKSRSHSAKTPGFSVQSISDFEKFTKGMDDLGSSEEEEDEESGMEEGAGDRNSEDDGVVMTFSSVKVSEEVEKGRAVKNQIALWDQLLEGRIKLQKALLTTNQLPQPDVFPLFKDKGGPEFSSALKNSHKALKALLRSLVGLQEELLFQYPDTRYLVDGTKPNAGSEEISSEDDELVEEKKQQRRRVPAKRKLEMEDYPSFMAKRFADFTVYRNRTLQKWHDKTKLASGKLGKGFGAFERSILTQIDHILMDKERLLRRTQTKRSVYRVLGKPEPAAQPVPESLPGEPEILPQAPANAHLKDLDEEIFDDDDFYHQLLRELIERKTSSLDPNDQVAMGRQWLAIQKLRSKIHKKVDRKASKGRKLRFHVLSKLLSFMAPIDHTTMNDDARTELYRSLFGQLHPPDEGHGD

SEQ ID NO: 902843 - protein, 216 aa, Homo sapiens [sequence omitted]

SEQ ID NO: 902844 - protein, 630 aa, Homo sapiens
AGLHASNARSDAQAPPPPARLPEVAGPELWGGLRAVSGGVGESDQGERIRQGRSFGAGGWAAHLRARSGVDRELVTMAGPQPLALQLEQLLNPRPSEADPEADPEEATAARVIDRFDEGEDGEGDFLVVGSIRKLASASLLDTDKRYCGKTTSRKAWNEDHWEQTLPGSSDEEISDEEGSGDEDSEGLGLEEYDEDDLGAAEEQECGDHRESKKSRSHSAKTPGFSVQSISDFEKFTKGMDDLGSSEEEEDEESGMEEGDDAEDSQGESEEDRAGDRNSEDDGVVMTFSSVKVSEEVEKGRAVKNQIALWDQLLEGRIKLQKALLTTNQLPQPDVFPLFKDKGGPEFSSALKNSHKALKALLRSLVGLQEELLFQYPDTRYLVDGTKPNAGSEEISSEDDELVEEKKQQRRRVPAKRKLEMEDYPSFMAKRFADFTVYRNRTLQKWHDKTKLASGKLGKGFGAFERSILTQIDHILMDKERLLRRTQTKRSVYRVLGKPEPAAQPVPESLPGEPEILPQAPANAHLKDLDEEIFDDDDFYHQLLRELIERKTSSLDPNDQVAMGRQWLAIQKLQVDRKASKGRKLRFHVLSKLLSFMAPIDHTTMNDDARTELYRSLFGQLHPPDEGHGD

SEQ ID NO: 902845 - protein, 267 aa, Homo sapiens
RDPDVAYPDTRYLVDGTKPNAGSEEISSEDDELVEEKKQQRRRVPAKRKLEMEDYPSFMAKRFADFTVYRNRTLQKWHDKTKLASGKLGKGFGAFERSILTQIDHILMDKERLLRRTQTKRSVYRVLGKPEPAAQPVPESLPGEPEILPQAPANAHLKDLDEEIFDDDDFYHQLLRELIERKTSSLDPNDQVAMGRQWLAIQKLRSKIHKKVDRKASKGRKLRFHVLSKLLSFMAPIDHTTMNDDARTELYRSLFGQLHPPDEGHGD

SEQ ID NO: 902846 - protein, 257 aa, Homo sapiens
CAATTLLIFHRYTEEISSEDDELVEEKKQQRRRVPAKRKLEMEDYPSFMAKRFADFTVYRNRTLQKWHDKTKLASGKLGKGFGAFERSILTQIDHILMDKERLLRRTQTKRSVYRVLGKPEPAAQPVPESLPGEPEILPQAPANAHLKDLDEEIFDDDDFYHQLLRELIERKTSSLDPNDQVAMGRQWLAIQKLRSKIHKKVDRKASKGRKLRFHVLSKLLSFMAPIDHTTMNDDARTELYRSLFGQLHPPDEGHGD

SEQ ID NO: 902847 - protein, 638 aa, Homo sapiens
AGLHASNARSDAQAPPPPARLPEVAGPELWGGLRAVSGGVGESDQGERIRQGRSFGAGGWAAHLRARSGVDRELVTMAGPQPLALQLEQLLNPRPSEADPEADPEEATAARVIDRFDEGEDGEGDFLVVGSIRKLASASLLDTDKRYCGKTTSRKAWNEDHWEQTLPGSSDEEISDEEGSGDEDSEGLGLEEYDEDDLGAAEEQECGDHRESKKSRSHSAKTPGFSVQSISDFEKFTKGMDDLGSSEEEEDEESGMEEGDDAEDSQGESEEDRAGDRNSEDDGVVMTFSSVKVSEEVEKGRAVKNQIALWDQLLEGRIKLQKALLTTNQLPQPDVFPLFKDKGGPEFSSALKNSHKALKALLRSLVGLQEELLFQYPDTRYLVDGTKPNAGSEEISSEDDELVEEKKQQRRRVPAKRKLEMEDYPSFMAKRFADFTVYRNRTLQKWHDKTKLASGKLGKGFGAFERSILTQIDHILMDKERLLRRTQTKRSVYRVLGKPEPAAQPVPESLPGEPEILPQAPANAHLKDLDEEIFDDDDFYHQLLRELIERKTSSLDPNDQVAMGRQWLAIQKLRSKIHKKVDRKASKGRKLRFHVLSKLLSFMAPIDHTTMNDDARPSGRLGWCGCWSRWRKPVTLWG

SEQ ID NO: 902848 - protein, 569 aa, Homo sapiens
AGLHASNARSDAQAPPPPARLPEVAGPELWGGLRAVSGGVGESDQGERIRQGRSFGAGGWAAHLRARSGVDRELVTMAGPQPLALQLEQLLNPRPSEADPEADPEEATAARVIDRFDEGEDGEGDFLVVGSIRKLASASLLDTDKRYCGKTTSRKAWNEDHWEQTLPGSSDEEISDEEGSGDEDSEGLGLEEYDEDDLGAAEEQECGDHRESKKSRSHSAKTPGFSVQSISDFEKFTKGMDDLGSSEEEEDEESGMEEGDDAEDSQGESEEDRAGDRNSEDDGVVMTFSSVKVSEEVEKGRAVKNQIALWDQLLEGRIKLQKALLTTNQLPQPDVFPLFKDKGGPEFSSALKNSHKALKALLRSLVGLQEELLFQYPDTRYLVDGTKPNAGSEEISSEDDELVEEKKQQRRRVPAKRKLEMEDYPSFMAKRFADFTVYRNRTLQKWHDKTKLASGKLGKGFGAFERSILTQIDHILMDKERLLRRTQTKRSVYRVLGKPEPAAQPVPESLPGEPEILPQAPANAHLKDLDEEIFDDDDFYHQFLRELIEGKTVLGSKIRGHGTPGCIQK

SEQ ID NO: 902849 - protein, 117 aa, Homo sapiens
MFPLLANGEGRASCTSLLFSPLQLLRELIERKTSSLDPNDQVAMGRQWLAIQKLRSKIHKKVDRKASKGRKLRFHVLSKLLSFMAPIDHTTMNDDARTELYRSLFGQLHPPDEGHGD

SEQ ID NO: 902850 - protein, 71 aa, Homo sapiens
  misc_feature (18)..(18): Xaa can be any naturally occurring amino acid
KPQSRNGSVLSSYELAPXTYYMNDDAGQNCTALFLASSTLPTKATGIDIAHLRHPVGALAGVAAGPDGGNQ

SEQ ID NO: 902851 - protein, 636 aa, Homo sapiens; identical to SEQ ID NO: 902836

SEQ ID NO: 902852 - protein, 636 aa, Homo sapiens; identical to SEQ ID NO: 902836

SEQ ID NO: 902853 - protein, 520 aa, Homo sapiens
RLEDPLRYYYLVVGSIRKLASASLLDTDKRYCGKTTSRKAWNEDHWEQTLPGSSDEEISDEEGSGDEDSEGLGLEEYDEDDLGAAEEQECGDHRESKKSRSHSAKTPGFSVQSISDFEKFTKGMDDLGSSEEEEDEESGMEEGDDAEDSQGESEEDRAGDRNSEDDGVVMTFSSVKVSEEVEKGRAVKNQIALWDQLLEGRIKLQKALLTTNQLPQPDVFPLFKDKGGPEFSSALKNSHKALKALLRSLVGLQEELLFQYPDTRYLVDGTKPNAGSEEISSEDDELVEEKKQQRRRVPAKRKLEMEDYPSFMAKRFADFTVYRNRTLQKWHDKTKLASGKLGKGFGAFERSILTQIDHILMDKERLLRRTQTKRSVYRVLGKPEPAAQPVPESLPGEPEILPQAPANAHLKDLDEEIFDDDDFYHQLLRELIERKTSSLDPNDQVAMGRQWLAIQKLRSKIHKKVDRKASKGRKLRFHVLSKLLSFMAPIDHTTMNDDARTELYRSLFGQLHPPDEGHGD

SEQ ID NO: 902854 - protein, 409 aa, Homo sapiens
VLRCSRGSQFDGDSRLGSSEEEEDEESGMEEGDDAEDSQGESEEDRAGDRNSEDDGVVMTFSSVKVSEEVEKGRAVKNQIALWDQLLEGRIKLQKALLTTNQLPQPDVFPLFKDKGGPEFSSALKNSHKALKALLRSLVGLQEELLFQYPDTRYLVDGTKPNAGSEEISSEDDELVEEKKQQRRRVPAKRKLEMEDYPSFMAKRFADFTVYRNRTLQKWHDKTKLASGKLGKGFGAFERSILTQIDHILMDKERLLRRTQTKRSVYRVLGKPEPAAQPVPESLPGEPEILPQAPANAHLKDLDEEIFDDDDFYHQLLRELIERKTSSLDPNDQVAMGRQWLAIQKLRSKIHKKVDRKASKGRKLRFHVLSKLLSFMAPIDHTTMNDDARTELYRSLFGQLHPPDEGHGD

SEQ ID NO: 902855 - protein, 322 aa, Homo sapiens
LVVNRAFCSLILPSKSWSHSAIWFFTDKGGPEFSSALKNSHKALKALLRSLVGLQEELLFQYPDTRYLVDGTKPNAGSEEISSEDDELVEEKKQQRRRVPAKRKLEMEDYPSFMAKRFADFTVYRNRTLQKWHDKTKLASGKLGKGFGAFERSILTQIDHILMDKERLLRRTQTKRSVYRVLGKPEPAAQPVPESLPGEPEILPQAPANAHLKDLDEEIFDDDDFYHQLLRELIERKTSSLDPNDQVAMGRQWLAIQKLRSKIHKKVDRKASKGRKLRFHVLSKLLSFMAPIDHTTMNDDARTELYRSLFGQLHPPDEGHGD

SEQ ID NO: 902856 - protein, 285 aa, Homo sapiens
ILLPALALEDPRVGQCLQEELLFQYPDTRYLVDGTKPNAGSEEISSEDDELVEEKKQQRRRVPAKRKLEMEDYPSFMAKRFADFTVYRNRTLQKWHDKTKLASGKLGKGFGAFERSILTQIDHILMDKERLLRRTQTKRSVYRVLGKPEPAAQPVPESLPGEPEILPQAPANAHLKDLDEEIFDDDDFYHQLLRELIERKTSSLDPNDQVAMGRQWLAIQKLRSKIHKKVDRKASKGRKLRFHVLSKLLSFMAPIDHTTMNDDARTELYRSLFGQLHPPDEGHGD

SEQ ID NO: 902857 - protein, 612 aa, Homo sapiens
AGLHASNARSDAQAPPPPARLPEVAGPELWGGLRAVSGGVGESDQGERIRQGRSFGAGGWAAHLRARSGVDRELVTMAGPQPLALQLEQLLNPRPSEADPEADPEEATAARVIDRFDEGEDGEGDFLVVGSIRKLASASLLDTDKRYCGKTTSRKAWNEDHWEQTLPGSSDEEISDEEGSGDEDSEGLGLEEYDEDDLGAAEEQECGDHRESKKSRSHSAKTPGFSVQSISDFEKFTKGMDDLGSSEEEEDEESGMEEGDDAEDSQGESEEDRAGDRNSEDDGVVMTFSSVKVSEEVEKGRAVKNQIALWDQLLEGRIKLQKALLTTNQLPQPDVFPLFKDKGGPEFSSALKNSHKALKALLRSLVGLQEELLFQYPDTRYLVDGTKPNAGSEEISSEDDELVEEKKQQRRRVPAKRKLEMEDYPSFMAKRFADFTVYRNRTLQKWHDKTKLASGKLGKGFGAFERSILTQIDHILMDKERLLRRTQTKRSVYRVLGKPEPAAQPVPESLPGEPEILPQAPANAHLKDLDEEIFDDDDFYHQLLRELIERKTSSLDPNDQVAMGRQWLAIQKLRSKIHKKVDRKASKGRKLRTELYRSLFGQLHPPDEGHGD

SEQ ID NO: 902858 - protein, 612 aa, Homo sapiens; identical to SEQ ID NO: 902857

SEQ ID NO: 902859 - protein, 514 aa, Homo sapiens
AGLHASNARSDAQAPPPPARLPEVAGPELWGGLRAVSGGVGESDQGERIRQGRSFGAGGWAAHLRARSGVDRELVTMAGPQPLALQLEQLLNPRPSEADPEADPEEATAARVIDRFDEGEDGEGDFLVVGSIRKLASASLLDTDKRYCGKTTSRKAWNEDHWEQTLPGSSDEEISDEEGSGDEDSEGLGLEEYDEDDLGAAEEQECGDHRESKKSRSHSAKTPGFSVQSISDFEKFTKGMDDLGSSEEEEDEESGMEEGDDAEDSQGESEEDRAGDRNSEDDGVVMTFSSVKVSEEVEKGRAVKNQIALWDQLLEGRIKLQKALLTTNQLPQPDVFPLFKDKGGPEFSSALKNSHKALKALLRSLVGLQEELLFQYPDTRYLVDGTKPNAGSEEISSEDDELVEEKKQQRRRVPAKRKLEMEDYPSFMAKRFADFTVYRNRTLQKWHDKTKLASGKLGKGFGAFERSILTQIDHILMDKERLLRRTQTKRSVYRVLGSFSAPVMVIEDLVKKFL

SEQ ID NO: 902860 - protein, 119 aa, Homo sapiens
AASGSQAPFLRDTCCAYLRISPRPFLRPPLPTQKPMNVGLSETQNGGMSQEAVGNIKVTKSPQKSTVLTNGEAAMQSSNSESKKKKKKKRKMVNDAEPDTNKPHCYYGESEVARYRDTS

SEQ ID NO: 902861 - protein, 665 aa, Homo sapiens [sequence omitted]

SEQ ID NO: 902862 - protein, 665 aa, Homo sapiens [sequence omitted]

SEQ ID NO: 902863 - protein, 485 aa, Homo sapiens
MKLLRKKIEKRNLKLRQRNLKFQGASNLTLSETQNGDVSEETMGSRKVKKSKQKPMNVGLSETQNGGMSQEAVGNIKVTKSPQKSTVLTNGEAAMQSSNSESKKKKKKKRKMVNDAEPDTKKAKTENKGKSEEESAETTKETENNVEKPDNDEDESEVPSLPLGLTGAFEDTSFASLCNLVNENTLKAIKEMGFTNMTEIQHKSIRPLLEGRDLLAAAKTGSGKTLAFLIPAVELIVKLRFMPRNGTGVLILSPTRELAMQTFGVLKELMTHHVHTYGLIMGGSNRSAEAQKLGNGINIIVATPGRLLDHMQNTPGFMYKNLQCLVIDEADRILDVGFEEELKQIIKLLPTRRQTMLFSATQTRKVEDLARISLKKEPLYVGVDDDKANATVDGLEQGYVVCPSEKRFLLLFTFLKKNRKKKLMVFFSSCMSVKYHYELLNYIDLPVLAIHVSDDDELIENRVCLLNPIDCRIGGIALSWKHCSE

SEQ ID NO: 902864 - protein, 665 aa, Homo sapiens [sequence omitted]

SEQ ID NO: 902865 - protein, 692 aa, Homo sapiens
  misc_feature (6)..(7): Xaa can be any naturally occurring amino acid
YVPPRXXRGLVATRTRVDLVFRMSHLPMKLLRKKIEKRNLKLRQRNLKFQGASNLTLSETQNGDVSEETMGSRKVKKSKQKPMNVGLSETQNGGMSQEAVGNIKVTKSPQKSTVLTNGEAAMQSSNSESKKKKKKKRKMVNDAEPDTKKAKTENKGKSEEESAETTKETENNVEKPDNDEDESEVPSLPLGLTGAFEDTSFASLCNLVNENTLKAIKEMGFTNMTEIQHKSIRPLLEGRDLLAAAKTGSGKTLAFLIPAVELIVKLRFMPRNGTGVLILSPTRELAMQTFGVLKELMTHHVHTYGLIMGGSNRSAEAQKLGNGINIIVATPGRLLDHMQNTPGFMYKNLQCLVIDEADRILDVGFEEELKQIIKLLPTRRQTMLFSATQTRKVEDLARISLKKEPLYVGVDDDKANATVDGLEQGYVVCPSEKRFLLLFTFLKKNRKKKLMVFFSSCMSVKYHYELLNYIDLPVLAIHGKQKQNKRTTTFFQFCNADSGTLLCTDVAARGLDIPEVDWIVQYDPPDDPKEYIHRVGRTARGLNGRGHALLILRPEELGFLRYLKQSKVPLSEFDFSWSKISDIQSQLEKLIEKNYFLHKSAQEAYKSYIRAYDSHSLKQIFNVNNLNLPQVALSFGFKVPPFVDLNVNSNEGKQKKRGGGGGFGYQKTKKVEKSKIFKHISKKSSDSRQFSH

SEQ ID NO: 902866 - protein, 252 aa, Homo sapiens
EKPNFSYIIGKNTWVEHWPEEENAKTKRTRNNAGTSAPSPRAWLSLGAPTDHTPIPPLPYQLVRDVAARGLDIPEVDWIVQYDPPDDPKEYIHRVGRTARGLNGRGHALLILRPEELGFLRYLKQSKVPLSEFDFSWSKISDIQSQLEKLIEKNYFLHKSAQEAYKSYIRAYDSHSLKQIFNVNNLNLPQVALSFGFKVPPFVDLNVNSNEGKQKKRGGGGGFGYQKTKKVEKSKIFKHISKKSSDSRQFSH

SEQ ID NO: 902867 - protein, 658 aa, Homo sapiens
MSHLPMKLLRKKIEKRNLKLRQRNLKFQGASNLTLSETQNGDVSEETMGSRKVKKSKQKPMNVGLSETQNGGMSQEAVGNIKVTKSPQKSTVLTNGEAAMQSSNSESKKKKKKKRKMVNDAEPDTKKAKTENKGKSEEESAETTKETENNVEKPDNDEDESEVPSLPLGLTGAFEDTSFASLCNLVNENTLKAIKEMGFTNMTEIQHKSIRPLLEGRDLLAAAKTGSGKTLAFLIPAVELIVKLRFMPRNGTGVLILSPTRELAMQTFGVLKELMTHHVHTYGLIMGGSNRSAEAQKLGNGINIIVATPGRLLDHMQNTPGFMYKNLQCLVIDEADRILDVGFEEELKQIIKLLPTRRQTMLFSATQTRKVEDLARISLKKEPLYVGVDDDKANATVDGLEQGYVVCPSEKRFLLLFTFLKKNRKKKLMVFFSSCMSVKYHYELLNYIDLPVLAIHGKQKQNKRTTTFFQFCNADSGTLLCTDVAARGLDIPEVDWIVQYDPPDDPKEYIHRVGRTARGLNGRGHALLILRPEELGFLRYLKQSKVPLSEFDFSWSKISDIQSQLEKLIEKNYFLHKSAQEAYKSYIRAYDSHSLKQIFNVNNLNLPQVALSFGFKVPPFVDLNVNSNEGKQKKRGGGGGFGYQKTKKVEVSVRGYRA

SEQ ID NO: 902868 - protein, 181 aa, Homo sapiens
MSHLPMKLLRKKIEKRNLKLRQRNLKFQGASNLTLSETQNGDVSEETMGSRKVKKSKQKPMNVGLSETQNGGMSQEAVGNIKVTKSPQKSTVLTNGEAAMQSSNSESKKKKNTTKKTLLGGLGPGKVFYPFGLWPRAAPMRAMWNHGVHIGCSRGETRGRELRARRFPPFKKARGETRRFS

SEQ ID NO: 902869 - protein, 665 aa, Homo sapiens [sequence omitted]

SEQ ID NO: 902870 - protein, 665 aa, Homo sapiens [sequence omitted]

SEQ ID NO: 902871 - protein, 665 aa, Homo sapiens [sequence omitted]

SEQ ID NO: 902872 - protein, 651 aa, Homo sapiens
MSHLPMKLLRKKIEKRNLKLRQRNLKFQGASNLTLSETQNGDVSEETMGSRKVKKSKQKPMNVGLSETQNGGMSQEAVGNIKVTKSPQKSTVLTNGEAAMQSSNSESKKKKKKKRKMVNDAEPDTKKAKTENKGKSEEESAETTKETENNVEKPDNDEDESEVPSLPLGLTGAFEDTSFASLCNLVNENTLKAIKEMGFTNMTEIQHKSIRPLLEGRDLLAAAKTGSGKTLAFLIPAVELIVKLRFMPRNGTGVLILSPTRELAMQTFGVLKELMTHHVHTYGLIMGGSNRSAEAQKLGNGINIIVATPGRLLDHMQNTPGFMYKNLQCLVIDEADRILDVGFEEELKQIIKLLPTRRQTMLFSATQTRKVEDLARISLKKEPLYVGVDDDKANATVDGLEQKNRKKKLMVFFSSCMSVKYHYELLNYIDLPVLAIHGKQKQNKRTTTFFQFCNADSGTLLCTDVAARGLDIPEVDWIVQYDPPDDPKEYIHRVGRTARGLNGRGHALLILRPEELGFLRYLKQSKVPLSEFDFSWSKISDIQSQLEKLIEKNYFLHKSAQEAYKSYIRAYDSHSLKQIFNVNNLNLPQVALSFGFKVPPFVDLNVNSNEGKQKKRGGGGGFGYQKTKKVEKSKIFKHISKKSSDSRQFSH

SEQ ID NO: 902873 - protein, 665 aa, Homo sapiens [sequence omitted]

SEQ ID NO: 902874 - protein, 665 aa, Homo sapiens [sequence omitted]

SEQ ID NO: 902875 - protein, 615 aa, Homo sapiens
  misc_feature (606)..(606): Xaa can be any naturally occurring amino acid
MSHLPMKLLRKKIEKRNLKLRQRNLKFQGASNLTLSETQNGDVSEETMGSRKVKKSKQKPMNVGLSETQNGGMSQEAVGNIKVTKSPQKSTVLTNGEAAMQSSNSESKKKKKKKRKMVNDAEPDTKKAKTENKGKSEEESAETTKETENNVEKPDNDEDESEVPSLPLGLTGAFEDTSFASLCNLVNENTLKAIKEMGFTNMTEIQHKSIRPLLEGRDLLAAAKTGSGKTLAFLIPAVELIVKLRFMPRNGTGVLILSPTRELAMQTFGVLKELMTHHVHTYGLIMGGSNRSAEAQKLGNGINIIVATPGRLLDHMQNTPGFMYKNLQCLVIDEADRILDVGFEEELKQIIKLLPTRRQTMLFSATQTRKVEDLARISLKKEPLYVGVDDDKANATVDGLEQGYVVCPSEKRFLLLFTFLKKNRKKKLMVFFSSCMSVKYHYELLNYIDLPVLAIHGKQKQNKRTTTFFQFCNADSGTLLCTDVAARGLDIPEVDWIVQYDPPDDPKEYIHRVGRTARGLNGRGHALLILRPEELGFLRYLKQSKVPLSEFDFSWSKISDIQSQLEKLIEKNYFLHKSAQEAYKSYIRAYDSHSLFSILRSLPSLXLNAKFFYAL

SEQ ID NO: 902876 - protein, 144 aa, Homo sapiens
MSHLPMKLLRKKIEKRNLKLRQRNLKFQGASNLTLSETQNGDVSEETMGSRKVKKSKQKPMNVGLSETQNGGMSQEAVGNIKVTKSPQKSTVLTNGEAAMQSSNSESKKKKKKKRKMVNDAEPDTNKPHCYYGESEVARYRDTS

SEQ ID NO: 902877 - protein, 197 aa, Homo sapiens
MSRLSRSLLWAATCLGVLCVLSADKNTTQHPNVTTLAPISNVTSAPVTSLPLVTTPAPETCEGRNSCVSCFNVSVVNTTCFWIECKDESYCSHNSTVSDCQVGNTTDFCSVSTATPVPTANSTAKPTVQPSPSTTSKTVTTSGTTNNTVTPTSQPVRKSTFDAASFIGGIVLVLGVQAVIFFLYKFCKSKERNYHTL

SEQ ID NO: 902878 - protein, 178 aa, Homo sapiens
MSRLSRSLLWAATCLGVLCVLSADKNTTQHPNVTTLAPISNVTSAPVTSLPLVTTPAPETCEGRNSCVSCFNVSVVNTTCFWIECKDESYCSHNSTVSDCQVGNTTDFCSVSTATPVPTANSTGTTNNTVTPTSQPVRKSTFDAASFIGGIVLVLGVQAVIFFLYKFCKSKERNYHTL

SEQ ID NO: 902879 - protein, 197 aa, Homo sapiens; identical to SEQ ID NO: 902877

SEQ ID NO: 902880 - protein, 197 aa, Homo sapiens; identical to SEQ ID NO: 902877

SEQ ID NO: 902881 - protein, 197 aa, Homo sapiens; identical to SEQ ID NO: 902877

SEQ ID NO: 902882 - protein, 197 aa, Homo sapiens; identical to SEQ ID NO: 902877

SEQ ID NO: 902883 - protein, 197 aa, Homo sapiens; identical to SEQ ID NO: 902877

SEQ ID NO: 902884 - protein, 197 aa, Homo sapiens; identical to SEQ ID NO: 902877

SEQ ID NO: 902885 - protein, 197 aa, Homo sapiens; identical to SEQ ID NO: 902877

SEQ ID NO: 902886 - protein, 197 aa, Homo sapiens; identical to SEQ ID NO: 902877

SEQ ID NO: 902887 - protein, 197 aa, Homo sapiens; identical to SEQ ID NO: 902877

SEQ ID NO: 902888 - protein, 197 aa, Homo sapiens; identical to SEQ ID NO: 902877

SEQ ID NO: 902889 - protein, 197 aa, Homo sapiens; identical to SEQ ID NO: 902877

SEQ ID NO: 902890 - protein, 197 aa, Homo sapiens; identical to SEQ ID NO: 902877

SEQ ID NO: 902891 - protein, 197 aa, Homo sapiens; identical to SEQ ID NO: 902877

SEQ ID NO: 902892 - protein, 197 aa, Homo sapiens; identical to SEQ ID NO: 902877

SEQ ID NO: 902893 - protein, 188 aa, Homo sapiens
MSRLSRSLLWAATCLGVLCVLSADKNTTQHPNVTTLAPISNVTSAPVTSLPLVTTPAPETCEGRNSCVSCFNVSVVNTTCFWIECKDESYCSHNSTVSDCQVGNTTDFCSVSTATPVPTANSTAKPTVQPSPSTTSKTVTTSGTTNNTVTPTSQPVRKSTFDAASFIGGIVLVLVRCHTRNYIPDLKK

SEQ ID NO: 902894 - protein, 197 aa, Homo sapiens; identical to SEQ ID NO: 902877

SEQ ID NO: 902895 - protein, 197 aa, Homo sapiens; identical to SEQ ID NO: 902877

SEQ ID NO: 902896 - protein, 179 aa, Homo sapiens
MSRLSRSLLWAATCLGVLCVLSADKNTTQHPNVTTLAPISNVTSAPVTSLPLVTTPAPETCEGRNSCVSCFNVSVVNTTCFWIECKDESYCSHNSTVSDCQVGNTTDFCSVSTATPVPTANSTAKPTVQPSPSTTSKTVTTSATNARGFPIQQLCATTATVDAAMSSGGIVVVSGTAAR

SEQ ID NO: 902897 - protein, 140 aa, Homo sapiens
MCLGQKIYICLYYVPETVQVPLSKRAKFVGPGGYNLKKLQAETGVTISQVDEETFSVFAPTPSAMHEARDFITEICKDDQEQQLEFGAVYTATITEIRDTGVMVKLYPNMTAVLLHNTQLDQRKIKHPTALGLEVGQEIQ

SEQ ID NO: 902898 - protein, 802 aa, Homo sapiens
SSAINAELPLRPGDRVPGVMAACRYCCSCLRLRPLSDGPFLLPRRDRALTQLQVRALWSSAGSRAVAVDLGNRKLEISSGKLARFADGSAVVQSGDTAVMVTAVSKTKPSPSQFMPLVVDYRQKAAAAGRIPTNYLRREIGTSDKEILTSRIIDRSIRPLFPAGYFYDTQVLCNLLAVDGVNEPDVLAINGASVALSLSDIPWNGPVGAVRIGIIDGEYVVNPTRKEMSSSTLNLVVAGAPKSQIVMLEASAENILQQDFCHAIKVGVKYTQQIIQGIQQLVKETGVTKRTPQKLFTPSPEIVKYTHKLAMERLYAVFTDYEHDKVSRDEAVNKIRLDTEEQLKEKFPEADPYEIIESFNVVAKEVFRSIVLNEYKRCDGRDLTSLRNVSCEVDMFKTLHGSALFQRGQTQVLCTVTFDSLESGIKSDQVITAINGIKDKNFMLHYEFPPYATNEIGKVTGLNRRELGHGALAEKALYPVIPRDFPFTIRVTSEVLESNGSSSMASACGGSLALMDSGVPISSAVAGVAIGLVTKTDPEKGEIEDYRLLTDILGIEDYNGDMDFKIAGTNKGITALQADIKLPGIPIKIVMEAIQQASVAKKEILQIMNKTISKPRASRKENGPVVETVQVPLSKRAKFVGPGGYNLKKLQAETGVTISQVDEETFSVFAPTPSAMHEARDFITEICKDDQEQQLEFGAVYTATITEIRDTGVMVKLYPNMTAVLLHNTQLDQRKIKHPTALGLEVGQEIQVKYFGRDPADGRMRLSRKVLQSPATTVVRTLNDRSSIVMGEPISQSSSNSQ

SEQ ID NO: 902899 - protein, 802 aa, Homo sapiens; identical to SEQ ID NO: 902898

SEQ ID NO: 902900 - protein, 780 aa, Homo sapiens
SSAINAELPLRPGDRVPGVMAACRYCCSCLRLRPLSDGPFLLPRRDRALTQLQVRALWSSAGSRAVAVDLGNRKLEISSGKLARFADGSAVVQSGDTAVMVTAVSKTKPSPSQFMPLVVDYRQKAAAAGRIPTNYLRREIGTSDKEILTSRIIDRSIRPLFPAGYFYDTQVLCNLLAVDGVNEPDVLAINGASVALSLSDIPWNGPVGAVRIGIIDGEYVVNPTRKEMSSSTLNLVVAGAPKSQIVMLEASAENILQQDFCHAIKVGVKYTQQIIQGIQQLVKETGVTKRTPQKLFTPSPEIVKYTHKLAMERLYAVFTDYEHDKVSRDEAVNKIRLDTEEQLKEKFPEADPYEIIESFNVVAKEVFRSIVLNEYKRCDGRDLTSLRNVSCEVDMFKTLHGSALFQRGQTQVLCTVTFDSLESGIKSDQVITAINGIKDKNFMLHYEGALAEKALYPVIPRDFPFTIRVTSEVLESNGSSSMASACGGSLALMDSGVPISSAVAGVAIGLVTKTDPEKGEIEDYRLLTDILGIEDYNGDMDFKIAGTNKGITALQADIKLPGIPIKIVMEAIQQASVAKKEILQIMNKTISKPRASRKENGPVVETVQVPLSKRAKFVGPGGYNLKKLQAETGVTISQVDEETFSVFAPTPSAMHEARDFITEICKDDQEQQLEFGAVYTATITEIRDTGVMVKLYPNMTAVLLHNTQLDQRKIKHPTALGLEVGQEIQVKYFGRDPADGRMRLSRKVLQSPATTVVRTLNDRSSIVMGEPISQSSSNSQ

SEQ ID NO: 902901 - protein, 446 aa, Homo sapiens
RIAIRQCAKEVQKYGLNEYKRCDGRDLTSLRNVSCEVDMFKTLHGSALFQRGQTQVLCTVTFDSLESGIKSDQVITAINGIKDKNFMLHYEFPPYATNEIGKVTGLNRRELGHGALAEKALYPVIPRDFPFTIRVTSEVLESNGSSSMASACGGSLALMDSGVPISSAVAGVAIGLVTKTDPEKGEIEDYRLLTDILGIEDYNGDMDFKIAGTNKGITALQADIKLPGIPIKIVMEAIQQASVAKKEILQIMNKTISKPRASRKENGPVVETVQVPLSKRAKFVGPGGYNLKKLQAETGVTISQVDEETFSVFAPTPSAMHEARDFITEICKDDQEQQLEFGAVYTATITEIRDTGVMVKLYPNMTAVLLHNTQLDQRKIKHPTALGLEVGQEIQVKYFGRDPADGRMRLSRKVLQSPATTVVRTLNDRSSIVMGEPISQSSSNSQ

SEQ ID NO: 902902 - protein, 784 aa, Homo sapiens
SSAINAELPLRPGDRVPGVMAACRYCCSCLRLRPLSDGPFLLPRRDRALTQLQVRALWSSAGSRAVAVDLGNRKLEISSGKLARFADGSAVVQSGDTAVMVTAVSKTKPSPSQFMPLVVDYRQKAAAAGRIPTNYLRREIGTSDKEILTSRIIDRSIRPLFPAGYFYDTQVLCNLLAVDGVNEPDVLAINGASVALSLSDIPWNGPVGAVRIGIIDGEYVVNPTRKEMSSSTLNLVVAGAPKSQIVMLEASAENILQQDFCHAIKVGVKYTQQIIQGIQQLVKETGVTKRTPQKLFTPSPEIVKYTHKLAMERLYAVFTDYEHDKVSRDEAVNKIRLDTEEQLKEKFPEADPYEIIESFNVVAKEVFRSIVLNEYKRCDGRDLTSLRNVSCEVDMFKTLHGSALFQRGQTQVLCTVTFDSLESGIKSDQVITAINGIKDKNFMLHYEFPPYATNEIGKVTGLNRRELGHGALAEKALYPVIPRDFPFTIRVTSEVLESNGSSSMASACGGSLALMDSGVPISSAVAGVAIGLVTKTDPEKGEIEDYRLLTDILGIEDYNGDMDFKIAGTNKGITALQADIKLPGIPIKIVMEAIQQASVAKKEILQIMNKTISKPRASRKENGPVVETVQVPLSKRAKFVGPGGYNLNSVFAPTPSAMHEARDFITEICKDDQEQQLEFGAVYTATITEIRDTGVMVKLYPNMTAVLLHNTQLDQRKIKHPTALGLEVGQEIQVKYFGRDPADGRMRLSRKVLQSPATTVVRTLNDRSSIVMGEPISQSSSNSQ

SEQ ID NO: 902903 - protein, 626 aa, Homo sapiens
SSAINAELPLRPGDRVPGVMAACRYCCSCLRLRPLSDGPFLLPRRDRALTQLQVRALWSSAGSRAVAVDLGNRKLEISSGKLARFADGSAVVQSGDTAVMVTAVSKTKPSPSQFMPLVVDYRQKAAAAGRIPTNYLRREIGTSDKEILTSRIIDRSIRPLFPAGYFYDTQVLCNLLAVDGVNEPDVLAINGASVALSLSDIPWNGPVGAVRIGIIDGEYVVNPTRKEMSSSTLNLVVAGAPKSQIVMLEASAENILQQDFCHAIKVGVKYTQQIIQGIQQLVKETGVTKRTPQKLFTPSPEIVKYTHKLAMERLYAVFTDYEHDKVSRDEAVNKIRLDTEEQLKEKFPEADPYEIIESFNVVAKEVFRSIVLNEYKRCDGRDLTSLRNVSCEVDMFKTLHGSALFQRGQTQVLCTVTFDSLESGIKSDQVITAINGIKDKNFMLHYEFPPYATNEIGKVTGLNRRELGHGALAEKALYPVIPRDFPSLSAIFPRRHNGAMNVLADALKSINNAEKRGKRQVLIRPCSKVIVRFLTVMMKHGYIGEFEIIDDHRAGKIVVNLTGRLNKCGVISPRFDVQLKDLEKWQNNLLPSRQFGFIVLTTSAGIMDHEEARRKHTGGKILGFFF

SEQ ID NO: 902904 - protein, 466 aa, Homo sapiens
SSAINAELPLRPGDRVPGVMAACRYCCSCLRLRPLSDGPFLLPRRDRALTQLQVRALWSSAGSRAVAVDLGNRKLEISSGKLARFADGSAVVQSGDTAVMVTAVSKTKPSPSQFMPLVVDYRQKAAAAGRIPTNYLRREIGTSDKEILTSRIIDRSIRPLFPAGYFYDTQVLCNLLAVDGVNEPDVLAINGASVALSLSDIPWNGPVGAVRIGIIDGEYVVNPTRKEMSSSTLNLVVAGAPKSQIVMLEASAENILQQDFCHAIKVGVKYTQQIIQGIQQLVKETGVTKRTPQKLFTPSPEIVKYTHKLAMERLYAVFTDYEHDKVSRDEAVNKIRLDTEEQLKEKFPEADPYEIIESFNVVAKEVFRSIVLNEYKRCDGRDLTSLRNVSCEVDMFKTLHGSALFQRGQTQVLCTVTFDSLESGIKSDQVITAINGIKDKNFMLHYEVLLLRKLCILLFPEIFLSP

SEQ ID NO: 902905 - protein, 165 aa, Homo sapiens
PLCPAKLTLICYILFLKGVTISQVDEETFSVFAPTPSAMHEARDFITEICKDDQEQQLEFGAVYTATITEIRDTGVMVKLYPNMTAVLLHNTQLDQRKIKHPTALGLEVGQEIQVKYFGRDPADGRMRLSRKVLQSPATTVVRTLNDRSSIVMGEPISQSSSNSQ

SEQ ID NO: 902906 - protein, 342 aa, Homo sapiens
SSAINAELPLRPGDRVPGVMAACRYCCSCLRLRPLSDGPFLLPRRDRALTQLQVRALWSSAGSRAVAVDLGNRKLEISSGKLARFADGSAVVQSGDTAVMVTAVSKTKPSPSQFMPLVVDYRQKAAAAGRIPTNYLRREIGTSDKEILTSRIIDRSIRPLFPAGYFYDTQVLCNLLAVDGVNEPDVLAINGASVALSLSDIPWNGPVGAVRIGIIDGEYVVNPTRKEMSSSTLNLVVAGAPKSQIVMLEASAENILQQDFCHAIKVGVKYTQQIIQGIQQLVKETGVTKRTPQKLFTPSPEIVKYTHKLAMERLYAVFTDYEHDKVSRDEAVNKIRLIHEGF

SEQ ID NO: 902907 - protein, 800 aa, Homo sapiens
CKNSNRDGLWYSAEAGVWLSCRYCCSCLRLRPLSDGPFLLPRRDRALTQLQVRALWSSAGSRAVAVDLGNRKLEISSGKLARFADGSAVVQSGDTAVMVTAVSKTKPSPSQFMPLVVDYRQKAAAAGRIPTNYLRREIGTSDKEILTSRIIDRSIRPLFPAGYFYDTQVLCNLLAVDGVNEPDVLAINGASVALSLSDIPWNGPVGAVRIGIIDGEYVVNPTRKEMSSSTLNLVVAGAPKSQIVMLEASAENILQQDFCHAIKVGVKYTQQIIQGIQQLVKETGVTKRTPQKLFTPSPEIVKYTHKLAMERLYAVFTDYEHDKVSRDEAVNKIRLDTEEQLKEKFPEADPYEIIESFNVVAKEVFRSIVLNEYKRCDGRDLTSLRNVSCEVDMFKTLHGSALFQRGQTQVLCTVTFDSLESGIKSDQVITAINGIKDKNFMLHYEFPPYATNEIGKVTGLNRRELGHGALAEKALYPVIPRDFPFTIRVTSEVLESNGSSSMASACGGSLALMDSGVPISSAVAGVAIGLVTKTDPEKGEIEDYRLLTDILGIEDYNGDMDFKIAGTNKGITALQADIKLPGIPIKIVMEAIQQASVAKKEILQIMNKTISKPRASRKENGPVVETVQVPLSKRAKFVGPGGYNLKKLQAETGVTISQVDEETFSVFAPTPSAMHEARDFITEICKDDQEQQLEFGAVYTATITEIRDTGVMVKLYPNMTAVLLHNTQLDQRKIKHPTALGLEVGQEIQVKYFGRDPADGRMRLSRKVLQSPATTVVRTLNDRSSIVMGEPISQSSSNSQ

SEQ ID NO: 902908 - protein, 802 aa, Homo sapiens; identical to SEQ ID NO: 902898

SEQ ID NO: 902909 - protein, 833 aa, Homo sapiens
SSAINAELPLRPGDRVPGVMAACRYCCSCLRLRPLSDGPFLLPRRDRALTQLQVRALWSSAGSRAVAVDLGNRKLEISSGKLARFADGSAVVQSGDTAVMVTAVSKTKPSPSQFMPLVVDYRQKAAAAGRIPTNYLRREIGTSDKEILTSRIIDRSIRPLFPAGYFYDTQVLCNLLAVDGVNEPDVLAINGGKYKSRDENYQIKNFFKAMKFNFGPDFSPFLTSVALSLSDIPWNGPVGAVRIGIIDGEYVVNPTRKEMSSSTLNLVVAGAPKSQIVMLEASAENILQQDFCHAIKVGVKYTQQIIQGIQQLVKETGVTKRTPQKLFTPSPEIVKYTHKLAMERLYAVFTDYEHDKVSRDEAVNKIRLDTEEQLKEKFPEADPYEIIESFNVVAKEVFRSIVLNEYKRCDGRDLTSLRNVSCEVDMFKTLHGSALFQRGQTQVLCTVTFDSLESGIKSDQVITAINGIKDKNFMLHYEFPPYATNEIGKVTGLNRRELGHGALAEKALYPVIPRDFPFTIRVTSEVLESNGSSSMASACGGSLALMDSGVPISSAVAGVAIGLVTKTDPEKGEIEDYRLLTDILGIEDYNGDMDFKIAGTNKGITALQADIKLPGIPIKIVMEAIQQASVAKKEILQIMNKTISKPRASRKENGPVVETVQVPLSKRAKFVGPGGYNLKKLQAETGVTISQVDEETFSVFAPTPSAMHEARDFITEICKDDQEQQLEFGAVYTATITEIRDTGVMVKLYPNMTAVLLHNTQLDQRKIKHPTALGLEVGQEIQVKYFGRDPADGRMRLSRKVLQSPATTVVRTLNDRSSIVMGEPISQSSSNSQ

SEQ ID NO: 902910 - protein, 461 aa, Homo sapiens
SSAINAELPLRPGDRVPGVMAACRYCCSCLRLRPLSDGPFLLPRRDRALTQLQVRALWSSAGSRAVAVDLGNRKLEISSGKLARFADGSAVVQSGDTAVMVTAVSKTKPSPSQFMPLVVDYRQKAAAAGRIPTNYLRREIGTSDKEILTSRIIDRSIRPLFPAGYFYDTQVLCNLLAVDGVNEPDVLAINGASVALSLSDIPWNGPVGAVRIGIIDGEYVVNPTRKEMSSSTLNLVVAGAPKSQIVMLEASAENILQQDFCHAIKVGVKYTQQIIQGIQQLVKETGVTKRTPQKLFTPSPEIVKYTHKLAMERLYAVFTDYEHDKVSRDEAVNKIRLDTEEQLKEKFPEADPYEIIESFNVVAKEVFRSIVLNEYKRCDGRDLTSLRNVSCEVDMFKTLHGSALFQRGQTQVLCTVTFDSLESGIKSDQVITAINGIKDKNFMLHYEFPPYATNEMAKSLV

SEQ ID NO: 902911 - protein, 632 aa, Homo sapiens
SSAINAELPLRPGDRVPGVMAACRYCCSCLRLRPLSDGPFLLPRRDRALTQLQVRALWSSAGSRAVAVDLGNRKLEISSGKLARFADGSAVVQSGDTAVMVTAVSKTKPSPSQFMPLVVDYRQKAAAAGRIPTNYLRREIGTSDKEILTSRIIDRSIRPLFPAGYFYDTQVLCNLLAVDGVNEPDVLAINGASVALSLSDIPWNGPVGAVRIGIIDGEYVVNPTRKEMSSSTLNLVVAGAPKSQIVMLEASAENILQQDFCHAIKVGVKYTQQIIQGIQQLVKETGVTKRTPQKLFTPSPEIVKYTHKLAMERLYAVFTDYEHDKVSRDEAVNKIRLDTEEQLKEKFPEADPYEIIESFNVVAKEVFRSIVLNEYKRCDGRDLTSLRNVSCEVDMFKTLHGSALFQRGQTQVLCTVTFDSLESGIKSDQVITAINGIKDKNFMLHYEFPPYATNEIGKVTGLNRRELGHGALAEKALYPVIPRDFPFTIRVTSEVLESNGSSSMASACGGSLALMDSGVPISSAVAGVAIGLVTKTDPEKGEIEDYRLLTDILGIEDYNGDMDFKIAGTNKGITALQADIKLPGIPIKIVMEAIQQASVAKKEILQIMNKTISKPRASRKENGPVVGNTLKF

SEQ ID NO: 902912 - protein, 308 aa, Homo sapiens
SSAINAELPLRPGDRVPGVMAACRYCCSCLRLRPLSDGPFLLPRRDRALTQLQVRALWSSAGSRAVAVDLGNRKLEISSGKLARFADGSAVVQSGDTAVMVTAVSKTKPSPSQFMPLVVDYRQKAAAAGRIPTNYLRREIGTSDKEILTSRIIDRSIRPLFPAGYFYDTQVLCNLLAVDGVNEPDVLAINGASVALSLSDIPWNGPVGAVRIGIIDGEYVVNPTRKEMSSSTLNLVVAGAPKSQIVMLEASAENILQQDFCHAIKVGVKYTQQIIQGIQQLVKETGVTKRTPQKLFTPSPEIVKYTHK

SEQ ID NO: 902913 - protein, 260 aa, Homo sapiens
SSAINAELPLRPGDRVPGVMAACRYCCSCLRLRPLSDGPFLLPRRDRALTQLQVRALWSSAGSRAVAVDLGNRKLEISSGKLARFADGSAVVQSGDTAVMVTAVSKTKPSPSQFMPLVVDYRQKAAAAGRIPTNYLRREIGTSDKEILTSRIIDRSIRPLFPAGYFYDTQVLCNLLAVDGVNEPDVLAINGASVALSLSDIPWNGPVGAVRIGIIDGEYVVNPTRKEMFQSPATTVVRTLNDRSSIVMGEPISQSSSNSQ

SEQ ID NO: 902914 - protein, 404 aa, Homo sapiens
MRKRTEPVALEHERCAAAGSSSSGSAAAALDADCRLKQNLRLTGPAAAEPRCAADAGMKRALGRRKGVWLRLRKILFCVLGLYIAIPFLIKLCPGIQAKLIFLNFVRVPYFIDLKKPQDQGLNHTCNYYLQPEEDVTIGVWHTVPAVWWKNAQGKDQMWYEDALASSHPIILYLHGNAGTRGGDHRVELYKVLSSLGYHVVTFDYRGWGDSVGTPSERGMTYDALHVFDWIKARSGDNPVYIWGHSLGTGVATNLVRRLCERETPPDALILESPFTNIREEAKSHPFSVIYRYFPGFDWFFLDPITSSGIKFANDENVKHISCPLLILHAEDDPVVPFQLGRKLYSIAAPARSFRDFKVQFVPFHSDLGYRHKYIYKSPELPRILRPQQGPGSSPDPSMWSELV

SEQ ID NO: 902915 - protein, 316 aa, Homo sapiens
WNTGHSLMRNGMACIPGHSLMRNGIQAKLIFLNFVRVPYFIDLKKPQDQGLNHTCNYYLQPEEDVTIGVWHTVPAVWWKNAQGKDQMWYEDALASSHPIILYLHGNAGTRGGDHRVELYKVLSSLGYHVVTFDYRGWGDSVGTPSERGMTYDALHVFDWIKARSGDNPVYIWGHSLGTGVATNLVRRLCERETPPDALILESPFTNIREEAKSHPFSVIYRYTYPWVDWVLPLILSQRGGTSPLPTDENVKQISCSPGILHGDEDEPEGDPYTTWQKASIEIAEQRVEALRDPKSRRGLNQTWATAENDGKSRVPG

SEQ ID NO: 902916 - protein, 398 aa, Homo sapiens
MRKRTEPVALEHERCAAAGSSSSGSAAAALDADCRLKQNLRLTGPAAAEPRCAADAGMKRALGRRKGVWLRLRKILFCVLGLYIAIPFLIKLCPGIQAKLIFLNFVRVPYFIDLKKPQDQGLNHTCNYYLQPEEDVTIGVWHTVPAVWWKNAQGKDQMWYEDALASSHPIILYLHGNAGTRGGDHRVELYKVLSSLGYHVVTFDYRGWGDSVGTPSERGMTYDALHVFDWIKARSGDNPVYIWGHSLGTGVATNLVRRLCERETPPDALILESPFTNIREEAKSHPFSVIYRYFPGFDWFFLDPITSSGIKFANDENVKHISCPLLILHAEDDPVVPFQLGRKLYSIAAPARSFRDFKVQFVPFHSDLGYRHKYIYKSPELPRILREFLGKSEPEHQH

SEQ ID NO: 902917 - protein, 404 aa, Homo sapiens
SPWKIPGRQAQQRREAEGPAPDPESAGAHSDLLLLLCIRPHTELPGRAPLGLGCVRGALLAPWALGGSPRRKGVWLRLRKILFCVLGLYIAIPFLIKLCPGIQAKLIFLNFVRVPYFIDLKKPQDQGLNHTCNYYLQPEEDVTIGVWHTVPAVWWKNAQGKDQMWYEDALASSHPIILYLHGNAGTRGGDHRVELYKVLSSLGYHVVTFDYRGWGDSVGTPSERGMTYDALHVFDWIKARSGDNPVYIWGHSLGTGVATNLVRRLCERETPPDALILESPFTNIREEAKSHPFSVIYRYFPGFDWFFLDPITSSGIKFANDENVKHISCPLLILHAEDDPVVPFQLGRKLYSIAAPARSFRDFKVQFVPFHSDLGYRHKYIYKSPELPRILREFLGKSEPEHQH

SEQ ID NO: 902918 - protein, 346 aa, Homo sapiens
GGLRRPLFPDTRRKGVWLRLRKILFCVLGLYIAIPFLIKLCPGIQAKLIFLNFVRVPYFIDLKKPQDQGLNHTCNYYLQPEEDVTIGVWHTVPAVWWKNAQGKDQMWYEDALASSHPIILYLHGNAGTRGGDHRVELYKVLSSLGYHVVTFDYRGWGDSVGTPSERGMTYDALHVFDWIKARSGDNPVYIWGHSLGTGVATNLVRRLCERETPPDALILESPFTNIREEAKSHPFSVIYRYFPGFDWFFLDPITSSGIKFANDENVKHISCPLLILHAEDDPVVPFQLGRKLYSIAAPARSFRDFKVQFVPFHSDLGYRHKYIYKSPELPRILREFLGKSEPEHQH

SEQ ID NO: 902919 - protein, 516 aa, Homo sapiens
MAALTLCICVQSGRGTAYAFPGILARLRAIASSTAFSCFSSSSRRDSVLAFPDLVLAAPGSEALPGTLVTLLELLDWGDSWRFLSAGAAGALEFWPLCRSGFGEPSLPPDFRSQNLGDRYRVRPPSCCTGNGCVGGLTDARDSLLKPEAAEFTTFIFISCRIRQRAEPRCAADAGMKRALGRRKGVWLRLRKILFCVLGLYIAIPFLIKLCPGIQAKLIFLNFVRVPYFIDLKKPQDQGLNHTCNYYLQPEEDVTIGVWHTVPAVWWKNAQGKDQMWYEDALASSHPIILYLHGNAGTRGGDHRVELYKVLSSLGYHVVTFDYRGWGDSVGTPSERGMTYDALHVFDWIKARSGDNPVYIWGHSLGTGVATNLVRRLCERETPPDALILESPFTNIREEAKSHPFSVIYRYFPGFDWFFLDPITSSGIKFANDENVKHISCPLLILHAEDDPVVPFQLGRKLYSIAAPARSFRDFKVQFVPFHSDLGYRHKYIYKSPELPRILREFLGKSEPEHQH

SEQ ID NO: 902920 - protein, 179 aa, Homo sapiens [sequence omitted]

SEQ ID NO: 902921 - protein, 179 aa, Homo sapiens [sequence omitted]

SEQ ID NO: 902922 - protein, 398 aa, Homo sapiens; identical to SEQ ID NO: 902916

SEQ ID NO: 902923 - protein, 179 aa, Homo sapiens [sequence omitted]

SEQ ID NO: 902924 - protein, 401 aa, Homo sapiens
MRKRTEPVALEHERCAAAGSSSSGSAAAALDADCRLKQNLRLTGPAAAEPRCAADAGMKRALGRRKGVWLRLRKILFCVLGLYIAIPFLIKLCPGIQAKLIFLNFVRVPYFIDLKKPQDQGLNHTCNYYLQPEEDVTIGVWHTVPAVWWKNAQGKDQMWYEDALASSHPIILYLHGNAGTRREADHRGEPLPGCWSSLGFTIVVTFDSGGWGDSVGTPSERGMTYDALHVFDWIKARSGDNPVYIWGHSLGTGVATNLVRRLCERETPPDALILESPFTNIREEAKSHPFSVIYRYFPGFDWFFLDPITSSGIKFANDENVKHISCPLLILHAEDDPVVPFQLGRKLYSIAAPARSFRDFKVQFVPFHSDLGYRHKYIYKSPELPRILREFLGKSEPEHQH

SEQ ID NO: 902925 - protein, 241 aa, Homo sapiens
MWYEDALASSHPIILYLHGNAGTRGGDHRVELYKVLSSLGYHVVTFDYRGWGDSVGTPSERGMTYDALHVFDWIKARSGDNPVYIWGHSLGTGVATNLVRRLCERETPPDALILESPFTNIREEAKSHPFSVIYRYFPGFDWFFLDPITSSGIKFANDENVKHISCPLLILHAEDDPVVPFQLGRKLYSIAAPARSFRDFKVQFVPFHSDLGYRHKYIYKSPELPRILREFLGKSEPEHQH

SEQ ID NO: 902926 - protein, 179 aa, Homo sapiens [sequence omitted]

SEQ ID NO: 902927 - protein, 954 aa, Homo sapiens
GGGLGSAGRGLLQQRGGRESGPAPPAAKLRPPPEGSAGACAPVPAAAAVAAGPEPAPAGPAKPAGPAALAARAGPGPGPGPGPGPGPGKPAGPGAAQTLNGSAALLNSHHAAAPAVSLVNNGPAALLPLPKPAAPAAAPPPPPPAPATLARPPGHPAGPPTAAPAVPPPAAAQNGGSAGAAPAPAPAAGGPAGVSGQPGPGAAAAAPAPGVKAESPKRVVQAAPPAAQTLAASGPASTAASMVIGPTMQGALPSPAAVPPPAPGTPTGLPKGAAGAVTQSLSRTPTATTSGIRATLTPTVLAPRLPQPPQNPTNIQNFQLPPGMVLVRSENGQLLMIPQQALAQMQAQAHAQPQTTMAPRPATPTSAPPVQISTVQAPGTPIIARQVTPTTIIKQVSQAQTTVQPSATLQRSPGVQPQLVLGGAAQTASLGTATAVQTGTPQRTVPGATTTSSAATETMENVKKCKNFLSTLIKLASSGKQSTETAANVKELVQNLLDGKIEAEDFTSRLYRELNSSPQPYLVPFLKRSLPALRQLTPDSAAFIQQSQQQPPPPTSQATTALTAVVLSSSVQRTAGKTAATVTSALQPPVLSLTQPTQVGVGKQGQPTPLVIQQPPKPGALIRPPQVTLTQTPMVALRQPHNRIMLTTPQQIQLNPLQPVPVVKPAVLPGTKALSAVSAQAAAAQKNKLKEPGGGSFRDDDDINDVASMAGVNLSEESARILATNSELVGTLTRSCKDETFLLQAPLQRRILEIGKKHGITELHPDVVSYVSHATQQRLQNLVEKISETAQQKNFSYKDDDRYEQASDVRAQLKFFEQLDQIEKQRKDEQEREILMRAAKSRSRQEDPEQLRLKQKAKEMQQQELAQMRQRDANLTALAAIGPRKKRKVDCPGPGSGAEGSGPGSVVPGSSGVGTPRQFTRQRITRVNLRDLIFCLENERETSHSLLLYKAFLK

SEQ ID NO: 902928 - protein, 1083 aa, Homo sapiens
MAAGSDLLDEVFFNSEVDEKVVSDLVGSLESQLAASAAHHHHLAPRTPEVRAAAAGALGNHVVSGSPAGAAGAGPAAPAEGAPGAAPEPPPAGRARPGGGGPQRPGPPSPRRPLVPAGPAPPAAKLRPPPEGSAGACAPVPAAAAVAAGPEPAPAGPAKPAGPAALAARAGPGPGPGPGPGPGPGKPAGPGAAQTLNGSAALLNSHHAAAPAVSLVNNGPAALLPLPKPAAPGTVIQTPPFVGAAAPPAPAAPSPPAAPAPAAPAAAPPPPPPAPATLARPPGHPAGPPTAAPAVPPPAAAQNGGSAGAAPAPAPAAGGPAGVSGQPGPGAAAAAPAPGVKAESPKRVVQAAPPAAQTLAASGPASTAASMVIGPTMQGALPSPAAVPPPAPGTPTGLPKGAAGAVTQSLSRTPTATTSGIRATLTPTVLAPRLPQPPQNPTNIQNFQLPPGMVLVRSENGQLLMIPQQALAQMQAQAHAQPQTTMAPRPATPTSAPPVQISTVQAPGTPIIARQVTPTTIIKQVSQAQTTVQPSATLQRSPGVQPQLVLGGAAQTASLGTATAVQTGTPQRTVPGATTTSSAATETMENVKKCKNFLSTLIKLASSGKQSTETAANVKELVQNLLDGKIEAEDFTSRLYRELNSSPQPYLVPFLKRSLPALRQLTPDSAAFIQQSQQQPPPPTSQATTALTAVVLSSSVQRTAGKTAATVTSALQPPVLSLTQPTQVGVGKQGQPTPLVIQQPPKPGALIRPPQVTLTQTPMVALRQPHNRIMLTTPQQIQLNPLQPVPVVKPAVLPGTKALSAVSAQAAAAQKNKLKEPGGGSFRDDDDINDVASMAGVNLSEESARILATNSELVGTLTRSCKDETFLLQAPLQRRILEIGKKHGITELHPDVVSYVSHATQQRLQNLVEKISETAQQKNFSYKDDDRYEQASDVRAQLKFFEQLDQIEKQRKDEQEREILMRAAKSRSRQEDPEQLRLKQKAKEMQQQELAQMRQRDANLTALAAIGPRKKRKVDCPGPGSGAEGSGPGSVVPGSSGVGTPRQFTRQRITRVNLRDLIFCLENERETSHSLLLYKAFLK

SEQ ID NO: 902929 - protein, 139 aa, Homo sapiens
GKKKERRGTIAEQMQMKGLGASQEEREREGRQERGVKAETEGKEMQQQELAQMRQRDANLTALAAIGPRKKRKVDCPGPGSGAEGSGPGSVVPGSSGVGTPRQFTRQRITRVNLRDLIFCLENERETSHSLLLYKAFLK

SEQ ID NO: 902930 - protein, 1049 aa, Homo sapiens
MAAGSDLLDEVFFNSEVDEKVVSDLVGSLESQLAASAAHHHHLAPRTPEVRAAAAGALGNHVVSGSPAGAAGAGPAAPAEGAPGAAPEPPPAGRARPGGGGPQRPGPPSPRRPLVPAGPAPPAAKLRPPPEGSAGACAPVPAAAAVAAGPEPAPAGPAKPAGPAALAARAGPGPGPGPGPGPGPGKPAGPGAAQTLNGSAALLNSHHAAAPAVSLVNNGPAALLPLPKPAAPGTVIQTPPFVGAAAPPAPAAPSPPAAPAPAAPAAAPPPPPPAPATLARPPGHPAGPPTAAPAVPPPAAAQNGGSAGAAPAPAPAAGGPAGVSGQPGPGAAAAAPAPGVKAESPKRVVQAAPPAAQTLAASGPASTAASMVIGPTMQGALPSPAAVPPPAPGTPTGLPKGAAGAVTQSLSRTPTATTSGIRATLTPTVLAPRLPQPPQNPTNIQNFQLPPGMVLVRSENGQLLMIPQQALAQMQAQAHAQPQTTMAPRPATPTSAPPVQISTVQAPGTPIIARQVTPTTIIKQVSQAQTTVQPSATLQRSPGVQPQLVLGGAAQTASLGTATAVQTGTPQRTVPGATTTSSAATETMENVKKCKNFLSTLIKLASSGKQSTETAANVKELVQNLLDGKIEAEDFTSRLYRELNSSPQPYLVPFLKRSLPALRQLTPDSAAFIQQSQQQPPPPTSQATTALTAVVLSSSVQRTAGKTAATVTSALQPPVLSLTQPTQVGVGKQGQPTPLVIQQPPKPGALIRPPQVTLTQTPMVALRQPHNRIMLTTPQQIQLNPLQPVPVVKPAVLPGTKALSAVSAQAAAAQKNKLKEPGGGSFRDDDDINDVASMAGVNLSEESARILATNSELVGTLTRSCKDETFLLQAPLQRRILEIGKKHGITELHPDVVSYVSHATQQRLQNLVEKISETAQQKNFSYKDDDRYEQASDVRAQLKFFEQLDQIEKQRKDEQEREILMRAAKSRSRQEDPEQLRLKQKAKEMQQQELAQMRQRDANLTALAAIGPRKKRKVDCPGPGSGAEASVALSKQRAQGERPGWSPCR

SEQ ID NO: 902931 - protein, 637 aa, Homo sapiens
MAAGSDLLDEVFFNSEVDEKVVSDLVGSLESQLAASAAHHHHLAPRTPEVRAAAAGALGNHVVSGSPAGAAGAGPAAPAEGAPGAAPEPPPAGRARPGGGGPQRPGPPSPRRPLVPAGPAPPAAKLRPPPEGSAGACAPVPAAAAVAAGPEPAPAGPAKPAGPAALAARAGPGPGPGPGPGPGPGKPAGPGAAQTLNGSAALLNSHHAAAPAVSLVNNGPAALLPLPKPAAPGTVIQTPPFVGAAAPPAPAAPSPPAAPAPAAPAAAPPPPPPAPATLARPPGHPAGPPTAAPAVPPPAAAQNGGSAGAAPAPAPAAGGPAGVSGQPGPGAAAAAPAPGVKAESPKRVVQAAPPAAQTLAASGPASTAASMVIGPTMQGALPSPAAVPPPAPGTPTGLPKGAAGAVTQSLSRTPTATTSGIRATLTPTVLAPRLPQPPQNPTNIQNFQLPPGMVLVRSENGQLLMIPQQALAQMQAQAHAQPQTTMAPRPATPTSAPPVQISTVQAPGTPIIARQVTPTTIIKQVSQAQTTVQPSATLQRSPGVQPQLVLGGAAQTASLGTATAVQTGTPQRTVPGATTTSSAATETMENVKKCKNFLSTLIKLASSGKQSTETAANVKELVQNLLVRNLDFTFPFP

SEQ ID NO: 902932 - protein, 1083 aa, Homo sapiens; identical to SEQ ID NO: 902928

SEQ ID NO: 902933 - protein, 119 aa, Homo sapiens [sequence omitted]

SEQ ID NO: 902934 - protein, 758 aa, Homo sapiens
MAAGSDLLDEVFFNSEVDEKVVSDLVGSLESQLAASAAHHHHLAPRTPEVRAAAAGALGNHVVSGSPAGAAGAGPAAPAEGAPGAAPEPPPAGRARPGGGGPQRPGPPSPRRPLVPAGPAPPAAKLRPPPEGSAGACAPVPAAAAVAAGPEPAPAGPAKPAGPAALAARAGPGPGPGPGPGPGPGKPAGPGAAQTLNGSAALLNSHHAAAPAVSLVNNGPAALLPLPKPAAPGTVIQTPPFVGAAAPPAPAAPSPPAAPAPAAPAAAPPPPPPAPATLARPPGHPAGPPTAAPAVPPPAAAQNGGSAGAAPAPAPAAGGPAGVSGQPGPGAAAAAPAPGVKAESPKRVVQAAPPAAQTLAASGPASTAASMVIGPTMQGALPSPAAVPPPAPGTPTGLPKGAAGAVTQSLSRTPTATTSGIRATLTPTVLAPRLPQPPQNPTNIQNFQLPPGMVLVRSENGQLLMIPQQALAQMQAQAHAQPQTTMAPRPATPTSAPPVQISTVQAPGTPIIARQVTPTTIIKQVSQAQTTVQPSATLQRSPGVQPQLVLGGAAQTASLGTATAVQTGTPQRTVPGATTTSSAATETMENVKKCKNFLSTLIKLASSGKQSTETAANVKELVQNLLDGKIEAEDFTSRLYRELNSSPQPYLVPFLKRSLPALRQLTPDSAAFIQQSQQQPPPPTSQATTALTAVVLSSSVQRTAGKTAATVTSALQPPVLSLTQPTQVGVGKQGQPTPLVIQQPPKPGALIRPPQSLW

SEQ ID NO: 902935 - protein, 275 aa, Homo sapiens
MTDDKDVLRDVWFGRIPTCFTLYQDEITEREAEPYYLLLPRVSYLTLVTDKVKKHFQKVMRQEDISEIWFEYEGTPLKWHYPIGLLFDLLASSSALPWNITVHFKSFPEKDLLHCPSKDAIEAHFMSCMKEADALKHKSQVINEMQKKDHKQLWMGLQNDRFDQFWAINRKLMEYPAEENGFRYIPFRIYQTTTERPFIQKLFRPVAADGQLHTLGDLLKEVCPSAIDPEDGEKKNQVMIHGIEPMLETPLQWLSEHLSYPDNFLHISIIPQPTD

SEQ ID NO: 902936 - protein, 275 aa, Homo sapiens; identical to SEQ ID NO: 902935

SEQ ID NO: 902937 - protein, 197 aa, Homo sapiens
MHYPIGLLFDLLASSSALPWNITVHFKSFPEKDLLHCPSKDAIEAHFMSCMKEADALKHKSQVINEMQKKDHKQLWMGLQNDRFDQFWAINRKLMEYPAEENGFRYIPFRIYQTTTERPFIQKLFRPVAADGQLHTLGDLLKEVCPSAIDPEDGEKKNQVMIHGIEPMLETPLQWLSEHLSYPDNFLHISIIPQPTD

SEQ ID NO: 902938 - protein, 188 aa, Homo sapiens
  misc_feature (18)..(18): Xaa can be any naturally occurring amino acid
TASPSFYLSTYSPPRGVXSFPEKDLLHCPSKDAIEAHFMSCMKEADALKHKSQVINEMQKKDHKQLWMGLQNDRFDQFWAINRKLMEYPAEENGFRYIPFRIYQTTTERPFIQKLFRPVAADGQLHTLGDLLKEVCPSAIDPEDGEKKNQVMIHGIEPMLETPLQWLSEHLSYPDNFLHISIIPQPTD

SEQ ID NO: 902939 - protein, 119 aa, Homo sapiens
MANDRFDQFWAINRKLMEYPAEENGFRYIPFRIYQTTTERPFIQKLFRPVAADGQLHTLGDLLKEVCPSAIDPEDGEKKNQVMIHGIEPMLETPLQWLSEHLSYPDNFLHISIIPQPTD

SEQ ID NO: 902940 - protein, 275 aa, Homo sapiens; identical to SEQ ID NO: 902935

SEQ ID NO: 902941 - protein, 275 aa, Homo sapiens; identical to SEQ ID NO: 902935

SEQ ID NO: 902942 - protein, 106 aa, Homo sapiens
WGDFKDVGTAWMGLQNDRFDQFWAINRKLMEYPAEENGFRYIPFRIYQTTTERPFIQKLFRPVAADGQLHTLGDLLKEVCPSAIDPEGNTISNIKTFLSFSVTEVK

SEQ ID NO: 902943 - protein, 81 aa, Homo sapiens
QDRDKPAQIRFSNISAAKAVADAIRTSLGPKGMDENDGEKKNQVMIHGIEPMLETPLQWLSEHLSYPDNFLHISIIPQPTD

SEQ ID NO: 902944 - protein, 249 aa, Homo sapiens [sequence omitted]

SEQ ID NO: 902945 - protein, 195 aa, Homo sapiens
RELQSYAAFGAVVTRVSLPAPRCPALGGLASGPGESGPALLQVCGAKCPGGAPRGENREKEETTRIGPGVMESKEKRAVNSLSMENANQENEEKEQVANKGEPLALPLDAGEYCVPRGNRRRFRVRQPILQYRWDMMHRLGEPQARMREENMERIGEEVRQLMEKLREKQLSHSLRAVSTDPPHHDHHDEFCLMP

SEQ ID NO: 902946 - protein, 255 aa, Homo sapiens
RELQSYAAFGAVVTRVSLPAPRCPALGGLASGPGESGPALLQVCGAKCPGGAPRGENREKEETTRIGPGVMESKEKRAVNSLSMENANQEKKKKTSENSFSLSSGSPLCEGGPPANVLWRHSWQVGWVGGGNVASKFPWIKEGIRQDLTGIGAQITWKGPANSFRRNNRDVDSHRQRDWWAVETPGKPRRAKGWSGGGLIKRGSIRATGKALAHLPFGGGTNLLTKDWFCGHGFSKLSDHLDRDRPSVRPRTGAW

SEQ ID NO: 902947 - protein, 195 aa, Homo sapiens; identical to SEQ ID NO: 902945

SEQ ID NO: 902948 - protein, 214 aa, Homo sapiens
GVAPPPVGGGAEAGGGGPRMRRRQLAWGRDHAGGGGAGGGRFRERGGLRGGGGAWWGRGLCGLRRGAEWAAGMRGTSCVGGGAESPGGAGLSEGPRGRWLRLAPVCAYFLCVSLAAVLLAVYYGLIWVPTRSPAAPAGPQPSAPSPPCAARPGVPPVPAPAAASLSCLLGVPGGPRPQLQLPLSRRRRYSDPDRRPSRQTPRETPEAAEGRRPG

SEQ ID NO: 902949 - protein, 214 aa, Homo sapiens; identical to SEQ ID NO: 902948

SEQ ID NO: 902950 - protein, 56 aa, Homo sapiens
MLSTEPTAHLPLHLPESVSICNKRQPRQRRNRHTRRKHKHGGATKYPRGHTKTTFW

SEQ ID NO: 902951 - protein, 231 aa, Homo sapiens
GVAPPPVGGGAEAGGGGPRMRRRQLAWGRDHAGGGGAGGGRFRERGGLRGGGGAWWGRGLCGLRRGAEWAAGMRGTSCVGGGAESPGGAGLSEGPRGRWLRLAPVCAYFLCVSLAAVLLAVYYGLIWVPTRSPAAPAGPQPSAPSPPCAARPGVPPVPAPAAASLSCLLGVPGGPRPQLQLPLSRRRRYSDPDRRPSRQTPRETPEAAEGPCLLQLLCGQAGSSTIRKIPS

SEQ ID NO: 902952 - protein, 389 aa, Homo sapiens
MKLLTRAGSFSRFYSLKVAPKVKATAAPAGAPPQPQDLEFTKLPNGLVIASLENYSPVSRIGLFIKAGSRYEDFSNLGTTHLLRLTSSLTTKGASSFKITRGIEAVGGKLSVTATRENMAYTVECLRGDVDILMEFLLNVTTAPEFRRWEVADLQPQLKIDKAVAFQNPQTHVIENLHAAAYRNALANPLYCPDYRIGKVTSEELHYFVQNHFTSARMALIGLGVSHPVLKQVAEQFLNMRGGLGLSGAKANYRGGEIREQNGDSLVHAAFVAESAVAGSAEANAFSVLQHVLGAGPHVKRGSNTTSHLHQAVAKATQQPFDVSAFNASYSDSGLFGIYTISQATAAGDVIKAAYNQVKTIAQGNLSNTDVQAAKNKLKAGIPNVSGVF

SEQ ID NO: 902953 - protein, 152 aa, Homo sapiens
  misc_feature (1)..(1): Xaa can be any naturally occurring amino acid
XPFNSLHSHMGAVYLSSHSVSEPETDEHLVHAAFVAESAVAGSAEANAFSVLQHVLGAGPHVKRGSNTTSHLHQAVAKATQQPFDVSAFNASYSDSGLFGIYTISQATAAGDVIKAAYNQVKTIAQGNLSNTDVQAAKNKLKAGIPNVSGVF

SEQ ID NO: 902954 - protein, 193 aa, Homo sapiens
  misc_feature (190)..(190): Xaa can be any naturally occurring amino acid
GSAEANAFSVLQHVLGAGPHVNVTTAPEFRRWEVADLQPQLKIDKAVAFQNPQTHVIENLHAAAYRNALANPLYCPDYRIGKVTSEELHYFVQNHFTSARMALIGLGVSHPVLKQVAEQFLNMRGGLGLSGAKANYRGGEIREQNGDSLVHAAFVAESAVAGSAEANAFSVLQHVPFDVSAFNAVNQILXLWD

SEQ ID NO: 902955 - protein, 389 aa, Homo sapiens; identical to SEQ ID NO: 902952

SEQ ID NO: 902956 - protein, 389 aa, Homo sapiens; identical to SEQ ID NO: 902952

SEQ ID NO: 902957 - protein, 389 aa, Homo sapiens; identical to SEQ ID NO: 902952

SEQ ID NO: 902958 - protein, 389 aa, Homo sapiens; identical to SEQ ID NO: 902952

SEQ ID NO: 902959 - protein, 389 aa, Homo sapiens; identical to SEQ ID NO: 902952

SEQ ID NO: 902960 - protein, 380 aa, Homo sapiens
MKLLTRAGSFSRFYSLKVAPKVKATAAPAGAPPQPQDLEFTKLPNGLVIASLENYSPVSRIGLFIKAGSRYEDFSNLGTTHLLRLTSSLTTKGASSFKITRGIEAVGGKLSVTATRENMAYTVECLRGDVDILMEFLLNVTTAPEFRRWEVADLQPQLKIDKAVAFQNPQTHVIENLHAAAYRNALANPLYCPDYRIGKVTSEELHYFVQNHFTSARMALIGLGVSHPVLKQVAEQFLNMRGGLGLSGAKANYRGGEIREQNGDSLVHAAFVAESAVAGSAEANAFSVLQHVLGAGPHVKRGSNTTSHLHQAVAKATQQPFDVSAFNASYSDSGLFGIYTISQATAAGDVIKAAYNQVKTIAQGNLSNTDVQAAKGGQMR

SEQ ID NO: 902961 - protein, 370 aa, Homo sapiens
MKLLTRAGSFSRFYSLKVAPKVKATAAPAGAPPQPQDLEFTKLPNGLVIASLENYSPVSRIGLFIKAGSRYEDFSNLGTTHLLRLTSSLTTKGASSFKITRGIEAVGGKLSDILMEFLLNVTTAPEFRRWEVADLQPQLKIDKAVAFQNPQTHVIENLHAAAYRNALANPLYCPDYRIGKVTSEELHYFVQNHFTSARMALIGLGVSHPVLKQVAEQFLNMRGGLGLSGAKANYRGGEIREQNGDSLVHAAFVAESAVAGSAEANAFSVLQHVLGAGPHVKRGSNTTSHLHQAVAKATQQPFDVSAFNASYSDSGLFGIYTISQATAAGDVIKAAYNQVKTIAQGNLSNTDVQAAKNKLKAGIPNVSGVF

SEQ ID NO: 902962 - protein, 332 aa, Homo sapiens
MKLLTRAGSFSRFYSLKVAPKVKATAAPAGAPPQPQDLEFTKLPNGLVIASLENYSPVSRIGLFIKAGSRYEDFSNLGTTHLLRLTSSLTTKGASSFKITRGIEAVGGKLSVTATRENMAYTVECLRGDVDILMEFLLNVTTAPEFRRWEVADLQPQLKIDKAVAFQNPQTHVIENLHAAAYRNALANPLYCPDYRIGKVTSEELHYFVQNHFTSARMALIGLGVSHPVLKQVAEQFLNMRGGLGLSGAKANYRGGEIREQNGDSLVHAAFVAESAVAGSAEANAFSVLQHVLGAGPHVKRGSNTTSHLHSGQPLHSGQPLHSGQPLHSGQP

SEQ ID NO: 902963 - protein, 172 aa, Homo sapiens
MALIGLGVSHPVLKQVAEQFLNMRGGLGLSGAKANYRGGEIREQNGDSLVHAAFVAESAVAGSAEANAFSVLQHVLGAGPHVKRGSNTTSHLHQAVAKATQQPFDVSAFNASYSDSGLFGIYTISQATAAGDVIKAAYNQVKTIAQGNLSNTDVQAAKNKLKAGIPNVSGVF

SEQ ID NO: 902964 - protein, 213 aa, Homo sapiens
MKLLTRAGSFSRFYSLKVAPKVKATAAPAGAPPQPQDLEFTKLPNGLVIASLENYSPVSRIGLFIKAGSRYEDFSNLGTTHLLRLTSSLTTKGASSFKITRGIEAVGGKLSVTATRENMAYTVECLRGDVDILMEFLLNVTTAPEFRRWEVADLQPQLKIDKAVAFQNPQTHVIENLHAAAYRNALANPLYCPDYRIGKVTSEEVPIKHILKC

SEQ ID NO: 902965 - protein, 158 aa, Homo sapiens
MKLLTRAGSFSRFYSLKVAPKVKATAAPAGAPPQPQDLEFTKLPNGLVIASLENYSPVSRIGLFIKAGSRYEDFSNLGTTHLLRLTSSLTTKGASSFKITRGIEAVGGKLRVFTASSTRSRFYLKKPLCLLIHKKHLLICSSFIIRLQPFSHIFRPHF

SEQ ID NO: 902966 - protein, 114 aa, Homo sapiens
MALIGLGVSHPVLKQVAEQFLNMRGGLGLSGAKANYRGGEIREQNGDSLVHAAFVAESAVAGSAEANAFSVLQHVLGAGPHVKRGSNTTSHLHQAVAKATQQPFDKNKSAAGYR

SEQ ID NO: 902967 - protein, 389 aa, Homo sapiens; identical to SEQ ID NO: 902952

SEQ ID NO: 902968 - protein, 389 aa, Homo sapiens; identical to SEQ ID NO: 902952

SEQ ID NO: 902969 - protein, 366 aa, Homo sapiens
MKLLTRAGSFSRFYSLKVAPKVKATAAPAGAPPQPQDLEFTKLPNGLVIASLENYSPVSRIGLFIKAGSRYEDFSNLGTTHLLRLTSSLTTKGASSFKITRGIEAVGGKLSVTATRENMAYTVECLRGDVDILMEFLLNVTTAPEFRRWEVADLQPQLKIDKAVAFQNPQTHVIENLHAAAYRNALANPLYCPDYRIGKVTSEELHYFVQNHFTSARMALIGLGVSHPVLKQVAEQFLNMRGGLGLSGAKANYRGGEIREQNGDSLVHAAFVAESAVAGSAEANAFSVLQHVLGAGPHVKRGSNTTSHLHQAVAKATQQPFDVSAFNASYSDSGLFGIYTISQATAAGDVIKAAYNQVEQAESWDT

SEQ ID NO: 902970 - protein, 366 aa, Homo sapiens; identical to SEQ ID NO: 902969

SEQ ID NO: 902971 - protein, 295 aa, Homo sapiens
MKLLTRAGSFSRFYSLKVAPKVKATAAPAGAPPQPQDLEFTKLPNGLVIASLENYSPVSRIGLFIKAGSRYEDFSNLGTTHLLRLTSSLTTKGASSFKITRGIEAVGGKLSVTATRENMAYTVECLRGDVDILMEFLLNVTTAPEFRRWEVADLQPQLKIDKAVAFQNPQTHVIENLHAAAYRNALANPLYCPDYRIGKVTSEELHYFVQNHFTSARMALIGLGVSHPVLKQVAEQFLNMRGGLGLSGAKANYRGGEIREQNGDSLVHAAFVAESAVAGSAEANAFSVLQHVRTS

SEQ ID NO: 902972 - protein, 324 aa, Homo sapiens
MKLLTRAGSFSRFYSLKVAPKVKATAAPAGAPPQPQDLEFTKLPNGLVIASLENYSPVSRIGLFIKAGSRYEDFSNLGTTHLLRLTSSLTTKGASSFKITRGIEAVGGKLSVTATRENMAYTVECLRGDVDILMEFLLNVTTAPEFRRWEVADLQPQLKIDKAVAFQNPQTHVIENLHAAAYRNALANPLYCPDYRIGKVTSEELHYFVQNHFTSARMALIGLGVSHPVLKQVAEQFLNMRGGLGLSGAKANYRGGEIREQNGDSLVHAAFVAESAVAGSAEANAFSVLQHVHPLGVGPCQSELHTSLVSGLLRPGRLSLTPPA

SEQ ID NO: 902973 - protein, 194 aa, Homo sapiens
MCLKNWMPVARAVKSLWATDECVICGSLQTIQVAGLSIDPDAKPRMTVKVCYFPMDLTLDYQWSWAPRHVFCDSLEQLTRFLLVDEEANAFSVLQHVLGAGPHVKRGSNTTSHLHQAVAKATQQPFDVSAFNASYSDSGLFGIYTISQATAAGDVIKAAYNQVKTIAQGNLSNTDVQAAKNKLKAGIPNVSGVF

SEQ ID NO: 902974 - protein, 190 aa, Homo sapiens
MKLLTRAGSFSRFYSLKVAPKVKATAAPAGAPPQPQDLEFTKLPNGLVIASLENYSPVSRIGLFIKAGSRYEDFSNLGTTHLLRLTSSLTTKGASSFKITRGIEAVGGKLSVTATRENMAYTVECLRGDVDILMEFLLNVTTAPEFRRWEVADLQPQLKIDKAVAFQNPQTHVIEICMRTAGDVSGCLYQ

SEQ ID NO: 902975 - protein, 125 aa, Homo sapiens
MDSGPVQAENHDTFLLAMLLSVLLPLLPGAGLAWCCYRLPGAHLQRCSWGCRRDPACSGPKDGPHRDHPLGGVHPMELGPTATGQPWPLDPENSHEPSSHPEKPLPAVSPDPQADQVQMPRSCLW

SEQ ID NO: 902976 - protein, 309 aa, Homo sapiens
MGDCDLPEFCTGTSSHCPPDVYLLDGSPCARGSGYCWDGACPTLEQQCQQLWGPGSHPAPEACFQVVNSAGDAHGNCGQDSEGHFLPCAGRDALCGKLQCQGGKPSLLAPHMVPVDSTVHLDGQEVTCRGALALPSAQLDLLGLGLVEPGTQCGPRMVCNSNHNCHCAPGWAPPFCDKPGFGGSMDSGPVQAENHDTFLLAMLLSVLLPLLPGAGLAWCCYRLPGAHLQRCSWGCRRDPACSGPKDGPHRDHPLGGVHPMELGPTATGQPWPLDPENSHEPSSHPEKPLPAVSPDPQADQVQMPRSCLW

SEQ ID NO: 902977 - protein, 427 aa, Homo sapiens
PPAGSRSRGSSRRVPPSPAVHSPSSCALSSGVPAMSDEREVAEAATGEDASSPPPKTEAASDPQHPAASEGAAAAAASPPLLRCLVLTGFGGYDKVKLQSRPAAPPAPGPGQLTLRLRACGLNFADLMARQGLYDRLPPLPVTPGMEGAGVVIAVGEGVSDRKAGDRVMVLNRSGMWQEEVTVPSVQTFLIPEAMTFEEAAALLVNYITAYMVLFDFGNLQPGHSVLVHMAAGGVGMAAVQLCRTVENVTVFGTASASKHEALKENGVTHPIDYHTTDYVDEIKKISPKGVDIVMDPLGGSDTAKGYNLLKPMGKVVTYGMANLLTGPKRNLMALARTWWNQFSVTALQLLQANRAVCGFHLGYLDGEVELVSGVVARLLALYNQGHIKPHIDSVWPFEKVADAMKQMQEKKNVGKVLLVPGPEKEN

SEQ ID NO: 902978 - protein, 408 aa, Homo sapiens
MDQPSSCALSSGVPAMSDEREVAEAATGEDASSPPPKTEAASDPQHPAASEGAAAAAASPPLLRCLVLTGFGGYDKVKLQSRPAAPPAPGPGQLTLRLRACGLNFADLMARQGLYDRLPPLPVTPGMEGAGVVIAVGEGVSDRKAGDRVMVLNRSGMWQEEVTVPSVQTFLIPEAMTFEEAAALLVNYITAYMVLFDFGNLQPGHSVLVHMAAGGVGMAAVQLCRTVENVTVFGTASASKHEALKENGVTHPIDYHTTDYVDEIKKISPKGVDIVMDPLGGSDTAKGYNLLKPMGKVVTYGMANLLTGPKRNLMALARTWWNQFSVTALQLLQANRAVCGFHLGYLDGEVELVSGVVARLLALYNQGHIKPHIDSVWPFEKVADAMKQMQEKKNVGKVLLVPGPEKEN

SEQ ID NO: 902979 - protein, 147 aa, Homo sapiens
MTTSSGKKGALHCNLDDHDSVDKIVTQEYHTVNGHNCEVRKALSQQEMASASSSQRGRSGSGNFGGGRGGGFGGNDNFGRGGNFSGRGGFGGNRGGGGYGGSGDGYNGFGMMGGEMEQGSTEWDGQDLGHCNQNGDFLGREVTPSTH

SEQ ID NO: 902980 - protein, 408 aa, Homo sapiens; identical to SEQ ID NO: 902978

SEQ ID NO: 902981 - protein, 427 aa, Homo sapiens; identical to SEQ ID NO: 902977

SEQ ID NO: 902982 - protein, 427 aa, Homo sapiens; identical to SEQ ID NO: 902977

SEQ ID NO: 902983 - protein, 427 aa, Homo sapiens; identical to SEQ ID NO: 902977

SEQ ID NO: 902984 - protein, 427 aa, Homo sapiens; identical to SEQ ID NO: 902977

SEQ ID NO: 902985 - protein, 252 aa, Homo sapiens
MWQEEVTVPSVQTFLIPEAMTFEEAAALLVNYITAYMVLFDFGNLQPGHSVLVHMAAGGVGMAAVQLCRTVENVTVFGTASASKHEALKENGVTHPIDYHTTDYVDEIKKISPKGVDIVMDPLGGSDTAKGYNLLKPMGKVVTYGMANLLTGPKRNLMALARTWWNQFSVTALQLLQANRAVCGFHLGYLDGEVELVSGVVARLLALYNQGHIKPHIDSVWPFEKVADAMKQMQEKKNVGKVLLVPGPEKEN

SEQ ID NO: 902986 - protein, 427 aa, Homo sapiens; identical to SEQ ID NO: 902977

SEQ ID NO: 902987 - protein, 427 aa, Homo sapiens; identical to SEQ ID NO: 902977

SEQ ID NO: 902988 - protein, 123 aa, Homo sapiens
MFQPTVKHIGKVVTYGMANLLTGPKRNLMALARTWWNQFSVTALQLLQANRAVCGFHLGYLDGEVELVSGVVARLLALYNQGHIKPHIDSVWPFEKVADAMKQMQEKKNVGKVLLVPGPEKEN

SEQ ID NO: 902989 - protein, 118 aa, Homo sapiens
RLGSNNITMESAMDGNCGPKRNLMALARTWWNQFSVTALQLLQANRAVCGFHLGYLDGEVELVSGVVARLLALYNQGHIKPHIDSVWPFEKVADAMKQMQEKKNVGKVLLVPGPEKEN

SEQ ID NO: 902990 - protein, 194 aa, Homo sapiens
PPAGSRSRGSSRRVPPSPAVHSPSSCALSSGVPAMSDEREVAEAATGEDASSPPPKTEAASDPQHPAASEGAAAAAASPPLLRCLVLTGFGGYDKVKLQSRPAAPPAPGPGQLTLRLRACGLNFADLMARQGLYDRLPPLPVTPGMEGAGVVIAVGEGVSDRKAGDRVMVLNRSGMWQEEVTVPSVQTFLIPDL

SEQ ID NO: 902991 - protein, 134 aa, Homo sapiens
INQDLESRKEMTYRPLRRRLTQIKQKVDSLLKNLENIATEQSKQAVEMKNDKSEEETEQQLLKTDETNVKKVLLYSPVPSLFWWSWGFSPPQSHNTAKNLCMCHWVGQPQASWGGRAKTGALIVVCAMSRLYGG

SEQ ID NO: 902992 - protein, 287 aa, Homo sapiens
  misc_feature (280)..(280): Xaa can be any naturally occurring amino acid
  misc_feature (283)..(283): Xaa can be any naturally occurring amino acid
MDQPSSCALSSGVPAMSDEREVAEAATGEDASSPPPKTEAASDPQHPAASEGAAAAAASPPLLRCLVLTGFGGYDKVKLQSRPAAPPAPGPGQLTLRLRACGLNFADLMARQGLYDRLPPLPVTPGMEGAGVVIAVGEGVSDRKAGDRVMVLNRSGMWQEEVTVPSVQTFLIPEAMTFEEAAALLVNYITAYMVLFDFGNLQPGHSVLVHMAAGGVGMAAVQLCRTVENVTVFGTASASKHEALKENGVTHPIDYHTTDYVDEIKKISPKDGIALTLVVXCRXTLNM

SEQ ID NO: 902993 - protein, 92 aa, Homo sapiens
MVLNRSGMWQEEVTVPSVQTFLIPEAMTFEEAAALLVNYITAYMVLFDFGNLQPGHSVLVHMAAEVTGPLTLSPLTPPRFSSPFQSVDPLVP

SEQ ID NO: 902994 - protein, 427 aa, Homo sapiens; identical to SEQ ID NO: 902977

SEQ ID NO: 902995 - protein, 360 aa, Homo sapiens
PPAGSRSRGSSRRVPPSPAVHSPSSCALSSGVPAMSDEREVAEAATGEDASSPPPKTEAASDPQHPAASEGAAAAAASPPLLRCLVLTGFGGYDKVKLQSRPAAPPAPGPGQLTLRLRACGLNFADLMARQGLYDRLPPLPVTPGMEGAGVVIAVGEGVSDRKAGDRVMVLNRSGMWQEEVTVPSVQTFLIPEAMTFEEAAALLVNYITAYMVLFDFGNLQPGHSVLVHMAAGGVGMAAVQLCRTVENVTVFGTASASKHEALKENGVTHPIDYHTTDYVDEIKKISPKGVDIVMDPLGGSDTAKGYNLLKPMGKVVTYGPQTEPDGPGPDMVESVQRDSSAAAAGQPGCVWLPPGLPGW

SEQ ID NO: 902996 - protein, 427 aa, Homo sapiens; identical to SEQ ID NO: 902977

SEQ ID NO: 902997 - protein, 427 aa, Homo sapiens; identical to SEQ ID NO: 902977

SEQ ID NO: 902998 - protein, 281 aa, Homo sapiens
HFPPGKYRISCPGQESDAGDRVMVLNRSGMWQEEVTVPSVQTFLIPEAMTFEEAAALLVNYITAYMVLFDFGNLQPGHSVLVHMAAGGVGMAAVQLCRTVENVTVFGTASASKHEALKENGVTHPIDYHTTDYVDEIKKISPKGVDIVMDPLGGSDTAKGYNLLKPMGKVVTYGMANLLTGPKRNLMALARTWWNQFSVTALQLLQANRAVCGFHLGYLDGEVELVSGVVARLLALYNQGHIKPHIDSVWPFEKVADAMKQMQEKKNVGKVLLVPGPEKEN

SEQ ID NO: 902999 - protein, 191 aa, Homo sapiens [sequence omitted]

SEQ ID NO: 903000 - protein, 119 aa, Homo sapiens
HLEIHTIRMEAYYDGNRCGPKRNLMALARTWWNQFSVTALQLLQANRAVCGFHLGYLDGEVELVSGVVARLLALYNQGHIKPHIDSVWPFEKVADAMKQMQEKKNVGKVLLVPGPEKEN

SEQ ID NO: 903001 - protein, 129 aa, Homo sapiens
NSARGFLYWDQSKNPSTFPLQLGEALLPSQSREAAYQTQPKTLFTWVGRWSREVQSGMVRTWAIATKMGTSWVGRSLPLLTELGLGRVIASPPCCVPCAFTSASSFLPSLPRHLPKELKRQLRIWGQSL

SEQ ID NO: 903002 - protein, 191 aa, Homo sapiens [sequence omitted]

SEQ ID NO: 903003 - protein, 500 aa, Homo sapiens
MKCTAREWLRVTTVLFMARAIPAMVVPNATLLEKLLEKYMDEDGEWWIAKQRGKRAITDNDMQSILDLHNKLRSQVYPTASNMEYMTWDVELERSAESWAESCLWEHGPASLLPSIGQNLGAHWGRYRPPTFHVQSWYDEVKDFSYPYEHECNPYCPFRCSGPVCTHYTQVVWATSNRIGCAINLCHNMNIWGQIWPKAVYLVCNYSPKGNWWGHAPYKHGRPCSACPPSFGGGCRENLCYKEGSDRYYPPREEETNEIERQQSQVHDTHVRTRSDDSSRNEVISAQQMSQIVSCEVRLRDQCKGTTCNRYECPAGCLDSKAKVIGSVHYEMQSSICRAAIHYGIIDNDGGWVDITRQGRKHYFIKSNRNGIQTIGKYQSANSFTVSKVTVQAVTCETTVEQLCPFHKPASHCPRVYCPRNCMQANPHYARVIGTRVYSDLSSICRAAVHAGVVRNHGGYVDVMPVDKRKTYIASFQNGIFSESLQNPPGGKAFRVFAVV

SEQ ID NO: 903004 - protein, 425 aa, Homo sapiens
YLRHALILTAETWDVELERSAESWAESCLWEHGPASLLPSIGQNLGAHWGRYRPPTFHVQSWYDEVKDFSYPYEHECNPYCPFRCSGPVCTHYTQVVWATSNRIGCAINLCHNMNIWGQIWPKAVYLVCNYSPKGNWWGHAPYKHGRPCSACPPSFGGGCRENLCYKEGSDRYYPPREEETNEIERQQSQVHDTHVRTRSDDSSRNEVISAQQMSQIVSCEVRLRDQCKGTTCNRYECPAGCLDSKAKVIGSVHYEMQSSICRAAIHYGIIDNDGGWVDITRQGRKHYFIKSNRNGIQTIGKYQSANSFTVSKVTVQAVTCETTVEQLCPFHKPASHCPRVYCPRNCMQANPHYARVIGTRVYSDLSSICRAAVHAGVVRNHGGYVDVMPVDKRKTYIASFQNGIFSESLQNPPGGKAFRVFAVV

SEQ ID NO: 903005 - protein, 500 aa, Homo sapiens; identical to SEQ ID NO: 903003

SEQ ID NO: 903006 - protein, 500 aa, Homo sapiens; identical to SEQ ID NO: 903003

SEQ ID NO: 903007 - protein, 305 aa, Homo sapiens
  misc_feature (51)..(51): Xaa can be any naturally occurring amino acid
LNLLSLTEGSDRYYPPREEETNEIERQQSQVHDTHVRTRSDDSSRSKGQEXTRLCREWSGEVVTVLGGGGGGGGGGGGGVGGGGGWVWWGGQQMSQIVSCEVRLRDQCKGTTCNRYECPAGCLDSKAKVIGSVHYEMQSSICRAAIHYGIIDNDGGWVDITRQGRKHYFIKSNRNGIQTIGKYQSANSFTVSKVTVQAVTCETTVEQLCPFHKPASHCPRVYCPRNCMQANPHYARVIGTRVYSDLSSICRAAVHAGVVRNHGGYVDVMPVDKRKTYIASFQNGIFSESLQNPPGGKAFRVFAVV

SEQ ID NO: 903008 - protein, 281 aa, Homo sapiens
MKCTAREWLRVTTVLFMARAIPAMVVPNATLLEKLLEKYMDEDGEWWIAKQRGKRAITDNDMQSILDLHNKLRSQVYPTASNMEYMTWDVELERSAESWAESCLWEHGPASLLPSIGQNLGAHWGRYRPPTFHVQSWYDEVKDFSYPYEHECNPYCPFRCSGPVCTHYTQVVWATSNRIGCAINLCHNMNIWGQIWPKAVYLVCNYSPKGNWWGHAPYKHGRPCSACPPSFGGGCRENLCYKEGSDRYYPPREEETNEIERQQSQVHDTHVRTRSDDSSRN

SEQ ID NO: 903009 - protein, 167 aa, Homo sapiens
GPAASGRSSRLRAPSLARGHPPPSGESACARALLRGRASQSRCTRSQSVGPPGGGGGHRGERGGRSMAASLRLLGAASGLRYWSRRLRPAAGSFAAVCSRSVASKTPVGFIGLGNMGNPMAKNLMKHGYPLIIYDVFPDACKEFQDAGEQQVVSSPADVADYSGAGF

SEQ ID NO: 903010 - protein, 348 aa, Homo sapiens
ALPRQAAPLGSALLPSRVGTRPRAVRARARAPFSVGEPASPAAHARSLWALREAAEVTAGRGAGAAWQPPYGSSELPPVSGTGAGGCGRQPAALQRVVSSPADVAEKADRIITMLPTSINAIEAYSGANGILKKVKKGSLLIDSSTIDPAVSKELAKEVEKMGAVFMDAPVSGGVGAARSGNLTFMVGGVEDEFAAAQELLGCMGSNVVYCGAVGTGQAAKICNNMLLAISMIGTAEAMNLGIRLGLDPKLLAKILNMSSGRCWSSDTYNPVPGVMDGVPSANNYQGGFGTTLMAKDLGLAQDSATSTKSPILLGSLAHQIYRMMCAKGYSKKDFSSVFQFLREEETF

SEQ ID NO: 903011 - protein, 235 aa, Homo sapiens
MLPTSINAIEAYSGANGILKKVKKGSLLIDSSTIDPAVSKELAKEVEKMGAVFMDAPVSGGVGAARSGNLTFMVGGVEDEFAAAQELLGCMGSNVVYCGAVGTGQAAKICNNMLLAISMIGTAEAMNLGIRLGLDPKLLAKILNMSSGRCWSSDTYNPVPGVMDGVPSANNYQGGFGTTLMAKDLGLAQDSATSTKSPILLGSLAHQIYRMMCAKGYSKKDFSSVFQFLREEETF

SEQ ID NO: 903012 - protein, 163 aa, Homo sapiens [sequence omitted]

SEQ ID NO: 903013 - protein, 384 aa, Homo sapiens
GPAASGRSSRLRAPSLARGHPPPSGESACARALLRGRASQSRCTRSQSVGPPGGGGGHRGERGGRSMAASLRLLGAASGLRYWSRRLRPAAGSFAAVCSRSVASKTPVGFIGLGNMGNPMAKNLMKHGYPLIIYDVFPDACKEFQDAGEQVVSSPADVAEKADRIITMLPTSINAIEAYSGANGILKKVKKGSLLIDSSTIDPAVSKELAKEVEKMGAVFMDAPVSGGVGAARSGNLTFMVGGVEDEFAAAQELLGCMGSNVVYCGAVGTGQAAKICNNMLLAISMIGTAEAMNLGIRLGLDPKLLAVPGVMDGVPSANNYQGGFGTTLMAKDLGLAQDSATSTKSPILLGSLAHQIYRMMCAKGYSKKDFSSVFQFLREEETF

SEQ ID NO: 903014 - protein, 402 aa, Homo sapiens
GPAASGRSSRLRAPSLARGHPPPSGESACARALLRGRASQSRCTRSQSVGPPGGGGGHRGERGGRSMAASLRLLGAASGLRYWSRRLRPAAGSFAAVCSRSVASKTPVGFIGLGNMGNPMAKNLMKHGYPLIIYDVFPDACKEFQDAGEQVVSSPADVAEKADRIITMLPTSINAIEAYSGANGILKKVKKGSLLIDSSTIDPAVSKELAKEVEKMGAVFMDAPVSGGVGAARSGNLTFMVGGVEDEFAAAQELLGCMGSNVVYCGAVGTGQAAKICNNMLLAISMIGTAEAMNLGIRLGLDPKLLAKILNMSSGRCWSSDTYNPVPGVMDGVPSANNYQGGFGTTLMAKDLGLAQDSATSTKSPILLGSLAHQIYRMMCAKGYSKKDFSSVFQFLREEETF

SEQ ID NO: 903015 - protein, 352 aa, Homo sapiens
GPAASGRSSRLRAPSLARGHPPPSGESACARALLRGRASQSRCTRSQSVGPPGGGGGHRGERGGRSMAASLRLLGAASGLRYWSRRLRPAAGSFAAVCSRSVASKTPVGFIGLGNMGNPMAKNLMKHGYPLIIYDVFPDACKEFQDAGEQVVSSPADVAEKADRIITMLPTSINAIEAYSGANGILKKVKKGSLLIDSSTIDPAVSKELAKEVEKMGAVFMDAPVSGGVGAARSGNLTFMVGGVEDEFAAAQELLGCMGSNVVYCGAVGTGQAAKICNNMLLAISMIGTAEAMNLGIRLGLDPKLLAKILNMSSGRCWSSDTYNPVPGVMDGVPSANNYQGGFGTTLMAKVW

SEQ ID NO: 903016 - protein, 277 aa, Homo sapiens
GPAASGRSSRLRAPSLARGHPPPSGESACARALLRGRASQSRCTRSQSVGPPGGGGGHRGERGGRSMAASLRLLGAASGLRYWSRRLRPAAGSFAAVCSRSVASKTPVGFIGLGNMGNPMAKNLMKHGYPLIIYDVFPDACKEFQDAGEQVVSSPADVAEKADRIITMLPTSINAIEAYSGANGILKKVKKGSLLIDSSTIDPAVSKELAKEVEKMGAVFMDAPVSGGVGAARSGNLTFMVGGVEDEFAAAQELLGCMGSNVVYCGAVGTGQRRKRS

SEQ ID NO: 903017 - protein, 402 aa, Homo sapiens; identical to SEQ ID NO: 903014

SEQ ID NO: 903018 - protein, 215 aa, Homo sapiens
GPAASGRSSRLRAPSLARGHPPPSGESACARALLRGRASQSRCTRSQSVGPPGGGGGHRGERGGRSMAASLRLLGAASGLRYWSRRLRPAAGSFAAVCSRSVASKTPVGFIGLGNMGNPMAKNLMKHGYPLIIYDVFPDACKEFQDAGEQVVSSPADVAEKADRIITMLPTSINAIEAYSGANGILKKVKKGSLLIDSSTIDPAVSKELAKEVEV

SEQ ID NO: 903019 - protein, 194 aa, Homo sapiens
DKTSVFVQVHINITISFKNIFLEGGETRRQNRKLHRSSSYPYHKDTKLTNNYTGKSIFLRAKNQAAKICNNMLLAISMIGTAEAMNLGIRLGLDPKLLAKILNMSSGRCWSSDTYNPVPGVMDGVPSANNYQGGFGTTLMAKDLGLAQDSATSTKSPILLGSLAHQIYRMMCAKGYSKKDFSSVFQFLREEETF

SEQ ID NO: 903020 - protein, 350 aa, Homo sapiens
  misc_feature (151)..(152): Xaa can be any naturally occurring amino acid
  misc_feature (156)..(157): Xaa can be any naturally occurring amino acid
  misc_feature (162)..(162): Xaa can be any naturally occurring amino acid
  misc_feature (166)..(166): Xaa can be any naturally occurring amino acid
  misc_feature (169)..(173): Xaa can be any naturally occurring amino acid
  misc_feature (176)..(176): Xaa can be any naturally occurring amino acid
  misc_feature (179)..(180): Xaa can be any naturally occurring amino acid
  misc_feature (182)..(182): Xaa can be any naturally occurring amino acid
  misc_feature (187)..(188): Xaa can be any naturally occurring amino acid
  misc_feature (193)..(193): Xaa can be any naturally occurring amino acid
  misc_feature (198)..(199): Xaa can be any naturally occurring amino acid
  misc_feature (202)..(202): Xaa can be any naturally occurring amino acid
  misc_feature (206)..(206): Xaa can be any naturally occurring amino acid
  misc_feature (210)..(213): Xaa can be any naturally occurring amino acid
  misc_feature (215)..(215): Xaa can be any naturally occurring amino acid
  misc_feature (217)..(217): Xaa can be any naturally occurring amino acid
  misc_feature (219)..(219): Xaa can be any naturally occurring amino acid
  misc_feature (230)..(230): Xaa can be any naturally occurring amino acid
  misc_feature (232)..(235): Xaa can be any naturally occurring amino acid
  misc_feature (237)..(238): Xaa can be any naturally occurring amino acid
  misc_feature (240)..(240): Xaa can be any naturally occurring amino acid
  misc_feature (243)..(243): Xaa can be any naturally occurring amino acid
  misc_feature (245)..(249): Xaa can be any naturally occurring amino acid
  misc_feature (252)..(254): Xaa can be any naturally occurring amino acid
  misc_feature (256)..(256): Xaa can be any naturally occurring amino acid
  misc_feature (272)..(272): Xaa can be any naturally occurring amino acid
GPAASGRSSRLRAPSLARGHPPPSGESACARALLRGRASQSRCTRSQSVGPPGGGGGHRGERGGRSMAASLRLLGAASGLRYWSRRLRPAAGSFAAVCSRSVASKTPVGFIGLGNMGNPMAKNLMKHGYPLIIYDVFPDACKEFQDAGEQXXSGTXXEPHGXGGRXGRXXXXXPRXAGXXGXQRGGXXSGGDXAGGKXXQQXAGSXEEEXXXXSXEXWXEERAGPKTTGXKXXXXAXXGXGQXTXXXXXLEXXXAXPRRRRGGGRGNNTEGXGSGIGTRLCYQHKEPNPSWQSGPSDLQDDVCKGLLKERLLIRVPVPTRGGDLLSVPFGHGHCWEPNSVLEPPFSSLHK

SEQ ID NO: 903021 - protein, 279 aa, Homo sapiens
GPAASGRSSRLRAPSLARGHPPPSGESACARALLRGRASQSRCTRSQSVGPPGGGGGHRGERGGRSMAASLRLLGAASGLRYWSRRLRPAAGSFAAVCSRSVASKTPVGFIGLGNMGNPMAKNLMKHGYPLIIYDVFPDACKEFQDAGEQVVSSPADVAEKADRIITMLPTSINAIEAYSGANGILKKVKKGSLLIDSSTIDPAVSKELAKEVEKMGAVFMDAPVSGGVGAARSGNLTFMVGGVEDEFAAAQELLGCMGSNVVYCGAVGTGQCNTINLE

SEQ ID NO: 903022 - protein, 281 aa, Homo sapiens
MTCLAPTMSAELNVPIDPSAPACPEPGHKGMDYRDWVRRSYLELVTSNHHSVQALSWRKLYLSRAKLKASSRTSALLSGFAMVAMVEVQLETQYQYPRPLLIAFSACTTVLVAVHLFALLISTCILPNVEAVSNIHNLNSISESPHERMHPYIELAWGFSTVLGILLFLAEVVLLCWIKFLPRWGFAPGAPLPWWPPPNPWGPFAGTSSTRGLGQWAIAPWVLFAPRSIPFGCARVEVFHLFRGGALHTRTSQLCKHGFPIVCLPRKILGVRYTPVRDFVG

SEQ ID NO: 903023 - protein, 154 aa, Homo sapiens
MSGFDDPGIFYSDSFGGDAQADEGQARKSQLQRRFKEFLRQYRVGTDRTGFTFKYRDELKRHYNLGEYWIEVEMEDLASFDEDLADYLYKQPSRSYLELVTSNHHSVQALSWRKLYLSRAKLKASSRTSALLSGFAMDAMVEVQLETQTRYWYE

SEQ ID NO: 903024 - protein, 287 aa, Homo sapiens
APRPGHWATGHAATQSEREPSRAGRGQLRLAPTMSAELNVPIDPSAPACPEPGHKGMDYRDWVRRSYLELVTSNHHSVQALSWRKLYLSRAKLKASSRTSALLSGFAMVAMVEVQLETQYQYPRPLLIAFSACTTVLVAVHLFALLISTCILPNVEAVSNIHNLNSISESPHERMHPYIELAWGFSTVLGILLFLAEVVLLCWIKFLPVDARRQPGPPPGPGSHTGWQAALVSTIIMVPVGLIFVVFTIHFYRSLVRHKTERHNREIEELHKLKVQLDGHERSLQVL

SEQ ID NO: 903025 - protein, 287 aa, Homo sapiens; identical to SEQ ID NO: 903024

SEQ ID NO: 903026 - protein, 261 aa, Homo sapiens
MTCLAPTMSAELNVPIDPSAPACPEPGHKGMDYRDWVRRSYLELVTSNHHSVQALSWRKLYLSRAKLKASSRTSALLSGFAMVAMVEVQLETQYQYPRPLLIAFSACTTVLVAVHLFALLISTCILPNVEAVSNIHNLNSISESPHERMHPYIELAWGFSTVLGILLFLAEVVLLCWIKFLPVDARRQPGPPPGPGSHTGWQAALVSTIIMVPVGLIFVVFTIHFYRSLVRHKTERHNREIEELHKLKVQLDGHERSLQVL

SEQ ID NO: 903027 - protein, 287 aa, Homo sapiens; identical to SEQ ID NO: 903024

SEQ ID NO: 903028 - protein, 261 aa, Homo sapiens; identical to SEQ ID NO: 903026

SEQ ID NO: 903029 - protein, 287 aa, Homo sapiens; identical to SEQ ID NO: 903024

SEQ ID NO: 903030 - protein, 287 aa, Homo sapiens; identical to SEQ ID NO: 903024

SEQ ID NO: 903031 - protein, 287 aa, Homo sapiens; identical to SEQ ID NO: 903024

SEQ ID NO: 903032 - protein, 287 aa, Homo sapiens; identical to SEQ ID NO: 903024

SEQ ID NO: 903033 - protein, 656 aa, Homo sapiens
MEELDGEPTVTLIPGVNSKKNQMYFDWGPGEMLVCETSFNKKEKSEMVPSCPFIYIIRKDVDVYSQILRKLFNESHGIFLGLQRIDEELTGKSRKSQLVRVSKNYRSVIRACMEEMHQVAIAAKDPANGRQFSSQVSILSAMELIWNLCEILFIEVAPAGPLLLHLLDWVRLHVCEVDSLSADVLGSENPSKHDSFWNLVTILVLQGRLDEARQMLSKEADASPASAGICRIMGDLMRTMPILSPGNTQTLTELELKWQHWHEECERYLQDSTFATSPHLESLLKIMLGDEAALLEQKELLSNWYHFLVTRLLYSNPTVKPIDLHYYAQSSLDLFLGGESSPEPLDNILLAAFEFDIHQVIKECSIALSNWWFVAHLTDLLDHCKLLQSHNLYFGSNMREFLLLEYASGLFAHPSLWQLGVDYFDYCPELGRVSLELHIERIPLNTEQKALKVLRICEQRQMTEQVRSICKILAMKAVRNNRLGSALSWSIRAKDAAFATLVSDRFLRDYCERGCFSDLDLIDNLGPAMMLSDRLTFLGKYREFHRMYGEKRFADAASLLLSLMTSRIAPRSFWMTLLTDALPLLEQKQVIFSAEQTYELMRCLEDLTSRRPVHGESDTEQLQDDDIETTKVEMLRLSLARNLARAIIREGSLEGS

SEQ ID NO: 903034 - protein, 734 aa, Homo sapiens
MEELDGEPTVTLIPGVNSKKNQMYFDWGPGEMLVCETSFNKKEKSEMVPSCPFIYIIRKDVDVYSQILRKLFNESHGIFLGLQRIDEELTGKSRKSQLVRVSKNYRSVIRACMEEMHQVAIAAKDPANGRQFSSQVSILSAMELIWNLCEILFIEVAPAGPLLLHLLDWVRLHVCEVDSLSADVLGSENPSKHDSFWNLVTILVLQGRLDEARQMLSKEADASPASAGICRIMGDLMRTMPILSPGNTQTLTELELKWQHWHEECERYLQDSTFATSPHLESLLKVWEAVQIASMLASYGGCGIQCSSGRSLVLLGEGCLSLCRDGESFQTSGNPVPLAEEQEHYGEGTPERRTEFSTNVSPQIMLGDEAALLEQKELLSNWYHFLVTRLLYSNPTVKPIDLHYYAQSSLDLFLGGESSPEPLDNILLAAFEFDIHQVIKECSIALSNWWFVAHLTDLLDHCKLLQSHNLYFGSNMREFLLLEYASGLFAHPSLWQLGVDYFDYCPELGRVSLELHIERIPLNTEQKALKVLRICEQRQMTEQVRSICKILAMKAVRNNRLGSALSWSIRAKDAAFATLVSDRFLRDYCERGCFSDLDLIDNLGPAMMLSDRLTFLGKYREFHRMYGEKRFADAASLLLSLMTSRIAPRSFWMTLLTDALPLLEQKQVIFSAEQTYELMRCLEDLTSRRPVHGESDTEQLQDDDIETTKVEMLRLSLARNLARAIIREGSLEGS

SEQ ID NO: 903035 - protein, 367 aa, Homo sapiens
MEELDGEPTVTLIPGVNSKKNQMYFDWGPGEMLVCETSFNKKEKSEMVPSCPFIYIIRKDVDVYSQILRKLFNESHGIFLGLQRIDEELTGKSRKSQLVRVSKNYRSVIRACMEEMHQVAIAAKDPANGRQFSSQVSILSAMELIWNLCEILFIEVAPAGPLLLHLLDWVRLHVCEVDSLSADVLGSENPSKHDSFWNLVTILVLQGRLDEARQMLSKEADASPASAGICRIMGDLMRTMPILSPGNTQTLTELELKWQHWHEECERYLQDSTFATSPHLESLLKIMLGDEAALLEQKELLSNWYHFLVTRLLYSNPTVKPIDLHYYAQSSLDLFLGGESSPEPLDNILLAAFEFDIHQVIKECSFL

SEQ ID NO: 903036 - protein, 630 aa, Homo sapiens [sequence omitted]

SEQ ID NO: 903037 - protein, 634 aa, Homo sapiens
MYFDWGPGEMLVCETSFNKKEKSEMVPSCPFIYIIRKDVDVYSQILRKLFNESHGIFLGLQRIDEELTGKSRKSQLVRVSKNYRSVIRACMEEMHQVAIAAKDPANGRQFSSQVSILSAMELIWNLCEILFIEVAPAGPLLLHLLDWVRLHVCEVDSLSADVLGSENPSKHDSFWNLVTILVLQGRLDEARQMLSKEADASPASAGICRIMGDLMRTMPILSPGNTQTLTELELKWQHWHEECERYLQDSTFATSPHLESLLKIMLGDEAALLEQKELLSNWYHFLVTRLLYSNPTVKPIDLHYYAQSSLDLFLGGESSPEPLDNILLAAFEFDIHQVIKECSIALSNWWFVAHLTDLLDHCKLLQSHNLYFGSNMREFLLLEYASGLFAHPSLWQLGVDYFDYCPELGRVSLELHIERIPLNTEQKALKVLRICEQRQMTEQVRSICKILAMKAVRNNRLGSALSWSIRAKDAAFATLVSDRFLRDYCERGCFSDLDLIDNLGPAMMLSDRLTFLGKYREFHRMYGEKRFADAASLLLSLMTSRIAPRSFWMTLLTDALPLLEQKQVIFSAEQTYELMRCLEDLTSRRPVHGESDTEQLQDDDIETTKVEMLRLSLARNLARAIIREGSLEGS

SEQ ID NO: 903038 - protein, 610 aa, Homo sapiens
MVPSCPFIYIIRKDVDVYSQILRKLFNESHGIFLGLQRIDEELTGKSRKSQLVRVSKNYRSVIRACMEEMHQVAIAAKDPANGRQFSSQVSILSAMELIWNLCEILFIEVAPAGPLLLHLLDWVRLHVCEVDSLSADVLGSENPSKHDSFWNLVTILVLQGRLDEARQMLSKEADASPASAGICRIMGDLMRTMPILSPGNTQTLTELELKWQHWHEECERYLQDSTFATSPHLESLLKIMLGDEAALLEQKELLSNWYHFLVTRLLYSNPTVKPIDLHYYAQSSLDLFLGGESSPEPLDNILLAAFEFDIHQVIKECSIALSNWWFVAHLTDLLDHCKLLQSHNLYFGSNMREFLLLEYASGLFAHPSLWQLGVDYFDYCPELGRVSLELHIERIPLNTEQKALKVLRICEQRQMTEQVRSICKILAMKAVRNNRLGSALSWSIRAKDAAFATLVSDRFLRDYCERGCFSDLDLIDNLGPAMMLSDRLTFLGKYREFHRMYGEKRFADAASLLLSLMTSRIAPRSFWMTLLTDALPLLEQKQVIFSAEQTYELMRCLEDLTSRRPVHGESDTEQLQDDDIETTKVEMLRLSLARNLARAIIREGSLEGS

SEQ ID NO: 903039 - protein, 649 aa, Homo sapiens
MEELDGEPTVTLIPGVNSKKNQMYFDWGPGEMLVCETSFNKKEKSEMVPSCPFIYIIRKDVDVYSQILRKLFNESHGIFLGLQRIDEELTGKSRKSQLVRVSKNYRSVIRACMEEMHQVAIAAKDPANGRQFSSQVSILSAMELIWNLCEILFIEVAPAGPLLLHLLDWVRLHVCEVDSLSADVLGSENPSKHDSFWNLGRLDEARQMLSKEADASPASAGICRIMGDLMRTMPILSPGNTQTLTELELKWQHWHEECERYLQDSTFATSPHLESLLKIMLGDEAALLEQKELLSNWYHFLVTRLLYSNPTVKPIDLHYYAQSSLDLFLGGESSPEPLDNILLAAFEFDIHQVIKECSIALSNWWFVAHLTDLLDHCKLLQSHNLYFGSNMREFLLLEYASGLFAHPSLWQLGVDYFDYCPELGRVSLELHIERIPLNTEQKALKVLRICEQRQMTEQVRSICKILAMKAVRNNRLGSALSWSIRAKDAAFATLVSDRFLRDYCERGCFSDLDLIDNLGPAMMLSDRLTFLGKYREFHRMYGEKRFADAASLLLSLMTSRIAPRSFWMTLLTDALPLLEQKQVIFSAEQTYELMRCLEDLTSRRPVHGESDTEQLQDDDIETTKVEMLRLSLARNLARAIIREGSLEGS

SEQ ID NO: 903040 - protein, 488 aa, Homo sapiens
MAASSAARSPFCQQWSSSGTCVRFFLLKWPQVTILVLQGRLDEARQMLSKEADASPASAGICRIMGDLMRTMPILSPGNTQTLTELELKWQHWHEECERYLQDSTFATSPHLESLLKIMLGDEAALLEQKELLSNWYHFLVTRLLYSNPTVKPIDLHYYAQSSLDLFLGGESSPEPLDNILLAAFEFDIHQVIKECSIALSNWWFVAHLTDLLDHCKLLQSHNLYFGSNMREFLLLEYASGLFAHPSLWQLGVDYFDYCPELGRVSLELHIERIPLNTEQKALKVLRICEQRQMTEQVRSICKILAMKAVRNNRLGSALSWSIRAKDAAFATLVSDRFLRDYCERGCFSDLDLIDNLGPAMMLSDRLTFLGKYREFHRMYGEKRFADAASLLLSLMTSRIAPRSFWMTLLTDALPLLEQKQVIFSAEQTYELMRCLEDLTSRRPVHGESDTEQLQDDDIETTKVEMLRLSLARNLARAIIREGSLEGS

SEQ ID NO: 903041 - protein, 367 aa, Homo sapiens; identical to SEQ ID NO: 903035

SEQ ID NO: 903042 - protein, 616 aa, Homo sapiens
MEELDGEPTVTLIPGVNSKKNQMYFDWGPGEMLVCETSFNKKEKSEMVPSCPFIYIIRKDVDVYSQILRKLFNESHGIFLGLQRIDEELTGKSRKSQLVRVSKNYRSVIRACMEEMHQVAIAAKDPANGRQFSSQVSILSAMELIWNLCEILFIEVAPAGPLLLHLLDWVRLHVCEVDSLSADVLGSENPSKHDSFWNLIMLGDEAALLEQKELLSNWYHFLVTRLLYSNPTVKPIDLHYYAQSSLDLFLGGESSPEPLDNILLAAFEFDIHQVIKECSIALSNWWFVAHLTDLLDHCKLLQSHNLYFGSNMREFLLLEYASGLFAHPSLWQLGVDYFDYCPELGRVSLELHIERIPLNTEQKALKVLRICEQRQMTEQGELALLPAYCLWDAGVREILRSHFMPTPAILLLTSHTGDVGLWTPRVRSICKILAMKAVRNNRLGSALSWSIRAKDAAFATLVSDRFLRDYCERGCFSDLDLIDNLGPAMMLSDRLTFLGKYREFHRMYGEKRFADAASLLLSLMTSRIAPRSFWMTLLTDALPLLEQKQVIFSAEQTYELMRCLEDLTSRRPVHGESDTEQLQDDDIETTKVEMLRLSLARNLARAIIREGSLEGS

SEQ ID NO: 903043 - protein, 259 aa, Homo sapiens
MREFLLLEYASGLFAHPSLWQLGVDYFDYCPELGRVSLELHIERIPLNTEQKALKVLRICEQRQMTEQVRSICKILAMKAVRNNRLGSALSWSIRAKDAAFATLVSDRFLRDYCERGCFSDLDLIDNLGPAMMLSDRLTFLGKYREFHRMYGEKRFADAASLLLSLMTSRIAPRSFWMTLLTDALPLLEQKQVIFSAEQTYELMRCLEDLTSRRPVHGESDTEQLQDDDIETTKVEMLRLSLARNLARAIIREGSLEGS

SEQ ID NO: 903044 - protein, 259 aa, Homo sapiens; identical to SEQ ID NO: 903043

SEQ ID NO: 903045 - protein, 182 aa, Homo sapiens [sequence omitted]

SEQ ID NO: 903046 - protein, 42 aa, Homo sapiens
MKAVRNNRLGSALSWSIRAKDAAFATLVSDRWVPLVLASQGL

SEQ ID NO: 903047 - protein, 656 aa, Homo sapiens; identical to SEQ ID NO: 903033

SEQ ID NO: 903048 - protein, 700 aa, Homo sapiens
MEELDGEPTVTLIPGVNSKKNQMYFDWGPGEMLVCETSFNKKEKSEMVPSCPFIYIIRKDVDVYSQILRKLFNESHGIFLGLQRIDEELTGKSRKSQLVRVSKNYRSVIRACMEEMHQVAIAAKDPANGRQFSSQVSILSAMELIWNLCEILFIEVAPAGPLLLHLLDWVRLHVCEVDSLSADVLGSENPSKHDSFWNLVTILVLQGRLDEARQMLSKEADASPASAGICRIMGDLMRTMPILSPGNTQTLTELELKWQHWHEECERYLQDSTFATSPHLESLLKIMLGDEAALLEQKELLSNWYHFLVTRLLYSNPTVKPIDLHYYAQSSLDLFLGGESSPEPLDNILLAAFEFDIHQVIKECSFLLKTGQFLAVWQEETAGVHFTGSWARCRQFPGALQVLQKYRANIALSNWWFVAHLTDLLDHCKLLQSHNLYFGSNMREFLLLEYASGLFAHPSLWQLGVDYFDYCPELGRVSLELHIERIPLNTEQKALKVLRICEQRQMTEQVRSICKILAMKAVRNNRLGSALSWSIRAKDAAFATLVSDRFLRDYCERGCFSDLDLIDNLGPAMMLSDRLTFLGKYREFHRMYGEKRFADAASLLLSLMTSRIAPRSFWMTLLTDALPLLEQKQVIFSAEQTYELMRCLEDLTSRRPVHGESDTEQLQDDDIETTKVEMLRLSLARNLARAIIREGSLEGS

SEQ ID NO: 903049 - protein, 622 aa, Homo sapiens
MEELDGEPTVTLIPGVNSKKNQMYFDWGPGEMLVCETSFNKKEKSEMVPSCPFIYIIRKDVDVYSQILRKLFNESHGIFLGLQRIDEELTGKSRKSQLVRVSKNYRSVIRACMEEMHQVAIAAKDPANGRQFSSQVSILSAMELIWNLCEILFIEVAPAGPLLLHLLDWVRLHVCEVDSLSADVLGSENPSKHDSFWNLVTILVLQGRLDEARQMLSKEADASPASAGICRIMGDLMRTMPILSPGNTQTLTELELKWQHWHEECERYLQDSTFATSPHLESLLKIMLGDEAALLEQKELLSNWYHFLVTRLLYSNPTVKPIDLHYYAQSSLDLFLGGESSPEPLDNILLAAFEFDIHQVIKECSIALSNWWFVAHLTDLLDHCKLLQSHNLYFGSNMREFLLLEYASGLFAHPSLWQLGVDYFDYCPELGRVSLELHIERIPLNTEQKALKVLRICEQRQMTEQVRSICKILAMKAVRNNRLGSALSWSIRAKDAAFATLVSDRFLRDYCERGCFSDLDLIDNLGPAMMLSDRLTFLGKYREFHRMYGEKRFADAASLLLSLMTSRIAPRSFWMTLLTDALPLLEQKQDDDIETTKVEMLRLSLARNLARAIIREGSLEGS

SEQ ID NO: 903050 - protein, 610 aa, Homo sapiens; identical to SEQ ID NO: 903038

SEQ ID NO: 903051 - protein, 611 aa, Homo sapiens
MEELDGEPTVTLIPGVNSKKNQMYFDWGPGEMLVCETSFNKKEKSEMVPSCPFIYIIRKDVDVYSQILRKLFNESHGIFLGLQRIDEELTGKSRKSQLVRVSKNYRSVIRACMEEMHQVAIAAKDPANGRQFSSQVSILSAMELIWNLCEILFIEVAPAGPLLLHLLDWVRLHVCEVDSLSADVLGSENPSKHDSFWNLPGNTQTLTELELKWQHWHEECERYLQDSTFATSPHLESLLKIMLGDEAALLEQKELLSNWYHFLVTRLLYSNPTVKPIDLHYYAQSSLDLFLGGESSPEPLDNILLAAFEFDIHQVIKECSIALSNWWFVAHLTDLLDHCKLLQSHNLYFGSNMREFLLLEYASGLFAHPSLWQLGVDYFDYCPELGRVSLELHIERIPLNTEQKALKVLRICEQRQMTEQVRSICKILAMKAVRNNRLGSALSWSIRAKDAAFATLVSDRFLRDYCERGCFSDLDLIDNLGPAMMLSDRLTFLGKYREFHRMYGEKRFADAASLLLSLMTSRIAPRSFWMTLLTDALPLLEQKQVIFSAEQTYELMRCLEDLTSRRPVHGESDTEQLQDDDIETTKVEMLRLSLARNLARAIIREGSLEGS

SEQ ID NO: 903052 - protein, 426 aa, Homo sapiens
MEELDGEPTVTLIPGVNSKKNQMYFDWGPGEMLVCETSFNKKEKSEMVPSCPFIYIIRKDVDVYSQILRKLFNESHGIFLGLQRIDEELTGKSRKSQLVRVSKNYRSVIRACMEEMHQVAIAAKDPANGRQFSSQVSILSAMELIWNLCEILFIEVAPAGPLLLHLLDWVRLHVCEVDSLSADVLGSENPSKHDSFWNLVTILVLQGRLDEARQMLSKEADASPASAGICRIMGDLMRTMPILSPGNTQTLTELELKWQHWHEECERYLQDSTFATSPHLESLLKIMLGDEAALLEQKELLSNWYHFLVTRLLYSNPTVKPIDLHYYAQSSLDLFLGGESSPEPLDNILLAAFEFDIHQVIKECSIALSNWWFVAHLTDLLDHCKLLQSHNLYFGSNMREFLLLEYASGLFAHPSLWLPGGPAVWY

SEQ ID NO: 903053 - protein, 565 aa, Homo sapiens
MVPSCPFIYIIRKDVDVYSQILRKLFNESHGIFLGLQRIDEELTGKSRKSQLVRVSKNYRSVIRACMEEMHQVAIAAKDPANGRQFSSQVSILSAMELIWNLCEILFIEVAPAGPLLLHLLDWVRLHVCEVDSLSADVLGSENPSKHDSFWNLPGNTQTLTELELKWQHWHEECERYLQDSTFATSPHLESLLKIMLGDEAALLEQKELLSNWYHFLVTRLLYSNPTVKPIDLHYYAQSSLDLFLGGESSPEPLDNILLAAFEFDIHQVIKECSIALSNWWFVAHLTDLLDHCKLLQSHNLYFGSNMREFLLLEYASGLFAHPSLWQLGVDYFDYCPELGRVSLELHIERIPLNTEQKALKVLRICEQRQMTEQVRSICKILAMKAVRNNRLGSALSWSIRAKDAAFATLVSDRFLRDYCERGCFSDLDLIDNLGPAMMLSDRLTFLGKYREFHRMYGEKRFADAASLLLSLMTSRIAPRSFWMTLLTDALPLLEQKQVIFSAEQTYELMRCLEDLTSRRPVHGESDTEQLQDDDIETTKVEMLRLSLARNLARAIIREGSLEGS

SEQ ID NO: 903054 - protein, 259 aa, Homo sapiens; identical to SEQ ID NO: 903043

SEQ ID NO: 903055 - protein, 259 aa, Homo sapiens; identical to SEQ ID NO: 903043

SEQ ID NO: 903056 - protein, 136 aa, Homo sapiens
KSPALWSGWSEVFLLLFRARVTFVGVTWAIWGNMQVTQCSCFAIGKYREFHRMYGEKRFADAASLLLSLMTSRIAPRSFWMTLLTDALPLLEQKQVKVAAAVVFFACQSLLELSCIAVADVRVSSFVVLPVRVYSP

SEQ ID NO: 903057 - protein, 281 aa, Homo sapiens
MVADPKKKKLENGRTRGGHLAGVLGTAGAVTHAVACLASITWEGAGFHSWGLGTGFGFPAPPARPRPFPRPTITTASGRHPHLPPVPSPPHYTAHQPLQGSHGLSGEQFSPGLSSQLPPPTHAYTHALLDKANIPLSRTLHLLRPHSLGGGDIALWAFGLGAPSLLLHCSLWLPIVGPGRVPLALKGAQAPSHPGTPYSTALAAAGVANGGGCWPPGFPQPNCLCHHVGLTFHPSPTSLVPVLGWTAPFGYRKAGGVSPLLPLHCGHSPLALRLGSEYILW

SEQ ID NO: 903058 - protein, 281 aa, Homo sapiens; identical to SEQ ID NO: 903057

SEQ ID NO: 903059 - protein, 355 aa, Homo sapiens
MSESSSKSSQPLASKQEKDGTEKRGRGRPAQCSLRRSPAKCQHLRDLVGLTKGKQKQGVLPRPWKTTTTPGRKPMVADPKKKKLENGRTRGGHLAGVLGTAGAVTHAVACLASITWEGAGFHSWGLGTGFGFPAPPARPRPFPRPTITTASGRHPHLPPVPSPPHYTAHQPLQGSHGLSGEQFSPGLSSQLPPPTHAYTHALLDKANIPLSRTLHLLRPHSLGGGDIALWAFGLGAPSLLLHCSLWLPIVGPGRVPLALKGAQAPSHPGTPYSTALAAAGVANGGGCWPPGFPQPNCLCHHVGLTFHPSPTSLVPVLGWTAPFGYRKAGGVSPLLPLHCGHSPLALRLGSEYILW

SEQ ID NO: 903060 - protein, 148 aa, Homo sapiens
MFHSSTSVIAAATSAKCSSSLPPVLPTIPSPKILFVGKRGWGMAGWVTDYPSPREGGALPLGCCSRVSKGARIDHKGCRGHLLPLFCWGGVAMICPSLGLPLWFPICSYLNKKNILFWNKTKRREKHNKNTQNNTKQNTQRFYCVGKK

SEQ ID NO: 903061 - protein, 235 aa, Homo sapiens
MSESSSKSSQPLASKQEKDGTEKRGRGRPAQCSLRRSPAKCQHLRDLVGLTKGKQKQGVLPRPWKTTTTPGRKPMVADPKKKKLENGRTRGGHLAGVLGTAGAVTHAVACLASITWEGAGFHSWGLGTGFGFPAPPARPQRRHPGKDRTHIRIRTNTPEPRDANSYNRCKDHMEHAATQRVDDTNELAEQTTEDSKNTLTLTGRNEQKTDTHKTIGTEPHSKTATASQRKALTDP

SEQ ID NO: 903062 - protein, 289 aa, Homo sapiens
MFHSSTSVIAAATSAKCSSSLPPVLPTIPSPKILFVGKRGWGMAGWVTDYPSPREGGALPLGCCSRVSKGARIDHKGCRGHLLPLFCWGGVAMICPSLGLPLWFPICSYLNKKNILFWRKKKKKTKKKGGHSKKSTPQRGPKRNADTEIYDTKAAHNKEPTNQTATDEGTTLYKSAEKLGDNTSAPPGQISGRTAARPNPTCSDAPHNAHPHTPINEKMLKTDRTKKRANDRPTLTSRATNTGDTNTTATNTRLARRASTPEMGNHRKREGRITAERNLNPTDEATTGE

SEQ ID NO: 903063 - protein, 201 aa, Homo sapiens
MFHSSTSVIAAATSAKCSSSLPPVLPTIPSPKILFVGKRGWGMAGWVTDYPSPREGGALPLGCCSRVSKGARIDHKGCRGHLLPLFCWGGVAMICPSLGLPLWFPICSYLNKKNILFWRKKKKKTKKKKKTRGPSYCRAGGNKKANLETGTRGPNTPVVPWNPIFFGHQGGTNSAGPPKKRGRQKLQNPGLTLVLELREKH

SEQ ID NO: 903064 - protein, 161 aa, Homo sapiens
MFHSSTSVIAAATSAKCSSSLPPVLPTIPSPKILFVGKRGWGMAGWVTDYPSPREGGALPLGCCSRVSKGARIDHKGCRGHLLPLFCWGGVAMICPSLGLPLWFPICSYLNKKNILFWTEHNTITQKNPGTFARGTCFRCTSTSSDHSDKGLRPKGVFDTH

SEQ ID NO: 903065 - protein, 65 aa, Homo sapiens
MVGRGGTRRLIWKRAPGAPTRRWFRGTPFFLVTRGGQTRRAPPKREGGKNCKTPGEPGFRAARKT

SEQ ID NO: 903066 - protein, 281 aa, Homo sapiens; identical to SEQ ID NO: 903057

SEQ ID NO: 903067 - protein, 256 aa, Homo sapiens
MVADPKKKKLENGRTRGGHLAGVLGTAGAVTHAVACLASITWEGAGFHSWGLGTGFGFPAPPARPHYTAHQPLQGSHGLSGEQFSPGLSSQLPPPTHAYTHALLDKANIPLSRTLHLLRPHSLGGGDIALWAFGLGAPSLLLHCSLWLPIVGPGRVPLALKGAQAPSHPGTPYSTALAAAGVANGGGCWPPGFPQPNCLCHHVGLTFHPSPTSLVPVLGWTAPFGYRKAGGVSPLLPLHCGHSPLALRLGSEYILW

SEQ ID NO: 903068 - protein, 281 aa, Homo sapiens; identical to SEQ ID NO: 903057

SEQ ID NO: 903069 - protein, 149 aa, Homo sapiens
MLLPALHPSLGREQASILGDWGQALASPLPQRAPLHCSLWLPIVGPGRVPLALKGAQAPSHPGTPYSTALAAAGVANGGGCWPPGFPQPNCLCHHVGLTFHPSPTSLVPVLGWTAPFGYRKAGGVSPLLPLHCGHSPLALRLGSEYILW

SEQ ID NO: 903070 - protein, 281 aa, Homo sapiens; identical to SEQ ID NO: 903057

SEQ ID NO: 903071 - protein, 104 aa, Homo sapiens
MTLRSRYKQPIDNTTTATSKDHRTTTPKKVSEGKEGDSEGKKKLTNTQDTGKRARPKKRSNNKEANRQRERATQPRHHEEQHNTRETKDNNEQTKTIKTTHRRH

SEQ ID NO: 903072 - protein, 281 aa, Homo sapiens; identical to SEQ ID NO: 903057

SEQ ID NO: 903073 - protein, 166 aa, Homo sapiens
MQPPVSPGTALVGSQKEPSEVPTPKRPRGPDQREAKTRCAAKTLGERTDTRRASRRSPRHGRSSDPCCCLPCIPHLGGSKLPFMGTGDRLWLPRSPNAPPPLPQAHHHHRLWPPPPSSTCALTTTLHSTPAAAGLPWAEWGAVFPWPQFPAPPAHPRIHTCPPGQG

SEQ ID NO: 903074 - protein, 31 aa, Homo sapiens
MAGTSIGRPAQNAWPRKEATRKLNEAVACTQ

SEQ ID NO: 903075 - protein, 235 aa, Homo sapiens
MSESSSKSSQPLASKQEKDGTEKRGRGRPAQCSLRRSPAKCQHLRDLVGLTKGKQKQGVLPRPRKTTTTPGRKPMVADPKKKKLENGRTRGGHLAGVLGTAGAVTHAVACLASITWEGAGFHSWGLGTGFGFPAPPARPQRRHPGKDRTHIRIRTNTPEPRDANSYNRCKDHMEHAATQRVDDTNELAEQTTEDSKNTLTLTGRNEQKTDTHKTIGTEPHSKTATASQRKALTDP

SEQ ID NO: 903076 - protein, 155 aa, Homo sapiens
MSESSSKSSQPLASKQEKDGTEKRGRGRPAQCSLRRSPAKCQHLRDLVGLTKGKQKQGVLPRPWKTTTTPGRKPMVADPKKKKLENGRTRGGHLAGVLGTAGAVTHAVACLASITWEGAGFHSWGLGTGFGFPAPPARPQRASTSRDTLHRLAQP

SEQ ID NO: 903077 - protein, 355 aa, Homo sapiens; identical to SEQ ID NO: 903059

SEQ ID NO: 903078 - protein, 355 aa, Homo sapiens; identical to SEQ ID NO: 903059

SEQ ID NO: 903079 - protein, 123 aa, Homo sapiens
VGTSPFDSPFLFYFLLGLYFAGRGRREGAFFLSPAPARARFPAPRRAWVPPLAGSGAGCTRVAVHAVGVRCFPAPAGAACAPPPARPGPGSRRPACNGRAQTLAESPSGRVWSLMPRGFSPSR

SEQ ID NO: 903080 - protein, 281 aa, Homo sapiens; identical to SEQ ID NO: 903057

SEQ ID NO: 903081 - protein, 154 aa, Homo sapiens
MFHSSTSVIAAATSAKCSSSLPPVLPTIPSPKILFVGKRGWGMAGWVTDYPSPREGGALPLGCCSRVSKGARIDHKGCRGHLLPLFCWGGVAMICPSLGLPLWFPICSYLNKKNILFWTTKKKLRELFGGEQALMAGIVSDTFVKGMRPRREKT

SEQ ID NO: 903082 - protein, 190 aa, Homo sapiens
MFHSSTSVIAAATSAKCSSSLPPVLPTIPSPKILFVGKRGWGMAGWVTDYPSPREGGALPLGCCSRVSKGARIDHKGCRGHLLPLFCWGGVAMICPSLGLPLWFPICSYLNKKNILFWKKKKMSDQTHTATFCWAHSRGPLRKKLCKQPILGLERAGGPIGVLRRHVGQNGVPREKTRGQTKAAGISPAL

SEQ ID NO: 903083 - protein, 58 aa, Homo sapiens
MANLETGTRGPNTPVVPWNPIFFGHQGGTNSAGPPKKRGRQKLQNPGLTLVLELREKH

SEQ ID NO: 903084 - protein, 355 aa, Homo sapiens; identical to SEQ ID NO: 903059

SEQ ID NO: 903085 - protein, 114 aa, Homo sapiens
MGTGDRLWLPRSPNAPPPLPQAHHHHRLWPPPPSSTCALTTTSRCGQWRGVLAPRIPPAKLSLSPRGAHFSSFPNFPSPRTRLDSPLRLQEGRRGESPTPSSLWPQPPCPPPGI

SEQ ID NO: 903086 - protein, 355 aa, Homo sapiens
MSESSSKSSQPLASKQEKDGTEKRGRGRPAQCSLRRSPAKCQHLRDLVGLTKGKQKQGVLPRPRKTTTTPGRKPMVADPKKKKLENGRTRGGHLAGVLGTAGAVTHAVACLASITWEGAGFHSWGLGTGFGFPAPPARPRPFPRPTITTASGRHPHLPPVPSPPHYTAHQPLQGSHGLSGEQFSPGLSSQLPPPTHAYTHALLDKANIPLSRTLHLLRPHSLGGGDIALWAFGLGAPSLLLHCSLWLPIVGPGRVPLALKGAQAPSHPGTPYSTALAAAGVANGGGCWPPGFPQPNCLCHHVGLTFHPSPTSLVPVLGWTAPFGYRKAGGVSPLLPLHCGHSPLALRLGSEYILW

SEQ ID NO: 903087 - protein, 204 aa, Homo sapiens
MEENKKNKKGTNQQKTQKEKTLHDTHGMNAKTKTKGTRTKNTKNKQKTQRTQQKKTNREKKRKNNQKQKTEKKKKKEKKYIAEVSEAGVLHCSLWLPIVGPGRVPLALKGAQAPSHPGTPYSTALAAAGVANGGGCWPPGFPQPNCLCHHVGLTFHPSPTSLVPVLGWTAPFGYRKAGGVSPLLPLHCGHSPLALRLGSEYILW

SEQ ID NO: 903088 - protein, 58 aa, Homo sapiens; identical to SEQ ID NO: 903083

SEQ ID NO: 903089 - protein, 231 aa, Homo sapiens
  misc_feature (162)..(162): Xaa can be any naturally occurring amino acid
MFHSSTSVIAAATSAKCSSSLPPVLPTIPSPKILFVGKRGWGMAGWVTDYPSPREGGALPLGCCSRVSKGARIDHKGCRGHLLPLFCWGGVAMICPSLGLPLWFPICSYLNKKNILFWKKKRKLRTKKRNRRGLFFAGGGRKGLLERALANGVPWTAFLVQXRNLEGPHRRRKIAEAGSVIISKTTEPTDAKREHNLAQHGAQHSTHRKYIRQKKEVRRKYRQTRHVSSEK

SEQ ID NO: 903090 - protein, 141 aa, Homo sapiens
MQPPVSPGTALVGSQKEPSEVPTPKRPRGPDQREAKTRCAAKTLENHHNSRKETNGGRPKKKKTGERTDTRRASRRSPRHGRSTSILGDWEQALASPLPQRAPAPSPGPPSPPPLAATPIFHLCPHHHTTQHTSRCRAPMG

SEQ ID NO: 903091 - protein, 192 aa, Homo sapiens
MSESSSKSSQPLASKQEKDGTEKRGRGRPAQCSLRRSPAKCQHLRDLVGLTKGKQKQGVLPRPRKTTTTPGRKPMVADPKKKKLENGRTRGGHLAGVLGTAGAVTHAVACLASITWEGAGFHSWGLGTGFGFPAPPARPQGLGLSVRTDDSERLQDGASPSPMEPRRGHGQRTGPNLRAVPRGLALISPGLG

SEQ ID NO: 903092 - protein, 112 aa, Homo sapiens
MIPAVVLLLLLLVEQAAALGEPQLCYILDAILFLYGIVLTLLYCRLKIQVRKAAITSYEKSDGVYTMESPSITRLECSGMIWAHCNLCLLGSRDSRASPSRVAKTTGTTMPS

SEQ ID NO: 903093 - protein, 107 aa, Homo sapiens
QGTARGAQLHSAVRTADLQPKMIPAVVLLLLLLVEQAAALGEPQLCYILDAILFLYGIVLTLLYCRLKIQVRKAAITSYEKSDGVYTGLSTRNQETYETLKHEKPPQ

SEQ ID NO: 903094 - protein, 108 aa, Homo sapiens
QGTARGAQLHSAVRTADLQPKMIPAVVLLLLLLVEQAAALGEPQLCYILDAILFLYGIVLTLLYCRLKIQVRKAAITSYEKSDGVYTGLSTRNQETYETLKHEKPACH

SEQ ID NO: 903095 - protein, 107 aa, Homo sapiens; identical to SEQ ID NO: 903093

SEQ ID NO: 903096 - protein, 325 aa, Homo sapiens
AGPVLAVRRRGALSLSVGAACGLVALWQRRRQDSGTMSGFSTEERAAPFSLEYRVFLKNEKGQYISPFHDIPIYADKDVFHMVVEVPRWSNAKMEIATKDPLNPIKQDVKKGKLRYVANLFPYKGYIWNYGAIPQTWEDPGHNDKHTGCCGDNDPIDVCEIGSKVCARGEIIGVKVLGILAMIDEGETDWKVIAINVDDPDAANYNDINDVKRLKPGYLEATVDWFRRYKVPDGKPENEFAFNAEFKDKDFAIDIIKSTHDHWKALVTKKTNGKGISCMNTTLSESPFKCDPDAARAIVDALPPPCESACTVPTDVDKWFHHQKN

SEQ ID NO: 903097 - protein, 325 aa, Homo sapiens; identical to SEQ ID NO: 903096

SEQ ID NO: 903098 - protein, 325 aa, Homo sapiens; identical to SEQ ID NO: 903096

SEQ ID NO: 903099 - protein, 232 aa, Homo sapiens
MEIATKDPLNPIKQDVKKGKLRYVANLFPYKGYIWNYGAIPQTWEDPGHNDKHTGCCGDNDPIDVCEIGSKVCARGEIIGVKVLGILAMIDEGETDWKVIAINVDDPDAANYNDINDVKRLKPGYLEATVDWFRRYKVPDGKPENEFAFNAEFKDKDFAIDIIKSTHDHWKALVTKKTNGKGISCMNTTLSESPFKCDPDAARAIVDALPPPCESACTVPTDVDKWFHHQKN

SEQ ID NO: 903100 - protein, 292 aa, Homo sapiens
RRERCNGGAKDTPQSIDEGGSRISLLIYMDSLYGLQITFTSPLIETIIFNKALDINQRKKRKIATKDPLNPIKQDVKKGKLRYVANLFPYKGYIWNYGAIPQTWEDPGHNDKHTGCCGDNDPIDVCEIGSKVCARGEIIGVKVLGILAMIDEGETDWKVIAINVDDPDAANYNDINDVKRLKPGYLEATVDWFRRYKVPDGKPENEFAFNAEFKDKDFAIDIIKSTHDHWKALVTKKTNGKGISCMNTTLSESPFKCDPDAARAIVDALPPPCESACTVPTDVDKWFHHQKN

SEQ ID NO: 903101 - protein, 214 aa, Homo sapiens
AGPVLAVRRRGALSLSVGAACGLVALWQRRRQDSGTMSGFSTEERAAPFSLEYRVFLKNEKGQYISPFHDIPIYADKDVFHMVVEVPRWSNAKMEIATKDPLNPIKQDVKKGKLRYVANLFPYKGYIWNYGAIPQTWEDPGHNDKHTGCCGDNDPIDVCEIGSKVCARGEIIGVKVLGILAMIDEGETDWKVIAINVDDPDAANYNVCNSVVIL

SEQ ID NO: 903102 - protein, 338 aa, Homo sapiens
AGPVLAVRRRGALSLSVGAACGLVALWQRRRQDSGTMSGFSTEERAAPFSLEYRVFLKNEKGQYISPFHDIPIYADKDVFHMVVEVPRWSNAKMEIATKDPLNPIKQDVKKGKLRYVANLFPYKGYIWNYGAIPQTWEDPGHNDKHTGCCGDNDPIDVCEIGSKVCARGEIIGVKVLGILAMIDEGETDWKVIAINVDDPDAANYNDINDVKRLKPGYLEATVDWFRRYKVPDGKPENEFAFNAEFKDKDFAIDIIKSTHDHWKALVTKKTNGKGISCYHHPVNLPAQYQQTWISGSITRKTNEISLEYKLILLHRVHLDVLEVKVVAFQSFKFVELI

SEQ ID NO: 903103 - protein, 146 aa, Homo sapiens
KLPSHVSPMDLHEAEPSDEENYLRNYNDINDVKRLKPGYLEATVDWFRRYKVPDGKPENEFAFNAEFKDKDFAIDIIKSTHDHWKALVTKKTNGKGISCMNTTLSESPFKCDPDAARAIVDALPPPCESACTVPTDVDKWFHHQKN

SEQ ID NO: 903104 - protein, 182 aa, Homo sapiens
AGPVLAVRRRGALSLSVGAACGLVALWQRRRQDSGTMSGFSTEERAAPFSLEYRVFLKNEKGQYISPFHDIPIYADKDVFHMVVEVPRWSNAKMEIATKDPLNPIKQDVKKGKLRYVANLFPYKGYIWNLIPSKPVHSSFQVARFQPFDIIDIIIIGCIRIIHINGNDFPVGFPFVNHSQYA

SEQ ID NO: 903105 - protein, 125 aa, Homo sapiens [sequence omitted]

SEQ ID NO: 903106 - protein, 325 aa, Homo sapiens; identical to SEQ ID NO: 903096

SEQ ID NO: 903107 - protein, 244 aa, Homo sapiens
MVVEVPRWSNAKMEIATKDPLNPIKQDVKKGKLRYVANLFPYKGYIWNYGAIPQTWEDPGHNDKHTGCCGDNDPIDVCEIGSKVCARGEIIGVKVLGILAMIDEGETDWKVIAINVDDPDAANYNDINDVKRLKPGYLEATVDWFRRYKVPDGKPENEFAFNAEFKDKDFAIDIIKSTHDHWKALVTKKTNGKGISCMNTTLSESPFKCDPDAARAIVDALPPPCESACTVPTDVDKWFHHQKN

SEQ ID NO: 903108 - protein, 231 aa, Homo sapiens
MIATKDPLNPIKQDVKKGKLRYVANLFPYKGYIWNYGAIPQTWEDPGHNDKHTGCCGDNDPIDVCEIGSKVCARGEIIGVKVLGILAMIDEGETDWKVIAINVDDPDAANYNDINDVKRLKPGYLEATVDWFRRYKVPDGKPENEFAFNAEFKDKDFAIDIIKSTHDHWKALVTKKTNGKGISCMNTTLSESPFKCDPDAARAIVDALPPPCESACTVPTDVDKWFHHQKN

SEQ ID NO: 903109 - protein, 325 aa, Homo sapiens
AGPVLAVRRRGALSLSVGAACGLVALWQRRRQDSGTMSGFSTEERAAPFSLEYRVFLKNEKGQYISPFHDIPIYADKDVFHMVVEVPRWSNAKMEIATKDPLNPIKQDVKKGKLRYVANLFPYKGYIWNYGAIPQTWEDPGHNDKHTGCCGDNDPIDVCEIGSKVCARGEIIGVKVLGILAMIDEGETDWKVIAINVDDPDAANYNDINDVKRLKPGYLEATVDWFRRYKVPDGKPENEFAFNAEFKDKDFAIDIIKSTHDHWKALVTKKTNGKGISCMNTTLSESPFKCDPDAARAIVDALPPPCESACTVPTDGKISIPVKFH

SEQ ID NO: 903110 - protein, 306 aa, Homo sapiens
AGPVLAVRRRGALSLSVGAACGLVALWQRRRQDSGTMSGFSTEERAAPFSLEYRVFLKNEKGQYISPFHDIPIYADKDVFHMVVEVPRWSNAKMEIATKDPLNPIKQDVKKGKLRYVANLFPYKGYIWNYGAIPQTWEDPGHNDKHTGCCGDNDPIDVCEIGSKVCARGEIIGVKVLGILAMIDEGETDWKVIAINVDDPDAANYNDINDVKRLKPGYLEATVDWFRRYKDFAIDIIKSTHDHWKALVTKKTNGKGISCMNTTLSESPFKCDPDAARAIVDALPPPCESACTVPTDVDKWFHHQKN

SEQ ID NO: 903111 - protein, 257 aa, Homo sapiens
MVVEVPRWSNAKMEIATKDPLNPIKQDVKKGKLRYVANLFPYKGYIWNYGAIPQTWEDPGHNDKHTGCCGDNDPIDVCEIGSKVCARGEIIGVKVLGILAMIDEGETDWKVIAINVDDPDAANYNDINDVKRLKPGYLEATVDWFRRYKVPDGKPENEFAFNAEFKDKDFAIDIIKSTHDHWKALVTKKTNGKGISCYHHPVNLPAQYQQTWISGSITRKTNEISLEYKLILLHRVHLDVLEVKVVAFQSFKFVELI

SEQ ID NO: 903112 - protein, 110 aa, Homo sapiens
AGPVLAVRRRGALSLSVGAACGLVALWQRRRQDSGTMSGFSTEERAAPFSLEYRVFLKNEKGQYISPFHDIPIYADKDVFHMVVEVPRWSNAKMEVIFHLTFESDLGYWF

SEQ ID NO: 903113 - protein, 87 aa, Homo sapiens
ELHVLLSPTQSTPTGAGWSTPIQLDKVNLQVYCAWSLLDNFEWNQGYSSRFGLFHVDFEDPARPRVPYTSAKEYAKIIRNNGLEAHL

SEQ ID NO: 903114 - protein, 87 aa, Homo sapiens
  misc_feature (10)..(10): Xaa can be any naturally occurring amino acid
  misc_feature (16)..(16): Xaa can be any naturally occurring amino acid
GATPGRRVGXFSLLGXPLGIAIQLDKVNLQVYCAWSLLDNFEWNQGYSSRFGLFHVDFEDPARPRVPYTSAKEYAKIIRNNGLEAHL

SEQ ID NO: 903115 - protein, 86 aa, Homo sapiens
PAPPTVSVGGGRRKLHCNNTIQLDKVNLQVYCAWSLLDNFEWNQGYSSRFGLFHVDFEDPARPRVPYTSAKEYAKIIRNNGLEAHL

SEQ ID NO: 903116 - protein, 469 aa, Homo sapiens
MAFPAGFGWAAATAAYQVEGGWDADGKGPCVWDTFTHQGGERVFKNQTGDVACGSYTLWEEDLKCIKQLGLTHYRFSLSWSRLLPDGTTGFINQKGIDYYNKIIDDLLKNGVTPIVTLYHFDLPQTLEDQGGWLSEAIIESFDKYAQFCFSTFGDRVKQWITINEANVLSVMSYDLGMFPPGIPHFGTGGYQAAHNLIKAHARSWHSYDSLFRKKQKGMVSLSLFAVWLEPADPNSVSDQEAAKRAITFHLDLFAKPIFIDGDYPEVVKSQIASMSQKQGYPSSRLPEFTEEEKKMIKGTADFFAVQYYTTRLIKYQENKKGELGILQDAEIEFFPDPSWKNVDWIYVVPWGVCKLLKYIKDTYNNPVIYITENGFPQSDPAPLDDTQRWEYFRQTFQELFKAIQLDKVNLQVYCAWSLLDNFEWNQGYSSRFGLFHVDFEDPARPRVPYTSAKEYAKIIRNNGLEAHL

SEQ ID NO: 903117 - protein, 469 aa, Homo sapiens
SLYTCLVEITLPFHLEENVGGWDADGKGPCVWDTFTHQGGERVFKNQTGDVACGSYTLWEEDLKCIKQLGLTHYRFSLSWSRLLPDGTTGFINQKGIDYYNKIIDDLLKNGVTPIVTLYHFDLPQTLEDQGGWLSEAIIESFDKYAQFCFSTFGDRVKQWITINEANVLSVMSYDLGMFPPGIPHFGTGGYQAAHNLIKAHARSWHSYDSLFRKKQKGMVSLSLFAVWLEPADPNSVSDQEAAKRAITFHLDLFAKPIFIDGDYPEVVKSQIASMSQKQGYPSSRLPEFTEEEKKMIKGTADFFAVQYYTTRLIKYQENKKGELGILQDAEIEFFPDPSWKNVDWIYVVPWGVCKLLKYIKDTYNNPVIYITENGFPQSDPAPLDDTQRWEYFRQTFQELFKAIQLDKVNLQVYCAWSLLDNFEWNQGYSSRFGLFHVDFEDPARPRVPYTSAKEYAKIIRNNGLEAHL

SEQ ID NO: 903118 - protein, 162 aa, Homo sapiens
MAFPAGFGWAAATAAYQVEGGWDADGKGPCVWDTFTHQGGERVFKNQTGDVACGSYTLWEEDLKCIKQLGLTHYRFSLSWSRLLPDGTTGFINQKAIQLDKVNLQVYCAWSLLDNFEWNQGYSSRFGLFHVDFEDPARPRVPYTSAKEYAKIIRNNGLEAHL

SEQ ID NO: 903119 - protein, 84 aa, Homo sapiens
LRSSSSPNRKSEVFTVTPIQLDKVNLQVYCAWSLLDNFEWNQGYSSRFGLFHVDFEDPARPRVPYTSAKEYAKIIRNNGLEAHL

SEQ ID NO: 903120 - protein, 469 aa, Homo sapiens; identical to SEQ ID NO: 903116

SEQ ID NO: 903121 - protein, 84 aa, Homo sapiens
TVCVTRMPNARLNSERPAIQLDKVNLQVYCAWSLLDNFEWNQGYSSRFGLFHVDFEDPARPRVPYTSAKEYAKIIRNNGLEAHL

SEQ ID NO: 903122 - protein, 83 aa, Homo sapiens
  misc_feature (15)..(15): Xaa can be any naturally occurring amino acid
ADAPHVLPRCSPRGXFAIQLDKVNLQVYCAWSLLDNFEWNQGYSSRFGLFHVDFEDPARPRVPYTSAKEYAKIIRNNGLEAHL

SEQ ID NO: 903123 - protein, 87 aa, Homo sapiens; identical to SEQ ID NO: 903113

SEQ ID NO: 903124 - protein, 297 aa, Homo sapiens
  misc_feature (48)..(48): Xaa can be any naturally occurring amino acid
TRSFGQARGCSRYVTLFLTVPKDILSHDIIAGDFRHCKYRKRSATRQXRTCSHVKHMTLRVRTHSCMCLIHAEYTTALQAAFIAVDCDVSILETSSPSQIASMSQKQGYPSSRLPEFTEEEKKMIKGTADFFAVQYYTTRLIKYQENKKGELGILQDAEIEFFPDPSWKNVDWIYVVPWGVCKLLKYIKDTYNNPVIYITENGFPQSDPAPLDDTQRWEYFRQTFQELFKAIQLDKVNLQVYCAWSLLDNFEWNQGYSSRFGLFHVDFEDPARPRVPYTSAKEYAKIIRNNGLEAHL

SEQ ID NO: 903125 - protein, 91 aa, Homo sapiens
LITLSSVLLFLFVDAAPQVAFVFPPIQLDKVNLQVYCAWSLLDNFEWNQGYSSRFGLFHVDFEDPARPRVPYTSAKEYAKIIRNNGLEAHL

SEQ ID NO: 903126 - protein, 125 aa, Homo sapiens
GGRRLRPGENSSVAGVDRQCWGTQRTLHSCWPGANLLTAQGWPQQPAVPSVGPAEPTSTRNSRWPASALRPRLFLHTSPQAEGAGSSLSQSREGLTQCRDWPKGSSSTARVDAEAEEAPRASQVC

SEQ ID NO: 903127 - protein, 195 aa, Homo sapiens
QSRRVIVVIVARPLSGRLESKAVRYFSKSAIMAGEEINEDYPVEIHEYLSAFENSIGAVDEMLKTMMSVSRNELLQKLDPLEQAKVDLVSAYTLNSMFWVYLATQGVNPKEHPVKQELERIRVYMNRVKEITDKKKAGKLDRGAASRFVKNALWEPKSKNASKVANNRKQVKVNFLVLMYTYSKSTSFPPPPPAK

SEQ ID NO: 903128 - protein, 195 aa, Homo sapiens; identical to SEQ ID NO: 903127

SEQ ID NO: 903129 - protein, 199 aa, Homo sapiens
QSRRVIVVIVARPLSGRLESKAVRYFSKSAIMAGEEINEDYPVEIHEYLSAFENSIGAVDEMLKTMMSVSRNELLQKLDPLEQAKVDLVSAYTLNSMFWVYLATQGVNPKEHPVKQELERIRVYMNRVKEITDKKKAGKLDRGAASRFVKNALWEPKSKNASKVANNRKQVKVNFLVLMYTYSKSTSFLLLICKFTVNM

SEQ ID NO: 903130 - protein, 193 aa, Homo sapiens
QSRRVIVVIVARPLSGRLESKAVRYFSKSAIMAGEEINEDYPVEIHEYLSAFENSIGAVDEMLKTMMSVSRNELLQKLDPLEQAKVDLVSAYTLNSMFWVYLATQGVNPKEHPVKQELERIRVYMNRVKEITDKKKAGKLDRGAASRFVKNALWEPKSKNASKVANNRKQVKVNFLVLMYTYSKSTSFHHYLY

SEQ ID NO: 903131 - protein, 179 aa, Homo sapiens
RAAGIRHEEGRESAIMAGEEINEDYPVEIHEYLSAFENSIGAVDEMLKTMMSVSRNELLQKLDPLEQAKVDLVSAYTLNSMFWVYLATQGVNPKEHPVKQELERIRVYMNRVKEITDKKKAGKLDRGAASRFVKNALWEPKSKNASKVANNRKQVKVNFLVLMYTYSKSTSFPPPPPAK

SEQ ID NO: 903132 - protein, 191 aa, Homo sapiens
QSRRVIVVIVARPLSGRLESKAVRYFSKSAIMAGEEINEDYPVEIHEYLSAFENSIGAVDEMLKTMMSVSRNELLQKLDPLEQAKVDLVSAYTLNSMFWVYLATQGVNPKEHPVKQELERIRVYMNRVKEITDKKKAGKLDRGAASRFVKNALWEPKSKNASKVANNRKQVKVNFLILINFRWEIRLYVDG

SEQ ID NO: 903133 - protein, 164 aa, Homo sapiens
MAGEEINEDYPVEIHEYLSAFENSIGAVDEMLKTMMSVSRNELLQKLDPLEQAKVDLVSAYTLNSMFWVYLATQGVNPKEHPVKQELERIRVYMNRVKEITDKKKAGKLDRGAASRFVKNALWEPKSKNASKVANNRKQVKVNFLVLMYTYSKSTSFPPPPPAK

SEQ ID NO: 903134 - protein, 168 aa, Homo sapiens
MAGEEINEDYPVEIHEYLSAFENSIGAVDEMLKTMMSVSRNELLQKLDPLEQAKVDLVSAYTLNSMFWVYLATQGVNPKEHPVKQELERIRVYMNRVKEITDKKKAGKLDRGAASRFVKNALWEPKSKNASKVANNRKQVKVNFLVLMYTYSKSTSFLLLICKFTVNM

SEQ ID NO: 903135 - protein, 203 aa, Homo sapiens
MPSPSVSTSAASVLEGVCGRARSTYRTPEEGEEQSWSAIMAGEEINEDYPVEIHEYLSAFENSIGAVDEMLKTMMSVSRNELLQKLDPLEQAKVDLVSAYTLNSMFWVYLATQGVNPKEHPVKQELERIRVYMNRVKEITDKKKAGKLDRGAASRFVKNALWEPKSKNASKVANNRKQVKVNFLVLMYTYSKSTSFPPPPPAK

SEQ ID NO: 903136 - protein, 199 aa, Homo sapiens
MAGEEINEDYPVEIHEYLSAFENSIGAVDEMLKTMMSVSRNELLQKLDPLEQAKVDLVSAYTLNSMFWVYLATQGVNPKEHPVKQELERIRVYMNRVKEITDKKKAGKLDRGAASRFVKNALWEPKSKNASKVANNRKQVKVNFLVLMYTYSKSTSFRHFFPPAREKKIVGGRRVQRVSNKSVSSRQDVKEICAREKNF

SEQ ID NO: 903137 - protein, 1586 aa, Homo sapiens
RCAERLNNLKTSPEAVSGYSFAMAALLGGVHQCPLGIPHAKGKMVVSIAEDLLRTAAQNSRLSLQRTQAGWLLLGALMTLGPSVVRYHLPKMLLLWRNVFPRSLKELEAEKARGDSFTWQVTLEGRAGALCAMRSFVAHCPELLTEDVIRKLMTPIECAMTMMSHIPSVMKAHGAHLKASAAMVRLRLYDILALLPPKTYEGSFNALLRELVAEFTLTDNSANTTTSLLRSLCHYDDSVLLGSWLQETDHKSIEDQLQPNSASGSGALEHDPSSIYLRIPAGEAVPGPLPLGVSVIDASVALFGVVFPHVSYKHRLQMLDHFAECVKQAKGVRQQAVQLNIFTAVLSALKGLAENKSTLGPEEVRKSALTLVMGPLDNPNPILRCAAGEALGRMAQVVGEATFIARMAQYSFDKLKSARDVVSRTGHSLALGCLHRYVGGIGSGQHLKTSVSILLALAQDGTSPEVQTWSLHSLALIVDSSGPMYRGYVEPTLSLVLTLLLTVPPSHTEVHQCLGRCLGAIITTVGPELQGNGATTSTIRSSCLVGCAITQDHSDSLVQAAAISCLQQLHMFAPRHVNLSSLVPSLCVHLCSSHLLLRRAAVACLRQLAQREAAEVCEYAMSLAKNTGDKESSSANVSPFAPGVSSRTDIHCRHQGVNITETGLEGLLFGMLDRETDRKLCSDIHDTLGHMLSSLAVEKLSHWLMLCKDVLAASSDMSTATLLSSGKDEEAEKKDEMDDDTMFTTLGEEDKSKPFVAPRWATRVFAADCLCRIINLCENADQAHFDLALARSAKLRNPTNDLLVLHLSDLIRMAFMAATDHSNQLRMAGLQALEDIIKKFASVPEPEFPGHVILEQYQANVGAALRPAFSQDTPSDIIAKACQVCSTWIGSGVVSDLNDLRRVHNLLVSSLDKVQAGKGSSSQLYRESATTMEKLAVLKAWAEVYVVAMNIKKEAESKPKRAIKNTDDDDDDCGTIDELPPDSLITLVQPELPTLSRLWLAALKDYALLTLPAEFSSQLPPDGGAFYTPETIDTARLHYRNSWAPILHAVALWLNSTGFTCSESTEAAAISGLQKRSTSVNLNQASGAVGSAKSLPEINKDRMHLILGVSIQFLCSPRPEEPIEHVTACLQALHTLLDSPYARVHIAEDQLIGVELLSVLHRLLLTWNPSSVQLLVTGVVQQIVRAAQDYLQEKRNTLNEDDMEKEACTVLGEGGDSGGLIPGKSLVFATMELLMFILVRHMPHLSTKVSDSPSHIATKTRLSEESARLVAATVTILSDLPSLCSPAGCMTILPTILFLIARILKDTAIKSADNQVPPPVSAALQGIKSIVTLSMAKTEAGVQKQWTALIRSTLACILEYSQPEDSVPTPDEVSMLTAIALFLWSASNEIIGVQSLQNGCMNRFKNALNSCDPWVQAKCYQLLLSVFQHSNRALSTPYIHSLAPIVVEKLKAVERNRPASNIELLAVQEGIKVLETLVALGEEQNRVQLLALLVPTLISYLLDENSFASASSASKDLHEFALQNLMHIGPLYPHAFKTVMGAAPELKVRLETAVRASQASKAKAAARQPAPAIHSAPTIKLKTSFF

SEQ ID NO: 903138 - protein, 1497 aa, Homo sapiens
RCAERLNNLKTSPEAVSGYSFAMAALLGGVHQCPLGIPHAKGKMVVSIAEDLLRTAAQNSRLSLQRTQAGWLLLGALMTLGPSVVRYHLPKMLLLWRNVFPRSLKELEAEKARGDSFTWQVTLEGRAGALCAMRSFVAHCPELLTEDVIRKLMTPIECAMTMMSHIPSVMKAHGAHLKASAAMVRLRLYDILALLPPKTYEGSFNALLRELVAEFTLTDNSANTTTSLLRSLCHYDDSVLLGSWLQETDHKSIEDQLQPNSASGSGALEHDPSSIYLRIPAGEAVPGPLPLGVSVIDASVALFGVVFPHVSYKHRLQMLDHFAECVKQAKGVRQQAVQLNIFTAVLSALKGLAENKSTLGPEEVRKSALTLVMGPLDNPNPILRCAAGEALGRMAQVVGEATFIARMAQYSFDKLKSARDVVSRTGHSLALGCLHRYVGGIGSGQHLKTSVSILLALAQDGTSPEVQTWSLHSLALIVDSSGPMYRGYVEPTLSLVLTLLLTVPPSHTEVHQCLGRCLGAIITTVGPELQGNGATTSTIRSSCLVGCAITQDHSDSLVQAAAISCLQQLHMFAPRHVNLSSLVPSLCVHLCSSHLLLRRAAVACLRQLAQREAAEVCEYAMSLAKNTGDKESSSANVSPFAPGVSSRTDIHCRHQGVNITETGLEGLLFGMLDRETDRKLCSDIHDTLGHMLSSLAVEKLSHWLMLCKDVLAASSDMSTATLLSSGKDEEAEKKDEMDDDTMFTTLGEEDKSKPFVAPRWATRVFAADCLCRIINLCENADQAHFDLALARSAKLRNPTNDLLVLHLSDLIRMAFMAATDHSNQLRMAGLQALEDIIKKFASVPEPEFPGHVILEQYQANVGAALRPAFSQDTPSDIIAKACQVCSTWIGSGVVSDLNDLRRVHNLLVSSLDKVQAGKGSSSQLYRESATTMEKLAVLKAWAEVYVVAMNIKKEAESKPKRAIKNTDDDDDDCGTIDELPPDSLITLVQPELPTLSRLWLAALKDYALLTLPAEFSSQLPPDGGAFYTPETIDTARLHYRNSWAPILHAVALWLNSTGFTCSESTEAAAISGLQKRSTSVNLNQASGAVGSAKSLPEINKDRMHLILGVSIQFLCSPRPEEPIEHVTACLQALHTLLDSPYARVHIAEDQLIGVELLSVLHRLLLTWNPSSVQLLVTGVVQQIVRAAQDYLQEKRNTLRCMTILPTILFLIARILKDTAIKSADNQVPPPVSAALQGIKSIVTLSMAKTEAGVQKQWTALIRSTLACILEYSQPEDSVPTPDEVSMLTAIALFLWSASNEIIGVQSLQNGCMNRFKNALNSCDPWVQAKCYQLLLSVFQHSNRALSTPYIHSLAPIVVEKLKAVERNRPASNIELLAVQEGIKVLETLVALGEEQNRVQLLALLVPTLISYLLDENSFASASSASKDLHEFALQNLMHIGPLYPHAFKTVMGAAPELKVRLETAVRASQASKAKAAARQPAPAIHSAPTIKLKTSFF

SEQ ID NO: 903139 - protein, 1421 aa, Homo sapiens
RCAERLNNLKTSPEAVSGYSFAMAALLGGVHQCPLGIPHAKGKMVVSIAEDLLRTAAQNSRLSLQRTQAGWLLLGALMTLGPSVVRYHLPKMLLLWRNVFPRSLKELEAEKARGDSFTWQVTLEGRAGALCAMRSFVAHCPELLTEDVIRKLMTPIECAMTMMSHIPSVMKAHGAHLKASAAMVRLRLYDILALLPPKTYEGSFNALLRELVAEFTLTDNSANTTTSLLRSLCHYDDSVLLGSWLQETDHKSIEDQLQPNSASGSGALEHDPSSIYLRIPAGEAVPGPLPLGVSVIDASVALFGVVFPHVSYKHRLQMLDHFAECVKQAKGVRQQAVQLNIFTAVLSALKGLAENKSTLGPEEVRKSALTLVMGPLDNPNPILRCAAGEALGRMAQVVGEATFIARMAQYSFDKLKSARDVVSRTGHSLALGCLHRYVGGIGSGQHLKTSVSILLALAQDGTSPEVQTWSLHSLALIVDSSGPMYRGYVEPTLSLVLTLLLTVPPSHTEVHQCLGRCLGAIITTVGPELQGNGATTSTIRSSCLVGCAITQDHSDSLVQAAAISCLQQLHMFAPRHVNLSSLVPSLCVHLCSSHLLLRRAAVACLRQLAQREAAEVCEYAMSLAKNTGDKESSSANVSPFAPGVSSRTDIHCRHQGVNITETGLEGLLFGMLDRETDRKLCSDIHDTLGHMLSSLAVEKLSHWLMLCKDVLAASSDMSTATLLSSGKDEEAEKKDEMDDDTMFTTLGEEDKSKPFVAPRWATRVFAADCLCRIINLCENADQAHFDLALARSAKLRNPTNDLLVLHLSDLIRMAFMAATDHSNQLRMAGLQALEDIIKKFASVPEPEFPGHVILEQYQANVGAALRPAFSQDTPSDIIAKACQVCSTWIGSGVVSDLNDLRRVHNLLVSSLDKVQAGKGSSSQLYRESATTMEKLAVLKAWAEVYVVAMNIKKEAESKPKRAIKNTDDDDDDCGTIDELPPDSLITLVQPELPTLSRLWLAALKDYALLTLPAEFSSQLPPDGGAFYTPETIDTARLHYRNSWAPILHAVALWLNSTGFTCSESTEAAAISGLQKRSTSVNLNQASGAVGSAKSLPEINKDRMHLILGVSIQFLCSPRPEEPIEHVTACLQALHTLLDSPYARVHIAEDQLIGVELLSVLHRLLLTWNPSSVQLLVTGVVQQIVRAAQDYLQEKRNTLNEDDMEKEACTVLGEGGDSGGLIPGKSLVFATMELLMFILVRHMPHLSTKVSDSPSHIATKTRLSEESARLVAATVTILSDLPSLCSPAGCMTILPTILFLIARILKDTAIKSADNQVPPPVSAALQGIKSIVTLSMAKTEAGVQKQWTALIRSTLACILEYSQPEDSVPTPDEVSMLTAIALFLWSASNEIIGVQSLQNGCMNRFKNALNSCDPWESSYLLF

SEQ ID NO: 903140 - protein, 1586 aa, Homo sapiens; identical to SEQ ID NO: 903137

SEQ ID NO: 903141 - protein, 1586 aa, Homo sapiens; identical to SEQ ID NO: 903137

SEQ ID NO: 903142 - protein, 1423 aa, Homo sapiens
RCAERLNNLKTSPEAVSGYSFAMAALLGGVHQCPLGIPHAKGKMVVSIAEDLLRTAAQNSRLSLQRTQAGWLLLGALMTLGPSVVRYHLPKMLLLWRNVFPRSLKELEAEKARGDSFTWQVTLEGRAGALCAMRSFVAHCPELLTEDVIRKLMTPIECAMTMMSHIPSVMKAHGAHLKASAAMVRLRLYDILALLPPKTYEGSFNALLRELVAEFTLTDNSANTTTSLLRSLCHYDDSVLLGSWLQETDHKSIEDQLQPNSASGSGALEHDPSSIYLRIPAGEAVPGPLPLGVSVIDASVALFGVVFPHVSYKHRLQMLDHFAECVKQAKGVRQQAVQLNIFTAVLSALKGLAENKSTLGPEEVRKSALTLVMGPLDNPNPILRCAAGEALGRMAQVVGEATFIARMAQYSFDKLKSARDVVSRTGHSLALGCLHRYVGGIGSGQHLKTSVSILLALAQDGTSPEVQTWSLHSLALIVDSSGPMYRGYVEPTLSLVLTLLLTVPPSHTEVHQCLGRCLGAIITTVGPELQGNGATTSTIRSSCLVGCAITQDHSDSLVQAAAISCLQQLHMFAPRHVNLSSLVPSLCVHLCSSHLLLRRAAVACLRQLAQREAAEVCEYAMSLAKNTGDKESSSANVSPFAPGVSSRTDIHCRHQGVNITETGLEGLLFGMLDRETDRKLCSDIHDTLGHMLSSLAVEKLSHWLMLCKDVLAASSDMSTATLLSSGKDEEAEKKDEMDDDTMFTTLGEEDKSKPFVAPRWATRVFAADCLCRIINLCENADQAHFDLALARSAKLRNPTNDLLVLHLSDLIRMAFMAATDHSNQLRMAGLQALEDIIKKFASVPEPEFPGHVILEQYQANVGAALRPAFSQDTPSDIIAKACQVCSTWIGSGVVSDLNDLRRVHNLLVSSLDKVQAGKGSSSQLYRESATTMEKLAVLKAWAEVYVVAMNIKKEAESKPKRAIKNTDDDDDDCGTIDELPPDSLITLVQPELPTLSRLWLAALKDYALLTLPAEFSSQLPPDGGAFYTPETIDTARLHYRNSWAPILHAVALWLNSTGFTCSESTEAAAISGLQKRSTSVNLNQASGAVGSAKSLPEINKDRMHLILGVSIQFLCSPRPEEPIEHVTACLQALHTLLDSPYARVHIAEDQLIGVELLSVLHRLLLTWNPSSVQLLVTGVVQQIVRAAQDYLQEKRNTLNEDDMEKEACTVLGEGGDSGGLIPGKSLVFATMELLMFILVRHMPHLSTKVSDSPSHIATKTRLSEESARLVAATVTILSDLPSLCSPAGCMTILPTILFLIARILKDTAIKSADNQVPPPVSAALQGIKSIVTLSMAKTEAGVQKQWTALIRSTLACILEYSQPEDSVPTPDEVSMLTAIALFLWSASNEIIGVQSLQNGCMNRFKNALNSCDPWVSYTLHRHR

SEQ ID NO: 903143 - protein, 192 aa, Homo sapiens
  misc_feature (12)..(12): Xaa can be any naturally occurring amino acid
KGGSIEQESPNXIKFIATHGVQAKCYQLLLSVFQHSNRALSTPYIHSLAPIVVEKLKAVERNRPASNIELLAVQEGIKVLETLVALGEEQNRVQLLALLVPTLISYLLDENSFASASSASKDLHEFALQNLMHIGPLYPHAFKTVMGAAPELKVRLETAVRASQASKAKAAARQPAPAIHSAPTIKLKTSFF

SEQ ID NO: 903144 - protein, 985 aa, Homo sapiens
MFLLGADAIGMACLAHTKSSDSEGKQMFNRSHSLDVSPFAPGVSSRTDIHCRHQGVNITETGLEGLLFGMLDRETDRKLCSDIHDTLGHMLSSLAVEKLSHWLMLCKDVLAASSDMSTATLLSSGKDEEAEKKDEMDDDTMFTTLGEEDKSKPFVAPRWATRVFAADCLCRIINLCENADQAHFDLALARSAKLRNPTNDLLVLHLSDLIRMAFMAATDHSNQLRMAGLQALEDIIKKFASVPEPEFPGHVILEQYQANVGAALRPAFSQDTPSDIIAKACQVCSTWIGSGVVSDLNDLRRVHNLLVSSLDKVQAGKGSSSQLYRESATTMEKLAVLKAWAEVYVVAMNIKKEAESKPKRAIKNTDDDDDDCGTIDELPPDSLITLVQPELPTLSRLWLAALKDYALLTLPAEFSSQLPPDGGAFYTPETIDTARLHYRNSWAPILHAVALWLNSTGFTCSESTEAAAISGLQKRSTSVNLNQASGAVGSAKSLPEINKDRMHLILGVSIQFLCSPRPEEPIEHVTACLQALHTLLDSPYARVHIAEDQLIGVELLSVLHRLLLTWNPSSVQLLVTGVVQQIVRAAQDYLQEKRNTLNEDDMEKEACTVLGEGGDSGGLIPGKSLVFATMELLMFILVRHMPHLSTKVSDSPSHIATKTRLSEESARLVAATVTILSDLPSLCSPAGCMTILPTILFLIARILKDTAIKSADNQVPPPVSAALQGIKSIVTLSMAKTEAGVQKQWTALIRSTLACILEYSQPEDSVPTPDEVSMLTAIALFLWSASNEIIGVQSLQNGCMNRFKNALNSCDPWVQAKCYQLLLSVFQHSNRALSTPYIHSLAPIVVEKLKAVERNRPASNIELLAVQEGIKVLETLVALGEEQNRVQLLALLVPTLISYLLDENSFASASSASKDLHEFALQNLMHIGPLYPHAFKTVMGAAPELKVRLETAVRASQASKAKAAARQPAPAIHSAPTIKLKTSFF

SEQ ID NO: 903145 - protein, 1320 aa, Homo sapiens
RCAERLNNLKTSPEAVSGYSFAMAALLGGVHQCPLGIPHAKGKMVVSIAEDLLRTAAQNSRLSLQRTQAGWLLLGALMTLGPSVVRYHLPKMLLLWRNVFPRSLKELEAEKARGDSFTWQVTLEGRAGALCAMRSFVAHCPELLTEDVIRKLMTPIECAMTMMSHIPSVMKAHGAHLKASAAMVRLRLYDILALLPPKTYEGSFNALLRELVAEFTLTDNSANTTTSLLRSLCHYDDSVLLGSWLQETDHKSIEDQLQPNSASGSGALEHDPSSIYLRIPAGEAVPGPLPLGVSVIDASVALFGVVFPHVSYKHRLQMLDHFAECVKQAKGVRQQAVQLNIFTAVLSALKGLAENKSTLGPEEVRKSALTLVMGPLDNPNPILRCAAGEALGRMAQVVGEATFIARMAQYSFDKLKSARDVVSRTGHSLALGCLHRYVGGIGSGQHLKTSVSILLALAQDGTSPEVQTWSLHSLALIVDSSGPMYRGYVEPTLSLVLTLLLTVPPSHTEVHQCLGRCLGAIITTVGPELQGNGATTSTIRSSCLVGCAITQDHSDSLVQAAAISCLQQLHMFAPRHVNLSSLVPSLCVHLCSSHLLLRRAAVACLRQLAQREAAEVCEYAMSLAKNTGDKESSSANVSPFAPGVSSRTDIHCRHQGVNITETGLEGLLFGMLDRETDRKLCSDIHDTLGHMLSSLAVEKLSHWLMLCKDVLAASSDMSTATLLSSGKDEEAEKKDEMDDDTMFTTLGEEDKSKPFVAPRWATRVFAADCLCRIINLCENADQAHFDLALARSAKLRNPTNDLLVLHLSDLIRMAFMAATDHSNQLRMAGLQALEDIIKKFASVPEPEFPGHVILEQYQANVGAALRPAFSQDTPSDIIAKACQVCSTWIGSGVVSDLNDLRRVHNLLVSSLDKVQAGKGSSSQLYRESATTMEKLAVLKAWAEVYVVAMNIKKEAESKPKRAIKNTDDDDDDCGTIDELPPDSLITLVQPELPTLSRLWLAALKDYALLTLPAEFSSQLPPDGGAFYTPETIDTARLHYRNSWAPILHAVALWLNSTGFTCSESTEAAAISGLQKRSTSVNLNQASGAVGSAKSLPEINKDRMHLILGVSIQFLCSPRPEEPIEHVTACLQALHTLLDSPYARVHIAEDQLIGVELLSVLHRLLLTWNPSSVQLLVTGVVQQIVRAAQDYLQEKRNTLNEDDMEKEACTVLGEGGDSGGLIPGKSLVFATMELLMFILVRHMPHLSTKVSDSPSHIATKTRLSEESARLVAATVTILSDLPSLCSPAGSSQMLPASPLSLPAFQSCPFNSLYSFISSNSG

SEQ ID NO: 903146 - protein, 694 aa, Homo sapiens
SLWHQGTCNNKTVEMVLERTKTMLEIVLTHCSAVRVRLPWKKLADFKAGAYVYVVAMNIKKEAESKPKRAIKNTDDDDDDCGTIDELPPDSLITLVQPELPTLSRLWLAALKDYALLTLPAEFSSQLPPDGGAFYTPETIDTARLHYRNSWAPILHAVALWLNSTGFTCSESTEAAAISGLQKRSTSVNLNQASGAVGSAKSLPEINKDRMHLILGVSIQFLCSPRPEEPIEHVTACLQALHTLLDSPYARVHIAEDQLIGVELLSVLHRLLLTWNPSSVQLLVTGVVQQIVRAAQDYLQEKRNTLNEDDMEKEACTVLGEGGDSGGLIPGKSLVFATMELLMFILVRHMPHLSTKVSDSPSHIATKTRLSEESARLVAATVTILSDLPSLCSPAGCMTILPTILFLIARILKDTAIKSADNQVPPPVSAALQGIKSIVTLSMAKTEAGVQKQWTALIRSTLACILEYSQPEDSVPTPDEVSMLTAIALFLWSASNEIIGVQSLQNGCMNRFKNALNSCDPWVQAKCYQLLLSVFQHSNRALSTPYIHSLAPIVVEKLKAVERNRPASNIELLAVQEGIKVLETLVALGEEQNRVQLLALLVPTLISYLLDENSFASASSASKDLHEFALQNLMHIGPLYPHAFKTVMGAAPELKVRLETAVRASQASKAKAAARQPAPAIHSAPTIKLKTSFF

SEQ ID NO: 903147 - protein, 1529 aa, Homo sapiens
RCAERLNNLKTSPEAVSGYSFAMAALLGGVHQCPLGIPHAKGKMVVSIAEDLLRTAAQNSRLSLQRTQAGWLLLGALMTLGPSVVRYHLPKMLLLWRNVFPRSLKELEAEKARGDSFTWQVTLEGRAGALCAMRSFVAHCPELLTEDVIRKLMTPIECAMTMMSHIPSVMKAHGAHLKASAAMVRLRLYDILALLPPKTYEGSFNALLRELVAEFTLTDNSANTTTSLLRSLCHYDDSVLLGSWLQETDHKSIEDQLQPNSASGSGALEHDPSSIYLRIPAGEAVPGPLPLGVSVIDASVALFGVVFPHVSYKHRLQMLDHFAECVKQAKGVRQQAVQLNIFTAVLSALKGLAENKSTLGPEEVRKSALTLVMGPLDNPNPILRCAAGEALGRMAQVVGEATFIARMAQYSFDKLKSARDVVSRTGHSLALGCLHRYVGGIGSGQHLKTSVSILLALAQDGTSPEVQTWSLHSLALIVDSSGPMYRGYVEPTLSLVLTLLLTVPPSHTEVHQCLGRCLGAIITTVGPELQGNGATTSTIRSSCLVGCAITQDHSDSLVQAAAISCLQQLHMFAPRHVNLSSLVPSLCVHLCSSHLLLRRAAVACLRQLAQREAAEVCEYAMSLAKNTGDKESSSANVSPFAPGVSSRTDIHCRHQGVNITETGLEGLLFGMLDRETDRKLCSDIHDTLGHMLSSLAVEKLSHWLMLCKDVLAASSDMSTATLLSSGKDEEAEKKDEMDDDTMFTTLGEEDKSKPFVAPRWATRVFAADCLCRIINLCENADQAHFDLALARSAKLRNPTNDLLVLHLSDLIRMAFMAATDHSNQLRMAGLQALEDIIKKFASVPEPEFPGHVILEQYQANVGAALRPAFSQDTPSDIIAKACQVCSTWIGSGVVSDLNDLRRVHNLLVSSLDKVQAGKGSSSQLYRESATTMEKLAVLKAWAEVYVVAMNIKKEAESKPKRAIKNTDDDDDDCGTIDELPPDSLITLVQPELPTLSRLWLAALKDYALLTLPAEFSSQLPPDGGAFYTPETIDTARLHYRNSWAPILHAVALWLNSTGFTCSESTEAAAISGLQKRSTSVNLNQASGAVGSAKSLPEINKDRMHLILGVSIQFLCSPRPEEPIEHVTACLQALHTLLDSPYARVHIAEDQLIGVELLSVLHRLLLTWNPSSVQLLVTGVVQQIVRAAQDYLQEKRNTLNEDDMEKEACTVLGEGGDSGGLIPGKSLVFATMELLMFILVRHMPHLSTKVSDSPSHIATKTRLSEESARLVAATVTILSDLPSLCSPAGCMTILPTILFLIARILKDTAIKSADNQVPPPVSAALQGIKSIVTLSMAKTEAGVQKQWTALIRSTLACILEYSQPEDSVPTPDEVSMLTAIALFLWSASNEIIGVQSLQNGCMNRFKNALNSCDPWVQAKCYQLLLSVFQHSNRALSTPYIHSLAPIVVEKLKAVERNRPASNIELLAVQEGIKVLETLVALGEEQNILGSQPESTLRSLPPDPILLPPAHNSQAPVIYPPRPPKVLGLQA

SEQ ID NO: 903148 - protein, 1396 aa, Homo sapiens
RCAERLNNLKTSPEAVSGYSFAMAALLGGVHQCPLGIPHAKGKMVVSIAEDLLRTAAQNSRLSLQRTQAGWLLLGALMTLGPSVVRYHLPKMLLLWRNVFPRSLKELEAEKARGDSFTWQVTLEGRAGALCAMRSFVAHCPELLTEDVIRKLMTPIECAMTMMSHIPSVMKAHGAHLKASAAMVRLRLYDILALLPPKTYEGSFNALLRELVAEFTLTDNSANTTTSLLRSLCHYDDSVLLGSWLQETDHKSIEDQLQPNSASGSGALEHDPSSIYLRIPAGEAVPGPLPLGVSVIDASVALFGVVFPHVSYKHRLQMLDHFAECVKQAKGVRQQAVQLNIFTAVLSALKGLAENKSTLGPEEVRKSALTLVMGPLDNPNPILRCAAGEALGRMAQVVGEATFIARMAQYSFDKLKSARDVVSRTGHSLALGCLHRYVGGIGSGQHLKTSVSILLALAQDGTSPEVQTWSLHSLALIVDSSGPMYRGYVEPTLSLVLTLLLTVPPSHTEVHQCLGRCLGAIITTVGPELQGNGATTSTIRSSCLVGCAITQDHSDSLVQAAAISCLQQLHMFAPRHVNLSSLVPSLCVHLCSSHLLLRRAAVACLRQLAQREAAEVCEYAMSLAKNTGDKESSSANVSPFAPGVSSRTDIHCRHQGVNITETGLEGLLFGMLDRETDRKLCSDIHDTLGHMLSSLAVEKLSHWLMLCKDVLAASSDMSTATLLSSGKDEEAEKKDEMDDDTMFTTLGEEDKSKPFVAPRWATRVFAADCLCRIINLCENADQAHFDLALARSAKLRNPTNDLLVLHLSDLIRMAFMAATDHSNQLRMAGLQALEDIIKKFASVPEPEFPGHVILEQYQANVGAALRPAFSQDTPSDIIAKACQVCSTWIGSGVVSDLNDLRRVHNLLVSSLDKVQAGKGSSSQLYRESATTMEKLAVLKAWAEVYVVAMNIKKEAESKPKRAIKNTDDDDDDCGTIDELPPDSLITLVQPELPTLSRLWLAALKDYALLTLPAEFSSQLPPDGGAFYTPETIDTARLHYRNSWAPILHAVALWLNSTGFTCSESTEAAAISGLQKRSTSVNLNQASGAVGSAKSLPEINKDRMHLILGVSIQFLCSPRPEEPIEHVTACLQALHTLLDSPYARVHIAEDQLIGVELLSVLHRLLLTWNPSSVQLLVTGVVQQIVRAAQDYLQEKRNTLNEDDMEKEACTVLGEGGDSGGLIPGKSLVFATMELLMFILVRHMPHLSTKVSDSPSHIATKTRLSEESARLVAATVTILSDLPSLCSPAGCMTILPTILFLIARILKDTAIKSADNQVPPPVSAALQGIKSIVTLSMAKTEAGVQKQWTALIRSTLACILEYSQPGSSQMLPASPLSLPAFQSCPFNSLYSFISSNSG

SEQ ID NO: 903149 - protein, 989 aa, Homo sapiens
MKVVNLKQAILQAWKERWSDYQWAINMKKFFPKGATWDILNLADALLEQAMIGPSPNPLILSYLKYAISSQMVSYSSVLTAISKFDDFSRDLCVQALLDIMDMFCDRLSCHGKAEECIGLCRALLSALHWLLRCTAASAERLREGLEAGTPAAGEKQLAMCLQRLEKTLSSTKNRALLHIAKLEEASSWTAIEHSLLKLGEILANLSNPQLRSQAEQCGTLIRSIPTMLSVHAEQMHKTGFPTVHAVILLEGTMNLTGETQSLVEQLTMVKRMQHIPTPLFVLEIWKACFVGLIESPEGTEELKWTAFTFLKIPQVLVKLKKYSHGDKDFTEDVNCAFEFLLKLTPLLDKADQRCNCDCTNFLLQECGKQGLLSEASVNNLMAKRKADREHAPQQKSGENANIQPNIQLILRAEPTVTNILKTMDADHSKSPEGLLGVLGHMLSGKSLDLLLAAAAATGKLKSFARKFINLNEFTTYGSEESTKPASVRALLFDISFLMLCHVAQTYGSEVILSESRTGAEVPFFETWMQTCMPEEGKILNPDHPCFRPDSTKVESLVALLNNSSEMKLVQMKWHEACLSISAAILEILNAWENGVLAFESIQKITDNIKGKVCSLAVCAVAWLVAHVRMLGLDEREKSLQMIRQLAGPLFSENTLQFYNERVVIMNSILERMCADVLQQTATQIKFPSTGVDTMPYWNLLPPKRPIKEVLTDIFAKVLEKGWVDSRSIHIFDTLLHMGGVYWFCNNLIKELLKETRKEHTLRAVELLYSIFCLDMQQVTLVLLGHILPGLLTDSSKWHSLMDPPGTALAKLAVWCALSSYSSHKGQASTRQKKRHREDIEDYISLFPLDDVQPSKLMRLLSSNEDDANILSSPTDRSMSSSLSASQLHTVNMRDPLNRVLANLFLLISSILGSRTAGPHTQFVQWFMEECVDCLEQGGRGSVLQFMPFTTVSELVKVSAMSSPKVVLAITDLSLPLGRQVAAKAIAAL

SEQ ID NO: 903150 - protein, 1010 aa, Homo sapiens
VPKWRCLPPRTGLCAPFLSPQSWPPPLPPAQSEIMKVVNLKQAILQAWKERWSDYQWAINMKKFFPKGATWDILNLADALLEQAMIGPSPNPLILSYLKYAISSQFDDFSRDLCVQALLDIMDMFCDRLSCHGKAEECIGLCRALLSALHWLLRCTAASAERLREGLEAGTPAAGEKQLAMCLQRLEKTLSSTKNRALLHIAKLEEASSWTAIEHSLLKLGEILANLSNPQLRSQAEQCGTLIRSIPTMLSVHAEQMHKTGFPTVHAVILLEGTMNLTGETQSLVEQLTMVKRMQHIPTPLFVLEIWKACFVGLIESPEGTEELKWTAFTFLKIPQVLVKLKKYSHGDKDFTEDVNCAFEFLLKLTPLLDKADQRCNCDCTNFLLQECGKQGLLSEASVNNLMAKRKADREHAPQQKSGENANIQPNIQLILRAEPTVTNILKTMDADHSKSPEGLLGVLGHMLSGKSLDLLLAAAAATGKLKSFARKFINLNEFTTYGSEESTKPASVRALLFDISFLMLCHVAQTYGSEVILSESRTGAEVPFFETWMQTCMPEEGKILNPDHPCFRPDSTKVESLVALLNNSSEMKLVQMKWHEACLSISAAILEILNAWENGVLAFESIQKITDNIKGKVCSLAVCAVAWLVAHVRMLGLDEREKSLQMIRQLAGPLFSENTLQFYNERVVIMNSILERMCADVLQQTATQIKFPSTGVDTMPYWNLLPPKRPIKEVLTDIFAKVLEKGWVDSRSIHIFDTLLHMGGVYWFCNNLIKELLKETRKEHTLRAVELLYSIFCLDMQQVTLVLLGHILPGLLTDSSKWHSLMDPPGTALAKLAVWCALSSYSSHKGQASTRQKKRHREDIEDYISLFPLDDVQPSKLMRLLSSNEDDANILSSPTDRSMSSSLSASQLHTVNMRDPLNRVLANLFLLISSILGSRTAGPHTQFVQWFMEECVDCLEQGGRGSVLQFMPFTTVSELVKVSAMSSPKVVLAITDLSLPLGRQVAAKAIAAL

SEQ ID NO: 903151 - protein, 1033 aa, Homo sapiens
MKVVNLKQAILQAWKERWSDYQWAINMKKFFPKGATWDILNLADALLEQAMIGPSPNPLILSYLKYAISSQMVSYSSVLTAISKFDDFSRDLCVQALLDIMDMFCDRLSCHGKAEECIGLCRALLSALHWLLRCTAASAERLREGLEAGTPAAGEKQLAMCLQRLEKTLSSTKNRALLHIAKLEEASSWTAIEHSLLKLGEILANLSNPQLRSQAEQCGTLIRSIPTMLSVHAEQMHKTGFPTVHAVILLEGTMNLTGETQSLVEQLTMVKRMQHIPTPLFVLEIWKACFVGLIESPEGTEELKWTAFTFLKIPQVLVKLKKYSHGDKDFTEDVNCAFEFLLKLTPLLDKADQRCNCDCTNFLLQECGKQGLLSEASVNNLMAKRKADREHAPQQKSGENANIQPNIQLILRAEPTVTNILKTMDADHSKSPEGLLGVLGHMLSGKSLDLLLAAAAATGKLKSFARKFINLNEFTTYGSEESTKPASVRALLFDISFLMLCHVAQTYGSEVILSESRTGAEVPFFETWMQTCMPEEGKILNPDHPCFRPDSTKVESLVALLNNSSEMKLVQMKWHEACLSISAAILEILNAWENGVLAFESIQKITDNIKGKVCSLAVCAVAWLVAHVRMLGLDEREKSLQMIRQLAGPLFSENTLQFYNERVVIMNSILERMCADVLQQTATQIKFPSTGVDTMPYWNLLPPKRPIKEVLTDIFAKVLEKGWVDSRSIHIFDTLLHMGGVYWFCNNLIKELLKETRKEHTLRAVELLYSIFCLDMQQVTLVLLGHILPGLLTDSSKWHSLMDPPGTALAKLAVWCALSSYSSHKGQASTRQKKRHREDIEDYISLFPLDDVQPSKLMRLLSSNEDDANILSSPIRSSLGSPCTSYLRWVKVGLGHPRGAPLLHSAGCFPALHLLRPTADRSMSSSLSASQLHTVNMRDPLNRVLANLFLLISSILGSRTAGPHTQFVQWFMEECVDCLEQGGRGSVLQFMPFTTVSELVKVSAMSSPKVVLAITDLSLPLGRQVAAKAIAAL

SEQ ID NO: 903152 - protein, 427 aa, Homo sapiens
ALLRMKLVQMKWHEACLSISAAILEILNAWENGVLAFESIQKITDNIKGKVCSLAVCAVAWLVAHVRMLGLDEREKSLQMIRQLAGPLFSENTLQFYNERVVIMNSILERMCADVLQQTATQIKFPSTGVDTMPYWNLLPPKRPIKEVLTDIFAKVLEKGWVDSRSIHIFDTLLHMGGVYWFCNNLIKELLKETRKEHTLRAVELLYSIFCLDMQQVTLVLLGHILPGLLTDSSKWHSLMDPPGTALAKLAVWCALSSYSSHKGQASTRQKKRHREDIEDYISLFPLDDVQPSKLMRLLSSNEDDANILSSPTDRSMSSSLSASQLHTVNMRDPLNRVLANLFLLISSILGSRTAGPHTQFVQWFMEECVDCLEQGGRGSVLQFMPFTTVSELVKVSAMSSPKVVLAITDLSLPLGRQVAAKAIAAL

SEQ ID NO: 903153 - protein, 225 aa, Homo sapiens
RVHACGKAKALWTKKVSPVYIRILPGLLTDSSKWHSLMDPPGTALAKLAVWCALSSYSSHKGQASTRQKKRHREDIEDYISLFPLDDVQPSKLMRLLSSNEDDANILSSPTDRSMSSSLSASQLHTVNMRDPLNRVLANLFLLISSILGSRTAGPHTQFVQWFMEECVDCLEQGGRGSVLQFMPFTTVSELVKVSAMSSPKVVLAITDLSLPLGRQVAAKAIAAL

SEQ ID NO: 903154 - protein, 167 aa, Homo sapiens
MAPTTTGYPRGKRHREDIEDYISLFPLDDVQPSKLMRLLSSNEDDANILSSPTDRSMSSSLSASQLHTVNMRDPLNRVLANLFLLISSILGSRTAGPHTQFVQWFMEECVDCLEQGGRGSVLQFMPFTTVSELVKVSAMSSPKVVLAITDLSLPLGRQVAAKAIAAL

SEQ ID NO: 903155 - protein, 880 aa, Homo sapiens
MKVVNLKQAILQAWKERWSDYQWAINMKKFFPKGATWDILNLADALLEQAMIGPSPNPLILSYLKYAISSQMVSYSSVLTAISKFDDFSRDLCVQALLDIMDMFCDRLSCHGKAEECIGLCRALLSALHWLLRCTAASAERLREGLEAGTPAAGEKQLAMCLQRLEKTLSSTKNRALLHIAKLEEASSWTAIEHSLLKLGEILANLSNPQLRSQAEQCGTLIRSIPTMLSVHAEQMHKTGFPTVHAVILLEGTMNLTGETQSLVEQLTMVKRMQHIPTPLFVLEIWKACFVGLIESPEGTEELKWTAFTFLKIPQVLVKLKKYSHGDKDFTEDVNCAFEFLLKLTPLLDKADQRCNCDCTNFLLQECGKQGLLSEASVNNLMAKRKADREHAPQQKSGENANIQPNIQLILRAEPTVTNILKTMDADHSKSPEGLLGVLGHMLSGKSLDLLLAAAAATGKLKSFARKFINLNEFTTYGSEESTKPASVRALLFDISFLMLCHVAQTYGSEVILSESRTGAEVPFFETWMQTCMPEEGKILNPDHPCFRPDSTKVESLVALLNNSSEMKLVQMKWHEACLSISAAILEILNAWENGVLAFESIQKITDNIKGKVCSLAVCAVAWLVAHVRMLGLDEREKSLQMIRQLAGPLFSENTLQFYNERVVIMNSILERMCADVLQQTATQIKFPSTGVDTMPYWNLLPPKRPIKEVLTDIFAKVLEKGWVDSRSIHIFDTLLHMGGVYWFCNNLIKELLKETRKEHTLRAVELLYSIFCLDMQQVTLVLLGHILPGLLTDSSKWHSLMDPPGTALAKLAVWCALSSYSSHKGQASTRQKKRHREDIEDYISLFPLDDVQPSKLMRLLSSNEDDANILSSPISISDP

SEQ ID NO: 903156 - protein, 851 aa, Homo sapiens
MKVVNLKQAILQAWKERWSDYQWAINMKKFFPKGATWDILNLADALLEQAMIGPSPNPLILSYLKYAISSQMVSYSSVLTAISKFDDFSRDLCVQALLDIMDMFCDRLSCHGKAEECIGLCRALLSALHWLLRCTAASAERLREGLEAGTPAAGEKQLAMCLQRLEKTLSSTKNRALLHIAKLEEASSWTAIEHSLLKLGEILANLSNPQLRSQAEQCGTLIRSIPTMLSVHAEQMHKTGFPTVHAVILLEGTMNLTGETQSLVEQLTMVKRMQHIPTPLFVLEIWKACFVGLIESPEGTEELKWTAFTFLKIPQVLVKLKKYSHGDKDFTEDVNCAFEFLLKLTPLLDKADQRCNCDCTNFLLQECGKQGLLSEASVNNLMAKRKADREHAPQQKSGENANIQPNIQLILRAEPTVTNILKTMDADHSKSPEGLLGVLGHMLSGKSLDLLLAAAAATGKLKSFARKFINLNEFTTYGSEESTKPASVRALLFDISFLMLCHVAQTYGSEVILSESRTGAEVPFFETWMQTCMPEEGKILNPDHPCFRPDSTKVESLVALLNNSSEMKLVQMKWHEACLSISAAILEILNAWENGVLAFESIQKITDNIKGKVCSLAVCAVAWLVAHVRMLGLDEREKSLQMIRQLAGPLFSENTLQFYNERVVIMNSILERMCADVLQQTATQIKFPSTGVDTMPYWNLLPPKRPIKEVLTDIFAKVLEKGWVDSRSIHIFDTLLHMGGVYWFCNNLIKELLKETRKEHTLRAVELLYSIFCLDMQQVTLVLLGHILPGLLTDSSKWHSLMDPPGTALAKLAVWCALSSYSSHKGQASTRQRKVFPSDNHVGWAGLYIIG

SEQ ID NO: 903157 - protein, 472 aa, Homo sapiens
MKVVNLKQAILQAWKERWSDYQWAINMKKFFPKGATWDILNLADALLEQAMIGPSPNPLILSYLKYAISSQMVSYSSVLTAISKFDDFSRDLCVQALLDIMDMFCDRLSCHGKAEECIGLCRALLSALHWLLRCTAASAERLREGLEAGTPAAGEKQLAMCLQRLEKTLSSTKNRALLHIAKLEEASSWTAIEHSLLKLGEILANLSNPQLRSQAEQCGTLIRSIPTMLSVHAEQMHKTGFPTVHAVILLEGTMNLTGETQSLVEQLTMVKRMQHIPTPLFVLEIWKACFVGLIESPEGTEELKWTAFTFLKIPQVLVKLKKYSHGDKDFTEDVNCAFEFLLKLTPLLDKADQRCNCDCTNFLLQECGKQGLLSEASVNNLMAKRKADREHAPQQKSGENANIQPNIQLILRAEPTVTNILKTMDADHSKSPEGLLGVLGHMLSGKSLDLLLAAAAATGKLKSFARKFINFE

SEQ ID NO: 903158 - protein, 119 aa, Homo sapiens
MSFSLAPFLSPQSWPPPLPPAQSEIMKVVNLKQAILQAWKERWSDYQWAINMKKFFPKGATWDILNLADALLEQAMIGPSPNPLILSYLKYAISSQMVSYSSVLTAISTHIRSTWCKSL

SEQ ID NO: 903159 - protein, 989 aa, Homo sapiens; identical to SEQ ID NO: 903149

SEQ ID NO: 903160 - protein, 989 aa, Homo sapiens; identical to SEQ ID NO: 903149

SEQ ID NO: 903161 - protein, 558 aa, Homo sapiens
  misc_feature (9)..(10): Xaa can be any naturally occurring amino acid
  misc_feature (16)..(16): Xaa can be any naturally occurring amino acid
  misc_feature (36)..(36): Xaa can be any naturally occurring amino acid
  misc_feature (39)..(39): Xaa can be any naturally occurring amino acid
RPQSLGWAXXQQPGGXTVQPQVPALAGAAPSPLGWXPPXPLSQVILSESRTGAEVPFFETWMQTCMPEEGKILNPDHPCFRPDSTKVESLVALLNNSSEMKLVSVARAPTPRVAVGEGQDPLPEPVPCSPVLTSLHTRRQMKWHEACLSISAAILEILNAWENGVLAFESIQKITDNIKGKVCSLAVCAVAWLVAHVRMLGLDEREKSLQMIRQLAGPLFSENTLQFYNERVVIMNSILERMCADVLQQTATQIKFPSTGVDTMPYWNLLPPKRPIKEVLTDIFAKVLEKGWVDSRSIHIFDTLLHMGGVYWFCNNLIKELLKETRKEHTLRAVELLYSIFCLDMQQVTLVLLGHILPGLLTDSSKWHSLMDPPGTALAKLAVWCALSSYSSHKGQASTRQKKRHREDIEDYISLFPLDDVQPSKLMRLLSSNEDDANILSSPTDRSMSSSLSASQLHTVNMRDPLNRVLANLFLLISSILGSRTAGPHTQFVQWFMEECVDCLEQGGRGSVLQFMPFTTVSELVKVSAMSSPKVVLAITDLSLPLGRQVAAKAIAAL

SEQ ID NO: 903162 - protein, 324 aa, Homo sapiens [sequence omitted]

SEQ ID NO: 903163 - protein, 886 aa, Homo sapiens
  misc_feature (875)..(875): Xaa can be any naturally occurring amino acid
MKVVNLKQAILQAWKERWSDYQWAINMKKFFPKGATWDILNLADALLEQAMIGPSPNPLILSYLKYAISSQMVSYSSVLTAISKFDDFSRDLCVQALLDIMDMFCDRLSCHGKAEECIGLCRALLSALHWLLRCTAASAERLREGLEAGTPAAGEKQLAMCLQRLEKTLSSTKNRALLHIAKLEEASSWTAIEHSLLKLGEILANLSNPQLRSQAEQCGTLIRSIPTMLSVHAEQMHKTGFPTVHAVILLEGTMNLTGETQSLVEQLTMVKRMQHIPTPLFVLEIWKACFVGLIESPEGTEELKWTAFTFLKIPQVLVKLKKYSHGDKDFTEDVNCAFEFLLKLTPLLDKADQRCNCDCTNFLLQECGKQGLLSEASVNNLMAKRKADREHAPQQKSGENANIQPNIQLILRAEPTVTNILKTMDADHSKSPEGLLGVLGHMLSGKSLDLLLAAAAATGKLKSFARKFINLNEFTTYGSEESTKPASVRALLFDISFLMLCHVAQTYGSEVILSESRTGAEVPFFETWMQTCMPEEGKILNPDHPCFRPDSTKVESLVALLNNSSEMKLVQMKWHEACLSISAAILEILNAWENGVLAFESIQKITDNIKGKVCSLAVCAVAWLVAHVRMLGLDEREKSLQMIRQLAGPLFSENTLQFYNERVVIMNSILERMCADVLQQTATQIKFPSTGVDTMPYWNLLPPKRPIKEVLTDIFAKVLEKGWVDSRSIHIFDTLLHMGGVYWFCNNLIKELLKETRKEHTLRAVELLYSIFCLDMQQVTLVLLGHILPGLLTDSSKWHSLMDPPGTALAKLAVWCALSSYSSHKGQASTRQKKRHREDIEDYISLFPLDDVQPSKLMRLLSSNEDDANILSSPXPPAPMSSSPLS

SEQ ID NO: 903164 - protein, 860 aa, Homo sapiens
MKVVNLKQAILQAWKERWSDYQWAINMKKFFPKGATWDILNLADALLEQAMIGPSPNPLILSYLKYAISSQMVSYSSVLTAISKFDDFSRDLCVQALLDIMDMFCDRLSCHGKAEECIGLCRALLSALHWLLRCTAASAERLREGLEAGTPAAGEKQLAMCLQRLEKTLSSTKNRALLHIAKLEEASSWTAIEHSLLKLGEILANLSNPQLRSQAEQCGTLIRSIPTMLSVHAEQMHKTGFPTVHAVILLEGTMNLTGETQSLVEQLTMVKRMQHIPTPLFVLEIWKACFVGLIESPEGTEELKWTAFTFLKIPQVLVKLKKYSHGDKDFTEDVNCAFEFLLKLTPLLDKADQRCNCDCTNFLLQECGKQGLLSEASVNNLMAKRKADREHAPQQKSGENANIQPNIQLILRAEPTVTNILKTMDADHSKSPEGLLGVLGHMLSGKSLDLLLAAAAATGKLKSFARKFINLNEFTTYGSEESTKPASVRALLFDISFLMLCHVAQTYGSEVILSESRTGAEVPFFETWMQTCMPEEGKILNPDHPCFRPDSTKVESLVALLNNSSEMKLVQMKWHEACLSISAAILEILNAWENGVLAFESIQKITDNIKGKVCSLAVCAVAWLVAHVRMLGLDEREKSLQMIRQLAGPLFSENTLQFYNERVVIMNSILERMCADVLQQTATQIKFPSTGVDTMPYWNLLPPKRPIKEVLTDIFAKVLEKGWVDSRSIHIFDTLLHMGGVYWFCNNLIKELLKETRKEHTLRAVELLYSIFCLDMQQVTLVLLGHILPGLLTDSSKWHSLMDPPGTALAKLAVWCALSSYSSHKGQASTRQKKRHREDIEDYIAKLEEACMSLDSTLSP

SEQ ID NO: 903165 - protein, 472 aa, Homo sapiens; identical to SEQ ID NO: 903157

SEQ ID NO: 903166 - protein, 676 aa, Homo sapiens
MKVVNLKQAILQAWKERWSDYQWAINMKKFFPKGATWDILNLADALLEQAMIGPSPNPLILSYLKYAISSQMVSYSSVLTAISKFDDFSRDLCVQALLDIMDMFCDRLSCHGKAEECIGLCRALLSALHWLLRCTAASAERLREGLEAGTPAAGEKQLAMCLQRLEKTLSSTKNRALLHIAKLEEASSWTAIEHSLLKLGEILANLSNPQLRSQAEQCGTLIRSIPTMLSVHAEQMHKTGFPTVHAVILLEGTMNLTGETQSLVEQLTMVKRMQHIPTPLFVLEIWKACFVGLIESPEGTEELKWTAFTFLKIPQVLVKLKKYSHGDKDFTEDVNCAFEFLLKLTPLLDKADQRCNCDCTNFLLQECGKQGLLSEASVNNLMAKRKADREHAPQQKSGENANIQPNIQLILRAEPTVTNILKTMDADHSKSPEGLLGVLGHMLSGKSLDLLLAAAAATGKLKSFARKFINLNEFTTYGSEESTKPASVRALLFDISFLMLCHVAQTYGSEVILSESRTGAEVPFFETWMQTCMPEEGKILNPDHPCFRPDSTKVESLVALLNNSSEMKLVQMKWHEACLSISAAILEILNAWENGVLAFESIQKITDNIKGKVCSLAVCAVAWLVAHVRMLGLDEREKSLQMIRQLAGPLFSENTLQFYNERSVTCLPFSDPSSVL

SEQ ID NO: 903167 - protein, 677 aa, Homo sapiens
AELRIQPRAAANFSGLDQKFLAGQLLPPFISSFPSGSEEAISRHFHPSLATSPPPLIHKGARRRLPGHVGGGEGPTAAARPETRRPEPAPRTRAPAGRPQPSMSAATHSPMMQVASGNGDRDPLPPGWEIKIDPQTGWPFFVDHNSRTTTWNDPRVPSEGPKETPSSANGPSREGSRLPPAREGHPVYPQLRPGYIPIPVLHEGAENRQVHPFHVYPQPGMQRFRTEAAAAAPQRSQSPLRGMPETTQPDKQCGQVAAAAAAQPPASHGPERSQSPAASDCSSSSSSASLPSSGRSSLGSHQLPRGYISIPVIHEQNVTRPAAQPSFHQAQKTHYPAQQGEYQTHQPVYHKIQGDDWEPRPLRAASPFRSSVQGASSREGSPARSSTPLHSPSPIRVHTVVDRPQQPMTHRETAPVSQPENKPESKPGPVGPELPPGHIPIQVIRKEVDSKPVSQKPPPPSEKVEVKVPPAPVPCPPPSPGPSAVPSSPKSVATEERAAPSTAPAEATPPKPGEAEAPPKHPGVLKVEAILEKVQGLEQAVDNFEGKKTDKKYLMIEEYLTKELLALDSVDPEGRADVRQARRDGVRKVQTILEKLEQKAIDVPGQVQVYELQPSNLEADQPLQAIMEMGAVAADKGKKNAGNAEDPHTETQQPEATAAATSNPSSMTDTPGNPAAP

SEQ ID NO: 903168 - protein, 678 aa, Homo sapiens
MAKYEAGVESAEEFSGLDQKFLAGQLLPPFISSFPSGSEEAISRHFHPSLATSPPPLIHKGARRRLPGHVGGGEGPTAAARPETRRPEPAPRTRAPAGRPQPSMSAATHSPMMQVASGNGDRDPLPPGWEIKIDPQTGWPFFVDHNSRTTTWNDPRVPSEGPKETPSSANGPSREGSRLPPAREGHPVYPQLRPGYIPIPVLHEGAENRQVHPFHVYPQPGMQRFRTEAAAAAPQRSQSPLRGMPETTQPDKQCGQVAAAAAAQPPASHGPERSQSPAASDCSSSSSSASLPSSGRSSLGSHQLPRGYISIPVIHEQNVTRPAAQPSFHQAQKTHYPAQQGEYQTHQPVYHKIQGDDWEPRPLRAASPFRSSVQGASSREGSPARSSTPLHSPSPIRVHTVVDRPQQPMTHRETAPVSQPENKPESKPGPVGPELPPGHIPIQVIRKEVDSKPVSQKPPPPSEKVEVKVPPAPVPCPPPSPGPSAVPSSPKSVATEERAAPSTAPAEATPPKPGEAEAPPKHPGVLKVEAILEKVQGLEQAVDNFEGKKTDKKYLMIEEYLTKELLALDSVDPEGRADVRQARRDGVRKVQTILEKLEQKAIDVPGQVQVYELQPSNLEADQPLQAIMEMGAVAADKGKKNAGNAEDPHTETQQPEATAAATSNPSSMTDTPGNPAAP

SEQ ID NO: 903169 - protein, 682 aa, Homo sapiens
RVTRCVLVLIQSQGACISLVVDRQYLAGQLLPPFISSFPSGSEEAISRHFHPSLATSPPPLIHKGARRRLPGHVGGGEGPTAAARPETRRPEPAPRTRAPAGRPQPSMSAATHSPMMQVASGNGDRDPLPPGWEIKIDPQTGWPFFVDHNSRTTTWNDPRVPSEGPKETPSSANGPSREGSRLPPAREGHPVYPQLRPGYIPIPVLHEGAENRQVHPFHVYPQPGMQRFRTEAAAAAPQRSQSPLRGMPETTQPDKQCGQVAAAAAAQPPASHGPERSQSPAASDCSSSSSSASLPSSGRSSLGSHQLPRGYISIPVIHEQNVTRPAAQPSFHQAQKTHYPAQQGEYQTHQPVYHKIQGDDWEPRPLRAASPFRSSVQGASSREGSPARSSTPLHSPSPIRVHTVVDRPQQPMTHRETAPVSQPENKPESKPGPVGPELPPGHIPIQVIRKEVDSKPVSQKPPPPSEKVEVKVPPAPVPCPPPSPGPSAVPSSPKSVATEERAAPSTAPAEATPPKPGEAEAPPKHPGVLKVEAILEKVQGLEQAVDNFEGKKTDKKYLMIEEYLTKELLALDSVDPEGRADVRQARRDGVRKVQTILEKLEQKAIDVPGQVQVYELQPSNLEADQPLQAIMEMGAVAADKGKKNAGNAEDPHTETQQPEATAAATSNPSSMTDTPGNPAAP

SEQ ID NO: 903170 - protein, 677 aa, Homo sapiens; identical to SEQ ID NO: 903167

SEQ ID NO: 903171 - protein, 517 aa, Homo sapiens
MQETPSSANGPSREGSRLPPAREGHPVYPQLRPGYIPIPVLHEGAENRQVHPFHVYPQPGMQRFRTEAAAAAPQRSQSPLRGMPETTQPDKQCGQVAAAAAAQPPASHGPERSQSPAASDCSSSSSSASLPSSGRSSLGSHQLPRGYISIPVIHEQNVTRPAAQPSFHQAQKTHYPAQQGEYQTHQPVYHKIQGDDWEPRPLRAASPFRSSVQGASSREGSPARSSTPLHSPSPIRVHTVVDRPQQPMTHRETAPVSQPENKPESKPGPVGPELPPGHIPIQVIRKEVDSKPVSQKPPPPSEKVEVKVPPAPVPCPPPSPGPSAVPSSPKSVATEERAAPSTAPAEATPPKPGEAEAPPKHPGVLKVEAILEKVQGLEQAVDNFEGKKTDKKYLMIEEYLTKELLALDSVDPEGRADVRQARRDGVRKVQTILEKLEQKAIDVPGQVQVYELQPSNLEADQPLQAIMEMGAVAADKGKKNAGNAEDPHTETQQPEATAAATSNPSSMTDTPGNPAAP

SEQ ID NO: 903172 - protein, 229 aa, Homo sapiens
TKAKYEAGVESAEEKVEVKVPPAPVPCPPPSPGPSAVPSSPKSVATEERAAPSTAPAEATPPKPGEAEAPPKHPGVLKVEAILEKVQGLEQAVDNFEGKKTDKKYLMIEEYLTKELLALDSVDPEGRADVRQARRDGVRKVQTILEKLEQKAIDVPGQVQVYELQPSNLEADQPLQAIMEMGAVAADKGKKNAGNAEDPHTETQQPEATAAATSNPSSMTDTPGNPAAP

SEQ ID NO: 903173 - protein, 677 aa, Homo sapiens; identical to SEQ ID NO: 903167

SEQ ID NO: 903174 - protein, 635 aa, Homo sapiens
AELRIQPRAAANFSGLDQKFLAGQLLPPFISSFPSGSEEAISRHFHPSLATSPPPLIHKGARRRLPGHVGGGEGPTAAARPETRRPEPAPRTRAPAGRPQPSMSAATHSPMMQVASGNGDRDPLPPGWEIKIDPQTGWPFFVDHNSRTTTWNDPRVPSEGPKETPSSANGPSREGSRLPPAREGHPVYPQLRPGYIPIPVLHEGAENRQVHPFHVYPQPGMQRFRTEAAAAAPQRSQSPLRGMPETTQPDKQCGQVAAAAAAQPPASHGPERSQSPAASDCSSSSSSASLPSSGRSSLGSHQLPRGYISIPVIHEQNVTRPAAQPSFHQAQKTHYPAQQGEYQTHQPVYHKIQGDDWEPRPLRAASPFRSSVQGASSREGSPARSSTPLHSPSPIRVHTVVDRPQQPMTHRETAPVSQPENKPESKPGPVGPELPPGHIPIQVIRKEVDSKPVSQKPPPPSEKVEVKVPPAPVPCPPPSPGPSAVPSSPKSVATEERAAPSTAPAEATPPKPGEAEAPPKHPGVLKVEAILEKVQGLEQAVDNFEGKKTDKKYLMIEEYLTKELLALDSVDPEGRADVRQARRDGVRKVQTILEKLDLYVEVSGQHRGMVLRKDSRTLCYHWTFCAMEIQHCGLE

SEQ ID NO: 903175 - protein, 492 aa, Homo sapiens
  misc_feature (471)..(471): Xaa can be any naturally occurring amino acid
AELRIQPRAAANFSGLDQKFLAGQLLPPFISSFPSGSEEAISRHFHPSLATSPPPLIHKGARRRLPGHVGGGEGPTAAARPETRRPEPAPRTRAPAGRPQPSMSAATHSPMMQVASGNGDRDPLPPGWEIKIDPQTGWPFFVDHNSRTTTWNDPRVPSEGPKETPSSANGPSREGSRLPPAREGHPVYPQLRPGYIPIPVLHEGAENRQVHPFHVYPQPGMQRFRTEAAAAAPQRSQSPLRGMPETTQPDKQCGQVAAAAAAQPPASHGPERSQSPAASDCSSSSSSASLPSSGRSSLGSHQLPRGYISIPVIHEQNVTRPAAQPSFHQAQKTHYPAQQGEYQTHQPVYHKIQGDDWEPRPLRAASPFRSSVQGASSREGSPARSSTPLHSPSPIRVHTVVDRPQQPMTHRETAPVSQPENKPESKPGPVGPELPPGHIPIQVIRKEVDSKPVSQKPPPPSEKVEVKVPPXCSSSSSSASLPSSGRASLGSH

SEQ ID NO: 903176 - protein, 109 aa, Homo sapiens
SLLGSKPLCFPGRAHPLRTVPWARHLFTCRASGSSLQHQRSPSRDRVMAPHHPPASHRAVLQWGRAGIMWLLFVAKERLGRAHCSLPAPDAHRWREQSWDRKPGLPSGA

SEQ ID NO: 903177 - protein, 229 aa, Homo sapiens; identical to SEQ ID NO: 903172

SEQ ID NO: 903178 - protein, 677 aa, Homo sapiens; identical to SEQ ID NO: 903167

SEQ ID NO: 903179 - protein, 270 aa, Homo sapiens [sequence omitted]

SEQ ID NO: 903180 - protein, 368 aa, Homo sapiens
LHSFLEFIDTSHSSSSLLLEHLKTHYPAQQGEYQTHQPVYHKIQGDDWEPRPLRAASPFRSSVQGASSREGSPARSSTPLHSPSPIRVHTVVDRPQQPMTHRETAPVSQPENKPESKPGPVGPELPPGHIPIQVIRKEVDSKPVSQKPPPPSEKVEVKVPPAPVPCPPPSPGPSAVPSSPKSVATEERAAPSTAPAEATPPKPGEAEAPPKHPGVLKVEAILEKVQGLEQAVDNFEGKKTDKKYLMIEEYLTKELLALDSVDPEGRADVRQARRDGVRKVQTILEKLEQKAIDVPGQVQVYELQPSNLEADQPLQAIMEMGAVAADKGKKNAGNAEDPHTETQQPEATAAATSNPSSMTDTPGNPAAP

SEQ ID NO: 903181 - protein, 123 aa, Homo sapiens [sequence omitted]

SEQ ID NO: 903182 - protein, 350 aa, Homo sapiens
AELRIQPRAAANFSGLDQKFLAGQLLPPFISSFPSGSEEAISRHFHPSLATSPPPLIHKGARRRLPGHVGGGEGPTAAARPETRRPEPAPRTRAPAGRPQPSMSAATHSPMMQVASGNGDRDPLPPGWEIKIDPQTGWPFFVDHNSRTTTWNDPRVPSEGPKETPSSANGPSREGSRLPPAREGHPVYPQLRPGYIPIPVLHEGAENRQVHPFHVYPQPGMQRFRTEAAAAAPQRSQSPLRGMPETTQPDKQCGQVAAAAAAQPPASHGPERSQSPAASDCSSSSSSASLPSSGRSSLGSHQLPRGYISIPVIHEQKLGWRQNTNKRAKKENDAFLLYSYSVQIKKLLVV

SEQ ID NO: 903183 - protein, 214 aa, Homo sapiens
AELRIQPRAAANFSGLDQKFLAGQLLPPFISSFPSGSEEAISRHFHPSLATSPPPLIHKGARRRLPGHVGGGEGPTAAARPETRRPEPAPRTRAPAGRPQPSMSAATHSPMMQVASGNGDRDPLPPGWEIKIDPQTGWPFFVDHNSRTTTWNDPRVPSEGPKETPSSANGPSREGSRLPPAREGHPVYPQLRPGYIPIPVLHEGTVFCSSGLEG

SEQ ID NO: 903184 - protein, 840 aa, Homo sapiens [sequence omitted]

SEQ ID NO: 903185 - protein, 840 aa, Homo sapiens [sequence omitted]

SEQ ID NO: 903186 - protein, 881 aa, Homo sapiens
MMSIQEKSKENSSKVTKKSDDKNSETEIQDSQKNLAKKSGPKETIKSQAKSSSESKINQPELETRMSTRSSKAASNDKATKSINKNTVTVRGYSQESTKKKLSQKKLVHENPKANEQLNRRSQRLQQLTEVSRRSLRSREIQGQVQAVKQSLPPTKKEQCSSTQSKSNKTSQKHVKRKVLEVKSDSKEDENLVINEVINSPKGKKRKVEHQTACACSSQCMQGSEKCPQKTTRRDETKPVPVTSEVKRSKMATSVVPKKNEMKKSVHTQVNTNTTLPKSPQPSVPEQSDNELEQAGKSKRGSILQLCEEIAGEIESDNVEVKKESSQMESVKEEKPTEIKLEETSVERQILHQKETNQDVQCNRFFPSRKTKPVKCILNGINSSAKKNSNWTKIKLSKFNSVQHNKLDSQVSPKLGLLRTSFSPPALEMHHPVTQSTFLGTKLHDRNITCQQEKMKEINSEEVKINDITVEINKTTERAPENCHLANEIKPSDPPLDNQMKHSFDSASNKNFSQCLESKLENSPVENVTAASTLLSQAKIDTGENKFPGSAPQQHSILSNQTSKSSDNRETPRNHSLPKCNSHLEITIPKDLKLKEAEKTDEKQLIIDAGQKRFGAVSCNVCGMLYTASNPEDETQHLLFHNQFISAVKYVVLLINHHECGSEEEFITSLFLSMFNFRYTQRSFSFPIRFLEGWKKERILAEYPDGRIIMVLPEDPKYALKKVDEIREMVDNDLGFQQAPLMCYSRTKTLLFISNDKKVVGCLIAEHIQWGYRVIEEKLPVIRSEEEKVRFERQKAWCCSTLPEPAICGISRIWVFSMMRRKKIASRMIECLRSNFIYGSYLSKEEIAFSDPTPDGKLFATQYCGTGQFLVYNFINGQNST

SEQ ID NO: 903187 - protein, 156 aa, Homo sapiens
MQWNVPRTVSRLARRTCLEPHNAGLFGHCQNVKGPLLLYNAESKVVLVQGPQKQWLHLSAAQCVAKERRPLDAHPPQPGVLRHKQGKQHVSFRRVFSSSATAQGTPEKKEEPDPLQDKSISLYQRFKKTFRQYGKVLIPVHLITSGVGLEHFIMQP

SEQ ID NO: 903188 - protein, 156 aa, Homo sapiens; identical to SEQ ID NO: 903187

SEQ ID NO: 903189 - protein, 156 aa, Homo sapiens; identical to SEQ ID NO: 903187

SEQ ID NO: 903190 - protein, 840 aa, Homo sapiens [sequence omitted]

SEQ ID NO: 903191 - protein, 881 aa, Homo sapiens; identical to SEQ ID NO: 903186

SEQ ID NO: 903192 - protein, 156 aa, Homo sapiens; identical to SEQ ID NO: 903187

SEQ ID NO: 903193 - protein, 156 aa, Homo sapiens; identical to SEQ ID NO: 903187

SEQ ID NO: 903194 - protein, 149 aa, Homo sapiens
RRRRKLDTTPDERKEVLRDTLPWLCNLHDILLRDVASGQRVVLACSALKKTYRDILTQGKDGVALKCEESGKEAKQAEMQLLVVHLSGSFEVISGRLLKREGHFMPPELLQSQFETLEPPAAPENFIQISVDKNVSEIIATIMETLKMK

SEQ ID NO: 903195 - protein, 184 aa, Homo sapiens
MAAPGALLVMGVSGSTVGALLASELGWKFYDADDYHPEENRRKMGKGIPLNDQDRIPWLCNLHDILLRDVASGQRVVLACSALKKTYRDILTQGKDGVALKCEESGKEAKQAEMQLLVVHLSGSFEVISGRLLKREGHFMPPELLQSQFETLEPPAAPENFIQISVDKNVSEIIATIMETLKMK

SEQ ID NO: 903196 - protein, 150 aa, Homo sapiens
RAQRGTALTAPAGARAAPPLERRVGRGRRGPEGDGKEPSLGYGGAGRAAGDGRERTLALSPRLEYSGVISARCNLCLLSSGDCHASASGVAGVTGVHHNTQLGFVFLVETGFCRVGRAGPELLASGDPPASASQSAGIIGVSQGLNLTWS

SEQ ID NO: 903197 - protein, 150 aa, Homo sapiens; identical to SEQ ID NO: 903196

SEQ ID NO: 903198 - protein, 148 aa, Homo sapiens
PTLPPRFPPSTPPWPFRDRIPWLCNLHDILLRDVASGQRVVLACSALKKTYRDILTQGKDGVALKCEESGKEAKQAEMQLLVVHLSGSFEVISGRLLKREGHFMPPELLQSQFETLEPPAAPENFIQISVDKNVSEIIATIMETLKMK

SEQ ID NO: 903199 - protein, 189 aa, Homo sapiens
MANRGPAYGLSREVQQKIEKQYDADLEQILIQWITTQCRKDVGRPQPGRENFQNWLKDGTVLCELINALYPEGQAPVKKIQASTMAFKQMEQISQFLQAAERYGINTTDIFQTVDLWEGKNMACVQRTLMNLGGLAVARDDGLFSGDPNWFPKKSKENPRNFSDNQLQEGKNVIGLHDGHQTAGRLRQA

SEQ ID NO: 903200 - protein, 189 aa, Homo sapiens; identical to SEQ ID NO: 903199

SEQ ID NO: 903201 - protein, 189 aa, Homo sapiens; identical to SEQ ID NO: 903199

SEQ ID NO: 903202 - protein, 189 aa, Homo sapiens; identical to SEQ ID NO: 903199

SEQ ID NO: 903203 - protein, 189 aa, Homo sapiens; identical to SEQ ID NO: 903199

SEQ ID NO: 903204 - protein, 189 aa, Homo sapiens; identical to SEQ ID NO: 903199

SEQ ID NO: 903205 - protein, 189 aa, Homo sapiens; identical to SEQ ID NO: 903199

SEQ ID NO: 903206 - protein, 189 aa, Homo sapiens; identical to SEQ ID NO: 903199

SEQ ID NO: 903207 - protein, 189 aa, Homo sapiens; identical to SEQ ID NO: 903199

SEQ ID NO: 903208 - protein, 189 aa, Homo sapiens; identical to SEQ ID NO: 903199

SEQ ID NO: 903209 - protein, 189 aa, Homo sapiens; identical to SEQ ID NO: 903199

SEQ ID NO: 903210 - protein, 189 aa, Homo sapiens; identical to SEQ ID NO: 903199

SEQ ID NO: 903211 - protein, 176 aa, Homo sapiens
MANRGPAYGLSREVQQKIEKQYDADLEQILIQWITTQCRKDVGRPQPGRENFQNWLKDGTQAPVKKIQASTMAFKQMEQISQFLQAAERYGINTTDIFQTVDLWEGKNMACVQRTLMNLGGLAVARDDGLFSGDPNWFPKKSKENPRNFSDNQLQEGKNVIGLHDGHQTAGRLRQA

SEQ ID NO: 903212 - protein, 209 aa, Homo sapiens
MANRGPAYGLSREVQQKIEKQYDADLEQILIQWITTQCRKDVGRPQPGRENFQNWLKDGTLCELINALYPELHSLEDVSGVNAIALSCLQELRDLLHRLKAMVEAQIFFTGACPSGYSALMSSHSTVAILEPVLDLWEGKNMACVQRTLMNLGGLAVARDDGLFSGDPNWFPKKSKENPRNFSDNQLQEGKNVIGLHDGHQTAGRLRQA

SEQ ID NO: 903213 - protein, 252 aa, Homo sapiens
MANRGPAYGLSREVQQKIEKQYDADLEQILIQWITTQCRKDVGRPQPGRENFQNWLKDGTVLCELINALYPEGQAPVKKIQASTMAFKQMEQISQFLQAAERYGINTTDIFQTVDLWEGKNMACVQRTGLGPWALPRNGLIYTGTIYILRSDIPREPQSSQAPFCQGGGFKPVLSPLRCLLASLSPHGLLIHSLPHSHQNWTNWPLPFPWDQNLGASVPHRHALAYSVSPSSPWPVLSLSSVSSVHSMAGSH

SEQ ID NO: 903214 - protein, 189 aa, Homo sapiens; identical to SEQ ID NO: 903199

SEQ ID NO: 903215 - protein, 189 aa, Homo sapiens; identical to SEQ ID NO: 903199

SEQ ID NO: 903216 - protein, 189 aa, Homo sapiens; identical to SEQ ID NO: 903199

SEQ ID NO: 903217 - protein, 196 aa, Homo sapiens
MANRGPAYGLSREVQQKIEKQYDADLEQILIQWITTQCRKDVGRPQPGRENFQNWLKDGTVLCELINALYPEGQAPVKKIQASTMAFKQMEQISQFLQAAERYGINTTDIFQTVDLWEGKNMACVQRTLMNLGGLAVARDDGLFSGDPNWFPKKSKENPRNFSDNQLQEGKAWGGIRGSGVASRSQSCLPETPRGW

SEQ ID NO: 903218 - protein, 132 aa, Homo sapiens
MANRGPAYGLSREVQQKIEKQYDADLEQILIQWITTQCRKDVGRPQPGRENFQNWLKDGTVLCELINALYPEGQAPVKKIQASTMAFKQMEQISQFLQAAERYGINTTDIFQTVDLWEERTWPRYIAGYPSS

SEQ ID NO: 903219 - protein, 58 aa, Homo sapiens
RSGICTEASVVMKIPGWAGRTTCSCSPCLESVRRSPARLNGEQVGGTGVGDMCVLCRK

SEQ ID NO: 903220 - protein, 189 aa, Homo sapiens; identical to SEQ ID NO: 903199

SEQ ID NO: 903221 - protein, 189 aa, Homo sapiens; identical to SEQ ID NO: 903199

SEQ ID NO: 903222 - protein, 189 aa, Homo sapiens; identical to SEQ ID NO: 903199

SEQ ID NO: 903223 - protein, 189 aa, Homo sapiens; identical to SEQ ID NO: 903199

SEQ ID NO: 903224 - protein, 189 aa, Homo sapiens; identical to SEQ ID NO: 903199

SEQ ID NO: 903225 - protein, 189 aa, Homo sapiens; identical to SEQ ID NO: 903199

SEQ ID NO: 903226 - protein, 189 aa, Homo sapiens; identical to SEQ ID NO: 903199

SEQ ID NO: 903227 - protein, 189 aa, Homo sapiens; identical to SEQ ID NO: 903199

SEQ ID NO: 903228 - protein, 189 aa, Homo sapiens; identical to SEQ ID NO: 903199

SEQ ID NO: 903229 - protein, 189 aa, Homo sapiens; identical to SEQ ID NO: 903199

SEQ ID NO: 903230 - protein, 153 aa, Homo sapiens
MANRGPAYGLSREVQQKIEKQYDADLEQILIQWITTQCRKDVGRPQPGRENFQNWLKDGTVLCELINALYPEGQAPVKKIQASTMAFKQMEQISQFLQAAERYGINTTDIFQTVDLWEGKNMACVQRTLMNLGGLAVARDDGLFSGDPNWFPK

SEQ ID NO: 903231 - protein, 271 aa, Homo sapiens
MANRGPAYGLSREVQQKIEKQYDADLEQILIQWITTQCRKDVGRPQPGRENFQNWLKDGTVLCELINALYPEGQAPVKKIQASTMAFKQMEQISQFLQAAERYGINTTDIFQTVDLWEGKNMACVQRTLMNLGGLAVARDDGLFSGDPNWFPKKSKENPRNFSDNQLQEGKNVIGLHDGHQTFCQGGGFKPVLSPLRCLLASLSPHGLLIHSLPHSHQNWTNWPLPFPWDQNLGASVPHRHALAYSVSPSSPWPVLSLSSVSSVHSMAGSH

SEQ ID NO: 903232 - protein, 189 aa, Homo sapiens; identical to SEQ ID NO: 903199

SEQ ID NO: 903233 - protein, 189 aa, Homo sapiens; identical to SEQ ID NO: 903199

SEQ ID NO: 903234 - protein, 169 aa, Homo sapiens
MANRGPAYGLSREVQQKIEKQYDADLEQILIQWITTQCRKDVGRPQPGRENFQNWLKDGTVLCELINALYPEGQAPVKKIQASTMAFKQMEQISQFLQAAERYGINTTDIFQTVDLWEGKNMACVQRTLMNLGGLAVARDDGLFSGDPNWFPKNPEILGILKVTSHAAS

SEQ ID NO: 903235 - protein, 144 aa, Homo sapiens
MANRGPAYGLSREVQQKIEKQYDADLEQILIQWITTQCRKDVGRPQPGRENFQNWLKDGTVLCELINALYPEGQAPVKKIQASTMAFKQMEQISQFLQAAERYGINTTDIFQTVDLWEERTWPVCSGVGCSQRRWIAVSGVDAV

SEQ ID NO: 903236 - protein, 858 aa, Homo sapiens
MSVVGLDVGSQSCYIAVARAGGIETIANEFSDRCTPSVISFGSKNRTIGVAAKNQQITHANNTVSNFKRFHGRAFNDPFIQKEKENLSYDLVPLKNGGVGIKVMYMGEEHLFSVEQITAMLLTKLKETAENSLKKPVTDCVISVPSFFTDAERRSVLDAAQIVGLNCLRLMNDMTAVALNYGIYKQDLPSLDEKPRIVVFVDMGHSAFQVSACAFNKGKLKVLGTAFDPFLGGKNFDEKLVEHFCAEFKTKYKLDAKSKIRALLRLYQECEKLKKLMSSNSTDLPLNIECFMNDKDVSGKMNRSQFEELCAELLQKIEVPLYSLLEQTHLKVEDVSAVEIVGGATRIPAVKERIAKFFGKDISTTLNADEAVARGCALQCAILSPAFKVREFSVTDAVPFPISLIWNHDSEDTEGVHEVFSRNHAAPFSKVLTFLRRGPFELEAFYSDPQGVPYPEAKIGRFVVQNVSAQKDGEKSRVKVKVRVNTHGIFTISTASMVEKVPTEENEMSSEADMECLNQRPPENPDTDKNVQQDNSEAGTQPQVQTDAQQTSQSPPSPELTSEENKIPDADKANEKKVDQPPEAKKPKIKVVNVELPIEANLVWQLGKDLLNMYIETEGKMIMQDKLEKERNDAKNAVEEYVYEFRDKLCGPYEKFICEQDHQNFLRLLTETEDWLYEEGEDQAKQAYVDKLEELMKIGTPVKVRFQEAEERPKMFEELGQRLQHYAKIAADFRNKDEKYNHIDESEMKKVEKSVNEVMEWMNNVMNAQAKKSLDQDPVVRAQEIKTKIKELNNTCEPVVTQPKPKIESPKLERTPNGPNIDKKEEDLEDKNNFGAEPPHQNGECYPNEKNSVNMDLD

SEQ ID NO: 903237 - protein, 858 aa, Homo sapiens; identical to SEQ ID NO: 903236

SEQ ID NO: 903238 - protein, 858 aa, Homo sapiens; identical to SEQ ID NO: 903236

SEQ ID NO: 903239 - protein, 860 aa, Homo sapiens
MATAAVLRGPAAHWVESFQKAREEGSGSGTWRGRWRRRSVISFGSKNRTIGVAAKNQQITHANNTVSNFKRFHGRAFNDPFIQKEKENLSYDLVPLKNGGVGIKVMYMGEEHLFSVEQITAMLLTKLKETAENSLKKPVTDCVISVPSFFTDAERRSVLDAAQIVGLNCLRLMNDMTAVALNYGIYKQDLPSLDEKPRIVVFVDMGHSAFQVSACAFNKGKLKVLGTAFDPFLGGKNFDEKLVEHFCAEFKTKYKLDAKSKIRALLRLYQECEKLKKLMSSNSTDLPLNIECFMNDKDVSGKMNRSQFEELCAELLQKIEVPLYSLLEQTHLKVEDVSAVEIVGGATRIPAVKERIAKFFGKDISTTLNADEAVARGCALQCAILSPAFKVREFSVTDAVPFPISLIWNHDSEDTEGVHEVFSRNHAAPFSKVLTFLRRGPFELEAFYSDPQGVPYPEAKIGRFVVQNVSAQKDGEKSRVKVKVRVNTHGIFTISTASMVEKVPTEENEMSSEADMECLNQRPPENPDTDKNVQQDNSEAGTQPQVQTDAQQTSQSPPSPELTSEENKIPDADKANEKKVDQPPEAKKPKIKVVNVELPIEANLVWQLGKDLLNMYIETEGKMIMQDKLEKERNDAKNAVEEYVYEFRDKLCGPYEKFICEQDHQNFLRLLTETEDWLYEEGEDQAKQAYVDKLEELMKIGTPVKVRFQEAEERPKMFEELGQRLQHYAKIAADFRNKDEKYNHIDESEMKKVEKSVNEVMEWMNNVMNAQAKKSLDQDPVVRAQEIKTKIKELNNTCEPVVTQPKPKIESPKLERTPNGPNIDKKEEDLEDKNNFGAEPPHQNGECYPNEKNSVNMDLD

SEQ ID NO: 903240 - protein, 593 aa, Homo sapiens
MSVVGLDVGSQSCYIAVARAGGIETIANEFSDRCTPSVISFGSKNRTIGVAAKNQQITHANNTVSNFKRFHGRAFNDPFIQKEKENLSYDLVPLKNGGVGIKVMYMGEEHLFSVEQITAMLLTKLKETAENSLKKPVTDCVISVPSFFTDAERRSVLDAAQIVGLNCLRLMNDMTAVALNYGIYKQDLPSLDEKPRIVVFVDMGHSAFQVSACAFNKGKLKVLGTAFDPFLGGKNFDEKLVEHFCAEFKTKYKLDAKSKIRALLRLYQECEKLKKLMSSNSTDLPLNIECFMNDKDVSGKMNRSQFEELCAELLQKIEVPLYSLLEQTHLKVEDVSAVEIVGGATRIPAVKERIAKFFGKDISTTLNADEAVARGCALQCAILSPAFKVREFSVTDAVPFPISLIWNHDSEDTEGVHEVFSRNHAAPFSKVLTFLRRGPFELEAFYSDPQGVPYPEAKIGRFVVQNVSAQKDGEKSRVKVKVRVNTHGIFTISTASMVEKVPTEENEMSSEADMECLNQRPPENPDTDKNVQQDNSEAGTQPQVQTDAQQTSQSPPSPELTSEENKIPDADKANEKKVDQPPEAKKPIRERPS

SEQ ID NO: 903241 - protein, 570 aa, Homo sapiens
MLVLTFLKTSFYLLRSQFEELCAELLQKIEVPLYSLLEQTHLKVEDVSAVEIVGGATRIPAVKERIAKFFGKDISTTLNADEAVARGCALQCAILSPAFKVREFSVTDAVPFPISLIWNHDSEDTEGVHEVFSRNHAAPFSKVLTFLRRGPFELEAFYSDPQGVPYPEAKIGRFVVQNVSAQKDGEKSRVKVKVRVNTHGIFTISTASMVEKVPTEENEMSSEADMECLNQRPPENPDTDKNVQQDNSEAGTQPQVQTDAQQTSQSPPSPELTSEENKIPDADKANEKKVDQPPEAKKPKIKVVNVELPIEANLVWQLGKDLLNMYIETEGKMIMQDKLEKERNDAKNAVEEYVYEFRDKLCGPYEKFICEQDHQNFLRLLTETEDWLYEEGEDQAKQAYVDKLEELMKIGTPVKVRFQEAEERPKMFEELGQRLQHYAKIAADFRNKDEKYNHIDESEMKKVEKSVNEVMEWMNNVMNAQAKKSLDQDPVVRAQEIKTKIKELNNTCEPVVTQPKPKIESPKLERTPNGPNIDKKEEDLEDKNNFGAEPPHQNGECYPNEKNSVNMDLD

SEQ ID NO: 903242 - protein, 858 aa, Homo sapiens; identical to SEQ ID NO: 903236

SEQ ID NO: 903243 - protein, 851 aa, Homo sapiens
MSVVGLDVGSQSCYIAVARAGGIETIANEFSDRCTPSVISFGSKNRTIGVAAKNQQITHANNTVSNFKRFHGRAFNDPFIQKEKENLSYDLVPLKNGGVGIKVMYMGEEHLFSVEQITAMLLTKLKETAENSLKKPVTDCVISVPSFFTDAERRSVLDAAQIVGLNCLRLMNDMTAVALNYGIYKQDLPSLDEKPRIVVFVDMGHSAFQVSACAFNKGKLKVLGTAFDPFLGGKNFDEKLVEHFCAEFKTKYKLDAKSKIRALLRLYQECEKLKKLMSSNSTDLPLNIECFMNDKDVSGKMNRSQFEELCAELLQKIEVPLYSLLEQTHLKVEDVSAVEIVGGATRIPAVKERIAKFFGKDISTTLNADEAVARGCALQCAILSPAFKVREFSVTDAVPFPISLIWNHDSEDTEGVHEVFSRNHAAPFSKVLTFLRRGPFELEAFYSDPQGVPYPEAKIGRFVVQNVSAQKDGEKSRVKVKVRVNTHGIFTISTASMVEKVPTEENEMSSEADMECLNQRPPENPDTDKNVQQDNSEAGTQPQVQTDAQQTSQSPPSPELTSEENKIPDADKANEKKVDQPPEAKKPKIKVVNVELPIEANLVWQLGKDLLNMYIETEGKMIMQDKLEKERNDAKNAVEEYVYEFRDKLCGPYEKFICEQDHQNFLRLLTETEDWLYEEGEDQAKQAYVDKLEELMKIGTPVKVRFQEAEERPKMFEELGQRLQHYAKIAADFRNKDEKYNHIDESEMKKVEKSVNEVMEWMNNVMNAQAKKSLDQDPVVRAQEIKTKIKELNNTCEPVVTQPKPKIESPKLERTPNGPNIDKKEEDLEDKNNFGAEPPHQNDSCGIVNSY

SEQ ID NO: 903244 - protein, 826 aa, Homo sapiens
MSVVGLDVGSQSCYIAVARAGGIETIANEFSDRCTPSVISFGSKNRTIGVAAKNQQITHANNTVSNFKRFHGRAFNDPFIQKEKENLSYDLVPLKNGGVGIKVMYMGEEHLFSVEQITAMLLTKLKETAENSLKKPVTDCVISVPSFFTDAERRSVLDAAQIVGLNCLRLMNDMTAVALNYGIYKQDLPSLDEKPRIVVFVDMGHSAFQVSACAFNKGKLKVLGTAFDPFLGGKNFDEKLVEHFCAEFKTKYKLDAKSKIRALLRLYQECEKLKKLMSSNSTDLPLNIECFMNDKDVSGKMNRSQFEELCAELLQKIEVPLYSLLEQTHLKVEDVSAVEIVGGATRIPAVKERIAKFFGKDISTTLNADEAVARGCALQCAILSPAFKVREFSVTDAVPFPISLIWNHDSEDTEGVHEVFSRNHAAPFSKVLTFLRRGPFELEAFYSDPQGVPYPEAKIGRFVVQNVSAQKDGEKSRVKVKVRVNTHGIFTISTASMVEKVPTEENEMSSEADMECLNQRPPENPDTDKNVQQDNSEAGTQPQVQTDAQQTSQSPPSPELTSEENKIPDADKANEKKVDQPPEAKKPKIKVVNVELPIEANLVWQLGKDLLNMYIETEGKMIMQDKLEKERNDAKNAVEEYVYEFRDKLCGPYEKFICEQDHQNFLRLLTETEDWLYEEGEDQAKQAYVDKLEELMKIGTPVKVRFQEAEERPKMFEELGQRLQHYAKIAADFRNKDEKYNHIDESEMKKVEKSVNEVMEWMNNVMNAQAKKSLDQDPVVRAQEIKTKIKVSVTVSCLLLGSLTDSSCNHLNLQHSHFSCKSFTSS

SEQ ID NO: 903245 - protein, 88 aa, Homo sapiens
RGRATGCERRQRVLRKKQNQELNNTCEPVVTQPKPKIESPKLERTPNGPNIDKKEEDLEDKNNFGAEPPHQNGECYPNEKNSVNMDLD

SEQ ID NO: 903246 - protein, 537 aa, Homo sapiens
MSVVGLDVGSQSCYIAVARAGGIETIANEFSDRCTPSVISFGSKNRTIGVAAKNQQITHANNTVSNFKRFHGRAFNDPFIQKEKENLSYDLVPLKNGGVGIKVMYMGEEHLFSVEQITAMLLTKLKETAENSLKKPVTDCVISVPSFFTDAERRSVLDAAQIVGLNCLRLMNDMTAVALNYGIYKQDLPSLDEKPRIVVFVDMGHSAFQVSACAFNKGKLKVLGTAFDPFLGGKNFDEKLVEHFCAEFKTKYKLDAKSKIRALLRLYQECEKLKKLMSSNSTDLPLNIECFMNDKDVSGKMNRSQFEELCAELLQKIEVPLYSLLEQTHLKVEDVSAVEIVGGATRIPAVKERIAKFFGKDISTTLNADEAVARGCALQCAILSPAFKVREFSVTDAVPFPISLIWNHDSEDTEGVHEVFSRNHAAPFSKVLTFLRRGPFELEAFYSDPQGVPYPEAKIGRFVVQNVSAQKDGEKSRVKVKVRVNTHGIFTISTASMVEKVPTEENEMSSEADMECLNQRPPENPDTDVSLWINLCV

SEQ ID NO: 903247 - protein, 513 aa, Homo sapiens
MSVVGLDVGSQSCYIAVARAGGIETIANEFSDRCTPSVISFGSKNRTIGVAAKNQQITHANNTVSNFKRFHGRAFNDPFIQKEKENLSYDLVPLKNGGVGIKVMYMGEEHLFSVEQITAMLLTKLKETAENSLKKPVTDCVISVPSFFTDAERRSVLDAAQIVGLNCLRLMNDMTAVALNYGIYKQDLPSLDEKPRIVVFVDMGHSAFQVSACAFNKGKLKVLGTAFDPFLGGKNFDEKLVEHFCAEFKTKYKLDAKSKIRALLRLYQECEKLKKLMSSNSTDLPLNIECFMNDKDVSGKMNRSQFEELCAELLQKIEVPLYSLLEQTHLKVEDVSAVEIVGGATRIPAVKERIAKFFGKDISTTLNADEAVARGCALQCAILSPAFKVREFSVTDAVPFPISLIWNHDSEDTEGVHEVFSRNHAAPFSKVLTFLRRGPFELEAFYSDPQGVPYPEAKIAKIESPKLERTPNGPNIDKKEEDLEDKNNFGAEPPHQNGECYPNEKNSVNMDLD

SEQ ID NO: 903248 - protein, 305 aa, Homo sapiens
MSVVGLDVGSQSCYIAVARAGGIETIANEFSDRCTPSVISFGSKNRTIGVAAKNQQITHANNTVSNFKRFHGRAFNDPFIQKEKENLSYDLVPLKNGGVGIKVMYMGEEHLFSVEQITAMLLTKLKETAENSLKKPVTDCVISVPSFFTDAERRSVLDAAQIVGLNCLRLMNDMTAVALNYGIYKQDLPSLDEKPRIVVFVDMGHSAFQVSACAFNKGKLKVLGTAFDPFLGGKNFDEKLVEHFCAEFKTKYKLDAKSKIRALLRLYQECEKLKKLMSSNSTFTARSLYRPIKHVSPQRLNRPLL

SEQ ID NO: 903249 - protein, 110 aa, Homo sapiens
TITRERRLSRSERICISRCAILSPAFKVREFSVTDAVPFPISLIWNHDSEDTEGVHEVFSRNHAAPFSKVLTFLRRGPFELEAFYSDPQGVPYPEAKIVGKEFIVYILLF

SEQ ID NO: 903250 - protein, 814 aa, Homo sapiens
MSVVGLDVGSQSCYIAVARAGGIETIANEFSDRCTPSVISFGSKNRTIGVAAKNQQITHANNTVSNFKRFHGRAFNDPFIQKEKENLSYDLVPLKNGGVGIKVMYMGEEHLFSVEQITAMLLTKLKETAENSLKKPVTDCVISVPSFFTDAERRSVLDAAQIVGLNCLRLMNDMTAVALNYGIYKQDLPSLDEKPRIVVFVDMGHSAFQVSACAFNKGKLKVLGTAFDPFLGGKNFDEKLVEHFCAEFKTKYKLDAKSKIRALLRLYQECEKLKKLMSSNSTDLPLNIECFMNDKDVSGKMNRSQFEELCAELLQKIEVPLYSLLEQTHLKVEDVSAVEIVGGATRIPAVKERIAKFFGKDISTTLNADEAVARGCALQCAILSPAFKVREFSVTDAVPFPISLIWNHDSEDTEGVHEVFSRNHAAPFSKVLTFLRRGPFELEAFYSDPQGVPYPEAKIGRFVVQNVSAQKDGEKSRVKVKVRVNTHGIFTISTASMVEKVPTEENEMSSEADMECLNQRPPENPDTDANEKKVDQPPEAKKPKIKVVNVELPIEANLVWQLGKDLLNMYIETEGKMIMQDKLEKERNDAKNAVEEYVYEFRDKLCGPYEKFICEQDHQNFLRLLTETEDWLYEEGEDQAKQAYVDKLEELMKIGTPVKVRFQEAEERPKMFEELGQRLQHYAKIAADFRNKDEKYNHIDESEMKKVEKSVNEVMEWMNNVMNAQAKKSLDQDPVVRAQEIKTKIKELNNTCEPVVTQPKPKIESPKLERTPNGPNIDKKEEDLEDKNNFGAEPPHQNGECYPNEKNSVNMDLD

SEQ ID NO: 903251 - protein, 817 aa, Homo sapiens
MSVVGLDVGSQSCYIAVARAGGIETIANEFSDRCTPSVISFGSKNRTIGVAAKNQQITHANNTVSNFKRFHGRAFNDPFIQKEKENLSYDLVPLKNGGVGIKVPSFFTDAERRSVLDAAQIVGLNCLRLMNDMTAVALNYGIYKQDLPSLDEKPRIVVFVDMGHSAFQVSACAFNKGKLKVLGTAFDPFLGGKNFDEKLVEHFCAEFKTKYKLDAKSKIRALLRLYQECEKLKKLMSSNSTDLPLNIECFMNDKDVSGKMNRSQFEELCAELLQKIEVPLYSLLEQTHLKVEDVSAVEIVGGATRIPAVKERIAKFFGKDISTTLNADEAVARGCALQCAILSPAFKVREFSVTDAVPFPISLIWNHDSEDTEGVHEVFSRNHAAPFSKVLTFLRRGPFELEAFYSDPQGVPYPEAKIGRFVVQNVSAQKDGEKSRVKVKVRVNTHGIFTISTASMVEKVPTEENEMSSEADMECLNQRPPENPDTDKNVQQDNSEAGTQPQVQTDAQQTSQSPPSPELTSEENKIPDADKANEKKVDQPPEAKKPKIKVVNVELPIEANLVWQLGKDLLNMYIETEGKMIMQDKLEKERNDAKNAVEEYVYEFRDKLCGPYEKFICEQDHQNFLRLLTETEDWLYEEGEDQAKQAYVDKLEELMKIGTPVKVRFQEAEERPKMFEELGQRLQHYAKIAADFRNKDEKYNHIDESEMKKVEKSVNEVMEWMNNVMNAQAKKSLDQDPVVRAQEIKTKIKELNNTCEPVVTQPKPKIESPKLERTPNGPNIDKKEEDLEDKNNFGAEPPHQNGECYPNEKNSVNMDLD

SEQ ID NO: 903252 - protein, 755 aa, Homo sapiens
MYMGEEHLFSVEQITAMLLTKLKETAENSLKKPVTDCVISVPSFFTDAERRSVLDAAQIVGLNCLRLMNDMTAVALNYGIYKQDLPSLDEKPRIVVFVDMGHSAFQVSACAFNKGKLKVLGTAFDPFLGGKNFDEKLVEHFCAEFKTKYKLDAKSKIRALLRLYQECEKLKKLMSSNSTDLPLNIECFMNDKDVSGKMNRSQFEELCAELLQKIEVPLYSLLEQTHLKVEDVSAVEIVGGATRIPAVKERIAKFFGKDISTTLNADEAVARGCALQCAILSPAFKVREFSVTDAVPFPISLIWNHDSEDTEGVHEVFSRNHAAPFSKVLTFLRRGPFELEAFYSDPQGVPYPEAKIGRFVVQNVSAQKDGEKSRVKVKVRVNTHGIFTISTASMVEKVPTEENEMSSEADMECLNQRPPENPDTDKNVQQDNSEAGTQPQVQTDAQQTSQSPPSPELTSEENKIPDADKANEKKVDQPPEAKKPKIKVVNVELPIEANLVWQLGKDLLNMYIETEGKMIMQDKLEKERNDAKNAVEEYVYEFRDKLCGPYEKFICEQDHQNFLRLLTETEDWLYEEGEDQAKQAYVDKLEELMKIGTPVKVRFQEAEERPKMFEELGQRLQHYAKIAADFRNKDEKYNHIDESEMKKVEKSVNEVMEWMNNVMNAQAKKSLDQDPVVRAQEIKTKIKELNNTCEPVVTQPKPKIESPKLERTPNGPNIDKKEEDLEDKNNFGAEPPHQNGECYPNEKNSVNMDLD

SEQ ID NO: 903253 - protein, 851 aa, Homo sapiens; identical to SEQ ID NO: 903243

SEQ ID NO: 903254 - protein, 858 aa, Homo sapiens; identical to SEQ ID NO: 903236

SEQ ID NO: 903255 - protein, 163 aa, Homo sapiens
MKIGTPVKVRFQEAEERPKMFEELGQRLQHYAKIAADFRNKDEKYNHIDESEMKKVEKSVNEVMEWMNNVMNAQAKKSLDQDPVVRAQEIKTKIKELNNTCEPVVTQPKPKIESPKLERTPNGPNIDKKEEDLEDKNNFGAEPPHQNGECYPNEKNSVNMDLD

SEQ ID NO: 903256 - protein, 624 aa, Homo sapiens
MSVVGLDVGSQSCYIAVARAGGIETIANEFSDRCTPSVISFGSKNRTIGVAAKNQQITHANNTVSNFKRFHGRAFNDPFIQKEKENLSYDLVPLKNGGVGIKVMYMGEEHLFSVEQITAMLLTKLKETAENSLKKPVTDCVISVPSFFTDAERRSVLDAAQIVGLNCLRLMNDMTAVALNYGIYKQDLPSLDEKPRIVVFVDMGHSAFQVSACAFNKGKLKVLGTAFDPFLGGKNFDEKLVEHFCAEFKTKYKLDAKSKIRALLRLYQECEKLKKLMSSNSTDLPLNIECFMNDKDVSGKMNRSQFEELCAELLQKIEVPLYSLLEQTHLKVEDVSAVEIVGGATRIPAVKERIAKFFGKDISTTLNADEAVARGCALQCAILSPAFKVREFSVTDAVPFPISLIWNHDSEDTEGVHEVFSRNHAAPFSKVLTFLRRGPFELEAFYSDPQGVPYPEAKIGRFVVQNVSAQKDGEKSRVKVKVRVNTHGIFTISTASMVEKVPTEENEMSSEADMECLNQRPPENPDTDKNVQQDNSEAGTQPQVQTDAQQTSQSPPSPELTSEENKIPDADKANEKKVDQPPEAKKPKIKVVNVELPIEANLVWQLGKDLLNMYIETELDDNED

SEQ ID NO: 903257 - protein, 513 aa, Homo sapiens; identical to SEQ ID NO: 903247

SEQ ID NO: 903258 - protein, 352 aa, Homo sapiens
MEGISIYTSDNYTEEMGSGDYDSMKEPCFREENANFNKIFLPTIYSIIFLTGIVGNGLVILVMGYQKKLRSMTDKYRLHLSVADLLFVITLPFWAVDAVANWYFGNFLCKAVHVIYTVNLYSSVLILAFISLDRYLAIVHATNSQRPRKLLAEKVVYVGVWIPALLLTIPDFIFANVSEADDRYICDRFYPNDLWVVVFQFQHIMVGLILPGIVILSCYCIIISKLSHSKGHQKRKALKTTVILILAFFACWLPYYIGISIDSFILLEIIKQGCEFENTVHKWISITEALAFFHCCLNPILYAFLGAKFKTSAQHALTSVSRGSSLKILSKGKRGGHSSVSTESESSSFHSS

SEQ ID NO: 903259 - protein, 352 aa, Homo sapiens; identical to SEQ ID NO: 903258

SEQ ID NO: 903260 - protein, 334 aa, Homo sapiens
MEGISIYTSDNYTEEMGSGDYDSMKEPCFREENANFNNGLVILVMGYQKKLRSMTDKYRLHLSVADLLFVITLPFWAVDAVANWYFGNFLCKAVHVIYTVNLYSSVLILAFISLDRYLAIVHATNSQRPRKLLAEKVVYVGVWIPALLLTIPDFIFANVSEADDRYICDRFYPNDLWVVVFQFQHIMVGLILPGIVILSCYCIIISKLSHSKGHQKRKALKTTVILILAFFACWLPYYIGISIDSFILLEIIKQGCEFENTVHKWISITEALAFFHCCLNPILYAFLGAKFKTSAQHALTSVSRGSSLKILSKGKRGGHSSVSTESESSSFHSS

SEQ ID NO: 903261 - protein, 356 aa, Homo sapiens
MSIPLPLLQIYTSDNYTEEMGSGDYDSMKEPCFREENANFNKIFLPTIYSIIFLTGIVGNGLVILVMGYQKKLRSMTDKYRLHLSVADLLFVITLPFWAVDAVANWYFGNFLCKAVHVIYTVNLYSSVLILAFISLDRYLAIVHATNSQRPRKLLAEKVVYVGVWIPALLLTIPDFIFANVSEADDRYICDRFYPNDLWVVVFQFQHIMVGLILPGIVILSCYCIIISKLSHSKGHQKRKALKTTVILILAFFACWLPYYIGISIDSFILLEIIKQGCEFENTVHKWISITEALAFFHCCLNPILYAFLGAKFKTSAQHALTSVSRGSSLKILSKGKRGGHSSVSTESESSSFHSS

SEQ ID NO: 903262 - protein, 309 aa, Homo sapiens
MEGISIYTSDNYTEEMGSGDYDSMKEPCFREENANFNKIFLPTIYSIIFLTGIVGNGLVILVMGYQKKLRSMTDKYRLHLSVADLLFVITLPFWAVDAVANWYFGNFLCKAVHVIYTVNLYSSVLILAFISLDRYLAIVHATNSQRPRKLLAEKVVYVGVWIPALLLTIPDFIFANVSEADDRYICDRFYPNDLWVVVFQFQHIMVGLILPYYIGISIDSFILLEIIKQGCEFENTVHKWISITEALAFFHCCLNPILYAFLGAKFKTSAQHALTSVSRGSSLKILSKGKRGGHSSVSTESESSSFHSS

SEQ ID NO: 903263 - protein, 350 aa, Homo sapiens
MHCILSRRYIIPIIIYIQLVLTYSRFDVHTHCLYRIISYPNYQNYIIIFILKIILSSSSLRPESLQPLQLTLLSPFLVSGNPLLFVITLPFWAVDAVANWYFGNFLCKAVHVIYTVNLYSSVLILAFISLDRYLAIVHATNSQRPRKLLAEKVVYVGVWIPALLLTIPDFIFANVSEADDRYICDRFYPNDLWVVVFQFQHIMVGLILPGIVILSCYCIIISKLSHSKGHQKRKALKTTVILILAFFACWLPYYIGISIDSFILLEIIKQGCEFENTVHKWISITEALAFFHCCLNPILYAFLGAKFKTSAQHALTSVSRGSSLKILSKGKRGGHSSVSTESESSSFHSS

SEQ ID NO: 903264 - protein, 91 aa, Homo sapiens
SLSAVGEGARVPPNPARRPRPPAPALAPAEPRNFPGARAKVSAKCCPSCRDGAAEPARGARRGTRAPPERRPQEAAPRKAAADRRAQRQTR

SEQ ID NO: 903265 - protein, 455 aa, Homo sapiens
FPFGRGGGGSCPPQPSPEAASARARSGPRGAAQLPGSPGQSERKVLPKLPGWSCRAGPRRSPWNSRATRTATSRSSSTKGSRGSPRSATNKSRAEPLICAQGTQHGALGTITAVPVTGPQVSSLQRLAGQGAAVLPQVRPKTLIPDSLPVAPGRDRPPKQPPTFQKATVVSVKNPSPALPTANNTVSHVPAPGSQPQALAEPAALASPLSSAGVAYAIISTSPSNAAAMAPSTAVSVVSDSIKVQPLLISADNKVIIIQPQVQTQPESTAESRPPTEEPSQGAQATKKKKEDRPPTQENPEKIAFMVALGLVTTEHLEEIQSKRQERKRRSTANPAYSGLLETERKRLASNYLNNPLFLTARANEDPCWKNEITHDEHCAACKRGANLQPCGTCPGAYHLSCLEPPLKTAPKGVWVCPRCQQKALKKDEGVPWTGMLAIVHSYVTHHPWTACGPS

SEQ ID NO: 903266 - protein, 528 aa, Homo sapiens
MELQSRPEALAVELARHQNGDLKKQLHERQPRIAALSDKQALGTITAVPVTGPQVSSLQRLAGQGAAVLPQVRPKTLIPDSLPVAPGRDRPPKQPPTFQKATVVSVKNPSPALPTANNTVSHVPAPGSQPQALAEPAALASPLSSAGVAYAIISTSPSNAAAMAPSTAVSVVSDSIKVQPLLISADNKPPPRLLSSPHPATHHCPLHPSSLPLTPPSPSLSPSPLHGIFQVIIIQPQVQTQPESTAESRPPTEEPSQGAQATKKKKEDRPPTQENPEKIAFMVALGLVTTEHLEEIQSKRQERKRRSTANPAYSGLLETERKRLASNYLNNPLFLTARANEDPCWKNEITHDEHCAACKRGANLQPCGTCPGAYHLSCLEPPLKTAPKGVWVCPRCQQKALKKDEGVPWTGMLAIVHSYVTIKEEEKQKLLQRGSELQNEHQQLEERDRRLASAVQKCLELKTSLLARQRGTQSSLDRLRALLRLIQGEQLLQVTMTTTSPAPLLAGPWTKPSVAATHPTVQHPQGHN

SEQ ID NO: 903267 - protein, 261 aa, Homo sapiens
MAESHLQSSLITASQFFEIWLHFDADGSGYLEGKELQNLIQELQQARKKAGLELSPEMKTFVDQYGQRDDGKIGIVELAHVLPTEENFLLLFRCQQLKSCEEFMKTWRKYDTDHSGFIETEELKNFLKDLLEKANKTVDDTKLAEYTDLMLKLFDSNNDGKLELTEMARLLPVQENFLLKFQGIKMCGKEFNKAFELYDQDGNGYIDENELDALLKDLCEKNKQDLDINNITTYKKNIMALSDGGKLYRTDLALILCAGDN

SEQ ID NO: 903268 - protein, 261 aa, Homo sapiens; identical to SEQ ID NO: 903267

SEQ ID NO: 903269 - protein, 291 aa, Homo sapiens
LFTRTHMKFGAVTQIRDLPWEINPLSSCSLLCEKDPPTTSGPQTDQPKKHLTNFKSGSGYLEGKELQNLIQELQQARKKAGLELSPEMKTFVDQYGQRDDGKIGIVELAHVLPTEENFLLLFRCQQLKSCEEFMKTWRKYDTDHSGFIETEELKNFLKDLLEKANKTVDDTKLAEYTDLMLKLFDSNNDGKLELTEMARLLPVQENFLLKFQGIKMCGKEFNKAFELYDQDGNGYIDENELDALLKDLCEKNKQDLDINNITTYKKNIMALSDGGKLYRTDLALILCAGDN

SEQ ID NO: 903270 - protein, 156 aa, Homo sapiens
FLPTPLTIVFSSPTTKTPYNFLKDLLEKANKTVDDTKLAEYTDLMLKLFDSNNDGKLELTEMARLLPVQENFLLKFQGIKMCGKEFNKAFELYDQDGNGYIDENELDALLKDLCEKNKQDLDINNITTYKKNIMALSDGGKLYRTDLALILCAGDN

SEQ ID NO: 903271 - protein, 248 aa, Homo sapiens [sequence omitted]

SEQ ID NO: 903272 - protein, 435 aa, Homo sapiens
MAAHLLPICALFLTLLDMAQGFRGPLLPNRPFTTVWNANTQWCLERHGVDVDVSVFDVVANPGQTFRGPDMTIFYSSQLGTYPYYTPTGEPVFGGLPQNASLIAHLARTFQDILAAIPAPDFSGLAVIDWEAWRPRWAFNWDTKDIYRQRSRALVQAQHPDWPAPQVEAVAQDQFQGAARAWMAGTLQLGRALRPRGLWGFYGFPDCYNYDFLSPNYTGQCPSGIRAQNDQLGWLWGQSRALYPSIYMPAVLEGTGKSQMYVQHRVAEAFRVAVAAGDPNLPVLPYVQIFYDTTNHFLPLDELEHSLGESAAQGAAGVVLWVSWENTRTKESCQAIKEYMDTTLGPFILNVTSGALLCSQALCSGHGRCVRRTSHPKALLLLNPASFSIQLTPGGGPLSLRGALSLEDQAQMAVEFKCRCYPGWQAPWCERKSMW

SEQ ID NO: 903273 - protein, 475 aa, Homo sapiens
VSGAAGVESGQALLRPPSWGQEIWRIRPFSPKVVLDQSRAMAAHLLPICALFLTLLDMAQGFRGPLLPNRPFTTVWNANTQWCLERHGVDVDVSVFDVVANPGQTFRGPDMTIFYSSQLGTYPYYTPTGEPVFGGLPQNASLIAHLARTFQDILAAIPAPDFSGLAVIDWEAWRPRWAFNWDTKDIYRQRSRALVQAQHPDWPAPQVEAVAQDQFQGAARAWMAGTLQLGRALRPRGLWGFYGFPDCYNYDFLSPNYTGQCPSGIRAQNDQLGWLWGQSRALYPSIYMPAVLEGTGKSQMYVQHRVAEAFRVAVAAGDPNLPVLPYVQIFYDTTNHFLPLDELEHSLGESAAQGAAGVVLWVSWENTRTKESCQAIKEYMDTTLGPFILNVTSGALLCSQALCSGHGRCVRRTSHPKALLLLNPASFSIQLTPGGGPLSLRGALSLEDQAQMAVEFKCRCYPGWQAPWCERKSMW

SEQ ID NO: 903274 - protein, 445 aa, Homo sapiens
VSGAAGVESGQALLRPPSWGQEIWRIRPFSPKVVLDQSRAMAAHLLPICALFLTLLDMAQGFRGPLLPNRPFTTVWNANTQWCLERHGVDVDVSVFDVVANPGQTFRGPDMTIFYSSQLGTYPYYTPTGEPVFGGLPQNASLIAHLARTFQDILAAIPAPDFSGLAVIDWEAWRPRWAFNWDTKDIYRQRSRALVQAQHPDWPAPQVEAVAQDQFQGAARAWMAGTLQLGRALRPRGLWGFYGFPDCYNYDFLSPNYTGQCPSGIRAQNDQLGWLWGQSRALYPSIYMPAVLEGTGKSQMYVQHRVAEAFRVAVAAGDPNLPVLPYVQIFYDTTNHFLPLESCQAIKEYMDTTLGPFILNVTSGALLCSQALCSGHGRCVRRTSHPKALLLLNPASFSIQLTPGGGPLSLRGALSLEDQAQMAVEFKCRCYPGWQAPWCERKSMW

SEQ ID NO: 903275 - protein, 409 aa, Homo sapiens
VSGAAGVESGQALLRPPSWGQEIWRIRPFSPKVVLDQSRAMAAHLLPICALFLTLLDMAQGFRGPLLPNRPFTTVWNANTQWCLERHGVDVDVSVFDVVANPGQTFRGPDMTIFYSSQLGTYPYYTPTGEPVFGGLPQNASLIAHLARTFQDILAAIPAPDFSGLAVIDWEAWRPRWAFNWDTKDIYRQRSRALVQAQHPDWPAPQVEAVAQDQFQGAARAWMAGTLQLGRALRPRGLWGFYGFPDCYNYDFLSPNYTGQCPSGIRAQNDQLGWLWGQSRALYPSIYMPAVLEGTGKSQMYVQHRVAEAFRVAVAAGDPNLPVLPYVQIFYDTTNHFLPLDELEHSLGESAAQGAAGVVLWVSWENTRTKTGALHPERDQWGPSLQSSPVLRPWPLCPPHQPPQSPPPP

SEQ ID NO: 903276 - protein, 735 aa, Homo sapiens
MLVHLFRVGIRGGPFPGRLLPPLRFQTFSAVRNTWRNGKTGQLHKAEGEYSDGYRSSSLLRAVAHLRSQLWAHLPRAPLAPRWSPSAWCWVGGALLGPMVLSKHPHLCLVALCEAEEAPPASSTPHVVGSRFNWKLFWQFLHPHLLVLGVAVVLALGAALVNVQIPLLLGQLVEVVAKYTRDHVGSFMTESQNLSTHLLILYGVQGLLTFGYLVLLSHVGERMAVDMRRALFSSLLRQDITFFDANKTGQLVSRLTTDVQEFKSSFKLVISQGLRSCTQVAGCLVSLSMLSTRLTLLLMVATPALMGVGTLMGSGLRKLSRQCQEQIARAMGVADEALGNVRTVRAFAMEQREEERYGAELEACRCRAEELGRGIALFQGLSNIAFNCMVLGTLFIGGSLVAGQQLTGGDLMSFLVASQTVQRSMANLSVLFGQVVRGLSAGARVFEYMALNPCIPLSGGCCVPKEQLRGSVTFQNVCFSYPCRPGFEVLKDFTLTLPPGKIVALVGQSGGGKTTVASLLERFYDPTAGVVMLDGRDLRTLDPSWLRGQVVGFISQEPVLFGTTIMENIRFGKLEASDEEVYTAAREANAHEFITSFPEGYNTVVGERGTTLSGGQKQRLAIARALIKQPTVLILDEATSALDAESERVVQEALDRASAGRTVLVIAHRLSTVRGAHCIVVMADGRVWEAGTHEELLKKGGLYAELIRRQALDAPRTAAPPPKKPEGPRSHQHKS

SEQ ID NO: 903277 - protein, 635 aa, Homo sapiens
RALSGMRVKLLLPAAPVLPRQHAGAFISGRDSGWPIPRQAATAPPLPDILSCQLALGAALVNVQIPLLLGQLVEVVAKYTRDHVGSFMTESQNLSTHLLILYGVQGLLTFGYLVLLSHVGERMAVDMRRALFSSLLRQDITFFDANKTGQLVSRLTTDVQEFKSSFKLVISQGLRSCTQVAGCLVSLSMLSTRLTLLLMVATPALMGVGTLMGSGLRKLSRQCQEQIARAMGVADEALGNVRTVRAFAMEQREEERYGAELEACRCRAEELGRGIALFQGLSNIAFNCMVLGTLFIGGSLVAGQQLTGGDLMSFLVASQTVQRSMANLSVLFGQVVRGLSAGARVFEYMALNPCIPLSGGCCVPKEQLRGSVTFQNVCFSYPCRPGFEVLKDFTLTLPPGKIVALVGQSGGGKTTVASLLERFYDPTAGVVMLDGRDLRTLDPSWLRGQVVGFISQEPVLFGTTIMENIRFGKLEASDEEVYTAAREANAHEFITSFPEGYNTVVGERGTTLSGGQKQRLAIARALIKQPTVLILDEATSALDAESERVVQEALDRASAGRTVLVIAHRLSTVRGAHCIVVMADGRVWEAGTHEELLKKGGLYAELIRRQALDAPRTAAPPPKKPEGPRSHQHKS

SEQ ID NO: 903278 - protein, 431 aa, Homo sapiens [sequence omitted]

SEQ ID NO: 903279 - protein, 407 aa, Homo sapiens [sequence omitted]

SEQ ID NO: 903280 - protein, 718 aa, Homo sapiens
MLVHLFRVGIRGGPFPGRLLPPLRFQTFSAVRYSDGYRSSSLLRAVAHLRSQLWAHLPRAPLAPRWSPSAWCWVGGALLGPMVLSKHPHLCLVALCEAEEAPPASSTPHVVGSRFNWKLFWQFLHPHLLVLGVAVVLALGAALVNVQIPLLLGQLVEVVAKYTRDHVGSFMTESQNLSTHLLILYGVQGLLTFGYLVLLSHVGERMAVDMRRALFSSLLRQDITFFDANKTGQLVSRLTTDVQEFKSSFKLVISQGLRSCTQVAGCLVSLSMLSTRLTLLLMVATPALMGVGTLMGSGLRKLSRQCQEQIARAMGVADEALGNVRTVRAFAMEQREEERYGAELEACRCRAEELGRGIALFQGLSNIAFNCMVLGTLFIGGSLVAGQQLTGGDLMSFLVASQTVQRSMANLSVLFGQVVRGLSAGARVFEYMALNPCIPLSGGCCVPKEQLRGSVTFQNVCFSYPCRPGFEVLKDFTLTLPPGKIVALVGQSGGGKTTVASLLERFYDPTAGVVMLDGRDLRTLDPSWLRGQVVGFISQEPVLFGTTIMENIRFGKLEASDEEVYTAAREANAHEFITSFPEGYNTVVGERGTTLSGGQKQRLAIARALIKQPTVLILDEATSALDAESERVVQEALDRASAGRTVLVIAHRLSTVRGAHCIVVMADGRVWEAGTHEELLKKGGLYAELIRRQALDAPRTAAPPPKKPEGPRSHQHKS

SEQ ID NO: 903281 - protein, 693 aa, Homo sapiens
MLVHLFRVGIRGGPFPGRLLPPLRFQTFSAVRYSDGYRSSSLLRAVAHLRSQLWAHLPRAPLAPRWSPSAWCWVGGALLGPMVLSKHPHLCLVALCEAEEAPPASSTPHVVGSRFNWKLFWQFLHPHLLVLGVAVVLALGAALVNVQIPLLLGQLVEVVAKYTRDHVGSFMTESQNLSTHLLILYGVQGLLTFGYLVLLSHVGERMAVDMRRALFSSLLRQDITFFDANKTGQLVSRLTTDVQEFKSSFKLVISQGLRSCTQVAGCLVSLSMLSTRLTLLLMVATPALMGVGTLMGSGLRKLSRQCQEQIARAMGVADEALGNVRTVRAFAMEQREEERYGAELEACRCRAEELGRGIALFQGLSNIAFNCMVLGTLFIGGSLVAGQQLTGGDLMSFLVASQTVQRSMANLSVLFGQVVRGLSAGARVFEYMALNPCIPLSGGCCVPKEQLRGSVTFQNVCFSYPCRPGFEVLKDFTLTLPPGKIVALVGQSGGGKTTVASLLERFYDPTAGVVMLDGRDLRTLDPSWLRGQVVGFISQEPVLFGTTIMENIRFGKLEASDEEVYTAAREANAHEFITSFPEGYNTVVGERGTTLSGGQKQRLAIARALIKQPTVLILDEATSALDAESERVVQEALDRASAGRTVLAGTHEELLKKGGLYAELIRRQALDAPRTAAPPPKKPEGPRSHQHKS

SEQ ID NO: 903282 - protein, 746 aa, Homo sapiens
MLVHLFRVGIRGGPFPGRLLPPLRFQTFSAVRYSDGYRSSSLLRAVAHLRSQLWAHLPRAPLAPRWSPSAWCWVGGALLGPMVLSKHPHLCLVALCEAEEAPPASSTPHVVGSRFNWKLFWQFLHPHLLVLGVAVVLALGAALVNVQIPLLLGQLVEVVAKYTRDHVGSFMTESQNLSTHLLILYGVQGLLTFGYLVLLSHVGERMAVDMRRALFSSLLRQDITFFDANKTGQLVSRLTTDVQEFKSSFKLVISQGLRSCTQVAGCLVSLSMLSTRLTLLLMVATPALMGVGTLMGSGLRKLSRQCQEQIARAMGVADEALGNVRTVRAFAMEQREEERYGAELEACRCRAEELGRGIALFQGLSNIAFNCMVLGTLFIGGSLVAGQQLTGGDLMSFLVASQTVQRSMANLSVLFGQVVRGLSAGARVFEYMALNPCIPLSGGCCVPKEQLRGSVTFQNVCFSYPCRPGFEVLKDFTLTLPPGKIVALVGQSGGGKTTVASLLERFYDPTAGVVMLDGRDLRTLDPSWLRGQVVGFISQEPVLFGTTIMENIRFGKLEASDEEVYTAAREANAHEFITSFPEGYNTVVGERGTTLSGGQKQRLAIARALIKQPTVLILDEATSALDAESERVVQEALDRASAGRTVLVIAHRLSTVRGAHCIVVMADGRVWEAGTHEELLKKGGLYAELIRRQALDAPRTAAPPPKVWSLPSISVRAGAQPGGAYWGLSPQEGQHVESRCGCSCSQ

SEQ ID NO: 903283 - protein, 120 aa, Homo sapiens [sequence omitted]

SEQ ID NO: 903284 - protein, 360 aa, Homo sapiens
MVPAAGRRPPRVMRLLGWWQVLLWVLGLPVRGVEVAEESGRLWSEEQPAHPLQVGAVYLGEEELLHDPMGQDRAAEEANAVLGLDTQGDHMVMLSVIPGEAEDKVSSEPSGVTCGAGGAEDSRCNVRESLFSLDGAGAHFPDREEEYYTEPEVAESDAAPTEDSNNTESLKSPKVNCEERNITGLENFTLKILNMSQDLMDFLNPNGSDCTLVLFYTPWCRFSASLAPHFNSLPRAFPALHFLALDASQHSSLSTRFGTVAVPNILLFQGAKPMARFNHTDRTLETLKIFIFNQTGIEAKKNVVVTQADQIGPLPSTLIKSVDWLLVFSLFFLISFIMYATIRTESIRWLIPGQEQEHVE

SEQ ID NO: 903285 - protein, 360 aa, Homo sapiens; identical to SEQ ID NO: 903284

SEQ ID NO: 903286 - protein, 360 aa, Homo sapiens; identical to SEQ ID NO: 903284

SEQ ID NO: 903287 - protein, 360 aa, Homo sapiens; identical to SEQ ID NO: 903284

SEQ ID NO: 903288 - protein, 256 aa, Homo sapiens
MVPAAGRRPPRVMRLLGWWQVLLWVLGLPVRGVEVAEESGRLWSEEQPAHPLQVGAVYLGEEELLHDPMGQDRAAEEANAVLGLDTQGDHMVMLSVIPGEAEDKVSSEPSGVTCGAGGAEDSRCNVRESLFSLDGAGAHFPDREEEYYTEPEVAESDAAPTEDSNNTESLKSPKVNCEERNITGLENFTLKILNMSQDLMDFLNPNGSDCTLVLFYTPWCRFSASLAPHFNSLPRAFPALHFLALDASQHSRQELN

SEQ ID NO: 903289 - protein, 360 aa, Homo sapiens; identical to SEQ ID NO: 903284

SEQ ID NO: 903290 - protein, 360 aa, Homo sapiens; identical to SEQ ID NO: 903284

SEQ ID NO: 903291 - protein, 379 aa, Homo sapiens
MAARGRARAPRLSSPSLPPAGSTTRVAVRRLPLGLGNGPGCRSTTAPRHAAPRLVASIAVGAGTSRPRRGGCRGKWSLMVRGLLHDPMGQDRAAEEANAVLGLDTQGDHMVMLSVIPGEAEDKVSSEPSGVTCGAGGAEDSRCNVRESLFSLDGAGAHFPDREEEYYTEPEVAESDAAPTEDSNNTESLKSPKVNCEERNITGLENFTLKILNMSQDLMDFLNPNGSDCTLVLFYTPWCRFSASLAPHFNSLPRAFPALHFLALDASQHSSLSTRFGTVAVPNILLFQGAKPMARFNHTDRTLETLKIFIFNQTGIEAKKNVVVTQADQIGPLPSTLIKSVDWLLVFSLFFLISFIMYATIRTESIRWLIPGQEQEHVE

SEQ ID NO: 903292 - protein, 332 aa, Homo sapiens [sequence omitted]

SEQ ID NO: 903293 - protein, 323 aa, Homo sapiens
MVPAAGRRPPRVMRLLGWWQVLLWVLGLPVRGVEVAEESGRLWSEEQPAHPLQVGAVYLGEEELLHDPMGQDRAAEEANAVLGLDTQGDHMVMLSVIPGEAEDKVSSEPSGVTCGAGGAEDSRCNVRESLFSLDGAGAHFPDREEEYYTEPEVAESDAAPTEDSNNTESLKSPKVNCEERNITGLENFTLKILNMSQDLMDFLNPNGSDCTLVLFYTPWCRFSASLAPHFNSLPRAFPALHFLALDASQHSSLSTRFGTVAVPNILLFQGGATAPGLNKLFEKLFLKDSLNSDMTANYLIINYFYTNCFQGFRVVECLFHKAP

SEQ ID NO: 903294 - protein, 258 aa, Homo sapiens
MFAQQMQLMLQNAQMSSLGSFPMTPSIPANPPMAFNPYIPHPGMGLVPAELVPNTPVLIPGNPPLAMPGAVGPKLMRSDKLEVCREFQRGNCTRGENDCRYAHPTDASMIEASDNTVTICMDYIKGRCSREKCKYFHPPAHLQARLKAAHHQMNHSAASAMALQPGTLQLIPKRSALEKPNGATPVFNPTVFHCQQALTNLQLPQPAFIPAGPILCMAPASNIVPMMHGATPTTVSAATTPATSVPFAAPTTGNQLKF

SEQ ID NO: 903295 - protein, 246 aa, Homo sapiens
MFAQQMQLMLQNAQMSSLGSFPMTPSIPANPPMAFNPYIPHPGMGLVPAELVPNTPVLIPGNPPLAMPGAVGPKLMRSDKLEVCREFQRGNCTRGENDCRYAHPTDASMIEASDNTVTICMDYIKGRCSREKCKYFHPPAHLQARLKAAHHQMNHSAASAMALQPGTLQLIPKRSALEKPNGATPVFNPTVFHCQQALTNLQLPQPAFIPAVPMMHGATPTTVSAATTPATSVPFAAPTTGNQLKF

SEQ ID NO: 903296 - protein, 273 aa, Homo sapiens
MFAQQMQLMLQNAQMSSLGSFPMTPSIPANPPMAFNPYIPHPGMGLVPAELVPNTPVLIPGNPPLAMPGAVGPKLMRSDKLEVCREFQRGNCTRGENDCRYAHPTDASMIEASDNTVTICMDYIKGRCSREKCKYFHPPAHLQARLKAAHHQMNHSAASAMALQPGTLQLIPKRSALEKPNGATPVFNPTVFHCQQALTNLQLPQPAFIPAGPILCMAPASNIVPMMHGATPTTVSAATTPATSVPFAAPTTGNQIPQLSIDELNSSMFVSQM

SEQ ID NO: 903297 - protein, 304 aa, Homo sapiens
MERASKNLKGRCTRENCKYLHPPPHLKTQLEINGRNNLIQQKTAAAMFAQQMQLMLQNAQMSSLGSFPMTPSIPANPPMAFNPYIPHPGMGLVPAELVPNTPVLIPGNPPLAMPGAVGPKLMRSDKLEVCREFQRGNCTRGENDCRYAHPTDASMIEASDNTVTICMDYIKGRCSREKCKYFHPPAHLQARLKAAHHQMNHSAASAMALQPGTLQLIPKRSALEKPNGATPVFNPTVFHCQQALTNLQLPQPAFIPAGPILCMAPASNIVPMMHGATPTTVSAATTPATSVPFAAPTTGNQLKF

SEQ ID NO: 903298 - protein, 265 aa, Homo sapiens
MQADQGRCTRENCKYLHPPPHLKTQLEINGRNNLIQQKTAAAMFAQQMQLMLQNAQMSSLGSFPMTPSIPANPPMAFNPYIPHPGMGLVPAELVPNTPVLIPGNPPLAMPGAVGPKLMRSDKLEVCREFQRGNCTRGENDCRYAHPTDASMIEASDNTVTICMDYIKGRCSREKCKYFHPPAHLQARLKAAHHQMNHSAASAMALTNLQLPQPAFIPAGPILCMAPASNIVPMMHGATPTTVSAATTPATSVPFAAPTTGNQLKF

SEQ ID NO: 903299 - protein, 135 aa, Homo sapiens
VSDLLTWLPFLAGCPNALMPRVLAGLPANHAAAAAARSCLGAACAPATAGGADAAPDRRKAIPRPRLPAARLDAAASGGRGLRSLPARRVRRAAGLPGGQGARRVRLLLGMRQPRGPALRPGPQCSLLRALRRAA

SEQ ID NO: 903300 - protein, 199 aa, Homo sapiens
LACPGSLSQRQFLLPNPGWKRAALGAAHNSASGLDTGSRFQGAHRSRIRGVAHTRDVRFQERRPRVARPEGGRGSVAPYISHLQDFKYSSLEIPGMRFLLAPTRRSGVRTNRGRKGPSDQLLPSRGFQVSAGLFSLLLAEPGWAYLSPPSRAGCEEEARGGCLKMTLTPSSGCREEEGRFARLLVTAKAPKKCCAAVLV

SEQ ID NO: 903301 - protein, 304 aa, Homo sapiens
MLPPPRPAAALALPVLLLLLVVLTPPPTGARPSPGPDYLRRGWMRLLAEGEGCAPCRPEECAAPRGCLAGRVRDACGCCWECANLEGQLCDLDPSAHFYGHCGEQLECRLDTGGDLSRGEVPEPLCACRSQSPLCGSDGHTYSQICRLQEAARARPDANLTVAHPGPCESGPQIVSHPYDTWNVTGQDVIFGCEVFAYPMASIEWRKDGLDIQLPGDDPHISVQFRGGPQRFEVTGWLQIQAVRPSDEGTYRCLGRNALGQVEAPASLTVLTPDQLNSTGIPQLRSLNLVPEEEAESEENDDYY

SEQ ID NO: 903302 - protein, 145 aa, Homo sapiens [sequence omitted]

SEQ ID NO: 903303 - protein, 104 aa, Homo sapiens [sequence omitted]

SEQ ID NO: 903304 - protein, 304 aa, Homo sapiens; identical to SEQ ID NO: 903301

SEQ ID NO: 903305 - protein, 304 aa, Homo sapiens; identical to SEQ ID NO: 903301

SEQ ID NO: 903306 - protein, 104 aa, Homo sapiens [sequence omitted]

SEQ ID NO: 903307 - protein, 304 aa, Homo sapiens; identical to SEQ ID NO: 903301

SEQ ID NO: 903308 - protein, 794 aa, Homo sapiens
MDRGTLPLAVALLLASCSLSPTSLAETVHCDLQPVGPERGEVTYTTSQVSKGCVAQAPNAILEVHVLFLEFPTGPSQLELTLQASKQNGTWPREVLLVLSVNSSVFLHLQALGIPLHLAYNSSLVTFQEPPGVNTTELPSFPKTQILEWAAERGPITSAAELNDPQSILLRLGQAQGSLSFCMLEASQDMGRTLEWRPRTPALVRGCHLEGVAGHKEAHILRVLPGHSAGPRTVTVKVELSCAPGDLDAVLILQGPPYVSWLIDANHNMQIWTTGEYSFKIFPEKNIRGFKLPDTPQGLLGEARMLNASIVASFVELPLASIVSLHASSCGGRLQTSPAPIQTTPPKDTCSPELLMSLIQTKCADDAMTLVLKKELVAHLKCTITGLTFWDPSCEAEDRGDKFVLRSAYSSCGMQVSASMISNEAVVNILSSSSPQRKKVHCLNMDSLSFQLGLYLSPHFLQASNTIEPGQQSFVQVRVSPSVSEFLLQLDSCHLDLGPEGGTVELIQGRAAKGNCVSLLSPSPEGDPRFSFLLHFYTVPIPKTGTLSCTVALRPKTGSQDQEVHRTVFMRLNIISPDLSGCTSKGLVLPAVLGITFGAFLIGALLTAALWYIYSHTREYPRPPQLSMPGPSIHPGEPSEASEGLRGPGRTLTSAPAPAPAPRFPQQAGARGGGGCPGLLGEQQHQPQHREHPEHPLLHQQHGIAPAPRARPAGETEQPPAGSTGVNSPWEPVLHSTQNGACSPRLPFPPPSQRPAASAATGLEHLGVPPPHRTFNPVGLGYGCPGDRPLATLL

SEQ ID NO: 903309 - protein, 658 aa, Homo sapiens
MDRGTLPLAVALLLASCSLSPTSLAETVHCDLQPVGPERGEVTYTTSQVSKGCVAQAPNAILEVHVLFLEFPTGPSQLELTLQASKQNGTWPREVLLVLSVNSSVFLHLQALGIPLHLAYNSSLVTFQEPPGVNTTELPSFPKTQILEWAAERGPITSAAELNDPQSILLRLGQAQGSLSFCMLEASQDMGRTLEWRPRTPALVRGCHLEGVAGHKEAHILRVLPGHSAGPRTVTVKVELSCAPGDLDAVLILQGPPYVSWLIDANHNMQIWTTGEYSFKIFPEKNIRGFKLPDTPQGLLGEARMLNASIVASFVELPLASIVSLHASSCGGRLQTSPAPIQTTPPKDTCSPELLMSLIQTKCADDAMTLVLKKELVAHLKCTITGLTFWDPSCEAEDRGDKFVLRSAYSSCGMQVSASMISNEAVVNILSSSSPQRKKVHCLNMDSLSFQLGLYLSPHFLQASNTIEPGQQSFVQVRVSPSVSEFLLQLDSCHLDLGPEGGTVELIQGRAAKGNCVSLLSPSPEGDPRFSFLLHFYTVPIPKTGTLSCTVALRPKTGSQDQEVHRTVFMRLNIISPDLSGCTSKGLVLPAVLGITFGAFLIGALLTAALWYIYSHTRSPSKREPVVAVAAPASSESSSTNHSIGSTQSTPCSTSSMA

SEQ ID NO: 903310 - protein, 488 aa, Homo sapiens
MDRGTLPLAVALLLASCSLSPTSLAETVHCDLQPVGPERGEVTYTTSQVSKGCVAQAPNAILEVHVLFLEFPTGPSQLELTLQASKQNGTWPREVLLVLSVNSSVFLHLQALGIPLHLAYNSSLVTFQEPPGVNTTELPSFPKTQILEWAAERGPITSAAELNDPQSILLRLGQAQGSLSFCMLEASQDMGRTLEWRPRTPALVRGCHLEGVAGHKEAHILRVLPGHSAGPRTVTVKVELSCAPGDLDAVLILQGPPYVSWLIDANHNMQIWTTGEYSFKIFPEKNIRGFKLPDTPQGLLGEARMLNASIVASFVELPLASIVSLHASSCGGRLQTSPAPIQTTPPKDTCSPELLMSLIQTKCADDAMTLVLKKELVAHLKCTITGLTFWDPSCEAEDRGDKFVLRSAYSSCGMQVSASMISNEAVVNILSSSSPQRKKVHCLNMDSLSFQLGLYLSPHFLQASSESSSTNHSIGSTQSTPCSTSSMA

SEQ ID NO: 903311 - protein, 705 aa, Homo sapiens
MDRGTLPLAVALLLASCSLSPTSLAETVHCDLQPVGPERGEVTYTTSQVSKGCVAQAPNAILEVHVLFLEFPTGPSQLELTLQASKQNGTWPREVLLVLSVNSSVFLHLQALGIPLHLAYAGSTHHMLGVRVTLACQDPVMGPGPSTKQTNLSQCVLRVKHCARMGKNSSLVTFQEPPGVNTTELPSFPKTQILEWAAERGPITSAAELNDPQSILLRLGQAQGSLSFCMLEASQDMGRTLEWRPRTPALVRGCHLEGVAGHKEAHILRVLPGHSAGPRTVTVKVELSCAPGDLDAVLILQGPPYVSWLIDANHNMQIWTTGEYSFKIFPEKNIRGFKLPDTPQGLLGEARMLNASIVASFVELPLASIVSLHASSCGGRLQTSPAPIQTTPPKDTCSPELLMSLIQTKCADDAMTLVLKKELVAHLKCTITGLTFWDPSCEAEDRGDKFVLRSAYSSCGMQVSASMISNEAVVNILSSSSPQRKKVHCLNMDSLSFQLGLYLSPHFLQASNTIEPGQQSFVQVRVSPSVSEFLLQLDSCHLDLGPEGGTVELIQGRAAKGNCVSLLSPSPEGDPRFSFLLHFYTVPIPKTGTLSCTVALRPKTGSQDQEVHRTVFMRLNIISPDLSGCTSKGLVLPAVLGITFGAFLIGALLTAALWYIYSHTRSPSKREPVVAVAAPASSESSSTNHSIGSTQSTPCSTSSMA

SEQ ID NO: 903312 - protein, 436 aa, Homo sapiens
HPRLSPRRPRTVTVKVELSCAPGDLDAVLILQGPPYVSWLIDANHNMQIWTTGEYSFKIFPEKNIRGFKLPDTPQGLLGEARMLNASIVASFVELPLASIVSLHASSCGGRLQTSPAPIQTTPPKDTCSPELLMSLIQTKCADDAMTLVLKKELVAHLKCTITGLTFWDPSCEAEDRGDKFVLRSAYSSCGMQVSASMISNEAVVNILSSSSPQRKKVHCLNMDSLSFQLGLYLSPHFLQASNTIEPGQQSFVQVRVSPSVSEFLLQLDSCHLDLGPEGGTVELIQGRAAKGNCVSLLSPSPEGDPRFSFLLHFYTVPIPKTGTLSCTVALRPKTGSQDQEVHRTVFMRLNIISPDLSGCTSKGLVLPAVLGITFGAFLIGALLTAALWYIYSHTRSPSKREPVVAVAAPASSESSSTNHSIGSTQSTPCSTSSMA

SEQ ID NO: 903313 - protein, 345 aa, Homo sapiens
LLEDPCNCFGSLHASSCGGRLQTSPAPIQTTPPKDTCSPELLMSLIQTKCADDAMTLVLKKELVAHLKCTITGLTFWDPSCEAEDRGDKFVLRSAYSSCGMQVSASMISNEAVVNILSSSSPQRKKVHCLNMDSLSFQLGLYLSPHFLQASNTIEPGQQSFVQVRVSPSVSEFLLQLDSCHLDLGPEGGTVELIQGRAAKGNCVSLLSPSPEGDPRFSFLLHFYTVPIPKTGTLSCTVALRPKTGSQDQEVHRTVFMRLNIISPDLSGCTSKGLVLPAVLGITFGAFLIGALLTAALWYIYSHTRSPSKREPVVAVAAPASSESSSTNHSIGSTQSTPCSTSSMA

SEQ ID NO: 903314 - protein, 175 aa, Homo sapiens
RLVRGLGGVLIDANHNMQIWTTGEYSFKIFPEKNIRGFKLPDTPQGLLGEARMLNASIVASFVELPLASIVSLHASSCGGRLQTSPAPIQTTPPKDTCSPELLMSLIQTKCADDAMTLVLKKELVAHLKCTITGLTFWASTSAHTSSRPPTPSSRGSRALCRSECPHPSPSSCSS

SEQ ID NO: 903315 - protein, 175 aa, Homo sapiens
MDRGTLPLAVALLLASCSLSPTSLAETVHCDLQPVGPERGEVTYTTSQVSKGCVAQAPNAILEVHVLFLEFPTGPSQLELTLQASKQNGTWPREVLLVLSVNSSVFLHLQALGIPLHLAYNSSLVTFQEPPGVNTTELPSFPKTQILEWAAERGPITPPAAWHSPGPPRSPSRRD

SEQ ID NO: 903316 - protein, 167 aa, Homo sapiens
MPGPSIHPGEPSEASEGLRGPGRTLTSAPAPAPAPRFPQQAGARGGGGCPGLLGEQQHQPQHREHPEHPLLHQQHGIAPAPRARPAGETEQPPAGSTGVNSPWEPVLHSTQNGACSPRLPFPPPSQRPAASAATGLEHLGVPPPHRTFNPVGLGYGCPGDRPLATLL

SEQ ID NO: 903317 - protein, 173 aa, Homo sapiens
MDRGTLPLAVALLLASCSLSPTSLAETVHCDLQPVGPERGEVTYTTSQVSKGCVAQAPNAILEVHVLFLEFPTGPSQLELTLQASKQNGTWPREVLLVLSVNSSVFLHLQALGIPLHLAYAGSTHHMLGVRVTLACQDPVMGPGPSTKSDKSLSVRTTCQALCKDGQGRRCPL

SEQ ID NO: 903318 - protein, 62 aa, Homo sapiens
MLEASQDMGRTLEWRPRTPALVRGCHLEGVAGHKEAHILRVLPGHSAGYGSRPAPDTSPHPE

SEQ ID NO: 903319 - protein, 658 aa, Homo sapiens; identical to SEQ ID NO: 903309

SEQ ID NO: 903320 - protein, 476 aa, Homo sapiens
MLEASQDMGRTLEWRPRTPALVRGCHLEGVAGHKEAHILRVLPGHSAGPRTVTVKVELSCAPGDLDAVLILQGPPYVSWLIDANHNMQIWTTGEYSFKIFPEKNIRGFKLPDTPQGLLGEARMLNASIVASFVELPLASIVSLHASSCGGRLQTSPAPIQTTPPKDTCSPELLMSLIQTKCADDAMTLVLKKELVAHLKCTITGLTFWDPSCEAEDRGDKFVLRSAYSSCGMQVSASMISNEAVVNILSSSSPQRKKVHCLNMDSLSFQLGLYLSPHFLQASNTIEPGQQSFVQVRVSPSVSEFLLQLDSCHLDLGPEGGTVELIQGRAAKGNCVSLLSPSPEGDPRFSFLLHFYTVPIPKTGTLSCTVALRPKTGSQDQEVHRTVFMRLNIISPDLSGCTSKGLVLPAVLGITFGAFLIGALLTAALWYIYSHTRSPSKREPVVAVAAPASSESSSTNHSIGSTQSTPCSTSSMA

SEQ ID NO: 903321 - protein, 345 aa, Homo sapiens
KKPNFLVQSCAAARDDCGGRLQTSPAPIQTTPPKDTCSPELLMSLIQTKCADDAMTLVLKKELVAHLKCTITGLTFWDPSCEAEDRGDKFVLRSAYSSCGMQVSASMISNEAVVNILSSSSPQRKKVHCLNMDSLSFQLGLYLSPHFLQASNTIEPGQQSFVQVRVSPSVSEFLLQLDSCHLDLGPEGGTVELIQGRAAKGNCVSLLSPSPEGDPRFSFLLHFYTVPIPKTGTLSCTVALRPKTGSQDQEVHRTVFMRLNIISPDLSGCTSKGLVLPAVLGITFGAFLIGALLTAALWYIYSHTRSPSKREPVVAVAAPASSESSSTNHSIGSTQSTPCSTSSMA

SEQ ID NO: 903322 - protein, 560 aa, Homo sapiens
MDRGTLPLAVALLLASCSLSPTSLAETVHCDLQPVGPERGEVTYTTSQVSKGCVAQAPNAILEVHVLFLEFPTGPSQLELTLQASKQNGTWPREVLLVLSVNSSVFLHLQALGIPLHLAYNSSLVTFQEPPGVNTTELPSFPKTQILEWAAERGPITSAAELNDPQSILLRLGQAQGSLSFCMLEASQDMGRTLEWRPRTPALVRGCHLEGVAGHKEAHILRVLPGHSAGPRTVTVKVELSCAPGDLDAVLILQGPPYVSWLIDANHNMQIWTTGEYSFKIFPEKNIRGFKLPDTPQGLLGEARMLNASIVASFVELPLASIVSLHASSCGGRLQTSPAPIQTTPPKDTCSPELLMSLIQTKCADDAMTLVLKKELVAHLKCTITGLTFWDPSCEAEDRGDKFVLRSAYSSCGMQVSASMISNEAVVNILSSSSPQRVEMDSHVLTHLAQGLLLGRGLFLAWEGAGLGKLLASHVCLECLGLPFCMTGAGLLRVTLSVSQVRGLSTYWLCGLGQVTLVFWAQRWPKKGLCATGCFWAANEVLCGSSSHSLAAGASLINIS

SEQ ID NO: 903323 - protein, 267 aa, Homo sapiens
RRGLALSPRLECNDVISAHCSLLLSGSSDSCASAFPVAGTMGVCHHTYLACLSPLGPPSSWNFLSAFLPTMTPEEMRLPEQEGDSVRVSPSVSEFLLQLDSCHLDLGPEGGTVELIQGRAAKGNCVSLLSPSPEGDPRFSFLLHFYTVPIPKTGTLSCTVALRPKTGSQDQEVHRTVFMRLNIISPDLSGCTSKGLVLPAVLGITFGAFLIGALLTAALWYIYSHTRSPSKREPVVAVAAPASSESSSTNHSIGSTQSTPCSTSSMA

SEQ ID NO: 903324 - protein, 355 aa, Homo sapiens
MDRGTLPLAVALLLASCSLSPTSLAETVHCDLQPVGPERGEVTYTTSQVSKGCVAQAPNAILEVHVLFLEFPTGPSQLELTLQASKQNGTWPREVLLVLSVNSSVFLHLQALGIPLHLAYNSSLVTFQEPPGVNTTELPSFPKTQILEWAAERGPITSAAELNDPQSILLRLGQAQGSLSFCMLEASQDMGRTLEWRPRTPALVRGCHLEGVAGHKEAHILRVLPGHSAGPRTVTVKVELSCAPGDLDAVLILQGPPYVSWLIDANHNMQIWTTGEYSFKIFPEKNIRGFKLPDTPQGLLGEARMLNASIVASFVELPLASIVSLHASSCGGKLYLTRSCTSPVAVPHPELYLTR

SEQ ID NO: 903325 - protein, 107 aa, Homo sapiens
AVVAGIALMWPQPRLPPRPAMSEETRQSKLAAAKKKLREYQQRNSPGVPTGAKKKKKIKNGSNPETTTSGGCHSPEDVSLGWPGSWGQGAQGAVEGNCYDCGRTVGY

SEQ ID NO: 903326 - protein, 1010 aa, Homo sapiens
AVVAGIALMWPQPRLPPRPAMSEETRQSKLAAAKKKLREYQQRNSPGVPTGAKKKKKIKNGSNPETTTSGGCHSPEDTPKDNAATLQPSDDTVLPGGVPSPGASLTSMAASQNHDADNVPNLMDETKTFSSTESLRQLSQQLNGLVCESATCVNGEGPASSANLKDLESRYQQLAVALDSSYVTNKQLNITIEKLKQQNQEITDQLEEEKKECHQKQGALREQLQVHIQTIGILVSEKAELQTALAHTQHAARQKEGESEDLASRLQYSRRRVGELERALSAVSTQQKKADRYNKELTKERDALRLELYKNTQSNEDLKQEKSELEEKLRVLVTEKAGMQLNLEELQKKLEMTELLLQQFSSRCEAPDANQQLQQAMEERAQLEAHLGQVMESVRQLQMERDKYAENLKGESAMWRQRMQQMSEQVHTLREEKECSMSRVQELETSLAELRNQMAEPPPPEPPAGPSEVEQQLQAEAEHLRKELEGLAGQLQAQVQDNEGLSRLNREQEERLLELERAAELWGEQAEARRQILETMQNDRTTISRALSQNRELKEQLAELQSGFVKLTNENMEITSALQSEQHVKRELGKKLGELQEKLSELKETVELKSQEAQSLQQQRDQYLGHLQQYVAAYQQLTSEKEVLHNQLLLQTQLVDQLQQQEAQGKAVAEMARQELQETQERLEAATQQNQQLRAQLSLMAHPGEGDGLDREEEEDEEEEEEEAVAVPQPMPSIPEDLESREAMVAFFNSAVASAEEEQARLRGQLKEQRVRCRRLAHLLASAQKEPEAAAPAPGTGGDSVCGETHRALQGAMEKLQSRFMELMQEKADLKERVEELEHRCIQLSGETDTIGEYIALYQSQRAVLKERHREKEEYISRLAQDKEEMKVKLLELQELVLRLVGDRNEWHGRFLAAAQNPADEPTSGAPAPQELGAANQQGDLCEVSLAGSVEPAQGEAREGSPRDNPTAQQIMQLLREMQNPRERPGLGSNPCIPFFYRADENDEVKITVI

SEQ ID NO: 903327 - protein, 1010 aa, Homo sapiens
AVVAGIALMWPQPRLPPRPAMSEETRQSKLAAAKKKLREYQQRNSPGVPTGAKKKKKIKNGSNPETTTSGGCHSPEDIQDILKVLVSDLNRSNGVALPPLDKWKTPKDNAATLQPSDDTVLPGGVPSPGASLTSMAASQNHDADNVPNLMDETKTFSSTESLRQLSQQLNGLVCESATCVNGEGPASSANLKDLEKQQNQEITDQLEEEKKECHQKQGALREQLQVHIQTIGILVSEKAELQTALAHTQHAARQKEGESEDLASRLQYSRRRVGELERALSAVSTQQKKADRYNKELTKERDALRLELYKNTQSNEDLKQEKSELEEKLRVLVTEKAGMQLNLEELQKKLEMTELLLQQFSSRCEAPDANQQLQQAMEERAQLEAHLGQVMESVRQLQMERDKYAENLKGESAMWRQRMQQMSEQVHTLREEKECSMSRVQELETSLAELRNQMAEPPPPEPPAGPSEVEQQLQAEAEHLRKELEGLAGQLQAQVQDNEGLSRLNREQEERLLELERAAELWGEQAEARRQILETMQNDRTTISRALSQNRELKEQLAELQSGFVKLTNENMEITSALQSEQHVKRELGKKLGELQEKLSELKETVELKSQEAQSLQQQRDQYLGHLQQYVAAYQQLTSEKEVLHNQLLLQTQLVDQLQQQEAQGKAVAEMARQELQETQERLEAATQQNQQLRAQLSLMAHPGEGDGLDREEEEDEEEEEEEAVAVPQPMPSIPEDLESREAMVAFFNSAVASAEEEQARLRGQLKEQRVRCRRLAHLLASAQKEPEAAAPAPGTGGDSVCGETHRALQGAMEKLQSRFMELMQEKADLKERVEELEHRCIQLSGETDTIGEYIALYQSQRAVLKERHREKEEYISRLAQDKEEMKVKLLELQELVLRLVGDRNEWHGRFLAAAQNPADEPTSGAPAPQELGAANQQGDLCEVSLAGSVEPAQGEAREGSPRDNPTAQQIMQLLREMQNPRERPGLGSNPCIPFFYRADENDEVKITVI

SEQ ID NO: 903328 - protein, 914 aa, Homo sapiens
MIKIVRVSTPKDNAATLQPSDDTVLPGGVPSPGASLTSMAASQNHDADNVPNLMDETKTFSSTESLRQLSQQLNGLVCESATCVNGEGPASSANLKDLEKQQNQEITDQLEEEKKECHQKQGALREQLQVHIQTIGILVSEKAELQTALAHTQHAARQKEGESEDLASRLQYSRRRVGELERALSAVSTQQKKADRYNKELTKERDALRLELYKNTQSNEDLKQEKSELEEKLRVLVTEKAGMQLNLEELQKKLEMTELLLQQFSSRCEAPDANQQLQQAMEERAQLEAHLGQVMESVRQLQMERDKYAENLKGESAMWRQRMQQMSEQVHTLREEKECSMSRVQELETSLAELRNQMAEPPPPEPPAGPSEVEQQLQAEAEHLRKELEGLAGQLQAQVQDNEGLSRLNREQEERLLELERAAELWGEQAEARRQILETMQNDRTTISRALSQNRELKEQLAELQSGFVKLTNENMEITSALQSEQHVKRELGKKLGELQEKLSELKETVELKSQEAQSLQQQRDQYLGHLQQYVAAYQQLTSEKEVLHNQLLLQTQLVDQLQQQEAQGKAVAEMARQELQETQERLEAATQQNQQLRAQLSLMAHPGEGDGLDREEEEDEEEEEEEAVAVPQPMPSIPEDLESREAMVAFFNSAVASAEEEQARLRGQLKEQRVRCRRLAHLLASAQKEPEAAAPAPGTGGDSVCGETHRALQGAMEKLQSRFMELMQEKADLKERVEELEHRCIQLSGETDTIGEYIALYQSQRAVLKERHREKEEYISRLAQDKEEMKVKLLELQELVLRLVGDRNEWHGRFLAAAQNPADEPTSGAPAPQELGAANQQGDLCEVSLAGSVEPAQGEAREGSPRDNPTAQQIMQLLREMQNPRERPGLGSNPCIPFFYRADENDEVKITVI

SEQ ID NO: 903329 - protein, 1010 aa, Homo sapiens; identical to SEQ ID NO: 903326

SEQ ID NO: 903330 - protein, 1010 aa, Homo sapiens; identical to SEQ ID NO: 903326

SEQ ID NO: 903331 - protein, 1010 aa, Homo sapiens; identical to SEQ ID NO: 903326

SEQ ID NO: 903332 - protein, 1132 aa, Homo sapiens
AVVAGIALMWPQPRLPPRPAMSEETRQSKLAAAKKKLREYQQRNSPGVPTGAKKKKKIKNGSNPETTTSGGCHSPEDIQDILKVLVSDLNRSNGVALPPLDKWKTPKDNAATLQPSDDTVLPGGVPSPGASLTSMAASQNHDADNVPNLMDETKTFSSTESLRQLSQQLNGLVCESATCVNGEGPASSANLKDLESRYQQLAVALDSSYVTNKQLNITIEKLKQQNQEITDQLEEEKKECHQKQGALREQLQVHIQTIGILVSEKAELQTALAHTQHAARQKEGESEDLASRLQYSRRRVGELERALSAVSTQQKKADRYNKELTKERDALRLELYKNTQSNEDLKQEKSELEEKLRVLVTEKAGMQLNLEELQKKLEMTELLLQQFSSRCEAPDANQQLQQAMEERAQLEAHLGQVMESVRQLQMERDKYAENLKGESAMWRQRMQQMSEQVHTLREEKECSMSRVQELETSLAELRNQMGNWGWGDLGAGMVSEGCGGGLECPRELGGWNGFEAEGKRSVPGDGKSRHLHEPQCPISKDEGVPVVSHPQLSLSESGLEDWLTSGCEESSAGRPSLGSLRGEPPAGPSEVEQQLQAEAEHLRKELEGLAGQLQAQVQDNEGLSRLNREQEERLLELERAAELWGEQAEARRQILETMQNDRTTISRALSQNRELKEQLAELQSGFVKLTNENMEITSALQSEQHVKRELGKKLGELQEKLSELKETVELKSQEAQSLQQQRDQYLGHLQQYVAAYQQLTSEKEVLHNQLLLQTQLVDQLQQQEAQGKAVAEMARQELQETQERLEAATQQNQQLRAQLSLMAHPGEGDGLDREEEEDEEEEEEEAVAVPQPMPSIPEDLESREAMVAFFNSAVASAEEEQARLRGQLKEQRVRCRRLAHLLASAQKEPEAAAPAPGTGGDSVCGETHRALQGAMEKLQSRFMELMQEKADLKERVEELEHRCIQLSGETDTIGEYIALYQSQRAVLKERHREKEEYISRLAQDKEEMKVKLLELQELVLRLVGDRNEWHGRFLAAAQNPADEPTSGAPAPQELGAANQQGDLCEVSLAGSVEPAQGEAREGSPRDNPTAQQIMQLLREMQNPRERPGLGSNPCIPFFYRADENDEVKITVI

SEQ ID NO: 903333 - protein, 757 aa, Homo sapiens
MEERAQLEAHLGQVMESVRQLQMERDKYAENLKGESAMWRQRMQQMSEQVHTLREEKECSMSRVQELETSLAELRNQMGNWGWGDLGAGMVSEGCGGGLECPRELGGWNGFEAEGKRSVPGDGKSRHLHEPQCPISKDEGVPVVSHPQLSLSESGLEDWLTSGCEESSAGRPSLGSLRGGMDQEEGFFENARGFYCLRPFSAEPPPPEPPAGPSEVEQQLQAEAEHLRKELEGLAGQLQAQVQDNEGLSRLNREQEERLLELERAAELWGEQAEARRQILETMQNDRTTISRALSQNRELKEQLAELQSGFVKLTNENMEITSALQSEQHVKRELGKKLGELQEKLSELKETVELKSQEAQSLQQQRDQYLGHLQQYVAAYQQLTSEKEVLHNQLLLQTQLVDQLQQQEAQGKAVAEMARQELQETQERLEAATQQNQQLRAQLSLMAHPGEGDGLDREEEEDEEEEEEEAVAVPQPMPSIPEDLESREAMVAFFNSAVASAEEEQARLRGQLKEQRVRCRRLAHLLASAQKEPEAAAPAPGTGGDSVCGETHRALQGAMEKLQSRFMELMQEKADLKERVEELEHRCIQLSGETDTIGEYIALYQSQRAVLKERHREKEEYISRLAQDKEEMKVKLLELQELVLRLVGDRNEWHGRFLAAAQNPADEPTSGAPAPQELGAANQQGDLCEVSLAGSVEPAQGEAREGSPRDNPTAQQIMQLLREMQNPRERPGLGSNPCIPFFYRADENDEVKITVI

SEQ ID NO: 903334 - protein, 691 aa, Homo sapiens
MIKIVRVSTPKDNAATLQPSDDTVLPGGVPSPGASLTSMAASQNHDADNVPNLMDETKTFSSTESLRQLSQQLNGLVCESATCVNGEGPASSANLKDLEKQQNQEITDQLEEEKKECHQKQGALREQLQVHIQTIGILVSEKAELQTALAHTQHAARQKEGESEDLASRLQYSRRRVGELERALSAVSTQQKKADRYNKELTKEEQAEARRQILETMQNDRTTISRALSQNRELKEQLAELQSGFVKLTNENMEITSALQSEQHVKRELGKKLGELQEKLSELKETVELKSQEAQSLQQQRDQYLGHLQQYVAAYQQLTSEKEVLHNQLLLQTQLVDQLQQQEAQGKAVAEMARQELQETQERLEAATQQNQQLRAQLSLMAHPGEGDGLDREEEEDEEEEEEEAVAVPQPMPSIPEDLESREAMVAFFNSAVASAEEEQARLRGQLKEQRVRCRRLAHLLASAQKEPEAAAPAPGTGGDSVCGETHRALQGAMEKLQSRFMELMQEKADLKERVEELEHRCIQLSGETDTIGEYIALYQSQRAVLKERHREKEEYISRLAQDKEEMKVKLLELQELVLRLVGDRNEWHGRFLAAAQNPADEPTSGAPAPQELGAANQQGDLCEVSLAGSVEPAQGEAREGSPRDNPTAQQIMQLLREMQNPRERPGLGSNPCIPFFYRADENDEVKITVI

SEQ ID NO: 903335 - protein, 230 aa, Homo sapiens
MLTRLPVERCRAPQRERRRSLCGETHRALQGAMEKLQSRFMELMQEKADLKERVEELEHRCIQLSGETDTIGEYIALYQSQRAVLKERHREKEEYISRLAQDKEEMKVKLLELQELVLRLVGDRNEWHGRFLAAAQNPADEPTSGAPAPQELGAANQQGDLCEVSLAGSVEPAQGEAREGSPRDNPTAQQIMQLLREMQNPRERPGLGSNPCIPFFYRADENDEVKITVI

SEQ ID NO: 903336 - protein, 437 aa, Homo sapiens
AVVAGIALMWPQPRLPPRPAMSEETRQSKLAAAKKKLREYQQRNSPGVPTGAKKKKKIKNGSNPETTTSGGCHSPEDIQDILKVLVSDLNRSNGVALPPLDKWKTPKDNAATLQPSDDTVLPGGVPSPGASLTSMAASQNHDADNVPNLMDETKTFSSTESLRQLSQQLNGLVCESATCVNGEGPASSANLKDLESRYQQLAVALDSSYVTNKQLNITIEKLKQQNQEITDQLEEEKKECHQKQGALREQLQVHIQTIGILVSEKAELQTALAHTQHAARQKEGESEDLASRLQYSRRRVGELERALSAVSTQQKKADRYNKELTKERDALRLELYKNTQSNEDLKQEKSELEEKLRVLVTEKAGMQLNLEELQKKLEMTELLLQQFSSRCEAPDANQQLQQAMEERAQLEAHLGQVMESVRQLQMERDKYAEVAVG

SEQ ID NO: 903337 - protein, 843 aa, Homo sapiens
AVVAGIALMWPQPRLPPRPAMSEETRQSKLAAAKKKLREYQQRNSPGVPTGAKKKKKIKNGSNPETTTSGGCHSPEDIQDILKVLVSDLNRSNGVALPPLDKWKTPKDNAATLQPSDDTVLPGGVPSPGASLTSMAASQNHDADNVPNLMDETKTFSSTESLRQLSQQLNGLVCESATCVNGEGPASSANLKDLESRYQQLAVALDSSYVTNKQLNITIEKLKQQNQEITDQLEEEKKECHQKQGALREQLQVHIQTIGILVSEKAELQTALAHTQHAARQKEGESEDLASRLQYSRRRVGELERALSAVSTQQKKADRYNKELTKERDALRLELYKNTQSNEDLKQEKSELEEKLRVLVTEKAGMQLNLEELQKKLEMTELLLQQFSSRCEAPDANQQLQQAMEERAQLEAHLGQVMESVRQLQMERDKYAENLKGESAMWRQRMQQMSEQVHTLREEKECSMSRVQELETSLAELRNQMAEPPPPEPPAGPSEVEQQLQAEAEHLRKELEGLAGQLQAQVQDNEGLSRLNREQEERLLELERAAELWGEQAEARRQILETMQNDRTTISRALSQNRELKEQLAELQSGFVKLVLLPHLESPPSSLALQTFVFPPVKWGSVALTGNGTSGGICEPEPCSDGCGGEGMIFLTCLHPSRCHGRQTPRQQVLGSPAAVGGRCLLLSVQTNENMEITSALQSEQHVKRELGKKLGELQEKLSELKETVELKSQEAQSLQQQRDQYLGHLQQYVAAYQQLTSEKEVLHNQLLLQTQLVDQLQQQEAQGKAVAEMARQELQETQERLEAATQQNQQLRAQLSLMAHPGEGTGTCSQEEERAPGRRGDC

SEQ ID NO: 903338 - protein, 424 aa, Homo sapiens
AVVAGIALMWPQPRLPPRPAMSEETRQSKLAAAKKKLREYQQRNSPGVPTGAKKKKKIKNGSNPETTTSGGCHSPEDIQDILKVLVSDLNRSNGVALPPLDKWKTPKDNAATLQPSDDTVLPGGVPSPGASLTSMAASQNHDADNVPNLMDETKTFSSTESLRQLSQQLNGLVCESATCVNGEGPASSANLKDLESRYQQLAVALDSSYVTNKQLNITIEKLKQQNQEITDQLEEEKKECHQKQGALREQLQVHIQTIGILVSEKAELQTALAHTQHAARQKEGESEDLASRLQYSRRRVGELERALSAVSTQQKKADRYNKELTKERDALRLELYKNTQSNEDLKQEKSELEEKLRVLVTEKAGMQLNLEELQKKLEMTELLLQQFSSRCEAPDANQQLQQAMEERAQLEAHLGQVRLCRGGM

SEQ ID NO: 903339 - protein, 204 aa, Homo sapiens
QLDSERVPSRLPSDRALSQNRELKEQLAELQSGFVKLTNENMEITSALQSEQHVKRELGKKLGELQEKLSELKETVELKSQEAQSLQQQRDQYLGHLQQYVAAYQQLTSEKEVLHNQLLLQTQLVDQLQQQEAQGKAVAEMARQELQETQERLEAATQQNQQLRAQLSLMAHPGEGDGLDREEEEDEEEEEEESEAVWRLALAR

SEQ ID NO: 903340 - protein, 1037 aa, Homo sapiens
AVVAGIALMWPQPRLPPRPAMSEETRQSKLAAAKKKLREYQQRNSPGVPTGAKKKKKIKNGSNPETTTSGGCHSPEDIQDILKVLVSDLNRSNGVALPPLDKWKTPKDNAATLQPSDDTVLPGGVPSPGASLTSMAASQNHDADNVPNLMDETKTFSSTESLRQLSQQLNGLVCESATCVNGEGPASSANLKDLESRYQQLAVALDSSYVTNKQLNITIEKLKQQNQEITDQLEEEKKECHQKQGALREQLQVHIQTIGILVSEKAELQTALAHTQHAARQKEGESEDLASRLQYSRRRVGELERALSAVSTQQKKADRYNKELTKERDALRLELYKNTQSNEDLKQEKSELEEKLRVLVTEKAGMQLNLEELQKKLEMTELLLQQFSSRCEAPDANQQLQQAMEERAQLEAHLGQVMESVRQLQMERDKYAENLKGESAMWRQRMQQMSEQVHTLREEKECSMSRVQELETSLAELRNQMAEPPPPEPPAGPSEVEQQLQAEAEHLRKELEGLAGQLQAQVQDNEGLSRLNREQEERLLELERAAELWGEQAEARRQILETMQNDRTTISRALSQNRELKEQLAELQSGFVKLTNENMEITSALQSEQHVKRELGKKLGELQEKLSELKETVELKSQEAQSLQQQRDQYLGHLQQYVAAYQQLTSEKEVLHNQLLLQTQLVDQLQQQEAQGKAVAEMARQELQETQERLEAATQQNQQLRAQLSLMAHPGEGDGLDREEEEDEEEEEEEAVAVPQPMPSIPEDLESREAMVAFFNSAVASAEEEQARLRGQLKEQRVRCRRLAHLLASAQKEPEAAAPAPGTGGDSVCGETHRALQGAMEKLQSRFMELMQEKADLKERVEELEHRCIQLSGETDTIGEYIALYQSQRAVLKERHREKEEYISRLAQDKEEMKVKLLELQELVLRLVGDRNEWHGRFLAAAQNPADEPTSGAPAPQELGAANQQGDLCEVSLAGSVEPAQGEAREGSPRDNPTAQQIMQLLREMQNPRERPGLGSNPCIPFFYRADENDEVKITVI

SEQ ID NO: 903341 - protein, 859 aa, Homo sapiens
AVVAGIALMWPQPRLPPRPAMSEETRQSKLAAAKKKLREYQQRNSPGVPTGAKKKKKIKNGSNPETTTSGGCHSPEDTPKDNAATLQPSDDTVLPGGVPSPGASLTSMAASQNHDADNVPNLMDETKALSAVSTQQKKADRYNKELTKERDALRLELYKNTQSNEDLKQEKSELEEKLRVLVTEKAGMQLNLEELQKKLEMTELLLQQFSSRCEAPDANQQLQQAMEERAQLEAHLGQVMESVRQLQMERDKYAENLKGESAMWRQRMQQMSEQVHTLREEKECSMSRVQELETSLAELRNQMAEPPPPEPPAGPSEVEQQLQAEAEHLRKELEGLAGQLQAQVQDNEGLSRLNREQEERLLELERAAELWGEQAEARRQILETMQNDRTTISRALSQNRELKEQLAELQSGFVKLTNENMEITSALQSEQHVKRELGKKLGELQEKLSELKETVELKSQEAQSLQQQRDQYLGHLQQYVAAYQQLTSEKEVLHNQLLLQTQLVDQLQQQEAQGKAVAEMARQELQETQERLEAATQQNQQLRAQLSLMAHPGEGDGLDREEEEDEEEEEEEAVAVPQPMPSIPEDLESREAMVAFFNSAVASAEEEQARLRGQLKEQRVRCRRLAHLLASAQKEPEAAAPAPGTGGDSVCGETHRALQGAMEKLQSRFMELMQEKADLKERVEELEHRCIQLSGETDTIGEYIALYQSQRAVLKERHREKEEYISRLAQDKEEMKVKLLELQELVLRLVGDRNEWHGRFLAAAQNPADEPTSGAPAPQELGAANQQGDLCEVSLAGSVEPAQGEAREGSPRDNPTAQQIMQLLREMQNPRERPGLGSNPCIPFFYRADENDEVKITVI

SEQ ID NO: 903342 - protein, 808 aa, Homo sapiens
FRPVLWRMFLSFFFSTCLGFLPKVHIQTIGILVSEKAELQTALAHTQHAARQKEGESEDLASRLQYSRRRVGELERALSAVSTQQKKADRYNKELTKERDALRLELYKNTQSNEDLKQEKSELEEKLRVLVTEKAGMQLNLEELQKKLEMTELLLQQFSSRCEAPDANQQLQQAMEERAQLEAHLGQVMESVRQLQMERDKYAENLKGESAMWRQRMQQMSEQVHTLREEKECSMSRVQELETSLAELRNQMAEPPPPEPPAGPSEVEQQLQAEAEHLRKELEGLAGQLQAQVQDNEGLSRLNREQEERLLELERAAELWGEQAEARRQILETMQNDRTTISRALSQNRELKEQLAELQSGFVKLTNENMEITSALQSEQHVKRELGKKLGELQEKLSELKETVELKSQEAQSLQQQRDQYLGHLQQYVAAYQQLTSEKEVLHNQLLLQTQLVDQLQQQEAQGKAVAEMARQELQETQERLEAATQQNQQLRAQLSLMAHPGEGDGLDREEEEDEEEEEEEAVAVPQPMPSIPEDLESREAMVAFFNSAVASAEEEQARLRGQLKEQRVRCRRLAHLLASAQKEPEAAAPAPGTGGDSVCGETHRALQGAMEKLQSRFMELMQEKADLKERVEELEHRCIQLSGETDTIGEYIALYQSQRAVLKERHREKEEYISRLAQDKEEMKVKLLELQELVLRLVGDRNEWHGRFLAAAQNPADEPTSGAPAPQELGAANQQGDLCEVSLAGSVEPAQGEAREGSPRDNPTAQQIMQLLREMQNPRERPGLGSNPCIPFFYRADENDEVKITVI

SEQ ID NO: 903343 - protein, 1010 aa, Homo sapiens; identical to SEQ ID NO: 903326

SEQ ID NO: 903344 - protein, 1160 aa, Homo sapiens
AVVAGIALMWPQPRLPPRPAMSEETRQSKLAAAKKKLREYQQRNSPGVPTGAKKKKKIKNGSNPETTTSGGCHSPEDIQDILKVLVSDLNRSNGVALPPLDKWKTPKDNAATLQPSDDTVLPGGVPSPGASLTSMAASQNHDADNVPNLMDETKTFSSTESLRQLSQQLNGLVCESATCVNGEGPASSANLKDLESRYQQLAVALDSSYVTNKQLNITIEKLKQQNQEITDQLEEEKKECHQKQGALREQLQVHIQTIGILVSEKAELQTALAHTQHAARQKEGESEDLASRLQYSRRRVGELERALSAVSTQQKKADRYNKELTKERDALRLELYKNTQSNEDLKQEKSELEEKLRVLVTEKAGMQLNLEELQKKLEMTELLLQQFSSRCEAPDANQQLQQAMEERAQLEAHLGQVMESVRQLQMERDKYAENLKGESAMWRQRMQQMSEQVHTLREEKECSMSRVQELETSLAELRNQMGNWGWGDLGAGMVSEGCGGGLECPRELGGWNGFEAEGKRSVPGDGKSRHLHEPQCPISKDEGVPVVSHPQLSLSESGLEDWLTSGCEESSAGRPSLGSLRGGMDQEEGFFENARGFYCLRPFSAEPPPPEPPAGPSEVEQQLQAEAEHLRKELEGLAGQLQAQVQDNEGLSRLNREQEERLLELERAAELWGEQAEARRQILETMQNDRTTISRALSQNRELKEQLAELQSGFVKLTNENMEITSALQSEQHVKRELGKKLGELQEKLSELKETVELKSQEAQSLQQQRDQYLGHLQQYVAAYQQLTSEKEVLHNQLLLQTQLVDQLQQQEAQGKAVAEMARQELQETQERLEAATQQNQQLRAQLSLMAHPGEGDGLDREEEEDEEEEEEEAVAVPQPMPSIPEDLESREAMVAFFNSAVASAEEEQARLRGQLKEQRVRCRRLAHLLASAQKEPEAAAPAPGTGGDSVCGETHRALQGAMEKLQSRFMELMQEKADLKERVEELEHRCIQLSGETDTIGEYIALYQSQRAVLKERHREKEEYISRLAQDKEEMKVKLLELQELVLRLVGDRNEWHGRFLAAAQNPADEPTSGAPAPQELGAANQQGDLCEVSLAGSVEPAQGEAREGSPRDNPTAQQIMQLLREMQNPRERPGLGSNPCIPFFYRADENDEVKITVI

SEQ ID NO: 903345 - protein, 1128 aa, Homo sapiens
AVVAGIALMWPQPRLPPRPAMSEETRQSKLAAAKKKLREYQQRNSPGVPTGAKKKKKIKNGSNPETTTSGGCHSPEDIQDILKVLVSDLNRSNGVALPPLDKWKTPKDNAATLQPSDDTVLPGGVPSPGASLTSMAASQNHDADNVPNLMDETKTFSSTESLRQLSQQLNGLVCESATCVNGEGPASSANLKDLESRYQQLAVALDSSYVTNKQLNITIEKLKQQNQEITDQLEEEKKECHQKQGALREQLQVHIQTIGILVSEKAELQTALAHTQHAARQKEGESEDLASRLQYSRRRVGELERALSAVSTQQKKADRYNKELTKERDALRLELYKNTQSNEDLKQEKSELEEKLRVLVTEKAGMQLNLEELQKKLEMTELLLQQFSSRCEAPDANQQLQQAMEERAQLEAHLGQVMESVRQLQMERDKYAENLKGESAMWRQRMQQMSEQVHTLREEKECSMSRVQELETSLAELRNQMAEPPPPEPPAGPSEVEQQLQAEAEHLRKELEGLAGQLQAQVQDNEGLSRLNREQEERLLELERAAELWGEQAEARRQILETMQNDRTTISRALSQNRELKEQLAELQSGFVKLVRCPPGEPALLPSPPDLCFPTCKVGQCSPHLKWYFWRHLCARALLRWLWGRGDDFSNLPPPFPVPWEADTKAASSGVSSCSGWPLMLLSVQTNENMEITSALQSEQHVKRELGKKLGELQEKLSELKETVELKSQEAQSLQQQRDQYLGHLQQYVAAYQQLTSEKEVLHNQLLLQTQLVDQLQQQEAQGKAVAEMARQELQETQERLEAATQQNQQLRAQLSLMAHPGEGDGLDREEEEDEEEEEEEAVAVPQPMPSIPEDLESREAMVAFFNSAVASAEEEQARLRGQLKEQRVRCRRLAHLLASAQKEPEAAAPAPGTGGDSVCGETHRALQGAMEKLQSRFMELMQEKADLKERVEELEHRCIQLSGETDTIGEYIALYQSQRAVLKERHREKEEYISRLAQDKEEMKVKLLELQELVLRLVGDRNEWHGRFLAAAQNPADEPTSGAPAPQELGAANQQGDLCEVSLAGSVEPAQGEAREGSPRDNPTAQQIMQLLREMQNPRERPGLGSNPCIPFFYRADENDEVKITVI

SEQ ID NO: 903346 - protein, 568 aa, Homo sapiens
MIKIVRVSTPKDNAATLQPSDDTVLPGGVPSPGASLTSMAASQNHDADNVPNLMDETKTFSSTESLRQLSQQLNGLVCESATCVNGEGPASSANLKDLEKQQNQEITDQLEEEKKECHQKQGALREQLQVHIQTIGILVSEKAELQTALAHTQHAARQKEGESEDLASRLQYSRRRVGELERALSAVSTQQKKADRYNKELTKEEQAEARRQILETMQNDRTTISRALSQNRELKEQLAELQSGFVKLTNENMEITSALQSEQHVKRELGKKLGELQEKLSELKETVELKSQEAQSLQQQRDQYLGHLQQYVAAYQQLTSEKEVLHNQLLLQTQLVDQLQQQEAQGKAVAEMARQELQETQERLEAATQQNQQLRAQLSLMAHPGEGDGLDREEEEDEEEEEEEAVAVPQPMPSIPEDLESREAMVAFFNSAVASAEEEQARLRGQLKEQRVRCRRLAHLLASAQKEPEAAAPAPGTGGDSVCGETHRALQGAMEKLQSRFMELMQEKADLKERAREGSPRDNPTAQQIMQLLREMQNPRERPGLGSNPCIPFFYRADENDEVKITVI

SEQ ID NO: 903347 - protein, 197 aa, Homo sapiens
LGRGRVFNRPRCRRRILKERVEELEHRCIQLSGETDTIGEYIALYQSQRAVLKERHREKEEYISRLAQDKEEMKVKLLELQELVLRLVGDRNEWHGRFLAAAQNPADEPTSGAPAPQELGAANQQGDLCEVSLAGSVEPAQGEAREGSPRDNPTAQQIMQLLREMQNPRERPGLGSNPCIPFFYRADENDEVKITVI

SEQ ID NO: 903348 - protein, 751 aa, Homo sapiens
AVVAGIALMWPQPRLPPRPAMSEETRQSKLAAAKKKLREYQQRNSPGVPTGAKKKKKIKNGSNPETTTSGGCHSPEDIQDILKVLVSDLNRSNGVALPPLDKWKTPKDNAATLQPSDDTVLPGGVPSPGASLTSMAASQNHDADNVPNLMDETKTFSSTESLRQLSQQLNGLVCESATCVNGEGPASSANLKDLESRYQQLAVALDSSYVTNKQLNITIEKLKQQNQEITDQLEEEKKECHQKQGALREQLQVHIQTIGILVSEKAELQTALAHTQHAARQKEGESEDLASRLQYSRRRVGELERALSAVSTQQKKADRYNKELTKERDALRLELYKNTQSNEDLKQEKSELEEKLRVLVTEKAGMQLNLEELQKKLEMTELLLQQFSSRCEAPDANQQLQQAMEERAQLEAHLGQVMESVRQLQMERDKYAENLKGESAMWRQRMQQMSEQVHTLREEKECSMSRVQELETSLAELRNQMAEPPPPEPPAGPSEVEQQLQAEAEHLRKELEGLAGQLQAQVQDNEGLSRLNREQEERLLELERAAELWGEQAEARRQILETMQNDRTTISRALSQNRELKEQLAELQSGFVKLTNENMEITSALQSEQHVKRELGKKLGELQEKLSELKETVELKSQEAQSLQQQRDQYLGHLQQYVAAYQQLTSEKEVLHNQLLLQTQLVDQLQQQEAQGKAVAEMARQELQETQERLEAATQQNQQLRAQLSLMAHPGEGTGTCSQEEERAPGRRGDC

SEQ ID NO: 903349 - protein, 130 aa, Homo sapiens
PHGLLTLTKAIFPSGGLPSSYTERQLRQDSGANCRPGEGTGCWGGPASPVYILYLCNILYIPGVGPPPVSYLAEVGAGTWGGGSNNYLGLGNLFIDSIGQRKEAGMGSWRPGDATPVYFAFYFGINGFSH

SEQ ID NO: 903350 - protein, 141 aa, Homo sapiens
MPARGASSRGRSDLSTCLEENGAGTPLPSPQLEPDLKQNPNRCTQKTPLGHASRLAEVSPVCPSLTLARSGCGSTRDSGRPHFPPMALGIPRIPAQVGKRTGACGGRVLRWSGVCGTTEKTKEVFPPATGNFFGRFSLLLG

SEQ ID NO: 903351 - protein, 585 aa, Homo sapiens
MASPGSGFWSFGSEDGSGDSENPGTARAWCQVAQKFTGGIGNKLCALLYGDAEKPAESGGSQPPRAAARKAACACDQKPCSCSKVDVNYAFLHATDLLPACDGERPTLAFLQDVMNILLQYVVKSFDRSTKVIDFHYPNELLQEYNWELADQPQNLEEILMHCQTTLKYAIKTGHPRYFNQLSTGLDMVGLAADWLTSTANTNMFTYEIAPVFVLLEYVTLKKMREIIGWPGGSGDGIFSPGGAISNMYAMMIARFKMFPEVKEKGMAALPRLIAFTSEHSHFSLKKGAAALGIGTDSVILIKCDERGKMIPSDLERRILEAKQKGFVPFLVSATAGTTVYGAFDPLLAVADICKKYKIWMHVDAAWGGGLLMSRKHKWKLSGVERANSVTWNPHKMMGVPLQCSALLVREEGLMQNCNQMHASYLFQQDKHYDLSYDTGDKALQCGRHVDVFKLWLMWRAKGTTGFEAHVDKCLELAEYLYNIIKNREGYEMVFDGKPQHTNVCFWYIPPSLRTLEDNEERMSRLSKVAPVIKARMMEYGTTMVSYQPLGDKVNFFRMVISNPAATHQDIDFLIEEIERLGQDL

SEQ ID NO: 903352 - protein, 163 aa, Homo sapiens
MPARGASSRGRSDLSTCLEENGAGTPLPSPQLEPDLKQNPNRCTQKTPLGHASRLAEVSPVCPSLTLARSGCGSTRDSGRPHFPPLARPRTRWHASHPLTLTPAGVHGLPRILTTQLPPSLVFFSSAAPSFIPTGLPFPQMLWGSPRFPESGLRGPLGSPGLF

SEQ ID NO: 903353 - protein, 188 aa, Homo sapiens
MASPGSGFWSFGSEDGSGDSENPGTARAWCQVAQKFTGGIGNKLCALLYGDAEKPAESGGSQPPRAAARKAACACDQKPCSCSKVDVNYAFLHATDLLPACDGERPTLAFLQDVMNILLQYVVKSFDRSTKVIDFHYPNELLQEYNWELADQPQNLEEILMHCQTTLKYAIKTGIVSSKIIKLFFRLQ

SEQ ID NO: 903354 - protein, 585 aa, Homo sapiens; identical to SEQ ID NO: 903351

SEQ ID NO: 903355 - protein, 600 aa, Homo sapiens
CPLYITITITWFRVDPKLQNSGFWSFGSEDGSGDSENPGTARAWCQVAQKFTGGIGNKLCALLYGDAEKPAESGGSQPPRAAARKAACACDQKPCSCSKVDVNYAFLHATDLLPACDGERPTLAFLQDVMNILLQYVVKSFDRSTKVIDFHYPNELLQEYNWELADQPQNLEEILMHCQTTLKYAIKTGHPRYFNQLSTGLDMVGLAADWLTSTANTNMFTYEIAPVFVLLEYVTLKKMREIIGWPGGSGDGIFSPGGAISNMYAMMIARFKMFPEVKEKGMAALPRLIAFTSEHSHFSLKKGAAALGIGTDSVILIKCDERGKMIPSDLERRILEAKQKGFVPFLVSATAGTTVYGAFDPLLAVADICKKYKIWMHVDAAWGGGLLMSRKHKWKLSGVERANSVTWNPHKMMGVPLQCSALLVREEGLMQNCNQMHASYLFQQDKHYDLSYDTGDKALQCGRHVDVFKLWLMWRAKGTTGFEAHVDKCLELAEYLYNIIKNREGYEMVFDGKPQHTNVCFWYIPPSLRTLEDNEERMSRLSKVAPVIKARMMEYGTTMVSYQPLGDKVNFFRMVISNPAATHQDIDFLIEEIERLGQDL

SEQ ID NO: 903356 - protein, 135 aa, Homo sapiens
  misc_feature (4)..(4): Xaa can be any naturally occurring amino acid
TYFXISSGFKILRDVISALIVGFDFDGTPRLYQTDPSGTYHAWKANAIGRGAKSVREFLEKNYTDEAIETDDLTIKLVIKALLEVVQSGGKNIELAVMRRDQSLKILNPEEIEKYVAEIEKEKEENEKKKQKKAS

SEQ ID NO: 903357 - protein, 248 aa, Homo sapiens
MSYDRAITVFSPDGHLFQVEYAQEAVKKGSTAVGVRGRDIVVLGVEKKSVAKLQDERTVRKICALDDNVCMAFAGLTADARIVINRARVECQSHRLTVEDPVTVEYITRYIASLKQRYTQSNGRRPFGISALIVGFDFDGTPRLYQTDPSGTYHAWKANAIGRGAKSVREFLEKNYTDEAIETDDLTIKLVIKALLEVVQSGGKNIELAVMRRDQSLKILNPEEIEKYVAEIEKEKEENEKKKQKKAS

SEQ ID NO: 903358 - protein, 248 aa, Homo sapiens; identical to SEQ ID NO: 903357

SEQ ID NO: 903359 - protein, 248 aa, Homo sapiens; identical to SEQ ID NO: 903357

SEQ ID NO: 903360 - protein, 248 aa, Homo sapiens; identical to SEQ ID NO: 903357

SEQ ID NO: 903361 - protein, 276 aa, Homo sapiens
MSYDRAITVFSPDGHLFQVEYAQEAVKKGSTAVGVRGRDIVVLGVEKKSVAKLQDERTVRKICALDDNVCMAFAGLTADARIVINRARVECQSHRLTVEDPVTVEYITRYIASLKQRYTQSNGRRPFGISALIVGFDFDGTPRLYQTDPSGTYHAWKANAIGRGAKSVREFLEKNYTDEAIETDDLTIKLVIKALLEVVQSGGKNIELAVMRRDQSLKILNPEEIEKYVAEIEKEKEENEKTLLLARPRGPLSERTRSLIDNHIRCVRRARGAPRE

SEQ ID NO: 903362 - protein, 248 aa, Homo sapiens; identical to SEQ ID NO: 903357

SEQ ID NO: 903363 - protein, 217 aa, Homo sapiens
MVGVRGRDIVVLGVEKKSVAKLQDERTVRKICALDDNVCMAFAGLTADARIVINRARVECQSHRLTVEDPVTVEYITRYIASLKQRYTQSNGRRPFGISALIVGFDFDGTPRLYQTDPSGTYHAWKANAIGRGAKSVREFLEKNYTDEAIETDDLTIKLVIKALLEVVQSGGKNIELAVMRRDQSLKILNPEEIEKYVAEIEKEKEENEKKKQKKAS

SEQ ID NO: 903364 - protein, 237 aa, Homo sapiens
MSYDRAITVFSPDGHLFQVEYAQEAVKKGSTAVGVRGRDIVVLGVEKKSVAKLQDERTVRKICALDDNVCMAFAGLTADARIVINRARVECQSHRLTVEDPVTVEYITRYIASLKQRYTQSNGRRPFGISALIVGFDFDGTPRLYQTDPSGTYHAWKANAIGRGAKSVREFLEKNYTDEAIETDDLTIKLVIKALLEVVQSGGKNIELAVMRRDQSLKVITKFVCFLYLSVFSHDQG

SEQ ID NO: 903365 - protein, 149 aa, Homo sapiens
MSYDRAITVFSPDGHLFQVEYAQEAVKKGSTAVGVRGRDIVVLGVEKKSVAKLQDERTVRKICALDDNVCMAFAGLTADARIVINRARVECQSHRLTVEDPVTVEYITRYIASLKQVGACPLACSPLAAGQSRLRHGGSCHVTSGESEN

SEQ ID NO: 903366 - protein, 276 aa, Homo sapiens
MSYDRAITVFSPDGHLFQVEYAQEAVKKGSTAVGVRGRDIVVLGVEKKSVAKLQDERTVRKICALDDNVCMAFAGLTADARIVINRARVECQSHRLTVEDPVTVEYITRYIASLKQVGACPLACSPLAAGQHGSAMEGPAMSLQRYTQSNGRRPFGISALIVGFDFDGTPRLYQTDPSGTYHAWKANAIGRGAKSVREFLEKNYTDEAIETDDLTIKLVIKALLEVVQSGGKNIELAVMRRDQSLKILNPEEIEKYVAEIEKEKEENEKKKQKKAS

SEQ ID NO: 903367 - protein, 203 aa, Homo sapiens
MSYDRAITVFSPDGHLFQVEYAQEAVKKGSTAVGVRGRDIVVLGVEKKSVAKLQDERTVRKICALDDNVCMAFAGLTADARIVINRARVECQSHRLTVEDPVTVEYITRYIASLKQRYTQSNGRRPFGISALIVGFDFDGTPRLYQTDPSGTYHAWKANAIGRGAKSVREFLEKNYTDEAIETDDLTIKLVIKALLEILILKN

SEQ ID NO: 903368 - protein, 145 aa, Homo sapiens
MSYDRAITVFSPDGHLFQVEYAQEAVKKGSTAVGVRGRDIVVLGVEKKSVAKLQDERTVRKICALDDNVCMAFAGLTADARIVINRARVECQSHRLTVEDPVTVEYITRYIASLKQRYTQSNGRRPFGISALIPRAHTMPGRPMP

SEQ ID NO: 903369 - protein, 135 aa, Homo sapiens; identical to SEQ ID NO: 903356
  misc_feature (4)..(4): Xaa can be any naturally occurring amino acid

SEQ ID NO: 903370 - protein, 149 aa, Homo sapiens; identical to SEQ ID NO: 903365

SEQ ID NO: 903371 - protein, 103 aa, Homo sapiens [sequence omitted]

SEQ ID NO: 903372 - protein, 248 aa, Homo sapiens; identical to SEQ ID NO: 903357

SEQ ID NO: 903373 - protein, 248 aa, Homo sapiens; identical to SEQ ID NO: 903357

SEQ ID NO: 903374 - protein, 248 aa, Homo sapiens; identical to SEQ ID NO: 903357

SEQ ID NO: 903375 - protein, 248 aa, Homo sapiens; identical to SEQ ID NO: 903357

SEQ ID NO: 903376 - protein, 361 aa, Homo sapiens
MSYDRAITVFSPDGHLFQVEYAQEAVKKGSTAVGVRGRDIVVLGVEKKSVAKLQDERTVRKICALDDNVCMAFAGLTADARIVINRARVECQSHRLTVEDPVTVEYITRYIASLKQRYTQSNGRRPFGISALIVGFDFDGTPRLYQTDPSGTYHAWKANAIGRGAKSVREFLEKNYTDEAIETDDLTIKLVIKALLEVVQSGGKNIELAVMRRDQSLKILNPEEIEKYVAEIEKEKEENEKTLLCGARALGPSEKVSIKPLPRWARPGGAPEVKQWRPLWRHKRGCPKRESRPPRGRTKQTSEGAWGDSLSTAYIKKERARRGEGKHPAKTRRCSLMREQKSLAESSTEEISPEETGPYQN

SEQ ID NO: 903377 - protein, 248 aa, Homo sapiens; identical to SEQ ID NO: 903357

SEQ ID NO: 903378 - protein, 248 aa, Homo sapiens
MSYDRAITVFSPDGHLFQVEYAQEAVKKGSTAVGVRGRDIVVLGVEKKSVAKLQDERTVRKICALDDNVCMAFAGLTADARIVINRARVECQSHRLTVEDPVTVEYITRYIASLKQRYTQSNGRRPFGISALIVGFDFDGTPRLYQTDPSGTYHAWKANAIGRGAKSVREFLEKNYTDEAIETDDLTIKLVIKALLEVVQSGGKNIELAVMRRDQSLKENVFLRLPIRQREDSHLPLIRWSTRVLWAC

SEQ ID NO: 903379 - protein, 227 aa, Homo sapiens
MSYDRAITVFSPDGHLFQVEYAQEAVKKGSTAVGVRGRDIVVLGVEKKSVAKLQDERTVRKICALDDNVCMAFAGLTADARIVINRARVECQSHRLTVEDPVTVEYITRYIASLKQRYTQSNGRRPFGISALIVGFDFDGTPRLYQTDPSGTYHAWKANAIGRGAKSVREFLEKNYTDEAIETDDLTIKLVIKALLEILNPEEIEKYVAEIEKEKEENEKKKQKKAS

SEQ ID NO: 903380 - protein, 215 aa, Homo sapiens
MSYDRAITVFSPDGHLFQVEYAQEAVKKGSTAVGVRGRDIVVLGVEKKSVAKLQDERTVRKICALDDNVCMAFAGLTADARIVINRARVECQSHRLTVEDPVTVEYITRYIASLKQRYTQSNGRRPFGISALIVGFDFDGTPRLYQTDPSGTYHAWKANAIGRGAKSVREFLEKNYTDEAIETDDLTIKLVIKALLEVSLHLESRQGGEDTTFWW

SEQ ID NO: 903381 - protein, 156 aa, Homo sapiens
ALLGSIRVETHDEGRDAKRPAPIALRITLLQTGDERVMYSTVGFDFDGTPRLYQTDPSGTYHAWKANAIGRGAKSVREFLEKNYTDEAIETDDLTIKLVIKALLEVVQSGGKNIELAVMRRDQSLKILNPEEIEKYVAEIEKEKEENEKKKQKKAS

SEQ ID NO: 903382 - protein, 109 aa, Homo sapiens
SSDGDSRLPLEAHTMPWKANAIGRGAKSVREFLEKNYTDEAIETDDLTIKLVIKALLEVVQSGGKNIELAVMRRDQSLKILNPEEIEKYVAEIEKEKEENEKKKQKKAS

SEQ ID NO: 903383 - protein, 139 aa, Homo sapiens
MSPSPPMAQMRHSQSLQMMEEKTPGCQVCPLSGTPSPSLTARVPSQPQHGGYAGAVSLLRYNQLPETTSPLQPLSKVPGQRSPSLAHPGQLTEGCPPWRGASPLPTGPRPCPGFSPGQSRQDGEVPCQPVLWWGSCSLK

SEQ ID NO: 903384 - protein, 142 aa, Homo sapiens
MGLKLNGRYISLILAVQIAYLVQAVRAAGKCDAVFKGFSDCLLKLGDSMANYPQGLDDKTNIKTVCTYWEDFHSCTVTALTDCQEGAKDMWDKLRKESKNLNIQGSLFELCGSGNGAAGSLLPAFPVLLVSLSAALATWLSF

SEQ ID NO: 903385 - protein, 142 aa, Homo sapiens; identical to SEQ ID NO: 903384

SEQ ID NO: 903386 - protein, 169 aa, Homo sapiens
ARCSRDPFCHLKMEDRIARAVTGLAGEVLGDEGGSEEKGNKRDEGAYLVQAVRAAGKCDAVFKGFSDCLLKLGDSMANYPQGLDDKTNIKTVCTYWEDFHSCTVTALTDCQEGAKDMWDKLRKESKNLNIQGSLFELCGSGNGAAGSLLPAFPVLLVSLSAALATWLSF

SEQ ID NO: 903387 - protein, 142 aa, Homo sapiens; identical to SEQ ID NO: 903384

SEQ ID NO: 903388 - protein, 133 aa, Homo sapiens
MATAARPQPAYLVQAVRAAGKCDAVFKGFSDCLLKLGDSMANYPQGLDDKTNIKTVCTYWEDFHSCTVTALTDCQEGAKDMWDKLRKESKNLNIQGSLFELCGSGNGAAGSLLPAFPVLLVSLSAALATWLSF

SEQ ID NO: 903389 - protein, 142 aa, Homo sapiens; identical to SEQ ID NO: 903384

SEQ ID NO: 903390 - protein, 133 aa, Homo sapiens; identical to SEQ ID NO: 903388

SEQ ID NO: 903391 - protein, 255 aa, Homo sapiens
MPECDWRQPSGGDGGWDLSLLTGERDSDGRRLTEPSGYLTDGPINYKYKTKCTWLIEGYPNAVLRLRFNHFATECSWDHMYVYDGDSIYAPLIAVLSGLIVPEIRGNETVPEVVTTSGYALLHFFSDAAYNLTGFNIFYSINSCPNNCSGHGKCTTSVSVPSQVYCECDKYWKGEACDIPYCKANCGSPDHGYCDLTGEKLCVCNDSWQGPDCSLNVPSTESYWILPNVKPFSPSVGRASHKAVLHGKFMWVIGG

SEQ ID NO: 903392 - protein, 265 aa, Homo sapiens
DHGYCDLTGEKLCVCNDISAGPDTPVKVTSTESYWIPPHVKPFSPSVGRASHKAVLHGKFMWVIGGYTFNYSSFQMVLKLTEPSGYLTDGPINYKYKTKCTWLIEGYPNAVLRLRFNHFATECSWDHMYVYDGDSIYAPLIAVLSGLIVPEIRGNETVPEVVTTSGYALLHFFSDAAYNLTGFNIFYSINSCPNNCSGHGKCTTSVSVPSQVYCECDKYWKGEACDIPYCKANCGSPDHGYCDLTGEKLCVCNDSWQGKHVWCDG

SEQ ID NO: 903393 - protein, 110 aa, Homo sapiens
AELARAAGEAGPRAGSPPPAGQVPSGAPGAVCASRSPPPAGSGTPRLWGRPAKDKVGRLGGDARVRLEAAERRRRRLGSVPPDRGAGLGRAPGFRQGIKMFFKCFLRIED

SEQ ID NO: 903394 - protein, 227 aa, Homo sapiens
AELARAAGEAGPRAGSPPPAGQVPSGAPGAVCASRSPPPAGSGTPRLWGRPAKDKVGRLGGDARVRLEAAERRRRRLGSVPPDRGAGLGRAPVRRRRSGGGEVFCGRNSLQQHPCRRPRAQSRRAGAPGKMETGGRARTGTPQPAAPGVWRARPAGGGGGGASSWLLDGNSWLLCYGFLYLALYAQVSQSKPCERTGSCFSGRCVNSTCLCDPGWVGDQCQHCQGRF

SEQ ID NO: 903395 - protein, 690 aa, Homo sapiens
RRTRSPAPAEISAGTEPGFLSNRDCDAFGLAGRCFLSHFLLGPASAAAVPQFAPGGGRAAVPSAVRPRGCHRPSESSGAAEGFATEGGGGLREEEAEEAEEEGRKMAAVELEWIPETLYNTAISAVVDNYIRSRRDIRSLPENIQFDVYYKLYQQGRLCQLGSEFCELEVFAKVLRALDKRHLLHHCFQALMDHGVKVASVLAYSFSRRCSYIAESDAAVKEKAIQVGFVLGGFLSDAGWYSDAEKVFLSCLQLCTLHDEMLHWFRAVECCVRLLHVRNGNCKYHLGEETFKLAQTYMDKLSKHGQQANKAALYGELCALLFAKSHYDEAYKWCIEAMKEITAGLPVKVVVDVLRQASKACVVKREFKKAEQLIKHAVYLARDHFGSKHPKYSDTLLDYGFYLLNVDNICQSVAIYQAALDIRQSVFGGKNIHVATAHEDLAYSSYVHQYSSGKFDNALFHAERAIGIITHILPEDHLLLASSKRVKALILEEIAIDCHNKETEQRLLQEAHDLHLSSLQLAKKAFGEFNVQTAKHYGNLGRLYQSMRKFKEAEEMHIKAIQIKEQLLGQEDYEVALSVGHLASLYNYDMNQYENAEKLYLRSIAIGKKLFGEGYSGLEYDYRGLIKLYNSIGNYEKVFEYHNVLSNWNRLRDRQYSVTDALEDVSTSPQSTEEVVQSFLISQNVEGPSC

SEQ ID NO: 903396 - protein, 690 aa, Homo sapiens; identical to SEQ ID NO: 903395

SEQ ID NO: 903397 - protein, 690 aa, Homo sapiens; identical to SEQ ID NO: 903395

SEQ ID NO: 903398 - protein, 353 aa, Homo sapiens [sequence omitted]

SEQ ID NO: 903399 - protein, 70 aa, Homo sapiens
  misc_feature (10)..(10): Xaa can be any naturally occurring amino acid
  misc_feature (31)..(31): Xaa can be any naturally occurring amino acid
PEFKYDLTYXEFGPLEAQEFGHRGLASKRKXPNSRRTPPINPGVTYMDATPHPSVNCSLMSRGTSLLITK

SEQ ID NO: 903400 - protein, 244 aa, Homo sapiens
RRTRSPAPAEISAGTEPGFLSNRDCDAFGLAGRCFLSHFLLGPASAAAVPQFAPGGGRAAVPSAVRPRGCHRPSESSGAAEGFATEGGGGLREEEAEEAEEEGRKMAAVELEWIPETLYNTAISAVVDNYIRSRRDIRSLPENIQFDVYYKLYQQGRLCQLGSEFCELEVFAKVLRALDKRHLLHHCFQALMDHGVKVASVLAYSFSRRCSYIAESDAAVKEKAIQVGFVLVASFCCWLCGFSV

SEQ ID NO: 903401 - protein, 690 aa, Homo sapiens; identical to SEQ ID NO: 903395

SEQ ID NO: 903402 - protein, 241 aa, Homo sapiens
RRTRSPAPAEISAGTEPGFLSNRDCDAFGLAGRCFLSHFLLGPASAAAVPQFAPGGGRAAVPSAVRPRGCHRPSESSGAAEGFATEGGGGLREEEAEEAEEEGRKMAAVELEWIPETLYNNGNSSVVCGHNILSRLARRDMRLCCARESLAVLDCLTTMLYQQGRLCQLGSEFCELEVFAKVLRALDKRHLLHHCFQALMDHGVKVASVLAYSFSRRCSYIAESDAAVKEKAIQVGFVLGK

SEQ ID NO: 903403 - protein, 690 aa, Homo sapiens; identical to SEQ ID NO: 903395

SEQ ID NO: 903404 - protein, 324 aa, Homo sapiens
MCLYTLYPNNFVSFYRDHFGSKHPKYSDTLLDYGFYLLNVDNICQSVAIYQAALDIRQSVFGGKNIHVATAHEDLAYSSYVHQYSSGKFDNALFHAERAIGIITHILPEDHLLLASSKRVKALILEEIAIDCHNKETEQRLLQEAHDLHLSSLQLAKKAFGEFNVQTAKHYGNLGRLYQSMRKFKEAEEMHIKAIQIKEQLLGQEDYEVALSVGHLASLYNYDMNQYENAEKLYLRSIAIGKKLFGEGYSGLEYDYRGLIKLYNSIGNYEKVFEYHNVLSNWNRLRDRQYSVTDALEDVSTSPQSTEEVVQSFLISQNVEGPSC

SEQ ID NO: 903405 - protein, 401 aa, Homo sapiens
RRTRSPAPAEISAGTEPGFLSNRDCDAFGLAGRCFLSHFLLGPASAAAVPQFAPGGGRAAVPSAVRPRGCHRPSESSGAAEGFATEGGGGLREEEAEEAEEEGRKMAAVELEWIPETLYNTAISAVVDNYIRSRRDIRSLPENIQFDVYYKLYQQGRLCQLGSEFCELEVFAKVLRALDKRHLLHHCFQALMDHGVKVASVLAYSFSRRCSYIAESDAAVKEKAIQVGFVLGGFLSDAGWYSDAEKVFLSCLQLCTLHDEMLHWFRAVECCVRLLHVRNGNCKYHLGEETFKLAQTYMDKLSKHGQQANKAALYGELCALLFAKSHYDEAYKWCIEAMKEITAGLPVKVVVDVLRQASKACVVKREFKKAEKKKRGPKPSTQKRKMDGAPDGRGRKKKLKL

SEQ ID NO: 903406 - protein, 779 aa, Homo sapiens
MEEKDYSEADGLSERTTPSKAQKSPQKIAKKYKSAICRVTLLDASEYECEVEKHGRGQVLFDLVCEHLNLLEKDYFGLTFCDADSQKNWLDPSKEIKKQIRSSPWNFAFTVKFYPPDPAQLTEDITRYYLCLQLRADIITGRLPCSFVTHALLGSYAVQAELGDYDAEEHVGNYVSELRFAPNQTRELEERIMELHKTYRGMTPGEAEIHFLENAKKLSMYGVDLHHAKDSEGIDIMLGVCANGLLIYRDRLRINRFAWPKILKISYKRSNFYIKIRPGEYEQFESTIGFKLPNHRSAKRLWKVCIEHHTFFRLVSPEPPPKGFLVMGSKFRYSGRTQAQTRQASALIDRPAPFFERSSSKRYTMSRSLDGAEFSRPASVSENHDAGPDGDKRDEDGESGGQRSEAEEGEVRTPTKIKELKFLDKPEDVLLKHQASINELKRTLKEPNSKLIHRDRDWERERRLPSSPASPSPKGTPEKANERAGLREGSEEKVKPPRPRAPESDTGDEDQDQERDTVFLKDNHLAIERKCSSITVSSTSSLEAEVDFTVIGDYHGSAFEDFSRSLPELDRDKSDSDTEGLLFSRDLNKGAPSQDDESGGIEDSPDRGACSTPDMPQFEPVKTETMTVSSLAIRKKIEPEAVLQTRVSAMDNTQENSLKSGKGAAAMIPGPQTVATEIRSLSPIIGKDVLTSTYGATAETLSTSTTTHVTKTVKGGFSETRIEKRIIITGDEDVDQDQALALAIKEAKLQHPDMLVTKAVVYRETDPSPEERDKKPQES

SEQ ID NO: 903407 - protein, 92 aa, Homo sapiens
RVGPCLLIPLCWKVDSEARMEPPFPTVVLALRRSHDLHLHYWWMIDIDQDQALALAIKEAKLQHPDMLVTKAVVYRETDPSPEERDKKPQES

SEQ ID NO: 903408 - protein, 836 aa, Homo sapiens
SGVGIHQRAGVSPNRLLRRARRDPAPPRPAACLPEEPRGPPLAQPARHGEPRAQSLDMEEKDYSEADGLSERTTPSKAQKSPQKIAKKYKSAICRVTLLDASEYECEVEKHGRGQVLFDLVCEHLNLLEKDYFGLTFCDADSQKNWLDPSKEIKKQIRSSPWNFAFTVKFYPPDPAQLTEDITRYYLCLQLRADIITGRLPCSFVTHALLGSYAVQAELGDYDAEEHVGNYVSELRFAPNQTRELEERIMELHKTYRGMTPGEAEIHFLENAKKLSMYGVDLHHAKDSEGIDIMLGVCANGLLIYRDRLRINRFAWPKILKISYKRSNFYIKIRPGEYEQFESTIGFKLPNHRSAKRLWKVCIEHHTFFRLVSPEPPPKGFLVMGSKFRYSGRTQAQTRQASALIDRPAPFFERSSSKRYTMSRSLDGAEFSRPASVSENHDAGPDGDKRDEDGESGGQRSEAEEGEVRTPTKIKELKFLDKPEDVLLKHQASINELKRTLKEPNSKLIHRDRDWERERRLPSSPASPSPKGTPEKANERAGLREGSEEKVKPPRPRAPESDTGDEDQDQERDTVFLKDNHLAIERKCSSITVSSTSSLEAEVDFTVIGDYHGSAFEDFSRSLPELDRDKSDSDTEGLLFSRDLNKGAPSQDDESGGIEDSPDRGACSTPDMPQFEPVKTETMTVSSLAIRKKIEPEAVLQTRVSAMDNTQENSLKSGKGAAAMIPGPQTVATEIRSLSPIIGKDVLTSTYGATAETLSTSTTTHVTKTVKGGFSETRIEKRIIITGDEDVDQDQALALAIKEAKLQHPDMLVTKAVVYRETDPSPEERDKKPQES

SEQ ID NO: 903409 - protein, 887 aa, Homo sapiens
RPLLLGGPGSPPPPPGEPAGAGRSGERGCGGRARRGLSAVGGRAGASARESGAFLRSSSAPRSPPGQPPDTRTASQTAPGSRAAAARCLTDRSSCPRGAGVDRGGSLDMEEKDYSEADGLSERTTPSKAQKSPQKIAKKYKSAICRVTLLDASEYECEVEKHGRGQVLFDLVCEHLNLLEKDYFGLTFCDADSQKNWLDPSKEIKKQIRSSPWNFAFTVKFYPPDPAQLTEDITRYYLCLQLRADIITGRLPCSFVTHALLGSYAVQAELGDYDAEEHVGNYVSELRFAPNQTRELEERIMELHKTYRGMTPGEAEIHFLENAKKLSMYGVDLHHAKDSEGIDIMLGVCANGLLIYRDRLRINRFAWPKILKISYKRSNFYIKIRPGEYEQFESTIGFKLPNHRSAKRLWKVCIEHHTFFRLVSPEPPPKGFLVMGSKFRYSGRTQAQTRQASALIDRPAPFFERSSSKRYTMSRSLDGAEFSRPASVSENHDAGPDGDKRDEDGESGGQRSEAEEGEVRTPTKIKELKFLDKPEDVLLKHQASINELKRTLKEPNSKLIHRDRDWERERRLPSSPASPSPKGTPEKANERAGLREGSEEKVKPPRPRAPESDTGDEDQDQERDTVFLKDNHLAIERKCSSITVSSTSSLEAEVDFTVIGDYHGSAFEDFSRSLPELDRDKSDSDTEGLLFSRDLNKGAPSQDDESGGIEDSPDRGACSTPDMPQFEPVKTETMTVSSLAIRKKIEPEAVLQTRVSAMDNTQENSLKSGKGAAAMIPGPQTVATEIRSLSPIIGKDVLTSTYGATAETLSTSTTTHVTKTVKGGFSETRIEKRIIITGDEDVDQDQALALAIKEAKLQHPDMLVTKAVVYRETDPSPEERDKKPQES

SEQ ID NO: 903410 - protein, 779 aa, Homo sapiens; identical to SEQ ID NO: 903406

SEQ ID NO: 903411 - protein, 841 aa, Homo sapiens
MTTETGPDSEVKKAQEEAPQQPEAAAAVTTPVTPAGHGHPEANSNEKHPSQQDTRPAEQSLDMEEKDYSEADGLSERTTPSKAQKSPQKIAKKYKSAICRVTLLDASEYECEVEKHGRGQVLFDLVCEHLNLLEKDYFGLTFCDADSQKNWLDPSKEIKKQIRSSPWNFAFTVKFYPPDPAQLTEDITRYYLCLQLRADIITGRLPCSFVTHALLGSYAVQAELGDYDAEEHVGNYVSELRFAPNQTRELEERIMELHKTYRGMTPGEAEIHFLENAKKLSMYGVDLHHAKDSEGIDIMLGVCANGLLIYRDRLRINRFAWPKILKISYKRSNFYIKIRPGEYEQFESTIGFKLPNHRSAKRLWKVCIEHHTFFRLVSPEPPPKGFLVMGSKFRYSGRTQAQTRQASALIDRPAPFFERSSSKRYTMSRSLDGAEFSRPASVSENHDAGPDGDKRDEDGESGGQRSEAEEGEVRTPTKIKELKFLDKPEDVLLKHQASINELKRTLKEPNSKLIHRDRDWERERRLPSSPASPSPKGTPEKANERAGLREGSEEKVKPPRPRAPESDTGDEDQDQERDTVFLKDNHLAIERKCSSITVSSTSSLEAEVDFTVIGDYHGSAFEDFSRSLPELDRDKSDSDTEGLLFSRDLNKGAPSQDDESGGIEDSPDRGACSTPDMPQFEPVKTETMTVSSLAIRKKIEPEAVLQTRVSAMDNTQENSLKSGKGAAAMIPGPQTVATEIRSLSPIIGKDVLTSTYGATAETLSTSTTTHVTKTVKGGFSETRIEKRIIITGDEDVDQDQALALAIKEAKLQHPDMLVTKAVVYRETDPSPEERDKKPQES

SEQ ID NO: 903412 - protein, 818 aa, Homo sapiens
GSTHASAFRCYLGLAEHGCLTDRSSCPRGAGVDRGGSLDMEEKDYSEADGLSERTTPSKAQKSPQKIAKKYKSAICRVTLLDASEYECEVEKHGRGQVLFDLVCEHLNLLEKDYFGLTFCDADSQKNWLDPSKEIKKQIRSSPWNFAFTVKFYPPDPAQLTEDITRYYLCLQLRADIITGRLPCSFVTHALLGSYAVQAELGDYDAEEHVGNYVSELRFAPNQTRELEERIMELHKTYRGMTPGEAEIHFLENAKKLSMYGVDLHHAKDSEGIDIMLGVCANGLLIYRDRLRINRFAWPKILKISYKRSNFYIKIRPGEYEQFESTIGFKLPNHRSAKRLWKVCIEHHTFFRLVSPEPPPKGFLVMGSKFRYSGRTQAQTRQASALIDRPAPFFERSSSKRYTMSRSLDGAEFSRPASVSENHDAGPDGDKRDEDGESGGQRSEAEEGEVRTPTKIKELKFLDKPEDVLLKHQASINELKRTLKEPNSKLIHRDRDWERERRLPSSPASPSPKGTPEKANERAGLREGSEEKVKPPRPRAPESDTGDEDQDQERDTVFLKDNHLAIERKCSSITVSSTSSLEAEVDFTVIGDYHGSAFEDFSRSLPELDRDKSDSDTEGLLFSRDLNKGAPSQDDESGGIEDSPDRGACSTPDMPQFEPVKTETMTVSSLAIRKKIEPEAVLQTRVSAMDNTQENSLKSGKGAAAMIPGPQTVATEIRSLSPIIGKDVLTSTYGATAETLSTSTTTHVTKTVKGGFSETRIEKRIIITGDEDVDQDQALALAIKEAKLQHPDMLVTKAVVYRETDPSPEERDKKPQES

SEQ ID NO: 903413 - protein, 836 aa, Homo sapiens; identical to SEQ ID NO: 903408

SEQ ID NO: 903414 - protein, 836 aa, Homo sapiens; identical to SEQ ID NO: 903408

SEQ ID NO: 903415 - protein, 836 aa, Homo sapiens; identical to SEQ ID NO: 903408

SEQ ID NO: 903416 - protein, 439 aa, Homo sapiens
SGVGIHQRAGVSPNRLLRRARRDPAPPRPAACLPEEPRGPPLAQPARHGEPRAQSLDMEEKDYSEADGLSERTTPSKAQKSPQKIAKKYKSAICRVTLLDASEYECEVEKHGRGQVLFDLVCEHLNLLEKDYFGLTFCDADSQKNWLDPSKEIKKQIRSSPWNFAFTVKFYPPDPAQLTEDITRYYLCLQLRADIITGRLPCSFVTHALLGSYAVQAELGDYDAEEHVGNYVSELRFAPNQTRELEERIMELHKTYRGMTPGEAEIHFLENAKKLSMYGVDLHHAKDSEGIDIMLGVCANGLLIYRDRLRINRFAWPKILKISYKRSNFYIKIRPGEYEQFESTIGFKLPNHRSAKRLWKVCIEHHTFFRLVSPEPPPKGFLVMGSKFRYSGRTQAQTRQASALIDRPASWFSLTEAGRENISSIKAAGHGVPFAGRTL

SEQ ID NO: 903417 - protein, 939 aa, Homo sapiens
RSRHPSAGGGVAEQAAPQSPPRPRAAPPRGLPARGAEGAAPRPTCPTWGTPGPGVLVTMTTETGPDSEVKKAQEEAPQQPEAAAAVTTPVTPAGHGHPEANSNEKHPSQQDTRPAEQSLDMEEKDYSEADGLSERTTPSKAQKSPQKIAKKYKSAICRVTLLDASEYECEVEKHGRGQVLFDLVCEHLNLLEKDYFGLTFCDADSQKNWLDPSKEIKKQIRSSPWNFAFTVKFYPPDPAQLTEDITRYYLCLQLRADIITGRLPCSFVTHALLGSYAVQAELGDYDAEEHVGNYVSELRFAPNQTRELEERIMELHKTYRGMTPGEAEIHFLENAKKLSMYGVDLHHAKDSEGIDIMLGVCANGLLIYRDRLRINRFAWPKILKISYKRSNFYIKIRPGEYEQFESTIGFKLPNHRSAKRLWKVCIEHHTFFRLVSPEPPPKGFLVMGSKFRYSGRTQAQTRQASALIDRPAPFFERSSSKRYTMSRSLDGAEFSRPASVSENHDAGPDGDKRDEDGESGGQRSEAEEGEVRTPTKIKELKPEQETTPRHKQEFLDKPEDVLLKHQASINELKRTLKEPNSKLIHRDRDWERERRLPSSPASPSPKGTPEKANERAGLREGSEEKVKPPRPRAPESDTGDEDQDQERDTVFLKDNHLAIERKCSSITVSSTSSLEAEVDFTVIGDYHGSAFEDFSRSLPELDRDKSDSDTEGLLFSRDLNKGAPSQDDESGGIEDSPDRGACSTPDMPQFEPVKTETMTVSSLAIRKKIEPEAVLQTRVSAMDNTQQVDGSASVGREFIATTPSITTETISTTMENSLKSGKGAAAMIPGPQTVATEIRSLSPIIGKDVLTSTYGATAETLSTSTTTHVTKTVKGGFSETRIEKRIIITGDEDVDQDQALALAIKEAKLQHPDMLVTKAVVYRETDPSPEERDKKPQES

SEQ ID NO: 903418 - protein, 94 aa, Homo sapiens
VQQVSFRLPCEHRALNMLPLTARAGNSILTSHLPSVALPTWPLVPFSAFLGQHPASHLYLLLTTSLPCWWPTQLPWPPLGRVCVLWAPCWTKPI

SEQ ID NO: 903419 - protein, 836 aa, Homo sapiens; identical to SEQ ID NO: 903408

SEQ ID NO: 903420 - protein, 841 aa, Homo sapiens; identical to SEQ ID NO: 903411

SEQ ID NO: 903421 - protein, 841 aa, Homo sapiens; identical to SEQ ID NO: 903411

SEQ ID NO: 903422 - protein, 835 aa, Homo sapiens
SGVGIHQRAGVSPNRLLRRARRDPAPPRPAACLPEEPRGPPLAQPARHGEPRAQSLDMEEKDYSEADGLSERTTPSKAQKSPQKIAKKYKSAICRVTLLDASEYECEVEKHGRGQVLFDLVCEHLNLLEKDYFGLTFCDADSQKNWLDPSKEIKKQIRSSPWNFAFTVKFYPPDPAQLTEDITRYYLCLQLRADIITGRLPCSFVTHALLGSYAVQAELGDYDAEEHVGNYVSELRFAPNQTRELEERIMELHKTYRGMTPGEAEIHFLENAKKLSMYGVDLHHAKDSEGIDIMLGVCANGLLIYRDRLRINRFAWPKILKISYKRSNFYIKIRPGEYEQFESTIGFKLPNHRSAKRLWKVCIEHHTFFRLVSPEPPPKGFLVMGSKFRYSGRTQAQTRQASALIDRPAPFFERSSSKRYTMSRSLDGAEFSRPASVSENHDAGPDGDKRDEDGESGGQRSEAEEGEVRTPTKIKELKFLDKPEDVLLKHQASINELKRTLKEPNSKLIHRDRDWERERRLPSSPASPSPKGTPEKANERAGLREGSEEKVKPPRPRAPESDTGDEDQDQERDTVFLKDNHLAIERKCSSITVSSTSSLEAEVDFTVIGDYHGSAFEDFSRSLPELDRDKSDSDTEGLLFSRDLNKGAPSQDDESGGIEDSPDRGACSTPDMPQFEPVKTETMTVSSLAIRKKIEPEAVLQTRVSAMDNTQQVDGSASVGREFIATTPSITTETISTTMIIGKDVLTSTYGATAETLSTSTTTHVTKTVKGGFSETRIEKRIIITGDEDVDQDQALALAIKEAKLQHPDMLVTKAVVYRETDPSPEERDKKPQES

SEQ ID NO: 903423 - protein, 162 aa, Homo sapiens
RPLLLGGPGSPPPPPGEPAGAGRSGERGCGGRARRGLSAVGGRAGASARESGAFLRSSSAPRSPPGQPPDTRTASQTAPTAETLSTSTTTHVTKTVKGGFSETRIEKRIIITGDEDVDQDQALALAIKEAKLQHPDMLVTKAVVYRETDPSPEERDKKPQES

SEQ ID NO: 903424 - protein, 836 aa, Homo sapiens; identical to SEQ ID NO: 903408

SEQ ID NO: 903425 - protein, 361 aa, Homo sapiens
SGVGIHQRAGVSPNRLLRRARRDPAPPRPAACLPEEPRGPPLAQPARHGEPRAQSLDMEEKDYSEADGLSERTTPSKAQKSPQKIAKKYKSAICRVTLLDASEYECEVEKHGRGQVLFDLVCEHLNLLEKDYFGLTFCDADSQKNWLDPSKEIKKQIRSSPWNFAFTVKFYPPDPAQLTEDITRYYLCLQLRADIITGRLPCSFVTHALLGSYAVQAELGDYDAEEHVGNYVSELRFAPNQTRELEERIMELHKTYRGMTPGEAEIHFLENAKKLSMYGVDLHHAKDSEGIDIMLGVCANGLLIYRDRLRINRFAWPKILKISYKRSNFYIKIRPGEGQAILRSQKPVMVKRKRTRPTKSS

SEQ ID NO: 903426 - protein, 116 aa, Homo sapiens
MSFPIKKKMTSCPVSSASDSVISGHTLQGASGNASSSKEQSTSHSKVNSHQSASFFPSSPGLPVAGNSGFVQDYTTSKLGWGSNLHPFLCASSLVKFPLSRVSKQDCHGCCQEVPG

SEQ ID NO: 903427 - protein, 116 aa, Homo sapiens; identical to SEQ ID NO: 903426

SEQ ID NO: 903428 - protein, 254 aa, Homo sapiens
SRNKVGVGEPAEGSLRWSKMAVELGVLLVRPRPGTGLGRVMRTLLLVLWLATRGSALYFHIGETEKKCFIEEIPDETMVIGNYRTQLYDKQREEYQPATPGLGMFVEVKDPEDKVILARQYGSEGRFTFTSHTPGEHQICLHSNSTKFSLFAGGMLRVHLDIQVGEHANDYAEIAAKDKLSELQLRVRQLVEQVEQIQKEQNYQRWREERFRQTSESTNQRVLWWSILQTLILVAIGVWQMRHLKSFFEAKKLV

SEQ ID NO: 903429 - protein, 249 aa, Homo sapiens
RGAAGCGCAGRWSKMAVELGVLLVRPRPGTGLGRVMRTLLLVLWLATRGSALYFHIGETEKKCFIEEIPDETMVIGNYRTQLYDKQREEYQPATPGLGMFVEVKDPEDKVILARQYGSEGRFTFTSHTPGEHQICLHSNSTKFSLFAGGMLRVHLDIQVGEHANDYAEIAAKDKLSELQLRVRQLVEQVEQIQKEQNYQRWREERFRQTSESTNQRVLWWSILQTLILVAIGVWQMRHLKSFFEAKKLV

SEQ ID NO: 903430 - protein, 202 aa, Homo sapiens
ETASPCPGGRGTHATSRSSDLGSPCFPQGNYRTQLYDKQREEYQPATPGLGMFVEVKDPEDKVILARQYGSEGRFTFTSHTPGEHQICLHSNSTKFSLFAGGMLRVHLDIQVGEHANDYAEIAAKDKLSELQLRVRQLVEQVEQIQKEQNYQRWREERFRQTSESTNQRVLWWSILQTLILVAIGVWQMRHLKSFFEAKKLV

SEQ ID NO: 903431 - protein, 183 aa, Homo sapiens
VPRSMAMVIGNYRTQLYDKQREEYQPATPGLGMFVEVKDPEDKVILARQYGSEGRFTFTSHTPGEHQICLHSNSTKFSLFAGGMLRVHLDIQVGEHANDYAEIAAKDKLSELQLRVRQLVEQVEQIQKEQNYQRWREERFRQTSESTNQRVLWWSILQTLILVAIGVWQMRHLKSFFEAKKLV

SEQ ID NO: 903432 - protein, 232 aa, Homo sapiens
RGAAGCGCAGRWSKMAVELGVLLVRPRPGTGLGRVMRTLLLVLWLATRGSALYFHIGETEKKCFIEEIPDETMVIGNYRTQLYDKQREEYQPATPGLGMFVEVKDPEDKVILARQYGSEGRFTFTSHTPGEHQICLHSNSTKFSLFAGGMLRVHLDIQVGEHANDYAEIAAKDKLSELQLRVRQLVEQVEQIQKEQNYQRWREERFRQTSESTNQRVLWWSILQTLILWAVW

SEQ ID NO: 903433 - protein, 249 aa, Homo sapiens; identical to SEQ ID NO: 903429

SEQ ID NO: 903434 - protein, 241 aa, Homo sapiens
RGAAGCGCAGRWSKMAVELGVLLVRPRPGTGLGRVMRTLLLVLWLATRGSALYFHIGETEKKCFIEEIPDETMVIGNYRTQLYDKQREEYQPATPGLGMFVEVKDPEDKVILARQYGSEGRFTFTSHTPGEHQICLHSNSTKFSLFAGGMLRVHLDIQVGEHANDYAEIAAKDKLSELQLRVRQLVEQVEQIQKEQNYQRWREERFRQTSESTRAPARIPLAPARIPVAPARIPVAPARIP

SEQ ID NO: 903435 - protein, 221 aa, Homo sapiens
RGAAGCGCAGRWSKMAVELGVLLVRPRPGTGLGRVMRTLLLVLWLATRGSALYFHIGETEKKCFIEEIPDETMVIGNYRTQLYDKQREEYQPATPGLGMFVEVKDPEDKVILARQYGSEGRFTFTSHTPGEHQICLHSNSTKFSLFAGGMLRVHLDIQVGEHANDYAEIAAKDKLSELQLRVRQLVEQVEQIQKEQNYQRDEQESARQTSESTTSGRVLSN

SEQ ID NO: 903436 - protein, 161 aa, Homo sapiens
SRNKVGVGEPAEGSLRWSKMAVELGVLLVRPRPGTGLGRVMRTLLLVLWLATRGSALYFHIGETEKKCFIEEIPDETMVIGNYRTQLYDKQREEYQPATPGLGMFVEVKDPEDKVILARQYGSEGRFTFTSHTPGEHQICLHSNSTKFSLFAGGMLVSGPM

SEQ ID NO: 903437 - protein, 249 aa, Homo sapiens; identical to SEQ ID NO: 903429

SEQ ID NO: 903438 - protein, 249 aa, Homo sapiens; identical to SEQ ID NO: 903429

SEQ ID NO: 903439 - protein, 249 aa, Homo sapiens; identical to SEQ ID NO: 903429

SEQ ID NO: 903440 - protein, 249 aa, Homo sapiens; identical to SEQ ID NO: 903429

SEQ ID NO: 903441 - protein, 131 aa, Homo sapiens
THHLICPPHLRHHHQICLHSNSTKFSLFAGGMLRVHLDIQVGEHANDYAEIAAKDKLSELQLRVRQLVEQVEQIQKEQNYQRWREERFRQTSESTNQRVLWWSILQTLILVAIGVWQMRHLKSFFEAKKLV

SEQ ID NO: 903442 - protein, 114 aa, Homo sapiens [sequence omitted]

SEQ ID NO: 903443 - protein, 224 aa, Homo sapiens
RGAAGCGCAGRWSKMAVELGVLLVRPRPGTGLGRVMRTLLLVLWLATRGSALYFHIGETEKKCFIEEIPDETMVIGNYRTQLYDKQREEYQPATPGLGMFVEVKDPEDKVILARQYGSEGRFTFTSHTPGEHQICLHSNSTKFSLFAGGMLRVHLDIQVGEHANDYAEIAAKDKLSELQLRVRQLVEQVEQIQKEQNYQRVSDWAGSSGLLPRSCPLAQPGISH

SEQ ID NO: 903444 - protein, 323 aa, Homo sapiens
RREAGPRQPAGCDWAASELADARGNMAAAEPAVLALPNSGAGGAGAPSGTVPVLFCFSVFARPSSVPHGAGYELLIQKFLSLYGDQIDMHRKFVVQLFAEEWGQYVDLPKGFAVSERCKVRLVPLQIQLTTLGNLTPSSTVFFCCDMQERFRPAIKYFGDIISVGQRLLQGARILGIPVIVTEQYPKGLGSTVQEIDLTGVKLVLPKTKFSMVLPEVEAALAEIPGVRSVVLFGVETHVCIQQTALELVGRGVEVHIVADATSSRSMMDRMFALERLARTGIIVTTSEAVLLQLVADKDHPKFKEIQNLIKASAPESGLLSKV

SEQ ID NO: 903445 - protein, 158 aa, Homo sapiens
MAARGTIECKARDDGYMSSFLTIEHESLCSLDHMMHRDFIDRDNKTTALWPANPEDVVGINIADWKFCSVDYWIYQLGVHSGARSIKDYAPLCLDATSSRSMMDRMFALERLARTGIIVTTSEAVLLQLVADKDHPKFKEIQNLIKASAPESGLLSKV

SEQ ID NO: 903446 - protein, 323 aa, Homo sapiens; identical to SEQ ID NO: 903444

SEQ ID NO: 903447 - protein, 302 aa, Homo sapiens
RREAGPRQPAGCDWAASELADARGNMAGTVPVLFCFSVFARPSSVPHGAGYELLIQKFLSLYGDQIDMHRKFVVQLFAEEWGQYVDLPKGFAVSERCKVRLVPLQIQLTTLGNLTPSSTVFFCCDMQERFRPAIKYFGDIISVGQRLLQGARILGIPVIVTEQYPKGLGSTVQEIDLTGVKLVLPKTKFSMVLPEVEAALAEIPGVRSVVLFGVETHVCIQQTALELVGRGVEVHIVADATSSRSMMDRMFALERLARTGIIVTTSEAVLLQLVADKDHPKFKEIQNLIKASAPESGLLSKV

SEQ ID NO: 903448 - protein, 251 aa, Homo sapiens [sequence omitted]

SEQ ID NO: 903449 - protein, 148 aa, Homo sapiens
MMRLTINRSMDPKNMFAIWRVPAPFKPITRKSVGHRMGGGKGAIDHYVTPVKAGRLVVEMGGRCEFEEVQGFLDQVAHKLPFAAKAVSRGTLEKMRKDQEERERNNQNPWTFERIATANMLGIRKVLSPYDLTHKGKYWGKFYMPKRV

SEQ ID NO: 903450 - protein, 225 aa, Homo sapiens [sequence omitted]

SEQ ID NO: 903451 - protein, 238 aa, Homo sapiens
MWRLLARASAPLLRVPLSDPGLSVLLLDVSIPEKPKLRFIERAPLVPKVRREPKNLSDIRGPSTEATEFTEGNFAILALGGGYLHWGHFEMMRLTINRSMDPKNMFAIWRVPAPFKPITRKSVGHRMGGGKGAIDHYVTPVKAGRLVVEMGGRCEFEEVQGFLDQVAHKLPFAAKAVSRGTLEKMRKDQEERERNNQNPWTFERIATANMLGIRKVLSPYDLTHKGKYWGKFYMPKRV

SEQ ID NO: 903452 - protein, 111 aa, Homo sapiens
MFTKKTSNSDVATYSVEIEHTEMGGRCEFEEVQGFLDQVAHKLPFAAKAVSRGTLEKMRKDQEERERNNQNPWTFERIATANMLGIRKVLSPYDLTHKGKYWGKFYMPKRV

SEQ ID NO: 903453 - protein, 251 aa, Homo sapiens [sequence omitted]

SEQ ID NO: 903454 - protein, 148 aa, Homo sapiens; identical to SEQ ID NO: 903449

SEQ ID NO: 903455 - protein, 233 aa, Homo sapiens
MWRLLARASAPLLRVPLSDSWALLPASAGVKTLLPVPSFEDVSIPEKPKLRFIERAPLVPKVRREPKNLSDIRGPSTEATEFTEGNFAILALGGGYLHWGHFEMMRLTINRSMDPKNMFAIWRVPAPFKPITRKTVKAGRLVVEMGGRCEFEEVQGFLDQVAHKLPFAAKAVSRGTLEKMRKDQEERERNNQNPWTFERIATANMLGIRKVLSPYDLTHKGKYWGKFYMPKRV

SEQ ID NO: 903456 - protein, 111 aa, Homo sapiens
MMRLTINRSMDPKNMFAIWRVPAPFKPITRKSVGHRMGGGKGAIDHYVTPVKAGRLVVEMGGRCEFEEVQGFLDQVAHKLPFAAKAVSRGTLEKMRKDQEERERNNQNPWT

SEQ ID NO: 903457 - protein, 610 aa, Homo sapiens
GDFPFPATGPQAEREAGPGSRAAASAASAAAATAAGAVMAELVQGQSAPVGMKAEGFVDALHRVRQIAAKIDSIPHLNNSTPLVDPSVYGYGVQKRPLDDGVGNQLGALVHQRTVITEEFKVPDKMVGFIIGRGGEQISRIQAESGCKIQIASESSGIPERPCVLTGTPESIEQAKRLLGQIVDRCRNGPGFHNDIDSNSTIQEILIPASKVGLVIGRGGETIKQLQERTGVKMVMIQDGPLPTGADKPLRITGDAFKVQQAREMVLEIIREKDQADFRGVRGDFNSRMGGGSIEVSVPRFAVGIVIGRNGEMIKKIQNDAGVRIQFKPDDGISPERAAQVMGPPDRCQHAAHIISELILTAQERDGFGGLAAARGRGRGRGDWSVGAPGGVQEITYTVPADKCGLVIGKGGENIKSINQQSGAHVELQRNPPPNSDPNLRRFTIRGVPQQIEVARQLIDEKVGGTNLGAPGAFGQSPFSQPPAPPHQNTFPPRSSGCFPNMAAKVNGNPHSTPVSGPPAFLTQGWGSTYQAWQQPTQQVPSQQSQPQSSQPNYSKAWEDYYKKQSHAASAAPQASSPPDYTMAWAEYYRQQVAFYGQTLGQAQAHSQEQ

SEQ ID NO: 903458 - protein, 71 aa, Homo sapiens
VSCYRTLHTGPTAVRNGSMCSPPYAYSDVVAVLSYLTVNIWICIHISGDMHGPCTHLRQKTMLGWVTNLVN

SEQ ID NO: 903459 - protein, 485 aa, Homo sapiens
MVGFIIGRGGEQISRIQAESGCKIQIASESSGIPERPCVLTGTPESIEQAKRLLGQIVDRCRNGPGFHNDIDSNSTIQEILIPASKVGLVIGRGGETIKQLQERTGVKMVMIQDGPLPTGADKPLRITGDAFKVQQAREMVLEIIREKDQADFRGVRGDFNSRMGGGSIEVSVPRFAVGIVIGRNGEMIKKIQNDAGVRIQFKPDDGISPERAAQVMGPPDRCQHAAHIISELILTAQERDGFGGLAAARGRGRGRGDWSVGAPGGVQEITYTVPADKCGLVIGKGGENIKSINQQSGAHVELQRNPPPNSDPNLRRFTIRGVPQQIEVARQLIDEKVGGTNLGAPGAFGQSPFSQPPAPPHQNTFPPRSSGCFPNMAAKVNGNPHSTPVSGPPAFLTQGWGSTYQAWQQPTQQVPSQQSQPQSSQPNYSKAWEDYYKKQSHAASAAPQASSPPDYTMAWAEYYRQQVAFYGQTLGQAQAHSQEQ

SEQ ID NO: 903460 - protein, 635 aa, Homo sapiens
GDFPFPATGPQAEREAGPGSRAAASAASAAAATAAGAVMAELVQGQSAPVGMKAEGFVDALHRVRQIAAKIDSIPHLNNSTPLVDPSVYGYGVQKRPLDDGVGNQLGALVHQRTVITEEFKVPDKMVGFIMAGEREHDFTAFKHDILRFLAPNNKTFSKRKLLGAFFPNEKNGKGFPWGEFHRKKALCTYRKPPESIEQAKRLLGQIVDRCRNGPGFHNDIDSNSTIQEILIPASKVGLVIGRGGETIKQLQERTGVKMVMIQDGPLPTGADKPLRITGDAFKVQQAREMVLEIIREKDQADFRGVRGDFNSRMGGGSIEVSVPRFAVGIVIGRNGEMIKKIQNDAGVRIQFKPDDGISPERAAQVMGPPDRCQHAAHIISELILTAQERDGFGGLAAARGRGRGRGDWSVGAPGGVQEITYTVPADKCGLVIGKGGENIKSINQQSGAHVELQRNPPPNSDPNLRRFTIRGVPQQIEVARQLIDEKVGGTNLGAPGAFGQSPFSQPPAPPHQNTFPPRSSGCFPNMAAKVNGNPHSTPVSGPPAFLTQGWGSTYQAWQQPTQQVPSQQSQPQSSQPNYSKAWEDYYKKQSHAASAAPQASSPPDYTMAWAEYYRQQVAFYGQTLGQAQAHSQEQ

SEQ ID NO: 903461 - protein, 610 aa, Homo sapiens; identical to SEQ ID NO: 903457

SEQ ID NO: 903462 - protein, 566 aa, Homo sapiens
GDFPFPATGPQAEREAGPGSRAAASAASAAAATAAGAVMAELVQGQSAPVGMKAEGFVDALHRVRQIAAKIDSIPHLNNSTPLVDPSVYGYGVQKRPLDDGVGNQLGALVHQRTVITEEFKVPDKMVGFIIGRGGEQISRIQAESGCKIQIASESSGIPERPCVLTGTPESIEQAKRLLGQIVDRCRNGPGFHNDIDSNSTIQEILIPASKVGLVIGRGGETIKQLQERTGVKMVMIQDGPLPTGADKPLRITGDAFKVQQAREMVLEIIREKDQADFRGVRGDFNSRMGGGSIEVSVPRFAVGIVIGRNGEMIKKIQNDAGVRIQFKPDDGISPERAAQVMGPPDRCQHAAHIISELILTAQERDGFGGLAAARGRGRGRGDWSLRTESIQPATCPTSSKYLSSKELRVLPKHGCQGEWEPPQHPCEWSSGLSDPGLGQHLPGVAAAHTAGPKPAEPAAEQPAQLQQGLGRLLQKTESRRQRCSSGQLPTGLHNGLGRILQTAGRFLRTDVRAGAGPQPGAVGQRPRGQLSPQNHCQRKPICNRGFYICKPFDEELLFCSVKHYI

SEQ ID NO: 903463 - protein, 610 aa, Homo sapiens; identical to SEQ ID NO: 903457

SEQ ID NO: 903464 - protein, 84 aa, Homo sapiens
CEEPVRPDCFCVLRTGQQSQPQSSQPNYSKAWEDYYKKQSHAASAAPQASSPPDYTMAWAEYYRQQVAFYGQTLGQAQAHSQEQ

SEQ ID NO: 903465 - protein, 305 aa, Homo sapiens
GDFPFPATGPQAEREAGPGSRAAASAASAAAATAAGAVMAELVQGQSAPVGMKAEGFVDALHRVRQIAAKIDSIPHLNNSTPLVDPSVYGYGVQKRPLDDGVGNQLGALVHQRTVITEEFKVPDKMVGFIIGRGGEQISRIQAESGCKIQIASESSGIPERPCVLTGTPESIEQAKRLLGQIVDRCRNGPGFHNDIDSNSTIQEILIPASKVGLVIGRGGETIKQLQERTGVKMVMIQDGPLPTGADKPLRITGDAFKVQQAREMVLEIIREKDQADFRGVRGDFNSRMGGGSIEVCLNYRLVGK

SEQ ID NO: 903466 - protein, 304 aa, Homo sapiens
MPPIGNQLGALVHQRTVITEEFKVPDKMVGFIIGRGGEQISRIQAESGCKIQIASESSGIPERPCVLTGTPESIEQAKRLLGQIVDRCRNGPGFHNDIDSNSTIQEILIPASKVGLVIGRGGETIKQLQERTGVKMVMIQDGPLPTGADKPLRITGDAFKVQQAREMVLEIIREKDQADFRGVRGDFNSRMGGGSIEVSVPRFAVGIVIGRNGEMIKKIQNDAGVRIQFKPDNGLGRILQTAGRFLRTDVRAGAGPQPGAVGQRPRGQLSPQNHCQRKPICNRGFYICKPFDEELLFCSVKHYI

SEQ ID NO: 903467 - protein, 512 aa, Homo sapiens [sequence omitted]

SEQ ID NO: 903468 - protein, 610 aa, Homo sapiens; identical to SEQ ID NO: 903457

SEQ ID NO: 903469 - protein, 610 aa, Homo sapiens; identical to SEQ ID NO: 903457

SEQ ID NO: 903470 - protein, 284 aa, Homo sapiens
SEFCNQILLESVKLLTSPADNKSNHFVRHFEFFRYYRPLMYQGPYLVTYSIIQGRFCTPYPYTEEVQEITYTVPADKCGLVIGKGGENIKSINQQSGAHVELQRNPPPNSDPNLRRFTIRGVPQQIEVARQLIDEKVGGTNLGAPGAFGQSPFSQPPAPPHQNTFPPRSSGCFPNMAAKVNGNPHSTPVSGPPAFLTQGWGSTYQAWQQPTQQVPSQQSQPQSSQPNYSKAWEDYYKKQSHAASAAPQASSPPDYTMAWAEYYRQQVAFYGQTLGQAQAHSQEQ

SEQ ID NO: 903471 - protein, 92 aa, Homo sapiens
HQPHLTASQTSLPSSRPEGEQMPRAFGKGPAQCTSAPDNLCFLLCQPGHAASAAPQASSPPDYTMAWAEYYRQQVAFYGQTLGQAQAHSQEQ

SEQ ID NO: 903472 - protein, 82 aa, Homo sapiens
GDFPFPATGPQAEREAGPGSRAAASAASAAAATAAGAVMAELVQGQSAPVGMKAEGFVDALHRVRQKATGVIVLEEGLHSGA

SEQ ID NO: 903473 - protein, 69 aa, Homo sapiens
GNNVTNSIRINVYYDAEINKLVKLLCCLNPQVTNLQSCRLPLEGIGVDLLNYHMREEAQKLAHYSQAGP

SEQ ID NO: 903474 - protein, 69 aa, Homo sapiens; identical to SEQ ID NO: 903473

SEQ ID NO: 903475 - protein, 69 aa, Homo sapiens; identical to SEQ ID NO: 903473

SEQ ID NO: 903476 - protein, 946 aa, Homo sapiens
MEEQGHSEMEIIPSESHPHIQLLKSNRELLVTHIRNTQCLVDNLLKNDYFSAEDAEIVCACPTQPDKVRKILDLVQSKGEEVSEFFLYLLQQLADAYVDLRPWLLEIGFSPSLLTQSKVVVNTDPVSRYTQQLRHHLGRDSKFVLCYAQKEELLLEEIYMDTIMELVGFSNESLGSLNSLACLLDHTTGILNEQGETIFILGDAGVGKSMLLQRLQSLWATGRLDAGVKFFFHFRCRMFSCFKESDRLCLQDLLFKHYCYPERDPEEVFAFLLRFPHVALFTFDGLDELHSDLDLSRVPDSSCPWEPAHPLVLLANLLSGKLLKGASKLLTARTGIEVPRQFLRKKVLLRGFSPSHLRAYARRMFPERALQDRLLSQLEANPNLCSLCSVPLFCWIIFRCFQHFRAAFEGSPQLPDCTMTLTDVFLLVTEVHLNRMQPSSLVQRNTRSPVETLHAGRDTLCSLGQVAHRGMEKSLFVFTQEEVQASGLQERDMQLGFLRALPELGPGGDQQSYEFFHLTLQAFFTAFFLVLDDRVGTQELLRFFQEWMPPAGAATTSCYPPFLPFQCLQGSGPAREDLFKNKDHFQFTNLFLCGLLSKAKQKLLRHLVPAAALRRKRKALWAHLFSSLRGYLKSLPRVQVESFNQVQAMPTFIWMLRCIYETQSQKVGQLAARGICANYLKLTYCNACSADCSALSFVLHHFPKRLALDLDNNNLNDYGVRELQPCFSRLTVLRLSVNQITDGGVKVLSEELTKYKIVTYLGLWKSVDTICFKKQEAIKMTSGARKSHGCAFSGSLYNNQITDVGARLGKNKITSEGGKYLALAVKNSKSISEVGMWGNQVGDEGAKAFAEALRNHPSLTTLSLASNGISTEGGKSLARALQQNTSLEILWLTQNELNDEVAESLAEMLKVNQTLKHLWLIQNQITAKGTAQLADALQSNTGITEI

SEQ ID NO: 903477 - protein, 953 aa, Homo sapiens
MEEQGHSEMEIIPSESHPHIQLLKSNRELLVTHIRNTQCLVDNLLKNDYFSAEDAEIVCACPTQPDKVRKILDLVQSKGEEVSEFFLYLLQQLADAYVDLRPWLLEIGFSPSLLTQSKVVVNTDPVSRYTQQLRHHLGRDSKFVLCYAQKEELLLEEIYMDTIMELVGFSNESLGSLNSLACLLDHTTGILNEQGETIFILGDAGVGKSMLLQRLQSLWATGRLDAGVKFFFHFRCRMFSCFKESDRLCLQDLLFKHYCYPERDPEEVFAFLLRFPHVALFTFDGLDELHSDLDLSRVPDSSCPWEPAHPLVLLANLLSGKLLKGASKLLTARTGIEVPRQFLRKKVLLRGFSPSHLRAYARRMFPERALQDRLLSQLEANPNLCSLCSVPLFCWIIFRCFQHFRAAFEGSPQLPDCTMTLTDVFLLVTEVHLNRMQPSSLVQRNTRSPVETLHAGRDTLCSLGQVAHRGMEKSLFVFTQEEVQASGLQERDMQLGFLRALPELGPGGDQQSYEFFHLTLQAFFTAFFLVLDDRVGTQELLRFFQEWMPPAGAATTSCYPPFLPFQCLQGSGPAREDLFKNKDHFQFTNLFLCGLLSKAKQKLLRHLVPAAALRRKRKALWAHLFSSLRGYLKSLPRVQVESFNQVQAMPTFIWMLRCIYETQSQKVGQLAARGICANYLKLTYCNACSADCSALSFVLHHFPKRLALDLDNNNLNDYGVRELQPCFSRLTVLRLSVNQITDGGVKVLSEELTKYKIVTYLGLYNNQITDVGARYVTKILDECKGLTHLKLGKNKITSEGGKYLALAVKNSKSISEVGMWGNQVGDEGAKAFAEALRNHPSLTTLSLASNGISTEGGKSLARALQQNTSLEILWLTQNELNDEVAESLAEMLKVNQTLKHLWLIQNQITAKGTAQLADALQSNTGITEICLNGNLIKPEEAKVYEDEKRIICF

SEQ ID NO: 903478 - protein, 953 aa, Homo sapiens; identical to SEQ ID NO: 903477

SEQ ID NO: 903479 - protein, 269 aa, Homo sapiens
MRRLKQGCSALSFVLHHFPKRLALDLDNNNLNDYGVRELQPCFSRLTVLRLSVNQITDGGVKVLSEELTKYKIVTYLGLYNNQITDVGARYVTKILDECKGLTHLKLGKNKITSEGGKYLALAVKNSKSISEVGMWGNQVGDEGAKAFAEALRNHPSLTTLSLASNGISTEGGKSLARALQQNTSLEILWLTQNELNDEVAESLAEMLKVNQTLKHLWLIQNQITAKGTAQLADALQSNTGITEICLNGNLIKPEEAKVYEDEKRIICF

SEQ ID NO: 903480 - protein, 930 aa, Homo sapiens
MEEQGHSEMEIIPSESHPHIQLLKSNRELLVTHIRNTQCLVDNLLKNDYFSAEDAEIVCACPTQPDKVRKILDLVQSKGEEVSEFFLYLLQQLADAYVDLRPWLLEIGFSPSLLTQSKVVVNTDPVSRYTQQLRHHLGRDSKFVLCYAQKEELLLEEIYMDTIMELVGFSNESLGSLNSLACLLDHTTGILNEQGETIFILGDAGVGKSMLLQRLQSLWATGRLDAGVKFFFHFRCRMFSCFKESDRLCLQDLLFKHYCYPERDPEEVFAFLLRFPHVALFTFDGLDELHSDLDLSRVPDSSCPWEPAHPLVLLANLLSGKLLKGASKLLTARTGIEVPRQFLRKKVLLRGFSPSHLRAYARRMFPERALQDRLLSQLEANPNLCSLCSVPLFCWIIFRCFQHFRAAFEGSPQLPDCTMTLTDVFLLVTEVHLNRMQPSSLVQRNTRSPVETLHAGRDTLCSLGQVAHRGMEKSLFVFTQEEVQASGLQERDMQLGFLRALPELGPGGDQQSYEFFHLTLQAFFTAFFLVLDDRVGTQELLRFFQEWMPPAGAATTSCYPPFLPFQCLQGSGPAREDLFKNKDHFQFTNLFLCGLLSKAKQKLLRHLVPAAALRRKRKALWAHLFSSLRGYLKSLPRVQVESFNQVQAMPTFIWMLRCIYETQSQKVGQLAARGICANYLKLTYCNACSADCSALSFVLHHFPKRLALDLDNNNLNDYGVRELQPCFSRLTVLRLSVNQITDGGVKVLSEELTKYKIVTYLGLYNNQITDVGARYVTKILDECKGLTHLKLGKNKITSEGGKYLALAVKNSKSISEVGMWGNQVGDEGAKAFAEALRNHPSLTTLSLASNGISTEGGKSLARALQQNTSLEILWLTQNELNDEVAESLAEMLKVNQTLKHLWLIQNQITAKGTAQLADALQSNTGITEIW

SEQ ID NO: 903481 - protein, 953 aa, Homo sapiens; identical to SEQ ID NO: 903477

SEQ ID NO: 903482 - protein, 925 aa, Homo sapiens
MEEQGHSEMEIIPSESHPHIQLLKSNRELLVTHIRNTQCLVDNLLKNDYFSAEDAEIVCACPTQPDKVRKILDLVQSKGEEVSEFFLYLLQQLADAYVDLRPWLLEIGFSPSLLTQSKVVVNTDPVSRYTQQLRHHLGRDSKFVLCYAQKEELLLEEIYMDTIMELVGFSNESLGSLNSLACLLDHTTGILNEQGETIFILGDAGVGKSMLLQRLQSLWATGRLDAGVKFFFHFRCRMFSCFKESDRLCLQDLLFKHYCYPERDPEEVFAFLLRFPHVALFTFDGLDELHSDLDLSRVPDSSCPWEPAHPLVLLANLLSGKLLKGASKLLTARTGIEVPRQFLRKKVLLRGFSPSHLRAYARRMFPERALQDRLLSQLEANPNLCSLCSVPLFCWIIFRCFQHFRAAFEGSPQLPDCTMTLTDVFLLVTEVHLNRMQPSSLVQRNTRSPVETLHAGRDTLCSLGQVAHRGMEKSLFVFTQEEVQASGLQERDMQLGFLRALPELGPGGDQQSYEFFHLTLQAFFTAFFLVLDDRVGTQELLRFFQEWMPPAGAATTSCYPPFLPFQCLQGSGPAREDLFKNKDHFQFTNLFLCGLLSKAKQKLLRHLVPAAALRRKRKALWAHLFSSLRGYLKSLPRVQVESFNQVQAMPTFIWMLRCIYETQSQKVGQLAARGICANYLKLTYCNACSADCSALSFVLHHFPKRLALDLDNNNLNDYGVRELQPCFSRLTVLRLSVNQITDGGVKVLSEELTKYKIVTYLGLYNNQITDVGARYVTKILDECKGLTHLKLGKNKITSEGGKYLALAVKNSKSISEVGMWGNQVGDEGAKAFAEALRNHPSLTTLSLASNGISTEGGKSLARALQQNTSLEILWLTQNELNDEVAESLAEMLKVNQTLKHLCLNGNLIKPEEAKVYEDEKRIICF

SEQ ID NO: 903483 - protein, 135 aa, Homo sapiens [sequence omitted]

SEQ ID NO: 903484 - protein, 101 aa, Homo sapiens
MEEQGHSEMEIIPSESHPHIQLLKSNRELLVTHIRNTQCLVDNLLKNDYFSAEDAEIVCACPTQPDKVPRGQGRAWALCGPRELEEASPADLSEERGSLVQ

SEQ ID NO: 903485 - protein, 207 aa, Homo sapiens
MLALRCGSRWLGLLSVPRSVPLRLPAARACSKGSGDPSSSSSSGNPLVYLDVDANGKPLGRVVLELKADVVPKTAENFRALCTGEKGFGYKGSTFHRVIPSFMCQAGDFTNHNGTGGKSIYGSRFPDENFTLKHVGPGVLSMANAGPNTNGSQFFICTIKTDWLDGKHVVFGHVKEGMDVVKKIESFGSKSGRTSKKIVITDCGQLS

SEQ ID NO: 903486 - protein, 207 aa, Homo sapiens; identical to SEQ ID NO: 903485

SEQ ID NO: 903487 - protein, 207 aa, Homo sapiens; identical to SEQ ID NO: 903485

SEQ ID NO: 903488 - protein, 207 aa, Homo sapiens; identical to SEQ ID NO: 903485

SEQ ID NO: 903489 - protein, 207 aa, Homo sapiens; identical to SEQ ID NO: 903485

SEQ ID NO: 903490 - protein, 207 aa, Homo sapiens; identical to SEQ ID NO: 903485

SEQ ID NO: 903491 - protein, 191 aa, Homo sapiens
MLALRCGSRWLGLLSVPRSVPLRLPAARACSKGSGDPSSSSSSGNPLVYLDVDANGKPLGRVVLELKADVVPKTAENFRALCTGEKGFGYKGSTFHNGTGGKSIYGSRFPDENFTLKHVGPGVLSMANAGPNTNGSQFFICTIKTDWLDGKHVVFGHVKEGMDVVKKIESFGSKSGRTSKKIVITDCGQLS

SEQ ID NO: 903492 - protein, 207 aa, Homo sapiens; identical to SEQ ID NO: 903485

SEQ ID NO: 903493 - protein, 207 aa, Homo sapiens; identical to SEQ ID NO: 903485

SEQ ID NO: 903494 - protein, 207 aa, Homo sapiens; identical to SEQ ID NO: 903485

SEQ ID NO: 903495 - protein, 155 aa, Homo sapiens
MLALRCGSRWLGLLSVPRSVPLRLPAARACSKGSGDPSSSSSSGNPLVYLDVDANGKPLGRVVLELKADVVPKTAENFRALCTGEKGFGYKGSTFHRVIPSFMCQAGDFTNHNGTGGKSIYGSRFPDENFTLKHVGPGWMASMLCSVTSKRAWTS

SEQ ID NO: 903496 - protein, 71 aa, Homo sapiens
HFCTQAHFCTQAHFCTQAHFCTIKTDWLDGKHVVFGHVKEGMDVVKKIESFGSKSGRTSKKIVITDCGQLS

SEQ ID NO: 903497 - protein, 74 aa, Homo sapiens
GHTPHWPDTVWPSGCQQFERKALLNVDRLKKLSRPHREAVGSTTSEGRKIIESFGSKSGRTSKKIVITDCGQLS

SEQ ID NO: 903498 - protein, 107 aa, Homo sapiens [sequence omitted]

SEQ ID NO: 903499 - protein, 207 aa, Homo sapiens; identical to SEQ ID NO: 903485

SEQ ID NO: 903500 - protein, 207 aa, Homo sapiens; identical to SEQ ID NO: 903485

SEQ ID NO: 903501 - protein, 207 aa, Homo sapiens; identical to SEQ ID NO: 903485

SEQ ID NO: 903502 - protein, 151 aa, Homo sapiens
DVARAQKAELKADVVPKTAENFRALCTGEKGFGYKGSTFHRVIPSFMCQAGDFTNHNGTGGKSIYGSRFPDENFTLKHVGPGVLSMANAGPNTNGSQFFICTIKTDWLDGKHVVFGHVKEGMDVVKKIESFGSKSGRTSKKIVITDCGQLS

SEQ ID NO: 903503 - protein, 114 aa, Homo sapiens
MVATQKVLCAQQAGDFTNHNGTGGKSIYGSRFPDENFTLKHVGPGVLSMANAGPNTNGSQFFICTIKTDWLDGKHVVFGHVKEGMDVVKKIESFGSKSGRTSKKIVITDCGQLS

SEQ ID NO: 903504 - protein, 145 aa, Homo sapiens
MLALRCGSRWLGLLSVPRSVPLRLPAARACSKGSGDPSSSSSSGNPLVYLDVDANGKPLGRVVLELKADVVPKTAENFRALCTGEKGFGYKGSTFHRVIPSFMCQAGDFTNHNGTGGKSIYGSRFPDENFTLKHVGPGEWGPPLG

SEQ ID NO: 903505 - protein, 201 aa, Homo sapiens
MLALRCGSRWLGLLSVPRSVPLRLPAARACSKGSGDPSSSSSSGNPLVYLDVDANGKPLGRVVLELKADVVPKTAENFRALCTGEKGFGYKGSTFHRVIPSFMCQAGDFTNHNGTGGKSIYGSRFPDENFTLKHVGPGVLSMANAGPNTNGSQFFICTIKTDWSMALDDIALHCCSPGSPVLTGWMASMLCSVTSKRAWTS

SEQ ID NO: 903506 - protein, 105 aa, Homo sapiens
MGLPGFRLHGLRQGHNMSDRMCPGSQASSGVYLGRSTRLDRALGVDLAIPWGFFSELLFSVTNSMTRSMALDDIALHCCSPGSPVLTGWMASMLCSVTSKRAWTS

SEQ ID NO: 903507 - protein, 189 aa, Homo sapiens
MLALRCGSRWLGLLSVPRSVPLRLPAARACSKGSGDPSSSSSSGNPLVYLDVDANGKPLGRVVLELKADVVPKTAENFRALCTGEKGFGYKGSTFHRVIPSFMCQAGDFTNHNGTGGKSIYGSRFPDENFTLKHVGPGVLSMANAGPNTNGSQFFICTIKTDWLDGKHVVFGHVKEGMDVVKKDCGQLS

SEQ ID NO: 903508 - protein, 207 aa, Homo sapiens; identical to SEQ ID NO: 903485

SEQ ID NO: 903509 - protein, 454 aa, Homo sapiens
GAIVTGKGLDRETAGWHNITVLAMEADNHAQLSRASLRIRILDVNDNPPELATPYEAAVCEDAKPGQLIQTISVVDRDEPQGGHRFYFRLVPEAPSNPHFSLLDIQDNTAAVHTQHVGFNRQEQDVFFLPILVVDSGPPTLSSTGTLTIRICGCDSSGTIQSCNTTAFVMAASLSPGALIALLVCVLILVVLVLLILTLRRHHKSHLSSDEDEDMRDNVIKYNDEGGGEQDTEAYDMSALRSLYDFGELKGGDGGGSAGGGAGGGSGGGAGSPPQAHLPSERHSLPQGPPSPEPDFSVFRDFISRKVALADGDLSVPPYDAFQTYAFEGADSPAASLSSLHSGSSGSEQDFAYLSSWGPRFRPLAALYAGHRGDDEAQASSPSPCRRGAAAHPPSTRRGPRTTRFPRGPPFLPSPNPPLAAGRRGDLLGADSSIPPPLGVQLWSPEVRDSDQRH

SEQ ID NO: 903510 - protein, 174 aa, Homo sapiens
MGLLRDEALAEVKDMEQLLALGKEARACPYYRSRLAIPAAQLVVLPYQMLLHAATRQAAGIRLQDQVVIIDEAHNLIDTITGMHSVEVSGSQLCQAHSQLLQYMERYGKRLKAKNLMYLKQILYLLEKFVAVLGGNIKAKSHTQSLSQTGRDETSNDFSFQSRSNITVQGPELG

SEQ ID NO: 903511 - protein, 729 aa, Homo sapiens
VCLLKVEQARRKQREERLQQLQHRVQLKYAAKRLRQEEEETENLLRLSREMLETGPEAERLEQLESGEEELVLAEYESDEEKKVASGVDEDEDDLEEEHITKIYYCSRTHSQLAQFVHEVKKSPFGKDVRLVSLGSQQNLCVNEDVRSLGSVQLINDRCVDMQRSRHEKKKGAEEEKPKRRRQEKQAACPFYNHEQMGLLRDEALAEVKDMEQLLALGKEARACPYYRSRLAIPAAQLVVLPYQMLLHAATRQAAGIRLQDQVVIIDEAHNLIDTITGMHSVEVSGSQLCQAHSQLLQYMERYGKRLKAKNLMYLKQILYLLEKFVAVLGGNIKQNPNTQSLSQTGTELKTINDFLFQSQIDNINLFKVQRYCEKSMISRKLFGFTERYGAVFSSREQPKLAGFQQFLQSLQPRTTEALAAPADESQASVPQPASPLMHIEGFLAALTTANQDGRVILSRQGSLSESTLKFLLLNPAVHFAQVVKECRAVVIAGGTMQPVSDFRQQLLACAGVEAERVVEFSCGHVIPPDNICPYVICSGISNQPLEFTFQKRDLPQMMDEVGRILCNLCGVVSGGVVCFFPSYEYLRQVHAHWEKGGLLGRLAARKKIFQEPKSAHQVEQVLLAYSRCIQACGQERGQVTEALLLSVVGGKMSEGINFSDNLGRCVVMVGMPFPNIRSAELQEKMAYLDQTLPRAPGQAPPGKALVENLCMKAVKPAGPSGTRRILPA

SEQ ID NO: 903512 - protein, 509 aa, Homo sapiens
MLLHAATRQAAGIRLQDQVVIIDEAHNLIDTITGMHSVEVSGSQLCQAHSQLLQYMERYGKRLKAKNLMYLKQILYLLEKFVAVLGGNIKQNPNTQSLSQTGTELKTINDFLFQSQIDNINLFKVQRYCEKSMISRKLFGFTERYGAVFSSREQPKLAGFQQFLQSLQPRTTEALAAPADESQASVPQPASPLMHIEGFLAALTTANQDGRVILSRQGSLSESTLKFLLLNPAVHFAQVVKECRAVVIAGGTMQPANFSLPFCWASEGSWGHDAVALVYRCLTSGSSCWPVLGWKLSRGGVFLWSRDPSRQHLPLVICSGISNQPLEFTFQKRDLPQMMDEVGRILCNLCGVVSGGVVCFFPSYEYLRQVHAHWEKGGLLGRLAARKKIFQEPKSAHQVEQVLLAYSRCIQACGQERGQVTEALLLSVVGGKMSEGINFSDNLGRCVVMVGMPFPNIRSAELQEKMAYLDQTLPRAPGQAPPGKALVENLCMKAVKPAGPSGTRRILPA

SEQ ID NO: 903513 - protein, 557 aa, Homo sapiens
MGLLRDEALAEVKDMEQLLALGKEARACPYYRSRLAIPAAQLVVLPYQMLLHAATRQAAGIRLQDQVVIIDEAHNLIDTITGMHSVEVSGSQLCQAHSQLLQYMERYGKRLKAKNLMYLKQILYLLEKFVAVLGGNIKQNPNTQSLSQTGTELKTINDFLFQSQIDNINLFKVQRYCEKSMISRKLFGFTERYGAVFSSREQPKLAGFQQFLQSLQPRTTEALAAPADESQASVPQPASPLMHIEGFLAALTTANQDGRVILSRQGSLSESTLKFLLLNPAVHFAQVVKECRAVVIAGGTMQPANFSLPFCWASEGSWGHDAVALVYRCLTSGSSCWPVLGWKLSRGGVFLWSRDPSRQHLPLVICSGISNQPLEFTFQKRDLPQMMDEVGRILCNLCGVVSGGVVCFFPSYEYLRQVHAHWEKGGLLGRLAARKKIFQEPKSAHQVEQVLLAYSRCIQACGQERGQVTEALLLSVVGGKMSEGINFSDNLGRCVVMVGMPFPNIRSAELQEKMAYLDQTLPRAPGQAPPGKALVENLCMKAVKPAGPSGTRRILPA

SEQ ID NO: 903514 - protein, 607 aa, Homo sapiens
MLLHAATRQAAGIRLQDQVVIIDEAHNLIDTITGMHSVEVSGSQLCQAHSQLLQYMERYGKRLKAKNLMYLKQILYLLEKFVAVLGGNIKQNPNTQSLSQTGTELKTINDFLFQSQIDNINLFKVQRYCEKSMISRKLFGFTERYGAVFSSREQPKLAGFQQFLQSLQPRTTEALAAPADESQASVPQPASPLMHIEGFLAALTTANQDGRVILSRQGSLSESTLKFLLLNPAVHFAQVVKECRAVVIAGGTMQPVSDFRQQLLACAGVEAERVVEFSCGHVIPPDNICPYVICSGISNQPLEFTFQKRDLPQMMDEVGRILCNLCGVVSGGVVCFFPSYEYLRQVHAHWEKGGLLGRLAARKKIFQEPKSAHQVEQVLLAYSRCIQVRASCCAWACGQERGQVTEALLLSVVGGKMSEGINFSDNLGRCVVMVGMPFPNIRSAELQEKMAYLDQTLPRAPGQAPPGKALVENLCMKAVNQQGHQAPEGFCQHSAPGPAIRPAPCPGQAAGLDPSPRGGQSYLWPRHCCCAEVSPGEVGLFLMGNHTTARRRALPLSCPLETVFVVGVVCRDPVTKVKPRRRVWSPERCQDPGTGVSSRRRKCGNPE

SEQ ID NO: 903515 - protein, 595 aa, Homo sapiens
MLLHAATRQAAGIRLQDQVVIIDEAHNLIDTITGMHSVEVSGSQLCQAHSQLLQYMERYGKRLKAKNLMYLKQILYLLEKFVAVLGGNIKQNPNTQSLSQTGTELKTINDFLFQSQIDNINLFKVQRYCEKSMISRKLFGFTERYGAVFSSREQPKLAGFQQFLQSLQPRTTEALAAPADESQASVPQPASPLMHIEGFLAALTTANQDGRVILSRQGSLSESTLKFLLLNPAVHFAQVVKECRAVVIAGGTMQPANFSLPFCWASEGSWGHDAVALVYRCLTSGSSCWPVLGWKLSRGGVFLWSRDPSRQHLPLVICSGISNQPLEFTFQKRDLPQMMDEVGRILCNLCGVVSGGVVCFFPSYEYLRQVHAHWEKGGLLGRLAARKKIFQEPKSAHQVEQVLLAYSRCIQACGQERGQVTEALLLSVVGGKMSEGINFSDNLGRCVVMVGMPFPNIRSAELQEKMAYLDQTLPRAPGQAPPGKALVENLCMKAVKPVHEVSLAASSWVDRWGLEKGRTGKRGCLPCFLYKSEEGRAIRHQKDFASIVLLDQRYARPPVLAKLPAWIRARVEVKATFGPAIAAVQKFHREKSASS

SEQ ID NO: 903516 - protein, 486 aa, Homo sapiens
AVLAGIFGITGMHSVDVSGSQLCQAHSQLLQYMERYGKRLKAKNLMYLKQILYLLEKFVAVLGGNIKQNPNTQSLSQTGTELKTINDFLFQSQIDNINLFKVQRYCEKSMISRKLFGFTERYGAVFSSREQPKLAGFQQFLQSLQPRTTEALAAPADESQASVPQPASPLMHIEGFLAALTTANQDGRVILSRQGSLSESTLKFLLLNPAVHFAQVVKECRAVVIAGGTMQPANFSLPFCWASEGSWGHDAVALVYRCLTSGSSCWPVLGWKLSRGGVFLWSRDPSRQHLPLVICSGISNQPLEFTFQKRDLPQMMDEVGRILCNLCGVVSGGVVCFFPSYEYLRQVHAHWEKGGLLGRLAARKKIFQEPKSAHQVEQVLLAYSRCIQACGQERGQVTEALLLSVVGGKMSEGINFSDNLGRCVVMVGMPFPNIRSAELQEKMAYLDQTLPRAPGQAPPGKALVENLCMKAVKPAGPSGTRRILPA

SEQ ID NO: 903517 - protein, 463 aa, Homo sapiens
MLLHAATRQAAGIRLQDQVVIIDEAHNLIDTITGMHSVEVSGSQLCQAHSQLLQYMERYGKRLKAKNLMYLKQILYLLEKFVAVLGGNIKQNPNTQSLSQTGTELKTINDFLFQSQIDNINLFKVQRYCEKSMISRKLFGFTERYGAVFSSREQPKLAGFQQFLQSLQPRTTEALAAPADESQASVPQPASPLMHIEGFLAALTTANQDGRVILSRQGSLSESTLKFLLLNPAVHFAQVVKECRAVVIAGGTMQPANFSLPFCWASEGSWGHDAVALVYRCLTSGSSCWPVLGWKLSRGGVFLWSRDPSRQHLPLVICSGISNQPLEFTFQKRDLPQMMDEVGRILCNLCGVVSGGVVCFFPSYEYLRQVHAHWEKGGLLGRLAARKKIFQEPKSAHQVEQVLLAYSRCIQACGQERGQVTEALLLSVVGGKMSEGINFSDNLGRPEPPARHPQGRLWWRTCA

SEQ ID NO: 903518 - protein, 107 aa, Homo sapiens
RHCCCAEGQSYLFLSESLPTPRSHFSLPSVCPVSPGEVGLFLMGNHTTARRRALPLSCPLETVFVVGVVCRDPVTKVKPRRRVWSPERCQDPGTGVSSRRRKCGNPE

SEQ ID NO: 903519 - protein, 79 aa, Homo sapiens
GGTYHPVVPTQGSQVLFMTIETPYHHGDLCSCGKITLPPATAAPADCACLLPLTPEKGAVVSWDLLPPSGTNRGQEESH

SEQ ID NO: 903520 - protein, 729 aa, Homo sapiens; identical to SEQ ID NO: 903511

SEQ ID NO: 903521 - protein, 472 aa, Homo sapiens
MLLHAATRQAAGIRLQDQVVIIDEAHNLIDTITGMHSVEVSGSQLCQAHSQLLQYMERYGKRLKAKNLMYLKQILYLLEKFVAVLGGNIKQNPNTQSLSQTGTELKTINDFLFQSQIDNINLFKVQRYCEKSMISRKLFGFTERYGAVFSSREQPKLAGFQQFLQSLQPRTTEALAAPADESQASVPQPASPLMHIEGFLAALTTANQDGRVILSRQGSLSESTLKFLLLNPAVHFAQVVKECRAVVIAGGTMQPANFSLPFCWASEGSWGHDAVALVYRCLTSGSSCWPVLGWKLSRGGVFLWSRDPSRQHLPLVICSGISNQPLEFTFQKRDLPQMMDEVGRILCNLCGVVSGGVVCFFPSYEYLRQVHAHWEKGGLLGRLAARKKIFQEPKSAHQVEQVLLAYSRCIQACGQERGQVTEALLLSVVGGKMSEGINFSDNLGRSAELQEKMAYLDQTLAGPSGTRRILPA

SEQ ID NO: 903522 - protein, 545 aa, Homo sapiens
MGLLRDEALAEVKDMEQLLALGKEARACPYYRSRLAIPAAQLVVLPYQMLLHAATRQAAGIRLQDQVVIIDEAHNLIDTITGMHSVEVSGSQLCQAHSQLLQYMERYGKRLKAKNLMYLKQILYLLEKFVAVLGGNIKQNPNTQSLSQTEPDRQHQPVQGAAILEKSMISRKLFGFTERYGAVFSSREQPKLAGFQQFLQSLQPRTTEALAAPADESQASVPQPASPLMHIEGFLAALTTANQDGRVILSRQGSLSESTLKFLLLNPAVHFAQVVKECRAVVIAGGTMQPANFSLPFCWASEGSWGHDAVALVYQVSDFRQQLLACAGVEAERVVEFSCGHVIPPDNILPLVICSGISNQPLEFTFQKRDLPQMMDEVGRILCNLCGVVSGGVVCFFPSYEYLRQVHAHWEKGGLLGRLAARKKIFQEPKSAHQVEQVLLAYSRCIQACGQERGQVTEALLLSVVGGKMSEGINFSDNLGRCVVMVGMPFPNIRSAELQEKMAYLDQTLPRAPGQAPPGKALVENLCMKAVKPAGPSGTRRILPA

SEQ ID NO: 903523 - protein, 729 aa, Homo sapiens; identical to SEQ ID NO: 903511

SEQ ID NO: 903524 - protein, 70 aa, Homo sapiens
VGRILCNLCGVVSGGVVCFFPSYEYLRQVHAHWEKGGLLGRLAARKKVSGLSAALPLVRTVPLSPPGSSC

SEQ ID NO: 903525 - protein, 474 aa, Homo sapiens
YRSVKQAGCSAAPGAVPPPEADSTSAGMSRRPCSCALRPPRCSCSASPSAVTAAGRPRPSDSCKEESSTLSVKMKCDFNCNHVHSGLKLVKPDDIGRLVSYTPAYLEGSCKDCIKDYERLSCIGSPIVSPRIVELETESKRLHNKENQHVQQTLNSTNEIEALETSRLYEDSGYSSFSLQSGLSEHEEGSLLEENFGDSLQSCLLQIQSPDQYPNKNLLPVLHFEKVVCSTLKKNAKRNPKVDREMLKEIIARGNFRLQNIIGRKMGLECVDILSELFRRGLRHVLATILAQLSDMDLINVSKVSTTWKKILEDDKGAFQLYSKAIQRVTENNNKFSPHASTREYVMFRTPLASVQKSAAQTSLKKDAQTKLSNQGDQKGSTYSRHNEFSEVAKTLKKNESLKACIRCNSPAKYDCYLQRATCKREGCGFDYCTKCLCNYHTTKDCSDGKLLKASCKIGPLPGTKKSKKNLRRL

SEQ ID NO: 903526 - protein, 401 aa, Homo sapiens [sequence omitted]

SEQ ID NO: 903527 - protein, 383 aa, Homo sapiens
MKCDFNCNHVHSGLKLVKPDDIGRLVSYTPAYLEGSCKDCIKDYERLSCIGSPIVSPRIVELETESKRLHNKETSRLYEDSGYSSFSLQSGLSEHEEGSLLEENFGDSLQSCLLQIQSPDQYPNKNLLPVLHFEKVVCSTLKKNAKRNPKVDREMLKEIIARGNFRLQNIIGRKMGLECVDILSELFRRGLRHVLATILAQLSDMDLINVSKVSTTWKKILEDDKGAFQLYSKAIQRVTENNNKFSPHASTREYVMFRTPLASVQKSAAQTSLKKDAQTKLSNQGDQKGSTYSRHNEFSEVAKTLKKNESLKACIRCNSPAKYDCYLQRATCKREGCGFDYCTKCLCNYHTTKDCSDGKLLKASCKIGPLPGTKKSKKNLRRL

SEQ ID NO: 903528 - protein, 401 aa, Homo sapiens [sequence omitted]

SEQ ID NO: 903529 - protein, 119 aa, Homo sapiens
MDGQKKNWKDKVVDLLYWRDIKKTGVVFGASLFLLLSLTVFSIVSVTAYIALALLSVTISFRIYKGVIQAIQKSDEGHPFRAYLESEVAISEELVQKYSNSALWSCELHDKGTQAPLLS

SEQ ID NO: 903530 - protein, 128 aa, Homo sapiens
EGEGGGNVRGYIFSRAEYNFIVDLLYWRDIKKTGVVFGASLFLLLSLTVFSIVSVTAYIALALLSVTISFRIYKGVIQAIQKSDEGHPFRAYLESEVAISEELVQKYSNSALWSCELHDKGTQAPLLS

SEQ ID NO: 903531 - protein, 881 aa, Homo sapiens
MEDLDQSPLVSSSDSPPRPQPAFKYQFVREPEDEEEEEEEEEEDEDEDLEELEVLERKPEFSELEYSEMGSSFSVSPKAESAVIVANPREEIIVKNKDEEEKLVSNNILHNQQELPTALTKLVKEDEVVSSEKAKDSFNEKRVAVEAPMREEYADFKPFERVWEVKDSKEDSDMLAAGGKIESNLESKVDKKCFADSLEQTNHEKDSESSNDDTSFPSTPEGIKDRSGAYITCAPFNPAATESIATNIFPLLGDPTSENKTDEKKIEEKKAQIVTEKNTSTKTSNPFLVAAQDSETDYVTTDNLTKVTEEVVANMPEGLTPDLVQEACESELNEVTGTKIAYETKMDLVQTSEVMQESLYPAAQLCPSFEESEATPSPVLPDIVMEAPLNSAVPSAGASVIQPSSSPLEASSVNYESIKHEPENPPPYEEAMSVSLKKVSGIKEEIKEPENINAALQETEAPYISIACDLIKETKLSAEPAPDFSDYSEMAKVEQPVPDHSELVEDSSPDSEPVDLFSDDSIPDVPQKQDETVMLVKESLTETSFESMIEYENKEKLSALPPEGGKPYLESFKLSLDNTKDTLLPDEVSTLSKKEKIPLQMEELSTAVYSNDDLFISKEAQIRETETFSDSSPIEIIDEFPTLISSKTDSFSKLAREYTDLEVSHKSEIANAPDGAGSLPCTELPHDLSLKNIQPKVEEKISFSDDFSKNGSATSKVLLLPPDVSALATQAEIESIVKPKVLVKEAEKKLPSDTEKEDRSPSAIFSAELSKTSVVDLLYWRDIKKTGVVFGASLFLLLSLTVFSIVSVTAYIALALLSVTISFRIYKGVIQAIQKSDEGHPFRAYLESEVAISEELVQKYSNSALWSCELHDKGTQAPLLS

SEQ ID NO: 903532 - protein, 1041 aa, Homo sapiens
MEDLDQSPLVSSSDSPPRPQPAFKYQFVREPEDEEEEEEEEEEDEDEDLEELEVLERKPAAGLSAAPVPTAPAAGAPLMDFGNDFVPPAPRGPLPAAPPVAPERQPSWDPSPVSSTVPAPSPLSAAAVSPSKLPEDDEPPARPPPPPPASVSPQAEPVWTPPAPAPAAPPSTPAAPKRRGSSGSVDETLFALPAASEPVIRSSAENMDLKEQPGNTISAGQEDFPSVLLETAASLPSLSPLSAASFKEHEYLGNLSTVLPTEGTLQENVSEASKEVSEKAKTLLIDRDLTEFSELEYSEMGSSFSVSPKAESAVIVANPREEIIVKNKDEEEKLVSNNILHNQQELPTALTKLVKEDEVVSSEKAKDSFNEKRVAVEAPMREEYADFKPFERVWEVKDSKEDSDMLAAGGKIESNLESKVDKKCFADSLEQTNHEKDSESSNDDTSFPSTPEGIKDRSGAYITCAPFNPAATESIATNIFPLLGDPTSENKTDEKKIEEKKAQIVTEKNTSTKTSNPFLVAAQDSETDYVTTDNLTKVTEEVVANMPEGLTPDLVQEACESELNEVTGTKIAYETKMDLVQTSEVMQESLYPAAQLCPSFEESEATPSPVLPDIVMEAPLNSAVPSAGASVIQPSSSPLEASSVNYESIKHEPENPPPYEEAMSVSLKKVSGIKEEIKEPENINAALQETEAPYISIACDLIKETKLSAEPAPDFSDYSEMAKVEQPVPDHSELVEDSSPDSEPVDLFSDDSIPDVPQKQDETVMLVKESLTETSFESMIEYENKEKLSALPPEGGKPYLESFKLSLDNTKDTLLPDEVSTLSKKEKIPLQMEELSTAVYSNDDLFISKEAQIRETETFSDSSPIEIIDEFPTLISSKTDSFSKLAREYTDLEVSHKSEIANAPDGAGSLPCTELPHDLSLKNIQPKVEEKISFSDDFSKNGSATSKVLLLPPDVSALATQAEIESIVKPKVLVKEAEKKLPSDTEKEDRSPSAIFSAELSKTSGSGVWCQPIPAAFIDSIQHCERNSLHCLGPALCDHQL

SEQ ID NO: 903533 - protein, 1112 aa, Homo sapiens
MEDLDQSPLVSSSDSPPRPQPAFKYQFVREPEDEEEEEEEEEEDEDEDLEELEVLERKPAAGLSAAPVPTAPAAGAPLMDFGNDFVPPAPRGPLPAAPPVAPERQPSWDPSPVSSTVPAPSPLSAAAVSPSKLPEDDEPPARPPPPPPASVSPQAEPVWTPPAPAPAAPPSTPAAPKRRGSSGSVDETLFALPAASEPVIRSSAENMDLKEQPGNTISAGQEDFPSVLLETAASLPSLSPLSAASFKEHEYLGNLSTVLPTEGTLQENVSEASKEVSEKAKTLLIDRDLTEFSELEYSEMGSSFSVSPKAESAVIVANPREEIIVKNKDEEEKLVSNNILHNQQELPTALTKLVKEDEVVSSEKAKDSFNEKRVAVEAPMREEYADFKPFERVWEVKDSKEDSDMLAAGGKIESNLESKVDKKCFADSLEQTNHEKDSESSNDDTSFPSTPEGIKDRSGAYITCAPFNPAATESIATNIFPLLGDPTSENKTDEKKIEEKKAQIVTEKNTSTKTSNPFLVAAQDSETDYVTTDNLTKVTEEVVANMPEGLTPDLVQEACESELNEVTGTKIAYETKMDLVQTSEVMQESLYPAAQLCPSFEESEATPSPVLPDIVMEAPLNSAVPSAGASVIQPSSSPLEASSVNYESIKHEPENPPPYEEAMSVSLKKVSGIKEEIKEPENINAALQETEAPYISIACDLIKETKLSAEPAPDFSDYSEMAKVEQPVPDHSELVEDSSPDSEPVDLFSDDSIPDVPQKQDETVMLVKESLTETSFESMIEYENKEKLSALPPEGGKPYLESFKLSLDNTKDTLLPDEVSTLSKKEKIPLQMEELSTAVYSNDDLFISKEAQIRETETFSDSSPIEIIDEFPTLISSKTDSFSKLAREYTDLEVSHKSEIANAPDGAGSLPCTELPHDLSLKNIQPKVEEKISFSDDFSKNGSATSKVLLLPPDVSALATQAEIESIVKPKVLVKEAEKKLPSDTEKEDRSPSAIFSAELSKTSVVDLLYWRDIKKTGVVFGASLFLLLSLTVFSIVSVTAYIALALLSVTISFRIYKGVIQAIQKSDEGHPFRAYLESEVAISEELVQKYSNSALWSCELHDKGTQAPLLS

SEQ ID NO: 903534 - protein, 1112 aa, Homo sapiens; identical to SEQ ID NO: 903533

SEQ ID NO: 903535 - protein, 1112 aa, Homo sapiens; identical to SEQ ID NO: 903533

SEQ ID NO: 903536 - protein, 1112 aa, Homo sapiens; identical to SEQ ID NO: 903533

SEQ ID NO: 903537 - protein, 1112 aa, Homo sapiens; identical to SEQ ID NO: 903533

SEQ ID NO: 903538 - protein, 1112 aa, Homo sapiens; identical to SEQ ID NO: 903533

SEQ ID NO: 903539 - protein, 1112 aa, Homo sapiens; identical to SEQ ID NO: 903533

SEQ ID NO: 903540 - protein, 1112 aa, Homo sapiens; identical to SEQ ID NO: 903533

SEQ ID NO: 903541 - protein, 1112 aa, Homo sapiens; identical to SEQ ID NO: 903533

SEQ ID NO: 903542 - protein, 1112 aa, Homo sapiens; identical to SEQ ID NO: 903533

SEQ ID NO: 903543 - protein, 1112 aa, Homo sapiens; identical to SEQ ID NO: 903533

SEQ ID NO: 903544 - protein, 1112 aa, Homo sapiens; identical to SEQ ID NO: 903533

SEQ ID NO: 903545 - protein, 1112 aa, Homo sapiens; identical to SEQ ID NO: 903533

SEQ ID NO: 903546 - protein, 1112 aa, Homo sapiens; identical to SEQ ID NO: 903533

SEQ ID NO: 903547 - protein, 1112 aa, Homo sapiens; identical to SEQ ID NO: 903533

SEQ ID NO: 903548 - protein, 1112 aa, Homo sapiens; identical to SEQ ID NO: 903533

SEQ ID NO: 903549 - protein, 197 aa, Homo sapiens
MEDLDQSPLVSSSDSPPRPQPAFKYQFVREPEDEEEEEEEEEEDEDEDLEELEVLERKPAAGLSAAPVPTAPAAGAPLMDFGNDFVPPAPRGPLPAAPPVAPERQPSWDPSPVSSTVPAPSPLSAAAVSPSKLPEDDEPPARPPPPPPASVSPQAEPVWTPPAPAPAAPPSTPAAPKRRGSSGSVVNLLNWTDFATD

SEQ ID NO: 903550 - protein, 119 aa, Homo sapiens; identical to SEQ ID NO: 903529

SEQ ID NO: 903551 - protein, 1112 aa, Homo sapiens; identical to SEQ ID NO: 903533

SEQ ID NO: 903552 - protein, 293 aa, Homo sapiens
MEDLDQSPLVSSSDSPPRPQPAFKYQFVREPEDEEEEEEEEEEDEDEDLEELEVLERKPAAGLSAAPVPTAPAAGAPLMDFGNDFVPPAPRGPLPAAPPVAPERQPSWDPSPVSSTVPAPSPLSAAAVSPSKLPEDDEPPARPPPPPPASVSPQAEPVWTPPAPAPAAPPSTPAAPKRRGSSGSVVVDLLYWRDIKKTGVVFGASLFLLLSLTVFSIVSVTAYIALALLSVTISFRIYKGVIQAIQKSDEGHPFRAYLESEVAISEELVQKYSNSALWSCELHDKGTQAPLLS

SEQ ID NO: 903553 - protein, 360 aa, Homo sapiens
MEDLDQSPLVSSSDSPPRPQPAFKYQFVREPEDEEEEEEEEEEDEDEDLEELEVLERKPAAGLSAAPVPTAPAAGAPLMDFGNDFVPPAPRGPLPAAPPVAPERQPSWDPSPVSSTVPAPSPLSAAAVSPSKLPEDDEPPARPPPPPPASVSPQAEPVWTPPAPAPAAPPSTPAAPKRRGSSGSVDETLFALPAASEPVIRSSAENMDLKEQPGNTISAGQEDFPSVLLETAASLPSLSPLSAASFKEHEYLVVDLLYWRDIKKTGVVFGASLFLLLSLTVFSIVSVTAYIALALLSVTISFRIYKGVIQAIQKSDEGHPFRAYLESEVAISEELVQKYSNSALWSCELHDKGTQAPLLS

SEQ ID NO: 903554 - protein, 1112 aa, Homo sapiens; identical to SEQ ID NO: 903533

SEQ ID NO: 903555 - protein, 1112 aa, Homo sapiens; identical to SEQ ID NO: 903533

SEQ ID NO: 903556 - protein, 1112 aa, Homo sapiens; identical to SEQ ID NO: 903533

SEQ ID NO: 903557 - protein, 293 aa, Homo sapiens; identical to SEQ ID NO: 903552

SEQ ID NO: 903558 - protein, 1112 aa, Homo sapiens; identical to SEQ ID NO: 903533

SEQ ID NO: 903559 - protein, 1112 aa, Homo sapiens; identical to SEQ ID NO: 903533

SEQ ID NO: 903560 - protein, 1112 aa, Homo sapiens; identical to SEQ ID NO: 903533

SEQ ID NO: 903561 - protein, 1112 aa, Homo sapiens; identical to SEQ ID NO: 903533

SEQ ID NO: 903562 - protein, 1112 aa, Homo sapiens; identical to SEQ ID NO: 903533

SEQ ID NO: 903563 - protein, 1112 aa, Homo sapiens; identical to SEQ ID NO: 903533

SEQ ID NO: 903564 - protein, 1112 aa, Homo sapiens; identical to SEQ ID NO: 903533

SEQ ID NO: 903565 - protein, 685 aa, Homo sapiens
MEDLDQSPLVSSSDSPPRPQPAFKYQFVREPEDEEEEEEEEEEDEDEDLEELEVLERKPAAGLSAAPVPTAPAAGAPLMDFGNDFVPPAPRGPLPAAPPVAPERQPSWDPSPVSSTVPAPSPLSAAAVSPSKLPEDDEPPARPPPPPPASVSPQAEPVWTPPAPAPAAPPSTPAAPKRRGSSGSVDETLFALPAASEPVIRSSAENMDLKEQPGNTISAGQEDFPSVLLETAASLPSLSPLSAASFKEHEYLGNLSTVLPTEGTLQENVSEASKEVSEKAKTLLIDRDLTEFSELEYSEMGSSFSVSPKAESAVIVANPREEIIVKNKDEEEKLVSNNILHNQQELPTALTKLVKEDEVVSSEKAKDSFNEKRVAVEAPMREEYADFKPFERVWEVKDSKEDSDMLAAGGKIESNLESKVDKKCFADSLEQTNHEKDSESSNDDTSFPSTPEGIKDRSGAYITCAPFNPAATESIATNIFPLLGDPTSENKTDEKKIEEKKAQIVTEKNTSTKTSNPFLVAAQDSETDYVTTDNLTKVTEEVVANMPEGLTPDLVQEACESELNEVTGTKIAYETKMDLVQTSEVMQESLYPAAQLCPSFEESEATPSPVLPDIVMEAPLNSAVPSAGASVIQPSSSPLEASSLILSQNLWTESNASKNVVCLQISNIVMQEIINYKMKIYTIVV

SEQ ID NO: 903566 - protein, 511 aa, Homo sapiens
MALRAMRGIVNGAAPELPVPTGGPAVGAREQALAVSRNYLSQPRLTYKTVSGVNGPLVILDHVKFPRYAEIVHLTLPDGTKRSGQVLEVSGSKAVVQVFEGTSGIDAKKTSCEFTGDILRTPVSEDMLGRVFNGSGKPIDRGPVVLAEDFLDIMGQPINPQCRIYPEEMIQTGISAIDGMNSIARGQKIPIFSAAGLPHNEIAAQICRQAGLVKKSKDVVDYSEENFAIVFAAMGVNMETARFFKSDFEENGSMDNVCLFLNLANDPTIERIITPRLALTTAEFLAYQCEKHVLVILTDMSSYAEALREVSAAREEVPGRRGFPGYMYTDLATIYERAGRVEGRNGSITQIPILTMPNDDITHPIPDLTGYITEGQIYVDRQLHNRQIYPPINVLPSLSRLMKSAIGEGMTRKDHADVSNQLYACYAIGKDVQAMKAVVGEEALTSDDLLYLEFLQKFERNFIAQGPYENRTVFETLDIGWQLLRIFPKEMLKRIPQSTLSEFYPRDSAKH

SEQ ID NO: 903567 - protein, 525 aa, Homo sapiens
ARRRCWASRDRGDKMALRAMRGIVNGAAPELPVPTGGPAVGAREQALAVSRNYLSQPRLTYKTVSGVNGPLVILDHVKFPRYAEIVHLTLPDGTKRSGQVLEVSGSKAVVQVFEGTSGIDAKKTSCEFTGDILRTPVSEDMLGRVFNGSGKPIDRGPVVLAEDFLDIMGQPINPQCRIYPEEMIQTGISAIDGMNSIARGQKIPIFSAAGLPHNEIAAQICRQAGLVKKSKDVVDYSEENFAIVFAAMGVNMETARFFKSDFEENGSMDNVCLFLNLANDPTIERIITPRLALTTAEFLAYQCEKHVLVILTDMSSYAEALREVSAAREEVPGRRGFPGYMYTDLATIYERAGRVEGRNGSITQIPILTMPNDDITHPIPDLTGYITEGQIYVDRQLHNRQIYPPINVLPSLSRLMKSAIGEGMTRKDHADVSNQLYACYAIGKDVQAMKAVVGEEALTSDDLLYLEFLQKFERNFIAQGPYENRTVFETLDIGWQLLRIFPKEMLKRIPQSTLSEFYPRDSAKH

SEQ ID NO: 903568 - protein, 525 aa, Homo sapiens; identical to SEQ ID NO: 903567

SEQ ID NO: 903569 - protein, 525 aa, Homo sapiens; identical to SEQ ID NO: 903567

SEQ ID NO: 903570 - protein, 223 aa, Homo sapiens
ARRRCWASRDRGDKMALRAMRGIVNGAAPELPVPTGGPAVGAREQALAVSRNYLSQPRLTYKTVSGVNGPLVILDHVKFPRYAEIVHLTLPDGTKRSGQVLEVSGSKAVVQVFEGTSGIDAKKTSCEFTGDILRTPVSEDMLGRVFNGSGKPIDRGPVVLAEDFLDIMGQPINPQCRIYPEEMIQTGISAIDGMNSIARGQKIPIFSAAGLPHNEVRTGIGLL

SEQ ID NO: 903571 - protein, 525 aa, Homo sapiens; identical to SEQ ID NO: 903567

SEQ ID NO: 903572 - protein, 525 aa, Homo sapiens; identical to SEQ ID NO: 903567

SEQ ID NO: 903573 - protein, 385 aa, Homo sapiens
MLGRVFNGSGKPIDRGPVVLAEDFLDIMGQPINPQCRIYPEEMIQTGISAIDGMNSIARGQKIPIFSAAGLPHNEIAAQICRQAGLVKKSKDVVDYSEENFAIVFAAMGVNMETARFFKSDFEENGSMDNVCLFLNLANDPTIERIITPRLALTTAEFLAYQCEKHVLVILTDMSSYAEALREVSAAREEVPGRRGFPGYMYTDLATIYERAGRVEGRNGSITQIPILTMPNDDITHPIPDLTGYITEGQIYVDRQLHNRQIYPPINVLPSLSRLMKSAIGEGMTRKDHADVSNQLYACYAIGKDVQAMKAVVGEEALTSDDLLYLEFLQKFERNFIAQGPYENRTVFETLDIGWQLLRIFPKEMLKRIPQSTLSEFYPRDSAKH

SEQ ID NO: 903574 - protein, 494 aa, Homo sapiens
ARRRCWASRDRGDKMALRAMRGIVNGAAPELPVPTGGPAVGAREQALAVSRNYLSQPRLTYKTVSGVNGPLVILDHVKFPRYAEIVHLTLPDGTKRSGQVLEVSGSKAVVQVFEGTSGIDAKKTSCEFTGDILRTPVSEDMLGRVFNGSGKPIDRGPVVLAEDFLDIMGQPINPQCRIYPEEMIQTGISAIDGMNSIARGQKIPIFSAAGLPHNEIAAQICRQAGLVKKSKDVVDYSEENFAIVFAAMGVNMETARFFKSDFEENGSMDNVCLFLNLANDPTIERIITPRLALTTAEFLAYQCEKHVLVILTDMSSYAEALREVSAAREEVPGRRGFPGYMYTDLATIYERAGRVEGRNGSITQIPILTMPNDDITHPIPDLTGYITEGQIYVDRQLHNRQIYPPINVLPSLSRLMKSAIGEGMTRKDHADVSNQLYACYAIGKDVQAMKAVVGEEALTSDDLLYLEFLQKFERNFIAQGVSLCRPGWSTVVRS

SEQ ID NO: 903575 - protein, 605 aa, Homo sapiens
FERKEEVKQIHGDTVQNQLVVQGVELPSYLPLYPPAMDWIFQCISYHAPEALLTEMMERCKKLGNNALLLNSVMSAFRAEFIATRSMDFIGMIKECDESGFPKHLLFRSLGLNLALADPPESDRLQILNEAWKVITKLKNPQDYINCAEVWVEYTCKHFTKREVNTVLADVIKHMTPDRAFEDSYPQLQLIIKKVIAHFHDFSVLFSVEKFLPFLDMFQKESVRVEVCKCIMDAFIKHQQEPTKDPVILNALLHVCKTMHDSVNALTLEDEKRMLSYLINGFIKMVSFGRDFEQQLSFYVESRSMFCNLEPVLVQLIHSVNRLAMETRKVMKGNHSRKTAAFVRACVAYCFITIPSLAGIFTRLNLYLHSGQVALANQCLSQADAFFKAAISLVPEVPKMINIDGKMRPSESFLLEFLCNFFSTLLIVPDHPEHGVLFLVRELLNVIQDYTWEDNSDEKIRIYTCVLHLLSAMSQETYLYHIDKVDSNDSLYGGDSKFLAENNKLCETVMAQILEHLKTLAKDEALKRQSSLGLSFFNSILAHGDLRNNKLNQLSVNLWHLAQRHGCADTRTMVKTLEYIKKQSKQPDMTHLTELALRLPLQTRT

SEQ ID NO: 903576 - protein, 155 aa, Homo sapiens
MELIPRFYVEASILKCNKFLSKTGISECLPRLTCMIRGIGDPLVSVYARAYLCRALLTEMMERCKKLGNNALLLNSVMSAFRAEFIATRSMDFIGMIKECDESGFPKHLLFRSLGLNLALPYAIAYGKAKNRFLLYLLFRCQGITHCLNLCQMIL

SEQ ID NO: 903577 - protein, 976 aa, Homo sapiens
GRCGAASCPSQTWRPRGAGSGGVRMGSRADGPRTSGHVTGKMAVFPWHSRNRNYKAEFASCRLEAVPLEFGDYHPLKPITVTESKTKKVNRKGSTSSTSSSSSSSVVDPLSSVLDGTDPLSMFAATADPAALAAAMDSSRRKRDRDDNSVVGSDFEPWTNKRGEILARYTTTEKLSINLFMGSEKGKAGTATLAMSEKVRTRLEELDDFEEGSQKELLNLTQQDYVNRIEELNQSLKDAWASDQKVKALKIVIQESSCTSASFPCVWMSRSVLPDHFSPENANDTAKETCLNWFFKIASIRELIPRFYVEASILKCNKFLSKTGISECLPRLTCMIRGIGDPLVSVYARAYLCRVGMEVAPHLKETLNKNFFDFLLTFKQIHGDTVQNQLVVQGVELPSYLPLYPPAMDWIFQCISYHAPEALLTEMMERCKKLGNNALLLNSVMSAFRAEFIATRSMDFIGMIKECDESGFPKHLLFRSLGLNLALADPPESDRLQILNEAWKVITKLKNPQDYINCAEVWVEYTCKHFTKREVNTVLADVIKHMTPDRAFEDSYPQLQLIIKKVIAHFHDFSVLFSVEKFLPFLDMFQKESVRVEVCKCIMDAFIKHQQEPTKDPVILNALLHVCKTMHDSVNALTLEDEKRMLSYLINGFIKMVSFGRDFEQQLSFYVESRSMFCNLEPVLVQLIHSVNRLAMETRKVMKGNHSRKTAAFVRACVAYCFITIPSLAGIFTRLNLYLHSGQVALANQCLSQADAFFKAAISLVPEVPKMINIDGKMRPSESFLLEFLCNFFSTLLIVPDHPEHGVLFLVRELLNVIQDYTWEDNSDEKIRIYTCVLHLLSAMSQETYLYHIDKVDSNDSLYGGDSKFLAENNKLCETVMAQILEHLKTLAKDEALKRQSSLGLSFFNSILAHGDLRNNKLNQLSVNLWHLAQRHGCADTRTMVKTLEYIKKQSKQPDMTHLTELALRLPLQTRT

SEQ ID NO: 903578 - protein, 703 aa, Homo sapiens
IYESSAYLSYGKAKETCLNWFFKIASIRELIPRFYVEASILKCNKFLSKTGISECLPRLTCMIRGIGDPLVSVYARAYLCRVGMEVAPHLKETLNKNFFDFLLTFKQIHGDTVQNQLVVQGVELPSYLPLYPPAMDWIFQCISYHAPEALLTEMMERCKKLGNNALLLNSVMSAFRAEFIATRSMDFIGMIKECDESGFPKHLLFRSLGLNLALADPPESDRLQILNEAWKVITKLKNPQDYINCAEVWVEYTCKHFTKREVNTVLADVIKHMTPDRAFEDSYPQLQLIIKKVIAHFHDFSVLFSVEKFLPFLDMFQKESVRVEVCKCIMDAFIKHQQEPTKDPVILNALLHVCKTMHDSVNALTLEDEKRMLSYLINGFIKMVSFGRDFEQQLSFYVESRSMFCNLEPVLVQLIHSVNRLAMETRKVMKGNHSRKTAAFVRACVAYCFITIPSLAGIFTRLNLYLHSGQVALANQCLSQADAFFKAAISLVPEVPKMINIDGKMRPSESFLLEFLCNFFSTLLIVPDHPEHGVLFLVRELLNVIQDYTWEDNSDEKIRIYTCVLHLLSAMSQETYLYHIDKVDSNDSLYGGDSKFLAENNKLCETVMAQILEHLKTLAKDEALKRQSSLGLSFFNSILAHGDLRNNKLNQLSVNLWHLAQRHGCADTRTMVKTLEYIKKQSKQPDMTHLTELALRLPLQTRT

SEQ ID NO: 903579 - protein, 1011 aa, Homo sapiens
GRCGAASCPSQTWRPRGAGSGGVRMGSRADGPRTSGHVTGKMAVFPWHSRNRNYKAEFASCRLEAVPLEFGDYHPLKPITVTESKTKKVNRKGSTSSTSSSSSSSVVDPLSSVLDGTDPLSMFAATADPAALAAAMDSSRRKRDRDDNSVVGSDFEPWTNKRGEILARYTTTEKLSINLFMGSEKGKAGTATLAMSEKVRTRLEELDDFEEGSQKELLNLTQQDYVNRIEELNQSLKDAWASDQKVKALKIVIQCSKLLSDTSVIQFYPSKFVLITDILDTFGKLVYERIFSMCVDSRSVLPDHFSPENANDTAKETCLNWFFKIASIRELIPRFYVEASILKCNKFLSKTGISECLPRLTCMIRGIGDPLVSVYARAYLCRVGMEVAPHLKETLNKNFFDFLLTFKQIHGDTVQNQLVVQGVELPSYLPLYPPAMDWIFQCISYHAPEALLTEMMERCKKLGNNALLLNSVMSAFRAEFIATRSMDFIGMIKECDESGFPKHLLFRSLGLNLALADPPESDRLQILNEAWKVITKLKNPQDYINCAEVWVEYTCKHFTKREVNTVLADVIKHMTPDRAFEDSYPQLQLIIKKVIAHFHDFSVLFSVEKFLPFLDMFQKESVRVEVCKCIMDAFIKHQQEPTKDPVILNALLHVCKTMHDSVNALTLEDEKRMLSYLINGFIKMVSFGRDFEQQLSFYVESRSMFCNLEPVLVQLIHSVNRLAMETRKVMKGNHSRKTAAFVRACVAYCFITIPSLAGIFTRLNLYLHSGQVALANQCLSQADAFFKAAISLVPEVPKMINIDGKMRPSESFLLEFLCNFFSTLLIVPDHPEHGVLFLVRELLNVIQDYTWEDNSDEKIRIYTCVLHLLSAMSQETYLYHIDKVDSNDSLYGGDSKFLAENNKLCETVMAQILEHLKTLAKDEALKRQSSLGLSFFNSILAHGDLRNNKLNQLSVNLWHLAQRHGCADTRTMVKTLEYIKKQSKQPDMTHLTAEKRLPHPNPERSALLPLT

SEQ ID NO: 903580 - protein, 1028 aa, Homo sapiens
GRCGAASCPSQTWRPRGAGSGGVRMGSRADGPRTSGHVTGKMAVFPWHSRNRNYKAEFASCRLEAVPLEFGDYHPLKPITVTESKTKKVNRKGSTSSTSSSSSSSVVDPLSSVLDGTDPLSMFAATADPAALAAAMDSSRRKRDRDDNSVVGSDFEPWTNKRGEILARYTTTEKLSINLFMGSEKGKAGTATLAMSEKVRTRLEELDDFEEGSQKELLNLTQQDYVNRIEELNQSLKDAWASDQKVKALKIVIQCSKLLSDTSVIQFYPSKFVLITDILDTFGKLVYERIFSMCVDSRSVLPDHFSPENANDTAKETCLNWFFKIASIRELIPRFYVEASILKCNKFLSKTGISECLPRLTCMIRGIGDPLVSVYARAYLCRVGMEVAPHLKETLNKNFFDFLLTFKQIHGDTVQNQLVVQGVELPSYLPLYPPAMDWIFQCISYHAPEALLTEMMERCKKLGNNALLLNSVMSAFRAEFIATRSMDFIGMIKECDESGFPKHLLFRSLGLNLALADPPESDRLQILNEAWKVITKLKNPQDYINCAEVWVEYTCKHFTKREVNTVLADVIKHMTPDRAFEDSYPQLQLIIKKVIAHFHDFSVLFSVEKFLPFLDMFQKESVRVEVCKCIMDAFIKHQQEPTKDPVILNALLHVCKTMHDSVNALTLEDEKRMLSYLINGFIKMVSFGRDFEQQLSFYVESRSMFCNLEPVLVQLIHSVNRLAMETRKVMKGNHSRKTAAFVRACVAYCFITIPSLAGIFTRLNLYLHSGQVALANQCLSQADAFFKAAISLVPEVPKMINIDGKMRPSESFLLEFLCNFFSTLLIVPDHPEHGVLFLVRELLNVIQDYTWEDNSDEKIRIYTCVLHLLSAMSQETYLYHIDKVDSNDSLYGGDSKFLAENNKLCETVMAQILEHLKTLAKDEALKRQSSLGLSFFNSILAHGDLRNNKLNQLSVNLWHLAQRHGCADTRTMSWPSDSLCKQGPDPRAHPQAQGLWCQIQKDLLCCPELLRQFRFLIFLFFLHMYKLF

SEQ ID NO: 903581 - protein, 662 aa, Homo sapiens
MKEKAFRLRASSSLFAAEAKVCMHRPLLETWGGFSIQRYQVGMEVAPHLKETLNKNFFDFLLTFKQIHGDTVQNQLVVQGVELPSYLPLYPPAMDWIFQCISYHAPEALLTEMMERCKKLGNNALLLNSVMSAFRAEFIATRSMDFIGMIKECDESGFPKHLLFRSLGLNLALADPPESDRLQILNEAWKVITKLKNPQDYINCAEVWVEYTCKHFTKREVNTVLADVIKHMTPDRAFEDSYPQLQLIIKKVIAHFHDFSVLFSVEKFLPFLDMFQKESVRVEVCKCIMDAFIKHQQEPTKDPVILNALLHVCKTMHDSVNALTLEDEKRMLSYLINGFIKMVSFGRDFEQQLSFYVESRSMFCNLEPVLVQLIHSVNRLAMETRKVMKGNHSRKTAAFVRACVAYCFITIPSLAGIFTRLNLYLHSGQVALANQCLSQADAFFKAAISLVPEVPKMINIDGKMRPSESFLLEFLCNFFSTLLIVPDHPEHGVLFLVRELLNVIQDYTWEDNSDEKIRIYTCVLHLLSAMSQETYLYHIDKVDSNDSLYGGDSKFLAENNKLCETVMAQILEHLKTLAKDEALKRQSSLGLSFFNSILAHGDLRNNKLNQLSVNLWHLAQRHGCADTRTMVKTLEYIKKQSKQPDMTHLTELALRLPLQTRT

SEQ ID NO: 903582 - protein, 667 aa, Homo sapiens
MHDQRDRRPTSVGVCPCLPVPAEAKVCMHRPLLETWGGFSIQRYQVGMEVAPHLKETLNKNFFDFLLTFKQIHGDTVQNQLVVQGVELPSYLPLYPPAMDWIFQCISYHAPEALLTEMMERCKKLGNNALLLNSVMSAFRAEFIATRSMDFIGMIKECDESGFPKHLLFRSLGLNLALADPPESDRLQILNEAWKVITKLKNPQDYINCAEVWVEYTCKHFTKREVNTVLADVIKHMTPDRAFEDSYPQLQLIIKKVIAHFHDFSVLFSVEKFLPFLDMFQKESVRVEVCKCIMDAFIKHQQEPTKDPVILNALLHVCKTMHDSVNALTLEDEKRMLSYLINGFIKMVSFGRDFEQQLSFYVESRSMFCNLEPVLVQLIHSVNRLAMETRKVMKGNHSRKTAAFVRACVAYCFITIPSLAGIFTRLNLYLHSGQVALANQCLSQADAFFKAAISLVPEVPKMINIDGKMRPSESFLLEFLCNFFSTLLIVPDHPEHGVLFLVRELLNVIQDYTWEDNSDEKIRIYTCVLHLLSAMSQETYLYHIDKVDSNDSLYGGDSKFLAENNKLCETVMAQILEHLKTLAKDEALKRQSSLGLSFFNSILAHGDLRNNKLNQLSVNLWHLAQRHGCADTRTMVKTLEYIKKQSKQPDMTHLTELALRLPLQTRT

SEQ ID NO: 903583 - protein, 452 aa, Homo sapiens
WFLFPAQKREVNTVLADVIKHMTPDRAFEDSYPQLQLIIKKVIAHFHDFSVLFSVEKFLPFLDMFQKESVRVEVCKCIMDAFIKHQQEPTKDPVILNALLHVCKTMHDSVNALTLEDEKRMLSYLINGFIKMVSFGRDFEQQLSFYVESRSMFCNLEPVLVQLIHSVNRLAMETRKVMKGNHSRKTAAFVRACVAYCFITIPSLAGIFTRLNLYLHSGQVALANQCLSQADAFFKAAISLVPEVPKMINIDGKMRPSESFLLEFLCNFFSTLLIVPDHPEHGVLFLVRELLNVIQDYTWEDNSDEKIRIYTCVLHLLSAMSQETYLYHIDKVDSNDSLYGGDSKFLAENNKLCETVMAQILEHLKTLAKDEALKRQSSLGLSFFNSILAHGDLRNNKLNQLSVNLWHLAQRHGCADTRTMVKTLEYIKKQSKQPDMTHLTELALRLPLQTRT

SEQ ID NO: 903584 - protein, 304 aa, Homo sapiens
SHYLSPHAYTTHTKKLYSVNRLAMETRKVMKGNHSRKTAAFVRACVAYCFITIPSLAGIFTRLNLYLHSGQVALANQCLSQADAFFKAAISLVPEVPKMINIDGKMRPSESFLLEFLCNFFSTLLIVPDHPEHGVLFLVRELLNVIQDYTWEDNSDEKIRIYTCVLHLLSAMSQETYLYHIDKVDSNDSLYGGDSKFLAENNKLCETVMAQILEHLKTLAKDEALKRQSSLGLSFFNSILAHGDLRNNKLNQLSVNLWHLAQRHGCADTRTMVKTLEYIKKQSKQPDMTHLTELALRLPLQTRT

SEQ ID NO: 903585 - protein, 518 aa, Homo sapiens
GRCGAASCPSQTWRPRGAGSGGVRMGSRADGPRTSGHVTGKMAVFPWHSRNRNYKAEFASCRLEAVPLEFGDYHPLKPITVTESKTKKVNRKGSTSSTSSSSSSSVVDPLSSVLDGTDPLSMFAATADPAALAAAMDSSRRKRDRDDNSVVGSDFEPWTNKRGEILARYTTTEKLSINLFMGSEKGKAGTATLAMSEKVRTRLEELDDFEEGSQKELLNLTQQDYVNRIEELNQSLKDAWASDQKVKALKIVIQCSKLLSDTSVIQFYPSKFVLITDILDTFGKLVYERIFSMCVDSRSVLPDHFSPENANDTAKETCLNWFFKIASIRELIPRFYVEASILKCNKFLSKTGISECLPRLTCMIRGIGDPLVSVYARAYLCRVGMEVAPHLKETLNKNFFDFLLTFKQIHGDTVQNQLVVQGVELPSYLPLYPPAMDWIFQCISYHAPEALLTEMMERCKKLGNNALLLNSVMSAFRAEFIATRSMDFIGMIKECDESGFPKHLLVRALELKEGLSDI

SEQ ID NO: 903586 - protein, 512 aa, Homo sapiens
GRCGAASCPSQTWRPRGAGSGGVRMGSRADGPRTSGHVTGKMAVFPWHSRNRNYKAEFASCRLEAVPLEFGDYHPLKPITVTESKTKKVNRKGSTSSTSSSSSSSVVDPLSSVLDGTDPLSMFAATADPAALAAAMDSSRRKRDRDDNSVVGSDFEPWTNKRGEILARYTTTEKLSINLFMGSEKGKAGTATLAMSEKVRTRLEELDDFEEGSQKELLNLTQQDYVNRIEELNQSLKDAWASDQKVKALKIVIQCSKLLSDTSVIQFYPSKFVLITDILDTFGKLVYERIFSMCVDSRSVLPDHFSPENANDTAKETCLNWFFKIASIRELIPRFYVEASILKCNKFLSKTGISECLPRLTCMIRGIGDPLVSVYARAYLCRALLTEMMERCKKLGNNALLLNSVMSAFRAEFIATRSMDFIGMIKECDESGFPKHLLFRSLGLNLALADPPESDRLQILNEAWKVITKLKNPQDYIHWCPKCGWEFTLEHFTNEKGIRWGMVQPDPNPVGN

SEQ ID NO: 903587 - protein, 417 aa, Homo sapiens
GRCGAASCPSQTWRPRGAGSGGVRMGSRADGPRTSGHVTGKMAVFPWHSRNRNYKAEFASCRLEAVPLEFGDYHPLKPITVTESKTKKVNRKGSTSSTSSSSSSSVVDPLSSVLDGTDPLSMFAATADPAALAAAMDSSRRKRDRDDNSVVGSDFEPWTNKRGEILARYTTTEKLSINLFMGSEKGKAGTATLAMSEKVRTRLEELDDFEEGSQKELLNLTQQDYVNRIEELNQSLKDAWASDQKVKALKIVIQCSKLLSDTSVIQFYPSKFVLITDILDTFGKLVYERIFSMCVDSRSVLPDHFSPENANDTAKETCLNWFFKIASIRELIPRFYVEASILKCNKFLSKTGISECLPRLTCMIRGIGDPLVSVFMGIRSRTSWWSKEWSSHLTSPCTRLPWTGSSSASPTMPPRLC

SEQ ID NO: 903588 - protein, 362 aa, Homo sapiens
GRCGAASCPSQTWRPRGAGSGGVRMGSRADGPRTSGHVTGKMAVFPWHSRNRNYKAEFASCRLEAVPLEFGDYHPLKPITVTESKTKKVNRKGSTSSTSSSSSSSVVDPLSSVLDGTDPLSMFAATADPAALAAAMDSSRRKRDRDDNSVVGSDFEPWTNKRGEILARYTTTEKLSINLFMGSEKGKAGTATLAMSEKVRTRLEELDDFEEGSQKELLNLTQQDYVNRIEELNQSLKDAWASDQKVKALKIVIQCSKLLSDTSVIQFYPSKFVLITDILDTFGKLVYERIFSMCVDSRSVLPGNVAAVPGVSFCPGVRTRRLLLSQDSLKLDKGFNFGCVKVKETPLKISDHLSLLKTLEGF

SEQ ID NO: 903589 - protein, 1004 aa, Homo sapiens
GRCGAASCPSQTWRPRGAGSGGVRMGSRADGPRTSGHVTGKMAVFPWHSRNRNYKAEFASCRLEAVPLEFGDYHPLKPITVTESKTKKVNRKGSTSSTSSSSSSSVVDPLSSVLDGTDPLSMFAATADPAALAAAMDSSRRKRDRDDNSVVGSDFEPWTNKRGEILARYTTTEKLSINLFMGSEKGKAGTATLAMSEKVRTRLEELDDFEEGSQKELLNLTQQDYVNRIEELNQSLKDAWASDQKVKALKIVIQCSKLLSDTSVIQFYPSKFVLITDILDTFGKLVYERIFSMCVDSRSVLPDHFSPENANDTAKETCLNWFFKIASIRELIPRFYVEASILKCNKFLSKTGISECLPRLTCMIRGIGDPLVSVYARAYLCRVGMEVAPHLKETLNKNFFDFLLTFKQIHGDTVQNQLVVQGVELPSYLPLYPPAMDWIFQCISYHAPEALLTEMMERCKKLGNNALLLNSVMSAFRAEFIATRSMDFIGMIKECDESGFPKHLLFRSLGLNLALADPPESDRLQILNEAWKVITKLKNPQDYINCAEVWVEYTCKHFTKREVNTVLADVIKHMTPDRAFEDSYPQLQLIIKKVIAHFHDFSVLFSVEKFLPFLDMFQKESVRVEVCKCIMDAFIKHQQEPTKDPVILNALLHVCKTMHDSVNALTLEDEKRMLSYLINGFIKMVSFGRDFEQQLSFYVESRSMFCNLEPVLVQLIHSVNRLAMETRKVMKGNHSRKTAAFVRACVAYCFITIPSLAGIFTRLNLYLHSGQVALANQCLSQADAFFKAAISLVPEVPKMINIDGKMRPSESFLLEFLCNFFSTLLIVPDHPEHGVLFLVRELLNVIQDYTWEDNSDEKIRIYTCVLHLLSAMSQETYLYHIDKVDSNDSLYGGDSKFLAENNKLCETVMAQILEHLKTLAKDEALKRQSSLGLSFFNSILAHGDLRNNKLNQLSVNLWHLAQRHGCADTRTMVKTLEYIKKQSKQPDMTHLTELALRLPLQTRT

SEQ ID NO: 903590 - protein, 1004 aa, Homo sapiens; identical to SEQ ID NO: 903589

SEQ ID NO: 903591 - protein, 1004 aa, Homo sapiens; identical to SEQ ID NO: 903589

SEQ ID NO: 903592 - protein, 937 aa, Homo sapiens
GRCGAASCPSQTWRPRGAGSGGVRMGSRADGPRTSGHVTGKMAVFPWHSRNRNYKAEFASCRLEAVPLEFGDYHPLKPITVTESKTKKVNRKGSTSSTSSSSSSSVVDPLSSVLDGTDPLSMFAATADPAALAAAMDSSRRKRDRDDNSVVGSDFEPWTNKRGEILARYTTTEKLSINLFMGSEKGKAGTATLAMSEKVRTRLEELDDFEEGSQKELLNLTQQDYVNRIEELNQSLKDAWASDQKVKALKIVIQCSKLLSDTSVIQFYPSKFVLITDILDTFGKLVYERIFSMCVDSRSVLPDHFSPENANDTAKETCLNWFFKIASIRELIPRFYVEASILKCNKFLSKTGISECLPRLTCMIRGIGDPLVSVYARAYLCRALLTEMMERCKKLGNNALLLNSVMSAFRAEFIATRSMDFIGMIKECDESGFPKHLLFRSLGLNLALADPPESDRLQILNEAWKVITKLKNPQDYINCAEVWVEYTCKHFTKREVNTVLADVIKHMTPDRAFEDSYPQLQLIIKKVIAHFHDFSVLFSVEKFLPFLDMFQKESVRVEVCKCIMDAFIKHQQEPTKDPVILNALLHVCKTMHDSVNALTLEDEKRMLSYLINGFIKMVSFGRDFEQQLSFYVESRSMFCNLEPVLVQLIHSVNRLAMETRKVMKGNHSRKTAAFVRACVAYCFITIPSLAGIFTRLNLYLHSGQVALANQCLSQADAFFKAAISLVPEVPKMINIDGKMRPSESFLLEFLCNFFSTLLIVPDHPEHGVLFLVRELLNVIQDYTWEDNSDEKIRIYTCVLHLLSAMSQETYLYHIDKVDSNDSLYGGDSKFLAENNKLCETVMAQILEHLKTLAKDEALKRQSSLGLSFFNSILAHGDLRNNKLNQLSVNLWHLAQRHGCADTRTMVKTLEYIKKQSKQPDMTHLTELALRLPLQTRT

SEQ ID NO: 903593 - protein, 958 aa, Homo sapiens
GRCGAASCPSQTWRPRGAGSGGVRMGSRADGPRTSGHVTGKMAVFPWHSRNRNYKAEFASCRLEAVPLEFGDYHPLKPITVTESKTKKVNRKGSTSSTSSSSSSSVVDPLSSVLDGTDPLSMFAATADPAALAAAMDSSRRKRDRDDNSVVGSDFEPWTNKRGEILARYTTTEKLSINLFMGSEKGKAGTATLAMSEKVRTRLEELDDFEEGSQKELLNLTQQDYVNRIEELNQSLKDAWASDQKVKALKIVIQCSKLLSDTSVIQFYPSKFVLITDILDTFGKLVYERIFSMCVDSRSVLPDHFSPENANDTAKETCLNWFFKIASIRELIPRFYVEASILKCNKFLSKTGISECLPRLTCMIRGIGDPLVSVYARAYLCRVGMEVAPHLKETLNKNFFDFLLTFKQIHGDTVQNQLVVQGVELPSYLPLYPPAMDWIFQCISYHAPEALLTEMMERCKKLGNNALLLNSVMSAFRAEFIATRSMDFIGMIKECDESGFPKHLLFRSLGLNLALADPPESDRLQILNEAWKVITKLKNPQDYINCAEVWVEYTCKHFTKREVNTVLADVIKHMTPDRAFEDSYPQLQLIIKKVIAHFHDFSVLFSVEKFLPFLDMFQKESVRVEVCKCIMDAFIKHQQEPTKDPVILNALLHVCKTMHDSVNALTLEDEKRMLSYLINGFIKMVSFGRDFEQQLSFYVESRSMFCNLEPVLVQLIHSVNRLAMETRKVMKGNHSRKTAAFVRACVAYCFITIPSLAGIFTRLNLYLHSGQVALANQCLSQADAFFKAAISLVPEVPKMINIDGKMRPSESFLLEFLCNFFSTLLIVPDHPEHGVLFLVRELLNVIQDYTWEDNSDEKIRIYTCVLHLLSAMSQETYLYHIDKVDSNDSLYGGDSKFLAENNKLCETVMAQILEHLKTLAKDEVGALCCPPPAPCSESTSFQGGSTLVHSRKETMSCE

SEQ ID NO: 903594 - protein, 756 aa, Homo sapiens
MLEAVAKNVGRRARVPGLNSNSYICLLCALDHFSPENANDTAKETCLNWFFKIASIRELIPRFYVEASILKCNKFLSKTGISECLPRLTCMIRGIGDPLVSVYARAYLCRQRPKCVCIAHCLKPGEGFSIQRYQVGMEVAPHLKETLNKNFFDFLLTFKQIHGDTVQNQLVVQGVELPSYLPLYPPAMDWIFQCISYHAPEALLTEMMERCKKLGNNALLLNSVMSAFRAEFIATRSMDFIGMIKECDESGFPKHLLFRSLGLNLALADPPESDRLQILNEAWKVITKLKNPQDYINCAEVWVEYTCKHFTKREVNTVLADVIKHMTPDRAFEDSYPQLQLIIKKVIAHFHDFSVLFSVEKFLPFLDMFQKESVRVEVCKCIMDAFIKHQQEPTKDPVILNALLHVCKTMHDSVNALTLEDEKRMLSYLINGFIKMVSFGRDFEQQLSFYVESRSMFCNLEPVLVQLIHSVNRLAMETRKVMKGNHSRKTAAFVRACVAYCFITIPSLAGIFTRLNLYLHSGQVALANQCLSQADAFFKAAISLVPEVPKMINIDGKMRPSESFLLEFLCNFFSTLLIVPDHPEHGVLFLVRELLNVIQDYTWEDNSDEKIRIYTCVLHLLSAMSQETYLYHIDKVDSNDSLYGGDSKFLAENNKLCETVMAQILEHLKTLAKDEALKRQSSLGLSFFNSILAHGDLRNNKLNQLSVNLWHLAQRHGCADTRTMVKTLEYIKKQSKQPDMTHLTELALRLPLQTRT

SEQ ID NO: 903595 - protein, 492 aa, Homo sapiens
GRCGAASCPSQTWRPRGAGSGGVRMGSRADGPRTSGHVTGKMAVFPWHSRNRNYKAEFASCRLEAVPLEFGDYHPLKPITVTESKTKKVNRKGSTSSTSSSSSSSVVDPLSSVLDGTDPLSMFAATADPAALAAAMDSSRRKRDRDDNSVVGSDFEPWTNKRGEILARYTTTEKLSINLFMGSEKGKAGTATLAMSEKVRTRLEELDDFEEGSQKELLNLTQQDYVNRIEELNQSLKDAWASDQKVKALKIVIQCSKLLSDTSVIQFYPSKFVLITDILDTFGKLVYERIFSMCVDSRSVLPDHFSPENANDTAKETCLNWFFKIASIRELIPRFYVEASILKCNKFLSKTGISECLPRLTCMIRGIGDPLVSVYARAYLCRVGMEVAPHLKETLNKNFFDFLLTFKQIHGDTVQNQLVVQGVELPSYLPLYPPAMDWIFQCISYHAPEALLTEMMERYEPGDVPLPHRQSGLQRQPLRGRLQVPGRKQQAV

SEQ ID NO: 903596 - protein, 548 aa, Homo sapiens
GRCGAASCPSQTWRPRGAGSGGVRMGSRADGPRTSGHVTGKMAVFPWHSRNRNYKAEFASCRLEAVPLEFGDYHPLKPITVTESKTKKVNRKGSTSSTSSSSSSSVVDPLSSVLDGTDPLSMFAATADPAALAAAMDSSRRKRDRDDNSVVGSDFEPWTNKRGEILARYTTTEKLSINLFMGSEKGKAGTATLAMSEKVRTRLEELDDFEEGSQKELLNLTQQDYVNRIEELNQSLKDAWASDQKVKALKIVIQCSKLLSDTSVIQFYPSKFVLITDILDTFGKLVYERIFSMCVDSRSVLPDHFSPENANDTAKETCLNWFFKIASIRELIPRFYVEASILKCNKFLSKTGISECLPRLTCMIRGIGDPLVSVYARAYLCRVGMEVAPHLKETLNKNFFDFLLTFKQIHGDTVQNQLVVQGVELPSYLPLYPPAMDWIFQCISYHAPEALLTEMMERCKKLGNNALLLNSVMSAFRAEFIATRSMDFIGMIKECDESGFPKHLLFRSLGLNLALPYAIAYGKAIGQKMNHVRNRKSYLWIVARDPLE

SEQ ID NO: 903597 - protein, 473 aa, Homo sapiens
GRCGAASCPSQTWRPRGAGSGGVRMGSRADGPRTSGHVTGKMAVFPWHSRNRNYKAEFASCRLEAVPLEFGDYHPLKPITVTESKTKKVNRKGSTSSTSSSSSSSVVDPLSSVLDGTDPLSMFAATADPAALAAAMDSSRRKRDRDDNSVVGSDFEPWTNKRGEILARYTTTEKLSINLFMGSEKGKAGTATLAMSEKVRTRLEELDDFEEGSQKELLNLTQQDYVNRIEELNQSLKDAWASDQKVKALKIVIQCSKLLSDTSVIQFYPSKFVLITDILDTFGKLVYERIFSMCVDSRSVLPDHFSPENANDTAKETCLNWFFKIASIRELIPRFYVEASILKCNKFLSKTGISECLPRLTCMIRGIGDPLVSVYARAYLCRVGMEVAPHLKETLNKNFFDFLLTFKQIHGDTVQNQLVVQGVELPSYLPLYPPAMDWIFQCISYHAPEALLTEMMERCKKLGNNALLLNSTM

SEQ ID NO: 903598 - protein, 122 aa, Homo sapiens
MAELALELRHDLPQSQHCPQHLCGARPEPQCKAVNLPFLFQALKRQSSLGLSFFNSILAHGDLRNNKLNQLSVNLWHLAQRHGCADTRTMVKTLEYIKKQSKQPDMTHLTELALRLPLQTRT

SEQ ID NO: 903599 - protein, 111 aa, Homo sapiens
MADSLEPWAPRIMNQKGDGSFFFLIGENARIHQEAKQTTRHDSSDGAGPQTPSANKDLTPGPIPRLRDSGAKSRKICSAALNSYGNLGFSFFFSFYICTNCFKLWPLSRLF

SEQ ID NO: 903600 - protein, 196 aa, Homo sapiens
GRCGAASCPSQTWRPRGAGSGGVRMGSRADGPRTSGHVTGKMAVFPWHSRNRNYKAEFASCRLEAVPLEFGDYHPLKPITVTESKTKKVNRKGSTSSTSSSSSSSVVDPLSSVLDGTDPLSMFAATADPAALAAAMDSSRRKRDRDDNSVVGSDFEPWTNKRGEILARYTTTEKLSICWDYRCEPLQPSLRSCFCG

SEQ ID NO: 903601 - protein, 77 aa, Homo sapiens
AAAYYYYYCSNSSFKRCTGHENTLILSWRFCICFSSFTPIFLPTAANDNVSVQVCPPAHPRMPLTFFSSCYLDHAVQ

SEQ ID NO: 903602 - protein, 532 aa, Homo sapiens
MWFLQMAQLSTTISQAQRATAFHFFTSKRFLPAPLLVPLGVIHIHRCGLTKRPDARRRRVAGAQGREPAISLPGDRAAGARATRTRGPGPAPKMPAIAVLAAAAAAWCFLQVESRHLDALAGGAGPNHGNFLDNDQWLSTVSQYDRDKYWNRFRDDDYFRNWNPNKPFDQALDPSKDPCLKVKCSPHKVCVTQDYQTALCVSRKHLLPRQKKGNVAQKHWVGPSNLVKCKPCPVAQSAMVCGSDGHSYTSKCKLEFHACSTGKSLATLCDGPCPCLPEPEPPKHKAERSACTDKELRNLASRLKDWFGALHEDANRVIKPTSSNTAQGRFDTSILPICKDSLGWMFNKLDMNYDLLLDPSEINAIYLDKYEPCIKPLFNSCDSFKDGKLSNNEWCYCFQKPGGLPCQNEMNRIQKLSKGKSLLGAFIPRCNEEGYYKATQCHGSTGQCWCVDKYGNELAGSRKQGAVSCEEEQETSGDFGSGGSVVLLDDLEYERELGPKDKEGKLRVHTRAVTEDDEDEDDDKEDEVGYIW

SEQ ID NO: 903603 - protein, 405 aa, Homo sapiens
SGLVRHHQSQSALAAHRCHQNLLSLHHQDDYFRNWNPNKPFDQALDPSKDPCLKVKCSPHKVCVTQDYQTALCVSRKHLLPRQKKGNVAQKHWVGPSNLVKCKPCPVAQSAMVCGSDGHSYTSKCKLEFHACSTGKSLATLCDGPCPCLPEPEPPKHKAERSACTDKELRNLASRLKDWFGALHEDANRVIKPTSSNTAQGRFDTSILPICKDSLGWMFNKLDMNYDLLLDPSEINAIYLDKYEPCIKPLFNSCDSFKDGKLSNNEWCYCFQKPGGLPCQNEMNRIQKLSKGKSLLGAFIPRCNEEGYYKATQCHGSTGQCWCVDKYGNELAGSRKQGAVSCEEEQETSGDFGSGGSVVLLDDLEYERELGPKDKEGKLRVHTRAVTEDDEDEDDDKEDEVGYIW

SEQ ID NO: 903604 - protein, 532 aa, Homo sapiens; identical to SEQ ID NO: 903602

SEQ ID NO: 903605 - protein, 303 aa, Homo sapiens
FLLLPLTKTLHQQKGHDFLKAQCKLEFHACSTGKSLATLCDGPCPCLPEPEPPKHKAERSACTDKELRNLASRLKDWFGALHEDANRVIKPTSSNTAQGRFDTSILPICKDSLGWMFNKLDMNYDLLLDPSEINAIYLDKYEPCIKPLFNSCDSFKDGKLSNNEWCYCFQKPGGLPCQNEMNRIQKLSKGKSLLGAFIPRCNEEGYYKATQCHGSTGQCWCVDKYGNELAGSRKQGAVSCEEEQETSGDFGSGGSVVLLDDLEYERELGPKDKEGKLRVHTRAVTEDDEDEDDDKEDEVGYIW

SEQ ID NO: 903606 - protein, 464 aa, Homo sapiens
METEQPEETFPNTETNGEFGKRPAEDMEEEQAFKRSRNTDEMVELRILLQSKNAGAVIGKGGKNIKALRTDYNASVSVPDSSGPERILSISADIETIGEILKKIIPTLEEGLQLPSPTATSQLPLESDAVECLNYQHYKGSDFDCELRLLIHQSLAGGIIGVKGAKIKELRENTQTTIKLFQECCPHSTDRVVLIGGKPDRVVECIKIILDLISESPIKGRAQPYDPNFYDETYDYGGFTMMFDDRRGRPVGFPMRGRGGFDRMPPGRGGRPMPPSRRDYDDMSPRRGPPPPPPGRGGRGGSRARNLPLPPPPPPRGGDLMAYDRRGRPGDRYDGMVGFSADETWDSAIDTWSPSEWQMAYEPQGGSGYDYSYAGGRGSYGDLGGPIITTQVTIPKDLAGSIIGKGGQRIKQIRHESGASIKIDEPLEGSEDRIITITGTQDQIQNAQYLLQNSVKQYADVEGF

SEQ ID NO: 903607 - protein, 464 aa, Homo sapiens; identical to SEQ ID NO: 903606

SEQ ID NO: 903608 - protein, 464 aa, Homo sapiens; identical to SEQ ID NO: 903606

SEQ ID NO: 903609 - protein, 464 aa, Homo sapiens; identical to SEQ ID NO: 903606

SEQ ID NO: 903610 - protein, 464 aa, Homo sapiens; identical to SEQ ID NO: 903606

SEQ ID NO: 903611 - protein, 401 aa, Homo sapiens
METEQPEETFPNTETNGEFGKRPAEDMEEEQAFKRSRNTDEMVELRILLQSKNAGAVIGKGGKNIKALRTDYNASVSVPDSSGPERILSISADIETIGEILKKIIPTLEEGLQLPSPTATSQLPLESDAVECLNYQHYKGSDFDCELRLLIHQSLAGGIIGVKGAKIKELRENTQTTIKLFQECCPHSTDRVVLIGGKPDRVVECIKIILDLISESPIKGRAQPYDPNFYDETYDYGGFTMMFDDRRGRPVGFPMRGRGGFDRMPPGRGGRPMPPSRRDYDDMSPRRGPPPPPPGRGGRGGSRARNLPLPPPPPPRGGDLMAYDRRGRPGDRYDGMVGFSADETWDSAIDTWSPSEWQMAYEPQGGSGYDYSYAGGRGSYGDLGGPIITTQVTIPKDCKYL

SEQ ID NO: 903612 - protein, 463 aa, Homo sapiens
METEQPEETFPNTETNGEFGKRPAEDMEEEQAFKRSRNTDEMVELRILLQSKNAGAVIGKGGKNIKALRTDYNASVSVPDSSGPERILSISADIETIGEILKKIIPTLEEGLQLPSPTATSQLPLESDAVECLNYQHYKGSDFDCELRLLIHQSLAGGIIGVKGAKIKELRENTQTTIKLFQECCPHSTDRVVLIGGKPDRVVECIKIILDLISESPIKGRAQPYDPNFYDETYDYGGFTMMFDDRRGRPVGFPMRGRGGFDRMPPGRGGRPMPPSRRDYDDMSPRRGPPPPPPGRGGRGGSRARNLPLPPPPPPRGGDLMAYDRRGRPGDRYDGMVGFSADETWDSAIDTWSPSEWQMAYEPQGGSGYDYSYAGGRGSYGDLGGPIITTQVTIPKDLAGSIIGKGGQRIKQIRHESGASIKIDEPLEGSEDRIITITGTQDQIQNAQYLLQNSVKQYSGKFF

SEQ ID NO: 903613 - protein, 456 aa, Homo sapiens
METEQPEETFPNTETNGEFGKRPAEDMEEEQAFKRSRNTDEMVELRILLQSKNAGAVIGKGGKNIKALRTDYNASVSVPDSSGPERILSISADIETIGEILKKIIPTLEEGLQLPSPTATSQLPLESDAVECLNYQHYKGSDFDCELRLLIHQSLAGGIIGVKGAKIKELRENTQTTIKLFQECCPHSTDRVVLIGGKPDRVVECIKIILDLISESPIKGRAQPYDPNFYDETYDYGGFTMMFDDRRGRPVGFPMRGRGGFDRMPPGRGGRPMPPSRRDYDDMSPRRGPPPPPPGRGGRGGSRARNLPLPPPPPPRGGDLMAYDRRGRPGDRYDGMVGFSADETWDSAIDTWSPSEWQMAYEPQGGSGYDYSYAGGRGSYGDLGGPIITTQVTIPKDLAGSIIGKGGHESGASIKIDEPLEGSEDRIITITGTQDQIQNAQYLLQNSVKQYSGKFF

SEQ ID NO: 903614 - protein, 410 aa, Homo sapiens
METEQPEETFPNTETNGEFGKRPAEDMEEEQAFKRSRNTDEMVELRILLQSKNAGAVIGKGGKNIKALRTDYNASVSVPDSSGPERILSISADIETIGEILKKIIPTLEEGLQLPSPTATSQLPLESDAVECLNYQHYKGSDFDCELRLLIHQSLAGGIIGVKGAKIKELRENTQTTIKLFQECCPHSTDRVVLIGGKPDRVVECIKIILDLISESPIKGRAQPYDPNFYDETYDYGGFTMMFDDRRGRPVGFPLPPPPPPRGGDLMAYDRRGRPGDRYDGMVGFSADETWDSAIDTWSPSEWQMAYEPQGGSGYDYSYAGGRGSYGDLGGPIITTQVTIPKDLAGSIIGKGGQRIKQIRHESGASIKIDEPLEGSEDRIITITGTQDQIQNAQYLLQNSVKQYADVEGF

SEQ ID NO: 903615 - protein, 409 aa, Homo sapiens
METEQPEETFPNTETNGEFGKRPAEDMEEEQAFKRSRNTDEMVELRILLQSKNAGAVIGKGGKNIKALRTDYNASVSVPDSSGPERILSISADIETIGEILKKIIPTLEEGLQLPSPTATSQLPLESDAVECLNYQHYKGSDFDCELRLLIHQSLAGGIIGVKGAKIKELRENTQTTIKLFQECCPHSTDRVVLIGGKPDRVVECIKIILDLISESPIKGRAQPYDPNFYDETYDYGGFTMMFDDRRGRPVGFPLPPPPPPRGGDLMAYDRRGRPGDRYDGMVGFSADETWDSAIDTWSPSEWQMAYEPQGGSGYDYSYAGGRGSYGDLGGPIITTQVTIPKDLAGSIIGKGGQRIKQIRHESGASIKIDEPLEGSEDRIITITGTQDQIQNAQYLLQNSVKQYSGKFF

SEQ ID NO: 903616 - protein, 464 aa, Homo sapiens; identical to SEQ ID NO: 903606

SEQ ID NO: 903617 - protein, 464 aa, Homo sapiens; identical to SEQ ID NO: 903606

SEQ ID NO: 903618 - protein, 464 aa, Homo sapiens; identical to SEQ ID NO: 903606

SEQ ID NO: 903619 - protein, 464 aa, Homo sapiens; identical to SEQ ID NO: 903606

SEQ ID NO: 903620 - protein, 463 aa, Homo sapiens; identical to SEQ ID NO: 903612

SEQ ID NO: 903621 - protein, 401 aa, Homo sapiens; identical to SEQ ID NO: 903611

SEQ ID NO: 903622 - protein, 401 aa, Homo sapiens
METEQPEETFPNTETNGEFGKRPAEDMEEEQAFKRSRNTDEMVELRILLQSKNAGAVIGKGGKNIKALRTDYNASVSVPDSSGPERILSISADIETIGEILKKIIPTLEEGLQLPSPTATSQLPLESDAVECLNYQHYKGSDFDCELRLLIHQSLAGGIIGVKGAKIKELRENTQTTIKLFQECCPHSTDRVVLIGGKPDRVVECIKIILDLISESPIKGRAQPYDPNFYDETYDYGGFTMMFDDRRGRPVGFPMRGRGGFDRMPPGRGGRPMPPSRRDYDDMSPRRGPPPPPPGRGGRGGSRARNLPLPPPPPPRGGDLMAYDRRGRPGDRYDGMVGFSADETWDSAIDTWSPSEWQMAYEPQGGSGYDYSYAGGRGSYGDLGGPIITTQVTIPKDIWLI

SEQ ID NO: 903623 - protein, 341 aa, Homo sapiens
METEQPEETFPNTETNGEFGKRPAEDMEEEQAFKRSRNTDEMVELRILLQSKNAGAVIGKGGKNIKALRTDYNASVSVPDSSGPERILSISADIETIGEILKKIIPTLEEGLQLPSPTATSQLPLESDAVECLNYQHYKGSDFDCELRLLIHQSLAGGIIGVKGAKIKELRENTQTTIKLFQECCPHSTDRVVLIGGKPDRVVECIKIILDLISESPSKGSCNDYDPINDESYAYAWLHTDCLRTVREPEGITTGEKTEIRDEETEQESQAKTQSDAQTNAHERTPPTQTKTGEHNEDQANDKRTPAPTQTNKKKRQPNDQHREQRTQTYNEKRQKTREEN

SEQ ID NO: 903624 - protein, 178 aa, Homo sapiens
METEQPEETFPNTETNGEFGKRPAEDMEEEQAFKRSRNTDEMVELRILLQSKNAGAVIGKGGKNIKALRTDYNASVSVPDSSGPERILSISADIETIGEILKKIIPTLEEGLQLPSPTATSQLPLESDAVECLNYQHYKGSDFDCELRLLIHQSLAGGIIGVKGHFLYSVGNLTIPRP

SEQ ID NO: 903625 - protein, 78 aa, Homo sapiens
RGRGACARFLSSSDRLRRRGSGGTAVSRGEEPGWGSGSWRLLQHWGVSCWSDPERFSSALQGYIITDWCARLIKEYGN

SEQ ID NO: 903626 - protein, 78 aa, Homo sapiens; identical to SEQ ID NO: 903625

SEQ ID NO: 903627 - protein, 463 aa, Homo sapiens; identical to SEQ ID NO: 903612

SEQ ID NO: 903628 - protein, 464 aa, Homo sapiens; identical to SEQ ID NO: 903606

SEQ ID NO: 903629 - protein, 464 aa, Homo sapiens; identical to SEQ ID NO: 903606

SEQ ID NO: 903630 - protein, 143 aa, Homo sapiens
METEQPEETFPNTETNGEFGKRPAEDMEEEQAFKRSRNTDEMVELRILLQSKNAGAVIGKGGKNIKALRTDYNASVSVPDSSGPERILSISADIETIGEILKKIIPTLEEGLQLPSPTATSQLPLESDAVECLNVCHSAIEPH

SEQ ID NO: 903631 - protein, 446 aa, Homo sapiens
METEQPEETFPNTETNGEFGKRPAEDMEEEQAFKRSRNTDEMVELRILLQSKNAGAVIGKGGKNIKALRTDYNASVSVPDSSGPERILSISADIETIGEILKKIIPTLEEGLQLPSPTATSQLPLESDAVECLNYQHYKGSDFDCELRLLIHQSLAGGIIGVKGAKIKELRENTQTTIKLFQECCPHSTDRVVLIGGKPDRVVECIKIILDLISESPIKGRAQPYDPNFYDETYDYGGFTMMFDDRRGRPVGFPMRGRGGFDRMPPGRGGRPMPPSRRDYDDMSPRRGPPPPPPGRGGRGGSRARNLPLPPPPPPRGGDLMAYDRRGRPGDRYDGMVGFSADETWDSAIDTWSPSEWQMAYEPQGGSGYDYSYAGGRGSYGDLGGPIITTQVTIPKDLAGSIIGKGGQRIKQIRHESGASIKQDQIQNAQYLLQNSVKQYADVEGF

SEQ ID NO: 903632 - protein, 464 aa, Homo sapiens; identical to SEQ ID NO: 903606

SEQ ID NO: 903633 - protein, 464 aa, Homo sapiens; identical to SEQ ID NO: 903606

SEQ ID NO: 903634 - protein, 464 aa, Homo sapiens; identical to SEQ ID NO: 903606

SEQ ID NO: 903635 - protein, 463 aa, Homo sapiens; identical to SEQ ID NO: 903612

SEQ ID NO: 903636 - protein, 463 aa, Homo sapiens; identical to SEQ ID NO: 903612

SEQ ID NO: 903637 - protein, 462 aa, Homo sapiens
METEQPEETFPNTETNGEFGKRPAEDMEEEQAFKRSRNTDEMVELRILLQSKNAGAVIGKGGKNIKALRTDYNASVSVPDSSGPERILSISADIETIGEILKKIIPTLEEGLQLPSPTATSQLPLESDAVECLNYQHYKGSDFDCELRLLIHQSLAGGIIGVKGAKIKELRENTQTTIKLFQECCPHSTDRVVLIGGKPDRVVECIKIILDLISESPIKGRAQPYDPNFYDETYDYGGFTMMFDDRRGRPVGFPMRGRGGFDRMPPGRGGRPMPPSRRDYDDMSPRRGPPPPPPGRGGRGGSRARNLPLPPPPPPRGGDLMAYDRRGRPGDRYDGMVGFSADETWDSAIDTWSPSEWQMAYEPQGGSGYDYSYAGGRGSYGDLGGPIITTQVTIPKDLAGSIIGKGGQRIKQIRHESGASIKIDEPLEGSEDRIITITGTQDQIQNAQYLLQNRVSLSLALC

SEQ ID NO: 903638 - protein, 290 aa, Homo sapiens
METEQPEETFPNTETNGEFGKRPAEDMEEEQAFKRSRNTDEMVELRILLQSKNAGAVIGKGGKNIKALRTDYNASVSVPDSSGPERILSISADIETIGEILKKIIPTLEEGLQLPSPTATSQLPLESDAVECLNYQHYKGSDFDCELRLLIHQSLAGGIIGVKGAKIKELRENTQTTIKLFQECCPHSTDRVVLIGGKPDRVVECIKIILDLISESPIKGRAQPYDPNFYDETYDYGGFTMMFDDRRGRPVGFPMRGRGGFDRMPPGRGGRPMPPSRRDYDDMILGGQCW

SEQ ID NO: 903639 - protein, 226 aa, Homo sapiens
METEQPEETFPNTETNGEFGKRPAEDMEEEQAFKRSRNTDEMVELRILLQSKNAGAVIGKGGKNIKALRTDYNASVSVPDSSGPERILSISADIETIGEILKKIIPTLEEGLQLPSPTATSQLPLESDAVECLNYQHYKGSDFDCELRLLIHQSLAGGIIGVKGAKIKELRENTQTTIKLFQECCPHSTDRVVLIGGKPDRVVECIKIILDLISESPIKGRAGRGH

SEQ ID NO: 903640 - protein, 185 aa, Homo sapiens
METEQPEETFPNTETNGEFGKRPAEDMEEEQAFKRSRNTDEMVELRILLQSKNAGAVIGKGGKNIKALRTDYNASVSVPDSSGPERILSISADIETIGEILKKIIPTLEEGLQLPSPTATSQLPLESDAVECLNYQHYKGSDFDCELRLLIHQSLAGGIIGVKGKATASSSSTLLETVLVMKGLG

SEQ ID NO: 903641 - protein, 113 aa, Homo sapiens
MTERRVPFSLLRGPSWDPFRDWYPHSRLFDQAFGLPRLPEEWSQWLGGKQLGQATCAPCPPPPSRAPQWPAPAYSRALSRQLSKRGLGDPGHTCPGPLGACPWMSTTFAPGRS

SEQ ID NO: 903642 - protein, 145 aa, Homo sapiens
GRVGRPTRPHKSAAEPSAPHFSEQTSRAESASMTERRVPFSLLRGPSWDPFRDWYPHSRLFDQAFGLPRLPEEWSQWLGGKQLGQATCAPCPPPPSRAPQWPAPAYSRALSRQLSKRGLGDPGHTCPGPLGACPWMSTTFAPGRS

SEQ ID NO: 903643 - protein, 259 aa, Homo sapiens
MVLLIYKARTFCQFFLSNDTKKYDSQVNVIHKLIVCHLHVTNSYSQTNTFFIWNLIVDFTSSTLATMFSLCVSREGNFPALFKPGPRIRGICLIRDSEAKTASYFLASFLTSFLFLLSFFSASMSMWGISTALASSRPTPRAESASMTERRVPFSLLRGPSWDPFRDWYPHSRLFDQAFGLPRLPEEWSQWLGGKQLGQATCAPCPPPPSRAPQWPAPAYSRALSRQLSKRGLGDPGHTCPGPLGACPWMSTTFAPGRS

SEQ ID NO: 903644 - protein, 113 aa, Homo sapiens; identical to SEQ ID NO: 903641

SEQ ID NO: 903645 - protein, 105 aa, Homo sapiens
MANIFPGCFNAENTPAPRCGLAIRNVSHRFTLSSMRWSSIVTDGWPRTMPQKLEHTPSPIRDPLILQGLAYRSSAGHRRLGGRRKAWQIHPEVRTCAARDGKDAL

SEQ ID NO: 903646 - protein, 113 aa, Homo sapiens; identical to SEQ ID NO: 903641

SEQ ID NO: 903647 - protein, 122 aa, Homo sapiens
GRVGRPTRPHKSAAEPSAPHFSEQTSRAESASMTERRVRPLPPAAIESPAVACARLQPRAQPATQQAGSRRSGPHLAGTAGRVSLDVNHFRPRTKLTVKTKGLAWWRSPRAKHEERQGQKHG

SEQ ID NO: 903648 - protein, 113 aa, Homo sapiens; identical to SEQ ID NO: 903641

SEQ ID NO: 903649 - protein, 113 aa, Homo sapiens; identical to SEQ ID NO: 903641

SEQ ID NO: 903650 - protein, 113 aa, Homo sapiens; identical to SEQ ID NO: 903641

SEQ ID NO: 903651 - protein, 113 aa, Homo sapiens; identical to SEQ ID NO: 903641

SEQ ID NO: 903652 - protein, 113 aa, Homo sapiens; identical to SEQ ID NO: 903641

SEQ ID NO: 903653 - protein, 145 aa, Homo sapiens; identical to SEQ ID NO: 903642

SEQ ID NO: 903654 - protein, 145 aa, Homo sapiens; identical to SEQ ID NO: 903642

SEQ ID NO: 903655 - protein, 113 aa, Homo sapiens; identical to SEQ ID NO: 903641

SEQ ID NO: 903656 - protein, 145 aa, Homo sapiens; identical to SEQ ID NO: 903642

SEQ ID NO: 903657 - protein, 145 aa, Homo sapiens; identical to SEQ ID NO: 903642

SEQ ID NO: 903658 - protein, 105 aa, Homo sapiens; identical to SEQ ID NO: 903645

SEQ ID NO: 903659 - protein, 113 aa, Homo sapiens; identical to SEQ ID NO: 903641

SEQ ID NO: 903660 - protein, 145 aa, Homo sapiens; identical to SEQ ID NO: 903642

SEQ ID NO: 903661 - protein, 98 aa, Homo sapiens
GRVGRPTRPHKSAAEPSAPHFSEQTSRAESASMTERRVPFSLLRGPSWDPFRDWYPHSRLFDQAFGLPRLPEEWSQWLGGKQLGQATKLQNSDETAAK

SEQ ID NO: 903662 - protein, 149 aa, Homo sapiens
GGGFELYLRKTEDEMYQKNTQVAGEAQPVAAAGGGIRAEGFTWRQSHRILQPSWDPFRDWYPHSRLFDQAFGLPRLPEEWSQWLGGKQLGQATCAPCPPPPSRAPQWPAPAYSRALSRQLSKRGLGDPGHTCPGPLGACPWMCSPEGHT

SEQ ID NO: 903663 - protein, 113 aa, Homo sapiens; identical to SEQ ID NO: 903641

SEQ ID NO: 903664 - protein, 113 aa, Homo sapiens; identical to SEQ ID NO: 903641

SEQ ID NO: 903665 - protein, 113 aa, Homo sapiens; identical to SEQ ID NO: 903641

SEQ ID NO: 903666 - protein, 161 aa, Homo sapiens
GRVGRPTRPHKSAAEPSAPHFSEQTSRAESASMTERRVPFSLLRGPSWDPFRDWYPHSRLRPPTAARSAGNSASGVSEIRATLARDRWARVPGCQPLSPPDEADGQDPRIGVVEITPGKARGAARTEAWLTSSRGASTREIHACPPCCGPPPKVSFLPLFP

SEQ ID NO: 903667 - protein, 113 aa, Homo sapiens; identical to SEQ ID NO: 903641

SEQ ID NO: 903668 - protein, 113 aa, Homo sapiens; identical to SEQ ID NO: 903641

SEQ ID NO: 903669 - protein, 113 aa, Homo sapiens; identical to SEQ ID NO: 903641

SEQ ID NO: 903670 - protein, 113 aa, Homo sapiens; identical to SEQ ID NO: 903641

SEQ ID NO: 903671 - protein, 145 aa, Homo sapiens; identical to SEQ ID NO: 903642

SEQ ID NO: 903672 - protein, 145 aa, Homo sapiens; identical to SEQ ID NO: 903642

SEQ ID NO: 903673 - protein, 145 aa, Homo sapiens; identical to SEQ ID NO: 903642

SEQ ID NO: 903674 - protein, 143 aa, Homo sapiens
GRVGRPTRPHKSAAEPSAPHFSEQTSRAESASMTERRVPFSLLRGPSWDPFRDWYPHSRLFDQAFGLPRLPEEWSQWLGGKQLGQATCAPCPPPPSRAPQWPAPAYSRALSRQLSKRGLGDPGHTCPGPLGACPWMCSPEGHT

SEQ ID NO: 903675 - protein, 145 aa, Homo sapiens; identical to SEQ ID NO: 903642

SEQ ID NO: 903676 - protein, 303 aa, Homo sapiens
  misc_feature (166)..(166): Xaa can be any naturally occurring amino acid
GRVGRPTRPHKSAAEPSAPHFSEQTSRAESASMTERRVPFSLLRGPSWDPFRDWYPHSRLFDQAFGLPRLPEEWSQWLGGKQLGQATCAPCPPPPSRAPQWLAALADRAIKQAKLKKVAGLSEMNRGQHYDGPAIGQSSVTRCEYVQTQVIAPGKRRLEPHASILXRVRSEVWTNAPWHRADDVRPARTVAIGVRIIARMTVTTGKISDWLRARDDGAPSQWGPPSRYNFGGGNNWTVRGRHHDSKTSYRSAGPRLNACTDQPLEVMGQRWGAPESMQNREEPARQDKDLRPVMRNTSAMTKG

SEQ ID NO: 903677 - protein, 141 aa, Homo sapiens [sequence omitted]

SEQ ID NO: 903678 - protein, 100 aa, Homo sapiens
SSTSTSRPVPTAQLSPTEISAVRQLIAGYRESAAFLLRSADELENLILQQKLTPPAPGAHCPREGGCPSLDLASCLTSWYILFLKEVGSKRAVSSHTPST

SEQ ID NO: 903679 - protein, 100 aa, Homo sapiens; identical to SEQ ID NO: 903678

SEQ ID NO: 903680 - protein, 100 aa, Homo sapiens; identical to SEQ ID NO: 903678

SEQ ID NO: 903681 - protein, 100 aa, Homo sapiens; identical to SEQ ID NO: 903678

SEQ ID NO: 903682 - protein, 1141 aa, Homo sapiens
MSLRCLHILLAWILFSQSSNLFHKPQHCQISPRPLQIIHQPQFSPFISLSFSIFFFAFISFYFHILFFSLYTVFFLLIYSFLFFDFLFYFSILTSFIYPSFFLSFAFIFLSRFASNYLAFPSPVSPVSSSFMISSSFPPILHSPSVSTSPSPFIPIHPFNPPHWGKKVEKRREESGVEKKGIEKKVETRQLKRAIDSALPSALSKNDHKHQKQLLSKINCEKEMNENMRATLATSKNVFQLKLEETQKLLEDQHLSNLQKFCDEVNQITNSETLSSIDSLEATEHEEIYLTLNKEHSTSIQRNTISLKPANMQSTNLSCFDEDKLAFSKTQHINNWLTNLDASNTQNVTAFSDILSKSNVLPSWEYFNSKEQNPSPLNGTVERATNTANNSVPFVSSPPMFVLDKKCEKTSETSTMRTTDSTSGAFKRERPLVTESPTFKFSKSQSTSDSLTQEVATFPDQEKYSELNQENGTTSIPTSCVPVATPLVLPSNIQSARPSAKNSIHIKEIDAVQCSDKLDELKDGKEEEIKYFNCNKEELPLFSDSFQDAYIPHNPDSKDEKQKLAETSSLSNVTSNYDFVGQHKKMKYNIHERNGVRFLKSILKKESKYEHGYLKALIINQSFKFGNQKAAAIRDSIELTKEKGAEIPKTIKKLRWFDETSNIENNAENSHSLKNKTGTTQQHSQQFHIQSGAGSNIISVSTCAVNSADTKKSREDSISENVTTLGGSGADHMPLNCFIPSGYNFAKHAWPASKKEESKIPVHDDSKTKQGKPQRGRAKIIRKPGSAKVQSGFICTNRKGAVIQPQSASKVNIFTQAQGKLIIPCPPPQSTSNIRSGKNIQVSQCQPVTPENPQNIITHNSFNSKHVLPTEHSLNQWNQESSSPLSNACSDLVTVIPSLPSYCSSECQTFAKINHSNGTQAVARQDATLYCTQRSPVCEESYPSVTLRTAEEESVPLWKRGPNVLHQNKRATGSTVMRRKRIAETKRRNILEQKRQNPGSVGQKYSEQINNFGQSVLLSSSEPKQTTRGTSYIEEVSDSTSEFLMAENLVKASVPEDEILTVLNSKQIQKSNLPLNKTQQFNICTLSAEEQKILESLNDLNERLHYIQESICKNPSIKNTLQIIPLLEKREDRTSSCRDKR

SEQ ID NO: 903683 - protein, 1055 aa, Homo sapiens
HALYFSQLLTYFLLFFRIKFLKKNVYIQVFLFVFLTLVFSIECNLAGRCFTPLEQGLLIPKGLLASKTTEVLLSLSYLSSWQHKCWFSSYLFGLSSSVFIMYFVPQTAIDSALPSALSKNDHKHQKQLLSKINCEKEMNENMRATLATSKNVFQLKLEETQKLLEDQHLSNLQKFCDEVNQITNSETLSSIDSLEATEHEEIYLTLNKEHSTSIQRNTISLKPANMQSTNLSCFDEDKLAFSKTQHINNWLTNLDASNTQNVTAFSDILSKSNVLPSWEYFNSKEQNPSPLNGTVERATNTANNSVPFVSSPPMFVLDKKCEKTSETSTMRTTDSTSGAFKRERPLVTESPTFKFSKSQSTSDSLTQEVATFPDQEKYSELNQENGTTSIPTSCVPVATPLVLPSNIQSARPSAKNSIHIKEIDAVQCSDKLDELKDGKEEEIKYFNCNKEELPLFSDSFQDAYIPHNPDSKDEKQKLAETSSLSNVTSNYDFVGQHKKMKYNIHERNGVRFLKSILKKESKYEHGYLKALIINQSFKFGNQKAAAIRDSIELTKEKGAEIPKTIKKLRWFDETSNIENNAENSHSLKNKTGTTQQHSQQFHIQSGAGSNIISVSTCAVNSADTKKSREDSISENVTTLGGSGADHMPLNCFIPSGYNFAKHAWPASKKEESKIPVHDDSKTKQGKPQRGRAKIIRKPGSAKVQSGFICTNRKGAVIQPQSASKVNIFTQAQGKLIIPCPPPQSTSNIRSGKNIQVSQCQPVTPENPQNIITHNSFNSKHVLPTEHSLNQWNQESSSPLSNACSDLVTVIPSLPSYCSSECQTFAKINHSNGTQAVARQDATLYCTQRSPVCEESYPSVTLRTAEEESVPLWKRGPNVLHQNKRATGSTVMRRKRIAETKRRNILEQKRQNPGSVGQKYSEQINNFGQSVLLSSSEPKQTTRGTSYIEEVSDSTSEFLMAENLVKASVPEDEILTVLNSKQIQKSNLPLNKTQQFNICTLSAEEQKILESLNDLNERLHYIQESICKNPSIKNTLQIIPLLEKREDRTSSCRDKR

SEQ ID NO: 903684 - protein, 266 aa, Homo sapiens
MLAGRPGTRSAVGELGTESSDNLDRAPLGPRESGGHHRPGSYLDMKIHLEKNLEEERQILLQQQKICRNRARKYFVESNRRKKAFEEKRKEQEEKEHQIREQILQQRKQKFEEVTEKFQRAHVPLSQRRKAVSRKPVPPLEEALKQIQESNLKSEVNLPFSRRPTINWRAIDSALPSALSKNDHKHQKQLLSKINCEKEMNENMRATLATSKNVFQLKLEETQKLLEDQHLSNLQNFVMKLSDNPSWTLLRYTGLRLEHEKYFYTL

SEQ ID NO: 903685 - protein, 1117 aa, Homo sapiens
MLAGRPGTRSAVGELGTESSDNLDRAPLGPRESGGHHRPGSYLDMKIHLEKNLEEERQILLQQQKICRNRARKYFVESNRRKKAFEEKRKEQEEKEHQIREQILQQRKQKFEEVTEKFQRAHVPLSQRRKAVSRKPVPPLEEALKQIQESNLKSEVNLPFSRRPTINWRAIDSALPSALSKNDHKHQKQLLSKINCEKEMNENMRATLATSKNVFQLKLEETQKLLEDQHLSNLQKFCDEVNQITNSETLSSIDSLEATEHEEIYLTLNKEHSTSIQRNTISLKPANMQSTNLSCFDEDKLAFSKTQHINNWLTNLDASNTQNVTAFSDILSKSNVLPSWEYFNSKEQNPSPLNGTVERATNTANNSVPFVSSPPMFVLDKKCEKTSETSTMRTTDSTSGAFKRERPLVTESPTFKFSKSQSTSDSLTQEVATFPDQEKYSELNQENGTTSIPTSCVPVATPLVLPSNIQSARPSAKNSIHIKEIDAVQCSDKLDELKDGKEEEIKYFNCNKEELPLFSDSFQDAYIPHNPDSKDEKQKLAETSSLSNVTSNYDFVGQHKKMKYNIHERNGVRFLKSILKKESKYEHGYLKALIINQSFKFGNQKAAAIRDSIELTKEKGAEIPKTIKKLRWFDETSNIENNAENSHSLKNKTGTTQQHSQQFHIQSGAGSNIISVSTCAVNSADTKKSREDSISENVTTLGGSGADHMPLNCFIPSGYNFAKHAWPASKKEESKIPVHDDSKTKQGKPQRGRAKIIRKPGSAKVQSGFICTNRKGAVIQPQSASKVNIFTQAQGKLIIPCPPPQSTSNIRSGKNIQVSQCQPVTPENPQNIITHNSFNSKHVLPTEHSLNQWNQESSSPLSNACSDLVTVIPSLPSYCSSECQTFAKINHSNGTQAVARQDATLYCTQRSPVCEESYPSVTLRTAEEESVPLWKRGPNVLHQNKRATGSTVMRRKRIAETKRRNILEQKRQNPGSVGQKYSEQINNFGQSVLLSSSEPKQTTRGTSYIEEVSDSTSEFLMAENLVKASVPEDEILTVLNSKQIQKSNLPLNKTQQFNICTLSAEEQKILESLNDLNERLHYIQESICKNPSIKNTLQIIPLLEKREDRTSSCRDKR

SEQ ID NO: 903686 - protein, 1106 aa, Homo sapiens [sequence omitted]

SEQ ID NO: 903687 - protein, 168 aa, Homo sapiens
  misc_feature (160)..(160): Xaa can be any naturally occurring amino acid
  misc_feature (167)..(167): Xaa can be any naturally occurring amino acid
MQWAVGRRWAWAALLLAVAAVLTQVVWLWLGTQSFVFQREEIAQLARQYAGLDHELAFSRLIVELRRLHPGHVLPDEELQWVFVNAGGWMGAMCLLHASLSEYVLLFGTALGSRGHSGRYWAEISDTIISGTFHQWREGTTKSEVFYPEGETVVKRALVXAKKLLEXG

SEQ ID NO: 903688 - protein, 223 aa, Homo sapiens
MQWAVGRRWAWAALLLAVAAVLTQVVWLWLGTQSFVFQREEIAQLARQYAGLDHELAFSRLIVELRRLHPGHVLPDEELQWVFVNAGGWMGAMCLLHASLSEYVLLFGTALGSRGHSGRYWAEISDTIISGTFHQWREGTTKSEVFYPGETVVHGPGEATAVEWGPNTWMVEYGRGVIPSTLAFALADTVFSTQDFLTLFYTLRSYARGLRLELTTYLFGQDP

SEQ ID NO: 903689 - protein, 223 aa, Homo sapiens; identical to SEQ ID NO: 903688

SEQ ID NO: 903690 - protein, 223 aa, Homo sapiens; identical to SEQ ID NO: 903688

SEQ ID NO: 903691 - protein, 223 aa, Homo sapiens; identical to SEQ ID NO: 903688

SEQ ID NO: 903692 - protein, 223 aa, Homo sapiens; identical to SEQ ID NO: 903688

SEQ ID NO: 903693 - protein, 106 aa, Homo sapiens
MQWAVGRRWAWAALLLAVAAVLTQVVWLWLGTQSFVFQREEIAQLARQYAGLDHELAFSRLIVELRRLHPGHVLPDEELQWVFVNAGGWMGAMCLLHASLSEALLG

SEQ ID NO: 903694 - protein, 223 aa, Homo sapiens; identical to SEQ ID NO: 903688

SEQ ID NO: 903695 - protein, 159 aa, Homo sapiens
MQWAVGRRWAWAALLLAVAAVLTQVVWLWLGTQSFVFQREEIAQLARQYAGLDHELAFSRLIVELRRLHPGHVLPDEELQWVFVNAGGWMGAMCLLHASLSEYVLLFGTALGSRGHSVSCAIVTQGATGLRSRIPSSLAPSTSGERAPPKVRSSTQGRR

SEQ ID NO: 903696 - protein, 182 aa, Homo sapiens
MRVAGWAPCAFCTPRCPSMCCSSAPPWAPAATRVSASGGPDWEAGVVKGPMPSFLMFGWAMQWREYPDSVMCDCHSGRYWAEISDTIISGTFHQWREGTTKSEVFYPGETVVHGPGEATAVEWGPNTWMVEYGRGVIPSTLAFALADTVFSTQDFLTLFYTLRSYARGLRLELTTYLFGQDP

SEQ ID NO: 903697 - protein, 223 aa, Homo sapiens; identical to SEQ ID NO: 903688

SEQ ID NO: 903698 - protein, 103 aa, Homo sapiens
MGAMCLLHASLSEYVLLFGTALGSRGHSGETVVHGPGEATAVEWGPNTWMVEYGRGVIPSTLAFALADTVFSTQDFLTLFYTLRSYARGLRLELTTYLFGQDP

SEQ ID NO: 903699 - protein, 155 aa, Homo sapiens
MQWAVGRRWAWAALLLAVAAVLTQVVWLWLGTQSFVFQREEIAQLARQYAGLDHELAFSRLIVELRRLHPGHVLPDEELQWVFVNAGGWMGAMCLLHASLSEYVLLFGTALGSRGHSGRYWAEISDTIISGTFHQWREGTTKSEVFYPGPLTSQA

SEQ ID NO: 903700 - protein, 211 aa, Homo sapiens
MQWAVGRRWAWAALLLAVAAVLTQVVWLWLGTQSFVFQREEIAQLARQYAGLDHELAFSRLIVELRRLHPGHVLPDEELQWVFVNAGGWMGAMCLLHASLSEYVLLFGTALGSRGHSGRYWAEISDTIISGTFHQWREGTTKSEVFYPGETVVHGPGEATAVEWGPNTWMVEYGRGVIPSTLAFALADTVFSTQDFLTLFYTLRKKKGGRM

SEQ ID NO: 903701 - protein, 106 aa, Homo sapiens; identical to SEQ ID NO: 903693

SEQ ID NO: 903702 - protein, 223 aa, Homo sapiens; identical to SEQ ID NO: 903688

SEQ ID NO: 903703 - protein, 223 aa, Homo sapiens; identical to SEQ ID NO: 903688

SEQ ID NO: 903704 - protein, 223 aa, Homo sapiens; identical to SEQ ID NO: 903688

SEQ ID NO: 903705 - protein, 131 aa, Homo sapiens
MCLLHASLSEYVLLFGTALGSRGHSGRYWAEISDTIISGTFHQWREGTTKSEVFYPGETVVHGPGEATAVEWGPNTWMVEYGRGVIPSTLAFALADTVFSTQDFLTLFYTLRSYARGLRLELTTYLFGQDP

SEQ ID NO: 903706 - protein, 223 aa, Homo sapiens; identical to SEQ ID NO: 903688

SEQ ID NO: 903707 - protein, 266 aa, Homo sapiens
MQWAVGRRWAWAALLLAVAAVLTQVVWLWLGTQSFVFQREEIAQLARQYAGLDHELAFSRLIVELRRLHPGHVLPDEELQWVFVNAGGWMGAMCLLHASLSEYVLLFGTALGSRGHSGQCCGGPDWEAGVVKGPMPSFLMFGWAMQWREYPDSVMCDCHSGRYWAEISDTIISGTFHQWREGTTKSEVFYPGETVVHGPGEATAVEWGPNTWMVEYGRGVIPSTLAFALADTVFSTQDFLTLFYTLRSYARGLRLELTTYLFGQDP

SEQ ID NO: 903708 - protein, 215 aa, Homo sapiens
MQWAVGRRWAWAALLLAVAAVLTQVVWLWLGTQSFVFQREEIAQLARQYAGLDHELAFSRLIVELRRLHPGHVLPDEELQWVFVNAGGWMGAMCLLHASLSDVMCDCHSGRYWAEISDTIISGTFHQWREGTTKSEVFYPGETVVHGPGEATAVEWGPNTWMVEYGRGVIPSTLAFALADTVFSTQDFLTLFYTLRSYARGLRLELTTYLFGQDP

SEQ ID NO: 903709 - protein, 192 aa, Homo sapiens
MQWAVGRRWAWAALLLAVAAVLTQVVWLWLGTQSFVFQREEIAQLARQYAGLDHELAFSRLIVELRRLHPGHVLPDEELQWVFVNAGGWMGAMCLLHASLSEYVLLFGTALGSRGHSGETVVHGPGEATAVEWGPNTWMVEYGRGVIPSTLAFALADTVFSTQDFLTLFYTLRSYARGLRLELTTYLFGQDP

SEQ ID NO: 903710 - protein, 74 aa, Homo sapiens
AKYEAGGESAEASSILFAPMLGASGLSSPPTSLARTLDQPGLKEDLRMDRSGQARTYPLAGAHVYRQGHTPCRS

SEQ ID NO: 903711 - protein, 155 aa, Homo sapiens
MRVAGWAPCAFCTPRCPSMCCSSAPPWAPAATRVSASGGPDWEAGVVKGPMPSFLMFGWAMQWREYPDSVMCDCHSGRYWAEISDTIISGTFHQWREGTTKSEVFYPGWVRRLCQRSGSLHAGGAHNCGEHGMEKECVGGALLMVPFLHPPISHR

SEQ ID NO: 903712 - protein, 57 aa, Homo sapiens
MKFFVFALVLALMISMISADSHEKRHHGYRRKFHEKHHSHREFPFYGDYGSNYLYDN

SEQ ID NO: 903713 - protein, 1500 aa, Homo sapiens
MAKNKEPRPPSYTISIVGLSGTEKDKGNCGVGKSCLCNRFVRSKADEYYPEHTSVLSTIDFGGRVVNNDHFLYWGDIIQNSEDGVECKIHVIEQTEFIDDQTFLPHRSTNLQPYIKRAAASKLQSAEKLMYICTDQLGLEQDFEQKQMPEGKLNVDGFLLCIDVSQGCNRKFDDQLKFVNNLFVQLSKSKKPVIIAATKCDECVGHYLREVQAFASNKKNLLVVETLSAIKVNIETCFTALVQMLDKTRSKPKIIPYLDAYKTQRQLVVTATDKFEKLVQTVRDYHATWKTVSNKLKNHPDYEEYINLEGTRKARNTFSKHIEQLKQEHIRKRREEYINTLPRAFNTLLPNLEEIEHLNWSEALKLMEKRADFQLCFVVLEKTPWDETDHIDKINDRRIPFDLLSTLEAEKVYQNHVQHLISEKRRVEMKEKFKKTLEKIQFISPGQPWEEVMCFVMEDEAYKYITEADSKEVYGRHQREIVEKAKEEFQEMLFEHSELFYDLDLNATPSSDKMSEIHTVLSEEPRYKALQKLAPDRESLLLKHIGFVYHPTKETCLSGQNCTDIKVEQLLASSLLQLDHGRLRLYHDSTNIDKVNLFILGKDGLAQELANEIRTQSTDDEYALDGKIYELDLRPVDAKSPYFLSQLWTAAFKPHGCFCVFNSIESLSFIGEFIGKIRTEASQIRKDKYMANLPFTLILANQRDSISKNLPILRHQGQQLANKLQCPFVDVPAGTYPRKFNETQIKQALRGVLESVKHNLDVVSPIPANKDLSEADLRIVMCAMCGDPFSVDLILSPFLDSHSCSAAQAGQNNSLMLDKIIGEKRRRIQITILSYHSSIGVRKDELVHGYILVYSAKRKASMGMLRAFLSEVQDTIPVQLVAVTDSQADFFENEAIKELMTEGEHIATEITAKFTALYSLSQYHRQTEVFTLFFSDVLEKKNMIENSYLSDNTRESTHQSEDVFLPSPRDCFPYNNYPDSDDDTEAPPPYSPIGDDVQLLPTPSDRSRYRLDLEGNEYPIHSTPNCHDHERNHKVPPPIKPKPVVPKTNVKKLDPNLLKTIEAGIGKNPRKQTSRVPLAHPEDMDPSDNYAEPIDTIFKQKGYSDEIYVVPDDSQNRIKIRNSFVNNTQGDEENGFSDRTSKSHGERRPSKYKYKSKTLFSKAKSYYRRTHSDASDDEAFTTSKTKRKGRHRGSEEDPLLSPVETWKGGIDNPAITSDQELDDKKMKKKTHKVKEDKKKKKTKNFNPPTRRNWESNYFGMPLQDLVTAEKPIPLFVEKCVEFIEDTGLCTEGLYRVSGNKTDQDNIQKQFDQDHNINLVSMEVTVNAVAGALKAFFADLPDPLIPYSLHPELLEAAKIPDKTERLHALKEIVKKFHPVNYDVFRYVITHLNRVSQQHKINLMTADNLSICFWPTLMRPDFENREFLSTTKIHQSVVETFIQQCQFFFYNGEIVETTNIVAPPPPSNPGQLVEPMVPLQLPPPLQPQLIQPQLQTDPLGII

SEQ ID NO: 903714 - protein, 1500 aa, Homo sapiens; identical to SEQ ID NO: 903713

SEQ ID NO: 903715 - protein, 1500 aa, Homo sapiens; identical to SEQ ID NO: 903713

SEQ ID NO: 903716 - protein, 284 aa, Homo sapiens
SVIRNARELEARGVAEVERCTEKKKTKNFNPPTRRNWESNYFGMPLQDLVTAEKPIPLFVEKCVEFIEDTGLCTEGLYRVSGNKTDQDNIQKQFDQDHNINLVSMEVTVNAVAGALKAFFADLPDPLIPYSLHPELLEAAKIPDKTERLHALKEIVKKFHPVNYDVFRYVITHLNRVSQQHKINLMTADNLSICFWPTLMRPDFENREFLSTTKIHQSVVETFIQQCQFFFYNGEIVETTNIVAPPPPSNPGQLVEPMVPLQLPPPLQPQLIQPQLQTDPLGII

SEQ ID NO: 903717 - protein, 1296 aa, Homo sapiens
MAKNKEPRPPSYTISIVGLSGTEKDKGNCGVGKSCLCNRFVRSKADEYYPEHTSVLSTIDFGGRVVNNDHFLYWGDIIQNSEDGVECKIHVIEQTEFIDDQTFLPHRSTNLQPYIKRAAASKLQSAEKLMYICTDQLGLEQDFEQKQMPEGKLNVDGFLLCIDVSQGCNRKFDDQLKFVNNLFVQLSKSKKPVIIAATKCDECVGHYLREVQAFASNKKNLLVVETLSAIKVNIETCFTALVQMLDKTRSKPKIIPYLDAYKTQRQLVVTATDKFEKLVQTVRDYHATWKTVSNKLKNHPDYEEYINLEGTRKARNTFSKHIEQLKQEHIRKRREEYINTLPRAFNTLLPNLEEIEHLNWSEALKLMEKRADFQLCFVVLEKTPWDETDHIDKINDRRIPFDLLSTLEAEKVYQNHVQHLISEKRRVEMKEKFKKTLEKIQFISPGQPWEEVMCFVMEDEAYKYITEADSKEVYGRHQREIVEKAKEEFQEMLFEHSELFYDLDLNATPSSDKMSEIHTVLSEEPRYKALQKLAPDRESLLLKHIGFVYHPTKETCLSGQNCTDIKVEQLLASSLLQLDHGRLRLYHDSTNIDKVNLFILGKDGLAQELANEIRTQSTDDEYALDGKIYELDLRPVDAKSPYFLSQLWTAAFKPHGCFCVFNSIESLSFIGEFIGKIRTEASQIRKDKYMANLPFTLILANQRDSISKNLPILRHQGQQLANKLQCPFVDVPAGTYPRKFNETQIKQALRGVLESVKHNLDVVSPIPANKDLSEADLRIVMCAMCGDPFSVDLILSPFLDSHSCSAAQAGQNNSLMLDKIIGEKRRRIQITILSYHSSIGVRKDELVHGYILVYSAKRKASMGMLRAFLSEVQDTIPVQLVAVTDSQADFFENEAIKELMTEGEHIATEITAKFTALYSLSQYHRQTEVFTLFFSDVLEKKNMIENSYLSDNTRESTHQSEDVFLPSPRDCFPYNNYPDSDDDTEAPPPYSPIGDDVQLLPTPSDRSRYRLDLEGNEYPIHSTPNCHDHERNHKVPPPIKPKPVVPKTNVKKLDPNLLKTIEAGIGKNPRKQTSRVPLAHPEDMDPSDNYAEPIDTIFKQKGYSDEIYVVPDDSQNRIKIRNSFVNNTQGDEENGFSDRTSKSHGERRPSKYKYKSKTLFSKAKSYYRRTHSDASDDEAFTTSKTKRKGRHRGSEEDPLLSPVETWKGGIDNPAITSDQELDDKKMKKKTHKVKEDKKKKKTKNFNPPTRRNWESNYFGMPLQDLVTAEKPIPLFVEKCVEFIEDTGRIEESLQEI

SEQ ID NO: 903718 - protein, 158 aa, Homo sapiens
MSLPPPPPGPLPLRRRRRRPTLLGLCTEGLYRVSGNKTDQDNIQKQFDQDHNINLVSMEVTVNAVAGALKAFFADLPDPLIPYSLHPELLEAAKIPDKTERLHALKEIVKKFHPVNYDVFRYVITHLNRYFYFFRVFWQIKCTTHFKHVNFINWIIIR

SEQ ID NO: 903719 - protein, 1500 aa, Homo sapiens; identical to SEQ ID NO: 903713

SEQ ID NO: 903720 - protein, 1500 aa, Homo sapiens; identical to SEQ ID NO: 903713

SEQ ID NO: 903721 - protein, 1269 aa, Homo sapiens
MAKNKEPRPPSYTISIVGLSGTEKDKGNCGVGKSCLCNRFVRSKADEYYPEHTSVLSTIDFGGRVVNNDHFLYWGDIIQNSEDGVECKIHVIEQTEFIDDQTFLPHRSTNLQPYIKRAAASKLQSAEKLMYICTDQLGLEQDFEQKQMPEGKLNVDGFLLCIDVSQGCNRKFDDQLKFVNNLFVQLSKSKKPVIIAATKCDECVGHYLREVQAFASNKKNLLVVETLSAIKVNIETCFTALVQMLDKTRSKPKIIPYLDAYKTQRQLVVTATDKFEKLVQTVRDYHATWKTVSNKLKNHPDYEEYINLEGTRKARNTFSKHIEQLKQEHIRKRREEYINTLPRAFNTLLPNLEEIEHLNWSEALKLMEKRADFQLCFVVLEKTPWDETDHIDKINDRRIPFDLLSTLEAEKVYQNHVQHLISEKRRVEMKEKFKKTLEKIQFISPGQPWEEVMCFVMEDEAYKYITEADSKEVYGRHQREIVEKAKEEFQEMLFEHSELFYDLDLNATPSSDKMSEIHTVLSEEPRYKALQKLAPDRESLLLKHIGFVYHPTKETCLSGQNCTDIKVEQLLASSLLQLDHGRLRLYHDSTNIDKVNLFILGKDGLAQELANEIRTQSTDDEYALDGKIYELDLRPVDAKSPYFLSQLWTAAFKPHGCFCVFNSIESLSFIGEFIGKIRTEASQIRKDKYMANLPFTLILANQRDSISKNLPILRHQGQQLANKLQCPFVDVPAGTYPRKFNETQIKQALRGVLESVKHNLDVVSPIPANKDLSEADLRIVMCAMCGDPFSVDLILSPFLDSHSCSAAQAGQNNSLMLDKIIGEKRRRIQITILSYHSSIGVRKDELVHGYILVYSAKRKASMGMLRAFLSEVQDTIPVQLVAVTDSQADFFENEAIKELMTEGEHIATEITAKFTALYSLSQYHRQTEVFTLFFSDVLEKKNMIENSYLSDNTRESTHQSEDVFLPSPRDCFPYNNYPDSDDDTEAPPPYSPIGDDVQLLPTPSDRSRYRLDLEGNEYPIHSTPNCHDHERNHKVPPPIKPKPVVPKTNVKKLDPNLLKTIEAGIGKNPRKQTSRVPLAHPEDMDPSDNYAEPIDTIFKQKGYSDEIYVVPDDSQNRIKIRNSFVNNTQGDEENGFSDRTSKSHGERRPSKYKYKSKTLFSKAKSYYRRTHSDASDDEAFTTSKTKRKGRHRGSEEDPLLSPVETWKGGIDNPAITSDQELDDKKMKKKTHKVKEDKKGYVPKDSTVSAGIKLTKTIFKSSLIKIIISI

SEQ ID NO: 903722 - protein, 1421 aa, Homo sapiens
MAKNKEPRPPSYTISIVGLSGTEKDKGNCGVGKSCLCNRFVRSKADEYYPEHTSVLSTIDFGGRVVNNDHFLYWGDIIQNSEDGVECKIHVIEQTEFIDDQTFLPHRSTNLQPYIKRAAASKLQSAEKLMYICTDQLGLEQDFEQKQMPEGKLNVDGFLLCIDVSQGCNRKFDDQLKFVNNLFVQLSKSKKPVIIAATKCDECVGHYLREVQAFASNKKNLLVVETLSAIKVNIETCFTALVQMLDKTRSKPKIIPYLDAYKTQRQLVVTATDKFEKLVQTVRDYHATWKTVSNKLKNHPDYEEYINLEGTRKARNTFSKHIEQLKQEHIRKRREEYINTLPRAFNTLLPNLEEIEHLNWSEALKLMEKRADFQLCFVVLEKTPWDETDHIDKINDRRIPFDLLSTLEAEKVYQNHVQHLISEKRRVEMKEKFKKTLEKIQFISPGQPWEEVMCFVMEDEAYKYITEADSKEVYGRHQREIVEKAKEEFQEMLFEHSELFYDLDLNATPSSDKMSEIHTVLSEEPRYKALQKLAPDRESLLLKHIGFVYHPTKETCLSGQNCTDIKVEQLLASSLLQLDHGRLRLYHDSTNIDKVNLFILGKDGLAQELANEIRTQSTDDEYALDGKIYELDLRPVDAKSPYFLSQLWTAAFKPHGCFCVFNSIESLSFIGEFIGKIRTEASQIRKDKYMANLPFTLILANQRDSISKNLPILRHQGQQLANKLQCPFVDVPAGTYPRKFNETQIKQALRGVLESVKHNLDVVSPIPANKDLSEADLRIVMCAMCGDPFSVDLILSPFLDSHSCSAAQAGQNNSLMLDKIIGEKRRRIQITILSYHSSIGVRKDELVHGYILVYSAKRKASMGMLRAFLSEVQDTIPVQLVAVTDSQADFFENEAIKELMTEGEHIATEITAKFTALYSLSQYHRQTEVFTLFFSDVLEKKNMIENSYLSDNTRESTHQSEDVFLPSPRDCFPYNNYPDSDDDTEAPPPYSPIGDDVQLLPTPSDRSRYRLDLEGNEYPIHSTPNCHDHERNHKVPPPIKPKPVVPKTNVKKLDPNLLKTIEAGIGKNPRKQTSRVPLAHPEDMDPSDNYAEPIDTIFKQKGYSDEIYVVPDDSQNRIKIRNSFVNNTQGDEENGFSDRTSKSHGERRPSKYKYKSKTLFSKAKSYYRRTHSDASDDEAFTTSKTKRKGRHRGSEEDPLLSPVETWKGGIDNPAITSDQELDDKKMKKKTHKVKEDKKKKKTKNFNPPTRRNWESNYFGMPLQDLVTAEKPIPLFVEKCVEFIEDTGLCTEGLYRVSGNKTDQDNIQKQFDQDHNINLVSMEVTVNAVAGALKAFFADLPDPLIPYSLHPELLEAAKIPDKTERLHALKEIVKKFHPVNYDVFRYVITHLNRYFYFFRVFWQIKCTTHFKHVNFINWIIIR

SEQ ID NO: 903723 - protein, 1242 aa, Homo sapiens
MAKNKEPRPPSYTISIVGLSGTEKDKGNCGVGKSCLCNRFVRSKADEYYPEHTSVLSTIDFGGRVVNNDHFLYWGDIIQNSEDGVECKIHVIEQTEFIDDQTFLPHRSTNLQPYIKRAAASKLQSAEKLMYICTDQLGLEQDFEQKQMPEGKLNVDGFLLCIDVSQGCNRKFDDQLKFVNNLFVQLSKSKKPVIIAATKCDECVGHYLREVQAFASNKKNLLVVETLSAIKVNIETCFTALVQMLDKTRSKPKIIPYLDAYKTQRQLVVTATDKFEKLVQTVRDYHATWKTVSNKLKNHPDYEEYINLEGTRKARNTFSKHIEQLKQEHIRKRREEYINTLPRAFNTLLPNLEEIEHLNWSEALKLMEKRADFQLCFVVLEKTPWDETDHIDKINDRRIPFDLLSTLEAEKVYQNHVQHLISEKRRVEMKEKFKKTLEKIQFISPGQPWEEVMCFVMEDEAYKYITEADSKEVYGRHQREIVEKAKEEFQEMLFEHSELFYDLDLNATPSSDKMSEIHTVLSEEPRYKALQKLAPDRESLLLKHIGFVYHPTKETCLSGQNCTDIKVEQLLASSLLQLDHGRLRLYHDSTNIDKVNLFILGKDGLAQELANEIRTQSTDDEYALDGKIYELDLRPVDAKSPYFLSQLWTAAFKPHGCFCVFNSIESLSFIGEFIGKIRTEASQIRKDKYMANLPFTLILANQRDSISKNLPILRHQGQQLANKLQCPFVDVPAGTYPRKFNETQIKQALRGVLESVKHNLDVVSPIPANKDLSEADLRIVMCAMCGDPFSVDLILSPFLDSHSCSAAQAGQNNSLMLDKIIGEKRRRIQITILSYHSSIGVRKDELVHGYILVYSAKRKASMGMLRAFLSEVQDTIPVQLVAVTDSQADFFENEAIKELMTEGEHIATEITAKFTALYSLSQYHRQTEVFTLFFSDVLEKKNMIENSYLSDNTRESTHQSEDVFLPSPRDCFPYNNYPDSDDDTEAPPPYSPIGDDVQLLPTPSDRSRYRLDLEGNEYPIHSTPNCHDHERNHKVPPPIKPKPVVPKTNVKKLDPNLLKTIEAGIGKNPRKQTSRVPLAHPEDMDPSDNYAEPIDTIFKQKGYSDEIYVVPDDSQNRIKIRNSFVNNTQGDEENGFSDRTSKSHGERRPSKYKYKSKTLFSKAKSYYRRTHSDASDDEAFTTSKTKRKGRHRGSEEDPLLSPVETWKGGIDNPAITSDQELDDKKMKKKTHKVKEDKKVRLT

SEQ ID NO: 903724 - protein, 191 aa, Homo sapiens
MSDTSESGAGLTRFQAEASEKDSSSMMQTLLTVTQNVEVPETPKASKALEVSEDVKVSKASGVSKATEVSKTPEAREAPATQASSTTQLTDTQVLAAENKSLAADTKKQNADPQAVTMPATETKKVSHVADTKVNTKAQETEAAPSQAPADEPEPESAAAQSQENQDTRPKVKAKKARKVKHLDGGRGWQQ

SEQ ID NO: 903725 - protein, 305 aa, Homo sapiens
MLKDIIKEYTDVYPEIIERAGYSLEKVFGIQLKEIDKNDHLYILLSTLEPTDAGILGTTKDSPKLGLLMVLLSIIFMNGNRSSEAVIWEVLRKLGLRPGIHHSLFGDVKKLITDEFVKQKYLDYARVPNSNPPEYEFFWGLRSYYETSKMKVLKFACKVQKKDPKEWAAQYREAMEADLKAAAEAAAEAKARAEIRARMGIGLGSENAAGPCNWDEADIGPWAKARIQAGAEAKAKAQESGSASTGASTSTNNSASASASTSGGFSAGASLTATLTFGLFAGLGGSWCQHQWQLWCLWFLLQVRF

SEQ ID NO: 903726 - protein, 305 aa, Homo sapiens; identical to SEQ ID NO: 903725

SEQ ID NO: 903727 - protein, 305 aa, Homo sapiens; identical to SEQ ID NO: 903725

SEQ ID NO: 903728 - protein, 362 aa, Homo sapiens
MSLSSQSSDLAVLASLLISTEPGYATLGVVGKESIAWASGPPGISSVRCSQHSPLADMLKDIIKEYTDVYPEIIERAGYSLEKVFGIQLKEIDKNDHLYILLSTLEPTDAGILGTTKDSPKLGLLMVLLSIIFMNGNRSSEAVIWEVLRKLGLRPGIHHSLFGDVKKLITDEFVKQKYLDYARVPNSNPPEYEFFWGLRSYYETSKMKVLKFACKVQKKDPKEWAAQYREAMEADLKAAAEAAAEAKARAEIRARMGIGLGSENAAGPCNWDEADIGPWAKARIQAGAEAKAKAQESGSASTGASTSTNNSASASASTSGGFSAGASLTATLTFGLFAGLGGSWCQHQWQLWCLWFLLQVRF

SEQ ID NO: 903729 - protein, 156 aa, Homo sapiens
MKVLKFACKVQKKDPKEWAAQYREAMEADLKAAAEAAAEAKARAEIRARMGIGLGSENAAGPCNWDEADIGPWAKARIQAGAEAKAKAQESGSASTGASTSTNNSASASASTSGGFSAGASLTATLTFGLFAGLGGSWCQHQWQLWCLWFLLQVRF

SEQ ID NO: 903730 - protein, 305 aa, Homo sapiens; identical to SEQ ID NO: 903725

SEQ ID NO: 903731 - protein, 305 aa, Homo sapiens; identical to SEQ ID NO: 903725

SEQ ID NO: 903732 - protein, 305 aa, Homo sapiens; identical to SEQ ID NO: 903725

SEQ ID NO: 903733 - protein, 305 aa, Homo sapiens; identical to SEQ ID NO: 903725

SEQ ID NO: 903734 - protein, 305 aa, Homo sapiens; identical to SEQ ID NO: 903725

SEQ ID NO: 903735 - protein, 191 aa, Homo sapiens; identical to SEQ ID NO: 903724

SEQ ID NO: 903736 - protein, 271 aa, Homo sapiens
MLKDIIKEYTDVYPEIIERAGYSLEKVFGIQLKEIDKNDHLYILLSTLEPTDAGILGTTKDSPKLGLLMVLLSIIFMNGNRSSEAVIWEVLRKLGLRPGIHHSLFGDVKKLITDEFVKQKYLDYARVPNSNPPEYEFFWGLRSYYETSKMKVLKFACKVQKKDPKEWAAQYREAMEADLKAAAEAAAEAKARAEIRARMGIGLGSENAAGPCNWDEADIGPWAKARIQAGAEAKAKAQESGSASTGASTSTNNSANQWQLWCLWFLLQVRF

SEQ ID NO: 903737 - protein, 366 aa, Homo sapiens
FYLKPLIYEVEDLPCVSSYEPSQEPEAPPPRDVALLQGRANDLVKYLLAKDQTKIPIKRSDMLKDIIKEYTDVYPEIIERAGYSLEKVFGIQLKEIDKNDHLYILLSTLEPTDAGILGTTKDSPKLGLLMVLLSIIFMNGNRSSEAVIWEVLRKLGLRPGIHHSLFGDVKKLITDEFVKQKYLDYARVPNSNPPEYEFFWGLRSYYETSKMKVLKFACKVQKKDPKEWAAQYREAMEADLKAAAEAAAEAKARAEIRARMGIGLGSENAAGPCNWDEADIGPWAKARIQAGAEAKAKAQESGSASTGASTSTNNSASASASTSGGFSAGASLTATLTFGLFAGLGGSWCQHQWQLWCLWFLLQVRF

SEQ ID NO: 903738 - protein, 179 aa, Homo sapiens
MLKDIIKEYTDVYPEIIERAGYSLEKVFGIQLKEIDKNDHLYILLSTLEPTDAGILGTTKDSPKLGLLMVLLSIIFMNGNRSSEAVIWEVLRKLGLRPGIHHSLFGDVKKLITDEFVKQKYLDYARVPNSNPPEYEFFWGLRSYYETSKMKVLKFACKVQKKDPKEGADQSQSARGSSG

SEQ ID NO: 903739 - protein, 231 aa, Homo sapiens
MLKDIIKEYTDVYPEIIERAGYSLEKVFGIQLKEIDKNDHLYILLSTLEPTDAGILGTTKDSPKLGLLMVLLSIIFMNGNRSSEAVIWEVLRKLGLRPGYIIHSLGDSDRKLITDELAESPKVPCTTPRSTQQQTPRQTQNTGGQAPNHGHRQKYTPQDARNAPPRPPGRAPTPKRRTAHTEHTKTPPPQPQASPPTHATSHPPPTPPNPTHPPPPPNPPHHPPTPPPPHT

SEQ ID NO: 903740 - protein, 191 aa, Homo sapiens; identical to SEQ ID NO: 903724

SEQ ID NO: 903741 - protein, 191 aa, Homo sapiens; identical to SEQ ID NO: 903724

SEQ ID NO: 903742 - protein, 150 aa, Homo sapiens
  misc_feature (2)..(2): Xaa can be any naturally occurring amino acid
NXIGQVRGLGVEDVKVSKASGVSKATEVSKTPEAREAPATQASSTTQLTDTQVLAAENKSLAADTKKQNADPQAVTMPATETKKVSHVADTKVNTKAQETEAAPSQAPADEPEPESAAAQSQENQDTRPKVKAKKARKVKHLDGGRGWQQ

SEQ ID NO: 903743 - protein, 76 aa, Homo sapiens
RKFPPRGINPVQNPEPPDRREGRRIPNSLEDKVRGVDIGVLWRSDSGSRPLEPIARQMSNSYCTTAAEAEVTWSGV

SEQ ID NO: 903744 - protein, 305 aa, Homo sapiens; identical to SEQ ID NO: 903725

SEQ ID NO: 903745 - protein, 98 aa, Homo sapiens
MLKDIIKEYTDVYPEIIERAGYSLEKVFGIQLKEIDKNDHLYILLSTLEPTDAGILGTTKDSPKLGLLMVLLSIIFMNGNRSSEAVIWEVGGEEGYRA

SEQ ID NO: 903746 - protein, 305 aa, Homo sapiens; identical to SEQ ID NO: 903725

SEQ ID NO: 903747 - protein, 305 aa, Homo sapiens; identical to SEQ ID NO: 903725

SEQ ID NO: 903748 - protein, 320 aa, Homo sapiens
MLKDIIKEYTDVYPEIIERAGYSLEKVFGIQLKEIDKNDHLYILLSTLEPTDAGILGTTKDSPKLGLLMVLLSIIFMNGNRSSEAVIWEVLRKLGLRPGYDWALSALAVRVVLWIHHSLFGDVKKLITDEFVKQKYLDYARVPNSNPPEYEFFWGLRSYYETSKMKVLKFACKVQKKDPKEWAAQYREAMEADLKAAAEAAAEAKARAEIRARMGIGLGSENAAGPCNWDEADIGPWAKARIQAGAEAKAKAQESGSASTGASTSTNNSASASASTSGGFSAGASLTATLTFGLFAGLGGSWCQHQWQLWCLWFLLQVRF

SEQ ID NO: 903749 - protein, 305 aa, Homo sapiens; identical to SEQ ID NO: 903725

SEQ ID NO: 903750 - protein, 305 aa, Homo sapiens; identical to SEQ ID NO: 903725

SEQ ID NO: 903751 - protein, 194 aa, Homo sapiens
MSLSSQSSDLAVLASLLISTEPGYATLGVVGKESIAWASGPPGISSVRCSQHSPLADMLKDIIKEYTDVYPEIIERAGYSLEKVFGIQLKEIDKNDHLYILLSTLEPTDAGILGTTKDSPKLGLLMVLLSIIFMNGNRSSEAVIWEVLRKLGLRPGYDWALSALAVRVVLWQERTVLGLHQSGGLVERVGCWTG

SEQ ID NO: 903752 - protein, 305 aa, Homo sapiens; identical to SEQ ID NO: 903725

SEQ ID NO: 903753 - protein, 191 aa, Homo sapiens; identical to SEQ ID NO: 903724

SEQ ID NO: 903754 - protein, 424 aa, Homo sapiens
VAYTTLSKDSSIRDGKTIGEDKDPYGNYYLSGPRGQNGYNLNPVKFSLNCFLAALFMEIPGPVYVCAFGYYSFGMPKRRSQEPEAPPPRDVALLQGRANDLVKYLLAKDQTKIPIKRSDMLKDIIKEYTDVYPEIIERAGYSLEKVFGIQLKEIDKNDHLYILLSTLEPTDAGILGTTKDSPKLGLLMVLLSIIFMNGNRSSEAVIWEVLRKLGLRPGIHHSLFGDVKKLITDEFVKQKYLDYARVPNSNPPEYEFFWGLRSYYETSKMKVLKFACKVQKKDPKEWAAQYREAMEADLKAAAEAAAEAKARAEIRARMGIGLGSENAAGPCNWDEADIGPWAKARIQAGAEAKAKAQESGSASTGASTSTNNSASASASTSGGFSAGASLTATLTFGLFAGLGGSWCQHQWQLWCLWFLLQVRF

SEQ ID NO: 903755 - protein, 272 aa, Homo sapiens
MLKDIIKEYTDVYPEIIERAGYSLEKVFGIQLKEIDKNDHLYILLSTLEPTDAGILGTTKDSPKLGLLMVLLSIIFMNGNRSSEAVIWEVLRKLGLRPGIHHSLFGDVKKLITDEFVKQKYLDYARVPNSNPPEYEFFWGLRSYYETSKMKYLLAKDQTKIPIKRSDMLKDIIKEYTDVYPEIIERAGYSLEKVFGIQLKEIDKNDHLYILLSTLEPTDAGILGTTKDSPKLGLLMVLLSIIFMNGNRSSEAVIWDSETYSTQHSRQPLSIN

SEQ ID NO: 903756 - protein, 191 aa, Homo sapiens; identical to SEQ ID NO: 903724

SEQ ID NO: 903757 - protein, 191 aa, Homo sapiens; identical to SEQ ID NO: 903724

SEQ ID NO: 903758 - protein, 218 aa, Homo sapiens
MSDTSESGAGLTRFQAEASEKDSSSMMQTLLTVTQNVEVPETPKASKALEVSEDVKVSKASGVSKATEVSKTPEAREAPATQASSTTQLTDTQVLAAENKSLAADTKKQNADPQAVTMPATETKKVSHVADTKVNTKAQETEAAPSQAPADEPEPESAAAQSQENQDTRPKVKAKKARKGEALDGERMERDQSKLWNTGATVPRRRARRREGRHLPAS

SEQ ID NO: 903759 - protein, 208 aa, Homo sapiens [sequence omitted]

SEQ ID NO: 903760 - protein, 208 aa, Homo sapiens [sequence omitted]

SEQ ID NO: 903761 - protein, 208 aa, Homo sapiens [sequence omitted]

SEQ ID NO: 903762 - protein, 214 aa, Homo sapiens
MRGALGARGARWRRGRFKEAPGRGRTGVAGWRGAVSPAAAGPGGRDAASSPAQARRGRPECRSRAGAGARVLDTAGQEEFSAMREQYMRTGDGFLIVYSVTDKASFEHVDRFHQLILRVKDRESFPMILVANKVDLMHLRKITREQGKEMATKHNIPYIETSAKDPPLNVDKAFHDLVRVIRQQIPEKSQKKKKKTKWRGDRATGTHKLQCVIL

SEQ ID NO: 903763 - protein, 208 aa, Homo sapiens [sequence omitted]

SEQ ID NO: 903764 - protein, 208 aa, Homo sapiens [sequence omitted]

SEQ ID NO: 903765 - protein, 208 aa, Homo sapiens [sequence omitted]

SEQ ID NO: 903766 - protein, 208 aa, Homo sapiens [sequence omitted]

SEQ ID NO: 903767 - protein, 208 aa, Homo sapiens [sequence omitted]

SEQ ID NO: 903768 - protein, 208 aa, Homo sapiens [sequence omitted]

SEQ ID NO: 903769 - protein, 592 aa, Homo sapiens
MHTRYSVSSPDSSVSPHPRAWSCRGSYRRSRPPTSASCRPTWRASSGRPSLCAAAAGKYKKRYSELEQQLLERSGELEQQRLRDTEHSQDLQSALIRLEEEPQRSASLAQVKAMLREHLDQAGSANQALSEDIQKVTNDWTRSRKELEQREAAWRREEESFNAYFSKKHNHLLLLWRQVVGFRRLVSEVKMFTERVTELGLAVKRLQKQNPEKDQVNTDLTEKLEALSVLSDTERRPAERLQRTADDSFGSLRGLSAQQTPSPPRRSSPGRGRSPRRGPSPACSDSSTLALIHSTLHKHELQVQDMRGRYEASQDLLGTLRKQLSDSESERRALEEQLQRLRDKTDSTMQAHEDAQREVQRLRSAKELLRREKSNLAHSLQVAQQQAKELRQERKKLQAAQEELRRQRYWLGEEQEDAVQDGVRVRRELERSHRQLEQLEGKRSVLAKELVEVREALSRATLQRDMLQAEKAEVAEALTKAEGRGGLPAGLPVQAERPQREPCSGQVGSEPPCHPGHSWRKKSAPCRAGSGRRSRRPQWHGKSRSGWRRCGWNRRWRGRAWRAPYERRSRPRRQWSSSSPRCIMSAAGCRSS

SEQ ID NO: 903770 - protein, 663 aa, Homo sapiens
MHTRYSVSSPDSSVSPHPRAWSCRGSYRRSRPPTSASCRPTWRASSGRPSLCAAAAGKYKKRYSELEQQLLERSGELEQQRLRDTEHSQDLQSALIRLEEEPQRSASLAQVKAMLREHLDQAGSANQALSEDIQKVTNDWTRSRKELEQREAAWRREEEDLLQLGGELARTSRAVQEAGLGLSTGLWLAESRAKAALEKQALLQAQLEEQLRDKVLHQKDLAQQQMQSDLDKADLSARVTELGLAVKRLQKQNPEKDQVNTDLTEKLEALESLRLQEQVALETEDGEGLQQSLRDLAQSVLSDTERRPAERLQRTADDSFGSLRGLSAQQTPSPPRRSSPGRGRSPRRGPSPACSDSSTLALIHSTLHKHELQVQDMRGRYEASQDLLGTLRKQLSDSESERRALEEQLQRLRDKTDSTMQAHEDAQREVQRLRSAKELLRREKSNLAHSLQVAQQQAKELRQERKKLQAAQEELRRQRYWLGEEQEDAVQDGVRVRRELERSHRQLEQLEGKRSVLAKELVEVREALSRATLQRDMLQAEKAEVAEALTKAEGRGGLPAGLPVQAERPQREPCSGQVGSEPPCHPGHSWRKKSAPCRAGSGRRSRRPQWHGKSRSGWRRCGWNRRWRGRAWRAPYERRSRPRRQWSSSSPRCIMSAAGCRSS

SEQ ID NO: 903771 - protein, 799 aa, Homo sapiens
MELNFYKIPDNLPFSTKNLDLSFNPLRHLGSYSFFSFPELQVLDLSRCEIQTIEDGAYQSLSHLSTLILTGNPIQSLALGAFSGLSSLQKLVAVETNLASLENFPIGHLKTLKELNVAHNLIQSFKLPEYFSNLTNLEHLDLSSNKIQSIYCTDLRVLHQMPLLNLSLDLSLNPMNFIQPGAFKEIRLHKLTLRNNFDSLNVMKTCIQGLAGLEVHRLVLGEFRNEGNLEKFDKSALEGLCNLTIEEFRLAYLDYYLDDIIDLFNCLTNVSSFSLVSVTIERVKDFSYNFGWQHLELVNCKFGQFPTLKLKSLKRLTFTSNKGGNAFSEVDLPSLEFLDLSRNGLSFKGCCSQSDFGTTSLKYLDLSFNGVITMSSNFLGLEQLEHLDFQHSNLKQMSEFSVFLSLRNLIYLDISHTHTRVAFNGIFNGLSSLEVLKMAGNSFQENFLPDIFTELRNLTFLDLSQCQLEQLSPTAFNSLSSLQVLNMSHNNFFSLDTFPYKCLNSLQVLDYSLNHIMTSKKQELQHFPSSLAFLNLTQNDFACTCEHQSFLQWIKDQRQLLVEVERMECATPSDKQGMPVLSLNITCQMNKTIIGVSVLSVLVVSVVAVLVYKFYFHLMLLAGCIKYGRGENIYDAFVIYSSQDEDWVRNELVKNLEEGVPPFQLCLHYRDFIPGVAIAANIIHEGFHKSRKVIVVVSQHFIQSRWCIFEYEIAQTWQFLSSRAGIIFIVLQKVEKTLLRQQVELYRLLSRNTYLEWEDSVLGRHIFWRRLRKALLDGKSWNPEGTVGTGCNWQEATSI

SEQ ID NO: 903772 - protein, 799 aa, Homo sapiens; identical to SEQ ID NO: 903771

SEQ ID NO: 903773 - protein, 639 aa, Homo sapiens
MPLLNLSLDLSLNPMNFIQPGAFKEIRLHKLTLRNNFDSLNVMKTCIQGLAGLEVHRLVLGEFRNEGNLEKFDKSALEGLCNLTIEEFRLAYLDYYLDDIIDLFNCLTNVSSFSLVSVTIERVKDFSYNFGWQHLELVNCKFGQFPTLKLKSLKRLTFTSNKGGNAFSEVDLPSLEFLDLSRNGLSFKGCCSQSDFGTTSLKYLDLSFNGVITMSSNFLGLEQLEHLDFQHSNLKQMSEFSVFLSLRNLIYLDISHTHTRVAFNGIFNGLSSLEVLKMAGNSFQENFLPDIFTELRNLTFLDLSQCQLEQLSPTAFNSLSSLQVLNMSHNNFFSLDTFPYKCLNSLQVLDYSLNHIMTSKKQELQHFPSSLAFLNLTQNDFACTCEHQSFLQWIKDQRQLLVEVERMECATPSDKQGMPVLSLNITCQMNKTIIGVSVLSVLVVSVVAVLVYKFYFHLMLLAGCIKYGRGENIYDAFVIYSSQDEDWVRNELVKNLEEGVPPFQLCLHYRDFIPGVAIAANIIHEGFHKSRKVIVVVSQHFIQSRWCIFEYEIAQTWQFLSSRAGIIFIVLQKVEKTLLRQQVELYRLLSRNTYLEWEDSVLGRHIFWRRLRKALLDGKSWNPEGTVGTGCNWQEATSI

SEQ ID NO: 903774 - protein, 873 aa, Homo sapiens
EDTSASETARSDGDSEPRIHRATAAHRSSEDDARMMSASRLAGTLIPAMAFLSCVRPESWEPCVEVVPNITYQCMELNFYKIPDNLPFSTKNLDLSFNPLRHLGSYSFFSFPELQVLDLSRCEIQTIEDGAYQSLSHLSTLILTGNPIQSLALGAFSGLSSLQKLVAVETNLASLENFPIGHLKTLKELNVAHNLIQSFKLPEYFSNLTNLEHLDLSSNKIQSIYCTDLRVLHQMPLLNLSLDLSLNPMNFIQPGAFKEIRLHKLTLRNNFDSLNVMKTCIQGLAGLEVHRLVLGEFRNEGNLEKFDKSALEGLCNLTIEEFRLAYLDYYLDDIIDLFNCLTNVSSFSLVSVTIERVKDFSYNFGWQHLELVNCKFGQFPTLKLKSLKRLTFTSNKGGNAFSEVDLPSLEFLDLSRNGLSFKGCCSQSDFGTTSLKYLDLSFNGVITMSSNFLGLEQLEHLDFQHSNLKQMSEFSVFLSLRNLIYLDISHTHTRVAFNGIFNGLSSLEVLKMAGNSFQENFLPDIFTELRNLTFLDLSQCQLEQLSPTAFNSLSSLQVLNMSHNNFFSLDTFPYKCLNSLQVLDYSLNHIMTSKKQELQHFPSSLAFLNLTQNDFACTCEHQSFLQWIKDQRQLLVEVERMECATPSDKQGMPVLSLNITCQMNKTIIGVSVLSVLVVSVVAVLVYKFYFHLMLLAGCIKYGRGENIYDAFVIYSSQDEDWVRNELVKNLEEGVPPFQLCLHYRDFIPGVAIAANIIHEGFHKSRKVIVVVSQHFIQSRWCIFEYEIAQTWQFLSSRAGIIFIVLQKVEKTLLRQQVELYRLLSRNTYLEWEDSVLGRHIFWRRLRKALLDGKSWNPEGTVGTGCNWQEATSI

SEQ ID NO: 903775 - protein, 799 aa, Homo sapiens; identical to SEQ ID NO: 903771

SEQ ID NO: 903776 - protein, 104 aa, Homo sapiens
QNAKVAAFTSSHPLAQNCFEYTNCCGAARGREDTSASETARSDGDSEPRIHRATAAHRSSEDDARMMSASRLAGTLIPAMAFLSCVRPESWEPCVEVCGWSQLL

SEQ ID NO: 903777 - protein, 672 aa, Homo sapiens
PNGVALLHLPGAAVIPNTNYMFQDALGGRSRGSREESPAPSRAPASASLWRRLVVVEAKMAAQAAAAAQAAAAQAAQAEAADSWYLALLGFAEHFRTSSPPKIRLCVHCLQAVFPFKPPQRIEARTHLQLGSVLYHHTKNSEQARSHLEKAWLISQQIPQFEDVKFEAASLLSELYCQENSVDAAKPLLRKAIQISQQTPYWHCRLLFQLAQLHTLEKDLVSACDLLGVGAEYARVVGSEYTRALFLLSKGMLLLMERKLQEVHPLLTLCGQIVENWQGNPIQKESLRVFFLVLQVTHYLDAGQVKSVKPCLKQLQQCIQTISTLHDDEILPSNPADLFHWLPKEHMCVLVYLVTVMHSMQAGYLEKAQKYTDKALMQLEKLKMLDCSPILSSFQVILLEHIIMCRLVTGHKATALQEISQVCQLCQQSPRLFSNHAAQLHTLLGLYCVSVNCMDNAEAQFTTALRLTNHQELWAFIVTNLASVYIREGNRHQEVLYSLLERINPDHSFPVSSHCLRAAAFYVRGLFSFFQGRYNEAKRFLRETLKMSNAEDLNRLTACSLVLLGHIFYVLGNHRESNNMVVPAMQLASKIPDMSVQLWSSALLRDLNKACGNAMDAHEAAQMHQNFSQQLLQDHIEACSLPEHNLITWTDGPPPVQFQAQNGPNTSLASLL

SEQ ID NO: 903778 - protein, 974 aa, Homo sapiens
PNGVALLHLPGAAVIPNTNYMFQDALGGRSRGSREESPAPSRAPASASLWRRLVVVEAKMAAQAAAAAQAAAAQAAQAEAADSWYLALLGFAEHFRTSSPPKIRLCVHCLQAVFPFKPPQRIEARTHLQLGSVLYHHTKNSEQARSHLEKAWLISQQIPQFEDVKFEAASLLSELYCQENSVDAAKPLLRKAIQISQQTPYWHCRLLFQLAQLHTLEKDLVSACDLLGVGAEYARVVGSEYTRALFLLSKGMLLLMERKLQEVHPLLTLCGQIVENWQGNPIQKESLRVFFLVLQVTHYLDAGQVKSVKPCLKQLQQCIQTISTLHDDEILPSNPADLFHWLPKEHMCVLVYLVTVMHSMQAGYLEKAQKYTDKALMQLEKLKMLDCSPILSSFQVILLEHIIMCRLVTGHKATALQEVRLEAGGAGRPRSLLGLSSVRQETEFTKCILAGQPILLSRCRPAFYSPAWAPLIRESHTKTSGGRAQWLTPVIPAVWEAEAGGSLEARSLRPAWPTWRNPASTKNIKISQVWWQTPVIPVLERLRQENSLNPGGRGCSEPRSHYCTPTWATEGDSISKKKTQKTNGPWPKSLHTKGIAHMVSGDLGGPLTVIVIPHPAIRNTLPPVPTLLRGHGGPQQAGGPLQPRHLLDRVEETSNRQGSLSTMGSGLPFALMVDVSAGALYPSLVRQDMGSPTSYGVSPLLLRRQVPGCSPVMAVHSLPADLPGLPAVPAVPPALLQPCSTAAHIAGPVCVSVNCMDNAEAQFTTALRLTNHQELWAFIVTNLASVYIREGNRHQEVLYSLLERINPDHSFPVSSHCLRAAAFYVRGLFSFFQGRYNEAKRFLRETLKMSNAEDLNRLTACSLVLLGHIFYVLGNHRESNNMVVPAMQLASKIPDMSVQLWSSALLRDLNKACGNAMDAHEAAQMHQNFSQQLLQDHIEACSLPEHNLITWTDGPPPVQFQAQNGPNTSLASLL

SEQ ID NO: 903779 - protein, 984 aa, Homo sapiens
PNGVALLHLPGAAVIPNTNYMFQDALGGRSRGSREESPAPSRAPASASLWRRLVVVEAKMAAQAAAAAQAAAAQAAQAEAADSWYLALLGFAEHFRTSSPPKIRLCVHCLQAVFPFKPPQRIEARTHLQLGSVLYHHTKNSEQARSHLEKAWLISQQIPQFEDVKFEAASLLSELYCQENSVDAAKPLLRKAIQISQQTPYWHCRLLFQLAQLHTLEKDLVSACDLLGVGAEYARVVGSEYTRALFLLSKGMLLLMERKLQEVHPLLTLCGQIVENWQGNPIQKESLRVFFLVLQVTHYLDAGQVKSVKPCLKQLQQCIQTISTLHDDEILPSNPADLFHWLPKEHMCVLVYLVTVMHSMQAGYLEKAQKYTDKALMQLEKLKMLDCSPILSSFQVILLEHIIMCRLVTGHKATALQEVRLEAGGAGRPRSLLGLSSVRQETEFTKCILAGQPILLSRCRPAFYSPAWAPLIRESHTKTSGGRAQWLTPVIPAVWEAEAGGSLEARSLRPAWPTWRNPASTKNIKISQVWWQTPVIPVLERLRQENSLNPGGRGCSEPRSHYCTPTWATEGDSISKKKTQKTNGPWPKSLHTKGIAHMVSGDLGGPLTVIVIPHPAIRNTLPPVPTLLRGHGGPQQAGGPLQPRHLLDRVEETSNRQGSLSTMGSGLPFALMVDVSAGALYPSLVRQDMGSPTSYGVSPLLLRRQVPGCSPVMAVHSLPADLPGLPAVPAVPPALLQPCSTAAHIAGPVCVSVNCMDNAEAQFTTALRLTNHQELWAFIVTNLASVYIREGNRHQEVLYSLLERINPDHSFPVSSHCLRAAAFYVRGLFSFFQGRYNEAKRFLRETLKMSNAEDLNRLTACSLVLLGHIFYVLGNHRESNNMVVPAMQLASKIPDMSVQLWSSALLRDLNKACGNAMDAHEAAQMHQNFSQQLLQDHIEACSLPEHNLITVRVWVLGDGIRTSGLPTCKRKGHLGCISLLSNKP

SEQ ID NO: 903780 - protein, 984 aa, Homo sapiens; identical to SEQ ID NO: 903779

SEQ ID NO: 903781 - protein, 974 aa, Homo sapiens; identical to SEQ ID NO: 903778

SEQ ID NO: 903782 - protein, 974 aa, Homo sapiens; identical to SEQ ID NO: 903778

SEQ ID NO: 903783 - protein, 672 aa, Homo sapiens; identical to SEQ ID NO: 903777

SEQ ID NO: 903784 - protein, 312 aa, Homo sapiens
MGSGLPFALMVDVSAGALYPSLVRQDMGSPTSYGVSPLLLRRQVPGCSPVMQYTLSRQISQVCQLCQQSPRLFSNHAAQLHTLLGLYCVSVNCMDNAEAQFTTALRLTNHQELWAFIVTNLASVYIREGNRHQEVLYSLLERINPDHSFPVSSHCLRAAAFYVRGLFSFFQGRYNEAKRFLRETLKMSNAEDLNRLTACSLVLLGHIFYVLGNHRESNNMVVPAMQLASKIPDMSVQLWSSALLRDLNKACGNAMDAHEAAQMHQNFSQQLLQDHIEACSLPEHNLITWTDGPPPVQFQAQNGPNTSLASLL

SEQ ID NO: 903785 - protein, 974 aa, Homo sapiens; identical to SEQ ID NO: 903778

SEQ ID NO: 903786 - protein, 974 aa, Homo sapiens; identical to SEQ ID NO: 903778

SEQ ID NO: 903787 - protein, 102 aa, Homo sapiens
LDRVEETSNRQGSLSTMGSGLPFALMVDVSAGALYPSLVRQDMGSPTSYGVSPLLLRRQVPGCSPVMAVHSLPADLPGLPAVPAVPPALLQPCSTAAHIAGE

SEQ ID NO: 903788 - protein, 744 aa, Homo sapiens
GGGRYGADKMAAGGAVAAAPECRLLPYALHKWSSFSSTYLPENILVDKPNDQSSRWSSESNYPPQYLILKLERPAIVQNITFGKYEKTHVCNLKKFKVFGGMNEENMTELLSSGLKNDYNKETFTLKHKIDEQMFPCRFIKIVPLLSWGPSFNFSIWYVELSGIDDPDIVQPCLNWYSKYREQEAIRLCLKHFRQHNYTEAFESLQKKTKIALEHPMLTDIHDKLVLKGDFDACEELIEKAVNDGLFNQYISQQEYKPRWSQIIPKSTKGDGEDNRPGMRGGHQMVIDVQTETVYLFGGWDGTQDLADFWAYSVKENQWTCISRDTEKENGPSARSCHKMCIDIQRRQIYTLGRYLDSSVRNSKSLKSDFYRYDIDTNTWMLLSEDTAADGGPKLVFDHQMCMDSEKHMIYTFGGRILTCNGSVDDSRASEPQFSGLFAFNCQCQTWKLLREDSCNAGPEDIQSRIGHCMLFHSKNRCLYVFGGQRSKTYLNDFFSYDVDSDHVDIISDGTKKDSGMVPMTGFTQRATIDPELNEIHVLSGLSKDKEKREENVRNSFWIYDIVRNSWSCVYKNDQAAKDNPTKSLQEEEPCPRFAHQLVYDELHKVHYLFGGNPGKSCSPKMRLDDFWSLKLCRPSKDYLLRHCKYLIRKHRFEEKAQVDPLSALKYLQNDLYITVDHSDPEETKEFQLLASALFKSGSDFTALGFSDVDHTYAQRTQLFDTLVNFFPDSMTPPKGNLVDLITL

SEQ ID NO: 903789 - protein, 744 aa, Homo sapiens; identical to SEQ ID NO: 903788

SEQ ID NO: 903790 - protein, 705 aa, Homo sapiens
GGGRYGADKMAAGGAVAAAPECRLLPYALHKWSSFSSTYLPENILVDKPNDQSSRWSSESNYPPQYLILKLERPAIVQNITFGKYEKTHVCNLKKFKVFGGMNEENMTELLSSGLKNDYNKETFTLKHKIDEQMFPCRFIKIVPLLSWGPSFNFSIWYVELSGIDDPDIVQPCLNWYSKYREQEAIRLCLKHFRQHNYTEAFESLQKKTKIALEHPMLTDIHDKLVLKGDFDACEELIEKAVNDGLFNQYISQQEYKPRWSQIIPKSTKGDGEDNRPGMRGGHQMVIDVQTETVYLFGGWDGTQDLADFWAYSVKENQWTCISRDTEKENGPSARSCHKMCIDIQRRQIYTLGRYLDSSVRNSKSLKSDFYRYDIDTNTWMLLSEDTAADGGPKLVFDHQMCMDSEKHMIYTFGGRILTCNGSVDDSRASEPQFSGLFAFNCQCQTWKLLREDSCNAGPEDIQSRIGHCMLFHSKNRCLYVFGGQRSKTYLNDFFSYDVDSDHVDIISDGTKKDSGMVPMTGFTQRATIDPELNEIHVLSGLSKDKEKREENVRNSFWIYDIVRNSWSCVYKNDQAAKDNPTKSLQEEEPCPRFAHQLVYDELHKVHYLFGGNPGKSCSPKMRLDDFWSLKLCRPSKDYLLRHCKYLIRKHRFEEKAQVDPLSALKYLQNDLYITVDHSDPEETKEFQLLASALFKSGSDFTALA

SEQ ID NO: 903791 - protein, 691 aa, Homo sapiens
GGGRYGADKMAAGGAVAAAPECRLLPYALHKWSSFSSTYLPENILVDKPNDQSSRWSSESNYPPQYLILKLERPAIVQNITFGKYEKTHVCNLKKFKVFGGMNEENMTELLSSGLKNDYNKETFTLKHKIDEQMFPCRFIKIVPLLSWGPSFNFSIWYVELSGIDDPDIVQPCLNWYSKYREQEAIRLCLKHFRQHNYTEAFESLQKKTKIALEHPMLTDIHDKLVLKGDFDACEELIEKAVNDGLFNQYISQQEYKPRWSQIIPKSTKGDGEDNRPGMRGGHQMVIDVQTETVYLFGGWDGTQDLADFWAYSVKENQWTCISRDTEKENGPSARSCHKMCIDIQRRQIYTLGRYLDSSVRNSKSLKSDFYRYDIDTNTWMLLSEDTAADGGPKLVFDHQMCMDSEKHMIYTFGGRILTCNGSVDDSRASEPQFSGLFAFNCQCQTWKLLREDSCNAGPEDIQSRIGHCMLFHSKNRCLYVFGGQRSKTYLNDFFSYDVDSDHVDIISDGTKKDSGMVPMTGFTQRATIDPELNEIHVLSGLSKDKEKREENVRNSFWIYDIVRNSWSCVYKNDQAAKDNPTKSLQEEEPCPRFAHQLVYDELHKVHYLFGGNPGKSCSPKMRLDDFWSLKLCRPSKDYLLRHCKYLIRKHRFEEKAQVDPLSALKYLQNDLYITVDHSDPEETKEASLFI

SEQ ID NO: 903792 - protein, 280 aa, Homo sapiens
GGGRYGADKMAAGGAVAAAPECRLLPYALHKWSSFSSTYLPENILVDKPNDQSSRWSSESNYPPQYLILKLERPAIVQNITFGKYEKTHVCNLKKFKVFGGMNEENMTELLSSGLKNDYNKETFTLKHKIDEQMFPCRFIKIVPLLSWGPSFNFSIWYVELSGIDDPDIVQPCLNWYSKYREQEAIRLCLKHFRQHNYTEAFESLQKKTKIALEHPMLTDIHDKLVLKGDFDACEELIEKAVNDGLFNQYISQQEYKPRWSQIIPLMISGLSFIQSVWTF

SEQ ID NO: 903793 - protein, 695 aa, Homo sapiens
GGGRYGADKMAAGGAVAAAPECRLLPYALHKWSSFSSTYLPENILVDKPNDQSSRWSSESNYPPQYLILKLERPAIVQNITFGKYEKTHVCNLKKFKVFGGMNEENMTELLSSGLKNDYNKETFTLKHKIDEQMFPCRFIKIVPLLSWGPSFNFSIWYVELSGIDDPDIVQPCLNWYSKYREQEAIRLCLKHFRQHNYTEAFESLQKKTKIALEHPMLTDIHDKLVLKGDFDACEELIEKAVNDGLFNQYISQQEYKPRWSQIIPKSTKGDGEDNRPGMRGGHQMVIDVQTETVYLFGGWDGTQDLADFWAYSVKENQWTCISRDTEKENGPSARSCHKMCIDIQRRQIYTLGRYLDSSVRNSKSLKSDFYRYDIDTNTWMLLSEDTAADGGPKLVFDHQMCMDSEKHMIYTFGGRILTCNGSVDDSRASEPQFSGLFAFNCQCQTWKLLREDSCNAGPEDIQSRIGHCMLFHSKNRCLYVFGGQRSKTYLNDFFSYDVDSDHVDIISDGTKKDSGMVPMTGFTQRATIDPELNEIHVLSGLSKDKEKREENVRNSFWIYDIVRNSWSCVYKNDQAAKDNPTKSLQEEEPCPRFAHQLVYDELHKVHYLFGGNPGKSCSPKMRLDDFWSLKLCRPSKDYLLRHCKYLIRKHRFEEKAQVDPLSALKYLQNDLYIISAPGISSIQIWFRFYSSGLF

SEQ ID NO: 903794 - protein, 744 aa, Homo sapiens; identical to SEQ ID NO: 903788

SEQ ID NO: 903795 - protein, 715 aa, Homo sapiens
GGGRYGADKMAAGGAVAAAPECRLLPYALHKWSSFSSTYLPENILVDKPNDQSSRWSSESNYPPQYLILKLERPAIVQNITFGKYEKTHVCNLKKFKVFGGMNEENMTELLSSGLKNDYNKETFTLKHKIDEQMFPCRFIKIVPLLSWGPSFNFSIWYVELSGIDDPDIVQPCLNWYSKYREQEAIRLCLKHFRQHNYTEAFESLQKKTKIALEHPMLTDIHDKLVLKGDFDACEELIEKAVNDGLFNQYISQQEYKPRWSQIIPKSTKGDGEDNRPGMRGGHQMVIDVQTETVYLFGGWDGTQDLADFWAYSVKENQWTCISRDTEKENGPSARSCHKMCIDIQRRQIYTLGRYLDSSVRNSKSLKSDFYRYDIDTNTWMLLSEDTAADGGPKLVFDHQMCMDSEKHMIYTFGGRILTCNGSVDDSRASEPQFSGLFAFNCQCQTWKLLREDSCNAGPEDIQSRIGHCMLFHSKNRCLYVFGGQRSKTYLNDFFSYDVDSDHVDIISDGTKKDSGMVPMTGFTQRATIDPELNEIHVLSGLSKDKEKREENVRNSFWIYDIVRNSWSCVYKNDQAAKDNPTKSLQEEEPCPRFAHQLVYDELHKVHYLFGGNPGKSCSPKMRLDDFWSLKLCRPSKDYLLRHCKYLIRKHRFEEKAQVDPLSALKYLQNDLYITVDHSDPEETKEVKKGGNKFQKLSIFKCLPNLYLMILLLSV

SEQ ID NO: 903796 - protein, 307 aa, Homo sapiens
MGTVLSLSPSYRKATLFEDGAATVGHYTAVQNSKNAKDKNLKRHSIISVLPWKRIVAVSAKKKNSKKVQPNSSYQNNITHLNNENLKKSLSCANLSTFAQPPPAQPPAPPASQLSGSQTGGSSSVKKAPHPAVTSAGTPKRVIVQASTSELLRCLGEFLCRRCYRLKHLSPTDPVLWLRSVDRSLLLQGWQDQGFITPANVVFLYMLCRDVISSEVGSDHELQAVLLTCLYLSYSYMGNEISYPLKPFLVESCKEAFWDRCLSVINLMSSKMLQINADPHYFTQVFSDLKNESGQEDKKRLLLGLDR

SEQ ID NO: 903797 - protein, 173 aa, Homo sapiens [sequence omitted]

SEQ ID NO: 903798 - protein, 307 aa, Homo sapiens; identical to SEQ ID NO: 903796

SEQ ID NO: 903799 - protein, 307 aa, Homo sapiens; identical to SEQ ID NO: 903796

SEQ ID NO: 903800 - protein, 351 aa, Homo sapiens [sequence omitted]

SEQ ID NO: 903801 - protein, 351 aa, Homo sapiens [sequence omitted]

SEQ ID NO: 903802 - protein, 351 aa, Homo sapiens [sequence omitted]

SEQ ID NO: 903803 - protein, 351 aa, Homo sapiens [sequence omitted]

SEQ ID NO: 903804 - protein, 316 aa, Homo sapiens
MADQDPAGISPLQQMVASGTGAVVTSLFRKCLLYCNGVLEPLYLCPNGARCATWFQDPTRFTGTMDAFVKIVRHEGTRTLWSGLPATLVMTVPATAIYFTAYDQLKAFLCGRALTSDLYAPMVAGALARLGTVTVISPLELMRTKLQAQHVSYRELGACVRTAVAQGGWRSLWLGWGPTALRDVPFSALYWFNYELVKSWLNGLRPKDQTSVGMSFVAGGISGTVAAVLTLPFDVVKTQRQVALGAMEAVRVNPLHVDSTWLLLRRIRAESGTKGLFAGFLPRIIKAAPSCAIMISTYEFGKSFFQRLNQDRLLGG

SEQ ID NO: 903805 - protein, 351 aa, Homo sapiens [sequence omitted]

SEQ ID NO: 903806 - protein, 357 aa, Homo sapiens
MADQDPAGISPLQQMVASGTGAVVTSLFMTPLDVVKVRLQSQRPSMASELMPSSRLWSLSYTKWKCLLYCNGVLEPLYLCPNGARCATWFQDPTRFTGTMDAFVKIVRHEGTRTLWSGLPATLVMTVPATAIYFTAYDQLKAFLCGRALTSDLYAPMVAGALARLGTVTVISPLELMRTKLQAQHVSYRELGACVRTAVAQGGWRSLWLGWGPTALRDVPFSVHPPPQALYWFNYELVKSWLNGLRPKDQTSVGMSFVAGGISGTVAAVLTLPFDVVKTQRQVALGAMEAVRVNPLHVDSTWLLLRRIRAESGTKGLFAGFLPRIIKAAPSCAIMISTYEFGKSFFQRLNQDRLLGG

SEQ ID NO: 903807 - protein, 258 aa, Homo sapiens
MVSWSLCTCAQMVPAVPPGFKTLPASLAPWVMTVPATAIYFTAYDQLKAFLCGRALTSDLYAPMVAGALARLGTVTVISPLELMRTKLQAQHVSYRELGACVRTAVAQGGWRSLWLGWGPTALRDVPFSALYWFNYELVKSWLNGLRPKDQTSVGMSFVAGGISGTVAAVLTLPFDVVKTQRQVALGAMEAVRVNPLHVDSTWLLLRRIRAESGTKGLFAGFLPRIIKAAPSCAIMISTYEFGKSFFQRLNQDRLLGG

SEQ ID NO: 903808 - protein, 419 aa, Homo sapiens
MADQDPAGISPLQQMVASGTGAVVTSLFMTPLDVVKVRLQSQRPSMASELMPSSRLWSLSYTKWKCLLYCNGVLEPLYLCPNGARCATWFQDPTRFTGTMDAFVKIVRHEGTRTLWSGLPATLVMTVPATAIYFTAYDQLKAFLCGRALTSDLYAPMVAGALARREHSLVAFDLPLSPPRPKPSQSQLPAPTSASLGIGGCSRSPDLGQQVGDAMLRPVISLLPIVTPNPHTVGTVTVISPLELMRTKLQAQHVSYRELGACVRTAVAQGGWRSLWLGWGPTALRDVPFSALYWFNYELVKSWLNGLRPKDQTSVGMSFVAGGISGTVAAVLTLPFDVVKTQRQVALGAMEAVRVNPLHVDSTWLLLRRIRAESGTKGLFAGFLPRIIKAAPSCAIMISTYEFGKSFFQRLNQDRLLGG

SEQ ID NO: 903809 - protein, 195 aa, Homo sapiens
MADQDPAGISPLQQMVASGTGAVVTSLFMTPLDVVKVRLQSQRPSMASELMPSSRLWSLSYTKWKCLLYCNGVLEPLYLCPNGARCATWFQDPTRFTGTMDAFVKIVRHEGTRTLWSGLPATLVMTVPATAIYFTAYDQLKAFLCGRALTSDLYAPMVAGALARREHSLGPLTSLCPHLGPNPVSPSSQPQPLPA

SEQ ID NO: 903810 - protein, 195 aa, Homo sapiens; identical to SEQ ID NO: 903809

SEQ ID NO: 903811 - protein, 271 aa, Homo sapiens
MADQDPAGISPLQQMVASGTGAVVTSLFMTPLDVVKVRLQSQRPSMASELMPSSRLWSLSYTKWKCLLYCNGVLEPLYLCPNGARCATWFQDPTRFTGTMDAFVKIVRHEGTRTLWSGLPATLVMTVPATAIYFTAYDQLKAFLCGRALTSDLYAPMVAGALARLGTVTVISPLELMRTVAAVLTLPFDVVKTQRQVALGAMEAVRVNPLHVDSTWLLLRRIRAESGTKGLFAGFLPRIIKAAPSCAIMISTYEFGKSFFQRLNQDRLLGG

SEQ ID NO: 903812 - protein, 279 aa, Homo sapiens
MADQDPAGISPLQQMVASGTGAVVTSLFMTPLDVVKVRLQSQRPSMASELMPSSRLWSLSYTKLPSSLQSTGKCLLYCNGVLEPLYLCPNGARCATWFQDPTRFTGTMDAFVKIVRHEGTRTLWSGLPATLVMTVPATAIYFTAYDQLKAFLCGRALTSDLYAPMVAGALARLGTVTVISPLELMRTVAAVLTLPFDVVKTQRQVALGAMEAVRVNPLHVDSTWLLLRRIRAESGTKGLFAGFLPRIIKAAPSCAIMISTYEFGKSFFQRLNQDRLLGG

SEQ ID NO: 903813 - protein, 351 aa, Homo sapiens [sequence omitted]

SEQ ID NO: 903814 - protein, 359 aa, Homo sapiens [sequence omitted]

SEQ ID NO: 903815 - protein, 351 aa, Homo sapiens [sequence omitted]

SEQ ID NO: 903816 - protein, 351 aa, Homo sapiens [sequence omitted]

SEQ ID NO: 903817 - protein, 424 aa, Homo sapiens
MADQDPAGISPLQQMVASGTGAVVTSLFMTPLDVVKVRLQSQRPSMASELMPSSRLWSLSYTKWKCLLYCNGVLEPLYLCPNGARCATWFQDPTRFTGTMDAFVKIVRHEGTRTLWSGLPATLVMTVPATAIYFTAYDQLKAFLCGRALTSDLYAPMVAGALARLGTVTVISPLELMRTKLQAQHVSYRELGACVRTAVAQGGWRSLWLGWGPTALRDVPFSALYWFNYELVKSWLNGLRPKDQTSVGMSFVAGGISGTVAAVLTLPFDVVKTQRQVALGAMEAVRVNPLHVDSTWLLLRRIRAESGTKGLFAGFLPRIIKAAPSCAIMISTYEFGKSPVSPTDGERAGGDPAKCLFLSTEGGGLFPFPPGDKLQGRAVPLGGPALPQTQLLPAAPVVGIITYPPPKFKTKSSSCPLRVSLCLL

SEQ ID NO: 903818 - protein, 460 aa, Homo sapiens
MADQDPAGISPLQQMVASGTGAVVTSLFMTPLDVVKVRLQSQRPSMASELMPSSRLWSLSYTKWKCLLYCNGVLEPLYLCPNGARCATWFQDPTRFTGTMDAFVKIVRHEGTRTLWSGLPATLVMTVPATAIYFTAYDQLKAFLCGRALTSDLYAPMVAGALARLGTVTVISPLELMRTKLQAQHVSYRELGACVRTAVAQGGWRSLWLGWGPTALRDVPFSGRHPSCRGWVREPWGDCTKGLQPSPSFVTSDHEVTSAFLSHGFLICEVGLAGRVFAQAVRRLIPTECLLLSLHVADKTHSWEGVVAVKGGRSGATSLPFPSLTVHPPPQALYWFNYELVKSWLNGLRPKDQTSVGMSFVAGGISGTVAAVLTLPFDVVKTQRQVALGAMEAVRVNPLHVDSTWLLLRRIRAESGTKGLFAGFLPRIIKAAPSCAIMISTYEFGKSFFQRLNQDRLLGG

SEQ ID NO: 903819 - protein, 341 aa, Homo sapiens
MADQDPAGISPLQQMVASGTGAVVTSLFMTPLDVVKVRLQSQRPSMASELMPSSRLWSLSYTKWKCLLYCNGVLEPLYLCPNGARCATWFQDPTRFTGTMDAFVKIVRHEGTRTLWSGLPATLVMTVPATAIYFTAYDQLKAFLCGRALTSDLYVGTVTVISPLELMRTKLQAQHVSYRELGACVRTAVAQGGWRSLWLGWGPTALRDVPFSALYWFNYELVKSWLNGLRPKDQTSVGMSFVAGGISGTVAAVLTLPFDVVKTQRQVALGAMEAVRVNPLHVDSTWLLLRRIRAESGTKGLFAGFLPRIIKAAPSCAIMISTYEFGKSFFQRLNQDRLLGG

SEQ ID NO: 903820 - protein, 279 aa, Homo sapiens
MADQDPAGISPLQQMVASGTGAVVTSLFMTPLDVVKVRLQSQRPSMASELMPSSRLWSLSYTKWKCLLYCNGVLEPLYLCPNGARCATWFQDPTRFTGTMDAFVKIVRHEGTRTLWSGLPATLVMTVPATAIYFMWLGWGPTALRDVPFSALYWFNYELVKSWLNGLRPKDQTSVGMSFVAGGISGTVAAVLTLPFDVVKTQRQVALGAMEAVRVNPLHVDSTWLLLRRIRAESGTKGLFAGFLPRIIKAAPSCAIMISTYEFGKSFFQRLNQDRLLGG

SEQ ID NO: 903821 - protein, 264 aa, Homo sapiens
MVSWSLCTCAQMVPAVPPGFKTLPASLAPWVMTVPATAIYFTAYDQLKAFLCGRALTSDLYAPMVAGALARLGTVTVISPLELMRTKLQAQHVSYRELGACVRTAVAQGGWRSLWLGWGPTALRDVPFSVHPPPQALYWFNYELVKSWLNGLRPKDQTSVGMSFVAGGISGTVAAVLTLPFDVVKTQRQVALGAMEAVRVNPLHVDSTWLLLRRIRAESGTKGLFAGFLPRIIKAAPSCAIMISTYEFGKSFFQRLNQDRLLGG

SEQ ID NO: 903822 - protein, 253 aa, Homo sapiens
MADQDPAGISPLQQMVASGTGAVVTSLFMTPLDVVKVRLQSQRPSMASGKCLLYCNGVLEPLYLCPNGARCATWFQDPTRFTGTMDAFVKIVRHEGTRTLWSGLPATLVMTVPATAIYFTAYDQLKAFLCGRALTSDLYAPMVAGALARLGTVTVISPLELMRTKLQAQHVSYRELGACVRTAVAQGGWRSLWLGWGPTALRDVPFSACLCSTMSCCRPWLKGLRPMSRLLVGQLTLEARWGHSGTTACEGCT

SEQ ID NO: 903823 - protein, 229 aa, Homo sapiens
MTTAARPTFEPARGGRGKGEGDLSQLSKQYSSRDLPSHTKIKYRQTTQDAPEEVRNRDFRRELEERERAAAREKNRDRPTREHTTSSSVSKKPRLDQIPAANLDADDPLTDEEDEDFEEESDDDDTAALLAELEKIKKERAEEQARKEQEQKAEEERIRMENILSGNPLLNLTGPSQPQANFKVKRRWDDDVVFKNCAKGVDDQKKDKRFVNDTLRSEFHKKFMEKYIK

SEQ ID NO: 903824 - protein, 229 aa, Homo sapiens; identical to SEQ ID NO: 903823

SEQ ID NO: 903825 - protein, 229 aa, Homo sapiens; identical to SEQ ID NO: 903823

SEQ ID NO: 903826 - protein, 144 aa, Homo sapiens
MTTAARPTFEPARGGRGKGEGDLSQLSKQYSSRDLPSHTKIKYRQTTQDAPEEVRNRDFRRELEERERAAAREKNRDRPTREHTTSSSVSKKRKMKILKKKVMMMILQLFLQNWKKLKKKELKSRPGRNKNKKLKKRGFVWKTF

SEQ ID NO: 903827 - protein, 120 aa, Homo sapiens
MTTAARPTFEPARGGRGKGEGDLSQLSKQYSSRDLPSHTKIKYRQTTQDAPEEVRNRDFRRELEERERAAAREKNRDRPTREHTTSSSVSKKPRLDQIPAANLDADDPLTDVCFVSSFHL

SEQ ID NO: 903828 - protein, 229 aa, Homo sapiens; identical to SEQ ID NO: 903823

SEQ ID NO: 903829 - protein, 120 aa, Homo sapiens; identical to SEQ ID NO: 903827

SEQ ID NO: 903830 - protein, 191 aa, Homo sapiens
MTTAARPTFEPARGGRGKGEGDLSQLSKQYSSRDLPSHTKIKYRQTTQDAPEEVRNRDFRRELEERERAAAREKNRDRPTREHTTSSSVSKKPRLDQIPAANLDADDPLTDEEDEDFEEESDDDDTAALPLLNLTGPSQPQANFKVKRRWDDDVVFKNCAKGVDDQKKDKRFVNDTLRSEFHKKFMEKYIK

SEQ ID NO: 903831 - protein, 120 aa, Homo sapiens
MPLKRFVTVTSGESWKKERELAELEKIKKERAEEQARKEQEQKAEEERIRMENILSGNPLLNLTGPSQPQANFKVKRRWDDDVVFKNCAKGVDDQKKDKRFVNDTLRSEFHKKFMEKYIK

SEQ ID NO: 903832 - protein, 257 aa, Homo sapiens
ILFSSFYLSAKKARSKLSCLFVPSYMSPPLPTGMEFEGAIIALFHLLATRTDKVRALREAFYRQNLPNLMNLIATIFVFAVVIYFQVCPDPTPGSFHGLDLSFRMPCVQSPTLWGALSSYCVETMRWYLKAAGFQMSWTSMFIESWDLFHFLWSIQHGPDYHHSVQKVKRDAVRGCDVLSASDDTVASVGCKDDDGSDRRLQGAVQVGEALNVQHVDLINKQHTRDQLSNALVDVLVHHLINLPSKFVCDFCLLWLH

SEQ ID NO: 903833 - protein, 476 aa, Homo sapiens
MAIKFLEVIKPFCVILPEIQKPERKIQFKEKVLWTAITLFIFLVCCQIPLFGIMSSDSADPFYWMRVILASNRGTLMELGISPIVTSGLIMQLLAGAKIIEVGDTPKDRALFNGAQKLFGMIITIGQSIVYVMTGMYGDPSEMGAGICLLITIQLFVAGLIVLLLDELLQKGYGLGSGISLFIATNICETIVWKAFSPTTVNTGRGMEFEGAIIALFHLLATRTDKVRALREAFYRQNLPNLMNLIATIFVFAVVIYFQGFRVDLPIKSARYRGQYNTYPIKLFYTSNIPIILQSALVSNLYVISQMLSARFSGNLLVSLLGTWSDTSSGGPARAYPVGGLCYYLSPPESFGSVLEDPVHAVVYIVFMLGSCAFFSKTWIEVSGSSAKDVAKQLKEQQMVMRGHRETSMVHELNRYIPTAAAFGGLCIGALSVLADFLGAIGSGTGILLAVTIIYQYFEIFVKEQSEVGSMGALLF

SEQ ID NO: 903834 - protein, 135 aa, Homo sapiens
SRGAFEALGPKVSGEPVGRLAHGELCGCPGADCVPSPRYIPTAAAFGGLCIGALSVLADFLGAIGSGTGILLAVTIIYQYFEIFVKEQLGKEGQSPGDLRCCHSTLQSAQSSVQLLISSIATALQPGQQTKIRLK

SEQ ID NO: 903835 - protein, 476 aa, Homo sapiens
MGIKFLEVIKPFCVILPEIQKPERKIQFKEKVLWTAITLFIFLVCCQIPLFGIMSSDSADPFYWMRVILASNRGTLMELGISPIVTSGLIMQLLAGAKIIEVGDTPKDRALFNGAQKLFGMIITIGQSIVYVMTGMYGDPSEMGAGICLLITIQLFVAGLIVLLLDELLQKGYGLGSGISLFIATNICETIVWKAFSPTTVNTGRGMEFEGAIIALFHLLATRTDKVRALREAFYRQNLPNLMNLIATIFVFAVVIYFQGFRVDLPIKSARYRGQYNTYPIKLFYTSNIPIILQSALVSNLYVISQMLSARFSGNLLVSLLGTWSDTSSGGPARAYPVGGLCYYLSPPESFGSVLEDPVHAVVYIVFMLGSCAFFSKTWIEVSGSSAKDVAKQLKEQQMVMRGHRETSMVHELNRYIPTAAAFGGLCIGALSVLADFLGAIGSGTGILLAVTIIYQYFEIFVKEQSEVGSMGALLF

SEQ ID NO: 903836 - protein, 239 aa, Homo sapiens
CVSVQQAEDEAVKGIWFCLASQGFRVDLPIKSARYRGQYNTYPIKLFYTSNIPIILQSALVSNLYVISQMLSARFSGNLLVSLLGTWSDTSSGGPARAYPVGGLCYYLSPPESFGSVLEDPVHAVVYIVFMLGSCAFFSKTWIEVSGSSAKDVAKQLKEQQMVMRGHRETSMVHELNRYIPTAAAFGGLCIGALSVLADFLGAIGSGTGILLAVTIIYQYFEIFVKEQSEVGSMGALLF

SEQ ID NO: 903837 - protein, 476 aa, Homo sapiens; identical to SEQ ID NO: 903833

SEQ ID NO: 903838 - protein, 135 aa, Homo sapiens
AKMIIVGAGCDSVLEDPVHAVVYIVFMLGSCAFFSKTWIEVSGSSAKDVAKQLKEQQMVMRGHRETSMVHELNRYIPTAAAFGGLCIGALSVLADFLGAIGSGTGILLAVTIIYQYFEIFVKEQSEVGSMGALLF

SEQ ID NO: 903839 - protein, 99 aa, Homo sapiens
SRGAFEALGPKVSGEPVGRLAHGELCGCPGADCVPSPRYIPTAAAFGGLCIGALSVLADFLGAIGSGTGILLAVTIIYQYFEIFVKEQSEVGSMGALLF

SEQ ID NO: 903840 - protein, 476 aa, Homo sapiens; identical to SEQ ID NO: 903833

SEQ ID NO: 903841 - protein, 476 aa, Homo sapiens; identical to SEQ ID NO: 903833

SEQ ID NO: 903842 - protein, 476 aa, Homo sapiens; identical to SEQ ID NO: 903833

SEQ ID NO: 903843 - protein, 433 aa, Homo sapiens
MAIKFLEVIKPFCVILPEIQKPERKIQFKEKVLWTAITLFIFLVCCQIPLFGIMSSDSADPFYWMRVILASNRGTLMELGISPIVTSGLIMQLLAGAKIIEVGDTPKDRALFNGAQKLFGMIITIGQSIVYVMTGMYGDPSEMGAGICLLITIQLFVAGLIVLLLDELLQKGYGLGSGISLFIATNICETIVWKAFSPTTVNTGRGMEFEGAIIALFHLLATRTDKVRALREAFYRQNLPNLMNLIATIFVFAVVIYFQVCPDPTPGSFHGLDLSFRMPCVQSPTLWGALSSYCVETMRWYLKAAGFQMSWTSMFIESWDLPGCGEEFGPEVMVPDTAVPLEMEQLGKEGQSPGDLRCCHSTLQSAQSSVQLLISSIVTQKQPQTDNRQMSMAVFLQSWLQSQLQTRLSYGPYLKEATTGKARIANFRSFSNP

SEQ ID NO: 903844 - protein, 327 aa, Homo sapiens
MAIKFLEVIKPFCVILPEIQKPERKIQFKEKVLWTAITLFIFLVCCQIPLFGIMSSDSADPFYWMRVILASNRGTLMELGISPIVTSGLIMQLLAGAKIIEVGDTPKDRALFNGAQKLFGMIITIGQSIVYVMTGMYGDPSEMGAGICLLITIQLFVAGLIVLLLDELLQKGYGLGSGISLFIATNICETIVWKAFSPTTVNTGRGMEFEGAIIALFHLLATRTDKVRALREAFYRQNLPNLMNLIATIFVFAVVIYFQVCPDPTPGSFHGLDLSFRMPCVQSPTLWGALSSYCVETMRWYLKAAGFQMSWTSMFIESWDLPLTKQN

SEQ ID NO: 903845 - protein, 430 aa, Homo sapiens
MAIKFLEVIKPFCVILPEIQKPERKIQFKEKVLWTAITLFIFLVCCQIPLFGIMSSDSADPFYWMRVILASNRGTLMELGISPIVTSGLIMQLLAGAKIIEVGDTPKDRALFNGAQKLFGMIITIGQSIVYVMTGMYGDPSEMGAGICLLITIQLFVAGLIVLLLDELLQKGYGLGSGISLFIATNICETIVWKAFSPTTVNTGRGMEFEGAIIALFHLLATRTDKVRALREAFYRQNLPNLMNLIATIFVFAVVIYFQVCPDPTPGSFHGLDLSFRMPCVQSPTLWGALSSYCVETMRWYLKAAGFQMSWTSMFIESWDLFHFLWSIQHGPDYHHSVQKVKRDAVRGCDVLSASDDTVASVGCKDDDGSDRRLQGAVQVGEALNVQHVDLINKQHTRDQLSNALVDVLVHHLINLPSKFVCDFCLLWLH

SEQ ID NO: 903846 - protein, 110 aa, Homo sapiens
QDALILRRGPGGACSLSGRPHSDSGHTAACKAQGHRHSPAEGHTLETLLAVLARKQSDQGTRRDLPKATQQLSSRTKMGPRLLHMAQGLPPYHTWPCLDPVLSRGEALET

SEQ ID NO: 903847 - protein, 172 aa, Homo sapiens
ILFSSFYLSAKKARSKLSCLFVPSYMSPPLPTGMEFEGAIIALFHLLATRTDKVRALREAFYRQNLPNLMNLIATIFVFAVVIYFQVCPDPTPGSFHGLDLSFRMPCVQSPTLWGALSSYCVETMRWYLKAAGFQMSWTSMFIESWDLMTQLPRLDAKMTMGAIEDSRARCR

SEQ ID NO: 903848 - protein, 476 aa, Homo sapiens; identical to SEQ ID NO: 903833

SEQ ID NO: 903849 - protein, 337 aa, Homo sapiens
DRTSGVLEFAANHHQLFVAGLIVLLLDELLQKGYGLGSGISLFIATNICETIVWKAFSPTTVNTGRGMEFEGAIIALFHLLATRTDKVRALREAFYRQNLPNLMNLIATIFVFAVVIYFQGFRVDLPIKSARYRGQYNTYPIKLFYTSNIPIILQSALVSNLYVISQMLSARFSGNLLVSLLGTWSDTSSGGPARAYPVGGLCYYLSPPESFGSVLEDPVHAVVYIVFMLGSCAFFSKTWIEVSGSSAKDVAKQLKEQQMVMRGHRETSMVHELNRYIPTAAAFGGLCIGALSVLADFLGAIGSGTGILLAVTIIYQYFEIFVKEQSEVGSMGALLF

SEQ ID NO: 903850 - protein, 109 aa, Homo sapiens
MLGSCAFFSKTWIEVSGSSAKDVAKQLKEQQMVMRGHRETSMVHELNRYIPTAAAFGGLCIGALSVLADFLGAIGSGTGILLAVTIIYQYFEIFVKEQSEVGSMGALLF

SEQ ID NO: 903851 - protein, 476 aa, Homo sapiens; identical to SEQ ID NO: 903833

SEQ ID NO: 903852 - protein, 102 aa, Homo sapiens
QGVGTLRSTGSPAPRRAACRRASTDVSLGGAAVQWNALGRGQRRLTRSRAELKRDPEPEQPPPWQAIGSGTGILLAVTIIYQYFEIFVKEQSEVGSMGALLF

SEQ ID NO: 903853 - protein, 79 aa, Homo sapiens
RCSPTVSTTELIPDINMSLLISNTGATDQHHHSPCTPNLTSLPTLSLCCPLSADDTGDAERKSVVSAHLRAVLSTVRKF

SEQ ID NO: 903854 - protein, 476 aa, Homo sapiens; identical to SEQ ID NO: 903833

SEQ ID NO: 903855 - protein, 554 aa, Homo sapiens
MAIKFLEVIKPFCVILPEIQKPERKIQFKEKVLWTAITLFIFLVCCQIPLFGIMSSDSADPFYWMRVILASNRGTLMELGISPIVTSGLIMQLLAGAKIIEVGDTPKDRALFNGAQKLFGMIITIGQSIVYVMTGMYGDPSEMGAGICLLITIQLFVAGLIVLLLDELLQKGYGLGSGISLFIATNICETIVWKAFSPTTVNTGRGMEFEGAIIALFHLLATRTDKVRALREAFYRQNLPNLMNLIATIFVFAVVIYFQVCPDPTPGSFHGLDLSFRMPCVQSPTLWGALSSYCVETMRWYLKAAGFQMSWTSMFIESWDLPGCGEEFGPEVMVPDTAVPLEMEQLGKEGQSPGDLRCCHSTLQSAQSSVQLLISSIVTQKQPQTDNRQMSMAVFLQSWLQSQLQTRLSYGPYLSVVIGANLPQVVQCLLTDVDSFRLGTDFNDLFHFLWSIQHGPDYHHSVQKVKRDAVRGCDVLSASDDTVASVGCKDDDGSDRRLQGAVQVGEALNVQHVDLINKQHTRDQLSNALVDVLVHHLINLPSKFVCDFCLLWLH

SEQ ID NO: 903856 - protein, 422 aa, Homo sapiens
MAIKFLEVIKPFCVILPEIQKPERKIQFKEKVLWTAITLFIFLVCCQIPLFGIMSSDSADPFYWMRVILASNRGTLMELGISPIVTSGLIMQLLAGAKIIEVGDTPKDRALFNGAQKLFGMIITIGQSIVYVMTGMYGDPSEMGAGICLLITIQLFVAGLIVLLLDELLQKGYGLGSGISLFIATNICETIVWKAFSPTTVNTGRGMEFEGAIIALFHLLATRTDKVRALREAFYRQNLPNLMNLIATIFVFAVVIYFQVCPDPTPGSFHGLDLSFRMPCVQSPTLWGALSSYCVETMRWYLKAAGFQMSWTSMFIESWDLPGCGEEFGPEVMVPDTAVPLEMEQLGKEGQSPGDLRCCHSTLQSAQSSVQLLISSIVTQKQPQTDNRQMSMAVFLQSWLQSQLQTRLSYGPYLKEATTGAI

SEQ ID NO: 903857 - protein, 842 aa, Homo sapiens
MDFQERDPPFLPESAQSSKPSSAQQASELWEVVEEPRVRLGTEGVMPERQEGHLLKKRKWPLKGWHKRYFVLEDGILHYATTRQDITKGKLHGSIDVRLSVMSINKKAQRIDLDTEDNIYHLKIKSQDLFQSWVAQLRAHRLAHRLDMPRGSLPSTAHRKVPGAQLPTAATASALPGLGPREKVSSWLRDSDGLDRCSHELSECQGKLQELHRLLQSLESLHRIPSAPVIPTHQASVTTERPKKGKRTSRMWCTQSFAKDDTIGRVGRLHGSVPNLSRYLESRDSSGTRGLPPTDYAHLQRSFWALAQKVHSSLSSVLAALTMERDQLRDMHQGSELSRMGVSEASTGQRRLHSLSTSSDTTADSFSSLNPEEQEALYMKGRELTPQLSQTSILSLADSHTEFFDACEVLLSASSSENEGSEEEESCTSEITTSLSEEMLDLRGAERCQKGGCVPGRPMGPPRRRCLPAASGPGADVSLWNILRNNIGKDLSKVSMPVQLNEPLNTLQRLCEELEYSSLLDQASRIADPCERMVYIAAFAVSAYSSTYHRAGCKPFNPVLGETYECERPDRGFRFISEQVSHHPPISACHAESENFAFWQDMKWKNKFWGKSLEIVPVGTVNVSLPRFGDHFEWNKVTSCIHNVLSGQRWIEHYGEVLIRNTQDSSCHCKITFCKAKYWSSNVHEVQGAVLSRSGRVLHRLFGKWHEGLYRGPTPGGQCIWKPNSMPPDHERNFGFTQFALELNELTAELKRSLPSTDTRLRPDQRYLEEGNIQAAEAQKRRIEQLQRDRRKVMEENNIVHQARFFRRQTDSSGKEWWVTNNTYWRLRAEPGYGNMDGAVLW

SEQ ID NO: 903858 - protein, 687 aa, Homo sapiens
APFPHPVSKIAPTLTCQASVTTERPKKGKRTSRMWCTQSFAKDDTIGRVGRLHGSVPNLSRYLESRDSSGTRGLPPTDYAHLQRSFWALAQKVHSSLSSVLAALTMERDQLRDMHQGSELSRMGVRPGGQGDWCGEEGFKLRTASLGSDSRSGSGWGVGRGSLCRDAARWGGPHPPGTVSLTLSLQVSEASTGQRRLHSLSTSSDTTADSFSSLNPEEQEALYMKGRELTPQLSQTSILSLADSHTEFFDACEVLLSASSSENEGSEEEESCTSEITTSLSEEMLDLRGAERCQKGGCVPGRPMGPPRRRCLPAASGPGADVSLWNILRNNIGKDLSKVSMPVQLNEPLNTLQRLCEELEYSSLLDQASRIADPCERMVYIAAFAVSAYSSTYHRAGCKPFNPVLGETYECERPDRGFRFISEQVSHHPPISACHAESENFAFWQDMKWKNKFWGKSLEIVPVGTVNVSLPRFGDHFEWNKVTSCIHNVLSGQRWIEHYGEVLIRNTQDSSCHCKITFCKAKYWSSNVHEVQGAVLSRSGRVLHRLFGKWHEGLYRGPTPGGQCIWKPNSMPPDHERNFGFTQFALELNELTAELKRSLPSTDTRLRPDQRYLEEGNIQAAEAQKRRIEQLQRDRRKVMEENNIVHQARFFRRQTDSSGKEWWVTNNTYWRLRAEPGYGNMDGAVLW

SEQ ID NO: 903859 - protein, 846 aa, Homo sapiens
MASGRWWLYGSESLKQVPSPSTNLHPQITKGKLHGSIDVRLSVMSINKKAQRIDLDTEDNIYHLKIKSQDLFQSWVAQLRAHRLAHRLDMPRGSLPSTAHRKVPGAQLPTAATASALPGLGPREKVSSWLRDSDGLDRCSHELSECQGKLQELHRLLQSLESLHRIPSAPVIPTHQASVTTERPKKGKRTSRMWCTQSFAKDDTIGRVGRLHGSVPNLSRYLESRDSSGTRGLPPTDYAHLQRSFWALAQKVHSSLSSVLAALTMERDQLRDMHQGSELSRMGVRPGGQGDWCGEEGFKLRTASLGSDSRSGSGWGVGRGSLCRDAARWGGPHPPGTVSLTLSLQVSEASTGQRRLHSLSTSSDTTADSFSSLNPEEQEALYMKGRELTPQLSQTSILSLADSHTEFFDACEVLLSASSSENEGSEEEESCTSEITTSLSEEMLDLRGAERCQKGGCVPGRPMGPPRRRCLPAASGPGADVSLWNILRNNIGKDLSKVSMPVQLNEPLNTLQRLCEELEYSSLLDQASRIADPCERMVYIAAFAVSAYSSTYHRAGCKPFNPVLGETYECERPDRGFRFISEQVSHHPPISACHAESENFAFWQDMKWKNKFWGKSLEIVPVGTVNVSLPRFGDHFEWNKVTSCIHNVLSGQRWIEHYGEVLIRNTQDSSCHCKITFCKAKYWSSNVHEVQGAVLSRSGRVLHRLFGKWHEGLYRGPTPGGQCIWKPNSMPPDHERNFGFTQFALELNELTAELKRSLPSTDTRLRPDQRYLEEGNIQAAEAQKRRIEQLQRDRRKVMEENNIVHQARFFRRQTDSSGKEWWVTNNTYWRLRAEPGYGNMDGAVLW

SEQ ID NO: 903860 - protein, 70 aa, Homo sapiens
VGRLHGSVPNLSRYLESRDSSGTRGLPPTDYAHLQRSFWALAQKGKCLLGGAGGERTGASEDSDGLPHSL

SEQ ID NO: 903861 - protein, 846 aa, Homo sapiens; identical to SEQ ID NO: 903859

SEQ ID NO: 903862 - protein, 731 aa, Homo sapiens
MASGRWWLYGSESLKQVPSPSTNLHPQITKGKLHGSIDVRLSVMSINKKAQRIDLDTEDNIYHLKIKSQDLFQSWVAQLRAHRLAHRLDMPRGSLPSTAHRKVPGAQLPTAATASALPGLGPREKVSSWLRDSDGLDRCSHELSECQGKLQELHRLLQSLESLHRIPSAPVIPTHQASVTTERPKKGKRTSRMWCTQSFAKDDTIGRVGRLHGSVPNLSRYLESRDSSGTRGLPPTDYAHLQRSFWALAQKVHSSLSSVLAALTMERDQLRDMHQGSELSRMGVRPGGQGDWCGEEGFKLRTASLGSDSRSGSGWGVGRGSLCRDAARWGGPHPPGTVSLTLSLQVSEASTGQRRLHSLSTSSDTTADSFSSLNPEEQEALYMKGRELTPQLSQTSILSLADSHTEFFDACEVLLSASSSENEGSEEEESCTSEITTSLSEEMLDLRGAERCQKGGCVPGRPMGPPRRRCLPAASGPGADVSLWNILRNNIGKDLSKVSMPVQLNEPLNTLQRLCEELEYSSLLDQASRIADPCERMVYIAAFAVSAYSSTYHRAGCKPFNPVLGETYECERPDRGFRFISEQVSHHPPISACHAESENFAFWQDMKWKNKFWGKSLEIVPVGTVNVSLPRFGDHFEWNKVTSCIHNVLSGQRWIEHYGEVLIRNTQDSSCHCKITFCKAKYWSSNVHEVQGAVLSRSGRVLHRLFGKWHEGLYRGPTPGGQCIWKPIGAE

SEQ ID NO: 903863 - protein, 121 aa, Homo sapiens
EIYALGSENTPGNLFSIRELELNELTAELKRSLPSTDTRLRPDQRYLEEGNIQAAEAQKRRIEQLQRDRRKVMEENNIVHQARFFRRQTDSSGKEWWVTNNTYWRLRAEPGYGNMDGAVLW

SEQ ID NO: 903864 - protein, 95 aa, Homo sapiens
AESLPATAAGARPGAVVRICAGSGCWLLGSAASLPNELHQVGSLQLCALGTQGNAQLWGSWGAFQFYHLWKWTPQGEDKWTDCVVESGNREALEV

SEQ ID NO: 903865 - protein, 312 aa, Homo sapiens
MIQVLDPRPLTSSVMPVDVAMRLCLAHSPPVKSFLGPYDEFQRRHFVNKLKPLKSCLNIKHKAKSQNDWKCSHNQAKKRVVFADSKGLSLTAIHVFSDLPEEPAWDLQFDLLDLNDISSALKHHEEKNLILDFPQPSTDYLSFRSHFQKNFVCLENCSLQERTVTGTVKVKNVSFEKKVQIRITFDSWKNYTDVDCVYMKNVYGGTDSDTFSFAIDLPPVIPTEQKIEFCISYHANGQVFWDNNDGQNYRIVHVQWKPDGVQTQMAPQDCAFHQTSPKTELESTIFGSPRLASGLFPEWQSWGRMENLASYR

SEQ ID NO: 903866 - protein, 180 aa, Homo sapiens
MIQVLDPRPLTSSVMPVDVAMRLCLAHSPPVKSFLGPYDEFQRRHFVNKLKPLKSCLNIKHKAKSQNDWKCSHNQAKKRVVFADSKGLSLTAIHVFSDLPEEPAWDLQFDLLDLNDISSALKHHEEKNLILDFPQPSTDYLSFRSHFQKNFVCLENCSLQERTVTGTVKPFCSDVIYKKS

SEQ ID NO: 903867 - protein, 312 aa, Homo sapiens; identical to SEQ ID NO: 903865

SEQ ID NO: 903868 - protein, 312 aa, Homo sapiens; identical to SEQ ID NO: 903865

SEQ ID NO: 903869 - protein, 479 aa, Homo sapiens
MVGRSRRRGAAKWAAVRAKAGPTLTDENGDDLGLPPSPGDTSYYQDQVDDFHEARSRAALAKGWNEVQSGDEEDGEEEEEEVLALDMDDEDDEDGGNAGEEEEEENADDDGGSSVQSEAEASVDPSLSWGQRKKLYYDTDYGSKSRGRQSQQEAEEEEREEEEEAQIIQRRLAQALQEDDFGVAWVEAFAKPVPQVDEAETRVVKDLAKVSVKEKLKMLRKESPELLELIEDLKVKLTEVKDELEPLLELVEQGIIPPGKGSQYLRTKYNLYLNYCSNISFYLILKARRVPAHGHPVIERLVTYRNLINKLSVVDQKLSSEIRHLLTLKDDAVKKELIPKAKSTKPKPKSVSKTSAAACAVTDLSDDSDFDEKAKLKYYKEIEDRQKLKRKKEENSTEEQALEDQNAKRAITYQIAKNRGLTPRRKKIDRNPRVKHREKFRRAKIRRRGQVREVRKEEQRYSGELSGIRAGVKKSIKLK

SEQ ID NO: 903870 - protein, 479 aa, Homo sapiens; identical to SEQ ID NO: 903869

SEQ ID NO: 903871 - protein, 259 aa, Homo sapiens
CLLLTLPASGSCLMKVIYLILVELEPLLELVEQGIIPPGKGSQYLRTKYNLYLNYCSNISFYLILKARRVPAHGHPVIERLVTYRNLINKLSVVDQKLSSEIRHLLTLKDDAVKKELIPKAKSTKPKPKSVSKTSAAACAVTDLSDDSDFDEKAKLKYYKEIEDRQKLKRKKEENSTEEQALEDQNAKRAITYQIAKNRGLTPRRKKIDRNPRVKHREKFRRAKIRRRGQVREVRKEEQRYSGELSGIRAGVKKSIKLK

SEQ ID NO: 903872 - protein, 479 aa, Homo sapiens; identical to SEQ ID NO: 903869

SEQ ID NO: 903873 - protein, 312 aa, Homo sapiens
  misc_feature (279)..(279): Xaa can be any naturally occurring amino acid
MVGRSRRRGAAKWAAVRAKAGPTLTDENGDDLGLPPSPGDTSYYQDQVDDFHEARSRAALAKGWNEVQSGDEEDGEEEEEEVLALDMDDEDDEDGGNAGEEEEEENADDDGGSSVQSEAEASVDPSLSWGQRKKLYYDTDYGSKSRGRQSQQEAEEEEREEEEEAQIIQRRLAQALQEDDFGVAWVEAFAKPVPQVDEAETRVVKDLAKVSVKEKLKMLRKESPELLELIEDLKVKLTEVKDELEPLLELVEQGIIPPGKGSQYLRTKYSAATTLSRIXTHCRPLLVDRARYQLGVIMAELFLCEIGIRSQF

SEQ ID NO: 903874 - protein, 461 aa, Homo sapiens
MVGRSRRRGAAKWAAVRAKAGPTLTDENGDDLGLPPSPGDTSYYQDQVDDFHEARSRAALAKGWNEVQSGDEEDGEEEEEEVLALDMDDEDDEDGGNAGEEEEEENADDDGGSSVQSEAEASVDPSLSWGQRKKLYYDTDYGSKSRGRQSQQEAEEEEREEEEEAQIIQRRLAQALQEDDFGVAWVEAFAKPVPQVDEAETRVVKDLAKVSVKEKLIKLTEVKDELEPLLELVEQGIIPPGKGSQYLRTKYNLYLNYCSNISFYLILKARRVPAHGHPVIERLVTYRNLINKLSVVDQKLSSEIRHLLTLKDDAVKKELIPKAKSTKPKPKSVSKTSAAACAVTDLSDDSDFDEKAKLKYYKEIEDRQKLKRKKEENSTEEQALEDQNAKRAITYQIAKNRGLTPRRKKIDRNPRVKHREKFRRAKIRRRGQVREVRKEEQRYSGELSGIRAGVKKSIKLK

SEQ ID NO: 903875 - protein, 297 aa, Homo sapiens
MAAAAVVEFQRAQSLLSTDREASIDILHSIVKRDIQENDEEAVQVKEQSILELGSLLAKTGQAAELGGLLKYVRPFLNSISKAKAARLVRSLLDLFLDMEAATGQEVELCLECIEWAKSEKRTFLRQALEARLVSLYFDTKRYQEALHLGSQLLRELKKMDDKALLVEVQLLESKTYHALSNLPKARAALTSARTTANAIYCPPKLQATLDMQSGIIHAAEEKDWKTAYSYFYEAFEGYDSIDSPKAITSLKYMLLCKIMLNTPENVSLGNGNLPSVAGGERALRGGRHSVRRFGGC

SEQ ID NO: 903876 - protein, 128 aa, Homo sapiens
MAAAAVVEFQRAQSLLSTDREASIDILHSIVKRDIQENDEEAVQVKEQSILELGSLLAKTGQAAELGGLLKYVRPFLNSISKAKAARLVRSLLDLFLDMEAATGQEVELCLECIKLGQENVREKNLFL

SEQ ID NO: 903877 - protein, 179 aa, Homo sapiens
ILVFFPLPYGLSALPSPHWLQQSSRRSCRRRHHHHHCSPKAITSLKYMLLCKIMLNTPEDVQALVSGKLALRYAGRQTEALKCVAQASKNRSLADFEKALTDYRAELRDDPIISTHLAKLYDNLLEQNLIRVIEPFSRVQIEHISSLIKLSKADVGKELSQMILTEFMGLDQGGCLIIR

SEQ ID NO: 903878 - protein, 422 aa, Homo sapiens
MAAAAVVEFQRAQSLLSTDREASIDILHSIVKRDIQENDEEAVQVKEQSILELGSLLAKTGQAAELGGLLKYVRPFLNSISKAKAARLVRSLLDLFLDMEAATGQEVELCLECIEWAKSEKRTFLRQALEARLVSLYFDTKRYQEALHLGSQLLRELKKMDDKALLVEVQLLESKTYHALSNLPKARAALTSARTTANAIYCPPKLQATLDMQSGIIHAAEEKDWKTAYSYFYEAFEGYDSIDSPKAITSLKYMLLCKIMLNTPEDVQALVSGKLALRYAGRQTEALKCVAQASKNRSLADFEKALTDYRAELRDDPIISTHLAKLYDNLLEQNLIRVIEPFSRVQIEHISSLIKLSKADVERKLSQMILDKKFHGILDQGEGVLIIFDEPPVDKTYEAALETIQNMSKVVDSLYNKAKKLT

SEQ ID NO: 903879 - protein, 422 aa, Homo sapiens; identical to SEQ ID NO: 903878

SEQ ID NO: 903880 - protein, 422 aa, Homo sapiens; identical to SEQ ID NO: 903878

SEQ ID NO: 903881 - protein, 337 aa, Homo sapiens
SEDPFGSIEVCFLYWKRSGQEVELCLECIEWAKSEKRTFLRQALEARLVSLYFDTKRYQEALHLGSQLLRELKKMDDKALLVEVQLLESKTYHALSNLPKARAALTSARTTANAIYCPPKLQATLDMQSGIIHAAEEKDWKTAYSYFYEAFEGYDSIDSPKAITSLKYMLLCKIMLNTPEDVQALVSGKLALRYAGRQTEALKCVAQASKNRSLADFEKALTDYRAELRDDPIISTHLAKLYDNLLEQNLIRVIEPFSRVQIEHISSLIKLSKADVERKLSQMILDKKFHGILDQGEGVLIIFDEPPVDKTYEAALETIQNMSKVVDSLYNKAKKLT

SEQ ID NO: 903882 - protein, 268 aa, Homo sapiens
  misc_feature (1)..(1): Xaa can be any naturally occurring amino acid
XEVMDIVDPALRVEVQLLESKTYHALSNLPKARAALTSARTTANAIYCPPKLQATLDMQSGIIHAAEEKDWKTAYSYFYEAFEGYDSIDSPKAITSLKYMLLCKIMLNTPEDVQALVSGKLALRYAGRQTEALKCVAQASKNRSLADFEKALTDYRAELRDDPIISTHLAKLYDNLLEQNLIRVIEPFSRVQIEHISSLIKLSKADVERKLSQMILDKKFHGILDQGEGVLIIFDEPPVDKTYEAALETIQNMSKVVDSLYNKAKKLT

SEQ ID NO: 903883 - protein, 261 aa, Homo sapiens
SSKLSYNLAKCVLMIGHALSNLPKARAALTSARTTANAIYCPPKLQATLDMQSGIIHAAEEKDWKTAYSYFYEAFEGYDSIDSPKAITSLKYMLLCKIMLNTPEDVQALVSGKLALRYAGRQTEALKCVAQASKNRSLADFEKALTDYRAELRDDPIISTHLAKLYDNLLEQNLIRVIEPFSRVQIEHISSLIKLSKADVERKLSQMILDKKFHGILDQGEGVLIIFDEPPVDKTYEAALETIQNMSKVVDSLYNKAKKLT

SEQ ID NO: 903884 - protein, 385 aa, Homo sapiens
MAAAAVVEFQRAQSLLSTDREASIDILHSIVKRDIQENDEEAVQVKEQSILELGSLLAKTGQAAELGGLLKYVRPFLNSISKAKAARLVRSLLDLFLDMEAATGQEVELCLECIEWAKSEKRTFLRQALEARLVSLYFDTKRYQEALHLGSQLLRELKKMDDKALLVEVQLLESKTYHALSNLPKARAALTSARTTANAIYCPPKLQATLDMQSGIIHAAEEKDWKTAYSYFYEAFEGYDSIDSPKAITSLKYMLLCKIMLNTPEDVQALVSGKLALRYAGRQTEALKCVAQASKNRSLADFEKALTDYRAELRDDPIISTHLAKLYDNLLEQNLIRVIEPFSRVQIEHISSLIKLSKADVGKELSQMILTEFMGLDQGGCLIIR

SEQ ID NO: 903885 - protein, 374 aa, Homo sapiens
MAAAAVVEFQRAQSLLSTDREASIDILHSIVKRDIQENDEEAVQVKEQSILELGSLLAKTGQAAELGGLLKYVRPFLNSISKAKAARLVRSLLDLFLDMEAATGQEVELCLECIEWAKSEKRTFLRQALEARLVSLYFDTKRYQEALHLGSQLLRELKKMDDKALLVEVQLLESKTYHALSNLPKARAALTSARTTANAIYCPPKLQATLDMQSGIIHAAEEKDWKTAYSYFYEAFEGYDSIDSPKAITSLKYMLLCKIMLNTPEDVQALVSGKLALRYAGRQTEALKCVAQASKNRSLADFEKLDRYGRAPDDHHQPPWQCCTTTIVGLAFSRGLFLHSSPGISFQMGCGGGLPQWSTGPKFGGGSFPSLHSI

SEQ ID NO: 903886 - protein, 100 aa, Homo sapiens
  misc_feature (13)..(13): Xaa can be any naturally occurring amino acid
LQDIGPRAKLGLXPFISTHWSKVQIEHISSLIKLSKADVERKLSQMILDKKFHGILDQGEGVLIIFDEPPVDKTYEAALETIQNMSKVVDSLYNKAKKLT

SEQ ID NO: 903887 - protein, 100 aa, Homo sapiens; identical to SEQ ID NO: 903886
  misc_feature (13)..(13): Xaa can be any naturally occurring amino acid

SEQ ID NO: 903888 - protein, 151 aa, Homo sapiens
MAAAAVVEFQRAQSLLSTDREASIDILHSIVKRDIQENDEEAVQVKEQSILELGSLLAKTGQAAELGGLLKYVRPFLNSISKAKAARLVRSLLDLFLDMEAATGQEVELCLECIEWAKSEKRTFLRQALEARLVSLYFDTKRYQEALHLGS

SEQ ID NO: 903889 - protein, 237 aa, Homo sapiens [sequence omitted]

SEQ ID NO: 903890 - protein, 422 aa, Homo sapiens; identical to SEQ ID NO: 903878

SEQ ID NO: 903891 - protein, 422 aa, Homo sapiens; identical to SEQ ID NO: 903878

SEQ ID NO: 903892 - protein, 422 aa, Homo sapiens; identical to SEQ ID NO: 903878

SEQ ID NO: 903893 - protein, 372 aa, Homo sapiens
MYLRKFGHQEVVYSTSCRIVRPYLESHYVKDIHYRGGRSLLDLVARYWTPVYESYYTTTGVSCIEWAKSEKRTFLRQALEARLVSLYFDTKRYQEALHLGSQLLRELKKMDDKALLVEVQLLESKTYHALSNLPKARAALTSARTTANAIYCPPKLQATLDMQSGIIHAAEEKDWKTAYSYFYEAFEGYDSIDSPKAITSLKYMLLCKIMLNTPEDVQALVSGKLALRYAGRQTEALKCVAQASKNRSLADFEKALTDYRAELRDDPIISTHLAKLYDNLLEQNLIRVIEPFSRVQIEHISSLIKLSKADVERKLSQMILDKKFHGILDQGEGVLIIFDEPPVDKTYEAALETIQNMSKVVDSLYNKAKKLT

SEQ ID NO: 903894 - protein, 394 aa, Homo sapiens
MAAAAVVEFQRAQSLLSTDREASIDILHSIVKRDIQENDEEAVQVKEQSILELGSLLAKTGQAAELGGLLKYVRPFLNSISKAKAARLVRSLLDLFLDMEAATGQEVELCLECIEWAKSEKRTFLRQALEARLVSLYFDTKRYQEALHLGSQLLRELKKMDDKALLVEVQLLESKTYHALSNLPKARAALTSARTTANAIYCPPKLQATLDMQSGIIHAAEEKDWKTAYSYFYEAFEGYDSIDSPKAITSLKYMLLCKIMLNTPEDVQALVSGKLALRYAGRQTEALKCVAQASKNRSLADFEKALTDYRAELRDDPIISTHLAKLYDNLLEQNLIRVIEPFSRVQIEHISSLIKLSKADVERKLSQMILDKKFHGILDQWEGVPVILDEPLVH

SEQ ID NO: 903895 - protein, 376 aa, Homo sapiens
MAAAAVVEFQRAQSLLSTDREASIDILHSIVKRDIQENDEEAVQVKEQSILELGSLLAKTGQAAELGGLLKYVRPFLNSISKAKAARLVRSLLDLFLDMEAATGQEVELCLECIEWAKSEKRTFLRQALEARLVSLYFDTKRYQEALHLGSQLLRELKKMDDKALLVEVQLLESKTYHALSNLPKARAALTSARTTANAIYCPPKLQATLDMQSGIIHAAEEKDWKTAYSYFYEAFEGYDSIDSPKAITSLKYMLLCKIMLNTPEDVQALVSGKLALRYAGRQTEALKCVAQASKNRSLADFEKALTDYRAELRDDPIISTHLAKLYDNLLEQNLIRVIEPFSRVQVRTLWGLHFWPGILTVATSLPHLSRMGTHF

SEQ ID NO: 903896 - protein, 390 aa, Homo sapiens
MAAAAVVEFQRAQSLLSTDREASIDILHSIVKRDIQENDEEAVQVKEQSILELGSLLAKTGQAAELGGLLKYVRPFLNSISKAKAARLVRSLLDLFLDMEAATGQEVELCLECIEWAKSEKRTFLRQALEARLVSLYFDTKRYQEALHLGSQLLRELKKMDDKALLVEVQLLESKTYHALSNLPKARAALTSARTTANAIYCPPKLQATLDMQSGIIHAAEEKDWKTAYSYFYEAFEGYDSIDSPKAITSLKYMLLCKIMLNTPEDVQALVSGKLALRYAGRQTEALKCVAQASKNRSLADFEKSGKLKVPEWVDTVKLAKHKELAPYDENWFYTRAASTARHLYLRGGAGVGSMTKIYGGRQRNGVMPSHFSRGSKSVAAGSSKPGGAE

SEQ ID NO: 903897 - protein, 111 aa, Homo sapiens
MTYTLRTYEGSQGTFQKWAAVVVPSGEEQRYTCHVQHEGLPEPVTLRWKPASQPTIPIVGIIAGLVLLGSVVSGAVVAAVIWRKKSSGGKGGSYSKAEWSDSAQGSESHSL

SEQ ID NO: 903898 - protein, 164 aa, Homo sapiens
KQSTSVSTMTPFLTLTCVPSLFSFLLKIRTWALGFYPAEITLTWQQDGEGHTQDTELVETRPAGDGTFQKWAAVVVPSGEEQRYTCHVQHEGLPEPVTLRWKPASQPTIPIVGIIAGLVLLGSVVSGAVVAAVIWRKKSSGGKGGSYSKAEWSDSAQGSESHSL

SEQ ID NO: 903899 - protein, 111 aa, Homo sapiens; identical to SEQ ID NO: 903897

SEQ ID NO: 903900 - protein, 164 aa, Homo sapiens; identical to SEQ ID NO: 903898

SEQ ID NO: 903901 - protein, 167 aa, Homo sapiens
KQSTSVSTMTPFLTLTCVPSLFSFLLKIRTWALGFYPAEITLTWQQDGEGHTQDTELVETRPAGDGTFQKWAAVVVPSGEEQRYTCHVQHEGLPEPVTLRWKPASQPTIPIVGIIAGLVLLGSVVSGAVVAAVIWRKKSSEKEGATLTAEWRRQLPQGSELSQLVKP

SEQ ID NO: 903902 - protein, 147 aa, Homo sapiens
KQSTSVSTMTPFLTLTCVPSLFSFLLKIRTWALGFYPAEITLTWQQDGEGHTQDTELVETRPAGDGTFQKWAAVVVPSGEEQRYTCHVQHEGLPEPVTLRWKPASQPTIPIVGIIAGLVLLGSVVSGAVVAAVIWRKKSSVSQLVKP

SEQ ID NO: 903903 - protein, 164 aa, Homo sapiens; identical to SEQ ID NO: 903898

SEQ ID NO: 903904 - protein, 164 aa, Homo sapiens; identical to SEQ ID NO: 903898

SEQ ID NO: 903905 - protein, 164 aa, Homo sapiens; identical to SEQ ID NO: 903898

SEQ ID NO: 903906 - protein, 164 aa, Homo sapiens; identical to SEQ ID NO: 903898

SEQ ID NO: 903907 - protein, 164 aa, Homo sapiens; identical to SEQ ID NO: 903898

SEQ ID NO: 903908 - protein, 164 aa, Homo sapiens; identical to SEQ ID NO: 903898

SEQ ID NO: 903909 - protein, 164 aa, Homo sapiens; identical to SEQ ID NO: 903898

SEQ ID NO: 903910 - protein, 164 aa, Homo sapiens; identical to SEQ ID NO: 903898

SEQ ID NO: 903911 - protein, 164 aa, Homo sapiens; identical to SEQ ID NO: 903898

SEQ ID NO: 903912 - protein, 199 aa, Homo sapiens
MSTSVSTMTPFLTLTCVPSLFSFLLKIRTWALGFYPAEITLTWQQDGEGHTQDTELVETRPAGDGTFQKWAAVVVPSGEEQRYTCHVQHEGLPEPVTLRWSKEGDGRSCLFSGKAGALLEPFRRVRAEAWGSGPLTFPSPEPASQPTIPIVGIIAGLVLLGSVVSGAVVAAVIWRKKSSGGEGRRVGSEFSCPTGCFKP

SEQ ID NO: 903913 - protein, 170 aa, Homo sapiens
DTIENVKAKIQDKEGIPPDQQGLIFAGIQLEDGRTLSDYYIQKCAWVRTQAHFWKFHTQDTELVETRPAGDGTFQKWAAVVVPSGEEQRYTCHVQHEGLPEPVTLRWKPASQPTIPIVGIIAGLVLLGSVVSGAVVAAVIWRKKSSGGKGGSYSKAEWSDSAQGSESHSL

SEQ ID NO: 903914 - protein, 214 aa, Homo sapiens
GDSEDPKLLEKGKETLLHLEPPKTHVTHHPISDHEATLRCWALGFYPAEITLTWQQDGEGHTQDTELVETRPAGDGTFQKWAAVVVPSGEEQRYTCHVQHEGLPEPVTLRWSKEGDGRSCLFSGKAGALLEPFRRVRAEAWGSGPLTFPSPEPASQPTIPIVGIIAGLVLLGSVVSGAVVAAVIWRKKSSGGKGGSYSKAEWSDSAQGSESHSL

SEQ ID NO: 903915 - protein, 199 aa, Homo sapiens
KQSTSVSTMTPFLTLTCVPSLFSFLLKIRTWALGFYPAEITLTWQQDGEGHTQDTELVETRPAGDGTFQKWAAVVVPSGEEQRYTCHVQHEGLPEPVTLRWKPASQPTIPIVGIIAGLVLLGSVVSGAVVAAVIWRKKSSGGKGGSYSKAECKCGAGSVEELAHPIIPPAPHLLWALTRSCFCSTPGSDSAQGSESHSL

SEQ ID NO: 903916 - protein, 164 aa, Homo sapiens; identical to SEQ ID NO: 903898

SEQ ID NO: 903917 - protein, 164 aa, Homo sapiens; identical to SEQ ID NO: 903898

SEQ ID NO: 903918 - protein, 199 aa, Homo sapiens; identical to SEQ ID NO: 903912

SEQ ID NO: 903919 - protein, 164 aa, Homo sapiens; identical to SEQ ID NO: 903898

SEQ ID NO: 903920 - protein, 164 aa, Homo sapiens; identical to SEQ ID NO: 903898

SEQ ID NO: 903921 - protein, 164 aa, Homo sapiens; identical to SEQ ID NO: 903898

SEQ ID NO: 903922 - protein, 164 aa, Homo sapiens; identical to SEQ ID NO: 903898

SEQ ID NO: 903923 - protein, 164 aa, Homo sapiens; identical to SEQ ID NO: 903898

SEQ ID NO: 903924 - protein, 160 aa, Homo sapiens
KQSTSVSTMTPFLTLTCVPSLFSFLLKIRTWALGFYPAEITLTWQQDGEGHTQDTELVETRPAGDGTFQKWAAVVVPSGEEQRYTCHVQHEGLPEPVTLRWKPASQPTIPIVGIIAGLVLLGSVVSGAVVAAVIWRKKSSGGEGRRVGSEFSCPTGCFKP

SEQ ID NO: 903925 - protein, 209 aa, Homo sapiens
MRAAAISTPKLDKMPGMFFSANPKELKGTTHSLLDDKMQKRRPKTFGMDMKAYLRSMIPHLESGMKSSKSKDVLSAAEVMQWSQSLEKLLANQTGQNVFGSFLKSEFSEENIEFWLACEDYKKTESDLLPCKAEEIYKAFVHSDAAKQINIDFRTRESTAKKIKAPTPTCFDEAQKVIYTLMEKDSYPRFLKSDIYLNLLNDLQANSLK

SEQ ID NO: 903926 - protein, 152 aa, Homo sapiens
MPGMFFSANPKELKGTTHSLLDDKMQKRRPKTFGMDMKAYLRSMIPHSEFSEENIEFWLACEDYKKTESDLLPCKAEEIYKAFVHSDAAKQINIDFRTRESTAKKIKAPTPTCFDEAQKVIYTLMEKDSYPRFLKSDIYLNLLNDLQANSLK

SEQ ID NO: 903927 - protein, 178 aa, Homo sapiens
MPGMFFSANPKELKGTTHSLLDDKMQKRRPKTFGMDMKAYLRSMIPHLESGMKSSKSKDVLSAAEVMQWSQSLEKLLANQTGQNVFGSFLKSEFSEENIEFWLACEDYKVHSDAAKQINIDFRTRESTAKKIKAPTPTCFDEAQKVIYTLMEKDSYPRFLKSDIYLNLLNDLQANSLK

SEQ ID NO: 903928 - protein, 191 aa, Homo sapiens
MRAAAISTPKLDKMPGMFFSANPKELKGTTHSLLDDKMQKRRPKTFGMDMKAYLRSMIPHLESGMKSSKSKDVLSAAEVMQWSQSLEKLLANQTGQNVFGSFLKSEFSEENIEFWLACEDYKVHSDAAKQINIDFRTRESTAKKIKAPTPTCFDEAQKVIYTLMEKDSYPRFLKSDIYLNLLNDLQANSLK

SEQ ID NO: 903929 - protein, 209 aa, Homo sapiens; identical to SEQ ID NO: 903925

SEQ ID NO: 903930 - protein, 196 aa, Homo sapiens
MPGMFFSANPKELKGTTHSLLDDKMQKRRPKTFGMDMKAYLRSMIPHLESGMKSSKSKDVLSAAEVMQWSQSLEKLLANQTGQNVFGSFLKSEFSEENIEFWLACEDYKKTESDLLPCKAEEIYKAFVHSDAAKQINIDFRTRESTAKKIKAPTPTCFDEAQKVIYTLMEKDSYPRFLKSDIYLNLLNDLQANSLK

SEQ ID NO: 903931 - protein, 227 aa, Homo sapiens
  misc_feature (1)..(1): Xaa can be any naturally occurring amino acid
  misc_feature (3)..(3): Xaa can be any naturally occurring amino acid
  misc_feature (8)..(8): Xaa can be any naturally occurring amino acid
XGXKKRRXGGRALFRPTRPGAAAISTPKLDKMPGMFFSANPKELKGTTHSLLDDKMQKRRPKTFGMDMKAYLRSMIPHLESGMKSSKSKDVLSAAEVMQWSQSLEKLLANQTGQNVFGSFLKSEFSEENIEFWLACEDYKKTESDLLPCKAEEIYKAFVHSDAAKQINIDFRTRESTAKKIKAPTPTCFDEAQKVIYTLMEKDSYPRFLKSDIYLNLLNDLQANSLK

SEQ ID NO: 903932 - protein, 191 aa, Homo sapiens
MRAAAISTPKLDKMPGMFFSANPKELKGTTHSLLDDKMQKRRPKTFGMDMKAYLRSMIPHLESGMKSSKSKDVLSAAEVMQWSQSLEKLLANQTGQNVFGSFLKSEFSEENIEFWLACEDYKKTESDLLPCKAEEIYKAFVHSDAAKQINIDFRTRESTAKKIKAPTPTCFDEAQKVIYTLMDDLQANSLK

SEQ ID NO: 903933 - protein, 182 aa, Homo sapiens
MRAAAISTPKLDKMPGMFFSANPKELKGTTHSLLDDKMQKRRPKTLLSAAEVMQWSQSLEKLLANQTGQNVFGSFLKSEFSEENIEFWLACEDYKKTESDLLPCKAEEIYKAFVHSDAAKQINIDFRTRESTAKKIKAPTPTCFDEAQKVIYTLMEKDSYPRFLKSDIYLNLLNDLQANSLK

SEQ ID NO: 903934 - protein, 209 aa, Homo sapiens; identical to SEQ ID NO: 903925

SEQ ID NO: 903935 - protein, 142 aa, Homo sapiens
PGDGGGGGRSSKGFMRPVPVRGVHSLHPRPFGGPVSLPWLRTGRCRWGLGLYRQPSLLPEEICGVFFRRHYPLTTLRFCGMDPEQRKWQKYCKPSWIFGFVAKSQTEPQENVCHLFAEYDMVQPASQVIGLVTALLQDAERM

SEQ ID NO: 903936 - protein, 145 aa, Homo sapiens
LASNCDHPHTHFLLGGGSKRSSTGFLNRRLTPSPGPGQRENLGPGSVAPAQCLPPTGCHTLYLSSVSVETLTGALAVQKAISTTFERDILPTPTVVHFKVTEQGITLTDVQRKVFFRRHYPLTTLRFCGMDPEQRKWQKYCKPSW

SEQ ID NO: 903937 - protein, 120 aa, Homo sapiens
MSQVMSSPLLAGGHAVSLAPCDEPRRTLHPAPSPSLPPQCSYYTTEGWGAQALMAPVPCMGPPGRLQQAPQVEAKATCFLPSPGEKALGTPEDLDSYIDFSLEEPGGWQRPPYTLLQLLS

SEQ ID NO: 903938 - protein, 374 aa, Homo sapiens
MGQPRTPHSPPLAKEHASSCPPSITNSMVDIPIVLINGCPEPGSSPPQRTPGHQNSVQPGAASPSNPCPATRSNSQTLSDAPFTTCPEGPARDMQPTMKFVMDTSKYWFKPNITREQAIELLRKEEPGAFVIRDSSSYRGSFGLALKVQEVPASAQSRPGEDSNDLIRHFLIESSAKGVHLKGADEEPYFGSLSAFVCQHSIMALALPCKLTIPQRELGGADGASDSTDSPASCQKKSAGCHTLYLSSVSVETLTGALAVQKAISTTFERDILPTPTVVHFKVTEQGITLTDVQRKVFFRRHYPLTTLRFCGMDPEQRKWQKYCKPSWIFGFVAKSQTEPQENVCHLFAEYDMVQPASQVIGLVTALLQDAERM

SEQ ID NO: 903939 - protein, 277 aa, Homo sapiens
MKFVMDTSKYWFKPNITREQAIELLRKEEPGAFVIRDSSSYRGSFGLALKVQEVPASAQSRPGEDSNDLIRHFLIESSAKGVHLKGADEEPYFGSLSAFVCQHSIMALALPCKLTIPQRELGGADGASDSTDSPASCQKKSAGCHTLYLSSVSVETLTGALAVQKAISTTFERDILPTPTVVHFKVTEQGITLTDVQRKVFFRRHYPLTTLRFCGMDPEQRKWQKYCKPSWIFGFVAKSQTEPQENVCHLFAEYDMVQPASQVIGLVTALLQDAERM

SEQ ID NO: 903940 - protein, 537 aa, Homo sapiens
MSQVMSSPLLAGGHAVSLAPCDEPRRTLHPAPSPSLPPQCSYYTTEGWGAQALMAPVPCMGPPGRLQQAPQVEAKATCFLPSPGEKALGTPEDLDSYIDFSLESLNQMILELDPTFQLLPPGTGGSQAELAQSTMSMRKKEESEALDIKYIEVTSARSRCHDGPQHCSSPSVTPPFGSLRSGGLLLSRDVPRETRSSSESLIFSGNQGRGHQRPLPPSEGLSPRPPNSPSISIPCMGSKASSPHGLGSPLVASPRLEKRLGGLAPQRGSRISVLSASPVSDVSYMFGSSQSLLHSSNSSHQSSSRSLESPANSSSSLHSLGSVSLCTRPSDFQAPRNPTLTMGQPRTPHSPPLAKEHASSCPPSITNSMVDIPIVLINGCPEPGSSPPQRTPGHQNSVQPGAASPSNPCPATRSNSQTLSDAPFTTCPEGPARDMQPTMKFVMDTSKYWFKPNITREQAIELLRKEEPGAFVIRDSSSYRGSFGLALKVQEVPASAQSRPGMRLSLCSLKASLRQRGVVGSSPGSGTSFQGDMAPVL

SEQ ID NO: 903941 - protein, 312 aa, Homo sapiens
MSQVMSSPLLAGGHAVSLAPCDEPRRTLHPAPSPSLPPQCSYYTTEGWGAQALMAPVPCMGPPGRLQQAPQVEAKATCFLPSPGEKALGTPEDLDSYIDFSLESLNQMILELDPTFQLLPPGTGGSQAELAQSTMSMRKKEESEALDIKYIEVTSARSRCHDGPQHCSSPSVTPPFGSLRSGGLLLSRDVPRETRSSSESLIFSGNQGRGHQRPLPPSEGLSPRPPNSPSISIPCMGSKASSPHGLGSPLVASPRLEKRLGGLAPQRGSRISVLSASPVSDVSYMFGSSQSLLHSSNSSHQSSSRSLEICRM

SEQ ID NO: 903942 - protein, 169 aa, Homo sapiens
MSQVMSSPLLAGGHAVSLAPCDEPRRTLHPAPSPSLPPQCSYYTTEGWGAQALMAPVPCMGPPGRLQQAPQVEAKATCFLPSPGEKALGTPEDLDSYIDFSLESLNQMILELDPTFQLLPPGTGGSQAELAQSTMSMRKKEESEALDIAPIFRKLFPLLAPSCIHQSLR

SEQ ID NO: 903943 - protein, 715 aa, Homo sapiens
MSQVMSSPLLAGGHAVSLAPCDEPRRTLHPAPSPSLPPQCSYYTTEGWGAQALMAPVPCMGPPGRLQQAPQVEAKATCFLPSPGEKALGTPEDLDSYIDFSLESLNQMILELDPTFQLLPPGTGGSQAELAQSTMSMRKKEESEALDIKYIEVTSARSRCHDGPQHCSSPSVTPPFGSLRSGGLLLSRDVPRETRSSSESLIFSGNQGRGHQRPLPPSEGLSPRPPNSPSISIPCMGSKASSPHGLGSPLVASPRLEKRLGGLAPQRGSRISVLSASPVSDVSYMFGSSQSLLHSSNSSHQSSSRSLESPANSSSSLHSLGSVSLCTRPSDFQAPRNPTLTMGQPRTPHSPPLAKEHASSCPPSITNSMVDIPIVLINGCPEPGSSPPQRTPGHQNSVQPGAASPSNPCPATRSNSQTLSDAPFTTCPEGPARDMQPTMKFVMDTSKYWFKPNITREQAIELLRKEEPGAFVIRDSSSYRGSFGLALKVQEVPASAQSRPGEDSNDLIRHFLIESSAKGVHLKGADEEPYFGSLSAFVCQHSIMALALPCKLTIPQRELGGADGASDSTDSPASCQKKSAGCHTLYLSSVSVETLTGALAVQKAISTTFERDILPTPTVVHFKVTEQGITLTDVQRKVFFRRHYPLTTLRFCGMDPEQRKWQKYCKPSWIFGFVAKSQTEPQENVCHLFAEYDMVQPASQVIGLVTALLQDAERM

SEQ ID NO: 903944 - protein, 477 aa, Homo sapiens
MKNKLRQVLEKYEDRKIYAKNWINSTEKMRKLLVTNLFEKPINLISGGAEVEKVKEMSSSPLPSSSRSLESPANSSSSLHSLGSVSLCTRPSDFQAPRNPTLTMGQPRTPHSPPLAKEHASSCPPSITNSMVDIPIVLINGCPEPGSSPPQRTPGHQNSVQPGAASPSNPCPATRSNSQTLSDAPFTTCPEGPARDMQPTMKFVMDTSKYWFKPNITREQAIELLRKEEPGAFVIRDSSSYRGSFGLALKVQEVPASAQSRPGEDSNDLIRHFLIESSAKGVHLKGADEEPYFGSLSAFVCQHSIMALALPCKLTIPQRELGGADGASDSTDSPASCQKKSAGCHTLYLSSVSVETLTGALAVQKAISTTFERDILPTPTVVHFKVTEQGITLTDVQRKVFFRRHYPLTTLRFCGMDPEQRKWQKYCKPSWIFGFVAKSQTEPQENVCHLFAEYDMVQPASQVIGLVTALLQDAERM

SEQ ID NO: 903945 - protein, 306 aa, Homo sapiens
SSVPDALSVGDFLGTKGDSVNICSVKTLRGWGQGVHGGAVSISDSRIVPAIELLRKEEPGAFVIRDSSSYRGSFGLALKVQEVPASAQSRPGEDSNDLIRHFLIESSAKGVHLKGADEEPYFGSLSAFVCQHSIMALALPCKLTIPQRELGGADGASDSTDSPASCQKKSAGCHTLYLSSVSVETLTGALAVQKAISTTFERDILPTPTVVHFKVTEQGITLTDVQRKVFFRRHYPLTTLRFCGMDPEQRKWQKYCKPSWIFGFVAKSQTEPQENVCHLFAEYDMVQPASQVIGLVTALLQDAERM

SEQ ID NO: 903946 - protein, 288 aa, Homo sapiens
MSQVMSSPLLAGGHAVSLAPCDEPRRTLHPAPSPSLPPQCSYYTTEGWGAQALMAPVPCMGPPGRLQQAPQVEAKATCFLPSPGEKALGTPEDLDSYIDFSLESLNQMILELDPTFQLLPPGTGGSQAELAQSTMSMRKKEESEALDIKYIEVTSARSRCHDGPQHCSSPSVTPPFGSLRSGGLLLSRDVPRETRSSSESLIFSGNQGRGHQRPLPPSEGLSPRPPNSPSISIPCMGSKASSPHGLGSPLVASPRLEKRLGGLAPQRGSRISVLSASPVSDVSYMFGR

SEQ ID NO: 903947 - protein, 110 aa, Homo sapiens
HSPASSAACRTMAQGQRKFQAHKPAKSKTAAAASEKNRGPRKGGRVIAPKKARVVQQQKLKKNLEVGIRKKIEHDVVMKASSSLPKKLALLKAPAKKKGAAAATSSKTPS

SEQ ID NO: 903948 - protein, 72 aa, Homo sapiens
RARSEGIEPGAALGAKDGARGQRGNLEVGIRKKIEHDVVMKASSSLPKKLALLKAPAKKKGAAAATSSKTPS

SEQ ID NO: 903949 - protein, 110 aa, Homo sapiens; identical to SEQ ID NO: 903947

SEQ ID NO: 903950 - protein, 79 aa, Homo sapiens
PEDYEALGPRKGGRVIAPKKARVVQQQKLKKNLEVGIRKKIEHDVVMKASSSLPKKLALLKAPAKKKGAAAATSSKTPS

SEQ ID NO: 903951 - protein, 110 aa, Homo sapiens; identical to SEQ ID NO: 903947

SEQ ID NO: 903952 - protein, 73 aa, Homo sapiens
QEEGDWSGPLSAPGHNADCPVLLPQNLEVGIRKKIEHDVVMKASSSLPKKLALLKAPAKKKGAAAATSSKTPS

SEQ ID NO: 903953 - protein, 70 aa, Homo sapiens
CRPTVHVQKLSQECLKRLAIKKNLEVGIRKKIEHDVVMKASSSLPKKLALLKAPAKKKGAAAATSSKTPS

SEQ ID NO: 903954 - protein, 110 aa, Homo sapiens; identical to SEQ ID NO: 903947

SEQ ID NO: 903955 - protein, 110 aa, Homo sapiens; identical to SEQ ID NO: 903947

SEQ ID NO: 903956 - protein, 110 aa, Homo sapiens; identical to SEQ ID NO: 903947

SEQ ID NO: 903957 - protein, 136 aa, Homo sapiens
HSPASSAACRTMAQGQRKFQAHKPAKSKTAAAASEKNRGPRKGGKERPGDLGARWTPGFPASREQHLSPGRVIAPKKARVVQQQKLKKNLEVGIRKKIEHDVVMKASSSLPKKLALLKAPAKKKGAAAATSSKTPS

SEQ ID NO: 903958 - protein, 110 aa, Homo sapiens; identical to SEQ ID NO: 903947

SEQ ID NO: 903959 - protein, 73 aa, Homo sapiens
HSPASSAACRTMAQGQRKFQAHKPAKSKTAAAASEKNRGPRKGGRVIAPKKARVVQQQKLKKRQVSLCCSGWS

SEQ ID NO: 903960 - protein, 97 aa, Homo sapiens
HSPASSAACRTMAQGQRKFQAHKPAKSKTAAAASEKNRGPRKGGRVIAPKKARVVQQQKLKKVVMKASSSLPKKLALLKAPAKKKGAAAATSSKTPS

SEQ ID NO: 903961 - protein, 584 aa, Homo sapiens
SKSHCADDQRAPRIPPPGWPRLLPPRGKARTGQCAGGWVLAARPDGTKAAGVCGRSLGCGPGGTHAVQGNMADAEVIILPKKHKKKKERKSLPEEDVAEIQHAEEFLIKPESKVAKLDTSQWPLLLKNFDKLNVRTTHYTPLACGSNPLKREIGDYIRTGFINLDKPSNPSSHEVVAWIRRILRVEKTGHSGTLDPKVTGCLIVCIERATRLVKSQQSAGKEYVGIVRLHNAIEGGTQLSRALETLTGALFQRPPLIAAVKRQLRVRTIYESKMIEYDPERRLGIFWVSCEAGTYIRTLCVHLGLLLGVGGQMQELRRVRSGVMSEKDHMVTMHDVLDAQWLYDNHKDESYLRRVVYPLEKLLTSHKRLVMKDSAVNAICYGAKIMLPGVLRYEDGIEVNQEIVVITTKGEAICMAIALMTTAVISTCDHGIVAKIKRVIMERDTYPRKWGLGPKASQKKLMIKQGLLDKHGKPTDSTPATWKQEYVDYSESAKKEVVAEVVKAPQVVAEAAKTAKRKRESESESDETPPAAPQLIKKEKKKSKKDKKAKAGLESGAEPGDGDSDTTKKKKKKKKAKEVELVSE

SEQ ID NO: 903962 - protein, 74 aa, Homo sapiens
LLLNSRPRRLCVHLGLLLGVGGQMQELRRVRSGVMSEKDHMVTMHDVLDAQWLYDNNSPQVTLILVVISRRARE

SEQ ID NO: 903963 - protein, 584 aa, Homo sapiens; identical to SEQ ID NO: 903961

SEQ ID NO: 903964 - protein, 584 aa, Homo sapiens; identical to SEQ ID NO: 903961

SEQ ID NO: 903965 - protein, 584 aa, Homo sapiens; identical to SEQ ID NO: 903961

SEQ ID NO: 903966 - protein, 402 aa, Homo sapiens
SKRRPGCNRQSLDPKVTGCLIVCIERATRLVKSQQSAGKEYVGIVRLHNAIEGGTQLSRALETLTGALFQRPPLIAAVKRQLRVRTIYESKMIEYDPERRLGIFWVSCEAGTYIRTLCVHLGLLLGVGGQMQELRRVRSGVMSEKDHMVTMHDVLDAQWLYDNHKDESYLRRVVYPLEKLLTSHKRLVMKDSAVNAICYGAKIMLPGVLRYEDGIEVNQEIVVITTKGEAICMAIALMTTAVISTCDHGIVAKIKRVIMERDTYPRKWGLGPKASQKKLMIKQGLLDKHGKPTDSTPATWKQEYVDYSESAKKEVVAEVVKAPQVVAEAAKTAKRKRESESESDETPPAAPQLIKKEKKKSKKDKKAKAGLESGAEPGDGDSDTTKKKKKKKKAKEVELVSE

SEQ ID NO: 903967 - protein, 252 aa, Homo sapiens
MHDVLDAQWLYDNHKDESYLRRVVYPLEKLLTSHKRLVMKDSAVNAICYGAKIMLPGVLRYEDGIEVNQEIVVITTKGEAICMAIALMTTAVISTCDHGIVAKIKRVIMERDTYPRKWGLGPKASQKKLMIKQGLLDKHGKPTDSTPATWKQEYVDYSESAKKEVVAEVVKAPQVVAEAAKTAKRKRESESESDETPPAAPQLIKKEKKKSKKDKKAKAGLESGAEPGDGDSDTTKKKKKKKKAKEVELVSE

SEQ ID NO: 903968 - protein, 269 aa, Homo sapiens
GEAPLGRLMYKRDHMVTMHDVLDAQWLYDNHKDESYLRRVVYPLEKLLTSHKRLVMKDSAVNAICYGAKIMLPGVLRYEDGIEVNQEIVVITTKGEAICMAIALMTTAVISTCDHGIVAKIKRVIMERDTYPRKWGLGPKASQKKLMIKQGLLDKHGKPTDSTPATWKQEYVDYSESAKKEVVAEVVKAPQVVAEAAKTAKRKRESESESDETPPAAPQLIKKEKKKSKKDKKAKAGLESGAEPGDGDSDTTKKKKKKKKAKEVELVSE

SEQ ID NO: 903969 - protein, 442 aa, Homo sapiens
SKSHCADDQRAPRIPPPGWPRLLPPRGKARTGQCAGGWVLAARPDGTKAAGVCGRSLGCGPGGTHAVQGNMADAEVIILPKKHKKKKERKSLPEEDVAEIQHAEEFLIKPESKVAKLDTSQWPLLLKNFDKLNVRTTHYTPLACGSNPLKREIGDYIRTGFINLDKPSNPSSHEVVAWIRRILRVEKTGHSGTLDPKVTGCLIVCIERATRLVKSQQSAGKEYVGIVRLHNAIEGGTQLSRALETLTGALFQRPPLIAAVKRQLRVRTIYESKMIEYDPERRLGIFWVSCEAGTYIRTLCVHLGLLLGVGGQMQELRRVRSGVMSEKDHMVTMHDVLDAQWLYDNHKDESYLRRVVYPLEKLLTSHKRLVMKDSAVNWHLLWGRYAPGVSNGRLRPPGWGLPPGTSGWVCYATGLPGRFPIPGPGTPRGSAQSWLRAPRCFS

SEQ ID NO: 903970 - protein, 119 aa, Homo sapiens
ITLHNISTALESHSVNLTYCYLFFSESAKKEVVAEVVKAPQVVAEAAKTAKRKRESESESDETPPAAPQLIKKEKKKSKKDKKAKAGLESGAEPGDGDSDTTKKKKKKKKAKEVELVSE

SEQ ID NO: 903971 - protein, 295 aa, Homo sapiens
DAWVDPRVAHATGFINLDKPSNPSSHEVVAWIRRILRVEKTGHSGTLDPKVTGCLIVCIERATRLVKSQQSAGKEYVGIVRLHNAIEGGTQLSRALETLTGALFQRPPLIAAVKRQLRVRTIYESKMIEYDPERRLGIFWVSCEAGTYIRTLCVHLGLLLGVGGQMQELRRVRSGVMSEKDHMVTMHDVLDAQWLYDNHKDESYLRRVVYPLEKLLTSHKRLVMKDSAVNWHLLWGRYAPGVSNGRLRPPGWGLPPGTSGWVCYATGLPGRFPIPGPGTPRGSAQSWLRAPRCFS

SEQ ID NO: 903972 - protein, 556 aa, Homo sapiens
  misc_feature (10)..(10): Xaa can be any naturally occurring amino acid
RLVRGGVNRXRLAARPDGTKAAGVCGRSLGCGPGGTHAVQGNMADAEVIILPKKHKKKKERKSLPEEDVAEIQHAEEFLIKPESKVAKLDTSQWPLLLKNFDKLNVRTTHYTPLACGSNPLKREIGDYIRTGFINLDKPSNPSSHEVVAWIRRILRVEKTGHSGTLDPKVTGCLIVCIERATRLVKSQQSAGKEYVGIVRLHNAIEGGTQLSRALETLTGALFQRPPLIAAVKRQLRVRTIYESKMIEYDPERRLGIFWVSCEAGTYIRTLCVHLGLLLGVGGQMQELRRVRSGVMSEKDHMVTMHDVLDAQWLYDNHKDESYLRRVVYPLEKLLTSHKRLVMKDSAVNAICYGAKIMLPGVLRYEDGIEVNQEIVVITTKGEAICMAIALMTTAVISTCDHGIVAKIKRVIMERDTYPRKWGLGPKASQKKLMIKQGLLDKHGKPTDSTPATWKQEYVDYSESAKKEVVAEVVKAPQVVAEAAKTAKRKRESESESDETPPAAPQLIKKEKKKSKKDKKAKAGLESGAEPGDGDSDTTKKKKKKKKAKEVELVSE

SEQ ID NO: 903973 - protein, 584 aa, Homo sapiens; identical to SEQ ID NO: 903961

SEQ ID NO: 903974 - protein, 549 aa, Homo sapiens
  misc_feature (38)..(38): Xaa can be any naturally occurring amino acid
MADAEVIYARRNHTGMKQWMPEGSLRAETKTVGATLSXIVCNDKFAYQNLRVQRLTRIGARLSGALVAKRKFVTKPELLMRQSTRDTSFVGQWWCPIVHFWTWSRTIGRARDYVEVNDGLLHVNSLVQKALCLTPSSHEVVAWIRRILRVEKTGHSGTLDPKVTGCLIVCIERATRLVKSQQSAGKEYVGIVRLHNAIEGGTQLSRALETLTGALFQRPPLIAAVKRQLRVRTIYESKMIEYDPERRLGIFWVSCEAGTYIRTLCVHLGLLLGVGGQMQELRRVRSGVMSEKDHMVTMHDVLDAQWLYDNHKDESYLRRVVYPLEKLLTSHKRLVMKDSAVNAICYGAKIMLPGVLRYEDGIEVNQEIVVITTKGEAICMAIALMTTAVISTCDHGIVAKIKRVIMERDTYPRKWGLGPKASQKKLMIKQGLLDKHGKPTDSTPATWKQEYVDYSESAKKEVVAEVVKAPQVVAEAAKTAKRKRESESESDETPPAAPQLIKKEKKKSKKDKKAKAGLESGAEPGDGDSDTTKKKKKKKKAKEVELVSE

SEQ ID NO: 903975 - protein, 272 aa, Homo sapiens [sequence omitted]

SEQ ID NO: 903976 - protein, 262 aa, Homo sapiens [sequence omitted]

SEQ ID NO: 903977 - protein, 332 aa, Homo sapiens
SKSHCADDQRAPRIPPPGWPRLLPPRGKARTGQCAGGWVLAARPDGTKAAGVCGRSLGCGPGGTHAVQGNMADAEVIILPKKHKKKKERKSLPEEDVAEIQHAEEFLIKPESKVAKLDTSQWPLLLKNFDKLNVRTTHYTPLACGSNPLKREIGDYIRTGFINLDKPSNPSSHEVVAWIRRILRVEKTGHSGTLDPKVTGCLIVCIERATRLVKSQQSAGKEYVGIVRLHNAIEGGTQLSRALETLTGALFQRPPLIAAVKRQLRVRTIYESKMIEYDPERRLGIFWVSCEAGTYIRTLCVHLGCIGVGANADLGARLGWGRPWGACVSQGV

SEQ ID NO: 903978 - protein, 739 aa, Homo sapiens
TCPPEFLHQQHGRRLRGEPGRRRLCSPRVTGPLPPSALGPRGEIDVYLAKSLAEKLYLFQYPVRPASMTYDDIPHLSAKIKPKQQKVELEMAIDTLNPNYCRSKGEQIALNVDGACADETSTYSSKLMDKQTFCSSQTTSNTSRYAAALYRQGELHLTPLHGILQLRPSFSYLDKADAKHREREAANEAGDSSQDEAEDDVKQITVRFSRPESEQARQRRVQSYEFLQKKHAEEPWVHLHYYGLRDSRSEHERQYLLCPGSSGVENTELVKSPSEYLMMLMPPSQEEEKDKPVAPSNVLSMAQLRTLPLADQIKILMKNVKVMPFANLMSLLGPSIDSVAVLRGIQKVAMLVQGNWVVKSDILYPKDSSSPHSGVPAEVLCRGRDFVMWKFTQSRWVVRKEVATVTKLCAEDVKDFLEHMAVVRINKGWEFILPYDGEFIKKHPDVVQRQHMLWTGIQAKLEKVYNLVKETMPKKPDAQSGPAGLVCGDQRIQVAKTKAQQNHALLERELQRRKEQLRVPAVPPGVRIKEEPVSEEGEEDEEQEAEEEPMDTSPSGLHSKLANGLPLGRAAGTDSFNGHPPQGCASTPVARELKAFVEATFQRQFVLTLSELKRLFNLHLASLPPGHTLFSGISDRMLQDTVLAAGCKQILVPFPPQTAASPDEQKVFALWESGDMSDQHRQVLLEIFSKNYRVRRNMIQSRLTQECGEDLSKQEVDKVLKDCCVSYGGMWYLKGTVQS

SEQ ID NO: 903979 - protein, 763 aa, Homo sapiens
VSAGVSPPATWPPPERRAGPPPSLQPAGNWAVAAVRARPPRRDRAEGLRGWLSSSMANEEDDPVVQEIDVYLAKSLAEKLYLFQYPVRPASMTYDDIPHLSAKIKPKQQKVELEMAIDTLNPNYCRSKGEQIALNVDGACADETSTYSSKLMDKQTFCSSQTTSNTSRYAAALYRQGELHLTPLHGILQLRPSFSYLDKADAKHREREAANEAGDSSQDEAEDDVKQITVRFSRPESEQARQRRVQSYEFLQKKHAEEPWVHLHYYGLRDSRSEHERQYLLCPGSSGVENTELVKSPSEYLMMLMPPSQEEEKDKPVAPSNVLSMAQLRTLPLADQIKILMKNVKVMPFANLMSLLGPSIDSVAVLRGIQKVAMLVQGNWVVKSDILYPKDSSSPHSGVPAEVLCRGRDFVMWKFTQSRWVVRKEVATVTKLCAEDVKDFLEHMAVVRINKGWEFILPYDGEFIKKHPDVVQRQHMLWTGIQAKLEKVYNLVKETMPKKPDAQSGPAGLVCGDQRIQVAKTKAQQNHALLERELQRRKEQLRVPAVPPGVRIKEEPVSEEGEEDEEQEAEEEPMDTSPSGLHSKLANGLPLGRAAGTDSFNGHPPQGCASTPVARELKAFVEATFQRQFVLTLSELKRLFNLHLASLPPGHTLFSGISDRMLQDTVLAAGCKQILVPFPPQTAASPDEQKVFALWESGDMSDQHRQVLLEIFSKNYRVRRNMIQSRLTQECGEDLSKQEVDKVLKDCCVSYGGMWYLKGTVQS

SEQ ID NO: 903980 - protein, 721 aa, Homo sapiens
VSAGVSPPATWPPPERRAGPPPSLQPAGNWAVAAVRARPPRRDRAEGLRGWLSSSMANEEDDPVVQEIDVYLAKSLAEKLYLFQYPVRPASMTYDDIPHLSAKIKPKQQKVELEMAIDTLNPNYCRSKGEQIALNVDGACADETSTYSSKLMDKQTFCSSQTTSNTSRYAAALYRQGELHLTPLHGILQLRPSFSYLDKADAKHREREAANEAGDSSQDEAEDDVKQITVRFSRPESEQARQRRVQSYEFLQKKHAEEPWVHLHYYGLRDSRSEHERQYLLCPGSSGVENTELVKSPSEYLMMLMPPSQEEEKDKPVAPSNVLSMAQLRTLPLADQIKILMKNVKVMPFANLMSLLGPSIDSVAVLRGIQKVAMLVQGNWVVKSDILYPKDSSSPHSGVPAEVLCRGRDFVMWKFTQSRWVVRKEVATVTKLCAEDVKDFLEHMAVVRINKGWEFILPYDGEFIKKHPDVVQRQHMLWTGIQAKLEKVYNLVKETMPKKPDAQSGPAGLVCGDQRIQVAKTKAQQNHALLERELQRRKEQLRVPAVPPGVRIKEEPVSEEGEEDEEQEAEEEPMDTSPSGLHSKLANGLPLGRAAGTDSFNGHPPQGCASTPVARELKAFVEATFQRQFVLTLSELKRLFNLHLASLPPGHTLFSGISDRMLQDTVLAAGCKQILVPFPPQTAASPDEQKVFALWESGDMSDQDCCVSYGGMWYLKGTVQS

SEQ ID NO: 903981 - protein, 534 aa, Homo sapiens
VSAGVSPPATWPPPERRAGPPPSLQPAGNWAVAAVRARPPRRDRAEGLRGWLSSSMANEEDDPVVQEIDVYLAKSLAEKLYLFQYPVRPASMTYDDIPHLSAKIKPKQQKVELEMAIDTLNPNYCRSKGEQIALNVDGACADETSTYSSKLMDKQTFCSSQTTSNTSRYAAALYRQGELHLTPLHGILQLRPSFSYLDKADAKHREREAANEAGDSSQDEAEDDVKQITVRFSRPESEQARQRRVQSYEFLQKKHAEEPWVHLHYYGLRDSRSEHERQYLLCPGSSGVENTELVKSPSEYLMMLMPPSQEEEKDKPVAPSNVLSMAQLRTLPLADQIKILMKNVKVMPFANLMSLLGPSIDSVAVLRGIQKVAMLVQGNWVVKSDILYPKDSSSPHSGVPAEVLCRGRDFVMWKFTQSRWVVRKEVATVTKLCAEDVKDFLEHMAVVRINKGWEFILPYDGEFIKKHPDVVQRQHMLWTGIQAKLEKVYNLVKETMPKKPDAQSGPAGLVCGDQRIQVAKTKAQAAPAPLWLGN

SEQ ID NO: 903982 - protein, 739 aa, Homo sapiens; identical to SEQ ID NO: 903978

SEQ ID NO: 903983 - protein, 745 aa, Homo sapiens
VSAGVSPPATWPPPERRAGPPPSLQPAGNWAVAAVRARPPRRDRAEGLRGWLSSSMANEEDDPVVQEIDVYLAKSLAEKLYLFQYPVRPASMTYDDIPHLSAKIKPKQQKVELEMAIDTLNPNYCRSKGEQIALNVDGACADETSTYSSKLMDKQTFCSSQTTSNTSRYAAALYRQGELHLTPLHGILQLRPSFSYLDKADAKHREREAANEAGDSSQDEAEDDVKQITVRFSRPESEQARQRRVQSYEFLQKKHAEEPWVHLHYYGLRDSRSEHERQYLLCPGSSGVENTELVKSPSEYLMMLMPPSQEEEKDKPVAPSNVLSMAQLRTLPLADQIKILMKNVKVMPFANLMSLLGPSIDSVAVLRGIQKVAMLVQGNWVVKSDILYPKDSSSPHSGVPAEVLCRGRDFVMWKFTQSRWVVRKEVATVTKLCAEDVKDFLEHMAVVRINKGWEFILPYDGEFIKKHPDVVQRQHMLWTGIQAKLEKVYNLVKETMPKKPDAQSGPAGLVCGDQRIQVAKTKAQQNHALLERELQRRKEQLRVPAVPPGVRIKEEPVSEEGEEDEEQEAEEEPMDTSPSGLHSKLANGLPLGRAAGTDSFNGHPPQGCASTPVARELKAFVEATFQRQFVLTLSELKRLFNLHLASLPPGHTLFSGISDRMLQDTVLAAGCKQILVPFPPQTAASPDEQKVFALWESGDMSDQHRQVLLEIFSREDLSKQEVDKVLKDCCVSYGGMWYLKGTVQS

SEQ ID NO: 903984 - protein, 462 aa, Homo sapiens
MMLMPPSQEEEKDKPVAPSNVLSMAQLRTLPLADQIKILMKNVKVMPFANLMSLLGPSIDSVAVLRGIQKVAMLVQGNWVVKSDILYPKDSSSPHSGVPAEVLCRGRDFVMWKFTQSRWVVRKEVATVTKLCAEDVKDFLEHMAVVRINKGWEFILPYDGEFIKKHPDVVQRQHMLWTGIQAKLEKVYNLVKETMPKKPDAQSGPAGLVCGDQRIQVAKTKAQQNHALLERELQRRKEQLRVPAVPPGVRIKEEPVSEEGEEDEEQEAEEEPMDTSPSGLHSKLANGLPLGRAAGTDSFNGHPPQGCASTPVARELKAFVEATFQRQFVLTLSELKRLFNLHLASLPPGHTLFSGISDRMLQDTVLAAGCKQILVPFPPQTAASPDEQKVFALWESGDMSDQHRQVLLEIFSKNYRVRRNMIQSRLTQECGEDLSKQEVDKVLKDCCVSYGGMWYLKGTVQS

SEQ ID NO: 903985 - protein, 709 aa, Homo sapiens
VSAGVSPPATWPPPERRAGPPPSLQPAGNWAVAAVRARPPRRDRAEGLRGWLSSSMANEEDDPVVQEIDVYLAKSLAEKLYLFQYPVRPASMTYDDIPHLSAKIKPKQQKVELEMAIDTLNPNYCRSKGEQIALNVDGACADETSTYSSKLMDKQTFCSSQTTSNTSRYAAALYRQGELHLTPLHGILQLRPSFSYLDKADAKHREREAANEAGDSSQDEAEDDVKQITVRFSRPESEQARQRRVQSYEFLQKKHAEEPWVHLHYYGLRDSRSEHERQYLLCPGSSGVENTELVKSPSEYLMMLMPPSQEEEKDKPVAPSNVLSMAQLRTLPLADQIKILMKNVKVMPFANLMSLLGPSIDSVAVLRGIQKVAMLVQGNWVVKSDILYPKDSSSPHSGVPAEVLCRGRDFVMWKFTQSRWVVRKEVATVTKLCAEDVKDFLEHMAVVRINKGWEFILPYDGEFIKKHPDVVQRQHMLWTGIQAKLEKVYNLVKETMPKKPDAQSGPAGLVCGDQRIQVAKTKAQQNHALLERELQRRKEQLRVPAVPPGVRIKEEPVSEEGEEDEEQEAEEEPMDTSPSGLHSKLANGLPLGRAAGTDSFNGHPPQGCASTPVARELKAFVEATFQRQFVLTLSELKRLFNLHLASLPPGHTLFSGISDRMLQDTVLAAGCKQILVPVSRALPARGMGGGGWGEPAVGRPRGDTGGHAW

SEQ ID NO: 903986 - protein, 763 aa, Homo sapiens; identical to SEQ ID NO: 903979

SEQ ID NO: 903987 - protein, 187 aa, Homo sapiens
GLQELARELANGLPLGRAAGTDSFNGHPPQGCASTPVARELKAFVEATFQRQFVLTLSELKRLFNLHLASLPPGHTLFSGISDRMLQDTVLAAGCKQILVPFPPQTAASPDEQKVFALWESGDMSDQHRQVLLEIFSKNYRVRRNMIQSRLTQECGEDLSKQEVDKVLKDCCVSYGGMWYLKGTVQS

SEQ ID NO: 903988 - protein, 769 aa, Homo sapiens
VSAGVSPPATWPPPERRAGPPPSLQPAGNWAVAAVRARPPRRDRAEGLRGWLSSSMANEEDDPVVQEIDVYLAKSLAEKLYLFQYPVRPASMTYDDIPHLSAKIKPKQQKVELEMAIDTLNPNYCRSKGEQIALNVDGACADETSTYSSKLMDKQTFCSSQTTSNTSRYAAALYRQGELHLTPLHGILQLRPSFSYLDKADAKHREREAANEAGDSSQDEAEDDVKQITVRFSRPESEQARQRRVQSYEFLQKKHAEEPWVHLHYYGLRDSRSEHERQYLLCPGSSGVENTELVKSPSEYLMMLMPPSQEEEKDKPVAPSNVLSMAQLRTLPLADQIKILMKNVKVMPFANLMSLLGPSIDSVAVLRGIQKVAMLVQGNWVVKSDILYPKDSSSPHSGVPAEVLCRGRDFVMWKFTQSRWVVRKEVATVTKLCAEDVKDFLEHMAVVRINKGWEFILPYDGEFIKKHPDVVQRQHMLWTGIQAKLEKVYNLVKETMPKKPDAQSGPAGLVCGDQRIQVAKTKAQQNHALLERELQRRKEQLRVPAVPPGVRIKEEPVSEEGEEDEEQEAEEEPMDTSPSGLHSKLANGLPLGRAAGTDSFNGHPPQGCASTPVARELKAFVEATFQRQFVLTLSELKRLFNLHLASLPPGHTLFSGISDRMLQDTVLAAGCKQILVPFPPQTAASPDEQKVFALWESGDMSDQHRQVLLEIFSKNYRVRRNMIQSRLTQECGEDLSKQEVDKVLKDCCVSYGGMWYLKGTTEQEELTIS

SEQ ID NO: 903989 - protein, 272 aa, Homo sapiens
VSAGVSPPATWPPPERRAGPPPSLQPAGNWAVAAVRARPPRRDRAEGLRGWLSSSMANEEDDPVVQEIDVYLAKSLAEKLYLFQYPVRPASMTYDDIPHLSAKIKPKQQKVELEMAIDTLNPNYCRSKGEQIALNVDGACADETSTYSSKLMDKQTFCSSQTTSNTSRYAAALYRQGELHLTPLHGILQLRPSFSYLDKADAKHREKEAAHQVMGLFKDEAQNHVKPYKVRFFRSGVIPGPAKSSSIPLNLCKTNTPKYPWDPLAYLMPDRT

SEQ ID NO: 903990 - protein, 67 aa, Homo sapiens
RDGPLFCRGSGLLGEGGGGLSAPSPQTLTWVAGEEGPAWISPEPLPLPCPCSEYLMMLMPPSQEEEK

SEQ ID NO: 903991 - protein, 709 aa, Homo sapiens; identical to SEQ ID NO: 903985

SEQ ID NO: 903992 - protein, 763 aa, Homo sapiens; identical to SEQ ID NO: 903979

SEQ ID NO: 903993 - protein, 709 aa, Homo sapiens; identical to SEQ ID NO: 903985

SEQ ID NO: 903994 - protein, 696 aa, Homo sapiens
VSAGVSPPATWPPPERRAGPPPSLQPAGNWAVAAVRARPPRRDRAEGLRGWLSSSMANEEDDPVVQEIDVYLAKSLAEKLYLFQYPVRPASMTYDDIPHLSAKIKPKQQKVELEMAIDTLNPNYCRSKGEQIALNVDGACADETSTYSSKLMDKQTFCSSQTTSNTSRYAAALYRQGELHLTPLHGILQLRPSFSYLDKADAKHREREAANEAGDSSQDEAEDDVKQITVRFSRPESEQARQRRVQSYEFLQKKHAEEPWVHLHYYGLRDSRSEHERQYLLCPGSSGVENTELVKSPSEYLMMLMPPSQEEEKDKPVAPSNVLSMAQLRTLPLADQIKILMKNVKVMPFANLMSLLGPSIDSVAVLRGIQKVAMLVQGNWVVKSDILYPKDSSSPHSGVPAEVLCRGRDFVMWKFTQSRWVVRKEVATVTKLCAEDVKDFLEHMAVVRINKGWEFILPYDGEFIKKHPDVVQRQHMLWTGIQAKLEKVYNLVKETMPKKPDAQSGPAGLVCGDQRIQLANGLPLGRAAGTDSFNGHPPQGCASTPVARELKAFVEATFQRQFVLTLSELKRLFNLHLASLPPGHTLFSGISDRMLQDTVLAAGCKQILVPFPPQTAASPDEQKVFALWESGDMSDQHRQVLLEIFSKNYRVRRNMIQSRLTQECGEDLSKQEVDKVLKDCCVSYGGMWYLKGTVQS

SEQ ID NO: 903995 - protein, 692 aa, Homo sapiens
GQDQAQAAEGHRGWEVRNVIVGHRGWTHLSAKIKPKQQKVELEMAIDTLNPNYCRSKGEQIALNVDGACADETSTYSSKLMDKQTFCSSQTTSNTSRYAAALYRQGELHLTPLHGILQLRPSFSYLDKADAKHREREAANEAGDSSQDEAEDDVKQITVRFSRPESEQARQRRVQSYEFLQKKHAEEPWVHLHYYGLRDSRSEHERQYLLCPGSSGVENTELVKSPSEYLMMLMPPSQEEEKDKPVAPSNVLSMAQLRTLPLADQIKILMKNVKVMPFANLMSLLGPSIDSVAVLRGIQKVAMLVQGNWVVKSDILYPKDSSSPHSGVPAEVLCRGRDFVMWKFTQSRWVVRKEVATVTKLCAEDVKDFLEHMAVVRINKGWEFILPYDGEFIKKHPDVVQRQHMLWTGIQAKLEKVYNLVKETMPKKPDAQSGPAGLVCGDQRIQVAKTKAQQNHALLERELQRRKEQLRVPAVPPGVRIKEEPVSEEGEEDEEQEAEEEPMDTSPSGLHSKLANGLPLGRAAGTDSFNGHPPQGCASTPVARELKAFVEATFQRQFVLTLSELKRLFNLHLASLPPGHTLFSGISDRMLQDTVLAAGCKQILVPFPPQTAASPDEQKVFALWESGDMSDQHRQVLLEIFSKNYRVRRNMIQSRLTQECGEDLSKQEVDKVLKDCCVSYGGMWYLKGTVQS

SEQ ID NO: 903996 - protein, 627 aa, Homo sapiens
EICTSTSPVLFQYAGRRALHVLHMSQLVHTSRYAAALYRQGELHLTPLHGILQLRPSFSYLDKADAKHREREAANEAGDSSQDEAEDDVKQITVRFSRPESEQARQRRVQSYEFLQKKHAEEPWVHLHYYGLRDSRSEHERQYLLCPGSSGVENTELVKSPSEYLMMLMPPSQEEEKDKPVAPSNVLSMAQLRTLPLADQIKILMKNVKVMPFANLMSLLGPSIDSVAVLRGIQKVAMLVQGNWVVKSDILYPKDSSSPHSGVPAEVLCRGRDFVMWKFTQSRWVVRKEVATVTKLCAEDVKDFLEHMAVVRINKGWEFILPYDGEFIKKHPDVVQRQHMLWTGIQAKLEKVYNLVKETMPKKPDAQSGPAGLVCGDQRIQVAKTKAQQNHALLERELQRRKEQLRVPAVPPGVRIKEEPVSEEGEEDEEQEAEEEPMDTSPSGLHSKLANGLPLGRAAGTDSFNGHPPQGCASTPVARELKAFVEATFQRQFVLTLSELKRLFNLHLASLPPGHTLFSGISDRMLQDTVLAAGCKQILVPFPPQTAASPDEQKVFALWESGDMSDQHRQVLLEIFSKNYRVRRNMIQSRLTQECGEDLSKQEVDKVLKDCCVSYGGMWYLKGTVQS

SEQ ID NO: 903997 - protein, 321 aa, Homo sapiens
HRPALPHQYGLGSEASVLGEFIKKHPDVVQRQHMLWTGIQAKLEKVYNLVKETMPKKPDAQSGPAGLVCGDQRIQVAKTKAQQNHALLERELQRRKEQLRVPAVPPGVRIKEEPVSEEGEEDEEQEAEEEPMDTSPSGLHSKLANGLPLGRAAGTDSFNGHPPQGCASTPVARELKAFVEATFQRQFVLTLSELKRLFNLHLASLPPGHTLFSGISDRMLQDTVLAAGCKQILVPFPPQTAASPDEQKVFALWESGDMSDQHRQVLLEIFSKNYRVRRNMIQSRLTQECGEDLSKQEVDKVLKDCCVSYGGMWYLKGTVQS

SEQ ID NO: 903998 - protein, 763 aa, Homo sapiens; identical to SEQ ID NO: 903979

SEQ ID NO: 903999 - protein, 520 aa, Homo sapiens
VSAGVSPPATWPPPERRAGPPPSLQPAGNWAVAAVRARPPRRDRAEGLRGWLSSSMANEEDDPVVQEIDVYLAKSLAEKLYLFQYPVRPASMTYDDIPHLSAKIKPKQQKVELEMAIDTLNPNYCRSKGEQIALNVDGACADETSTYSSKLMDKQTFCSSQTTSNTSRYAAALYRQGELHLTPLHGILQLRPSFSYLDKADAKHREREAANEAGDSSQDEAEDDVKQITVRFSRPESEQARQRRVQSYEFLQKKHAEEPWVHLHYYGLRDSRSEHERQYLLCPGSSGVENTELVKSPSEYLMMLMPPSQEEEKDKPVAPSNVLSMAQLRTLPLADQIKILMKNVKVMPFANLMSLLGPSIDSVAVLRGIQKVAMLVQGNWVVKSDILYPKDSSSPHSGVPAEVLCRGRDFVMWKFTQSRWVVRKEVATVTKLCAEDVKDFLEHMAVVRINKGWEFILPYDGEFIKKHPDVVQRQHMLWTGIQAKLEKVYNLVKETMPKKPDAQSGLPGGLWDTIHYQTRP

SEQ ID NO: 904000 - protein, 208 aa, Homo sapiens
VSAGVSPPATWPPPERRAGPPPSLQPAGNWAVAAVRARPPRRDRAEGLRGWLSSSMANEEDDPVVQEIDVYLAKSLAEKLYLFQYPVRPASMTYDDIPHLSAKIKPKQQKVELEMAIDTLNPNYCRSKGEQIALNVDGACADETSTYSSKLMDKQTFCSSQTTSNTSRYAAALYRQGSIYPKEMKTCVHTKPYTVVHSSIFMIAKKWK

SEQ ID NO: 904001 - protein, 101 aa, Homo sapiens
MGTRLLPALFLVLLVLGFEVQGTQQPQQDEMPSPTFLTQVKESLSSYWESAKTAAQNLYEKTYLPAVDEKLRDLYSKSTAAMSTYTGIFTDQVLSVLKGEE

SEQ ID NO: 904002 - protein, 104 aa, Homo sapiens
ERTRPCLGKKKRIVDHLLVFFLRGSDLTLFLPYFLISYVWMMILCPVHVLRHQKCLSHRAGLWTLWAHDSSQLCFLSSWYWDLRSRGPNSPSKMRCLARPSSPR

SEQ ID NO: 904003 - protein, 101 aa, Homo sapiens
MGTRLLPALFLVLLVLGFEVQGTQQPQQDEMPSPTLLTQVKESLSSYWESAKTAAQNLYEKTYLPAVDEKLRDLYSKSTAAMSTYTGIFTDQVLSVLKGEE

SEQ ID NO: 904004 - protein, 106 aa, Homo sapiens
GGCGCGAEVGLNHYKASLCPSGAGEDSLPESGLWTLWAHDSSQLCFLSSWYWDLVKESLSSYWESAKTAAQNLYEKTYLPAVDEKLRGGLVQQKHSSHEHLHRHFY

SEQ ID NO: 904005 - protein, 103 aa, Homo sapiens
MTPPQCSRSLDTMGTRLLPALFLVLLVLGFEVQGTQQPQQDEMPSPTFLTQVKESLSSYWESAKTAAQNLYEKTYLPAVDEKLRGGLVQQKHSSHEHLHRHFY

SEQ ID NO: 904006 - protein, 109 aa, Homo sapiens
MGTRLLPALFLVLLVLGFEVQGTQQPQQDEMPSPTFLTQVKESLSSYWESAKTAAQNLYEKTYLPAVDEKLRGEHLPLEKWGLAHTTDCIQDPEVQAPAPPPSDPGVQA

SEQ ID NO: 904007 - protein, 119 aa, Homo sapiens
  misc_feature (5)..(5): Xaa can be any naturally occurring amino acid
RLIRXLWGFGSSQDSARGQPARVWSLDTMGTRLLPALFLVLLVLGFEVQGTQQPQQDEMPSPTFLTQVKESLSSYWESAKTAAQNLYEKTYLPAVDEKLRGGLVQQKHSSHEHLHRHFY

SEQ ID NO: 904008 - protein, 119 aa, Homo sapiens; identical to SEQ ID NO: 904007
  misc_feature (5)..(5): Xaa can be any naturally occurring amino acid

SEQ ID NO: 904009 - protein, 104 aa, Homo sapiens; identical to SEQ ID NO: 904002

SEQ ID NO: 904010 - protein, 101 aa, Homo sapiens; identical to SEQ ID NO: 904003

SEQ ID NO: 904011 - protein, 378 aa, Homo sapiens
MLYLEDYLEMIEQLPMDLRDRFTEMREMDLQVQNAMDQLEQRVSEFFMNAKKNKPEWREEQMASIKKDYYKALEDADEKVQLANQIYDLVDRHLRKLDQELAKFKMELEADNAGITEILERRSLELDTPSQPVNNHHAHSHTPVEKRKYNPTSHHTTTDHIPEKKFKSEALLSTLTSDASKENTLGCRNNNSTASSNNAYNVNSSQPLGSYNIGSLSSGTGAGAITMAAAQAVQATAQMKEGRRTSSLKASYEAFKNNDFQLGKEFSMARETVGYSSSSALMTTLTQNASSSAADSRSGRKSKNNNKSSSQQSSSSSSSSSLSSCSSSSTVVQEISQQTTVVPESDSNSQVDWTYDPNEPRYCICNQVKVCYIYKSII

SEQ ID NO: 904012 - protein, 192 aa, Homo sapiens
MAAAQAVQATAQMKEGRRTSSLKASYEAFKNNDFQLGKEFSMARETVGYSSSSALMTTLTQNASSSAADSRSGRKSKNNNKSSSQQSSSSSSSSSLSSCSSSSTVVQEISQQTTVVPESDSNSQVDWTYDPNEPRYCICNQVSYGEMVGCDNQDCPIEWFHYGCVGLTEAPKGKWYCPQCTAAMKRRGSRHK

SEQ ID NO: 904013 - protein, 198 aa, Homo sapiens
  misc_feature (14)..(14): Xaa can be any naturally occurring amino acid
FSSSSSTLFVFFIXPFSTMKEGRRTSSLKASYEAFKNNDFQLGKEFSMARETVGYSSSSALMTTLTQNASSSAADSRSGRKSKNNNKSSSQQSSSSSSSSSLSSCSSSSTVVQEISQQTTVVPESDSNSQVDWTYDPNEPRYCICNQVSYGEMVGCDNQDCPIEWFHYGCVGLTEAPKGKWYCPQCTAAMKRRGSRHK

SEQ ID NO: 904014 - protein, 426 aa, Homo sapiens
GVERVLLAMLYLEDYLEMIEQLPMDLRDRFTEMREMDLQVQNAMDQLEQRVSEFFMNAKKNKPEWREEQMASIKKDYYKALEDADEKVQLANQIYDLVDRHLRKLDQELAKFKMELEADNAGITEILERRSLELDTPSQPVNNHHAHSHTPVEKRKYNPTSHHTTTDHIPEKKFKSEALLSTLTSDASKENTLGCRNNNSTASSNNAYNVNSSQPLGSYNIGSLSSGTGAGAITMAAAQAVQATAQMKEGRRTSSLKASYEAFKNNDFQLGKEFSMARETVGYSSSSALMTTLTQNASSSAADSRSGRKSKNNNKSSSQQSSSSSSSSSLSSCSSSSTVVQEISQQTTVVPESDSNSQVDWTYDPNEPRYCICNQVSYGEMVGCDNQDCPIEWFHYGCVGLTEAPKGKWYCPQCTAAMKRRGSRHK

SEQ ID NO: 904015 - protein, 394 aa, Homo sapiens
MLYLEDYLENAMDQLEQRVSEFFMNAKKNKPEWREEQMASIKKDYYKALEDADEKVQLANQIYDLVDRHLRKLDQELAKFKMELEADNAGITEILERRSLELDTPSQPVNNHHAHSHTPVEKRKYNPTSHHTTTDHIPEKKFKSEALLSTLTSDASKENTLGCRNNNSTASSNNAYNVNSSQPLGSYNIGSLSSGTGAGAITMAAAQAVQATAQMKEGRRTSSLKASYEAFKNNDFQLGKEFSMARETVGYSSSSALMTTLTQNASSSAADSRSGRKSKNNNKSSSQQSSSSSSSSSLSSCSSSSTVVQEISQQTTVVPESDSNSQVDWTYDPNEPRYCICNQVSYGEMVGCDNQDCPIEWFHYGCVGLTEAPKGKWYCPQCTAAMKRRGSRHK

SEQ ID NO: 904016 - protein, 418 aa, Homo sapiens
MLYLEDYLEMIEQLPMDLRDRFTEMREMDLQVQNAMDQLEQRVSEFFMNAKKNKPEWREEQMASIKKDYYKALEDADEKVQLANQIYDLVDRHLRKLDQELAKFKMELEADNAGITEILERRSLELDTPSQPVNNHHAHSHTPVEKRKYNPTSHHTTTDHIPEKKFKSEALLSTLTSDASKENTLGCRNNNSTASSNNAYNVNSSQPLGSYNIGSLSSGTGAGAITMAAAQAVQATAQMKEGRRTSSLKASYEAFKNNDFQLGKEFSMARETVGYSSSSALMTTLTQNASSSAADSRSGRKSKNNNKSSSQQSSSSSSSSSLSSCSSSSTVVQEISQQTTVVPESDSNSQVDWTYDPNEPRYCICNQVSYGEMVGCDNQDCPIEWFHYGCVGLTEAPKGKWYCPQCTAAMKRRGSRHK

SEQ ID NO: 904017 - protein, 83 aa, Homo sapiens
  misc_feature (16)..(16): Xaa can be any naturally occurring amino acid
FRLHLTDYYIDIQPTXSSDNKRAEFWDVITRLPYRMVPLWLRWIDRGTKRQMVLSTVHCCNEEKRQQTQIKVVLLFDEEINFS

SEQ ID NO: 904018 - protein, 464 aa, Homo sapiens
KPLNTWKRYRLSGGPAPCAGYERRAQRVVSESGDNFVYYISKYSEDEFRNRHTRGLIEQLPMDLRDRFTEMREMDLQVQNAMDQLEQRVSEFFMNAKKNKPEWREEQMASIKKDYYKALEDADEKVQLANQIYDLVDRHLRKLDQELAKFKMELEADNAGITEILERRSLELDTPSQPVNNHHAHSHTPVEKRKYNPTSHHTTTDHIPEKKFKSEALLSTLTSDASKENTLGCRNNNSTASSNNAYNVNSSQPLGSYNIGSLSSGTGAGAITMAAAQAVQATAQMKEGRRTSSLKASYEAFKNNDFQLGKEFSMARETVGYSSSSALMTTLTQNASSSAADSRSGRKSKNNNKSSSQQSSSSSSSSSLSSCSSSSTVVQEISQQTTVVPESDSNSQVDWTYDPNEPRYCICNQVSYGEMVGCDNQDCPIEWFHYGCVGLTEAPKGKWYCPQCTAAMKRRGSRHK

SEQ ID NO: 904019 - protein, 192 aa, Homo sapiens; identical to SEQ ID NO: 904012

SEQ ID NO: 904020 - protein, 92 aa, Homo sapiens
MLYLEDYLEMIEQLPMDLRDRFTEMREMDLQVQNAMDQLEQRVSEFFMNAKKNKPEWREEQMASIKKDYYKALEDADEKVQLANQIYDLQHF

SEQ ID NO: 904021 - protein, 198 aa, Homo sapiens
MAPARLFALLLFFVGGVAESIRETEVIDPQDLLEGRYFSGALPDDEDVVGPGQESDDFELSGSGDLDDLEDSMIGPEVVHPLVPLDNHIPERAGSGSQVPTEPKKLEENEVIPKRISPVEESEDVSNKVSMSSTVQGSNIFERTEVLAALIVGGIVGILFAVFLILLLMYRMKKKDEGSYDLGKKPIYKKAPTNEFYA

SEQ ID NO: 904022 - protein, 198 aa, Homo sapiens; identical to SEQ ID NO: 904021

SEQ ID NO: 904023 - protein, 198 aa, Homo sapiens; identical to SEQ ID NO: 904021

SEQ ID NO: 904024 - protein, 198 aa, Homo sapiens; identical to SEQ ID NO: 904021

SEQ ID NO: 904025 - protein, 164 aa, Homo sapiens
MAPARLFALLLFFVGGVAESIRETEVIDPQDLLEGRYFSGALPDDEDVVGPGQESDDFELSGSGDLDDLEDSMIGPEVVHPLVPLDNHIPERAGSGSQVPTEPKKLEENEVIPKRISPVEESEDVSNKVSMSSTVQGSNIFERTEVLAGCPRTLKDYTVLMGWL

SEQ ID NO: 904026 - protein, 198 aa, Homo sapiens; identical to SEQ ID NO: 904021

SEQ ID NO: 904027 - protein, 111 aa, Homo sapiens
MAPARLFALLLFFVGGVAESIRETEVIDPQDLLEGRYFSGALPDDEDVVGPGQESDDFELSGSGDLDDLEDSMIGPEVVHPLVPLDNHIPERAGSGSQVPTEPKKLEPPAP

SEQ ID NO: 904028 - protein, 198 aa, Homo sapiens; identical to SEQ ID NO: 904021

SEQ ID NO: 904029 - protein, 198 aa, Homo sapiens; identical to SEQ ID NO: 904021

SEQ ID NO: 904030 - protein, 470 aa, Homo sapiens
MLASGLLLVALLACLTVMVLMSVWQQRKSRGKLPPGPTPLPFIGNYLQLNTEHICDSIMKVSQGVAFSNGERAKQLLRFAIATLRDFGVGKRGIEERIQEESGFLIEAIRSTHGANIDPTFFLSRTVSNVISSIVFGDRFDYEDKEFLSLLSMMLGIFQFTSTSTGQLYEMFSSVMKHLPGPQQQAFKLLQGLEDFIAKKVEHNQRTLDPNSPQDFIDSFLIRMQEEEKNPNTEFYLKNLMMSTLNLFIAGTETVSTTLRYGFLLLMKHPEVEAKVHEEIDRVIGKNRQPKFEDRTKMPYMEAVIHEIQRFGDVIPMSLARRVKKDTKFWDFFLPKGTEVFPMLGSVLRDPSFFSNPQDFNPQHFLDDKGQFKKSDAFVPFSIGKRNCFGEGLARMELFLFFTTVMQNFRLKSSQSPKDIDVSPKHVVFATIPRYTMTSCPAERGLCRCRSGGRGQGKAGSGRGSRKRRV

SEQ ID NO: 904031 - protein, 210 aa, Homo sapiens
EALVDQAEEFSGRGEQATFDWVFKGYGVVFSNGERAKQLRRFSIATLRDFGVGKRGIEERIQEEAGFLIDALRGTGGANIDPTFFLSRTVSNVISSIVFGDRFDYKDKEFLSLLRMMLGIFQFTSTSTGQLYEMFSSVMKHLPGPQQQAFQLLQGLEDFIAKKVEHNQRTLDPNSPRDFIDSFLIRMQEEEKNPNTEFYFDHPRLWLLLL

SEQ ID NO: 904032 - protein, 494 aa, Homo sapiens
MLASGMLLVALLVCLTVMVLMSVWQQRKSKGKLPPGPTPLPFIGNYLQLNTEQMYNSLMKISERYGPVFTIHLGPRRVVVLCGHDAVREALVDQAEEFSGRGEQATFDWVFKGYGVVFSNGERAKQLRRFSIATLRDFGVGKRGIEERIQEEAGFLIDALRGTGGANIDPTFFLSRTVSNVISSIVFGDRFDYKDKEFLSLLRMMLGIFQFTSTSTGQLYEMFSSVMKHLPGPQQQAFQLLQGLEDFIAKKVEHNQRTLDPNSPRDFIDSFLIRMQEEEKNPNTEFYLKNLVMTTLNLFIGGTETVSTTLRYGFLLLMKHPEVEAKVHEEIDRVIGKNRQPKFEDRAKMPYMEAVIHEIQRFGDVIPMSLARRVKKDTKFRDFFLPKGTEVFPMLGSVLRDPSFFSNPQDFNPQHFLNEKGQFKKSDAFVPFSIGKRNCFGEGLARMELFLFFTTVMQNFRLKSSQSPKDIDVSPKHVGFATIPRNYTMSFLPR

SEQ ID NO: 904033 - protein, 410 aa, Homo sapiens
MLASGMLLVALLVCLTVMVLMSVWQQRKSKGKLPPGPTPLPFIGNYLQLNTEQMYNSLMKISERYGPVFTIHLGPRRVVVLCGHDAVREALVDQAEEFSGRGEQATFDWVFKGYGVVFSNGERAKQLRRFSIATLRDFGVGKRGIEERIQEEAGFLIDALRGTGGANIDPTFFLSRTVSNVISSIVFGDRFDYKDKEFLSLLRMMLGIFQFTSTSTGQLYEMFSSVMKHLPGPQQQAFQLLQGLEDFIAKKVEHNQRTLDPNSPRDFIDSFLIRMQEEEKNPNTEFYLKNLVMTTLNLFIGGTETVSTTLRYGFLLLMKHPEVEAKVHEEIDRVIGKNRQPKFEDRAKMPYMEAVIHEIQRFGDVIPMSLARRVKKDTKFRDFFLPKIRPHPPDYGDFQPLSVSPASHPH

SEQ ID NO: 904034 - protein, 142 aa, Homo sapiens
MPATSPYLGTLVPPPAPVYFHQSPDPPHHTQLPPPGTEVFPMLGSVLRDPSFFSNPQDFNPQHFLNEKGQFKKSDAFVPFSIGKRNCFGEGLARMELFLFFTTVMQNFRLKSSQSPKDIDVSPKHVGFATIPRNYTMSFLPR

SEQ ID NO: 904035 - protein, 456 aa, Homo sapiens
MFSSVMKHLPGPQQQAFKLLQGLEDFIAKKVEHNQRTLDPNSPQDFIDSFLIRMQEEEKNPNTEFYLKNLMMSTLNLFIAGTETVSTTLRYGFLLLMKHPEVEAKVHEEIDRVIGKNRQPKFEDRTKMPYMEAVIHEIQRFGDVIPMSLARRVKKDTKFWDFFLPKVLSSPPPRLRGLPALLCVPRILPPLEAFYSLSHSLNQSKRTSPTTTSIPPFHLDTPESCISPDSLCRENQTQVPRTQISGPPNNLRSKTWTPCLPNFLFQRCEPSIPQSSSFTGPQLLHACHFPFIWGTPVPSPAPVYFHQSPDPPHHTQLPPPYQGTEVFPMLGSVLRDPSFFSNPQDFNPQHFLDDKGQFKKSDAFVPFSIGKRNCFGEGLARMELFLFFTTVMQNFRLKSSQSPKDIDVSPKHVVFATIPRYTMTSCPAERGLCRCRSGGRGQGKAGSGRGSRKRRV

SEQ ID NO: 904036 - protein, 142 aa, Homo sapiens
MPATSPYLGHTSSPSSPCVLSPIPDPPHHTQLPPPGTEVFPMLGSVLRDPSFFSNPQDFNPQHFLNEKGQFKKSDAFVPFSIGKRNCFGEGLARMELFLFFTTVMQNFRLKSSQSPKDIDVSPKHVGFATIPRNYTMSFLPR

SEQ ID NO: 904037 - protein, 126 aa, Homo sapiens
SLSLSLSLSLSLSLSLSLSGTEVFPMLGSVLRDPSFFSNPQDFNPQHFLNEKGQFKKSDAFVPFSIGKRNCFGEGLARMELFLFFTTVMQNFRLKSSQSPKDIDVSPKHVGFATIPRNYTMSFLPR

SEQ ID NO: 904038 - protein, 410 aa, Homo sapiens; identical to SEQ ID NO: 904033

SEQ ID NO: 904039 - protein, 238 aa, Homo sapiens
NSGISPVPRRLDDSFLIRMQEEEKNPNTEFYLKNLVMTTLNLFIGGTETVSTTLRYGFLLLMKHPEVEAKVHEEIDRVIGKNRQPKFEDRAKMPYMEAVIHEIQRFGDVIPMSLARRVKKDTKFRDFFLPKGTEVFPMLGSVLRDPSFFSNPQDFNPQHFLNEKGQFKKSDAFVPFSIGKRNCFGEGLARMELFLFFTTVMQNFRLKSSQSPKDIDVSPKHVGFATIPRNYTMSFLPR

SEQ ID NO: 904040 - protein, 626 aa, Homo sapiens
MLASGLLLVALLACLTVMVLMSVWQQRKSRGKLPPGPTPLPFIGNYLQLNTEHICDSIMKVSQGVAFSNGERAKQLLRFAIATLRDFGVGKRGIEERIQEESGFLIEAIRSTHGANIDPTFFLSRTVSNVISSIVFGDRFDYEDKEFLSLLSMMLGIFQFTSTSTGQLYEMFSSVMKHLPGPQQQAFKLLQGLEDFIAKKVEHNQRTLDPNSPQDFIDSFLIRMQEEEKNPNTEFYLKNLMMSTLNLFIAGTETVSTTLRYGFLLLMKHPEVEAKVHEEIDRVIGKNRQPKFEDRTKMPYMEAVIHEIQRFGDVIPMSLARRVKKDTKFWDFFLPKVLSSPPPRLRGLPALLCVPRILPPLEAFYSLSHSLNQSKRTSPTTTSIPPFHLDTPESCISPDSLCRENQTQVPRTQISGPPNNLRSKTWTPCLPNFLFQRCEPSIPQSSSFTGPQLLHACHFPFIWGTPVPSPAPVYFHQSPDPPHHTQLPPPYQGTEVFPMLGSVLRDPSFFSNPQDFNPQHFLDDKGQFKKSDAFVPFSIGKRNCFGEGLARMELFLFFTTVMQNFRLKSSQSPKDIDVSPKHVVFATIPRYTMTSCPAERGLCRCRSGGRGQGKAGSGRGSRKRRV

SEQ ID NO: 904041 - protein, 298 aa, Homo sapiens
MLASGMLLVALLVCLTVMVLMSVWQQRKSKGKLPPGPTPLPFIGNYLQLNTEQMYNSLMKISERYGPVFTIHLGPRRVVVLCGHDAVREALVDQAEEFSGRGEQATFDWVFKGYGVVFSNGERAKQLRRFSIATLRDFGVGKRGIEERIQEEAGFLIDALRGTGGANIDPTFFLSRTVSNVISSIVFGDRFDYKDKEFLSLLRMMLGIFQFTSTSTGQLYEMFSSVMKHLPGPQQQAFQLLQGLEDFIAKKVEHNQRTLDPNSPRDFIDSFLIRMQEEEKNPNTEFYFDHPRLWLLLL

SEQ ID NO: 904042 - protein, 302 aa, Homo sapiens
LSTEVGRTAELTVTAALTREFLEPKLFSTEDKQAAETMGSPSACPYRVCIPWQGLLLTASLLTFWNLPNSAQTNIDVVPFNVAEGKEVLLVVHNESQNLYGYNWYKGERVHANYRIIGYVKNISQENAPGPAHNGRETIYPNGTLLIQNVTHNDAGFYTLHVIKENLVNEEVTRQFYVFSEPPKPSITSNNFNPVENKDIVVLTCQPETQNTTYLWWVNNQSLLVSPRLLLSTDNRTLVLLSATKNDIGPYECEIQNPVGASRSDPVTLNVRYESVQASSPDLSAGTAVSIMIGVLAGMALI

SEQ ID NO: 904043 - protein, 209 aa, Homo sapiens
LSTEVGRTAELTVTAALTREFLEPKLFSTEDKQAAETMGSPSACPYRVCIPWQGLLLTASLLTFWNLPNSAQTNIDVVPFNVAEGKEVLLVVHNESQNLYGYNWYKGERVHANYRIIGYVKNISQENAPGPAHNGRETIYPNGTLLIQNVTHNDAGFYTLHVIKENLVNEEVTRQFYVFYESVQASSPDLSAGTAVSIMIGVLAGMALI

SEQ ID NO: 904044 - protein, 297 aa, Homo sapiens
SVCGARRGEEDVGRGICPGEVGSEFDFQKFLTSADPGDSQVFKVPVPTGVRAQASLLTFWNLPNSAQTNIDVVPFNVAEGKEVLLVVHNESQNLYGYNWYKGERVHANYRIIGYVKNISQENAPGPAHNGRETIYPNGTLLIQNVTHNDAGFYTLHVIKENLVNEEVTRQFYVFSEPPKPSITSNNFNPVENKDIVVLTCQPETQNTTYLWWVNNQSLLVSPRLLLSTDNRTLVLLSATKNDIGPYECEIQNPVGASRSDPVTLNVRYESVQASSPDLSAGTAVSIMIGVLAGMALI

SEQ ID NO: 904045 - protein, 302 aa, Homo sapiens; identical to SEQ ID NO: 904042

SEQ ID NO: 904046 - protein, 392 aa, Homo sapiens
GGGGGSGFGCAWRTGWERSPGREQAPPPQATMGNVLAASSPPAGPPPPPAPALVGLPPPPPSPPGFTLPPLGGSLGAGTSTSRSSERTPGAATASASGAAEDGACGCLPNPGTFEECHRKCKELFPIQMEGVKLTVNKGLSNHFQVNHTVALSTIGESNYHFGVTYVGTKQLSPTEAFPVLVGDMDNSGSLNAQVIHQLGPGLRSKMAIQTQQSKFVNWQVDGEYRGSDFTAAVTLGNPDVLVGSGILVAHYLQSITPCLALGGELVYHRRPGEEGTVMSLAGKYTLNNWLATVTLGQAGMHATYYHKASDQLQVGVEFEASTRMQDTSVSFGYQLDLPKANLLFKGSVDSNWIVGATLEKKLPPLPLTLALGAFLNHRKNKFQCGFGLTIG

SEQ ID NO: 904047 - protein, 361 aa, Homo sapiens
MGNVLAASSPPAGPPPPPAPALVGLPPPPPSPPGFTLPPLGGSLGAGTSTSRSSERTPGAATASASGAAEDGACGCLPNPGTFEECHRKCKELFPIQMEGVKLTVNKGLSNHFQVNHTVALSTIGESNYHFGVTYVGTKQLSPTEAFPVLVGDMDNSGSLNAQVIHQLGPGLRSKMAIQTQQSKFVNWQVDGEYRGSDFTAAVTLGNPDVLVGSGILVAHYLQSITPCLALGGELVYHRRPGEEGTVMSLAGKYTLNNWLATVTLGQAGMHATYYHKASDQLQVGVEFEASTRMQDTSVSFGYQLDLPKANLLFKGSVDSNWIVGATLEKKLPPLPLTLALGAFLNHRKNKFQCGFGLTIG

SEQ ID NO: 904048 - protein, 392 aa, Homo sapiens; identical to SEQ ID NO: 904046

SEQ ID NO: 904049 - protein, 361 aa, Homo sapiens; identical to SEQ ID NO: 904047

SEQ ID NO: 904050 - protein, 350 aa, Homo sapiens
GGGGGSGFGCAWRTGWERSPGREQAPPPQATMGNVLAASSPPAGPPPPPAPALVGLPPPPPSPPGFTLPPLGGSLGAGTSTSRSSERTPGAATASASGAAEDGACGCLPNPGTFEECHRKCKELFPIQMEGVKLTVNKGLSNHFQVNHTVALSTIGESNYHFGVTYVGTKQLSPTEAFPVLVGDMDNSGSLNAQVIHQLGPGLRSKMAIQTQQSKFVNWQVDGEYRGSDFTAAVTLGNPDVLVGSGILVAHYLQSITPCLALGGELVYHRRPGEEGTVMSLAGKYTLNNWLATVTLGQAGMHATYYHKASDQLQVGVEFEASTRMQDTSVSFGYQLDLPKANLLFKGSVG

SEQ ID NO: 904051 - protein, 114 aa, Homo sapiens
MSLAGKYTLNNWLATVTLGQAGMHATYYHKASDQLQVGVEFEASTRMQDTSVSFGYQLDLPKANLLFKGSVDSNWIVGATLEKKLPPLPLTLALGAFLNHRKNKFQCGFGLTIG

SEQ ID NO: 904052 - protein, 290 aa, Homo sapiens
GGGGGSGFGCAWRTGWERSPGREQAPPPQATMGNVLAASSPPAGPPPPPAPALVGLPPPPPSPPGFTLPPLGGSLGAGTSTSRSSERTPGAATASASGAAEDGACGCLPNPGTFEECHRKCKELFPIQMEGVKLTVNKGLSNHFQVNHTVALSTIGESNYHFGVTYVGTKQLSPTEAFPVLVGDMDNSGSLNAQVIHQLGPGLRSKMAIQTQQSKFVNWQVDGEYRGSDFTAASTRGRGGQTTSGRSVLASPSSKGPGPAPRGQREELPHPRSVHPAPSTFPSPRYKSCL

SEQ ID NO: 904053 - protein, 123 aa, Homo sapiens
GLVRSEMYGILVAHYLQSITPCLALGGELVYHRRPGEEGTVMSLAGKYTLNNWLATVTLGQAGMHATYYHKASDQLQVGVEFEASTRMQDTSVSFGYQLDLPKANLLFKGKGLGSPTRETGRR

SEQ ID NO: 904054 - protein, 384 aa, Homo sapiens
GLCGVDAVSPVPGEHVLPAAQATMGNVLAASSPPAGPPPPPAPALVGLPPPPPSPPGFTLPPLGGSLGAGTSTSRSSERTPGAATASASGAAEDGACGCLPNPGTFEECHRKCKELFPIQMEGVKLTVNKGLSNHFQVNHTVALSTIGESNYHFGVTYVGTKQLSPTEAFPVLVGDMDNSGSLNAQVIHQLGPGLRSKMAIQTQQSKFVNWQVDGEYRGSDFTAAVTLGNPDVLVGSGILVAHYLQSITPCLALGGELVYHRRPGEEGTVMSLAGKYTLNNWLATVTLGQAGMHATYYHKASDQLQVGVEFEASTRMQDTSVSFGYQLDLPKANLLFKGSVDSNWIVGATLEKKLPPLPLTLALGAFLNHRKNKFQCGFGLTIG

SEQ ID NO: 904055 - protein, 315 aa, Homo sapiens
APPAQCDHGGTVLAATASASGAAEDGACGCLPNPGTFEECHRKCKELFPIQMEGVKLTVNKGLSNHFQVNHTVALSTIGESNYHFGVTYVGTKQLSPTEAFPVLVGDMDNSGSLNAQVIHQLGPGLRSKMAIQTQQSKFVNWQVDGEYRGSDFTAAVTLGNPDVLVGSGILVAHYLQSITPCLALGGELVYHRRPGEEGTVMSLAGKYTLNNWLATVTLGQAGMHATYYHKASDQLQVGVEFEASTRMQDTSVSFGYQLDLPKANLLFKGSVDSNWIVGATLEKKLPPLPLTLALGAFLNHRKNKFQCGFGLTIG

SEQ ID NO: 904056 - protein, 260 aa, Homo sapiens
GGGGGSGFGCAWRTGWERSPGREQAPPPQATMGNVLAASSPPAGPPPPPAPALVGLPPPPPSPPGFTLPPLGGSLGAGTSTSRSSERTPGAATASASGAAEDGACGCLPNPGTFEECHRKCKELFPIQMEGVKLTVNKGLSNHFQVNHTVALSTIGESNYHFGVTYVGTKQLSPTEAFPVLVGDMDNSGSLNAQVIHQLGPGLRSKMAIQTQQSKFVNWQVDGEYRGSDFTAAVTLGNPDVLVGSGKRRRAWRVVTKLQF

SEQ ID NO: 904057 - protein, 171 aa, Homo sapiens
GGGGGSGFGCAWRTGWERSPGREQAPPPQATMGNVLAASSPPAGPPPPPAPALVGLPPPPPSPPGFTLPPLGGSLGAGTSTSRSSERTPGAATASASGAAEDGACGCLPNPGTFEECHRKCKELFPIQMEGVKLTVNKGLSNHFQVNHTVALSTIGESNYHFPSPRYKSCL

SEQ ID NO: 904058 - protein, 546 aa, Homo sapiens
TSRIRRLCGSSRGPWRTLTYDLCLRDTLELTGTLPAEYPLKPGEKAPKVRRRIGAAYKLDDWALHREDPLSSLERQLALQLQITEAARRLCLEENLSRQARRQRKHSMLQEEKKLQELQRCLVERRRNSEPPPAAALPLGRELSASDDSSLSDGLLLEEEESQVPKPPPESPAPPSRPLPPQTLEGLQPTGPEAGSPERAPVQNSPWKETSLDHPYEKPRKSSEPWSESSSPATTPQDGPSASSLWLLEPASYHVVPIRGVPGQWQGRTSAPATPEIQGRRGQSQSLRVDSFRAGPEGRGRSAFPRRRPTHYTVTVPDSCFPATKPPLPHAACHSCSEDSGSDVSSISHPTSPGSSSPDISFLQPLSPPKTHRHRGAWVPAGSRELVAHHPKLLLPPGYFPAGRYVVVAESPLPPGEWELCRAAPGPAYEEEGTPLRYQRLVPSRSRIVRTPSLKDSPAGRGLSKAAVSEELKWWHERARLRSTRPHSLDRQGAFRVRSLPLGREGFGRALGPRAQVPTVCVLRRSPDGAPVQVFVPEKGEIISQV

SEQ ID NO: 904059 - protein, 668 aa, Homo sapiens
MLQMPKLNEIPPGRAGRREARGEGRWPGQTGPEAARLEWRAQGQAGGARAPWDSWGSSRLPTQPGPGWSRCPPSLLCALSFQKSTMESKDEVSDTDSGIILQSGPDSPVSPMKELTHAVHKQQRALEARLEACLEELRRLCLREAELTGTLPAEYPLKPGEKAPKVRRRIGAAYKLDDWALHREDPLSSLERQLALQLQITEAARRLCLEENLSRQARRQRKHSMLQEEKKLQELQRCLVERRRNSEPPPAAALPLGRELSASDDSSLSDGLLLEEEESQVPKPPPESPAPPSRPLPPQTLEGLQPTGPEAGSPERAPVQNSPWKETSLDHPYEKPRKSSEPWSESSSPATTPQDGPSASSLWLLEPASYHVVPIRGVPGQWQGRTSAPATPEIQGRRGQSQSLRVDSFRAGPEGRGRSAFPRRRPTHYTVTVPDSCFPATKPPLPHAACHSCSEDSGSDVSSISHPTSPGSSSPDISFLQPLSPPKTHRHRGAWVPAGSRELVAHHPKLLLPPGYFPAGRYVVVAESPLPPGEWELCRAAPGPAYEEEGTPLRYQRLVPSRSRIVRTPSLKDSPAGRGLSKAAVSEELKWWHERARLRSTRPHSLDRQGAFRVRSLPLGREGFGRALGPRAQVPTVCVLRRSPDGAPVQVFVPEKGEIISQSLAYWT

SEQ ID NO: 904060 - protein, 663 aa, Homo sapiens [sequence omitted]

SEQ ID NO: 904061 - protein, 663 aa, Homo sapiens [sequence omitted]

SEQ ID NO: 904062 - protein, 663 aa, Homo sapiens [sequence omitted]

SEQ ID NO: 904063 - protein, 292 aa, Homo sapiens
IESLIPKGLSEFTKQQIRYILQMRGMSDKSLRLVLSTFSNIREELGHLQNDMTSLENDKMRLEKDLSFKDTQLKEYEELLASVRANNHQQQQGLQDSSSKCQALEENNLSLRHTLSDMEYRLKELEYCKRNLEQENQNLRMQVSETCTGPMLQAKMDEIGNHYTEMVKNLRMEKDREICRLRSQLNQYHKDVSKREGSCSDFQFKLHELTSLLEEKDSLIKRQSEELSKLRQEIYSSHNQPSTGGRTTITTKKYRTQYPILGLLYDDYEYIPPGSETQTIVIEKTEDKYTCP

SEQ ID NO: 904064 - protein, 262 aa, Homo sapiens
RLPEDPRQSSYREELGHLQNDMTSLENDKMRLEKDLSFKDTQLKEYEELLASVRANNHQQQQGLQDSSSKCQALEENNLSLRHTLSDMEYRLKELEYCKRNLEQENQNLRMQVSETCTGPMLQAKMDEIGNHYTEMVKNLRMEKDREICRLRSQLNQYHKDVSKREGSCSDFQFKLHELTSLLEEKDSLIKRQSEELSKLRQEIYSSHNQPSTGGRTTITTKKYRTQYPILGLLYDDYEYIPPGSETQTIVIEKTEDKYTCP

SEQ ID NO: 904065 - protein, 292 aa, Homo sapiens; identical to SEQ ID NO: 904063

SEQ ID NO: 904066 - protein, 470 aa, Homo sapiens
MSSSYWSETSSSSCGTQQLPEVLQCQPQHYHCYHQSSQAQQPPEKNVVYERVRTYSGPMNKVVQALDPFNSREVLSPLKTTSSYQNLVWSDHSQELHSPTLKISTCAPSTLHITQNTEQELHSPTVKLTTYPQTTIRKYVVQNPEQEPLSQFLRGSHFFPGNNVIYEKTIRKVEKLNTDQGCHPQAQCHHHIIQQPQVIHSAHWQQPDSSQQIQAITGNNPISTHIGNELCHSGSSQICEQVIIQDDGPEKLDPRYFGELLADLSRKNTDLYHCLLEHLQKLEENNLSLRHTLSDMEYRLKELEYCKRNLEQENQNLRMQVSETCTGPMLQAKMDEIGNHYTEMVKNLRMEKDREICRLRSQLNQYHKDVSKREGSCSDFQFKLHELTSLLEEKDSLIKRQSEELSKLRQEIYSSHNQPSTGGRTTITTKKYRTQYPILGLLYDDYEYIPPGSETQTIVIEKTEDKYTCP

SEQ ID NO: 904067 - protein, 1596 aa, Homo sapiens
QAALRPRPRLPAPPPPPPPPPPPPPPALAPAAGPDHPPPGARRRPRQQPGPITRRPVPAAARATGMALRGFCSADGSDPLWDWNVTWNTSNPDFTKCFQNTVLVWVPCFYLWACFPFYFLYLSRHDRGYIQMTPLNKTKTALGFLLWIVCWADLFYSFWERSRGIFLAPVFLVSPTLLGITTLLATFLIQLERRKGVQSSGIMLTFWLVALVCALAILRSKIMTALKEDAQVDLFRDITFYVYFSLLLIQLVLSCFSDRSPLFSETIHDPNPCPESSASFLSRITFWWITGLIVRGYRQPLEGSDLWSLNKEDTSEQVVPVLVKNWKKECAKTRKQPVKVVYSSKDPAQPKESSKVDANEEVEALIVKSPQKEWNPSLFKVLYKTFGPYFLMSFFFKAIHDLMMFSGPQILKLLIKFVNDTKAPDWQGYFYTVLLFVTACLQTLVLHQYFHICFVSGMRIKTAVIGAVYRKALVITNSARKSSTVGEIVNLMSVDAQRFMDLATYINMIWSAPLQVILALYLLWLNLGPSVLAGVAVMVLMVPVNAVMAMKTKTYQVAHMKSKDNRIKLMNEILNGIKVLKLYAWELAFKDKVLAIRQEELKVLKKSAYLSAVGTFTWVCTPFLVALCTFAVYVTIDENNILDAQTAFVSLALFNILRFPLNILPMVISSIVQASVSLKRLRIFLSHEELEPDSIERRPVKDGGGTNSITVRNATFTWARSDPPTLNGITFSIPEGALVAVVGQVGCGKSSLLSALLAEMDKVEGHVAIKGSVAYVPQQAWIQNDSLRENILFGCQLEEPYYRSVIQACALLPDLEILPSGDRTEIGEKGVNLSGGQKQRVSLARAVYSNADIYLFDDPLSAVDAHVGKHIFENVIGPKGMLKNKTRILVTHSMSYLPQVDVIIVMSGGKISEMGSYQELLARDGAFAEFLRTYASTEQEQDAEENGVTGVSGPGKEAKQMENGMLVTDSAGKQLQRQLSSSSSYSGDISRHHNSTAELQKAEAKKEETWKLMEADKAQTGQVKLSVYWDYMKAIGLFISFLSIFLFMCNHVSALASNYWLSLWTDDPIVNGTQEHTKVRLSVYGALGISQGIAVFGYSMAVSIGGILASRCLHVDLLHSILRSPMSFFERTPSGNLVNRFSKELDTVDSMIPEVIKMFMGSLFNVIGACIVILLATPIAAIIIPPLGLIYFFVQRFYVASSRQLKRLESVSRSPVYSHFNETLLGVSVIRAFEEQERFIHQSDLKVDENQKAYYPSIVANRWLAVRLECVGNCIVLFAALFAVISRHSLSAGLVGLSVSYSLQVTTYLNWLVRMSSEMETNIVAVERLKEYSETEKEAPWQIQETAPPSSWPQVGRVEFRNYCLRYREDLDFVLRHINVTINGGEKVGIVGRTGAGKSSLTLGLFRINESAEGEIIIDGINIAKIGLHDLRFKITIIPQDPVLFSGSLRMNLDPFSQYSDEEVWTSLELAHLKDFVSALPDKLDHECAEGGENLSVGQRQLVCLARALLRKTKILVLDEATAAVDLETDDLIQSTIRTQFEDCTVLTIAHRLNTIMDYTRVIVLDKGEIQEYGAPSDLLQQRGLFYSMAKDAGLV

SEQ ID NO: 904068 - protein, 1489 aa, Homo sapiens
MALRGFCSADGSDPLWDWNVTWNTSNPDFTKCFQNTVLVWVPCFYLWACFPFYFLYLSRHDRGYIQMTPLNKTKTALGFLLWIVCWADLFYSFWERSRGIFLAPVFLVSPTLLGITTLLATFLIQLERRKGVQSSGIMLTFWLVALVCALAILRSKIMTALKENPCPESSASFLSRITFWWITGLIVRGYRQPLEGSDLWSLNKEDTSEQVVPVLVKNWKKECAKTRKQPVKVVYSSKDPAQPKESSKVDANEEVEALIVKSPQKEWNPSLFKVLYKTFGPYFLMSFFFKAIHDLMMFSGPQILKLLIKFVNDTKAPDWQGYFYTVLLFVTACLQTLVLHQYFHICFVSGMRIKTAVIGAVYRKALVITNSARKSSTVGEIVNLMSVDAQRFMDLATYINMIWSAPLQVILALYLLWLNLGPSVLAGVAVMVLMVPVNAVMAMKTKTYQVAHMKSKDNRIKLMNEILNGIKVLKLYAWELAFKDKVLAIRQEELKVLKKSAYLSAVGTFTWVCTPFLVALCTFAVYVTIDENNILDAQTAFVSLALFNILRFPLNILPMVISSIVQASVSLKRLRIFLSHEELEPDSIERRPVKDGGGTNSITVRNATFTWARSDPPTLNGITFSIPEGALVAVVGQVGCGKSSLLSALLAEMDKVEGHVAIKGSVAYVPQQAWIQNDSLRENILFGCQLEEPYYRSVIQACALLPDLEILPSGDRTEIGEKGVNLSGGQKQRVSLARAVYSNADIYLFDDPLSAVDAHVGKHIFENVIGPKGMLKNKTRILVTHSMSYLPQVDVIIVMSGGKISEMGSYQELLARDGAFAEFLRTYASTEQEQDAEENGVTGVSGPGKEAKQMENGMLVTDSAGKQLQRQLSSSSSYSGDISRHHNSTAELQKAEAKKEETWKLMEADKAQTGQVKLSVYWDYMKAIGLFISFLSIFLFMCNHVSALASNYWLSLWTDDPIVNGTQEHTKVRLSVYGALGISQGIAVFGYSMAVSIGGILASRCLHVDLLHSILRSPMSFFERTPSGNLVNRFSKELDTVDSMIPEVIKMFMGSLFNVIGACIVILLATPIAAIIIPPLGLIYFFVQRFYVASSRQLKRLESVSRSPVYSHFNETLLGVSVIRAFEEQERFIHQSDLKVDENQKAYYPSIVANRWLAVRLECVGNCIVLFAALFAVISRHSLSAGLVGLSVSYSLQVTTYLNWLVRMSSEMETNIVAVERLKEYSETEKEAPWQIQETAPPSSWPQVGRVEFRNYCLRYREDLDFVLRHINVTINGGEKVGIVGRTGAGKSSLTLGLFRINESAEGEIIIDGINIAKIGLHDLRFKITIIPQDPVLFSGSLRMNLDPFSQYSDEEVWTSLELAHLKDFVSALPDKLDHECAEGGENLSVGQRQLVCLARALLRKTKILVLDEATAAVDLETDDLIQSTIRTQFEDCTVLTIAHRLNTIMDYTRVIVLDKGEIQEYGAPSDLLQQRGLFYSMAKDAGLV

SEQ ID NO: 904069 - protein, 1537 aa, Homo sapiens
QAALRPRPRLPAPPPPPPPPPPPPPPALAPAAGPDHPPPGARRRPRQQPGPITRRPVPAAARATGMALRGFCSADGSDPLWDWNVTWNTSNPDFTKCFQNTVLVWVPCFYLWACFPFYFLYLSRHDRGYIQMTPLNKTKTALGFLLWIVCWADLFYSFWERSRGIFLAPVFLVSPTLLGITTLLATFLIQLERRKGVQSSGIMLTFWLVALVCALAILRSKIMTALKEDAQVDLFRDITFYVYFSLLLIQLVLSCFSDRSPLFSETIHDPNPCPESSASFLSRITFWWITGLIVRGYRQPLEGSDLWSLNKEDTSEQVVPVLVKNWKKECAKTRKQPVKVVYSSKDPAQPKESSKVDANEEVEALIVKSPQKEWNPSLFKVLYKTFGPYFLMSFFFKAIHDLMMFSGPQILKLLIKFVNDTKAPDWQGYFYTVLLFVTACLQTLVLHQYFHICFVSGMRIKTAVIGAVYRKALVITNSARKSSTVGEIVNLMSVDAQRFMDLATYINMIWSAPLQVILALYLLWLNLGPSVLAGVAVMVLMVPVNAVMAMKTKTYQVAHMKSKDNRIKLMNEILNGIKVLKLYAWELAFKDKVLAIRQEELKVLKKSAYLSAVGTFTWVCTPFLVALCTFAVYVTIDENNILDAQTAFVSLALFNILRFPLNILPMVISSIVQASVSLKRLRIFLSHEELEPDSIERRPVKDGGGTNSITVRNATFTWARSDPPTLNGITFSIPEGALVAVVGQVGCGKSSLLSALLAEMDKVEGHVAIKGVNLSGGQKQRVSLARAVYSNADIYLFDDPLSAVDAHVGKHIFENVIGPKGMLKNKTRILVTHSMSYLPQVDVIIVMSGGKISEMGSYQELLARDGAFAEFLRTYASTEQEQDAEENGVTGVSGPGKEAKQMENGMLVTDSAGKQLQRQLSSSSSYSGDISRHHNSTAELQKAEAKKEETWKLMEADKAQTGQVKLSVYWDYMKAIGLFISFLSIFLFMCNHVSALASNYWLSLWTDDPIVNGTQEHTKVRLSVYGALGISQGIAVFGYSMAVSIGGILASRCLHVDLLHSILRSPMSFFERTPSGNLVNRFSKELDTVDSMIPEVIKMFMGSLFNVIGACIVILLATPIAAIIIPPLGLIYFFVQRFYVASSRQLKRLESVSRSPVYSHFNETLLGVSVIRAFEEQERFIHQSDLKVDENQKAYYPSIVANRWLAVRLECVGNCIVLFAALFAVISRHSLSAGLVGLSVSYSLQVTTYLNWLVRMSSEMETNIVAVERLKEYSETEKEAPWQIQETAPPSSWPQVGRVEFRNYCLRYREDLDFVLRHINVTINGGEKVGIVGRTGAGKSSLTLGLFRINESAEGEIIIDGINIAKIGLHDLRFKITIIPQDPVLFSGSLRMNLDPFSQYSDEEVWTSLELAHLKDFVSALPDKLDHECAEGGENLSVGQRQLVCLARALLRKTKILVLDEATAAVDLETDDLIQSTIRTQFEDCTVLTIAHRLNTIMDYTRVIVLDKGEIQEYGAPSDLLQQRGLFYSMAKDAGLV

SEQ ID NO: 904070 - protein, 1481 aa, Homo sapiens
QAALRPRPRLPAPPPPPPPPPPPPPPALAPAAGPDHPPPGARRRPRQQPGPITRRPVPAAARATGMALRGFCSADGSDPLWDWNVTWNTSNPDFTKCFQNTVLVWVPCFYLWACFPFYFLYLSRHDRGYIQMTPLNKTKTALGFLLWIVCWADLFYSFWERSRGIFLAPVFLVSPTLLGITTLLATFLIQLERRKGVQSSGIMLTFWLVALVCALAILRSKIMTALKEDAQVDLFRDITFYVYFSLLLIQLVLSCFSDRSPLFSETIHDPNPCPESSASFLSRITFWWITGLIVRGYRQPLEGSDLWSLNKEDTSEQVVPVLVKNWKKECAKTRKQPVKVVYSSKDPAQPKESSKVDANEEVEALIVKSPQKEWNPSLFKVLYKTFGPYFLMSFFFKAIHDLMMFSGPQILKLLIKFVNDTKAPDWQGYFYTVLLFVTACLQTLVLHQYFHICFVSGMRIKTAVIGAVYRKALVITNSARKSSTVGEIVNLMSVDAQRFMDLATYINMIWSAPLQVILALYLLWLNLGPSVLAGVAVMVLMVPVNAVMAMKTKTYQVAHMKSKDNRIKLMNEILNGIKVLKLYAWELAFKDKVLAIRQEELKVLKKSAYLSAVGTFTWVCTPFLVALCTFAVYVTIDENNILDAQTAFVSLALFNILRFPLNILPMVISSIVQASVSLKRLRIFLSHEELEPDSIERRPVKDGGGTNSITVRNATFTWARSDPPTLNGITFSIPEGALVAVVGQVGCGKSSLLSALLAEMDKVEGHVAIKTRILVTHSMSYLPQVDVIIVMSGGKISEMGSYQELLARDGAFAEFLRTYASTEQEQDAEENGVTGVSGPGKEAKQMENGMLVTDSAGKQLQRQLSSSSSYSGDISRHHNSTAELQKAEAKKEETWKLMEADKAQTGQVKLSVYWDYMKAIGLFISFLSIFLFMCNHVSALASNYWLSLWTDDPIVNGTQEHTKVRLSVYGALGISQGIAVFGYSMAVSIGGILASRCLHVDLLHSILRSPMSFFERTPSGNLVNRFSKELDTVDSMIPEVIKMFMGSLFNVIGACIVILLATPIAAIIIPPLGLIYFFVQRFYVASSRQLKRLESVSRSPVYSHFNETLLGVSVIRAFEEQERFIHQSDLKVDENQKAYYPSIVANRWLAVRLECVGNCIVLFAALFAVISRHSLSAGLVGLSVSYSLQVTTYLNWLVRMSSEMETNIVAVERLKEYSETEKEAPWQIQETAPPSSWPQVGRVEFRNYCLRYREDLDFVLRHINVTINGGEKVGIVGRTGAGKSSLTLGLFRINESAEGEIIIDGINIAKIGLHDLRFKITIIPQDPVLFSGSLRMNLDPFSQYSDEEVWTSLELAHLKDFVSALPDKLDHECAEGGENLSVGQRQLVCLARALLRKTKILVLDEATAAVDLETDDLIQSTIRTQFEDCTVLTIAHRLNTIMDYTRVIVLDKGEIQEYGAPSDLLQQRGLFYSMAKDAGLV

SEQ ID NO: 904071 - protein, 1596 aa, Homo sapiens; identical to SEQ ID NO: 904067

SEQ ID NO: 904072 - protein, 1251 aa, Homo sapiens
FAAAMRFVVCIGLGGLGSLARPVATLLLIGKVQGVVQGASQEGVSFMGLGMAEGAGGGADEVASYSSLLIKFVNDTKAPDWQGYFYTVLLFVTACLQTLVLHQYFHICFVSGMRIKTAVIGAVYRKALVITNSARKSSTVGEIVNLMSVDAQRFMDLATYINMIWSAPLQVILALYLLWLNLGPSVLAGVAVMVLMVPVNAVMAMKTKTYQVAHMKSKDNRIKLMNEILNGIKVLKLYAWELAFKDKVLAIRQEELKVLKKSAYLSAVGTFTWVCTPFLVALCTFAVYVTIDENNILDAQTAFVSLALFNILRFPLNILPMVISSIVQASVSLKRLRIFLSHEELEPDSIERRPVKDGGGTNSITVRNATFTWARSDPPTLNGITFSIPEGALVAVVGQVGCGKSSLLSALLAEMDKVEGHVAIKGSVAYVPQQAWIQNDSLRENILFGCQLEEPYYRSVIQACALLPDLEILPSGDRTEIGEKGVNLSGGQKQRVSLARAVYSNADIYLFDDPLSAVDAHVGKHIFENVIGPKGMLKNKTRILVTHSMSYLPQVDVIIVMSGGKISEMGSYQELLARDGAFAEFLRTYASTEQEQDAEENGVTGVSGPGKEAKQMENGMLVTDSAGKQLQRQLSSSSSYSGDISRHHNSTAELQKAEAKKEETWKLMEADKAQTGQVKLSVYWDYMKAIGLFISFLSIFLFMCNHVSALASNYWLSLWTDDPIVNGTQEHTKVRLSVYGALGISQGIAVFGYSMAVSIGGILASRCLHVDLLHSILRSPMSFFERTPSGNLVNRFSKELDTVDSMIPEVIKMFMGSLFNVIGACIVILLATPIAAIIIPPLGLIYFFVQRFYVASSRQLKRLESVSRSPVYSHFNETLLGVSVIRAFEEQERFIHQSDLKVDENQKAYYPSIVANRWLAVRLECVGNCIVLFAALFAVISRHSLSAGLVGLSVSYSLQVTTYLNWLVRMSSEMETNIVAVERLKEYSETEKEAPWQIQETAPPSSWPQVGRVEFRNYCLRYREDLDFVLRHINVTINGGEKVGIVGRTGAGKSSLTLGLFRINESAEGEIIIDGINIAKIGLHDLRFKITIIPQDPVLFSGSLRMNLDPFSQYSDEEVWTSLELAHLKDFVSALPDKLDHECAEGGENLSVGQRQLVCLARALLRKTKILVLDEATAAVDLETDDLIQSTIRTQFEDCTVLTIAHRLNTIMDYTRVIVLDKGEIQEYGAPSDLLQQRGLFYSMAKDAGLV

SEQ ID NO: 904073 - protein, 636 aa, Homo sapiens
MENGMLVTDSAGKQLQRQLSSSSSYSGDISRHHNSTAELQKAEAKKEETWKLMEADKAQTGQVKLSVYWDYMKAIGLFISFLSIFLFMCNHVSALASNYWLSLWTDDPIVNGTQEHTKVRLSVYGALGISQGIAVFGYSMAVSIGGILASRCLHVDLLHSILRSPMSFFERTPSGNLVNRFSKELDTVDSMIPEVIKMFMGSLFNVIGACIVILLATPIAAIIIPPLGLIYFFVQRFYVASSRQLKRLESVSRSPVYSHFNETLLGVSVIRAFEEQERFIHQSDLKVDENQKAYYPSIVANRWLAVRLECVGNCIVLFAALFAVISRHSLSAGLVGLSVSYSLQVTTYLNWLVRMSSEMETNIVAVERLKEYSETEKEAPWQIQETAPPSSWPQVGRVEFRNYCLRYREDLDFVLRHINVTINGGEKVGIVGRTGAGKSSLTLGLFRINESAEGEIIIDGINIAKIGLHDLRFKITIIPQDPVLFSGSLRMNLDPFSQYSDEEVWTSLELAHLKDFVSALPDKLDHECAEGGENLSVGQRQLVCLARALLRKTKILVLDEATAAVDLETDDLIQSTIRTQFEDCTVLTIAHRLNTIMDYTRVIVLDKGEIQEYGAPSDLLQQRGLFYSMAKDAGLV

SEQ ID NO: 904074 - protein, 690 aa, Homo sapiens
DTAFLWVPINLESDMVGVWCIYSYICLHVCMWKHSVSYAMVQTHNSSPSREPSDPAQGICTVDTLVLCFSRQLSSSSSYSGDISRHHNSTAELQKAEAKKEETWKLMEADKAQTGQVKLSVYWDYMKAIGLFISFLSIFLFMCNHVSALASNYWLSLWTDDPIVNGTQEHTKVRLSVYGALGISQGIAVFGYSMAVSIGGILASRCLHVDLLHSILRSPMSFFERTPSGNLVNRFSKELDTVDSMIPEVIKMFMGSLFNVIGACIVILLATPIAAIIIPPLGLIYFFVQRFYVASSRQLKRLESVSRSPVYSHFNETLLGVSVIRAFEEQERFIHQSDLKVDENQKAYYPSIVANRWLAVRLECVGNCIVLFAALFAVISRHSLSAGLVGLSVSYSLQVTTYLNWLVRMSSEMETNIVAVERLKEYSETEKEAPWQIQETAPPSSWPQVGRVEFRNYCLRYREDLDFVLRHINVTINGGEKVGIVGRTGAGKSSLTLGLFRINESAEGEIIIDGINIAKIGLHDLRFKITIIPQDPVLFSGSLRMNLDPFSQYSDEEVWTSLELAHLKDFVSALPDKLDHECAEGGENLSVGQRQLVCLARALLRKTKILVLDEATAAVDLETDDLIQSTIRTQFEDCTVLTIAHRLNTIMDYTRVIVLDKGEIQEYGAPSDLLQQRGLFYSMAKDAGLV

SEQ ID NO: 904075 - protein, 1531 aa, Homo sapiens
QAALRPRPRLPAPPPPPPPPPPPPPPALAPAAGPDHPPPGARRRPRQQPGPITRRPVPAAARATGMALRGFCSADGSDPLWDWNVTWNTSNPDFTKCFQNTVLVWVPCFYLWACFPFYFLYLSRHDRGYIQMTPLNKTKTALGFLLWIVCWADLFYSFWERSRGIFLAPVFLVSPTLLGITTLLATFLIQLERRKGVQSSGIMLTFWLVALVCALAILRSKIMTALKEDAQVDLFRDITFYVYFSLLLIQLVLSCFSDRSPLFSETIHDPNPCPESSASFLSRITFWWITGLIVRGYRQPLEGSDLWSLNKEDTSEQVVPVLVKNWKKECAKTRKQPVKVVYSSKDPAQPKESSKVDANEEVEALIVKSPQKEWNPSLFKVLYKTFGPYFLMSFFFKAIHDLMMFSGPQILKLLIKFVNDTKAPDWQGYFYTVLLFVTACLQTLVLHQYFHICFVSGMRIKTAVIGAVYRKALVITNSARKSSTVGEIVNLMSVDAQRFMDLATYINMIWSAPLQVILALYLLWLNLGPSVLAGVAVMVLMVPVNAVMAMKTKTYQVAHMKSKDNRIKLMNEILNGIKVLKLYAWELAFKDKVLAIRQEELKVLKKSAYLSAVGTFTWVCTPFLVALCTFAVYVTIDENNILDAQTAFVSLALFNILRFPLNILPMVISSIVQASVSLKRLRIFLSHEELEPDSIERRPVKDGGGTNSITVRNATFTWARSDPPTLNGITFSIPEGALVAVVGQVGCGKSSLLSALLAEMDKVEGHVAIKGSVAYVPQQAWIQNDSLRENILFGCQLEEPYYRSVIQACALLPDLEILPSGDRTEIGEKGVNLSGGQKQRVSLARAVYSNADIYLFDDPLSAVDAHVGKHIFENVIGPKGMLKNKTRILVTHSMSYLPQVDVIIVMSGGKISEMGSYQELLARDGAFAEFLRTYASTEQEQDAEENGVTGVSGPGKEAKQMENGMLVTDSAGKQLQRQLSSSSSYSGDISRHHNSTAELQKAEAKKEETWKLMEADKAQTGQVKLSVYWDYMKAIGLFISFLSIFLFMCNHVSALASNYWLSLWTDDPIVNGTQEHTKVRLSVYGALGISQGIAVFGYSMAVSIGGILASRCLHVDLLHSILRSPMSFFERTPSGNLVNRFSKELDTVDSMIPEVIKMFMGSLFNVIGACIVILLATPIAAIIIPPLGLIYFFVQRFYVASSRQLKRLESVSRSPVYSHFNETLLGVSVIRAFEEQERFIHQSDLKVDENQKAYYPSIVANRWLAVRLECVGNCIVLFAALFAVISRHSLSAGLVGLSVSYSLQVTTYLNWLVRMSSEMETNIVAVERLKEYSETEKEAPWQIQETAPPSSWPQVGRVEFRNYCLRYREDLDFVLRHINVTINGGEKVGIVGRTGAGKSSLTLGLFRINESAEGEIIIDGINIAKIGLHDLRFKITIIPQDPVLFSGSLRMNLDPFSQYSDEEVWTSLELAHLKDFVSALPDKLDHECAEGGENLRQRRCVLAEAAATRHPGGWARDGPERKHSPQRQAES

SEQ ID NO: 904076 - protein, 977 aa, Homo sapiens
QAALRPRPRLPAPPPPPPPPPPPPPPALAPAAGPDHPPPGARRRPRQQPGPITRRPVPAAARATGMALRGFCSADGSDPLWDWNVTWNTSNPDFTKCFQNTVLVWVPCFYLWACFPFYFLYLSRHDRGYIQMTPLNKTKTALGFLLWIVCWADLFYSFWERSRGIFLAPVFLVSPTLLGITTLLATFLIQLERRKGVQSSGIMLTFWLVALVCALAILRSKIMTALKEDAQVDLFRDITFYVYFSLLLIQLVLSCFSDRSPLFSETIHDPNPCPESSASFLSRITFWWITGLIVRGYRQPLEGSDLWSLNKEDTSEQVVPVLVKNWKKECAKTRKQPVKVVYSSKDPAQPKESSKVDANEEVEALIVKSPQKEWNPSLFKVLYKTFGPYFLMSFFFKAIHDLMMFSGPQILKLLIKFVNDTKAPDWQGYFYTVLLFVTACLQTLVLHQYFHICFVSGMRIKTAVIGAVYRKALVITNSARKSSTVGEIVNLMSVDAQRFMDLATYINMIWSAPLQVILALYLLWLNLGPSVLAGVAVMVLMVPVNAVMAMKTKTYQVAHMKSKDNRIKLMNEILNGIKVLKLYAWELAFKDKVLAIRQEELKVLKKSAYLSAVGTFTWVCTPFLVALCTFAVYVTIDENNILDAQTAFVSLALFNILRFPLNILPMVISSIVQASVSLKRLRIFLSHEELEPDSIERRPVKDGGGTNSITVRNATFTWARSDPPTLNGITFSIPEGALVAVVGQVGCGKSSLLSALLAEMDKVEGHVAIKGSVAYVPQQAWIQNDSLRENILFGCQLEEPYYRSVIQACALLPDLEILPSGDRTEIGEKGVNLSGGQKQRVSLARAVYSNADIYLFDDPLSAVDAHVGKHIFENVIGPKGMLKNKTRILVTHSMSYLPQVDVIIVMSGGKISEMGSYQELLARDGAFAEFLRTYASTEQEQDAEENGVTGVSGPGKEAKQMENGMLVTDSAGKQLQR

SEQ ID NO: 904077 - protein, 607 aa, Homo sapiens
QAALRPRPRLPAPPPPPPPPPPPPPPALAPAAGPDHPPPGARRRPRQQPGPITRRPVPAAARATGMALRGFCSADGSDPLWDWNVTWNTSNPDFTKCFQNTVLVWVPCFYLWACFPFYFLYLSRHDRGYIQMTPLNKTKTALGFLLWIVCWADLFYSFWERSRGIFLAPVFLVSPTLLGITTLLATFLIQLERRKGVQSSGIMLTFWLVALVCALAILRSKIMTALKEDAQVDLFRDITFYVYFSLLLIQLVLSCFSDRSPLFSETIHDPNPCPESSASFLSRITFWWITGLIVRGYRQPLEGSDLWSLNKEDTSEQVVPVLVKNWKKECAKTRKQPVKVVYSSKDPAQPKESSKVDANEEVEALIVKSPQKEWNPSLFKVLYKTFGPYFLMSFFFKAIHDLMMFSGPQILKLLIKFVNDTKAPDWQGYFYTVLLFVTACLQTLVLHQYFHICFVSGMRIKTAVIGAVYRKALVITNSARKSSTVGEIVNLMSVDAQRFMDLATYINMIWSAPLQVILALYLLWLNLGPSVLAGVAVMVLMVPVNAVMAMKTKTYQVAHMKSKDNRIKLMNEILNGIKVLKLYAWELDKRGKSYMNAEKGCRLKPGE

SEQ ID NO: 904078 - protein, 1540 aa, Homo sapiens
QAALRPRPRLPAPPPPPPPPPPPPPPALAPAAGPDHPPPGARRRPRQQPGPITRRPVPAAARATGMALRGFCSADGSDPLWDWNVTWNTSNPDFTKCFQNTVLVWVPCFYLWACFPFYFLYLSRHDRGYIQMTPLNKTKTALGFLLWIVCWADLFYSFWERSRGIFLAPVFLVSPTLLGITTLLATFLIQLERRKGVQSSGIMLTFWLVALVCALAILRSKIMTALKEDAQVDLFRDITFYVYFSLLLIQLVLSCFSDRSPLFSETIHDPNPCPESSASFLSRITFWWITGLIVRGYRQPLEGSDLWSLNKEDTSEQVVPVLVKNWKKECAKTRKQPVKVVYSSKDPAQPKESSKVDANEEVEALIVKSPQKEWNPSLFKVLYKTFGPYFLMSFFFKAIHDLMMFSGPQILKLLIKFVNDTKAPDWQGYFYTVLLFVTACLQTLVLHQYFHICFVSGMRIKTAVIGAVYRKALVITNSARKSSTVGEIVNLMSVDAQRFMDLATYINMIWSAPLQVILALYLLWLNLGPSVLAGVAVMVLMVPVNAVMAMKTKTYQVAHMKSKDNRIKLMNEILNGIKVLKLYAWELAFKDKVLAIRQEELKVLKKSAYLSAVGTFTWVCTPFLVALCTFAVYVTIDENNILDAQTAFVSLALFNILRFPLNILPMVISSIVQASVSLKRLRIFLSHEELEPDSIERRPVKDGGGTNSITVRNATFTWARSDPPTLNGITFSIPEGALVAVVGQVGCGKSSLLSALLAEMDKVEGHVAIKGSVAYVPQQAWIQNDSLRENILFGCQLEEPYYRSVIQACALLPDLEILPSGDRTEIGEKTRILVTHSMSYLPQVDVIIVMSGGKISEMGSYQELLARDGAFAEFLRTYASTEQEQDAEENGVTGVSGPGKEAKQMENGMLVTDSAGKQLQRQLSSSSSYSGDISRHHNSTAELQKAEAKKEETWKLMEADKAQTGQVKLSVYWDYMKAIGLFISFLSIFLFMCNHVSALASNYWLSLWTDDPIVNGTQEHTKVRLSVYGALGISQGIAVFGYSMAVSIGGILASRCLHVDLLHSILRSPMSFFERTPSGNLVNRFSKELDTVDSMIPEVIKMFMGSLFNVIGACIVILLATPIAAIIIPPLGLIYFFVQRFYVASSRQLKRLESVSRSPVYSHFNETLLGVSVIRAFEEQERFIHQSDLKVDENQKAYYPSIVANRWLAVRLECVGNCIVLFAALFAVISRHSLSAGLVGLSVSYSLQVTTYLNWLVRMSSEMETNIVAVERLKEYSETEKEAPWQIQETAPPSSWPQVGRVEFRNYCLRYREDLDFVLRHINVTINGGEKVGIVGRTGAGKSSLTLGLFRINESAEGEIIIDGINIAKIGLHDLRFKITIIPQDPVLFSGSLRMNLDPFSQYSDEEVWTSLELAHLKDFVSALPDKLDHECAEGGENLSVGQRQLVCLARALLRKTKILVLDEATAAVDLETDDLIQSTIRTQFEDCTVLTIAHRLNTIMDYTRVIVLDKGEIQEYGAPSDLLQQRGLFYSMAKDAGLV

SEQ ID NO: 904079 - protein, 1482 aa, Homo sapiens
MALRGFCSADGSDPLWDWNVTWNTSNPDFTKCFQNTVLVWVPCFYLWACFPFYFLYLSRHDRGYIQMTPLNKTKTALGFLLWIVCWADLFYSFWERSRGIFLAPVFLVSPTLLGITTLLATFLIQLERRKGVQSSGIMLTFWLVALVCALAILRSKIMTALKEDAQVDLFRDITFYVYFSLLLIQLVLSCFSDRSPLFSETIHDPNPCPESSASFLSRITFWWITGLIVRGYRQPLEGSDLWSLNKEDTSEQVVPVLVKNWKKECAKTRKQPVKVVYSSKDPAQPKESSKVDANEEVEALIVKSPQKEWNPSLFKVLYKTFGPYFLMSFFFKAIHDLMMFSGPQILKLLIKFVNDTKAPDWQGYFYTVLLFVTACLQTLVLHQYFHICFVSGMRIKTAVIGAVYRKALVITNSARKSSTVGEIVNLMSVDAQRFMDLATYINMIWSAPLQVILALYLLWLNLGPSVLAGVAVMVLMVPVNAVMAMKTKTYQVAHMKSKDNRIKLMNEILNGIKVLKLYAWELAFKDKVLAIRQEELKVLKKSAYLSAVGTFTWVCTPFLASVSLKRLRIFLSHEELEPDSIERRPVKDGGGTNSITVRNATFTWARSDPPTLNGITFSIPEGALVAVVGQVGCGKSSLLSALLAEMDKVEGHVAIKGSVAYVPQQAWIQNDSLRENILFGCQLEEPYYRSVIQACALLPDLEILPSGDRTEIGEKGVNLSGGQKQRVSLARAVYSNADIYLFDDPLSAVDAHVGKHIFENVIGPKGMLKNKTRILVTHSMSYLPQVDVIIVMSGGKISEMGSYQELLARDGAFAEFLRTYASTEQEQDAEENGVTGVSGPGKEAKQMENGMLVTDSAGKQLQRQLSSSSSYSGDISRHHNSTAELQKAEAKKEETWKLMEADKAQTGQVKLSVYWDYMKAIGLFISFLSIFLFMCNHVSALASNYWLSLWTDDPIVNGTQEHTKVRLSVYGALGISQGIAVFGYSMAVSIGGILASRCLHVDLLHSILRSPMSFFERTPSGNLVNRFSKELDTVDSMIPEVIKMFMGSLFNVIGACIVILLATPIAAIIIPPLGLIYFFVQRFYVASSRQLKRLESVSRSPVYSHFNETLLGVSVIRAFEEQERFIHQSDLKVDENQKAYYPSIVANRWLAVRLECVGNCIVLFAALFAVISRHSLSAGLVGLSVSYSLQVTTYLNWLVRMSSEMETNIVAVERLKEYSETEKEAPWQIQETAPPSSWPQVGRVEFRNYCLRYREDLDFVLRHINVTINGGEKVGIVGRTGAGKSSLTLGLFRINESAEGEIIIDGINIAKIGLHDLRFKITIIPQDPVLFSGSLRMNLDPFSQYSDEEVWTSLELAHLKDFVSALPDKLDHECAEGGENLSVGQRQLVCLARALLRKTKILVLDEATAAVDLETDDLIQSTIRTQFEDCTVLTIAHRLNTIMDYTRVIVLDKGEIQEYGAPSDLLQQRGLFYSMAKDAGLV

SEQ ID NO: 904080 - protein, 1531 aa, Homo sapiens
QAALRPRPRLPAPPPPPPPPPPPPPPALAPAAGPDHPPPGARRRPRQQPGPITRRPVPAAARATGMALRGFCSADGSDPLWDWNVTWNTSNPDFTKCFQNTVLVWVPCFYLWACFPFYFLYLSRHDRGYIQMTPLNKTKTALGFLLWIVCWADLFYSFWERSRGIFLAPVFLVSPTLLGITTLLATFLIQLERRKGVQSSGIMLTFWLVALVCALAILRSKIMTALKEDAQVDLFRDITFYVYFSLLLIQLVLSCFSDRSPLFSETIHDPNPCPESSASFLSRITFWWITGLIVRGYRQPLEGSDLWSLNKEDTSEQVVPVLVKNWKKECAKTRKQPVKVVYSSKDPAQPKESSKVDANEEVEALIVKSPQKEWNPSLFKVLYKTFGPYFLMSFFFKAIHDLMMFSGPQILKLLIKFVNDTKAPDWQGYFYTVLLFVTACLQTLVLHQYFHICFVSGMRIKTAVIGAVYRKALVITNSARKSSTVGEIVNLMSVDAQRFMDLATYINMIWSAPLQVILALYLLWLNLGPSVLAGVAVMVLMVPVNAVMAMKTKTYQVAHMKSKDNRIKLMNEILNGIKVLKLYAWELAFKDKVLAIRQEELKVLKKSAYLSAVGTFTWVCTPFLVALCTFAVYVTIDENNILDAQTAFVSLALFNILRFPLNILPMVISSIVQASVSLKRLRIFLSHEELEPDSIERRPVKDGGGTNSITVRNATFTWARSDPPTLNGITFSIPEGALVAVVGQVGCGKSSLLSALLAEMDKVEGHVAIKGSVAYVPQQAWIQNDSLRENILFGCQLEEPYYRSVIQACALLPDLEILPSGDRTEIGEKGVNLSGGQKQRVSLARAVYSNADIYLFDDPLSAVDAHVGKHIFENVIGPKGMLKNKTRILVTHSMSYLPQVDVIIVMSGGKISEMGSYQELLARDGAFAEFLRTYASTEQEQDAEENGVTGVSGPGKEAKQMENGMLVTDSAGKQLQRQLSSSSSYSGDISRHHNSTAELQKAEAKKEETWKLMEADKAQTGQVKLSVYWDYMKAIGLFISFLSIFLFMCNHVSALASNYWLSLWTDDPIVNGTQEHTKVRLSVYGALGISQGIAVFGYSMAVSIGGILASRCLHVDLLHSILRSPMSFFERTPSGNLVNRFSKELDTVDSMIPEVIKMFMGSLFNVIGACIVILLATPIAAIIIPPLGLIYFFVQRFYVASSRQLKRLESVSRSPVYSHFNETLLGVSVIRAFEEQERFIHQSDLKVDENQKAYYPSIVANRWLAVRLECVGNCIVLFAALFAVISRHSLSAGLVGLSVSYSLQVTTYLNWLVRMSSEMETNIVAVERLKEYSETEKEAPWQIQETAPPSSWPQVGRVEFRNYCLRYREDLDFVLRHINVTINGGEKVGIVGRTGAGKSSLTLGLFRINESAEGEIIIDGINIAKIGLHDLRFKITIIPQDPVLFSGSLRMNLDPFSQYSDEEVWTSLELAHLKDFVSALPDKLDHECAEGGENLRVIVLDKGEIQEYGAPSDLLQQRGLFYSMAKDAGLV

SEQ ID NO: 904081 - protein, 911 aa, Homo sapiens
MWSRTAQPVPDMSLCFVGGGTNSITVRNATFTWARSDPPTLNGITFSIPEGALVAVVGQVGCGKSSLLSALLAEMDKVEGHVAIKGSVAYVPQQAWIQNDSLRENILFGCQLEEPYYRSVIQACALLPDLEILPSGDRTEIGEKGVNLSGGQKQRVSLARAVYSNADIYLFDDPLSAVDAHVGKHIFENVIGPKGMLKNKTRILVTHSMSYLPQVDVIIVMSGGKISEMGSYQELLARDGAFAEFLRTYASTEQEQDAEENGVTGVSGPGKEAKQMENGMLVTDSAGKQLQRQLSSSSSYSGDISRHHNSTAELQKAEAKKEETWKLMEADKAQTGQVKLSVYWDYMKAIGLFISFLSIFLFMCNHVSALASNYWLSLWTDDPIVNGTQEHTKVRLSVYGALGISQGIAVFGYSMAVSIGGILASRCLHVDLLHSILRSPMSFFERTPSGNLVNRFSKELDTVDSMIPEVIKMFMGSLFNVIGACIVILLATPIAAIIIPPLGLIYFFVQRFYVASSRQLKRLESVSRSPVYSHFNETLLGVSVIRAFEEQERFIHQSDLKVDENQKAYYPSIVANRWLAVRLECVGNCIVLFAALFAVISRHSLSAGLVGLSVSYSLQVTTYLNWLVRMSSEMETNIVAVERLKEYSETEKEAPWQIQETAPPSSWPQVGRVEFRNYCLRYREDLDFVLRHINVTINGGEKVGIVGRTGAGKSSLTLGLFRINESAEGEIIIDGINIAKIGLHDLRFKITIIPQDPVLFSGSLRMNLDPFSQYSDEEVWTSLELAHLKDFVSALPDKLDHECAEGGENLSVGQRQLVCLARALLRKTKILVLDEATAAVDLETDDLIQSTIRTQFEDCTVLTIAHRLNTIMDYTRVIVLDKGEIQEYGAPSDLLQQRGLFYSMAKDAGLV

SEQ ID NO: 904082 - protein, 590 aa, Homo sapiens
LRPYPLARPGMRLGSLVKLSVYWDYMKAIGLFISFLSIFLFMCNHVSALASNYWLSLWTDDPIVNGTQEHTKVRLSVYGALGISQGIAVFGYSMAVSIGGILASRCLHVDLLHSILRSPMSFFERTPSGNLVNRFSKELDTVDSMIPEVIKMFMGSLFNVIGACIVILLATPIAAIIIPPLGLIYFFVQRFYVASSRQLKRLESVSRSPVYSHFNETLLGVSVIRAFEEQERFIHQSDLKVDENQKAYYPSIVANRWLAVRLECVGNCIVLFAALFAVISRHSLSAGLVGLSVSYSLQVTTYLNWLVRMSSEMETNIVAVERLKEYSETEKEAPWQIQETAPPSSWPQVGRVEFRNYCLRYREDLDFVLRHINVTINGGEKVGIVGRTGAGKSSLTLGLFRINESAEGEIIIDGINIAKIGLHDLRFKITIIPQDPVLFSGSLRMNLDPFSQYSDEEVWTSLELAHLKDFVSALPDKLDHECAEGGENLSVGQRQLVCLARALLRKTKILVLDEATAAVDLETDDLIQSTIRTQFEDCTVLTIAHRLNTIMDYTRVIVLDKGEIQEYGAPSDLLQQRGLFYSMAKDAGLV

SEQ ID NO: 904083 - protein, 428 aa, Homo sapiens
MFSSTALPWEDGRREPSSTPRVCSLPQRFYVASSRQLKRLESVSRSPVYSHFNETLLGVSVIRAFEEQERFIHQSDLKVDENQKAYYPSIVANRWLAVRLECVGNCIVLFAALFAVISRHSLSAGLVGLSVSYSLQVTTYLNWLVRMSSEMETNIVAVERLKEYSETEKEAPWQIQETAPPSSWPQVGRVEFRNYCLRYREDLDFVLRHINVTINGGEKVGIVGRTGAGKSSLTLGLFRINESAEGEIIIDGINIAKIGLHDLRFKITIIPQDPVLFSGSLRMNLDPFSQYSDEEVWTSLELAHLKDFVSALPDKLDHECAEGGENLSVGQRQLVCLARALLRKTKILVLDEATAAVDLETDDLIQSTIRTQFEDCTVLTIAHRLNTIMDYTRVIVLDKGEIQEYGAPSDLLQQRGLFYSMAKDAGLV

SEQ ID NO: 904084 - protein, 605 aa, Homo sapiens
QAALRPRPRLPAPPPPPPPPPPPPPPALAPAAGPDHPPPGARRRPRQQPGPITRRPVPAAARATGMALRGFCSADGSDPLWDWNVTWNTSNPDFTKCFQNTVLVWVPCFYLWACFPFYFLYLSRHDRGYIQMTPLNKTKTALGFLLWIVCWADLFYSFWERSRGIFLAPVFLVSPTLLGITTLLATFLIQLERRKGVQSSGIMLTFWLVALVCALAILRSKIMTALKEDAQVDLFRDITFYVYFSLLLIQLVLSCFSDRSPLFSETIHDPNPCPESSASFLSRITFWWITGLIVRGYRQPLEGSDLWSLNKEDTSEQVVPVLVKNWKKECAKTRKQPVKVVYSSKDPAQPKESSKVDANEEVEALIVKSPQKEWNPSLFKVLYKTFGPYFLMSFFFKAIHDLMMFSGPQILKLLIKFVNDTKAPDWQGYFYTVLLFVTACLQTLVLHQYFHICFVSGMRIKTAVIGAVYRKALVITNSARKSSTVGEIVNLMSVDAQRFMDLATYINMIWSAPLQVILALYLLWLNLGPSVLAGVAVMVLMVPVNAVMAMKTKTYQVRHVSLRAPKPGPRQRPLHEDFSPVPSALSLGFSALPASWTHLGSLNKC

SEQ ID NO: 904085 - protein, 212 aa, Homo sapiens
MRAPRGLGTGSALKEKAVREGTEGHRAERVLCIDQRSTGCKGVIWGITFQEGQPPSAEAWEATLGSRVSERGGQGSHSFTRWTGNSLLSPFTAIEGALANPGDSSAQQLAPGGPSGIPELLPALPRGPGLRSQAHQCHDQWGRKGGYTSPHSLTHSQSGTGCHRAGEPSCSVSPVTHGSTPLLEWLFGGLGVDCGSKSCSERIQLAEVKAFR

SEQ ID NO: 904086 - protein, 437 aa, Homo sapiens
MGRRMRGAAATAGLWLLALGSLLALWGGLLPPRTELPASRPPEDRLPRRPARSGGPAPAPRFPLPPPLAWDARGGSLKTFRALLTLAAGADGPPRQSRSEPRWHVSARQPRPEESAAVHGGVFWSRGLEEQVPPGFSEAQAAAWLEAARGARMVALERGGCGRSSNRLARFADGTRACVRYGINPEQIQGEALSYYLARLLGLQRHVPPLALARVEARGAQWAQVQEELRAAHWTEGSVVSLTRWLPNLTDVVVPAPWRSEDGRLRPLRDAGGELANLSQAELVDLVQWTDLILFDYLTANFDRLVSNLFSLQWDPRVMQRATSNLHRGPGGALVFLDNEAGLVHGYRVAGMWDKYNEPLLQSVCVFRERTARRVLELHRGQDAAARLLRLYRRHEPRFPELAALADPHAQLLQRRLDFLAKHILHCKAKYGRRSGT

SEQ ID NO: 904087 - protein, 437 aa, Homo sapiens; identical to SEQ ID NO: 904086

SEQ ID NO: 904088 - protein, 437 aa, Homo sapiens; identical to SEQ ID NO: 904086

SEQ ID NO: 904089 - protein, 4087 aa, Homo sapiens
MAHAASQLKKNRDLEINAEEEPEKKRKHRKRSRDRKKKSDANASYLRAARAGHLEKALDYIKNGVDINICNQNGLNALHLASKEGHVEVVSELLQREANVDAATKKGNTALHIASLAGQAEVVKVLVTNGANVNAQSQNGFTPLYMAAQENHLEVVKFLLDNGASQSLATEDGFTPLAVALQQGHDQVVSLLLENDTKGKVRLPALHIAARKDDTKAAALLLQNDNNADVESKSGFTPLHIAAHYGNINVATLLLNRAAAVDFTARNDITPLHVASKRGNANMVKLLLDRGAKIDAKTRDGLTPLHCGARSGHEQVVEMLLDRAAPILSKTKNGLSPLHMATQGDHLNCVQLLLQHNVPVDDVTNDYLTALHVAAHCGHYKVAKVLLDKKANPNAKALNGFTPLHIACKKNRIKVMELLLKHGASIQAVTESGLTPIHVAAFMGHVNIVSQLMHHGASPNTTNVRGETALHMAARSGQAEVVRYLVQDGAQVEAKAKDDQTPLHISARLGKADIVQQLLQQGASPNAATTSGYTPLHLSAREGHEDVAAFLLDHGASLSITTKKGFTPLHVAAKYGKLEVANLLLQKSASPDAAGKSGLTPLHVAAHYDNQKVALLLLDQGASPHAAAKNGYTPLHIAAKKNQMDIATTLLEYGADANAVTRQGIASVHLAAQEGHVDMVSLLLGRNANVNLSNKSGLTPLHLAAQEDRVNVAEVLVNQGAHVDAQTKMGYTPLHVGCHYGNIKIVNFLLQHSAKVNAKTKNGYTPLHQAAQQGHTHIINVLLQNNASPNELTVNGNTALGIARRLGYISVVDTLKIVTEETMTTTTVTEKHKMNVPETMNEVLDMSDDEVRKANAPEMLSDGEYISDVEEGEDAMTGDTDKYLGPQDLKELGDDSLPAEGYMGFSLGARSASLRSFSSDRSYTLNRSSYARDSMMIEELLVPSKEQHLTFTREFDSDSLRHYSWAADTLDNVNLVSSPIHSGFLVSFMVDARGGSMRGSRHHGMRIIIPPRKCTAPTRITCRLVKRHKLANPPPMVEGEGLASRLVEMGPAGAQFLGPVIVEIPHFGSMRGKERELIVLRSENGETWKEHQFDSKNEDLTELLNGMDEELDSPEELGKKRICRIITKDFPQYFAVVSRIKQESNQIGPEGGILSSTTVPLVQASFPEGALTKRIRVGLQAQPVPDEIVKKILGNKATFSPIVTVEPRRRKFHKPITMTIPVPPPSGEGVSNGYKGDTTPNLRLLCSITGGTSPAQWEDITGTTPLTFIKDCVSFTTNVSARFWLADCHQVLETVGLATQLYRELICVPYMAKFVVFAKMNDPVESSLRCFCMTDDKVDKTLEQQENFEEVARSKDIEVLEGKPIYVDCYGNLAPLTKGGQQLVFNFYSFKENRLPFSIKIRDTSQEPCGRLSFLKEPKTTKGLPQTAVCNLNITLPAHKKETESDQDDEIEKTDRRQSFASLALRKRYSYLTEPGMIERSTGATRSLPTTYSYKPFFSTRPYQSWTTAPITVPGPAKSGFTSLSSSSSNTPSASPLKSIWSVSTPSPIKSTLGASTTSSVKSISDVASPIRSLRTMSSPIKTVVSQSPYNIQVSSGTLARAPAVTEATPLKGLASNSTFSSRTSPVTTAGSLLERSSITMTPPASPKSNINMYSSSLPFKSIITSAAPLISSPLKSVVSPVKSRVDVISSAKITMASSLSSPVKQMPGHAEVALVNGSISPLKYPSSSTLINGCKATATLQEKISSATNSVSSVVSAATDTVEKVFSTTTAMPFSPLRSYVSAAPSAFQSLRTPSASALYTSLGSSISATTSSVTSSIITVPVYSVVNVLPEPALKKLPDSNSFTKSAAALLSPIKTLTTETHPQPHFSRTSSPVKSSLFLAPSALKLSTPSSLSSSQEILKDVAEMKEDLMRMTAILQTDVPEEKPFQPELPKEGRIDDEEPFKIVEKVKEDLVKVSEILKKDVCVDNKGSPKSPKSDKGHSPEDDWIEFSSEEIREARQQAAASQSPSLPERVQVKAKAASEKDYNLTKVIDYLTNDIGSSSLTNLKYKFEDAKKDGEGGQKRVLKPAIALQEHKLKMPPASMRTSTSEKELCKMADSFFGTDTILESPDDFSQHDQDKSPLSDSGFETRSEKTPSAPQSAETTGPKPLFHEVPIPPVITETRTEVVHVIRSYDPSAGDVPQTQPEEPVSPKPSPTFMELEPKPTTSSIKEKVKAFQMKASSEEDDHNRVLSKGMRVKEETHITTTTRMVYHSPPGGEGASERIEETMSVHDIMKAFQSGRDPSKELAGLFEHKSAVSPDVHKSAAETSAQHAEKDNQMKPKLERIIEVHIEKGNQAEPTEVIIRETKKHPEKEMYVYQKDLSRGDINLKDFLPEKHDAFPCSEEQGQQEEEELTAEESLPSYLESSRVNTPVSQEEDSRPSSAQLISDDSYKTLKLLSQHSIEYHDDELSELRGESYRFAEKMLLSEKLDVSHSDTEESVTDHAGPPSSELQGSDKRSREKIATAPKKEILSKIYKDVSENGVGKVSKDEHFDKVTVLHYSGNVSSPKHAMWMRFTEDRLDRGREKLIYEDRVDRTVKEAEEKLTEVSQFFRDKTEKLNDELQSPEKKARPKNGKEYSSQSPTSSSPEKVLLTELLASNDEWVKARQHGPDGQGFPKAEEKAPSLPSSPEKMVLSQQTEDSKSTVEAKGSISQSKAPDGPQSGFQLKQSKLSSIRLKFEQGTHAKSKDMSQEDRKSDGQSRIPVKKIQESKLPVYQVFAREKQQKAIDLPDESVSVQKDFMVLKTKDEHAQSNEIVVNDSGSDNVKKQRTEMSSKAMPDSFSEQQAKDLACHITSDLATRGPWDKKVFRTWESSGATNNKSQKEKLSHVLVHDVRENHIGHPESKSVDQKNEFMSVTERERKLLTNGSLSEIKEMTVKSPSKKVLYREYVVKEGDHPGGLLDQPSRRSESSAVSHIPVRVADERRMLSSNIPDGFCEQSAFPKHELSQKLSQSSMSKETVETQHFNSIEDEKVTYSEISKVSKHQSYVGLCPPLEETETSPTKSPDSLEFSPGKESPSSDVFDHSPIDGLEKLAPLAQTEGGKEIKTLPVYVSFVQVGKQYEKEIQQGGVKKIISQECKTVQETRGTFYTTRQQKQPPSPQGSPEDDTLEQVSFLDSSGKSPLTPETPSSEEVSYEFTSKTPDSLIAYIPGKPSPIPEVSEESEEEEQAKSTSLKQTTVEETAVEREMPNDVSKDSNQRPKNNRVAYIEFPPPPPLDADQIESDKKHHYLPEKEVDMIEVNLQDEHDKYQLAEPVIRVQPPSPVPPGADVSDSSDDESIYQPVPVKKYTFKLKEVDDEQKEKPKASAEKASNQKELESNGSGKDNEFGLGLDSPQNEIAQNGNNDQSITECSIATTAEFSHDTDATEIDSLDGYDLQDEDDGLTESDSKLPIQAMEIKKDIWNTEGILKPADRSFSQSKLEVIEEEGKVGPDEDKPPSKSSSSEKTPDKTDQKSGAQFFTLEGRHPDRSVFPDTYFSYKVDEEFATPFKTVATKGLDFDPWSNNRGDDEVFDSKSREDETKPFGLAVEDRSPATTPDTTPARTPTDESTPTSEPNPFPFHEGKMFEMTRSGAIDMSKRDFVEERLQFFQIGEHTSEGKSGDQGEGDKSMVTATPQPQSGDTTVETNLERNVETPTVEPNPSIPTSGECQEGTSSSGSLEKSAAATNTSKVDPKLRTPIKMGISASTMTMKKEGPGEITDKIEAVMTSCQGLENETITMISNTANSQMGVRPHEKHDFQKDNFNNNNNLDSSTIQTDNIMSNIVLTEHSAPTCTTEKDNPVKVSSGKKTGVLQGHCVRDKQKVLGEQQKTKELIGIRQKSKLPIKATSPKDTFPPNHMSNTKASKMKQVSQSEKTKALTTSSCVDVKSRIPVKNTPRDNIIAVRKACATQKQGQPEKGKAKQLPSKLPVKVRSTCVTTTTTTATTTTTTTTTTTTSCTVKVRKSQLKEVCKHSIEYFKGISGETLKLVDRLSEEEKKMQSELSDEEESTSRNTSLSETSRGGQPSVTTKSARDKKTEAAPLKSKSEKAGSEKRSSEKDWSTESM

SEQ ID NO: 904090 - protein, 173 aa, Homo sapiens
MSEEPKEKNAKPAHRKRKGKKSDANASYLRAARAGHLEKALDYIKNGVDINICNQNGLNALHLASKEGHVEVVSELLQREANVDAATKKGNTALHIASLAGQAEVVKVLVTNGANVNAQSQNGFTPLYMAAQENHLEVVKFLLDNGASQSLATETLHKVLDILEQPGDGPFFQ

SEQ ID NO: 904091 - protein, 118 aa, Homo sapiens [sequence omitted]

SEQ ID NO: 904092 - protein, 1978 aa, Homo sapiens
MSEEPKEKNAKPAHRKRKGKKSDANASYLRAARAGHLEKALDYIKNGVDINICNQNGLNALHLASKEGHVEVVSELLQREANVDAATKKGNTALHIASLAGQAEVVKVLVTNGANVNAQSQNGFTPLYMAAQENHLEVVKFLLDNGASQSLATEDGFTPLAVALQQGHDQVVSLLLENDTKGKVRLPALHIAARKDDTKAAALLLQNDNNADVESKSGFTPLHIAAHYGNINVATLLLNRAAAVDFTARNDITPLHVASKRGNANMVKLLLDRGAKIDAKTRDGLTPLHCGARSGHEQVVEMLLDRAAPILSKTKNGLSPLHMATQGDHLNCVQLLLQHNVPVDDVTNDYLTALHVAAHCGHYKVAKVLLDKKANPNAKALNGFTPLHIACKKNRIKVMELLLKHGASIQAVTESGLTPIHVAAFMGHVNIVSQLMHHGASPNTTNVRGETALHMAARSGQAEVVRYLVQDGAQVEAKAKDDQTPLHISARLGKADIVQQLLQQGASPNAATTSGYTPLHLSAREGHEDVAAFLLDHGASLSITTKKGFTPLHVAAKYGKLEVANLLLQKSASPDAAGKVKRSPATLKQATSTITKYTLANIHYIATQIITKYLSPTRMKSTWEIKGKCWGPSTVENRNVNMPYVVSNLISFPQSKPLVLRTFDTGCCFCTCFQSGLTPLHVAAHYDNQKVALLLLDQGASPHAAAKNGYTPLHIAAKKNQMDIATTLLEYGADANAVTRQGIASVHLAAQEGHVDMVSLLLGRNANVNLSNKSGLTPLHLAAQEDRVNVAEVLVNQGAHVDAQTKMGYTPLHVGCHYGNIKIVNFLLQHSAKVNAKTKNGYTPLHQAAQQGHTHIINVLLQNNASPNELTVNGNTALGIARRLGYISVVDTLKIVTEETMTTTTVTEKHKMNVPETMNEVLDMSDDEVRKANAPEMLSDGEYISDVEEGEDAMTGDTDKYLGPQDLKELGDDSLPAEGYMGFSLGARSASLRSFSSDRSYTLNRSSYARDSMMIEELLVPSKEQHLTFTREFDSDSLRHYSWAADTLDNVNLVSSPIHSGFLVSFMVDARGGSMRGSRHHGMRIIIPPRKCTAPTRITCRLVKRHKLANPPPMVEGEGLASRLVEMGPAGAQFLGKLHLPTNPPPVNEGESLVSRILQLGPQGTKFIGPVIVEIPHFGSMRGKERELIVLRSENGETWKEHQFDSKNEDLTELLNGMDEELDSPEELGKKRICRIITKDFPQYFAVVSRIKQESNQIGPEGGILSSTTVPLVQASFPEGALTKRIRVGLQAQPVPDEIVKKILGNKATFSPIVTVEPRRRKFHKPITMTIPVPPPSGEGVSNGYKGDTTPNLRLLCSITGGTSPAQWEDITGTTPLTFIKDCVSFTTNVSARFWLADCHQVLETVGLATQLYRELICVPYMAKFVVFAKMNDPVESSLRCFCMTDDKVDKTLEQQENFEEVARSKDIEVLEGKPIYVDCYGNLAPLTKGGQQLVFNFYSFKENRLPFSIKIRDTSQEPCGRLSFLKEPKTTKGLPQTAVCNLNITLPAHKKIEKTDRRQSFASLALRKRYSYLTEPGMSPQSPCERTDIRMAIVADHLGLSWTELARELNFSVDEINQIRVENPNSLISQSFMLLKKWVTRDGKNATTDALTSVLTKINRIDIVTLLEGPIFDYGNISGTRSFADENNVFHDPVDGYPSLQVELETPTGLHYTPPTPFQQDDYFSDISSIESPLRTPSRLSDGLVPSQGNIEHSADGPPVVTAEDASLEDSKLEDSVPLTEMPEAVDVDESQLENVCLSWQNETSSGNLESCAQARRVTGGLLDRLDDSPDQCRDSITSYLKGEAGKFEANGSHTEITPEAKTKSYFPESQNDVGKQSTKETLKPKIHGSGHVEEPASPLAAYQKSLEETSKLIIEETKPCVPVSMKKMSRTSPADGKPRLSLHEEEGSSGSEQKQGEGFKVKTKKEIRHVEKKSHS

SEQ ID NO: 904093 - protein, 4284 aa, Homo sapiens
MSEEPKEKNAKPAHRKRKGKKSDANASYLRAARAGHLEKALDYIKNGVDINICNQNGLNALHLASKEGHVEVVSELLQREANVDAATKKGNTALHIASLAGQAEVVKVLVTNGANVNAQSQNGFTPLYMAAQENHLEVVKFLLDNGASQSLATEDGFTPLAVALQQGHDQVVSLLLENDTKGKVRLPALHIAARKDDTKAAALLLQNDNNADVESKSGFTPLHIAAHYGNINVATLLLNRAAAVDFTARNDITPLHVASKRGNANMVKLLLDRGAKIDAKTRDGLTPLHCGARSGHEQVVEMLLDRAAPILSKTKNGLSPLHMATQGDHLNCVQLLLQHNVPVDDVTNDYLTALHVAAHCGHYKVAKVLLDKKANPNAKALNGFTPLHIACKKNRIKVMELLLKHGASIQAVTESGLTPIHVAAFMGHVNIVSQLMHHGASPNTTNVRGETALHMAARSGQAEVVRYLVQDGAQVEAKAKDDQTPLHISARLGKADIVQQLLQQGASPNAATTSGYTPLHLSAREGHEDVAAFLLDHGASLSITTKKGFTPLHVAAKYGKLEVANLLLQKSASPDAAGKVKRSPATLKQATSTITKYTLANIHYIATQIITKYLSPTRMKSTWEIKGKCWGPSTVENRNVNMPYVVSNLISFPQSKPLVLRTFDTGCCFCTCFQSGLTPLHVAAHYDNQKVALLLLDQGASPHAAAKNGYTPLHIAAKKNQMDIATTLLEYGADANAVTRQGIASVHLAAQEGHVDMVSLLLGRNANVNLSNKSGLTPLHLAAQEDRVNVAEVLVNQGAHVDAQTKMGYTPLHVGCHYGNIKIVNFLLQHSAKVNAKTKNGYTPLHQAAQQGHTHIINVLLQNNASPNELTVNGNTALGIARRLGYISVVDTLKIVTEETMTTTTVTEKHKMNVPETMNEVLDMSDDEVRKANAPEMLSDGEYISDVEEGEDAMTGDTDKYLGPQDLKELGDDSLPAEGYMGFSLGARSASLRSFSSDRSYTLNRSSYARDSMMIEELLVPSKEQHLTFTREFDSDSLRHYSWAADTLDNVNLVSSPIHSGFLVSFMVDARGGSMRGSRHHGMRIIIPPRKCTAPTRITCRLVKRHKLANPPPMVEGEGLASRLVEMGPAGAQFLGPVIVEIPHFGSMRGKERELIVLRSENGETWKEHQFDSKNEDLTELLNGMDEELDSPEELGKKRICRIITKDFPQYFAVVSRIKQESNQIGPEGGILSSTTVPLVQASFPEGALTKRIRVGLQAQPVPDEIVKKILGNKATFSPIVTVEPRRRKFHKPITMTIPVPPPSGEGVSNGYKGDTTPNLRLLCSITGGTSPAQWEDITGTTPLTFIKDCVSFTTNVSARFWLADCHQVLETVGLATQLYRELICVPYMAKFVVFAKMNDPVESSLRCFCMTDDKVDKTLEQQENFEEVARSKDIEVLEGKPIYVDCYGNLAPLTKGGQQLVFNFYSFKENRLPFSIKIRDTSQEPCGRLSFLKEPKTTKGLPQTAVCNLNITLPAHKKETESDQDDEIEKTDRRQSFASLALRKRYSYLTEPGMIERSTGATRSLPTTYSYKPFFSTRPYQSWTTAPITVPGPAKSGFTSLSSSSSNTPSASPLKSIWSVSTPSPIKSTLGASTTSSVKSISDVASPIRSLRTMSSPIKTVVSQSPYNIQVSSGTLARAPAVTEATPLKGLASNSTFSSRTSPVTTAGSLLERSSITMTPPASPKSNINMYSSSLPFKSIITSAAPLISSPLKSVVSPVKSRVDVISSAKITMASSLSSPVKQMPGHAEVALVNGSISPLKYPSSSTLINGCKATATLQEKISSATNSVSSVVSAATDTVEKVFSTTTAMPFSPLRSYVSAAPSAFQSLRTPSASALYTSLGSSISATTSSVTSSIITVPVYSVVNVLPEPALKKLPDSNSFTKSAAALLSPIKTLTTETHPQPHFSRTSSPVKSSLFLAPSALKLSTPSSLSSSQEILKDVAEMKEDLMRMTAILQTDVPEEKPFQPELPKEGRIDDEEPFKIVEKVKEDLVKVSEILKKDVCVDNKGSPKSPKSDKGHSPEDDWIEFSSEEIREARQQAAASQSPSLPERVQVKAKAASEKDYNLTKVIDYLTNDIGSSSLTNLKYKFEDAKKDGEGGQKRVLKPAIALQEHKLKMPPASMRTSTSEKELCKMADSFFGTDTILESPDDFSQHDQDKSPLSDSGFETRSEKTPSAPQSAETTGPKPLFHEVPIPPVITETRTEVVHVIRSYDPSAGDVPQTQPEEPVSPKPSPTFMELEPKPTTSSIKEKVKAFQMKASSEEDDHNRVLSKGMRVKEETHITTTTRMVYHSPPGGEGASERIEETMSVHDIMKAFQSGRDPSKELAGLFEHKSAVSPDVHKSAAETSAQHAEKDNQMKPKLERIIEVHIEKGNQAEPTEVIIRETKKHPEKEMYVYQKDLSRGDINLKDFLPEKHDAFPCSEEQGQQEEEELTAEESLPSYLESSRVNTPVSQEEDSRPSSAQLISDDSYKTLKLLSQHSIEYHDDELSELRGESYRFAEKMLLSEKLDVSHSDTEESVTDHAGPPSSELQGSDKRSREKIATAPKKEILSKIYKDVSENGVGKVSKDEHFDKVTVLHYSGNVSSPKHAMWMRFTEDRLDRGREKLIYEDRVDRTVKEAEEKLTEVSQFFRDKTEKLNDELQSPEKKARPKNGKEYSSQSPTSSSPEKVLLTELLASNDEWVKARQHGPDGQGFPKAEEKAPSLPSSPEKMVLSQQTEDSKSTVEAKGSISQSKAPDGPQSGFQLKQSKLSSIRLKFEQGTHAKSKDMSQEDRKSDGQSRIPVKKIQESKLPVYQVFAREKQQKAIDLPDESVSVQKDFMVLKTKDEHAQSNEIVVNDSGSDNVKKQRTEMSSKAMPDSFSEQQAKDLACHITSDLATRGPWDKKVFRTWESSGATNNKSQKEKLSHVLVHDVRENHIGHPESKSVDQKNEFMSVTERERKLLTNGSLSEIKEMTVKSPSKKVLYREYVVKEGDHPGGLLDQPSRRSESSAVSHIPVRVADERRMLSSNIPDGFCEQSAFPKHELSQKLSQSSMSKETVETQHFNSIEDEKVTYSEISKVSKHQSYVGLCPPLEETETSPTKSPDSLEFSPGKESPSSDVFDHSPIDGLEKLAPLAQTEGGKEIKTLPVYVSFVQVGKQYEKEIQQGGVKKIISQECKTVQETRGTFYTTRQQKQPPSPQGSPEDDTLEQVSFLDSSGKSPLTPETPSSEEVSYEFTSKTPDSLIAYIPGKPSPIPEVSEESEEEEQAKSTSLKQTTVEETAVEREMPNDVSKDSNQRPKNNRVAYIEFPPPPPLDADQIESDKKHHYLPEKEVDMIEVNLQDEHDKYQLAEPVIRVQPPSPVPPGADVSDSSDDESIYQPVPVKKYTFKLKEVDDEQKEKPKASAEKASNQKELESNGSGKDNEFGLGLDSPQNEIAQNGNNDQSITECSIATTAEFSHDTDATEIDSLDGYDLQDEDDGLTESDSKLPIQAMEIKKDIWNTEGILKPADRSFSQSKLEVIEEEGKVGPDEDKPPSKSSSSEKTPDKTDQKSGAQFFTLEGRHPDRSVFPDTYFSYKVDEEFATPFKTVATKGLDFDPWSNNRGDDEVFDSKSREDETKPFGLAVEDRSPATTPDTTPARTPTDESTPTSEPNPFPFHEGKMFEMTRSGAIDMSKRDFVEERLQFFQIGEHTSEGKSGDQGEGDKSMVTATPQPQSGDTTVETNLERNVETPTVEPNPSIPTSGECQEGTSSSGSLEKSAAATNTSKVDPKLRTPIKMGISASTMTMKKEGPGEITDKIEAVMTSCQGLENETITMISNTANSQMGVRPHEKHDFQKDNFNNNNNLDSSTIQTDNIMSNIVLTEHSAPTCTTEKDNPVKVSSGKKTGVLQGHCVRDKQKVLGEQQKTKELIGIRQKSKLPIKATSPKDTFPPNHMSNTKASKMKQVSQSEKTKALTTSSCVDVKSRIPVKNTPRDNIIAVRKACATQKQGQPEKGKAKQLPSKLPVKVRSTCVTTTTTTATTTTTTTTTTTTSCTVKVRKSQLKEVCKHSIEYFKGISGETLKLVDRLSEEEKKMQSELSDEEESTSRNTSLSETSRGGQPSVTTKSARDKKTEAAPLKSKSEKAGSEKRSSRRTGPQSPCERTDIRMAIVADHLGLSWTELARELNFSVDEINQIRVENPNSLISQSFMLLKKWVTRDGKNATTDALTSVLTKINRIDIVTLLEGPIFDYGNISGTRSFADENNVFHDPVDVSPMYCLP

SEQ ID NO: 904094 - protein, 1933 aa, Homo sapiens
MSEEPKEKNAKPAHRKRKGKKSDANASYLRAARAGHLEKALDYIKNGVDINICNQNGLNALHLASKEGHVEVVSELLQREANVDAATKKGNTALHIASLAGQAEVVKVLVTNGANVNAQSQNGFTPLYMAAQENHLEVVKFLLDNGASQSLATEDGFTPLAVALQQGHDQVVSLLLENDTKGKVRLPALHIAARKDDTKAAALLLQNDNNADVESKSGFTPLHIAAHYGNINVATLLLNRAAAVDFTARNDITPLHVASKRGNANMVKLLLDRGAKIDAKTRDGLTPLHCGARSGHEQVVEMLLDRAAPILSKTKNGLSPLHMATQGDHLNCVQLLLQHNVPVDDVTNDYLTALHVAAHCGHYKVAKVLLDKKANPNAKALNGFTPLHIACKKNRIKVMELLLKHGASIQAVTESGLTPIHVAAFMGHVNIVSQLMHHGASPNTTNVRGETALHMAARSGQAEVVRYLVQDGAQVEAKAKDDQTPLHISARLGKADIVQQLLQQGASPNAATTSGYTPLHLSAREGHEDVAAFLLDHGASLSITTKKGFTPLHVAAKYGKLEVANLLLQKSASPDAAGKVKRSPATLKQATSTITKYTLANIHYIATQIITKYLSPTRMKSTWEIKGKCWGPSTVENRNVNMPYVVSNLISFPQSKPLVLRTFDTGCCFCTCFQSGLTPLHVAAHYDNQKVALLLLDQGASPHAAAKNGYTPLHIAAKKNQMDIATTLLEYGADANAVTRQGIASVHLAAQEGHVDMVSLLLGRNANVNLSNKSGLTPLHLAAQEDRVNVAEVLVNQGAHVDAQTKMGYTPLHVGCHYGNIKIVNFLLQHSAKVNAKTKNGYTPLHQAAQQGHTHIINVLLQNNASPNELTVNGNTALGIARRLGYISVVDTLKIVTEETMTTTTVTEKHKMNVPETMNEVLDMSDDEVRKANAPEMLSDGEYISDVEEGEDAMTGDTDKYLGPQDLKELGDDSLPAEGYMGFSLGARSASLRSFSSDRSYTLNRSSYARDSMMIEELLVPSKEQHLTFTREFDSDSLRHYSWAADTLDNVNLVSSPIHSGFLVSFMVDARGGSMRGSRHHGMRIIIPPRKCTAPTRITCRLVKRHKLANPPPMVEGEGLASRLVEMGPAGAQFLGPVIVEIPHFGSMRGKERELIVLRSENGETWKEHQFDSKNEDLTELLNGMDEELDSPEELGKKRICRIITKDFPQYFAVVSRIKQESNQIGPEGGILSSTTVPLVQASFPEGALTKRIRVGLQAQPVPDEIVKKILGNKATFSPIVTVEPRRRKFHKPITMTIPVPPPSGEGVSNGYKGDTTPNLRLLCSITGGTSPAQWEDITGTTPLTFIKDCVSFTTNVSARFWLADCHQVLETVGLATQLYRELICVPYMAKFVVFAKMNDPVESSLRCFCMTDDKVDKTLEQQENFEEVARSKDIEVLEGKPIYVDCYGNLAPLTKGGQQLVFNFYSFKENRLPFSIKIRDTSQEPCGRLSFLKEPKTTKGLPQTAVCNLNITLPAHKKIEKTDRRQSFASLALRPQSPCERTDIRMAIVADHLGLSWTELARELNFSVDEINQIRVENPNSLISQSFMLLKKWVTRDGKNATTDALTSVLTKINRIDIVTLLEGPIFDYGNISGTRSFADENNVFHDPVDGYPSLQVELETPTGLHYTPPTPFQQDDYFSDISSIESPLRTPSRLSDGLVPSQGNIEHSADGPPVVTAEDASLEDSKLEDSVPLTEMPEAVDVDESQLENVCLSWQNETSSGNLESCAQARRVTGGLLDRLDDSPDQCRDSITSYLKGEAGKFEANGSHTEITPEAKTKSYFPESQNDVGKQSTKETLKPKIHGSGHVEEPASPLAAYQKSLEETSKLIIEETKPCVPVSMKKMSRTSPADGKPRLSLHEEEGSSGSEQKQGEGFKVKTKKEIRHVEKKSHS

SEQ ID NO: 904095 - protein, 1945 aa, Homo sapiens
MSEEPKEKNAKPAHRKRKGKKSDANASYLRAARAGHLEKALDYIKNGVDINICNQNGLNALHLASKEGHVEVVSELLQREANVDAATKKGNTALHIASLAGQAEVVKVLVTNGANVNAQSQNGFTPLYMAAQENHLEVVKFLLDNGASQSLATEDGFTPLAVALQQGHDQVVSLLLENDTKGKVRLPALHIAARKDDTKAAALLLQNDNNADVESKSGFTPLHIAAHYGNINVATLLLNRAAAVDFTARNDITPLHVASKRGNANMVKLLLDRGAKIDAKTRDGLTPLHCGARSGHEQVVEMLLDRAAPILSKTKNGLSPLHMATQGDHLNCVQLLLQHNVPVDDVTNDYLTALHVAAHCGHYKVAKVLLDKKANPNAKALNGFTPLHIACKKNRIKVMELLLKHGASIQAVTESGLTPIHVAAFMGHVNIVSQLMHHGASPNTTNVRGETALHMAARSGQAEVVRYLVQDGAQVEAKAKDDQTPLHISARLGKADIVQQLLQQGASPNAATTSGYTPLHLSAREGHEDVAAFLLDHGASLSITTKKGFTPLHVAAKYGKLEVANLLLQKSASPDAAGKVKRSPATLKQATSTITKYTLANIHYIATQIITKYLSPTRMKSTWEIKGKCWGPSTVENRNVNMPYVVSNLISFPQSKPLVLRTFDTGCCFCTCFQSGLTPLHVAAHYDNQKVALLLLDQGASPHAAAKNGYTPLHIAAKKNQMDIATTLLEYGADANAVTRQGIASVHLAAQEGHVDMVSLLLGRNANVNLSNKSGLTPLHLAAQEDRVNVAEVLVNQGAHVDAQTKMGYTPLHVGCHYGNIKIVNFLLQHSAKVNAKTKNGYTPLHQAAQQGHTHIINVLLQNNASPNELTVNGNTALGIARRLGYISVVDTLKIVTEETMTTTTVTEKHKMNVPETMNEVLDMSDDEVRKANAPEMLSDGEYISDVEEGEDAMTGDTDKYLGPQDLKELGDDSLPAEGYMGFSLGARSASLRSFSSDRSYTLNRSSYARDSMMIEELLVPSKEQHLTFTREFDSDSLRHYSWAADTLDNVNLVSSPIHSGFLVSFMVDARGGSMRGSRHHGMRIIIPPRKCTAPTRITCRLVKRHKLANPPPMVEGEGLASRLVEMGPAGAQFLGPVIVEIPHFGSMRGKERELIVLRSENGETWKEHQFDSKNEDLTELLNGMDEELDSPEELGKKRICRIITKDFPQYFAVVSRIKQESNQIGPEGGILSSTTVPLVQASFPEGALTKRIRVGLQAQPVPDEIVKKILGNKATFSPIVTVEPRRRKFHKPITMTIPVPPPSGEGVSNGYKGDTTPNLRLLCSITGGTSPAQWEDITGTTPLTFIKDCVSFTTNVSARFWLADCHQVLETVGLATQLYRELICVPYMAKFVVFAKMNDPVESSLRCFCMTDDKVDKTLEQQENFEEVARSKDIEVLEGKPIYVDCYGNLAPLTKGGQQLVFNFYSFKENRLPFSIKIRDTSQEPCGRLSFLKEPKTTKGLPQTAVCNLNITLPAHKKIEKTDRRQSFASLALRKRYSYLTEPGMSPQSPCERTDIRMAIVADHLGLSWTELARELNFSVDEINQIRVENPNSLISQSFMLLKKWVTRDGKNATTDALTSVLTKINRIDIVTLLEGPIFDYGNISGTRSFADENNVFHDPVDGYPSLQVELETPTGLHYTPPTPFQQDDYFSDISSIESPLRTPSRLSDGLVPSQGNIEHSADGPPVVTAEDASLEDSKLEDSVPLTEMPEAVDVDESQLENVCLSWQNETSSGNLESCAQARRVTGGLLDRLDDSPDQCRDSITSYLKGEAGKFEANGSHTEITPEAKTKSYFPESQNDVGKQSTKETLKPKIHGSGHVEEPASPLAAYQKSLEETSKLIIEETKPCVPVSMKKMSRTSPADGKPRLSLHEEEGSSGSEQKQGEGFKVKTKKEIRHVEKKSHS

SEQ ID NO: 904096 - protein, 1962 aa, Homo sapiens
MSEEPKEKNAKPAHRKRKGKKSDANASYLRAARAGHLEKALDYIKNGVDINICNQNGLNALHLASKEGHVEVVSELLQREANVDAATKKGNTALHIASLAGQAEVVKVLVTNGANVNAQSQNGFTPLYMAAQENHLEVVKFLLDNGASQSLATEDGFTPLAVALQQGHDQVVSLLLENDTKGKVRLPALHIAARKDDTKAAALLLQNDNNADVESKSGFTPLHIAAHYGNINVATLLLNRAAAVDFTARNDITPLHVASKRGNANMVKLLLDRGAKIDAKTRDGLTPLHCGARSGHEQVVEMLLDRAAPILSKTKNGLSPLHMATQGDHLNCVQLLLQHNVPVDDVTNDYLTALHVAAHCGHYKVAKVLLDKKANPNAKALNGFTPLHIACKKNRIKVMELLLKHGASIQAVTESGLTPIHVAAFMGHVNIVSQLMHHGASPNTTNVRGETALHMAARSGQAEVVRYLVQDGAQVEAKAKDDQTPLHISARLGKADIVQQLLQQGASPNAATTSGYTPLHLSAREGHEDVAAFLLDHGASLSITTKKGFTPLHVAAKYGKLEVANLLLQKSASPDAAGKVKRSPATLKQATSTITKYTLANIHYIATQIITKYLSPTRMKSTWEIKGKCWGPSTVENRNVNMPYVVSNLISFPQSKPLVLRTFDTGCCFCTCFQSGLTPLHVAAHYDNQKVALLLLDQGASPHAAAKNGYTPLHIAAKKNQMDIATTLLEYGADANAVTRQGIASVHLAAQEGHVDMVSLLLGRNANVNLSNKSGLTPLHLAAQEDRVNVAEVLVNQGAHVDAQTKMGYTPLHVGCHYGNIKIVNFLLQHSAKVNAKTKNGYTPLHQAAQQGHTHIINVLLQNNASPNELTVNGNTALGIARRLGYISVVDTLKIVTEETMTTTTVTEKHKMNVPETMNEVLDMSDDEVRKANAPEMLSDGEYISDVEEGEDAMTGDTDKYLGPQDLKELGDDSLPAEGYMGFSLGARSASLRSFSSDRSYTLNRSSYARDSMMIEELLVPSKEQHLTFTREFDSDSLRHYSWAADTLDNVNLVSSPIHSGFLVSFMVDARGGSMRGSRHHGMRIIIPPRKCTAPTRITCRLVKRHKLANPPPMVEGEGLASRLVEMGPAGAQFLGPVIVEIPHFGSMRGKERELIVLRSENGETWKEHQFDSKNEDLTELLNGMDEELDSPEELGKKRICRIITKDFPQYFAVVSRIKQESNQIGPEGGILSSTTVPLVQASFPEGALTKRIRVGLQAQPVPDEIVKKILGNKATFSPIVTVEPRRRKFHKPITMTIPVPPPSGEGVSNGYKGDTTPNLRLLCSITGGTSPAQWEDITGTTPLTFIKDCVSFTTNVSARFWLADCHQVLETVGLATQLYRELICVPYMAKFVVFAKMNDPVESSLRCFCMTDDKVDKTLEQQENFEEVARSKDIEVLEGKPIYVDCYGNLAPLTKGGQQLVFNFYSFKENRLPFSIKIRDTSQEPCGRLSFLKEPKTTKGLPQTAVCNLNITLPAHKKIEKTDRRQSFASLALRKRYSYLTEPGMSPQSPCERTDIRMAIVADHLGLSWTELARELNFSVDEINQIRVENPNSLISQSFMLLKKWVTRDGKNATTDALTSVLTKINRIDIVTLLEGPIFDYGNISGTRSFADENNVFHDPVDGYPSLQVELETPTGLHYTPPTPFQQDDYFSDISSIESPLRTPSRLSDGLVPSQGNIEHSADGPPVVTAEDASLEDSKLEDSVPLTEMPEAVDVDESQLENVCLSWQNETSSGNLESCAQARRVTGGLLDRLDDSPDQCRDSITSYLKGEAGKFEANGSHTEITPEAKTKSYFPESQNDVGKQSTKETLKPKIHGSGHVEEPASPLAAYQKSLEETSKLIIEETKPCVPVSMKKMSRTSPADGKPRLSLHEEEGSSGSEQKVKSPGAAPTRMTACCYKQGEGFKVKTKKEIRHVEKKSHS

SEQ ID NO: 904097 - protein, 540 aa, Homo sapiens
  misc_feature (20)..(20): Xaa can be any naturally occurring amino acid
  misc_feature (27)..(27): Xaa can be any naturally occurring amino acid
  misc_feature (32)..(32): Xaa can be any naturally occurring amino acid
  misc_feature (67)..(67): Xaa can be any naturally occurring amino acid
  misc_feature (94)..(94): Xaa can be any naturally occurring amino acid
  misc_feature (105)..(105): Xaa can be any naturally occurring amino acid
EAVIAQADDERGDVRRAPRXRSAAAAXRADEXMRRRGIGRVADDRRDYGRRRRAMTCVKGAEARDDXRREHRGYGTQEVMAEWCGGYRGAAGRXWAWAAIGVATXDIVRRMGHGGRPEMRGVWAVETGGEREIRGERKAAVMARTEAADNKRRGGTGGEETGVGVLGGAERANGRYAGVILGVGKDGGGTQGGGDAPPTPFQQDDYFSDISSIESPLRTPSRLSDGLVPSQGNIEHSADGPPVVTAEDASLEDSKLEDSVPLTEMPEAVDVDESQLENVCLSEYPQYLGNLAGSPKDVKPAEPRKLGVSSEQQEKGKSGPDEEMMEEKLKSLFEDIQLEEGVESEEMTEEKVQAILKRVQQAELEMSSITGWQNETSSGNLESCAQARRVTGGLLDRLDDSSYLKGEAGKFEANGSHTEITPEAKTKSYFPESQNDVGKQSTKETLKPKIHGSGHVEEPASPLAAYQKSLEETSKLIIEETKPCVPVSMKKMSRTSPADGKPRLSLHEEEGSSGSEQKQGEGFKVKTKKEIRHVEKKSHS

SEQ ID NO: 904098 - protein, 4357 aa, Homo sapiens
MSEEPKEKNAKPAHRKRKGKKSDANASYLRAARAGHLEKALDYIKNGVDINICNQNGLNALHLASKEGHVEVVSELLQREANVDAATKKGNTALHIASLAGQAEVVKVLVTNGANVNAQSQNGFTPLYMAAQENHLEVVKFLLDNGASQSLATEDGFTPLAVALQQGHDQVVSLLLENDTKGKVRLPALHIAARKDDTKAAALLLQNDNNADVESKSGFTPLHIAAHYGNINVATLLLNRAAAVDFTARNDITPLHVASKRGNANMVKLLLDRGAKIDAKTRDGLTPLHCGARSGHEQVVEMLLDRAAPILSKTKNGLSPLHMATQGDHLNCVQLLLQHNVPVDDVTNDYLTALHVAAHCGHYKVAKVLLDKKANPNAKALNGFTPLHIACKKNRIKVMELLLKHGASIQAVTESGLTPIHVAAFMGHVNIVSQLMHHGASPNTTNVRGETALHMAARSGQAEVVRYLVQDGAQVEAKAKDDQTPLHISARLGKADIVQQLLQQGASPNAATTSGYTPLHLSAREGHEDVAAFLLDHGASLSITTKKGFTPLHVAAKYGKLEVANLLLQKSASPDAAGKVKRSPATLKQATSTITKYTLANIHYIATQIITKYLSPTRMKSTWEIKGKCWGPSTVENRNVNMPYVVSNLISFPQSKPLVLRTFDTGCCFCTCFQSGLTPLHVAAHYDNQKVALLLLDQGASPHAAAKNGYTPLHIAAKKNQMDIATTLLEYGADANAVTRQGIASVHLAAQEGHVDMVSLLLGRNANVNLSNKSGLTPLHLAAQEDRVNVAEVLVNQGAHVDAQTKMGYTPLHVGCHYGNIKIVNFLLQHSAKVNAKTKNGYTPLHQAAQQGHTHIINVLLQNNASPNELTVNGNTALGIARRLGYISVVDTLKIVTEETMTTTTVTEKHKMNVPETMNEVLDMSDDEVRKANAPEMLSDGEYISDVEEGEDAMTGDTDKYLGPQDLKELGDDSLPAEGYMGFSLGARSASLRSFSSDRSYTLNRSSYARDSMMIEELLVPSKEQHLTFTREFDSDSLRHYSWAADTLDNVNLVSSPIHSGFLVSFMVDARGGSMRGSRHHGMRIIIPPRKCTAPTRITCRLVKRHKLANPPPMVEGEGLASRLVEMGPAGAQFLGPVIVEIPHFGSMRGKERELIVLRSENGETWKEHQFDSKNEDLTELLNGMDEELDSPEELGKKRICRIITKDFPQYFAVVSRIKQESNQIGPEGGILSSTTVPLVQASFPEGALTKRIRVGLQAQPVPDEIVKKILGNKATFSPIVTVEPRRRKFHKPITMTIPVPPPSGEGVSNGYKGDTTPNLRLLCSITGGTSPAQWEDITGTTPLTFIKDCVSFTTNVSARFWLADCHQVLETVGLATQLYRELICVPYMAKFVVFAKMNDPVESSLRCFCMTDDKVDKTLEQQENFEEVARSKDIEVLEGKPIYVDCYGNLAPLTKGGQQLVFNFYSFKENRLPFSIKIRDTSQEPCGRLSFLKEPKTTKGLPQTAVCNLNITLPAHKKETESDQDDEIEKTDRRQSFASLALRKRYSYLTEPGMIERSTGATRSLPTTYSYKPFFSTRPYQSWTTAPITVPGPAKSGFTSLSSSSSNTPSASPLKSIWSVSTPSPIKSTLGASTTSSVKSISDVASPIRSLRTMSSPIKTVVSQSPYNIQVSSGTLARAPAVTEATPLKGLASNSTFSSRTSPVTTAGSLLERSSITMTPPASPKSNINMYSSSLPFKSIITSAAPLISSPLKSVVSPVKSRVDVISSAKITMASSLSSPVKQMPGHAEVALVNGSISPLKYPSSSTLINGCKATATLQEKISSATNSVSSVVSAATDTVEKVFSTTTAMPFSPLRSYVSAAPSAFQSLRTPSASALYTSLGSSISATTSSVTSSIITVPVYSVVNVLPEPALKKLPDSNSFTKSAAALLSPIKTLTTETHPQPHFSRTSSPVKSSLFLAPSALKLSTPSSLSSSQEILKDVAEMKEDLMRMTAILQTDVPEEKPFQPELPKEGRIDDEEPFKIVEKVKEDLVKVSEILKKDVCVDNKGSPKSPKSDKGHSPEDDWIEFSSEEIREARQQAAASQSPSLPERVQVKAKAASEKDYNLTKVIDYLTNDIGSSSLTNLKYKFEDAKKDGEGGQKRVLKPAIALQEHKLKMPPASMRTSTSEKELCKMADSFFGTDTILESPDDFSQHDQDKSPLSDSGFETRSEKTPSAPQSAETTGPKPLFHEVPIPPVITETRTEVVHVIRSYDPSAGDVPQTQPEEPVSPKPSPTFMELEPKPTTSSIKEKVKAFQMKASSEEDDHNRVLSKGMRVKEETHITTTTRMVYHSPPGGEGASERIEETMSVHDIMKAFQSGRDPSKELAGLFEHKSAVSPDVHKSAAETSAQHAEKDNQMKPKLERIIEVHIEKGNQAEPTEVIIRETKKHPEKEMYVYQKDLSRGDINLKDFLPEKHDAFPCSEEQGQQEEEELTAEESLPSYLESSRVNTPVSQEEDSRPSSAQLISDDSYKTLKLLSQHSIEYHDDELSELRGESYRFAEKMLLSEKLDVSHSDTEESVTDHAGPPSSELQGSDKRSREKIATAPKKEILSKIYKDVSENGVGKVSKDEHFDKVTVLHYSGNVSSPKHAMWMRFTEDRLDRGREKLIYEDRVDRTVKEAEEKLTEVSQFFRDKTEKLNDELQSPEKKARPKNGKEYSSQSPTSSSPEKVLLTELLASNDEWVKARQHGPDGQGFPKAEEKAPSLPSSPEKMVLSQQTEDSKSTVEAKGSISQSKAPDGPQSGFQLKQSKLSSIRLKFEQGTHAKSKDMSQEDRKSDGQSRIPVKKIQESKLPVYQVFAREKQQKAIDLPDESVSVQKDFMVLKTKDEHAQSNEIVVNDSGSDNVKKQRTEMSSKAMPDSFSEQQAKDLACHITSDLATRGPWDKKVFRTWESSGATNNKSQKEKLSHVLVHDVRENHIGHPESKSVDQKNEFMSVTERERKLLTNGSLSEIKEMTVKSPSKKVLYREYVVKEGDHPGGLLDQPSRRSESSAVSHIPVRVADERRMLSSNIPDGFCEQSAFPKHELSQKLSQSSMSKETVETQHFNSIEDEKVTYSEISKVSKHQSYVGLCPPLEETETSPTKSPDSLEFSPGKESPSSDVFDHSPIDGLEKLAPLAQTEGGKEIKTLPVYVSFVQVGKQYEKEIQQGGVKKIISQECKTVQETRGTFYTTRQQKQPPSPQGSPEDDTLEQVSFLDSSGKSPLTPETPSSEEVSYEFTSKTPDSLIAYIPGKPSPIPEVSEESEEEEQAKSTSLKQTTVEETAVEREMPNDVSKDSNQRPKNNRVAYIEFPPPPPLDADQIESDKKHHYLPEKEVDMIEVNLQDEHDKYQLAEPVIRVQPPSPVPPGADVSDSSDDESIYQPVPVKKYTFKLKEVDDEQKEKPKASAEKASNQKELESNGSGKDNEFGLGLDSPQNEIAQNGNNDQSITECSIATTAEFSHDTDATEIDSLDGYDLQDEDDGLTESDSKLPIQAMEIKKDIWNTEGILKPADRSFSQSKLEVIEEEGKVGPDEDKPPSKSSSSEKTPDKTDQKSGAQFFTLEGRHPDRSVFPDTYFSYKVDEEFATPFKTVATKGLDFDPWSNNRGDDEVFDSKSREDETKPFGLAVEDRSPATTPDTTPARTPTDESTPTSEPNPFPFHEGKMFEMTRSGAIDMSKRDFVEERLQFFQIGEHTSEGKSGDQGEGDKSMVTATPQPQSGDTTVETNLERNVETPTVEPNPSIPTSGECQEGTSSSGSLEKSAAATNTSKVDPKLRTPIKMGISASTMTMKKEGPGEITDKIEAVMTSCQGLENETITMISNTANSQMGVRPHEKHDFQKDNFNNNNNLDSSTIQTDNIMSNIVLTEHSAPTCTTEKDNPVKVSSGKKTGVLQGHCVRDKQKVLGEQQKTKELIGIRQKSKLPIKATSPKDTFPPNHMSNTKASKMKQVSQSEKTKALTTSSCVDVKSRIPVKNTPRDNIIAVRKACATQKQGQPEKGKAKQLPSKLPVKVRSTCVTTTTTTATTTTTTTTTTTTSCTVKVRKSQLKEVCKHSIEYFKGISGETLKLVDRLSEEEKKMQSELSDEEESTSRNTSLSETSRGGQPSVTTKSARDKKTEAAPLKSKSEKAGSEKRSSRRTGPQSPCERTDIRMAIVADHLGLSWTELARELNFSVDEINQIRVENPNSLISQSFMLLKKWVTRDGKNATTDALTSVLTKINRIDIVTLLEGPIFDYGNISGTRSFADENNVFHDPVDGNYFTPAILLKSSVTSFVTQLNDISQDSDHYSSCSIAPRNSLMHLSIMLQSPLNCWLSQHLLFSLSLSVFPLLFPFTLSVS

SEQ ID NO: 904099 - protein, 586 aa, Homo sapiens
MSEEPKEKNAKPAHRKRKGKKSDANASYLRAARAGHLEKALDYIKNGVDINICNQNGLNALHLASKEGHVEVVSELLQREANVDAATKKGNTALHIASLAGQAEVVKVLVTNGANVNAQSQNGFTPLYMAAQENHLEVVKFLLDNGASQSLATEDGFTPLAVALQQGHDQVVSLLLENDTKGKVRLPALHIAARKDDTKAAALLLQNDNNADVESKSGFTPLHIAAHYGNINVATLLLNRAAAVDFTARNDITPLHVASKRGNANMVKLLLDRGAKIDAKTRDGLTPLHCGARSGHEQVVEMLLDRAAPILSKTKNGLSPLHMATQGDHLNCVQLLLQHNVPVDDVTNDYLTALHVAAHCGHYKVAKVLLDKKANPNAKALNGFTPLHIACKKNRIKVMELLLKHGASIQAVTESGLTPIHVAAFMGHVNIVSQLMHHGASPNTTNVRGETALHMAARSGQAEVVRYLVQDGAQVEAKAKDDQTPLHISARLGKADIVQQLLQQGASPNAATTSGYTPLHLSAREGHEDVAAFLLDHGASLSITTKKGFTPLHVAAKYGKLEVANLLLQKSASPDAAGKVRGHQPL

SEQ ID NO: 904100 - protein, 586 aa, Homo sapiens; identical to SEQ ID NO: 904099

SEQ ID NO: 904101 - protein, 1094 aa, Homo sapiens
MNLRCVLLDKKANPNAKALNGFTPLHIACKKNRIKVMELLLKHGASIQAVTESGLTPIHVAAFMGHVNIVSQLMHHGASPNTTNVRGETALHMAARSGQAEVVRYLVQDGAQVEAKAKDDQTPLHISARLGKADIVQQLLQQGASPNAATTSGYTPLHLSAREGHEDVAAFLLDHGASLSITTKKGFTPLHVAAKYGKLEVANLLLQKSASPDAAGKSGLTPLHVAAHYDNQKVALLLLDQGASPHAAAKNGYTPLHIAAKKNQMDIATTLLEYGADANAVTRQGIASVHLAAQEGHVDMVSLLLGRNANVNLSNKSGLTPLHLAAQEDRVNVAEVLVNQGAHVDAQTKMGYTPLHVGCHYGNIKIVNFLLQHSAKVNAKTKNGYTPLHQAAQQGHTHIINVLLQNNASPNELTVNGNTALGIARRLGYISVVDTLKIVTEETMTTTTVTEKHKMNVPETMNEVLDMSDDEGEDAMTGDTDKYLGPQDLKELGDDSLPAEGYMGFSLGARSASLRSFSSDRSYTLNRSSYARDSMMIEELLVPSKEQHLTFTREFDSDSLRHYSWAADTLDNVNLVSSPIHSGFLVSFMVDARGGSMRGSRHHGMRIIIPPRKCTAPTRITCRLVKRHKLANPPPMVEGEGLASRLVEMGPAGAQFLGPVIVEIPHFGSMRGKERELIVLRSENGETWKEHQFDSKNEDLTELLNGMDEELDSPEELGKKRICRIITKDFPQYFAVVSRIKQESNQIGPEGGILSSTTVPLVQASFPEGALTKRIRVGLQAQPVPDEIVKKILGNKATFSPIVTVEPRRRKFHKPITMTIPVPPPSGEGVSNGYKGDTTPNLRLLCSITGGTSPAQWEDITGTTPLTFIKDCVSFTTNVSARFWLADCHQVLETVGLATQLYRELICVPYMAKFVVFAKMNDPVESSLRCFCMTDDKVDKTLEQQENFEEVARSKDIEVLEGKPIYVDCYGNLAPLTKGGQQLVFNFYSFKENRLPFSIKIRDTSQEPCGRLSFLKEPKTTKGLPQTAVCNLNITLPAHKKIEKTDRRQSFASLALRKRYSYLTEPGMSEFPDTSTNPGQCFRRRDIFSMRSKL

SEQ ID NO: 904102 - protein, 1945 aa, Homo sapiens; identical to SEQ ID NO: 904095

SEQ ID NO: 904103 - protein, 1224 aa, Homo sapiens
MDIATTLLEYGADANAVTRQGIASVHLAAQEGHVDMVSLLLGRNANVNLSNKSGLTPLHLAAQEDRVNVAEVLVNQGAHVDAQTKMGYTPLHVGCHYGNIKIVNFLLQHSAKVNAKTKNGYTPLHQAAQQGHTHIINVLLQNNASPNELTVNGNTALGIARRLGYISVVDTLKIVTEETMTTTTVTEKHKMNVPETMNEVLDMSDDEVRKANAPEMLSDGEYISDVEEGEDAMTGDTDKYLGPQDLKELGDDSLPAEGYMGFSLGARSASLRSFSSDRSYTLNRSSYARDSMMIEELLVPSKEQHLTFTREFDSDSLRHYSWAADTLDNVNLVSSPIHSGFLVSFMVDARGGSMRGSRHHGMRIIIPPRKCTAPTRITCRLVKRHKLANPPPMVEGEGLASRLVEMGPAGAQFLGPVIVEIPHFGSMRGKERELIVLRSENGETWKEHQFDSKNEDLTELLNGMDEELDSPEELGKKRICRIITKDFPQYFAVVSRIKQESNQIGPEGGILSSTTVPLVQASFPEGALTKRIRVGLQAQPVPDEIVKKILGNKATFSPIVTVEPRRRKFHKPITMTIPVPPPSGEGVSNGYKGDTTPNLRLLCSITGGTSPAQWEDITGTTPLTFIKDCVSFTTNVSARFWLADCHQVLETVGLATQLYRELICVPYMAKFVVFAKMNDPVESSLRCFCMTDDKVDKTLEQQENFEEVARSKDIEVLEGKPIYVDCYGNLAPLTKGGQQLVFNFYSFKENRLPFSIKIRDTSQEPCGRLSFLKEPKTTKGLPQTAVCNLNITLPAHKKIEKTDRRQSFASLALRKRYSYLTEPGMSPQSPCERTDIRMAIVADHLGLSWTELARELNFSVDEINQIRVENPNSLISQSFMLLKKWVTRDGKNATTDALTSVLTKINRIDIVTLLEGPIFDYGNISGTRSFADENNVFHDPVDGYPSLQVELETPTGLHYTPPTPFQQDDYFSDISSIESPLRTPSRLSDGLVPSQGNIEHSADGPPVVTAEDASLEDSKLEDSVPLTEMPEAVDVDESQLENVCLSWQNETSSGNLESCAQARRVTGGLLDRLDDSPDQCRDSITSYLKGEAGKFEANGSHTEITPEAKTKSYFPESQNDVGKQSTKETLKPKIHGSGHVEEPASPLAAYQKSLEETSKLIIEETKPCVPVSMKKMSRTSPADGKPRLSLHEEEGSSGSEQKQGEGFKVKTKKEIRHVEKKSHS

SEQ ID NO: 904104 - protein, 2034 aa, Homo sapiens
MSEEPKEKNAKPAHRKRKGKKSDANASYLRAARAGHLEKALDYIKNGVDINICNQNGLNALHLASKEGHVEVVSELLQREANVDAATKKGNTALHIASLAGQAEVVKVLVTNGANVNAQSQNGFTPLYMAAQENHLEVVKFLLDNGASQSLATEDGFTPLAVALQQGHDQVVSLLLENDTKGKVRLPALHIAARKDDTKAAALLLQNDNNADVESKSGFTPLHIAAHYGNINVATLLLNRAAAVDFTARNDITPLHVASKRGNANMVKLLLDRGAKIDAKTRDGLTPLHCGARSGHEQVVEMLLDRAAPILSKTKNGLSPLHMATQGDHLNCVQLLLQHNVPVDDVTNDYLTALHVAAHCGHYKVAKVLLDKKANPNAKALNGFTPLHIACKKNRIKVMELLLKHGASIQAVTESGLTPIHVAAFMGHVNIVSQLMHHGASPNTTNVRGETALHMAARSGQAEVVRYLVQDGAQVEAKAKDDQTPLHISARLGKADIVQQLLQQGASPNAATTSGYTPLHLSAREGHEDVAAFLLDHGASLSITTKKGFTPLHVAAKYGKLEVANLLLQKSASPDAAGKVKRSPATLKQATSTITKYTLANIHYIATQIITKYLSPTRMKSTWEIKGKCWGPSTVENRNVNMPYVVSNLISFPQSKPLVLRTFDTGCCFCTCFQSGLTPLHVAAHYDNQKVALLLLDQGASPHAAAKNGYTPLHIAAKKNQMDIATTLLEYGADANAVTRQGIASVHLAAQEGHVDMVSLLLGRNANVNLSNKSGLTPLHLAAQEDRVNVAEVLVNQGAHVDAQTKMGYTPLHVGCHYGNIKIVNFLLQHSAKVNAKTKNGYTPLHQAAQQGHTHIINVLLQNNASPNELTVNGNTALGIARRLGYISVVDTLKIVTEETMTTTTVTEKHKMNVPETMNEVLDMSDDEVRKANAPEMLSDGEYISDVEEGEDAMTGDTDKYLGPQDLKELGDDSLPAEGYMGFSLGARSASLRSFSSDRSYTLNRSSYARDSMMIEELLVPSKEQHLTFTREFDSDSLRHYSWAADTLDNVNLVSSPIHSGFLVSFMVDARGGSMRGSRHHGMRIIIPPRKCTAPTRITCRLVKRHKLANPPPMVEGEGLASRLVEMGPAGAQFLGPVIVEIPHFGSMRGKERELIVLRSENGETWKEHQFDSKNEDLTELLNGMDEELDSPEELGKKRICRIITKDFPQYFAVVSRIKQESNQIGPEGGILSSTTVPLVQASFPEGALTKRIRVGLQAQPVPDEIVKKILGNKATFSPIVTVEPRRRKFHKPITMTIPVPPPSGEGVSNGYKGDTTPNLRLLCSITGGTSPAQWEDITGTTPLTFIKDCVSFTTNVSARFWLADCHQVLETVGLATQLYRELICVPYMAKFVVFAKMNDPVESSLRCFCMTDDKVDKTLEQQENFEEVARSKDIEVLEGKPIYVDCYGNLAPLTKGGQQLVFNFYSFKENRLPFSIKIRDTSQEPCGRLSFLKEPKTTKGLPQTAVCNLNITLPAHKKIEKTDRRQSFASLALRKRYSYLTEPGMSPQSPCERTDIRMAIVADHLGLSWTELARELNFSVDEINQIRVENPNSLISQSFMLLKKWVTRDGKNATTDALTSVLTKINRIDIVTLLEGPIFDYGNISGTRSFADENNVFHDPVDGYPSLQVELETPTGLHYTPPTPFQQDDYFSDISSIESPLRTPSRLSDGLVPSQGNIEHSADGPPVVTAEDASLEDSKLEDSVPLTEMPEAVDVDESQLENVCLSEYPQYLGNLAGSPKDVKPAEPRKLGVSSEQQEKGKSGPDEEMMEEKLKSLFEDIQLEEGVESEEMTEEKVQAILKRVQQAELEMSSITGWQNETSSGNLESCAQARRVTGGLLDRLDDSPDQCRDSITSYLKGEAGKFEANGSHTEITPEAKTKSYFPESQNDVGKQSTKETLKPKIHGSGHVEEPASPLAAYQKSLEETSKLIIEETKPCVPVSMKKMSRTSPADGKPRLSLHEEEGSSGSEQKQGEGFKVKTKKEIRHVEKKSHS

SEQ ID NO: 904105 - protein, 2025 aa, Homo sapiens
MSEEPKEKNAKPAHRKRKGKKSDANASYLRAARAGHLEKALDYIKNGVDINICNQNGLNALHLASKEGHVEVVSELLQREANVDAATKKGNTALHIASLAGQAEVVKVLVTNGANVNAQSQNGFTPLYMAAQENHLEVVKFLLDNGASQSLATEDGFTPLAVALQQGHDQVVSLLLENDTKGKVRLPALHIAARKDDTKAAALLLQNDNNADVESKSGFTPLHIAAHYGNINVATLLLNRAAAVDFTARNDITPLHVASKRGNANMVKLLLDRGAKIDAKTRDGLTPLHCGARSGHEQVVEMLLDRAAPILSKTKNGLSPLHMATQGDHLNCVQLLLQHNVPVDDVTNDYLTALHVAAHCGHYKVAKVLLDKKANPNAKALNGFTPLHIACKKNRIKVMELLLKHGASIQAVTESGLTPIHVAAFMGHVNIVSQLMHHGASPNTTNVRGETALHMAARSGQAEVVRYLVQDGAQVEAKAKDDQTPLHISARLGKADIVQQLLQQGASPNAATTSGYTPLHLSAREGHEDVAAFLLDHGASLSITTKKGFTPLHVAAKYGKLEVANLLLQKSASPDAAGKVKRSPATLKQATSTITKYTLANIHYIATQIITKYLSPTRMKSTWEIKGKCWGPSTVENRNVNMPYVVSNLISFPQSKPLVLRTFDTGCCFCTCFQSGLTPLHVAAHYDNQKVALLLLDQGASPHAAAKNGYTPLHIAAKKNQMDIATTLLEYGADANAVTRQGIASVHLAAQEGHVDMVSLLLGRNANVNLSNKSGLTPLHLAAQEDRVNVAEVLVNQGAHVDAQTKMGYTPLHVGCHYGNIKIVNFLLQHSAKVNAKTKNGYTPLHQAAQQGHTHIINVLLQNNASPNELTVNGNTALGIARRLGYISVVDTLKIVTEETMTTTTVTEKHKMNVPETMNEVLDMSDDEVRKANAPEMLSDGEYISDVEEGEDAMTGDTDKYLGPQDLKELGDDSLPAEGYMGFSLGARSASLRSFSSDRSYTLNRSSYARDSMMIEELLVPSKEQHLTFTREFDSDSLRHYSWAADTLDNVNLVSSPIHSGFLVSFMVDARGGSMRGSRHHGMRIIIPPRKCTAPTRITCRLVKRHKLANPPPMVEGEGLASRLVEMGPAGAQFLGPVIVEIPHFGSMRGKERELIVLRSENGETWKEHQFDSKNEDLTELLNGMDEELDSPEELGKKRICRIITKDFPQYFAVVSRIKQESNQIGPEGGILSSTTVPLVQASFPEGALTKRIRVGLQAQPVPDEIVKKILGNKATFSPIVTVEPRRRKFHKPITMTIPVPPPSGEGVSNGYKGDTTPNLRLLCSITGGTSPAQWEDITGTTPLTFIKDCVSFTTNVSARFWLADCHQVLETVGLATQLYRELICVPYMAKFVVFAKMNDPVESSLRCFCMTDDKVDKTLEQQENFEEVARSKDIEVLEGKPIYVDCYGNLAPLTKGGQQLVFNFYSFKENRLPFSIKIRDTSQEPCGRLSFLKEPKTTKGLPQTAVCNLNITLPAHKKIEKTDRRQSFASLALRKRYSYLTEPGMSPQSPCERTDIRMAIVADHLGLSWTELARELNFSVDEINQIRVENPNSLISQSFMLLKKWVTRDGKNATTDALTSVLTKINRIDIVTLLEGPIFDYGNISGTRSFADENNVFHDPVDGYPSLQVELETPTGLHYTPPTPFQQDDYFSDISSIESPLRTPSRLSDGLVPSQGNIEHSADGPPVVTAEDASLEDSKLEDSVPLTEMPEAVDVDESQLENVCLSEYPQYLGNLAGSPKDVKPAEPRKLGVSSEQQEKGKSGPDEEMMEEKLKSLFEDIQLEEGVESEEMTEEKVQAILKRVQQAELEMSSITGWQNETSSGNLESCAQARRVTGGLLDRLDDSSYLKGEAGKFEANGSHTEITPEAKTKSYFPESQNDVGKQSTKETLKPKIHGSGHVEEPASPLAAYQKSLEETSKLIIEETKPCVPVSMKKMSRTSPADGKPRLSLHEEEGSSGSEQKQGEGFKVKTKKEIRHVEKKSHS

SEQ ID NO: 904106 - protein, 549 aa, Homo sapiens
  misc_feature (20)..(20): Xaa can be any naturally occurring amino acid
  misc_feature (27)..(27): Xaa can be any naturally occurring amino acid
  misc_feature (32)..(32): Xaa can be any naturally occurring amino acid
  misc_feature (67)..(67): Xaa can be any naturally occurring amino acid
  misc_feature (94)..(94): Xaa can be any naturally occurring amino acid
  misc_feature (105)..(105): Xaa can be any naturally occurring amino acid
EAVIAQADDERGDVRRAPRXRSAAAAXRADEXMRRRGIGRVADDRRDYGRRRRAMTCVKGAEARDDXRREHRGYGTQEVMAEWCGGYRGAAGRXWAWAAIGVATXDIVRRMGHGGRPEMRGVWAVETGGEREIRGERKAAVMARTEAADNKRRGGTGGEETGVGVLGGAERANGRYAGVILGVGKDGGGTQGGGDAPPTPFQQDDYFSDISSIESPLRTPSRLSDGLVPSQGNIEHSADGPPVVTAEDASLEDSKLEDSVPLTEMPEAVDVDESQLENVCLSEYPQYLGNLAGSPKDVKPAEPRKLGVSSEQQEKGKSGPDEEMMEEKLKSLFEDIQLEEGVESEEMTEEKVQAILKRVQQAELEMSSITGWQNETSSGNLESCAQARRVTGGLLDRLDDSPDQCRDSITSYLKGEAGKFEANGSHTEITPEAKTKSYFPESQNDVGKQSTKETLKPKIHGSGHVEEPASPLAAYQKSLEETSKLIIEETKPCVPVSMKKMSRTSPADGKPRLSLHEEEGSSGSEQKQGEGFKVKTKKEIRHVEKKSHS

SEQ ID NO: 904107 - protein, 1377 aa, Homo sapiens
MSEEPKEKNAKPAHRKRKGKKSDANASYLRAARAGHLEKALDYIKNGVDINICNQNGLNALHLASKEGHVEVVSELLQREANVDAATKKGNTALHIASLAGQAEVVKVLVTNGANVNAQSQNGFTPLYMAAQENHLEVVKFLLDNGASQSLATEDGFTPLAVALQQGHDQVVSLLLENDTKGKVRLPALHIAARKDDTKAAALLLQNDNNADVESKSGFTPLHIAAHYGNINVATLLLNRAAAVDFTARNDITPLHVASKRGNANMVKLLLDRGAKIDAKTRDGLTPLHCGARSGHEQVVEMLLDRAAPILSKTKNGLSPLHMATQGDHLNCVQLLLQHNVPVDDVTNDYLTALHVAAHCGHYKVAKVLLDKKANPNAKALNGFTPLHIACKKNRIKVMELLLKHGASIQAVTESGLTPIHVAAFMGHVNIVSQLMHHGASPNTTNVRGETALHMAARSGQAEVVRYLVQDGAQVEAKAKDDQTPLHISARLGKADIVQQLLQQGASPNAATTSGYTPLHLSAREGHEDVAAFLLDHGASLSITTKKGFTPLHVAAKYGKLEVANLLLQKSASPDAAGKVKRSPATLKQATSTITKYTLANIHYIATQIITKYLSPTRMKSTWEIKGKCWGPSTVENRNVNMPYVVSNLISFPQSKPLVLRTFDTGCCFCTCFQSGLTPLHVAAHYDNQKVALLLLDQGASPHAAAKNGYTPLHIAAKKNQMDIATTLLEYGADANAVTRQGIASVHLAAQEGHVDMVSLLLGRNANVNLSNKSGLTPLHLAAQEDRVNVAEVLVNQGAHVDAQTKMGYTPLHVGCHYGNIKIVNFLLQHSAKVNAKTKNGYTPLHQAAQQGHTHIINVLLQNNASPNELTVNGNTALGIARRLGYISVVDTLKIVTEETMTTTTVTEKHKMNVPETMNEVLDMSDDEVRKANAPEMLSDGEYISDVEEGEDAMTGDTDKYLGPQDLKELGDDSLPAEGYMGFSLGARSASLRSFSSDRSYTLNRSSYARDSMMIEELLVPSKEQHLTFTREFDSDSLRHYSWAADTLDNVNLVSSPIHSGFLVSFMVDARGGSMRGSRHHGMRIIIPPRKCTAPTRITCRLVKRHKLANPPPMVEGEGLASRLVEMGPAGAQFLGPVIVEIPHFGSMRGKERELIVLRSENGETWKEHQFDSKNEDLTELLNGMDEELDSPEELGKKRICRIITKDFPQYFAVVSRIKQESNQIGPEGGILSSTTVPLVQASFPEGALTKRIRVGLQAQSGCVIAILGKRCSRPWRTWRGRTPSTRHICSWCTMVSGTSAAAPKGPRASPRPRNWERAWKSTVVNLVRKYMHWWLGGAKWGGPLRVPCLWIRLVAPIGFTAAKGGRGKAPDRLWVS

SEQ ID NO: 904108 - protein, 1363 aa, Homo sapiens
MSEEPKEKNAKPAHRKRKGKKSDANASYLRAARAGHLEKALDYIKNGVDINICNQNGLNALHLASKEGHVEVVSELLQREANVDAATKKGNTALHIASLAGQAEVVKVLVTNGANVNAQSQNGFTPLYMAAQENHLEVVKFLLDNGASQSLATEDGFTPLAVALQQGHDQVVSLLLENDTKGKVRLPALHIAARKDDTKAAALLLQNDNNADVESKSGFTPLHIAAHYGNINVATLLLNRAAAVDFTARNDITPLHVASKRGNANMVKLLLDRGAKIDAKTRDGLTPLHCGARSGHEQVVEMLLDRAAPILSKTKNGLSPLHMATQGDHLNCVQLLLQHNVPVDDVTNDYLTALHVAAHCGHYKVAKVLLDKKANPNAKALNGFTPLHIACKKNRIKVMELLLKHGASIQAVTESGLTPIHVAAFMGHVNIVSQLMHHGASPNTTNVRGETALHMAARSGQAEVVRYLVQDGAQVEAKAKDDQTPLHISARLGKADIVQQLLQQGASPNAATTSGYTPLHLSAREGHEDVAAFLLDHGASLSITTKKGFTPLHVAAKYGKLEVANLLLQKSASPDAAGKVKRSPATLKQATSTITKYTLANIHYIATQIITKYLSPTRMKSTWEIKGKCWGPSTVENRNVNMPYVVSNLISFPQSKPLVLRTFDTGCCFCTCFQSGLTPLHVAAHYDNQKVALLLLDQGASPHAAAKNGYTPLHIAAKKNQMDIATTLLEYGADANAVTRQGIASVHLAAQEGHVDMVSLLLGRNANVNLSNKSGLTPLHLAAQEDRVNVAEVLVNQGAHVDAQTKMGYTPLHVGCHYGNIKIVNFLLQHSAKVNAKTKNGYTPLHQAAQQGHTHIINVLLQNNASPNELTVNGNTALGIARRLGYISVVDTLKIVTEETMTTTTVTEKHKMNVPETMNEVLDMSDDEVRKANAPEMLSDGEYISDVEEGEDAMTGDTDKYLGPQDLKELGDDSLPAEGYMGFSLGARSASLRSFSSDRSYTLNRSSYARDSMMIEELLVPSKEQHLTFTREFDSDSLRHYSWAADTLDNVNLVSSPIHSGFLVSFMVDARGGSMRGSRHHGMRIIIPPRKCTAPTRITCRLVKRHKLANPPPMVEGEGLASRLVEMGPAGAQFLGPVIVEIPHFGSMRGKERELIVLRSENGETWKEHQFDSKNEDLTELLNGMDEELDSPEELGKKRICRIITKDFPQYFAVVSRIKQESNQIGPEGGILSSTTVPLVQASFPEGALTKRIRVGLQAQPVPDEIVKKILGNKATFSPIVTVEPRRRKFHKPITMTIPVPPPSGEGVSNGYKGDTTPNLRLLCSITGLVKSLLYFLLIHKDCVQRYICVQRYKTFEISMPTL

SEQ ID NO: 904109 - protein, 835 aa, Homo sapiens
MGDPGSEVSSRVRVLAFSEANREGLCFLRSEAWCSVAASGRYLFSVLGRAQLWGLIIESVPPAGPEASESTTDENEDDIQFVSEGPSRPVLEYIDLVCGDDENPSAYYSDILFPKMPKRQGDFLHFLNVKKVKTDTENNEVSKNHCRLSKAKEPHFEYIEQPIIEEKPSLSSKKEIDNLVLPDCWNEKQAFMFTEQYKWLEIKEGKLGCKDCSAVRHLGSKAEKHVHVSKEWIAYLVTPNGSNKTTRQASLRKKIREHDVSKAHGKIQDLLKESTNDSICNLVHKQNNKNIDATVKVFNTVYSLVKHNRPLSDIEGARELQEKNGEVNCLNTRYSATRIAEHIAKEMKMKIFKNIIEENAKICIIIDEASTVSKKTTLVIYLQCTIQSAPAPVMLFVALKELVSTIAECIVNTLLTTLNDCGFTNEYLKANLIAFCSDGANTILGRKSGVATKLLENFPEIIIWNCLNHRLQLSLDDSISEIKQINHLKIFIDKIYSIYHQPNKNQTKLLGTVAKELETEIIKIGRVMGPRWAACSLQAATAVWHAYPILYMHFSHSYSGLAKRLANINFLQDLALMIDILEEFSVLSTALQSRSTNIKKAQKLIKRTIRALENLKIGTGKYESQIEDLIKSDKFKDIPFNKNNKFNALPRSILLDNIIQHMNLRLLSDRNHEDIFNYFDLLEPSTWPYEEITSPWIAGEKTLFHLCKILKYEVDLNDFREFVNNNIKSNNVSIPTTIYKAKKIVSTIAINSAEAERGFNLMNIICTRVRNSLTIDHVSDLMTINLLGKELADWDATPFVKSWSNCNHRLATDTRVRQKSTKVFHENQLAIWNLK

SEQ ID NO: 904110 - protein, 281 aa, Homo sapiens
MGDPGSEIIESVPPAGPEASESTTDENEDDIQFVSEGPSRPVLEYIDLVCGDDENPSAYYSDILFPKMPKRQGDFLHFLNVKKVKTDTENNEVSKNHCRLSKAKEPHFEYIEQPIIEEKPSLSSKKEIDNLVLPDCWNEKQAFMFTEQYKWLEIKEGKLGCKDCSAVRHLGSKAEKHVHVSKEWIAYLVTPNGSNKTTRQASLRKKIREHDVSKAHGKIQDLLKESTNDSICNLVHKQNNKNIDATVKVFNTVYSLVKHNRPLSDIEGARELQEKNGEVNV

SEQ ID NO: 904111 - protein, 720 aa, Homo sapiens
MPKRQGDFLHFLNVKKVKTDTENNEVSKNHCRLSKAKEPHFEYIEQPIIEEKPSLSSKKEIDNLVLPDCWNEKQAFMFTEQYKWLEIKEGKLGCKDCSAVRHLGSKAEKHVHVSKEWIAYLVTPNGSNKTTRQASLRKKIREHDVSKAHGKIQDLLKESTNDSICNLVHKQNNKNIDATVKVFNTVYSLVKHNRPLSDIEGARELQEKNGEVNCLNTRYSATRIAEHIAKEMKMKIFKNIIEENAKICIIIDEASTVSKKTTLVIYLQCTIQSAPAPVMLFVALKELVSTIAECIVNTLLTTLNDCGFTNEYLKANLIAFCSDGANTILGRKSGVATKLLENFPEIIIWNCLNHRLQLSLDDSISEIKQINHLKIFIDKIYSIYHQPNKNQTKLLGTVAKELETEIIKIGRVMGPRWAACSLQAATAVWHAYPILYMHFSHSYSGLAKRLANINFLQDLALMIDILEEFSVLSTALQSRSTNIKKAQKLIKRTIRALENLKIGTGKYESQIEDLIKSDKFKDIPFNKNNKFNALPRSILLDNIIQHMNLRLLSDRNHEDIFNYFDLLEPSTWPYEEITSPWIAGEKTLFHLCKILKYEVDLNDFREFVNNNIKSNNVSIPTTIYKAKKIVSTIAINSAEAERGFNLMNIICTRVRNSLTIDHVSDLMTINLLGKELADWDATPFVKSWSNCNHRLATDTRVRQKSTKVFHENQLAIWNLK

SEQ ID NO: 904112 - protein, 603 aa, Homo sapiens
MSCGNEFVETLKKIGYPKADNLNGEDFDWLFEGVEDESFLKWFCGNVNEQNVLSERELEAFSILQKSGKPILEGAALDEALKTCKTSDLKTPRLDDKELEKLEDEVQTLLKLKNLKIQRRNKCQLMASVTSHKSLRLNAKEEEATKKLKQSQGILNAMITKISNELQALTDEVTQLMMFFRHSNLGQGTNPLVFLSQFSLEKYLSQEEQSTAALTLYTKKQFFQGIHEVVESSNEDNFQLLDIQTPSICDNQEILEERRLEMARLQLAYICAQHQLIHLKASNSSMKSSIKWAEESLHSLTSKAVDKENLDAKISSLTSEIMKLEKEVTQIKDRSLPAVVRENAQLLNMPVVKGDFDLQIAKQDYYTARQELVLNQLIKQKASFELLQLSYEIELRKHRDIYRQLENLVQELSQSNMMLYKQLEMLTDPSVSQQINPRNTIDTKDYSTHRLYQVLEGENKKKELFLTHGNLEEVAEKLKQNISLVQDQLAVSAQEHSFFLSKRNKDVDMLCDTLYQGGNQLLLSDQELTEQFHKVESQLNKLNHLLTDILADVKTKRKTLANNKLHQMEREFYVYFLKDEDYLKDIVENLETQSKIKAVSLED

SEQ ID NO: 904113 - protein, 163 aa, Homo sapiens
RQCEARGARRAVAAGSCEKQAELPEVTDAGLGSGRRGVGLEEWPRSPSAPRCLFFFLRSWGLLPGAPAAARGSGPGPLGEELGRGLCGACHPRLLQLGVDGDSVGLCVCFVSVLRCHSWVTLRRKVLPLARLVYRGLGAADPWGLPLPLGFARPWRRGCLSAG

SEQ ID NO: 904114 - protein, 585 aa, Homo sapiens
MSCGNEFVETLKKIGYPKADNLNGEDFDWLFEGVEDESFLKWFCGNVNEQNVLSERELEAFSILQKSGKPILEGAALDEALKTCKTSDLKTPRLDDKELEKLEDEVQTLLKLKNLKIQRRNKCQLMASVTSHKSLRLNAKEEEATKKLKQSQGILNAMITKISNELQALTDEVTQLMMFFRHSNLGQGTNPLVFLSQFSLEKYLSQEEQSTAALTLYTKKQFFQGIHEVVESSNEDNFQLLDIQTPSICDNQEILEERRLEMARLQLAYICAQHQLIHLKASNSSMKSSIKWAEESLHSLTSKAVDKENLDAKISSLTSEIMKLEKEVTQIKDRSLPAVVRENAQLLNMPVVKGDFDLQIAKQDYYTARQELVLNQLIKQKASFELLQLSYEIELRKHRDIYRQLENLVQELSQSNMMLYKQLEMLTDPSVSQQINPRNTIDTKDYSTHRLYQVLEGENKKKNISLVQDQLAVSAQEHSFFLSKRNKDVDMLCDTLYQGGNQLLLSDQELTEQFHKVESQLNKLNHLLTDILADVKTKRKTLANNKLHQMEREFYVYFLKDEDYLKDIVENLETQSKIKAVSLED

SEQ ID NO: 904115 - protein, 529 aa, Homo sapiens
MKLLPKILAHSIEHNQHIEESRQLLSYALIHPATSLEDRSALAMWLNHLEDRTSTSFGGQNRGRSDSVDYGQTHYYHQRQNSDDKLNGWQNSRDSGICINASNWQDKSMGCENGHVPLYSSSSVPTTINTIGTSTSTNVPAWLKSLRLHKYAALFSQMTYEEMMALTECQLEAQNVTKGARHKIVISIQKLKERQNLLKSLERDIIEGGSLRIPLQELHQMILTPIKAYSSPSTTPEARRREPQAPRQPSLMGPESQSPDCKDGAAATGATATPSAGASGGLQPHQLSSCDGELAVAPLPEGDLPGQFTRVMGKVCTQLLVSRPDEENISSYLQLIDKCLIHEAFTETQKKRLLSWKQQVQKLFRSFPRKTLLDISGYRQQRNRGFGQSNSLPTAGSVGGGMGRRNPRQYQIPSRNVPSARLGLLGTSGFVSSNQRNTTATPTIMKQGRQNLWFANPGGSNSMPSRTHSSVQRTRSLPVHTSPQNMLMFQQPEFQLPVTEPDINNRLESLCLSMTEHALGDGVDRTSTI

SEQ ID NO: 904116 - protein, 651 aa, Homo sapiens
MKLLPKILAHSIEHNQHIEESRQLLSYALIHPATSLEDRSALAMWLNHLEDRTSTSFGGQNRGRSDSVDYGQTHYYHQRQNSDDKLNGWQNSRDSGICINASNWQDKSMGCENGHVPLYSSSSVPTTINTIGTSTSTILSGQAHHSPLKRSVSLTPPMNVPNQPLGHGWMSHEDLRARGPQCLPSDHAPLSPQSSVASSGSGGSEHLEDQTTARNTFQEEGSGMKDVPAWLKSLRLHKYAALFSQMTYEEMMALTECQLEAQNVTKGARHKIVISIQKLKERQNLLKSLERDIIEGGSLRIPLQELHQMILTPIKAYSSPSTTPEARRREPQAPRQPSLMGPESQSPDCKDGAAATGATATPSAGASGGLQPHQLSSCDGELAVAPLPEGDLPGQFTRVMGKVCTQLLVSRPDEENISSYLQLIDKCLIHEAFTETQKKRLLSWKQQVQKLFRSFPRKTLLDISGYRQQRNRGFGQSNSLPTAGSVGGGMGRRNPRQYQIPSRNVPSARLGLLGTSGFVSSNQRNTTATPTIMKQGRQNLWFANPGGSNSMPSRTHSSVQRTRSLPVHTSPQNMLMFQQPGSQVHSGLCLTDLRGWLSLSGAPSMPALTVPKSSQGGTPDLSPEGGTRWHPAYLLLVTNITLYRLQNSSFP

SEQ ID NO: 904117 - protein, 653 aa, Homo sapiens
MKLLPKILAHSIEHNQHIEESRQLLSYALIHPATSLEDRSALAMWLNHLEDRTSTSFGGQNRGRSDSVDYGQTHYYHQRQNSDDKLNGWQNSRDSGICINASNWQDKSMGCENGHVPLYSSSSVPTTINTIGTSTSTILSGQAHHSPLKRSVSLTPPMNVPNQPLGHGWMSHEDLRARGPQCLPSDHAPLSPQSSVASSGSGGSEHLEDQTTARNTFQEEGSGMKDVPAWLKSLRLHKYAALFSQMTYEEMMALTECQLEAQNVTKGARHKIVISIQKLKERQNLLKSLERDIIEGGSLRIPLQELHQMILTPIKAYSSPSTTPEARRREPQAPRQPSLMGPESQSPDCKDGAAATGATATPSAGASGGLQPHQLSSCDGELAVAPLPEGDLPGQFTRVMGKVCTQLLVSRPDEENISSYLQLIDKCLIHEAFTETQKKRLLSWKQQVQKLFRSFPRKTLLDISGYRQQRNRGFGQSNSLPTAGSVGGGMGRRNPRQYQIPSRNVPSARLGLLGTSGFVSSNQRNTTATPTIMKQGRQNLWFANPGGSNSMPSRTHSSVQRTRSLPVHTSPQNMLMFQQPGSQVHSGLCLTDLRGWLSLSGAPSMPALTVPKSSQGEFQLPVTEPDINNRLESLCLSMTEHALGDGVDRTSTI

SEQ ID NO: 904118 - protein, 396 aa, Homo sapiens
QWWLSEFCVQSSFVQLLNPYQAAAWDSICPIHWRLTDIIEGGSLRIPLQELHQMILTPIKAYSSPSTTPEARRREPQAPRQPSLMGPESQSPDCKDGAAATGATATPSAGASGGLQPHQLSSCDGELAVAPLPEGDLPGQFTRVMGKVCTQLLVSRPDEENISSYLQLIDKCLIHEAFTETQKKRLLSWKQQVQKLFRSFPRKTLLDISGYRQQRNRGFGQSNSLPTAGSVGGGMGRRNPRQYQIPSRNVPSARLGLLGTSGFVSSNQRNTTATPTIMKQGRQNLWFANPGGSNSMPSRTHSSVQRTRSLPVHTSPQNMLMFQQPGSQVHSGLCLTDLRGWLSLSGAPSMPALTVPKSSQGGTPDLSPEGGTRWHPAYLLLVTNITLYRLQNSSFP

SEQ ID NO: 904119 - protein, 529 aa, Homo sapiens; identical to SEQ ID NO: 904115

SEQ ID NO: 904120 - protein, 372 aa, Homo sapiens
MTSPWVTEVLKMQIHVQKEMAFFELIIFNQVPLTFIPHIPFLNKLSCYLGNVLGWTITCKAGRIGQRLKAKGEDQRVCECGFVGYLRKLIKRRKNHGITHLAEKGKHSDLLQKTHISIKTHVIQKTDCEHNHIRMNPLKGRRPKVSANLNFYYSFTEYRNNGYLIIRDIILDMLLINLLWLVTMIKSVINNNIILFLKKKSLFFIDSDRFIYLVVFCYECFNFFFEVECLINFKTLSPPCFESCVDYRYIAQFKNPKAKEVLFIKESNSCMHEADEVRYLVIKAAVPFLYLPIDPHQMQLFYIKKIVTILKSQSKIYFTTCFSPLVLIEAVCTWHLYIVLGTVVFYNIIMYDVLLVLFIHSGFLPETVGRNT

SEQ ID NO: 904121 - protein, 529 aa, Homo sapiens; identical to SEQ ID NO: 904115

SEQ ID NO: 904122 - protein, 146 aa, Homo sapiens
MKLLPKILAHSIEHNQHIEESRQLLSYALIHPATSLEDRSALAMWLNHLEDRTSTSFGGQNRGRSDSVDYGQTHYYHQRQNSDDKLNGWQNSRDSGICINASNWQDKSMGCENGHVPLYSSSSVPTTINTIGTSTSTSKFPGIPLT

SEQ ID NO: 904123 - protein, 717 aa, Homo sapiens
MFRDQVGVLAGWFKGWNECEQTVALLSLLKRVSQTQARFLQLCLEHSLADCAELHVLEREANSPGIINQWQQESKDKVISLLLTHLPLLKPGNLDAKVEYMKLLPKILAHSIEHNQHIEESRQLLSYALIHPATSLEDRSALAMWLNHLEDRTSTSFGGQNRGRSDSVDYGQTHYYHQRQNSDDKLNGWQNSRDSGICINASNWQDKSMGCENGHVPLYSSSSVPTTINTIGTSTSTILSGQAHHSPLKRSVSLTPPMNVPNQPLGHGWMSHEDLRARGPQCLPSDHAPLSPQSSVASSGSGGSEHLEDQTTARNTFQEEGSGMKDVPAWLKSLRLHKYAALFSQMTYEEMMALTECQLEAQNVTKGARHKIVISIQKLKERQNLLKSLERDIIEGGSLRIPLQELHQMILTPIKAYSSPSTTPEARRREPQAPRQPSLMGPESQSPDCKDGAAATGATATPSAGASGGLQPHQLSSCDGELAVAPLPEGDLPGQFTRVMGKVCTQLLVSRPDEENISSYLQLIDKCLIHEAFTETQKKRLLSWKQQVQKLFRSFPRKTLLDISGYRQQRNRGFGQSNSLPTAGSVGGGMGRRNPRQYQIPSRNVPSARLGLLGTSGFVSSNQRNTTATPTIMKQGRQNLWFANPGGSNSMPSRTHSSVQRTRSLPVHTSPQNMLMFQQPEFQLPVTEPDINNRLESLCLSMTEHALGDGVDRTSTI

SEQ ID NO: 904124 - protein, 529 aa, Homo sapiens; identical to SEQ ID NO: 904115

SEQ ID NO: 904125 - protein, 378 aa, Homo sapiens
YARYEAWVWANLLKSLERDIIEGGSLRIPLQELHQMILTPIKAYSSPSTTPEARRREPQAPRQPSLMGPESQSPDCKDGAAATGATATPSAGASGGLQPHQLSSCDGELAVAPLPEGDLPGQFTRVMGKVCTQLLVSRPDEENISSYLQLIDKCLIHEAFTETQKKRLLSWKQQVQKLFRSFPRKTLLDISGYRQQRNRGFGQSNSLPTAGSVGGGMGRRNPRQYQIPSRNVPSARLGLLGTSGFVSSNQRNTTATPTIMKQGRQNLWFANPGGSNSMPSRTHSSVQRTRSLPVHTSPQNMLMFQQPGSQVHSGLCLTDLRGWLSLSGAPSMPALTVPKSSQGGTPDLSPEGGTRWHPAYLLLVTNITLYRLQNSSFP

SEQ ID NO: 904126 - protein, 162 aa, Homo sapiens
MGRRNPRQYQIPSRNVPSARLGLLGTSGFVSSNQRNTTATPTIMKQGRQNLWFANPGGSNSMPSRTHSSVQRTRSLPVHTSPQNMLMFQQPGSQVHSGLCLTDLRGWLSLSGAPSMPALTVPKSSQGGTPDLSPEGGTRWHPAYLLLVTNITLYRLQNSSFP

SEQ ID NO: 904127 - protein, 529 aa, Homo sapiens; identical to SEQ ID NO: 904115

SEQ ID NO: 904128 - protein, 114 aa, Homo sapiens
MFSRAGVAGLSAWTLQPQWIQVRNMATLKDITRRLKSIKNIQKITKSMKMVAAAKYARAERELKPARIYGLGSLALYEKADIKGPEDKKKHLLMWCVLRSRTVWCYSFLHVLNR

SEQ ID NO: 904129 - protein, 114 aa, Homo sapiens; identical to SEQ ID NO: 904128

SEQ ID NO: 904130 - protein, 114 aa, Homo sapiens; identical to SEQ ID NO: 904128

SEQ ID NO: 904131 - protein, 114 aa, Homo sapiens; identical to SEQ ID NO: 904128

SEQ ID NO: 904132 - protein, 114 aa, Homo sapiens; identical to SEQ ID NO: 904128

SEQ ID NO: 904133 - protein, 114 aa, Homo sapiens; identical to SEQ ID NO: 904128

SEQ ID NO: 904134 - protein, 114 aa, Homo sapiens; identical to SEQ ID NO: 904128

SEQ ID NO: 904135 - protein, 114 aa, Homo sapiens; identical to SEQ ID NO: 904128

SEQ ID NO: 904136 - protein, 114 aa, Homo sapiens; identical to SEQ ID NO: 904128

SEQ ID NO: 904137 - protein, 114 aa, Homo sapiens; identical to SEQ ID NO: 904128

SEQ ID NO: 904138 - protein, 135 aa, Homo sapiens
RARWEGRAGELRRMRAEACLSLPDRPSAGLWLPCSLARVSLGCRPGPCSRNVTRRLKSIKNIQKITKSMKMVAAAKYARAERELKPARIYGLGSLALYEKADIKGPEDKKKHLLMWCVLRSRTVWCYSFLHVLNR

SEQ ID NO: 904139 - protein, 114 aa, Homo sapiens; identical to SEQ ID NO: 904128

SEQ ID NO: 904140 - protein, 114 aa, Homo sapiens; identical to SEQ ID NO: 904128

SEQ ID NO: 904141 - protein, 91 aa, Homo sapiens
RARWEGRAGELRRMRAEACLSLPDRPSAGLWLPCSLARVSLGCRPGPCSRNALYEKADIKGPEDKKKHLLMWCVLRSRTVWCYSFLHVLNR

SEQ ID NO: 904142 - protein, 114 aa, Homo sapiens; identical to SEQ ID NO: 904128

SEQ ID NO: 904143 - protein, 114 aa, Homo sapiens; identical to SEQ ID NO: 904128

SEQ ID NO: 904144 - protein, 114 aa, Homo sapiens; identical to SEQ ID NO: 904128

SEQ ID NO: 904145 - protein, 135 aa, Homo sapiens; identical to SEQ ID NO: 904138

SEQ ID NO: 904146 - protein, 114 aa, Homo sapiens; identical to SEQ ID NO: 904128

SEQ ID NO: 904147 - protein, 114 aa, Homo sapiens; identical to SEQ ID NO: 904128

SEQ ID NO: 904148 - protein, 114 aa, Homo sapiens; identical to SEQ ID NO: 904128

SEQ ID NO: 904149 - protein, 114 aa, Homo sapiens; identical to SEQ ID NO: 904128

SEQ ID NO: 904150 - protein, 114 aa, Homo sapiens; identical to SEQ ID NO: 904128

SEQ ID NO: 904151 - protein, 114 aa, Homo sapiens; identical to SEQ ID NO: 904128

SEQ ID NO: 904152 - protein, 114 aa, Homo sapiens; identical to SEQ ID NO: 904128

SEQ ID NO: 904153 - protein, 114 aa, Homo sapiens; identical to SEQ ID NO: 904128

SEQ ID NO: 904154 - protein, 126 aa, Homo sapiens
KDTKYDRTTPGVNRHEGAGVAELSAGPAAAMDSSSKYGNLKDITRRLKSIKNIQKITKSMKMVAAAKYARAERELKPARIYGLGSLALYEKADIKGPEDKKKHLLMWCVLRSRTVWCYSFLHVLNR

SEQ ID NO: 904155 - protein, 114 aa, Homo sapiens; identical to SEQ ID NO: 904128

SEQ ID NO: 904156 - protein, 114 aa, Homo sapiens; identical to SEQ ID NO: 904128

SEQ ID NO: 904157 - protein, 114 aa, Homo sapiens; identical to SEQ ID NO: 904128

SEQ ID NO: 904158 - protein, 155 aa, Homo sapiens
MFSRAGVAGLSAWTLQPQWIQVRNMATLKDITRRLKSIKNIQKITKSMKMVAAAKYARAERELKPARIYGLGSLALYEKADIKGPEDKKKHLLMWCVLRSRTVWCYSFLHVLNRPFSELLQSYHVYTQSACRFVAQSTPYRTHLPSYLRHSMTSS

SEQ ID NO: 904159 - protein, 83 aa, Homo sapiens
RARWEGRAGELRRMRAEACLSLPDRPSAGLWLPCSLARVSLGCRPGPCSRNDSSNRKQERSRTRSCRKGKDQTLEHFWDLQPK

SEQ ID NO: 904160 - protein, 216 aa, Homo sapiens
LLKRGQNGRRGRGGTESERRCAGCQHAVTSQYDLIRKKRPWRYNIYFTGFYVDHFGFNTVKTFNQRYLVADKYWKKNGGSILFYTGNEGDIIWFCNNTGFMWDVAEELKAMLVFAEHRYYGESLPFGDNSFKDSRHLNFLTSEQALADFAELIKHLKRTIPGAENQPVIAIGGSYGGMLAAWFRMKYPHMVVGVFEVLALLAVEDLELVGVFTEGS

SEQ ID NO: 904161 - protein, 496 aa, Homo sapiens
MGRRALLLLLLSFLAPWATIALRPALRALGSLHLPTNPTSLPAVAKNYSVLYFQQKVDHFGFNTVKTFNQRYLVADKYWKKNGGSILFYTGNEGDIIWFCNNTGFMWDVAEELKAMLVFAEHRYYGESLPFGDNSFKDSRHLNFLTSEQALADFAELIKHLKRTIPGAENQPVIAIGGSYGGMLAAWFRMKYPHMVVGALAASAPIWQFEDLVPCGVFMKIVTTDFRKSGPHCSESIHRSWDAINRLSNTGSGLQWLTGALHLCSPLTSQDIQHLKDWISETWVNLAMVDYPYASNFLQPLPAWPIKVVCQYLKNPNVSDSLLLQNIFQALNVYYNYSGQVKCLNISETATSSLGTLGWSYQACTEVVMPFCTNGVDDMFEPHSWNLKELSDDCFQQWGVRPRPSWITTMYGGKNISSHTNIVFSNGELDPWSGGGVTKDITDTLVAVTISEGAHHLDLRTKNALDPMSVLLARSLEVRHMKNWIRDFYDSAGKQH

SEQ ID NO: 904162 - protein, 465 aa, Homo sapiens
RRRRGWSLARKSYKHLETTIFVKLRVDHFGFNTVKTFNQRYLVADKYWKKNGGSILFYTGNEGDIIWFCNNTGFMWDVAEELKAMLVFAEHRYYGESLPFGDNSFKDSRHLNFLTSEQALADFAELIKHLKRTIPGAENQPVIAIGGSYGGMLAAWFRMKYPHMVVGALAASAPIWQFEDLVPCGVFMKIVTTDFRKSGPHCSESIHRSWDAINRLSNTGSGLQWLTGALHLCSPLTSQDIQHLKDWISETWVNLAMVDYPYASNFLQPLPAWPIKVVCQYLKNPNVSDSLLLQNIFQALNVYYNYSGQVKCLNISETATSSLGTLGWSYQACTEVVMPFCTNGVDDMFEPHSWNLKELSDDCFQQWGVRPRPSWITTMYGGKNISSHTNIVFSNGELDPWSGGGVTKDITDTLVAVTISEGAHHLDLRTKNALDPMSVLLARSLEVRHMKNWIRDFYDSAGKQH

SEQ ID NO: 904163 - protein, 457 aa, Homo sapiens
FGASLSLLGVGFPGKCGVDHFGFNTVKTFNQRYLVADKYWKKNGGSILFYTGNEGDIIWFCNNTGFMWDVAEELKAMLVFAEHRYYGESLPFGDNSFKDSRHLNFLTSEQALADFAELIKHLKRTIPGAENQPVIAIGGSYGGMLAAWFRMKYPHMVVGALAASAPIWQFEDLVPCGVFMKIVTTDFRKSGPHCSESIHRSWDAINRLSNTGSGLQWLTGALHLCSPLTSQDIQHLKDWISETWVNLAMVDYPYASNFLQPLPAWPIKVVCQYLKNPNVSDSLLLQNIFQALNVYYNYSGQVKCLNISETATSSLGTLGWSYQACTEVVMPFCTNGVDDMFEPHSWNLKELSDDCFQQWGVRPRPSWITTMYGGKNISSHTNIVFSNGELDPWSGGGVTKDITDTLVAVTISEGAHHLDLRTKNALDPMSVLLARSLEVRHMKNWIRDFYDSAGKQH

SEQ ID NO: 904164 - protein, 391 aa, Homo sapiens
MWDVAEELKAMLVFAEHRYYGESLPFGDNSFKDSRHLNFLTSEQALADFAELIKHLKRTIPGAENQPVIAIGGSYGGMLAAWFRMKYPHMVVGALAASAPIWQFEDLVPCGVFMKIVTTDFRKSGPHCSESIHRSWDAINRLSNTGSGLQWLTGALHLCSPLTSQDIQHLKDWISETWVNLAMVDYPYASNFLQPLPAWPIKVVCQYLKNPNVSDSLLLQNIFQALNVYYNYSGQVKCLNISETATSSLGTLGWSYQACTEVVMPFCTNGVDDMFEPHSWNLKELSDDCFQQWGVRPRPSWITTMYGGKNISSHTNIVFSNGELDPWSGGGVTKDITDTLVAVTISEGAHHLDLRTKNALDPMSVLLARSLEVRHMKNWIRDFYDSAGKQH

SEQ ID NO: 904165 - protein, 302 aa, Homo sapiens [sequence omitted]

SEQ ID NO: 904166 - protein, 256 aa, Homo sapiens
MGRRALLLLLLSFLAPWATIALRPALRALGSLHLPTNPTSLPAVAKNYSVLYFQQKVDHFGFNTVKTFNQRYLVADKYWKKNGGSILFYTGNEGDIIWFCNNTGFMWDVAEELKAMLVFAEHRYYGESLPFGDNSFKDSRHLNFLTSEQALADFAELIKHLKRTIPGAENQPVIAIGGSYGGMLAAWFRMKYPHMVVGALAASAPIWQFEDLVPCGVFMKIVTTDFRQWFAVAYWSPSLMQPINFSGHPTFERLDL

SEQ ID NO: 904167 - protein, 128 aa, Homo sapiens
MPFCTNGVDDMFEPHSWNLKELSDDCFQQWGVRPRPSWITTMYGGKNISSHTNIVFSNGELDPWSGGGVTKDITDTLVAVTISEGAHHLDLRTKNALDPMSVLLARSLEVRHMKNWIRDFYDSAGKQH

SEQ ID NO: 904168 - protein, 306 aa, Homo sapiens
MGRRALLLLLLSFLAPWATIALRPALRALGSLHLPTNPTSLPAVAKNYSVLYFQQKVDHFGFNTVKTFNQRYLVADKYWKKNGGSILFYTGNEGDIIWFCNNTGFMWDVAEELKAMLVFAEHRYYGESLPFGDNSFKDSRHLNFLTSEQALADFAELIKHLKRTIPGAENQPVIAIGGSYGGMLAAWFRMKYPHMVVGALAASAPIWQFEDLVPCGVFMKIVTTDFRKSGPHCSESIHRSWDAINRLSNTAGLPGYCGPSFCAITSPASTLGDCPPTRRTGLVAILGPTLKLAVGISEAPGNPVFT

SEQ ID NO: 904169 - protein, 496 aa, Homo sapiens; identical to SEQ ID NO: 904161

SEQ ID NO: 904170 - protein, 496 aa, Homo sapiens; identical to SEQ ID NO: 904161

SEQ ID NO: 904171 - protein, 391 aa, Homo sapiens; identical to SEQ ID NO: 904164

SEQ ID NO: 904172 - protein, 496 aa, Homo sapiens; identical to SEQ ID NO: 904161

SEQ ID NO: 904173 - protein, 496 aa, Homo sapiens; identical to SEQ ID NO: 904161

SEQ ID NO: 904174 - protein, 357 aa, Homo sapiens
TPPPPPPPPPPPRPTHTHTLRTGPRVNSATRQPVIAIGGSYGGMLAAWFRMKYPHMVVGALAASAPIWQFEDLVPCGVFMKIVTTDFRKSGPHCSESIHRSWDAINRLSNTGSGLQWLTGALHLCSPLTSQDIQHLKDWISETWVNLAMVDYPYASNFLQPLPAWPIKVVCQYLKNPNVSDSLLLQNIFQALNVYYNYSGQVKCLNISETATSSLGTLGWSYQACTEVVMPFCTNGVDDMFEPHSWNLKELSDDCFQQWGVRPRPSWITTMYGGKNISSHTNIVFSNGELDPWSGGGVTKDITDTLVAVTISEGAHHLDLRTKNALDPMSVLLARSLEVRHMKNWIRDFYDSAGKQH

SEQ ID NO: 904175 - protein, 128 aa, Homo sapiens; identical to SEQ ID NO: 904167

SEQ ID NO: 904176 - protein, 101 aa, Homo sapiens
  misc_feature (82)..(82): Xaa can be any naturally occurring amino acid
MGRRALLLLLLSFLAPWATIALRPALRALGSLHLPTNPTSLPAVAKNYSVLYFQQKVDHFGFNTVKTFNQRYLVADKYWKKXCNNTDRTMESLSPLVTLHQ

SEQ ID NO: 904177 - protein, 73 aa, Homo sapiens
KLAAAAMVFGGVLLVANILRILFWFGRRFESPLLWQSAIMILTMLLMLKLCTEVRVPRVFLGNTLECLSEGPA

SEQ ID NO: 904178 - protein, 253 aa, Homo sapiens
MEAEGLDWLLVPLHQLVSWGAAAAMVFGGVVPYVPQYRDIRRTQNADGFSTYVCLVLLVANILRILFWFGRRFESPLLWQSAIMILTMLLMLKLCTEVRVANELNARRRSFTDFDPHHFWQWSSFSDYVQCVLAFTGVAGYITYLSIDSALFVETLGFLAVLTEAMLGVPQLYRNHRHQSTEGMSIKMVLMWTSGDAFKTAYFLLKGAPLQFSVCGLLQVLVDLAILGQAYAFARHPQKPAPHAVHPTGTKAL

SEQ ID NO: 904179 - protein, 271 aa, Homo sapiens
MEAEGLDWLLVPLHQLVSWGAAAAMVFGGVVPYVPQYRDIRRTQNADGFSTYVCLVLLVANILRILFWFGRRFESPLLWQSAIMILTMLLMLKLCTEVRVANELNARRRSFTAADSKDEEVKVAPRRSFLDFDPHHFWQWSSFSDYVQCVLAFTGVAGYITYLSIDSALFVETLGFLAVLTEAMLGVPQLYRNHRHQSTEGMSIKMVLMWTSGDAFKTAYFLLKGAPLQFSVCGLLQVLVDLAILGQAYAFARHPQKPAPHAVHPTGTKAL

SEQ ID NO: 904180 - protein, 218 aa, Homo sapiens
MEAEGLDWLLVPLHQLVSWGAAAAMVFGGVVPYVPQYRDIRRTQNADGFSTYVCLVLLVANILRILFWFGRRFESPLLWQSAIMILTMLLMLKLCTEVRVANELNARRRSFTAADSKDEEVKVAPRRSFLDFDPHHFWQWSSFSDYVQCVLAFTGVAGYITYLSIDSALFVETLGFLAVLTEAMLGVPQLYRNHRHQSTEGMRLLPPGCRQDPLWNEG

SEQ ID NO: 904181 - protein, 113 aa, Homo sapiens [sequence omitted]

SEQ ID NO: 904182 - protein, 299 aa, Homo sapiens
MEAEGLDWLLVPLHQLVSWGAAAAMVFGGVVPYVPQYRDIRRTQNADGFSTYVCLVLLVANILRILFWFGRRFESPLLWQSAIMILTMLLMLKLCTEVRVANELNARRRSFTAADSKDEEVKVAPRRSFLVLRICYSTALWTPLFLMRSQLLILLGFPYFDPHHFWQWSSFSDYVQCVLAFTGVAGYITYLSIDSALFVETLGFLAVLTEAMLGVPQLYRNHRHQSTEGMSIKMVLMWTSGDAFKTAYFLLKGAPLQFSVCGLLQVLVDLAILGQAYAFARHPQKPAPHAVHPTGTKAL

SEQ ID NO: 904183 - protein, 278 aa, Homo sapiens
MEAEGLDWLLVPLHQLVSWGAAAAMVFGGVVPYVPQYRDIRRTQNADGFSTYVCLVLLVANILRILFCPYYHFAKPAFSRSHSVECQHSGFGRFGRRFESPLLWQSAIMILTMLLMLKLCTEVRVANELNARRRSFTDFDPHHFWQWSSFSDYVQCVLAFTGVAGYITYLSIDSALFVETLGFLAVLTEAMLGVPQLYRNHRHQSTEGMSIKMVLMWTSGDAFKTAYFLLKGAPLQFSVCGLLQVLVDLAILGQAYAFARHPQKPAPHAVHPTGTKAL

SEQ ID NO: 904184 - protein, 113 aa, Homo sapiens [sequence omitted]

SEQ ID NO: 904185 - protein, 271 aa, Homo sapiens; identical to SEQ ID NO: 904179

SEQ ID NO: 904186 - protein, 113 aa, Homo sapiens [sequence omitted]

SEQ ID NO: 904187 - protein, 271 aa, Homo sapiens; identical to SEQ ID NO: 904179

SEQ ID NO: 904188 - protein, 271 aa, Homo sapiens; identical to SEQ ID NO: 904179

SEQ ID NO: 904189 - protein, 104 aa, Homo sapiens
MTYPACIAEQIIVRSGIDLSVMPHCGCSYAQWTAVYHVPHALPPPRCKRSHHVSSLALTAAGPQASEFWMLPCGSNRHRLPFRRWRGRFPQASELSSSFPRKHS

SEQ ID NO: 904190 - protein, 155 aa, Homo sapiens
MEAEGLDWLLVPLHQLVSWGAAAAMVFGGVVPYVPQYRDIRRTQNADGFSTYVCLVLLVANILRILFWFGRRFESPLLWQSAIMILTMLLMLKLCTEVRVANELNARRRSFTESSQRVQNGFWKRESPLDLQGSHVQTSTTFDLLTSLLLAKTRL

SEQ ID NO: 904191 - protein, 113 aa, Homo sapiens [sequence omitted]

SEQ ID NO: 904192 - protein, 188 aa, Homo sapiens
MILTMLLMLKLCTEVRVANELNARRRSFTAADSKDEEVKVAPRRSFLDFDPHHFWQWSSFSDYVQCVLAFTGVAGYITYLSIDSALFVETLGFLAVLTEAMLGVPQLYRNHRHQSTEGMSIKMVLMWTSGDAFKTAYFLLKGAPLQFSVCGLLQVLVDLAILGQAYAFARHPQKPAPHAVHPTGTKAL

SEQ ID NO: 904193 - protein, 132 aa, Homo sapiens
MEAEGLDWLLVPLHQLVSWGAAAAMVFGGVVPYVPQYRDIRRTQNADGFSTYVCLVLLVANILRILFWFGRRFESPLLWQSAIMILTMLLMLKLCTEVRVANELNARRRSFTASRWCSCGPVVTPSRRPTSC

SEQ ID NO: 904194 - protein, 250 aa, Homo sapiens
MSACHTQPSLGGGGSAGSGLGEAAWAGLPPDTGSFLLQVRDQERRHGFGRRFESPLLWQSAIMILTMLLMLKLCTEVRVANELNARRRSFTAADSKDEEVKVAPRRSFLDFDPHHFWQWSSFSDYVQCVLAFTGVAGYITYLSIDSALFVETLGFLAVLTEAMLGVPQLYRNHRHQSTEGMSIKMVLMWTSGDAFKTAYFLLKGAPLQFSVCGLLQVLVDLAILGQAYAFARHPQKPAPHAVHPTGTKAL

SEQ ID NO: 904195 - protein, 150 aa, Homo sapiens
MEAEGLDWLLVPLHQLVSWGAAAAMVFGGVVPYVPQYRDIRRTQNADGFSTYVCLVLLVANILRILFWFGRRFESPLLWQSAIMILTMLLMLKLCTEVRVANELNARRRSFTAADSKDEEVKVAPRRSFLASRWCSCGPVVTPSRRPTSC

SEQ ID NO: 904196 - protein, 113 aa, Homo sapiens [sequence omitted]

SEQ ID NO: 904197 - protein, 113 aa, Homo sapiens [sequence omitted]

SEQ ID NO: 904198 - protein, 271 aa, Homo sapiens; identical to SEQ ID NO: 904179

SEQ ID NO: 904199 - protein, 271 aa, Homo sapiens; identical to SEQ ID NO: 904179

SEQ ID NO: 904200 - protein, 105 aa, Homo sapiens
MEAEGLDWLLVPLHQLVSWGAAAAMVFGGVVPYVPQYRDIRRTQNADGFSTYVCLVLLVANILRILFWFGRRFESPLLWQSAIMILTMLSSPCAACCRGPLPAGI

SEQ ID NO: 904201 - protein, 142 aa, Homo sapiens
MATSLDFKTYVDQACRAAEEFVNIYYETMDKRRRALTRLYLDKATLIWNGNAVSGLDALNNFFDTLPSSEFQVNMLDCQPVHEQATQSQTTVLVVTSGTVKFDGNKQHFFNQNFLLTAQSTPNNTVWKIASDCFRFQDWSSS

SEQ ID NO: 904202 - protein, 172 aa, Homo sapiens
MRGHTPATQDRTREEVVTPTLPEHTATRSQMATSLDFKTYVDQACRAAEEFVNIYYETMDKRRRALTRLYLDKATLIWNGNAVSGLDALNNFFDTLPSSEFQVNMLDCQPVHEQATQSQTTVLVVTSGTVKFDGNKQHFFNQNFLLTAQSTPNNTVWKIASDCFRFQDWSSS

SEQ ID NO: 904203 - protein, 114 aa, Homo sapiens
MDKRRRALTRLYLDKATLIWNGNAVSGLDALNNFFDTLPSSEFQVNMLDCQPVHEQATQSQTTVLVVTSGTVKFDGNKQHFFNQNFLLTAQSTPNNTVWKIASDCFRFQDWSSS

SEQ ID NO: 904204 - protein, 142 aa, Homo sapiens; identical to SEQ ID NO: 904201

SEQ ID NO: 904205 - protein, 142 aa, Homo sapiens; identical to SEQ ID NO: 904201

SEQ ID NO: 904206 - protein, 128 aa, Homo sapiens
MATSLDFKTYVDQACRAAEEFVNIYYETMDKRRRNGNAVSGLDALNNFFDTLPSSEFQVNMLDCQPVHEQATQSQTTVLVVTSGTVKFDGNKQHFFNQNFLLTAQSTPNNTVWKIASDCFRFQDWSSS

SEQ ID NO: 904207 - protein, 232 aa, Homo sapiens
MQQHITSKPTGHPGQHQQQGITKSKHSNSFMQRAKTPAHSKPLRDRTHRDGRYVTADHVPDTTTAYTGPKMAHVIWAFKNLLSDHGMIDAELTDVSTNIITHDDNVAYTRQHRATKTMACYLGTQAHTLTTQDMSKHAGYHGAWTAPYTHVIVMRTTIGTIIDEDTNGYKIHVHDSAPNTSNQSADNTPTIQVTQKLNHEYQGEADPRRDDIGDTTQTSSTQTKNNSHAKHK

SEQ ID NO: 904208 - protein, 142 aa, Homo sapiens; identical to SEQ ID NO: 904201

SEQ ID NO: 904209 - protein, 188 aa, Homo sapiens
VTNHVPALCTAGRGPRFAARPAGPTPSLVSSRFLIPERTLSWEIARGGDVGDFKTYVDQACRAAEEFVNIYYETMDKRRRALTRLYLDKATLIWNGNAVSGLDALNNFFDTLPSSEFQVNMLDCQPVHEQATQSQTTVLVVTSGTVKFDGNKQHFFNQNFLLTAQSTPNNTVWKIASDCFRFQDWSSS

SEQ ID NO: 904210 - protein, 188 aa, Homo sapiens; identical to SEQ ID NO: 904209

SEQ ID NO: 904211 - protein, 2179 aa, Homo sapiens
MMMMMKKMQHQRQQQADHANEANYARGTRLPLSGEGPTSQPNSSKQTVLSWQAAIDAARQAKAAQTMSTSAPPPVGSLSQRKRQQYAKSKKQGNSSNSRPARALFCLSLNNPIRRACISIVEWKPFDIFILLAIFANCVALAIYIPFPEDDSNSTNHNLEKVEYAFLIIFTVETFLKIIAYGLLLHPNAYVRNGWNLLDFVIVIVGLFSVILEQLTKETEGGNHSSGKSGGFDVKALRAFRVLRPLRLVSGVPSLQVVLNSIIKAMVPLLHIALLVLFVIIIYAIIGLELFIGKMHKTCFFADSDIVAEEDPAPCAFSGNGRQCTANGTECRSGWVGPNGGITNFDNFAFAMLTVFQCITMEGWTDVLYWVNDAIGWEWPWVYFVSLIILGSFFVLNLVLGVLSGEFSKEREKAKARGDFQKLREKQQLEEDLKGYLDWITQAEDIDPENEEEGGEEGKRNTSMPTSETESVNTENVSGEGENRGCCGSLWCWWRRRGAAKAGPSGCRRWGQAISKSKLSRRWRRWNRFNRRRCRAAVKSVTFYWLVIVLVFLNTLTISSEHYNQPDWLTQIQDIANKVLLALFTCEMLVKMYSLGLQAYFVSLFNRFDCFVVCGGITETILVELEIMSPLGISVFRCVRLLRIFKVTRHWTSLSNLVASLLNSMKSIASLLLLLFLFIIIFSLLGMQLFGGKFNFDETQTKRSTFDNFPQALLTVFQILTGEDWNAVMYDGIMAYGGPSSSGMIVCIYFIILFICGNYILLNVFLAIAVDNLADAESLNTAQKEEAEEKERKKIARKESLENKKNNKPEVNQIANSDNKVTIDDYREEDEDKDPYPPCDVPVGEEEEEEEEDEPEVPAGPRPRRISELNMKEKIAPIPEGSAFFILSKTNPIRVGCHKLINHHIFTNLILVFIMLSSAALAAEDPIRSHSFRNTILGYFDYAFTAIFTVEILLKMTTFGAFLHKGAFCRNYFNLLDMLVVGVSLVSFGIQSSAISVVKILRVLRVLRPLRAINRAKGLKHVVQCVFVAIRTIGNIMIVTTLLQFMFACIGVQLFKGKFYRCTDEAKSNPEECRGLFILYKDGDVDSPVVRERIWQNSDFNFDNVLSAMMALFTVSTFEGWPALLYKAIDSNGENIGPIYNHRVEISIFFIIYIIIVAFFMMNIFVGFVIVTFQEQGEKEYKNCELDKNQRQCVEYALKARPLRRYIPKNPYQYKFWYVVNSSPFEYMMFVLIMLNTLCLAMQHYEQSKMFNDAMDILNMVFTGVFTVEMVLKVIAFKPKGYFSDAWNTFDSLIVIGSIIDVALSEADPTESENVPVPTATPGNSEESNRISITFFRLFRVMRLVKLLSRGEGIRTLLWTFIKSFQALPYVALLIAMLFFIYAVIGMQMFGKVAMRDNNQINRNNNFQTFPQAVLLLFRCATGEAWQEIMLACLPGKLCDPESDYNPGEEYTCGSNFAIVYFISFYMLCAFLIINLFVAVIMDNFDYLTRDWSILGPHHLDEFKRIWSEYDPEAKGRIKHLDVVTLLRRIQPPLGFGKLCPHRVACKRLVAMNMPLNSDGTVMFNATLFALVRTALKIKTEGNLEQANEELRAVIKKIWKKTSMKLLDQVVPPAGDDEVTVGKFYATFLIQDYFRKFKKRKEQGLVGKYPAKNTTIALQAGLRTLHDIGPEIRRAISCDLQDDEPEETKREEEDDVFKRNGALLGNHVNHVNSDRRDSLQQTNTTHRPLHVQRPSIPPASDTEKPLFPPAGNSVCHNHHNHNSIGKQVPTSTNANLNNANMSKAAHGKRPSIGNLEHVSENGHHSSHKHDREPQRRSSVKRTRYYETYIRSDSGDEQLPTICREDPEIHGYFRDPHCLGEQEYFSSEECYEDDSSPTWSRQNYGYYSRYPGRNIDSERPRGYHHPQGFLEDDDSPVCYDSRRSPRRRLLPPTPASHRRSSFNFECLRRQSSQEEVPSSPIFPHRTALPLHLMQQQIMAVAGLDSSKAQKYSPSHSTRSWATPPATPPYRDWTPCYTPLIQVEQSEALDQVNGSLPSLHRSSWYTDEPDISYRTFTPASLTVPSSFRNKNSDKQRSADSLVEAVLISEGLGRYARDPKFVSATKHEIADACDLTIDEMESAASTLLNGNVRPRANGDVGPLSHRQDYELQDFGPGYSDEEPDPGRDEEDLADEMICITTL

SEQ ID NO: 904212 - protein, 2159 aa, Homo sapiens
MMMMMKKMQHQRQQQADHANEANYARGTRLPLSGEGPTSQPNSSKQTVLSWQAAIDAARQAKAAQTMSTSAPPPVGSLSQRKRQQYAKSKKQGNSSNSRPARALFCLSLNNPIRRACISIVEWKPFDIFILLAIFANCVALAIYIPFPEDDSNSTNHNLEKVEYAFLIIFTVETFLKIIAYGLLLHPNAYVRNGWNLLDFVIVIVGLFSVILEQLTKETEGGNHSSGKSGGFDVKALRAFRVLRPLRLVSGVPSLQVVLNSIIKAMVPLLHIALLVLFVIIIYAIIGLELFIGKMHKTCFFADSDIVAEEDPAPCAFSGNGRQCTANGTECRSGWVGPNGGITNFDNFAFAMLTVFQCITMEGWTDVLYWMNDAMGFELPWVYFVSLVIFGSFFVLNLVLGVLSGEFSKEREKAKARGDFQKLREKQQLEEDLKGYLDWITQAEDIDPENEEEGGEEGKRNTSMPTSETESVNTENVSGEGENRGCCGSLCQAISKSKLSRRWRRWNRFNRRRCRAAVKSVTFYWLVIVLVFLNTLTISSEHYNQPDWLTQIQDIANKVLLALFTCEMLVKMYSLGLQAYFVSLFNRFDCFVVCGGITETILVELEIMSPLGISVFRCVRLLRIFKVTRHWTSLSNLVASLLNSMKSIASLLLLLFLFIIIFSLLGMQLFGGKFNFDETQTKRSTFDNFPQALLTVFQILTGEDWNAVMYDGIMAYGGPSSSGMIVCIYFIILFICGNYILLNVFLAIAVDNLADAESLNTAQKEEAEEKERKKIARKESLENKKNNKPEVNQIANSDNKVTIDDYREEDEDKDPYPPCDVPVGEEEEEEEEDEPEVPAGPRPRRISELNMKEKIAPIPEGSAFFILSKTNPIRVGCHKLINHHIFTNLILVFIMLSSAALAAEDPIRSHSFRNTILGYFDYAFTAIFTVEILLKMTTFGAFLHKGAFCRNYFNLLDMLVVGVSLVSFGIQSSAISVVKILRVLRVLRPLRAINRAKGLKHVVQCVFVAIRTIGNIMIVTTLLQFMFACIGVQLFKGKFYRCTDEAKSNPEECRGLFILYKDGDVDSPVVRERIWQNSDFNFDNVLSAMMALFTVSTFEGWPALLYKAIDSNGENIGPIYNHRVEISIFFIIYIIIVAFFMMNIFVGFVIVTFQEQGEKEYKNCELDKNQRQCVEYALKARPLRRYIPKNPYQYKFWYVVNSSPFEYMMFVLIMLNTLCLAMQHYEQSKMFNDAMDILNMVFTGVFTVEMVLKVIAFKPKGYFSDAWNTFDSLIVIGSIIDVALSEADPTESENVPVPTATPGNSEESNRISITFFRLFRVMRLVKLLSRGEGIRTLLWTFIKSFQALPYVALLIAMLFFIYAVIGMQMFGKVAMRDNNQINRNNNFQTFPQAVLLLFRCATGEAWQEIMLACLPGKLCDPESDYNPGEEYTCGSNFAIVYFISFYMLCAFLIINLFVAVIMDNFDYLTRDWSILGPHHLDEFKRIWSEYDPEAKGRIKHLDVVTLLRRIQPPLGFGKLCPHRVACKRLVAMNMPLNSDGTVMFNATLFALVRTALKIKTEGNLEQANEELRAVIKKIWKKTSMKLLDQVVPPAGDDEVTVGKFYATFLIQDYFRKFKKRKEQGLVGKYPAKNTTIALQAGLRTLHDIGPEIRRAISCDLQDDEPEETKREEEDDVFKRNGALLGNHVNHVNSDRRDSLQQTNTTHRPLHVQRPSIPPASDTEKPLFPPAGNSVCHNHHNHNSIGKQVPTSTNANLNNANMSKAAHGKRPSIGNLEHVSENGHHSSHKHDREPQRRSSVKRTRYYETYIRSDSGDEQLPTICREDPEIHGYFRDPHCLGEQEYFSSEECYEDDSSPTWSRQNYGYYSRYPGRNIDSERPRGYHHPQGFLEDDDSPVCYDSRRSPRRRLLPPTPASHRRSSFNFECLRRQSSQEEVPSSPIFPHRTALPLHLMQQQIMAVAGLDSSKAQKYSPSHSTRSWATPPATPPYRDWTPCYTPLIQVEQSEALDQVNGSLPSLHRSSWYTDEPDISYRTFTPASLTVPSSFRNKNSDKQRSADSLVEAVLISEGLGRYARDPKFVSATKHEIADACDLTIDEMESAASTLLNGNVRPRANGDVGPLSHRQDYELQDFGPGYSDEEPDPGRDEEDLADEMICITTL

SEQ ID NO: 904213 - protein, 2170 aa, Homo sapiens
MMMMMKKMQHQRQQQADHANEANYARGTRLPLSGEGPTSQPNSSKQTVLSWQAAIDAARQAKAAQTMSTSAPPPVGSLSQRKRQQYAKSKKQGNSSNSRPARALFCLSLNNPIRRACISIVEWKPFDIFILLAIFANCVALAIYIPFPEDDSNSTNHNLEKVEYAFLIIFTVETFLKIIAYGLLLHPNAYVRNGWNLLDFVIVIVGLFSVILEQLTKETEGGNHSSGKSGGFDVKALRAFRVLRPLRLVSGVPSLQVVLNSIIKAMVPLLHIALLVLFVIIIYAIIGLELFIGKMHKTCFFADSDIVAEEDPAPCAFSGNGRQCTANGTECRSGWVGPNGGITNFDNFAFAMLTVFQCITMEGWTDVLYWVNDAIGWEWPWVYFVSLIILGSFFVLNLVLGVLSGEFSKEREKAKARGDFQKLREKQQLEEDLKGYLDWITQAEDIDPENEEEGGEEGKRNTSMPTSETESVNTENVSGEGENRGCCGSLWCWWRRRGAAKAGPSGCRRWGQAISKSKLSRRWRRWNRFNRRRCRAAVKSVTFYWLVIVLVFLNTLTISSEHYNQPDWLTQIQDIANKVLLALFTCEMLVKMYSLGLQAYFVSLFNRFDCFVVCGGITETILVELEIMSPLGISVFRCVRLLRIFKVTRHWTSLSNLVASLLNSMKSIASLLLLLFLFIIIFSLLGMQLFGGKFNFDETQTKRSTFDNFPQALLTVFQILTGEDWNAVMYDGIMAYGGPSSSGMIVCIYFIILFICGNYILLNVFLAIAVDNLADAESLNTAQKEEAEEKERKKIARKESLENKKNNKPEVNQIANSDNKVTIDDYREEDEDKDPYPPCDVPVGEEEEEEEEDEPEVPAGPRPRRISELNMKEKIAPIPEGSAFFILSKTNPIRVGCHKLINHHIFTNLILVFIMLSSAALAAEDPIRSHSFRNTILGYFDYAFTAIFTVEILLKMTTFGAFLHKGAFCRNYFNLLDMLVVGVSLVSFGIQSSAISVVKILRVLRVLRPLRAINRAKGLKHVVQCVFVAIRTIGNIMIVTTLLQFMFACIGVQLFKGKFYRCTDEAKSNPEECRGLFILYKDGDVDSPVVRERIWQNSDFNFDNVLSAMMALFTVSTFEGWPALLYKAIDSNGENIGPIYNHRVEISIFFIIYIIIVAFFMMNIFVGFVIVTFQEQGEKEYKNCELDKNQRQCVEYALKARPLRRYIPKNPYQYKFWYVVNSSPFEYMMFVLIMLNTLCLAMQHYEQSKMFNDAMDILNMVFTGVFTVEMVLKVIAFKPKGYFSDAWNTFDSLIVIGSIIDVALSEADPTESENVPVPTATPGNSEESNRISITFFRLFRVMRLVKLLSRGEGIRTLLWTFIKSFQALPYVALLIAMLFFIYAVIGMQMFGKVAMRDNNQINRNNNFQTFPQAVLLLFRCATGEAWQEIMLACLPGKLCDPESDYNPGEEYTCGSNFAIVYFISFYMLCAFLIINLFVAVIMDNFDYLTRDWSILGPHHLDEFKRIWSEYDPEAKGRIKHLDVVTLLRRIQPPLGFGKLCPHRVACKRLVAMNMPLNSDGTVMFNATLFALVRTALKIKTEGNLEQANEELRAVIKKIWKKTSMKLLDQVVPPAGDDEVTVGKFYATFLIQDYFRKFKKRKEQGLVGKYPAKNTTIALQAGLRTLHDIGPEIRRAISCDLQDDEPEETKREEEDDVFKRNGALLGNHVNHVNSDRRDSLQQTNTTHRPLHVQRPSIPPASDTEKPLFPPAGNSVCHNHHNHNSIGKQVPTSTNANLNNANMSKAAHGKRPSIGNLEHVSENGHHSSHKHDREPQRRSSVKRSDSGDEQLPTICREDPEIHGYFRDPHCLGEQEYFSSEECYEDDSSPTWSRQNYGYYSRYPGRNIDSERPRGYHHPQGFLEDDDSPVCYDSRRSPRRRLLPPTPASHRRSSFNFECLRRQSSQEEVPSSPIFPHRTALPLHLMQQQIMAVAGLDSSKAQKYSPSHSTRSWATPPATPPYRDWTPCYTPLIQVEQSEALDQVNGSLPSLHRSSWYTDEPDISYRTFTPASLTVPSSFRNKNSDKQRSADSLVEAVLISEGLGRYARDPKFVSATKHEIADACDLTIDEMESAASTLLNGNVRPRANGDVGPLSHRQDYELQDFGPGYSDEEPDPGRDEEDLADEMICITTL

SEQ ID NO: 904214 - protein, 405 aa, Homo sapiens
MMMMMKKMQHQRQQQADHANEANYARGTRLPLSGEGPTSQPNSSKQTVLSWQAAIDAARQAKAAQTMSTSAPPPVGSLSQRKRQQYAKSKKQGNSSNSRPARALFCLSLNNPIRRACISIVEWKPFDIFILLAIFANCVALAIYIPFPEDDSNSTNHNLEKVEYAFLIIFTVETFLKIIAYGLLLHPNAYVRNGWNLLDFVIVIVGLFSVILEQLTKETEGGNHSSGKSGGFDVKALRAFRVLRPLRLVSGVPSLQVVLNSIIKAMVPLLHIALLVLFVIIIYAIIGLELFIGKMHKTCFFADSDIVAEEDPAPCAFSGNGRQCTANGTECRSGWVGPNGGITNFDNFAFAMLTVFQCITMEGWTDVLYWVNDAIGWEWPWVYFVSLIILGSFFVLNLVLGVLSG

SEQ ID NO: 904215 - protein, 2179 aa, Homo sapiens; identical to SEQ ID NO: 904211

SEQ ID NO: 904216 - protein, 2170 aa, Homo sapiens; identical to SEQ ID NO: 904213

SEQ ID NO: 904217 - protein, 405 aa, Homo sapiens
MMMMMKKMQHQRQQQADHANEANYARGTRLPLSGEGPTSQPNSSKQTVLSWQAAIDAARQAKAAQTMSTSAPPPVGSLSQRKRQQYAKSKKQGNSSNSRPARALFCLSLNNPIRRACISIVEWKPFDIFILLAIFANCVALAIYIPFPEDDSNSTNHNLEKVEYAFLIIFTVETFLKIIAYGLLLHPNAYVRNGWNLLDFVIVIVGLFSVILEQLTKETEGGNHSSGKSGGFDVKALRAFRVLRPLRLVSGVPSLQVVLNSIIKAMVPLLHIALLVLFVIIIYAIIGLELFIGKMHKTCFFADSDIVAEEDPAPCAFSGNGRQCTANGTECRSGWVGPNGGITNFDNFAFAMLTVFQCITMEGWTDVLYWMNDAMGFELPWVYFVSLVIFGSFFVLNLVLGVLSG

SEQ ID NO: 904218 - protein, 300 aa, Homo sapiens
MAKDQAVENILVSPVVVASSLGLVSLGGKATTASQAKAVLSAEQLRDEEVHAGLGELLRSLSNSTARNVTWKLGSRLYGPSSVSFADDFVRSSKQHYNCEHSKINFRDKRSALQSINEWAAQTTDGKLPEVTKDVERTDGALLVNAMFFKPHWDEKFHHKMVDNRGFMVTRSYTVGVMMMHRTGLYNYYDDEKEKLQIVEMPLAHKLSSLIILMPHHVEPLERLEKLLTKEQLKIWMGKMQKKAVAISLPKGVVEVTHDLQKHLAGLGLTEAIDKNKADLSRMSGKKDLYLAQRVPRHRL

SEQ ID NO: 904219 - protein, 300 aa, Homo sapiens; identical to SEQ ID NO: 904218

SEQ ID NO: 904220 - protein, 300 aa, Homo sapiens; identical to SEQ ID NO: 904218

SEQ ID NO: 904221 - protein, 300 aa, Homo sapiens; identical to SEQ ID NO: 904218

SEQ ID NO: 904222 - protein, 411 aa, Homo sapiens
GLPAEIFFLYWLCNRTPHAALRRGSVLLMKKAGIDLPLRQFPGPPWCTQTTSWPCAPSCFSAPSASWRRPWPPRVKKPAAAAAPGTAEKLSPKAATLAERSAGLAFSLYQAMAKDQAVENILVSPVVVASSLGLVSLGGKATTASQAKAVLSAEQLRDEEVHAGLGELLRSLSNSTARNVTWKLGSRLYGPSSVSFADDFVRSSKQHYNCEHSKINFRDKRSALQSINEWAAQTTDGKLPEVTKDVERTDGALLVNAMFFKPHWDEKFHHKMVDNRGFMVTRSYTVGVMMMHRTGLYNYYDDEKEKLQIVEMPLAHKLSSLIILMPHHVEPLERLEKLLTKEQLKIWMGKMQKKAVAISLPKGVVEVTHDLQKHLAGLGLTEAIDKNKADLSRMSGKKDLYLAQRVPRHRL

SEQ ID NO: 904223 - protein, 426 aa, Homo sapiens
ARAGRDSRSRAFCLLEAALAAEVKKPAAAAAPGTAEKLSPKAATLAERSAGLAFSLYRPPWCTQTTSWPCAPSCFSAPSASWRRPWPPRVKKPAAAAAPGTAEKLSPKAATLAERSAGLAFSLYQAMAKDQAVENILVSPVVVASSLGLVSLGGKATTASQAKAVLSAEQLRDEEVHAGLGELLRSLSNSTARNVTWKLGSRLYGPSSVSFADDFVRSSKQHYNCEHSKINFRDKRSALQSINEWAAQTTDGKLPEVTKDVERTDGALLVNAMFFKPHWDEKFHHKMVDNRGFMVTRSYTVGVMMMHRTGLYNYYDDEKEKLQIVEMPLAHKLSSLIILMPHHVEPLERLEKLLTKEQLKIWMGKMQKKAVAISLPKGVVEVTHDLQKHLAGLGLTEAIDKNKADLSRMSGKKDLYLAQRVPRHRL

SEQ ID NO: 904224 - protein, 300 aa, Homo sapiens; identical to SEQ ID NO: 904218

SEQ ID NO: 904225 - protein, 300 aa, Homo sapiens; identical to SEQ ID NO: 904218

SEQ ID NO: 904226 - protein, 300 aa, Homo sapiens; identical to SEQ ID NO: 904218

SEQ ID NO: 904227 - protein, 54 aa, Homo sapiens
TVGSLAPISRGLVAARELRVVVGEEGLGLQDHPVCAILTAHRGARKPLPGHALP

SEQ ID NO: 904228 - protein, 143 aa, Homo sapiens
MAKDQAVENILVSPVVVASSLGLVSLGGKATTASQAKAVLSAEQLRDEEVHAGLGELLRSLSNSTARNVTWKLGSRLYGPSSVSFADDFVRSSKQHYNCEHSKINFRDKRSALQSINEWAAQTTDGKLPEVTKDVERTDGAPC

SEQ ID NO: 904229 - protein, 300 aa, Homo sapiens; identical to SEQ ID NO: 904218

SEQ ID NO: 904230 - protein, 383 aa, Homo sapiens
MKKAGIDLPLRQFPGPPWCTQTTSWPCAPSCFSAPSASWRRPWPPRVKKPAAAAAPGTAEKLSPKAATLAERSAGLAFSLYQAMAKDQAVENILVSPVVVASSLGLVSLGGKATTASQAKAVLSAEQLRDEEVHAGLGELLRSLSNSTARNVTWKLGSRLYGPSSVSFADDFVRSSKQHYNCEHSKINFRDKRSALQSINEWAAQTTDGKLPEVTKDVERTDGALLVNAMFFKPHWDEKFHHKMVDNRGFMVTRSYTVGVMMMHRTGLYNYYDDEKEKLQIVEMPLAHKLSSLIILMPHHVEPLERLEKLLTKEQLKIWMGKMQKKAVAISLPKGVVEVTHDLQKHLAGLGLTEAIDKNKADLSRMSGKKDLYLAQRVPRHRL

SEQ ID NO: 904231 - protein, 300 aa, Homo sapiens; identical to SEQ ID NO: 904218

SEQ ID NO: 904232 - protein, 300 aa, Homo sapiens; identical to SEQ ID NO: 904218

SEQ ID NO: 904233 - protein, 159 aa, Homo sapiens
LTLCFAPTTAHWDEKFHHKMVDNRGFMVTRSYTVGVMMMHRTGLYNYYDDEKEKLQIVEMPLAHKLSSLIILMPHHVEPLERLEKLLTKEQLKIWMGKMQKKAVAISLPKGVVEVTHDLQKHLAGLGLTEAIDKNKADLSRMSGKKDLYLAQRVPRHRL

SEQ ID NO: 904234 - protein, 88 aa, Homo sapiens
DVRRRQKGGEGVGGGAGHGPVDQQPAFELDTDGNPFDQDIYGREELRSPKLFYADHPFIFLVRDTQSGSLLFIGRLVRPKGDKMRDEL

SEQ ID NO: 904235 - protein, 199 aa, Homo sapiens
MADLEEQLSDEEKVRIAAKFIIHAPPGEFNEVFNDVRLLLNNDNLLREGAAHAFAQYNLDQFTPVKIEGYEDQVLITEHGDLGNGKFLDPKNRICFKFDHLRKEATDPRPCEVENAVESWRTSVETALRAYVKEHYPNGVCTVYGKKIDGQQTIIACIESHQFQAKNFWNGRWRSEWKFTITPFNHSSGWHLENSGSLL

SEQ ID NO: 904236 - protein, 199 aa, Homo sapiens; identical to SEQ ID NO: 904235

SEQ ID NO: 904237 - protein, 155 aa, Homo sapiens
MADLEEQLSDEEKVRIAAKFIIHAPPGEFNEVFNDVRLLLNNDNLLREGAAHAFAQYNLDQFTPVKIEGYEDQVLITEHGDLGNGKFLDPKNRICFKFDHLRKEATDPRPCEVENAVESWRTSVETALRAYVKEHYPNGVCTCKSSVAALCVCFV

SEQ ID NO: 904238 - protein, 151 aa, Homo sapiens
  misc_feature (39)..(39): Xaa can be any naturally occurring amino acid
  misc_feature (45)..(45): Xaa can be any naturally occurring amino acid
  misc_feature (71)..(71): Xaa can be any naturally occurring amino acid
  misc_feature (121)..(121): Xaa can be any naturally occurring amino acid
MADLEEQLSDEEKVRIAAKFIIHAPPGEFNEVFNDCFGXYCLIMXQSSQGQGSSPMAFATAINLGGTQGFXNRSPRLTNTTSTRVTERISATWIKPEPWRLGKWQSFRIQRTESVLNLVHXTDTEGPKNLLGKFSPKRETPPFWGFGAKRG

SEQ ID NO: 904239 - protein, 199 aa, Homo sapiens; identical to SEQ ID NO: 904235

SEQ ID NO: 904240 - protein, 199 aa, Homo sapiens; identical to SEQ ID NO: 904235

SEQ ID NO: 904241 - protein, 199 aa, Homo sapiens; identical to SEQ ID NO: 904235

SEQ ID NO: 904242 - protein, 199 aa, Homo sapiens; identical to SEQ ID NO: 904235

SEQ ID NO: 904243 - protein, 199 aa, Homo sapiens; identical to SEQ ID NO: 904235

SEQ ID NO: 904244 - protein, 117 aa, Homo sapiens
MVVGGQNGSLQSLLSTTQVVGILKIQVHYYEDGNVQLVSHKDIQDSLTVSNEVQTAKEFIKIVEAAENEYQTAISENYQTMSDTTFKALRRQLPVTRTKIDWNKILSYKIGKEMQNA

SEQ ID NO: 904245 - protein, 117 aa, Homo sapiens; identical to SEQ ID NO: 904244

SEQ ID NO: 904246 - protein, 268 aa, Homo sapiens
MADLEEQLSDEEKVRIAAKFIIHAPPGEFNEVFNDVRLLLNNDNLLREGAAHAFAQYNLDQFTPVKIEGYEDQVLITEHGDLGNGKFLDPKNRICFKFDHLRKEATDPRPCEVENAVESWRTSVETALRAYVKEHYPNGVCTVYGKKIDGQQTIIACIESHQFQAKNFWNGRWRSEWKFTITPFNHSSGWHLENSDSLTVSNEVQTAKEFIKIVEAAENEYQTAISENYQTMSDTTFKALRRQLPVTRTKIDWNKILSYKIGKEMQNA

SEQ ID NO: 904247 - protein, 199 aa, Homo sapiens; identical to SEQ ID NO: 904235

SEQ ID NO: 904248 - protein, 234 aa, Homo sapiens
  misc_feature (207)..(207): Xaa can be any naturally occurring amino acid
MADLEEQLSDEEKVRIAAKFIIHAPPGEFNEVFNDVRLLLNNDNLLREGAAHAFAQYNLDQFTPVKIEGYEDQVLITEHGDLGNGKFLDPKNRICFKFDHLRKEATDPRPCEVENAVESWRTSVETALRAYVKEHYPNGVCTVYGKKIDGQQTIIACIESHQFQAKNFWNGRWRSEWKFTITPFNHSSGWHLENSDSLTVSIESATXKEFIKIVEAAEMNTRLPSVRIIRPMST

SEQ ID NO: 904249 - protein, 163 aa, Homo sapiens
  misc_feature (162)..(162): Xaa can be any naturally occurring amino acid
MADLEEQLSDEEKVRIAAKFIIHAPPGEFNEVFNDVRLLLNNDNLLREGAAHAFAQYNLDQFTPVKIEGYEDQVLITEHGDLGNGKFLDPKNRICFKFDHLRKEATDPRPCEVENAVESWRTSVETALRAYVKEHYPNGVCTRSYANAASAPKKLAVRTAKXS

SEQ ID NO: 904250 - protein, 199 aa, Homo sapiens; identical to SEQ ID NO: 904235

SEQ ID NO: 904251 - protein, 199 aa, Homo sapiens; identical to SEQ ID NO: 904235

SEQ ID NO: 904252 - protein, 199 aa, Homo sapiens; identical to SEQ ID NO: 904235

SEQ ID NO: 904253 - protein, 117 aa, Homo sapiens; identical to SEQ ID NO: 904244

SEQ ID NO: 904254 - protein, 174 aa, Homo sapiens
MADLEEQLSDEEKVRIAAKFIIHAPPGEFNEVFNDVRLLLNNDNLLREGAAHAFAQYNLDQFTPVKIEGYEDQVLITEHGDLGNGKFLDPKNRICFKFDHLRKEATDPRPCEVENAVESWRTSVETALRAYVKEHYPNGVCTVYGKKIDGQQTIIACIESHQFQAKNFCCCFYF

SEQ ID NO: 904255 - protein, 179 aa, Homo sapiens
MADLEEQLSDEEKVRIAAKFIIHAPPGEFNEVFNDVRLLLNNDNLLREGAAHAFAQYNLDQFTPVKIEGYEDQVLITEHGDLGNGKFLDPKNRICFKFDHLRKEATDPRPCEVENAVESWRTSVETALRAYVKEHYPNGVCTLLFLFLRNGRWRSEWKFTITPFNHSSGWHLENSGSLL

SEQ ID NO: 904256 - protein, 248 aa, Homo sapiens
MWLCPLALNLILMAASGAVCEVKDVCVGSPGIPGTPGSHGLPGRDGRDGLKGDPGPPGPMGPPGEMPCPPGNDGLPGAPGIPGECGEKGEPGERGPPGLPAHLDEELQATLHDFRHQILQTRGALSLQGSIMTVGEKVFSSNGQSITFDAIQEACARAGGRIAVPRNPEENEAIASFVKKYNTYAYVGLTEGPSPGDFRYSDGTPVNYTNWYRGEPAGRGKEQCVEMYTDGQWNDRNCLYSRLTICEF

SEQ ID NO: 904257 - protein, 263 aa, Homo sapiens
MRPCQVPGAATGPRAMWLCPLALNLILMAASGAVCEVKDVCVGSPGIPGTPGSHGLPGRDGRDGLKGDPGPPGPMGPPGEMPCPPGNDGLPGAPGIPGECGEKGEPGERGPPGLPAHLDEELQATLHDFRHQILQTRGALSLQGSIMTVGEKVFSSNGQSITFDAIQEACARAGGRIAVPRNPEENEAIASFVKKYNTYAYVGLTEGPSPGDFRYSDGTPVNYTNWYRGEPAGRGKEQCVEMYTDGQWNDRNCLYSRLTICEF

SEQ ID NO: 904258 - protein, 275 aa, Homo sapiens
LPYPLTGRQRPKQLEALCVGAATGPRAMWLCPLALNLILMAASGAVCEVKDVCVGSPGIPGTPGSHGLPGRDGRDGLKGDPGPPGPMGPPGEMPCPPGNDGLPGAPGIPGECGEKGEPGERGPPGLPAHLDEELQATLHDFRHQILQTRGALSLQGSIMTVGEKVFSSNGQSITFDAIQEACARAGGRIAVPRNPEENEAIASFVKKYNTYAYVGLTEGPSPGDFRYSDGTPVNYTNWYRGEPAGRGKEQCVEMYTDGQWNDRNCLYSRLTICEF

SEQ ID NO: 904259 - protein, 117 aa, Homo sapiens
MTVGEKVFSSNGQSITFDAIQEACARAGGRIAVPRNPEENEAIASFVKKYNTYAYVGLTEGPSPGDFRYSDGTPVNYTNWYRGEPAGRGKEQCVEMYTDGQWNDRNCLYSRLTICEF

SEQ ID NO: 904260 - protein, 226 aa, Homo sapiens
SPARDSWSKRPKQLEALCVGAATGPRAMWLCPLALNLILMAASGAVCEVKDVCVGSPGIPGECGEKGEPGERGPPGLPAHLDEELQATLHDFRHQILQTRGALSLQGSIMTVGEKVFSSNGQSITFDAIQEACARAGGRIAVPRNPEENEAIASFVKKYNTYAYVGLTEGPSPGDFRYSDGTPVNYTNWYRGEPAGRGKEQCVEMYTDGQWNDRNCLYSRLTICEF

SEQ ID NO: 904261 - protein, 248 aa, Homo sapiens; identical to SEQ ID NO: 904256

SEQ ID NO: 904262 - protein, 248 aa, Homo sapiens; identical to SEQ ID NO: 904256

SEQ ID NO: 904263 - protein, 248 aa, Homo sapiens; identical to SEQ ID NO: 904256

SEQ ID NO: 904264 - protein, 248 aa, Homo sapiens; identical to SEQ ID NO: 904256

SEQ ID NO: 904265 - protein, 248 aa, Homo sapiens; identical to SEQ ID NO: 904256

SEQ ID NO: 904266 - protein, 125 aa, Homo sapiens
MLQLVKNLRCIRRIVSPVEPVCMTSSVDDDMEPHLIPHLVQFLHLQMAAVRSWGRRTLQSHTKCLPPGPLSSLSATQCHQDEQSWPSIMTERGRLRGSPDCAELRTQWRFSGTLRSLWQAWSGSP

SEQ ID NO: 904267 - protein, 248 aa, Homo sapiens; identical to SEQ ID NO: 904256

SEQ ID NO: 904268 - protein, 157 aa, Homo sapiens
MRPCQVPGAATGPRAMWLCPLALNLILMAASGAVCEVKDVCVGSPGIPGTPGSHGLPGRDGRDGLKGDPGPPGPMGPPGEMPCPPGNDGLPGAPGIPGECGEKGEPGERGPPAMWTTGKRRPLSSSSLKKSFPSGIRSDLSTVGRTPPATRASYRIR

SEQ ID NO: 904269 - protein, 248 aa, Homo sapiens; identical to SEQ ID NO: 904256

SEQ ID NO: 904270 - protein, 248 aa, Homo sapiens; identical to SEQ ID NO: 904256

SEQ ID NO: 904271 - protein, 275 aa, Homo sapiens
RQHGIPGARDPKQLEALCVGAATGPRAMWLCPLALNLILMAASGAVCEVKDVCVGSPGIPGTPGSHGLPGRDGRDGLKGDPGPPGPMGPPGEMPCPPGNDGLPGAPGIPGECGEKGEPGERGPPGLPAHLDEELQATLHDFRHQILQTRGALSLQGSIMTVGEKVFSSNGQSITFDAIQEACARAGGRIAVPRNPEENEAIASFVKKYNTYAYVGLTEGPSPGDFRYSDGTPVNYTNWYRGEPAGRGKEQCVEMYTDGQWNDRNCLYSRLTICEF

SEQ ID NO: 904272 - protein, 248 aa, Homo sapiens; identical to SEQ ID NO: 904256

SEQ ID NO: 904273 - protein, 248 aa, Homo sapiens; identical to SEQ ID NO: 904256

SEQ ID NO: 904274 - protein, 248 aa, Homo sapiens; identical to SEQ ID NO: 904256

SEQ ID NO: 904275 - protein, 248 aa, Homo sapiens; identical to SEQ ID NO: 904256

SEQ ID NO: 904276 - protein, 248 aa, Homo sapiens; identical to SEQ ID NO: 904256

SEQ ID NO: 904277 - protein, 76 aa, Homo sapiens
GYRGPYATLSDSHSSDGPRYSFRPYIQLIMACRTPVGILTPVMNARRPLLSIGLSTVVDVRRRPYIGICLPGCPSR

SEQ ID NO: 904278 - protein, 260 aa, Homo sapiens
MRPCQVPGAATGPRAMWLCPLALNLILMAASGAVCEVKDVCVGSPGIPGTPGSHGLPGRDGRDGLKGDPGPPGPMGPPGEMPCPPGNDGLPGAPGIPGECGEKGEPGERGPPGLPAHLDEELQATLHDFRHQILQTRGALSLQGSIMTVGEKVFSSNGQSITFDAIQEACARAGGRIAVPRNPEENEAIASFVKKYNTYAYVGLTEGPSPGDFRYSDGTPVNYTNWYRGEPAGRGKEQCVEMYTDGQWNDRNCLYSRLTI

SEQ ID NO: 904279 - protein, 156 aa, Homo sapiens
RACDPPSGRKRLTMATATEQWVLVEMVQALYEAPAYHLILEGILILWIIRLLFSKTYKLQERSDLTVKEKEELIEEWQPEPLVPPVPKDHPALNYNIVSGPPSHKTVVNGKECINFASFNFLGLLDNPRVKAAALASLKKYGVGTCGPRGFYGTFE

SEQ ID NO: 904280 - protein, 486 aa, Homo sapiens
RACDPPSGRKRLTMATATEQWVLVEMVQALYEAPAYHLILEGILILWIIRLLFSKTYKLQERSDLTVKEKEELIEEWQPEPLVPPVPKDHPALNYNIVSGPPSHKTVVNGKECINFASFNFLGLLDNPRVKAAALASLKKYGVGTCGPRGFYGTFDVHLDLEDRLAKFMKTEEAIIYSYGFATIASAIPAYSKRGDIVFVDRAACFAIQKGLQASRSDIKLFKHNDMADLERLLKEQEIEDQKNPRKARVTRRFIVVEGLYMNTGTICPLPELVKLKYKYKARIFLEESLSFGVLGEHGRGVTEHYGINIDDIDLISANMENALASIGGFCCGRSFVIDHQRLSGQGYCFSASLPPLLAAAAIEALNIMEENPGIFAVLKEKCGQIHKALQGISGLKVVGESLSPAFHLQLEESTGSREQDVRLLQEIVDQCMNRSIALTQARYLEKEEKCLPPPSIRVVVTVEQTEEELERAASTIKEVAQAVLL

SEQ ID NO: 904281 - protein, 351 aa, Homo sapiens
MYDFKYSEFPGSHQRRPAFYDVHLDLEDRLAKFMKTEEAIIYSYGFATIASAIPAYSKRGDIVFVDRAACFAIQKGLQASRSDIKLFKHNDMADLERLLKEQEIEDQKNPRKARVTRRFIVVEGLYMNTGTICPLPELVKLKYKYKARIFLEESLSFGVLGEHGRGVTEHYGINIDDIDLISANMENALASIGGFCCGRSFVIDHQRLSGQGYCFSASLPPLLAAAAIEALNIMEENPGIFAVLKEKCGQIHKALQGISGLKVVGESLSPAFHLQLEESTGSREQDVRLLQEIVDQCMNRSIALTQARYLEKEEKCLPPPSIRVVVTVEQTEEELERAASTIKEVAQAVLL

SEQ ID NO: 904282 - protein, 260 aa, Homo sapiens [sequence omitted]

SEQ ID NO: 904283 - protein, 366 aa, Homo sapiens
VVTSGWFARVKAAALASLKKYGVGTCGPRGFYGTFDVHLDLEDRLAKFMKTEEAIIYSYGFATIASAIPAYSKRGDIVFVDRAACFAIQKGLQASRSDIKLFKHNDMADLERLLKEQEIEDQKNPRKARVTRRFIVVEGLYMNTGTICPLPELVKLKYKYKARIFLEESLSFGVLGEHGRGVTEHYGINIDDIDLISANMENALASIGGFCCGRSFVIDHQRLSGQGYCFSASLPPLLAAAAIEALNIMEENPGIFAVLKEKCGQIHKALQGISGLKVVGESLSPAFHLQLEESTGSREQDVRLLQEIVDQCMNRSIALTQARYLEKEEKCLPPPSIRVVVTVEQTEEELERAASTIKEVAQAVLL

SEQ ID NO: 904284 - protein, 112 aa, Homo sapiens
MWGRRISQLSGVYRCHQGISGLKVVGESLSPAFHLQLEESTGSREQDVRLLQEIVDQCMNRSIALTQARYLEKEEKCLPPPSIRVVVTVEQTEEELERAASTIKEVAQAVLL

SEQ ID NO: 904285 - protein, 280 aa, Homo sapiens
RACDPPSGRKRLTMATATEQWVLVEMVQALYEAPAYHLILEGILILWIIRLLFSKTYKLQERSDLTVKEKEELIEEWQPEPLVPPVPKDHPALNYNIVSGPPSHKTVVNGKECINFASFNFLGLLDNPRVKAAALASLKKYGVGTCGPRGFYGTFDVHLDLEDRLAKFMKTEEAIIYSYGFATIASAIPAYSKRGDIVFVDRAACFAIQKGLQASRSDIKLFKHNDMADLERLLKEQEIEDQKNPRKARVTRRFIVVEGLYMNTGTICPLPELVSNHVQL

SEQ ID NO: 904286 - protein, 137 aa, Homo sapiens
RACDPPSGRKRLTMATATEQWVLVEMVQALYEAPAYHLILEGILILWIIRLLFSKTYKLQERSDLTVKEKEELIEEWQPEPLVPPVPKDHPALNYNIVSGPPSHKTVVNGKECINFASFNFLGLLDNPRVKVSSTYC

SEQ ID NO: 904287 - protein, 150 aa, Homo sapiens
MATATEQWVLVEMVQALYEAPAYHLILEGILILWIIRLLFSKTYKLQERSDLTVKEKEELIEEWQPEPLVPPVPKDHPALNYNIVSGPPSHKTVVNGKECINFASFNFLGLLDNPRVKAAALASLKKYGVGTCGPRGFYGTFGKFLLCSL

SEQ ID NO: 904288 - protein, 486 aa, Homo sapiens; identical to SEQ ID NO: 904280

SEQ ID NO: 904289 - protein, 486 aa, Homo sapiens; identical to SEQ ID NO: 904280

SEQ ID NO: 904290 - protein, 318 aa, Homo sapiens
MKTEEAIIYSYGFATIASAIPAYSKRGDIVFVDRAACFAIQKGLQASRSDIKLFKHNDMADLERLLKEQEIEDQKNPRKARVTRRFIVVEGLYMNTGTICPLPELVKLKYKYKARIFLEESLSFGVLGEHGRGVTEHYGINIDDIDLISANMENALASIGGFCCGRSFVIDHQRLSGQGYCFSASLPPLLAAAAIEALNIMEENPGIFAVLKEKCGQIHKALQGISGLKVVGESLSPAFHLQLEESTGSREQDVRLLQEIVDQCMNRSIALTQARYLEKEEKCLPPPSIRVVVTVEQTEEELERAASTIKEVAQAVLL

SEQ ID NO: 904291 - protein, 486 aa, Homo sapiens
RACDPPSGRKRLTMATATEQWVLVEMVQALYEAPAYHLILEGILILWIIRLLFSKTYKLQERSDLTVKEKEELIEEWQPEPLVPPVPKDHPALNYNIVSGPPSHKTVVNGKECINFASFNFLGLLDNPRVKAAALASLKKYGVGTCGPRGFYGTFDVHLDLEDRLAKFMKTEEAIIYSYGFATIASAIPAYSKRGDIVFVDRAACFAIQKGLQASRSDIKLFKHNDMADLERLLKEQEIEDQKNPRKARVTRRFIVVEGLYMNTGTICPLPELVKLKYKYKARIFLEESLSFGVLGEHGRGVTEHYGINIDDIDLISANMENALASIGGFCCGRSFVIDHQRLSGQGYCFSASLPPLLAAAAIEALNIMEENPGIFAVLKEKCGQIHKALQGISGLKVVGESLSPAFHLQLEESTGSREQDVRLLQEIVDQCMNRSIALTQARYLEKEEKCLPPPSIRVVVTVEQTEHNWSSFRTKAATFTPPLRS

SEQ ID NO: 904292 - protein, 239 aa, Homo sapiens
RACDPPSGRKRLTMATATEQWVLVEMVQALYEAPAYHLILEGILILWIIRLLFSKTYKLQERSDLTVKEKEELIEEWQPEPLVPPVPKDHPALNYNIVSGPPSHKTVVNGKECINFASFNFLGLLDNPRVKAAALASLKKYGVGTCGPRGFYGTFDVHLDLEDRLAKFMKTEEAIIYSYGFATIASAIPAYSKRGDIVFVYSTTRAASYAKSRRGVTRMKEATGGYPKQNEMAVPEKRR

SEQ ID NO: 904293 - protein, 100 aa, Homo sapiens
RACDPPSGRKRLTMATATEQWVLVEMVQALYEAPAYHLILEGILILWIIRLLFSKTYKLQERSDLTVKEKEELIEEWQPEPLVPPVPKDHPALNYNIVSG

SEQ ID NO: 904294 - protein, 105 aa, Homo sapiens
MLDYRRPEVLIYNGQLDIIVAAALTERSLMGMDWKGSQEYKKAEKKVWKIFKSDSEVAGYIRQAGDFHQVIIRGGGHILPYDQPLRAFDMINRFIYGKGWDPYVG

SEQ ID NO: 904295 - protein, 472 aa, Homo sapiens [sequence omitted]

SEQ ID NO: 904296 - protein, 472 aa, Homo sapiens [sequence omitted]

SEQ ID NO: 904297 - protein, 406 aa, Homo sapiens
MGCFAPYTEVFPCHLRETQDSHYFSPIQPEDAPVVLWLQGGPGGSSMFGLFVEHGPYVVTSNMTLRDRDFPWTTTLSMLYIDNPVGTGFSFTDDTHGYAVNEDDVARDLYSALIQFFQIFPEYKNNDFYVTGESYAGKYVPAIAHLIHSLNPVREVKINLNGIAIGDGYSDPESIIGGYAEFLYQIGLLDEKQKKYFQKQCHECIEHIRKQNWFEAFEILDKLLDGDLTSDPSYFQNVTGCSNYYNFLRCTEPEDQLYYVKFLSLPEVRQAIHVGNQTFNDGTIVEKYLREDTVQSVKPWLTEIMNNYKVLIYNGQLDIIVAAALTERSLMGMDWKGSQEYKKAEKKVWKIFKSDSEVAGYIRQAGDFHQVIIRGGGHILPYDQPLRAFDMINRFIYGKGWDPYVG

SEQ ID NO: 904298 - protein, 472 aa, Homo sapiens [sequence omitted]

SEQ ID NO: 904299 - protein, 91 aa, Homo sapiens
MNFSGLTFSPIDNRDYLFPSIGVLIYNGQLDIIVAAALTERSLMGMDWKGSQEYKKAEKKVWKIFKSDSEVAGYIRQAGDFHQVGRCLGAG

SEQ ID NO: 904300 - protein, 406 aa, Homo sapiens
MKSYAGFLTVNKTYNSNLFFWFFPAQIQPEDAPVVLWLQGGPGGSSMFGLFVEHGPYVVTSNMTLRDRDFPWTTTLSMLYIDNPVGTGFSFTDDTHGYAVNEDDVARDLYSALIQFFQIFPEYKNNDFYVTGESYAGKYVPAIAHLIHSLNPVREVKINLNGIAIGDGYSDPESIIGGYAEFLYQIGLLDEKQKKYFQKQCHECIEHIRKQNWFEAFEILDKLLDGDLTSDPSYFQNVTGCSNYYNFLRCTEPEDQLYYVKFLSLPEVRQAIHVGNQTFNDGTIVEKYLREDTVQSVKPWLTEIMNNYKVLIYNGQLDIIVAAALTERSLMGMDWKGSQEYKKAEKKVWKIFKSDSEVAGYIRQAGDFHQVIIRGGGHILPYDQPLRAFDMINRFIYGKGWDPYVG

SEQ ID NO: 904301 - protein, 406 aa, Homo sapiens; identical to SEQ ID NO: 904297

SEQ ID NO: 904302 - protein, 131 aa, Homo sapiens
GGCSGAGARAAAVALLGAPAVTAMAAPCLLRQGRAGALKTMLQEAQVFRGLASTVSLSAESGKSEKGQPQNSKKQSPPKKPAPVPAEPFDNTTYKNLQHHDYSTYTFLDLNLELSKFRMPQPSSGRESPRH

SEQ ID NO: 904303 - protein, 517 aa, Homo sapiens
GGCSGAGARAAAVALLGAPAVTAMAAPCLLRQGRAGALKTMLQEAQVFRGLASTVSLSAESGKSEKGQPQNSKKQSPPKNVVEPKERGKLLATQTAAELSKNLSSPSSYPPAVNKGRKVASPSPSGSVLFTDEGVPKFLSRKTLVEFPQKVLSPFRKQGSDSEARQVGRKVTSPSSSSSSSSSDSESDDEADVSEVTPRVVSKGRGGLRKPEASHSFENRAPRVTVSAKEKTLLQKPHVDITDPEKPHQPKKKGSPAKPSEGRENARPKTTMPRSQVDEEFLKQSLKEKQLQKTFRLNEIDKESQKPFEVKGPLPVHTKSGLSAPPKGSPAPAVLAEEARAEGQLQASPPGAAEGHLEKPVPEPQRKAAPPLPRKETSGTQGIEGHLKGGQAIVEDQIPPSNLETVPVENNHGFHEKTAALKLEAEGEAMEDAAAPGNDRGGTQGVPTPHRRYSPCGDWKDASSLKPAPVPAEPFDNTTYKNLQHHDYSTYTFLDLNLELSKFRMPQPSSGRESPRH

SEQ ID NO: 904304 - protein, 443 aa, Homo sapiens
GGCSGAGARAAAVALLGAPAVTAMAAPCLLRQGRAGALKTMLQEAQVFRGLASTVSLSAESGKSEKGQPQNSKKQSPPKNVVEPKERGKLLATQTAAELSKNLSSPSSYPPAVNKGRKVASPSPSGSVLFTDEGVPKFLSRKTLVEFPQKVLSPFRKQGSDSEARQVGRKVTSPSSSSSSSSSDSESDDEADVSEVTPRVVSKGRGGLRKPEASHSFENRAPRVTVSAKEKTLLQKPHVDITDPEKPHQPKKKGSPAKPSEGRENARPKTTMPRSQVDEEFLKQSLKEKQLQKTFRLNEIDKESQKPFEVKGPLPVHTKSGLSAPPKGSPAPAVLAEEARAEGQLQASPPGAAEGHLEKPVPEPQRKAAPPLPRKETSGTQGIEGHLKGGQAIVEDQIPPSNLETVPVENNHGFHEKTAALKNLELSKFRMPQPSSGRESPRH

SEQ ID NO: 904305 - protein, 455 aa, Homo sapiens
RLFRRGCARSCCGPAWCARCHRHGCPVFAAARTSRGAEDVVEPKERGKLLATQTAAELSKNLSSPSSYPPAVNKGRKVASPSPSGSVLFTDEGVPKFLSRKTLVEFPQKVLSPFRKQGSDSEARQVGRKVTSPSSSSSSSSSDSESDDEADVSEVTPRVVSKGRGGLRKPEASHSFENRAPRVTVSAKEKTLLQKPHVDITDPEKPHQPKKKGSPAKPSEGRENARPKTTMPRSQVDEEFLKQSLKEKQLQKTFRLNEIDKESQKPFEVKGPLPVHTKSGLSAPPKGSPAPAVLAEEARAEGQLQASPPGAAEGHLEKPVPEPQRKAAPPLPRKETSGTQGIEGHLKGGQAIVEDQIPPSNLETVPVENNHGFHEKTAALKLEAEGEAMEDAAAPGNDRGGTQEPAPVPAEPFDNTTYKNLQHHDYSTYTFLDLNLELSKFRMPQPSSGRESPRH

SEQ ID NO: 904306 - protein, 112 aa, Homo sapiens
GGCSGAGARAAAVALLGAPAVTAMAAPCLLRQGRAGALKTMLQEAQVFRGLASTVSLSAESGKSEKGQPQNSKKQSPPKNVVEPKERGKLLATQTAAELSKNLSSPSSYPPA

SEQ ID NO: 904307 - protein, 496 aa, Homo sapiens
GGCSGAGARAAAVALLGAPAVTAMAAPCLLRQGRAGALKTMLQEAQVFRGLASTVSLSAESGKSEKGQPQNSKKQSPPKNVVEPKERGKLLATQTAAELSKNLSSPSSYPPAVNKGRKVASPSPSGSVLFTDEGVPKFLSRKTLVEFPQKVLSPFRKQGSDSEARQVGRKVTSPSSSSSSSSSDSESDDEADVSEVTPRVVSKGRGGLRKPEASHSFENRAPRVTVSAKEKTLLQKPHVDITDPEKPHQPKKKGSPAKPSEGRENARPKTTMPRSQVDEEFLKQSLKEKQLQKTFRLNEIDKESQKPFEVKGPLPVHTKSGLSAPPKGSPAPAVLAEEARAEGQLQASPPGAAEGHLEKPVPEPQRKAAPPLPRKETSGTQGIEGHLKGGQAIVEDQIPPSNLETVPVENNHGFHEKTAALKLEAEGEAMEDAAAPGNDRGGTQEPAPVPAEPFDNTTYKNLQHHDYSTYTFLDLNLELSKFRMPQPSSGRESPRH

SEQ ID NO: 904308 - protein, 382 aa, Homo sapiens
GGCSGAGARAAAVALLGAPAVTAMAAPCLLRQGRAGALKTMLQEAQVFRGLASTVSLSAESGKSEKGQPQNSKKQSPPKNVVEPKERGKLLATQTAAELSKNLSSPSSYPPAVNKGRKVASPSPSGSVLFTDEGVPKFLSRKTLVEFPQKVLSPFRKQGSDSEARQVGRKVTSPSSSSSSSSSDSESDDEADVSEVTPRVVSKGRGGLRKPEASHSFENRAPRVTVSAKEKTLLQKPHVDITDPEKPHQPKKKGSPAKPSEGRENARPKTTMPRSQVDEEFLKQSLKEKQLQKTFRLNEIDKESQKPFEVKGPLPVHTKSGLSAPPKGSQRLLCWQKRPEQRGSCKPVLLGRQRGIWKNPCQSPSARRPLPCPERKPQGRRE

SEQ ID NO: 904309 - protein, 131 aa, Homo sapiens; identical to SEQ ID NO: 904302

SEQ ID NO: 904310 - protein, 762 aa, Homo sapiens
QGERYILVKKTNDDWWQVKPDENSKAFYVPAQYVKEVTRKALMPPVKQVAGLPNNSTKIMQSLHLQRSTENVNKLPELSSFGKPSSSVQGTGLIRDANQNFGPSYNQGQTVNLSLDLTHNNGKFNNDSHSPKVSSQNRTRSFGHFPGPEFLDVEKTSFSQEQSCDSAGEGSERIHQDSESGDELSSSSTEQIRATTPPNQGRPDSPVYANLQELKISQSALPPLPGSPAIQINGEWETHKDSSGRCYYYNRGTQERTWKPPRWTRDASISKGDFQNPGDQEWLKHVDDQGRQYYYSADGSRSEWELPKYNASSQQQREIIKSRSLDRRLQEPIVLTKWRHSTIVLDTNDKESPTASKPCFPENESSPSSPKHQDTAASDQEKYGLLNVTKIAENGKKVRKNWLSSWAVLQGSSLLFTKTQGSSTSWFGSNQSKPEFTVDLKGATIEMASKDKSSKKNVFELKTRQGTELLIQSDNDTVINDWFKVLSSTINNQAVETDEGIEEEIPDSPGIEKHDKEKEQKDPKKLRSFKVSSIDSSEQKKTKKNLKKFLTRRPTLQAVREKGYIKDQVFGSNLANLCQRENGTVPKFVKLCIEHVEEHGLDIDGIYRVSGNLAVIQKLRFAVNHDEKLDLNDSKWEDIHVITGALKMFFRELPEPLFTFNHFNDFVNAIKQEPRQRVAAVKDLIRQLPKPNQDTMQILFRHLRRVIENGEKNRMTYQSIAIVFGPTLLKPEKETGNIAVHTVYQNQIVELILLELSSIFGR

SEQ ID NO: 904311 - protein, 316 aa, Homo sapiens
MASKDKSSKKNVFELKTRQGTELLIQSDNDTVINDWFKVLSSTINNQAVETDEGIEEEIPDSPGIEKHDKEKEQKDPKKLRSFKVSSIDSSEQKKTKKNLKKFLTRRPTLQAVREKGYIKDQVFGSNLANLCQRENGTVPKFVKLCIEHVEEHGLDIDGIYRVSGNLAVIQKLRFAVNHDEKLDLNDSKWEDIHVITGALKMFFRELPEPLFTFNHFNDFVNAIKQEPRQRVAAVKDLIRQLPKPNQDTMQILFRHLRRVIENGEKNRMTYQSIAIVFGPTLLKPEKETGNIAVHTVYQNQIVELILLELSSIFGR

SEQ ID NO: 904312 - protein, 809 aa, Homo sapiens
QGERYILVKKTNDDWWQVKPDENSKAFYVPAQYVKEVTRKALMPPVKQVAGLPNNSTKIMQSLHLQRSTENVNKLPELSSFGKPSSSVQGTGLIRDANQNFGPSYNQGQTVNLSLDLTHNNGKFNNDSHSPKVSSQNRTRSFGHFPGPEFLDVEKTSFSQEQSCDSAGEGSERIHQDSESGDELSSSSTEQIRATTPPNQGRPDSPVYANLQELKISQSALPPLPGSPAIQINGEWETHKDSSGRCYYYNRGTQERTWKPPRWTRDASISKGDFQNPGDQELLSSEENYYSTSYSQSDSQCGSPPRGWSEELDERGHTLYTSDYTNEKWLKHVDDQGRQYYYSADGSRSEWELPKYNASSQQQREIIKSRSLDRRLQEPIVLTKWRHSTIVLDTNDKESPTASKPCFPENESSPSSPKHQDTAASDQEKYGLLNVTKIAENGKKVRKNWLSSWAVLQGSSLLFTKTQGSSTSWFGSNQSKPEFTVDLKGATIEMASKDKSSKKNVFELKTRQGTELLIQSDNDTVINDWFKVLSSTINNQAVETDEGIEEEIPDSPGIEKHDKEKEQKDPKKLRSFKVSSIDSSEQKKTKKNLKKFLTRRPTLQAVREKGYIKDQVFGSNLANLCQRENGTVPKFVKLCIEHVEEHGLDIDGIYRVSGNLAVIQKLRFAVNHDEKLDLNDSKWEDIHVITGALKMFFRELPEPLFTFNHFNDFVNAIKQEPRQRVAAVKDLIRQLPKPNQDTMQILFRHLRRVIENGEKNRMTYQSIAIVFGPTLLKPEKETGNIAVHTVYQNQIVELILLELSSIFGR

SEQ ID NO: 904313 - protein, 588 aa, Homo sapiens
GSLLRIGHAHCSSSTEQIRATTPPNQGRPDSPVYANLQELKISQSALPPLPGSPAIQINGEWETHKDSSGRCYYYNRGTQERTWKPPRWTRDASISKGDFQNPGDQEWLKHVDDQGRQYYYSADGSRSEWELPKYNASSQQQREIIKSRSLDRRLQEPIVLTKWRHSTIVLDTNDKESPTASKPCFPENESSPSSPKHQDTAASDQEKYGLLNVTKIAENGKKVRKNWLSSWAVLQGSSLLFTKTQGSSTSWFGSNQSKPEFTVDLKGATIEMASKDKSSKKNVFELKTRQGTELLIQSDNDTVINDWFKVLSSTINNQAVETDEGIEEEIPDSPGIEKHDKEKEQKDPKKLRSFKVSSIDSSEQKKTKKNLKKFLTRRPTLQAVREKGYIKDQVFGSNLANLCQRENGTVPKFVKLCIEHVEEHGLDIDGIYRVSGNLAVIQKLRFAVNHDEKLDLNDSKWEDIHVITGALKMFFRELPEPLFTFNHFNDFVNAIKQEPRQRVAAVKDLIRQLPKPNQDTMQILFRHLRRVIENGEKNRMTYQSIAIVFGPTLLKPEKETGNIAVHTVYQNQIVELILLELSSIFGR

SEQ ID NO: 904314 - protein, 307 aa, Homo sapiens
TRKDKGQMMSEVGEVDIREEEETSNNIVVQRYKTINNQAVETDEGIEEEIPDSPGIEKHDKEKEQKDPKKLRSFKVSSIDSSEQKKTKKNLKKFLTRRPTLQAVREKGYIKDQVFGSNLANLCQRENGTVPKFVKLCIEHVEEHGLDIDGIYRVSGNLAVIQKLRFAVNHDEKLDLNDSKWEDIHVITGALKMFFRELPEPLFTFNHFNDFVNAIKQEPRQRVAAVKDLIRQLPKPNQDTMQILFRHLRRVIENGEKNRMTYQSIAIVFGPTLLKPEKETGNIAVHTVYQNQIVELILLELSSIFGR

SEQ ID NO: 904315 - protein, 145 aa, Homo sapiens
MSNSCCFSDEKLDLNDSKWEDIHVITGALKMFFRELPEPLFTFNHFNDFVNAIKQEPRQRVAAVKDLIRQLPKPNQDTMQILFRHLRRVIENGEKNRMTYQSIAIVFGPTLLKPEKETGNIAVHTVYQNQIVELILLELSSIFGR

SEQ ID NO: 904316 - protein, 616 aa, Homo sapiens
QGERYILVKKTNDDWWQVKPDENSKAFYVPAQYVKEVTRKALMPPVKQVAGLPNNSTKIMQSLHLQRSTENVNKLPELSSFGKPSSSVQGTGLIRDANQNFGPSYNQGQTVNLSLDLTHNNGKFNNDSHSPKVSSQNRTRSFGHFPGPEFLDVEKTSFSQEQSCDSAGEGSERIHQDSESGDELSSSSTEQIRATTPPNQGRPDSPVYANLQELKISQSALPPLPGSPAIQINGEWETHKDSSGRCYYYNRGTQERTWKPPRWTRDASISKGDFQNPGDQELLSSEENYYSTSYSQSDSQCGSPPRGWSEELDERGHTLYTSDYTNEKWLKHVDDQGRQYYYSADGSRSEWELPKYNASSQQQREIIKSRSLDRRLQEPIVLTKWRHSTIVLDTNDKESPTASKPCFPENESSPSSPKHQDTAASDQEKYGLLNVTKIAENGKKVRKNWLSSWAVLQGSSLLFTKTQGSSTSWFGSNQSKPEFTVDLKGATIEMASKDKSSKKNVFELKTRQGTELLIQSDNDTVINDWFKVLSSTINNQAVETDEGIEEEIPDSPGIEKHDKEKEQKDPKKLRSFKVSSIDSSEQKKTKKNLKKFLTRRPTLQAVREKGYIKEGW

SEQ ID NO: 904317 - protein, 194 aa, Homo sapiens
QGERYILVKKTNDDWWQVKPDENSKAFYVPAQYVKEVTRKALMPPVKQVAGLPNNSTKIMQSLHLQRSTENVNKLPELSSFGKPSSSVQGTGLIRDANQNFGPSYNQGQTVNLSLDLTHNNGKFNNDSHSPKVSSQNRTRSFGHFPGPEFLDVEKTSFSQEQSCDSAGEGSERIHQDSESGDELSSSSTEQIRV

SEQ ID NO: 904318 - protein, 316 aa, Homo sapiens; identical to SEQ ID NO: 904311

SEQ ID NO: 904319 - protein, 795 aa, Homo sapiens
QGERYILVKKTNDDWWQVKPDENSKAFYVPAQYVKEVTRKALMPPVKQVAGLPNNSTKIMQSLHLQRSTENVNKLPELSSFGKPSSSVQGTGLIRDANQNFGPSYNQGQTVNLSLDLTHNNGKFNNDSHSPKVSSQNRTRSFGHFPGPEFLDVEKTSFSQEQSCDSAGEGSERIHQDSESGDELSSSSTEQIRATTPPNQGRPDSPVYANLQELKISQSALPPLPGSPAIQINGEWETHKDSSGRCYYYNRGTQERTWKPPRWTRDASISKGDFQNPGDQELLSSEENYYSTSYSQSDSQCGSPPRGWSEELDERGHTLYTSDYTNEKWLKHVDDQGRQYYYSADGSRSEWELPKYNASSQQQREIIKSRSLDRRLQEPIVLTKWRHSTIVLDTNDKESPTASKPCFPENESSPSSPKHQDTAASDQEKYGLLNVTKIAENGKKVRKNWLSSWAVLQGSSLLFTKTQGSSTSWFGSNQSKPEFTVDLKGATIEMASKDKSSKKNVFELKTRQGTELLIQSDNDTVINDWFKVLSSTINNQAVETDEGIEEEIPDSPGIEKHDKEKEQKDPKKLRSFKVSSIDSSEQKKTKKNLKKFLTRRPTLQAVREKGYIKENGTVPKFVKLCIEHVEEHGLDIDGIYRVSGNLAVIQKLRFAVNHDEKLDLNDSKWEDIHVITGALKMFFRELPEPLFTFNHFNDFVNAIKQEPRQRVAAVKDLIRQLPKPNQDTMQILFRHLRRVIENGEKNRMTYQSIAIVFGPTLLKPEKETGNIAVHTVYQNQIVELILLELSSIFGR

SEQ ID NO: 904320 - protein, 809 aa, Homo sapiens; identical to SEQ ID NO: 904312

SEQ ID NO: 904321 - protein, 590 aa, Homo sapiens
QGERYILVKKTNDDWWQVKPDENSKAFYVPAQYVKEVTRKALMPPVKQVAGLPNNSTKIMQSLHLQRSTENVNKLPELSSFGKPSSSVQGTGLIRDANQNFGPSYNQGQTVNLSLDLTHNNGKFNNDSHSPKVSSQNRTRSFGHFPGPEFLDVEKTSFSQEQSCDSAGEGSERIHQDSESGDELSSSSTEQIRATTPPNQGRPDSPVYANLQELKISQSALPPLPGSPAIQINGEWETHKDSSGRCYYYNRGTQERTWKPPRWTRDASISKGDFQNPGDQELLSSEENYYSTSYSQSDSQCGSPPRGWSEELDERGHTLYTSDYTNEKWLKHVDDQGRQYYYSADGSRSEWELPKYNASSQQQREIIKSRSLDRRLQEPIVLTKWRHSTIVLDTNDKASDQEKYGLLNVTKIAENGKKVRKNWLSSWAVLQGSSLLFTKTQGSSTSWFGSNQSKPEFTVDLKGATIEMASKDKSSKKNVFELKTRQGTELLIQSDNDTVINDWFKVLSSTINNQAVETDEGIEEEIPDSPGIEKHDKEKEQKDPKKLRSFKVSSIDSSEQKKTKKNLKKFLTRRPTLQAVREKGYIKEGW

SEQ ID NO: 904322 - protein, 145 aa, Homo sapiens; identical to SEQ ID NO: 904315

SEQ ID NO: 904323 - protein, 191 aa, Homo sapiens
MCFSRADAADNYPFGTCQQRKLFPHFHPPNLIGNKFVPLRGSPHRGPGCYFSDGYGLAYDLSKIPTSIKGYTLGARTAVRFKPIQKEMTPHAGRYQKVSPQQEKHKQNFAPFNVLVPRFKNYPKDTYYPSPGAYNPEKKPPPKIAWPMKFGSPDWAQVPCLQKRTLKAELSTDKDFRKHRNRVAYLSLYYN

SEQ ID NO: 904324 - protein, 139 aa, Homo sapiens
MSFTQRHYTLVEPGTEEGGFKPNSQKETDILSCKCDGYARKLDPSMTGINNMDMSLAPVNNVLVPRFKNYPKDTYYPSPGAYNPEKKPPPKIAWPMKFGSPDWAQVPCLQKRTLKAELSTDKDFRKHRNRVAYLSLYYN

SEQ ID NO: 904325 - protein, 155 aa, Homo sapiens
MCFSRADAADNYPFGTCQQRKLFPHFHPPNLIGNKFVPLRGSPHRGPGCYFSDGYGLAYDLSKIPTSIKGYTLGARTAVRFKPIQKEMTPHAGRYQKVSPQQEKHKQNFAPFNVLVPRFKNYPKDTYYPSMSPPFWCTSTKKAIGGKEVRNKRST

SEQ ID NO: 904326 - protein, 177 aa, Homo sapiens
MCFSRADAADNYPFGTCQQRKLFPHFHPPNLIGNKFVPLRGSPHRGPGCYFSDGYGLAYDLSKIPTSIKGYTLGARTAVRFKPIQKEMTPHAGRYQKVSPQQEKHKQNFAPFNVLVPRFKNYPKDTYYPSAWPMKFGSPDWAQVPCLQKRTLKAELSTDKDFRKHRNRVAYLSLYYN

SEQ ID NO: 904327 - protein, 191 aa, Homo sapiens; identical to SEQ ID NO: 904323

SEQ ID NO: 904328 - protein, 158 aa, Homo sapiens
MCFSRADAADNYPFGTCQQRKLFPHFHPPNLIGNKFVPLRGSPHRGPGCYFSDEMTPHAGRYQKVSPQQEKHKQNFAPFNVLVPRFKNYPKDTYYPSPGAYNPEKKPPPKIAWPMKFGSPDWAQVPCLQKRTLKAELSTDKDFRKHRNRVAYLSLYYN

SEQ ID NO: 904329 - protein, 175 aa, Homo sapiens
PPPRAPQLGITGLAFVSLATQYTSASPSSSRCASAEQGYGLAYDLSKIPTSIKGYTLGARTAVRFKPIQKEMTPHAGRYQKVSPQQEKHKQNFAPFNVLVPRFKNYPKDTYYPSPGAYNPEKKPPPKIAWPMKFGSPDWAQVPCLQKRTLKAELSTDKDFRKHRNRVAYLSLYYN

SEQ ID NO: 904330 - protein, 560 aa, Homo sapiens
MWGRFLAPEASGRDSPGGARSFPAGPDYSSAWLPANESLWQATTVPSNHRNNHIRRHSIASDSGDTGIGTSCSDSVEDHSTSSGTLSFKPSQSLITLPTAHVMPSNSSASISKLRESLTPDGSKWSTSLMQTLGNHSRGEQDSSLDMKDFRPLRKWSSLSKLTAPDNCGQGGTVCREESRNGLEKIGKAKALTSQLRTIGPSCLHDSMEMLRLEDKEINKKRSSTLDCKYKFESCSKEDFRASSSTLRRQTVDMTYSALPESKPIMTSSEAFEPPKYLMLGQQAVGGVPIQPSVRTQMWLTEQLRTNPLEGRNTEDSYSLAPWQQQQIEDFRQGSETPMQVLTGSSRQSYSPGYQDFSKWESMLKIKEGLLRQKEIVIDRQKQQITHLHERIRDNELRAQHAMLGHYVNCEDSYVASLQPQYENTSLQTPFSEESVSHSQQGEFEQKLASTEKEVLQLNEFLKQRLSLFSEEKKKLEEKLKTRDRYISSLKKKCQKESEQNKEKQRRIETLEKYLADLPTLDDVQSQSLQLQILEEKNKNLQEALIDTEKKLEEIKKQLS

SEQ ID NO: 904331 - protein, 805 aa, Homo sapiens [sequence omitted]

SEQ ID NO: 904332 - protein, 808 aa, Homo sapiens [sequence omitted]

SEQ ID NO: 904333 - protein, 753 aa, Homo sapiens
CTKQETKGALKKNLLSLTPAFHLALYHSTSSGTLSFKPSQSLITLPTAHVMPSNSSASISKLRESLTPDGSKWSTSLMQTLGNHSRGEQDSSLDMKDFRPLRKWSSLSKLTAPDNCGQGGTVCREESRNGLEKIGKAKALTSQLRTIGPSCLHDSMEMLRLEDKEINKKRSSTLDCKYKFESCSKEDFRASSSTLRRQTVDMTYSALPESKPIMTSSEAFEPPKYLMLGQQAVGGVPIQPSVRTQMWLTEQLRTNPLEGRNTEDSYSLAPWQQQQIEDFRQGSETPMQVLTGSSRQSYSPGYQDFSKWESMLKIKEGLLRQKEIVIDRQKQQITHLHERIRDNELRAQHAMLGHYVNCEDSYVASLQPQYENTSLQTPFSEESVSHSQQGEFEQKLASTEKEVLQLNEFLKQRLSLFSEEKKKLEEKLKTRDRYISSLKKKCQKESEQNKEKQRRIETLEKYLADLPTLDDVQSQSLQLQILEEKNKNLQEALIDTEKKLEEIKKQCQDKETQLICQKKKEKELVTTVQSLQQKVERCLEDGIRLPMLDAKQLQNENDNLRQQNETASKIIDSQQDEIDRMILEIQSMQGKLSKEKLTTQKMMEELEKKERNVQRLTKALLENQRQTDETCSLLDQGQEPDQSRQQTVLSKRPLFDLTVIDQLFKEMSCCLFDLKALCSILNQRAQGKEPNLSLLLGIRSMNCSAEETENDHSTETLTKKLSDVCQLRRDIDELRTTISDRYAQDMGDNCITQ

SEQ ID NO: 904334 - protein, 716 aa, Homo sapiens
MWGRFLAPEASGRDSPGGARSFPAGPDYSSAWLPANESLWQATTVPSNHRNNHIRRHSIASDSGDTGIGTSCSDSVEDHSTSSGTLSFKPSQSLITLPTAHVMPSNSSASISKLRESLTPDGSKWSTSLMQTLGNHSRGEQDSSLDMKDFRPLRKWSSLSKLTAPDNCGQGGTVCREESRNGLEKIGKAKALTSQLRTIGPSCLHDSMEMLRLEDKEINKKRSSTLDCKYKFESCSKEDFRASSSTLRRQTVDMTYSALPESKPIMTSSEAFEPPKYLMLGQQAVGGVPIQPSVRTQMWLTEQLRTNPLEGRNTEDSYSLAPWQQQQIEDFRQGSETPMQVLTGSSRQSYSPGYQDFSKWESMLKIKEGLLRQKEIVIDRQKQQITHLHERIRDNELRAQHAMLGHYVNCEDSYVASLQPQYENTSLQTPFSEESVSHSQQGEFEQKLASTEKEVLQLNEFLKQRLSLFSEEKKKLEEKLKTRDRYISSLKKKCQKESEQNKEKQRRIETLEKYLADLPTLDDVQSQSLQLQILEEKNKNLQEALIDTEKKLEEIKKQCQDKETQLICQKKKEKELVTTVQSLQQKVERCLEDGIRLPMLDAKQLQNENDNLRQQNETASKIIDSQQDEIDRMILEIQSMQGKLSKEKLTTQKMMEELEKKERNVQRLTKALLENQRQTDETCSLLDQGQEHIHKAFSQIFTKPSGDVKAPSQKAL

SEQ ID NO: 904335 - protein, 132 aa, Homo sapiens
PRLWLCRRRGRREPAAATSPGAFEPGLSRGSSSRHRRVAASPARASAQPAWPWQAPAVRRIWPLRSPPVAEQPLTSHPAFPPARVAEAHAPRKFPPPKKQEDGREESGVPGPPGPLARDVGALPGSGGQRPG

SEQ ID NO: 904336 - protein, 132 aa, Homo sapiens; identical to SEQ ID NO: 904335

SEQ ID NO: 904337 - protein, 160 aa, Homo sapiens
MFLQVLTGSSRQSYSPGYQDFSKWESMLKIKEGLLRQKEIVIDRQKQQITHLHERIRDNELRAQHAMLGHYVNCEDSYVASLQPQYENTSLQTPFSEESVSHSQQGEFEQKLASTEKEVLQLNEFLKQRLSLFSEEKKKLEEKVGFSNKVELGQQHFLSI

SEQ ID NO: 904338 - protein, 703 aa, Homo sapiens
MPSNSSASISKLRESLTPDGSKWSTSLMQTLGNHSRGEQDSSLDMKDFRPLRKWSSLSKLTAPDNCGQGGTVCREESRNGLEKIGKAKALTSQLRTIGPSCLHDSMEMLRLEDKEINKKRSSTLDCKYKFESCSKEDFRASSSTLRRQTVDMTYSALPESKPIMTSSEAFEPPKYLMLGQQAVGGVPIQPSVRTQMWLTEQLRTNPLEGRNTEDSYSLAPWQQQQIEDFRQGSETPMQVLTGSSRQSYSPGYQDFSKWESMLKIKEGLLRQKEIVIDRQKQQITHLHERIRDNELRAQHAMLGHYVNCEDSYVASLQPQYENTSLQTPFSEESVSHSQQGEFEQKLASTEKEVLQLNEFLKQRLSLFSEEKKKLEEKLKTRDRYISSLKKKCQKESEQNKEKQRRIETLEKYLADLPTLDDVQSQSLQLQILEEKNKNLQEALIDTEKKLEEIKKQCQDKETQLICQKKKEKELVTTVQSLQQKVERCLEDGIRLPMLDAKQLQNENDNLRQQNETASKIIDSQQDEIDRMILEIQSMQGKLSKEKLTTQKMMEELEKKERNVQRLTKALLENQRQTDETCSLLDQGQEPDQSRQQTVLSKRPLFDLTVIDQLFKEMSCCLFDLKALCSILNQRAQGKEPNLSLLLGIRSMNCSAEETENDHSTETLTKKLSDVCQLRRDIDELRTTISDRYAQDMGDNCITQ

SEQ ID NO: 904339 - protein, 496 aa, Homo sapiens
MWGRFLAPEASGRDSPGGARSFPAGPDYSSAWLPANESLWQATTVPSNHRNNHIRRHSIASDSGDTGIGTSCSDSVEDHSTSSGTLSFKPSQSLITLPTAHVMPSNSSASISKLRESLTPDGSKWSTSLMQTLGNHSRGEQDSSLDMKDFRPLRKWSSLSKLTAPDNCGQGGTVCREESRNGLEKIGKAKALTSQLRTIGPSCLHDSMEMLRLEDKEINKKRSSTLDCKYKFESCSKEDFRASSSTLRRQTVDMTYSALPESKPIMTSSEAFEPPKYLMLGQQAVGGVPIQPSVRTQMWLTEQLRTNPLEGRNTEDSYSLAPWQQQQIEDFRQGSETPMQVLTGSSRQSYSPGYQDFSKWESMLKIKEGLLRQKEIVIDRQKQQITHLHERIRDNELRAQHAMLGHYVNCEDSYVASLQPQYENTSLQTPFSEESVSHSQQGEFEQKLASTEKEVLQLNEFLKQRLSLFSEEKKKLEEKVGFSNKVELGQQHFLSI

SEQ ID NO: 904340 - protein, 345 aa, Homo sapiens
MWGRFLAPEASGRDSPGGARSFPAGPDYSSAWLPANESLWQATTVPSNHRNNHIRRHSIASDSGDTGIGTSCSDSVEDHSTSSGTLSFKPSQSLITLPTAHVMPSNSSASISKLRESLTPDGSKWSTSLMQTLGNHSRGEQDSSLDMKDFRPLRKWSSLSKLTAPDNCGQGGTVCREESRNGLEKIGKAKALTSQLRTIGPSCLHDSMEMLRLEDKEINKKRSSTLDCKYKFESCSKEDFRASSSTLRRQTVDMTYSALPESKPIMTSSEAFEPPKYLMLGQQAVGGVPIQPSVRTQMWLTEQLRTNPLEGRNTEDSYSLAPWQQQQIEDFRQGSETPMQVRCKI

SEQ ID NO: 904341 - protein, 712 aa, Homo sapiens
MAELGAGGDGHRGGDGAVRSETAPDSYKVQDKKNASSRPASAISGQNNNHSGNKPDPPPVLRVDDRQRLARERREEREKQLAAREIVWLEREERARQHYEKHLEERKKRLEEQRQKEERRRAAVEEKRRQRLEEDKERHEAVVRRTMERSQKPKQKHNRWSWGGSLHGSPSIHSAARRLQLSPWESSVVNRLLTPTHSFLARSKSTAALSGEAASCSPIIMPYKAAHSRNSMDRPKLFVTPPEGSSRRRIIHGTASYKKERERENVLFLTSGTRRAVSPSNPKARQPARSRLWLPSKSLPHLPGTPRPTSSLPPGSVKAAPAQVRPPSPGNIRPVKREVKVEPEKKDPEKEPQKVANEPSLKGRAPLVKVEEATVEERTPAEPEVGPAAPAMAPAPASAPAPASAPAPAPVPTPAMVSAPSSTVNASASVKTSAGTTDPEEATRLLAEKRRLAREQREKEERERREQEELERQKREELAQRVAEERTTRREEESRRLEAEQAREKEEQLQRQAEERALREREEAERAQRQKEEEARVREEAERVRQEREKHFQREEQERLERKKRLEEIMKRTRRTEATDKKTSDQRNGDIAKGALTGGTEVSALPCTTNAPGNGKPVGSPHVVTSHQSKVTVESTPDLEKQPNENGVSVQNENFEEIINLPIGSKPSRLDVTNSESPEIPLNPILAFDDEGTLGPLPQVDGVQTQQTAEVI

SEQ ID NO: 904342 - protein, 729 aa, Homo sapiens
MAAPDSYKVQDKKNASSRPASAISGQNNNHSGNKPDPPPVLRVDDRQRLARERREEREKQLAAREIVWLEREERARQHYEKHLEERKKRLEEQRQKEERRRAAVEEKRRQRLEEDKERHEAVVRRTMERSQKPKQKHNRWSWGGSLHGSPSIHSADPDRRSVSTMNLSKYVDPVISKRLSSSSATLLNSPDRARRLQLSPWESSVVNRLLTPTHSFLARSKSTAALSGEAASCSPIIMPYKAAHSRNSMDRPKLFVTPPEGSSRRRIIHGTASYKKERERENVLFLTSGTRRAVSPSNPKARQPARSRLWLPSKSLPHLPGTPRPTSSLPPGSVKAAPAQVRPPSPGNIRPVKREVKVEPEKKDPEKEPQKVANEPSLKGRAPLVKVEEATVEERTPAEPEVGPAAPAMAPAPASAPAPASAPAPAPVPTPAMVSAPSSTVNASASVKTSAGTTDPEEATRLLAEKRRLAREQREKEERERREQEELERQKREELAQRVAEERTTRREEESRRLEAEQAREKEEQLQRQAEERALREREEAERAQRQKEEEARVREEAERVRQEREKHFQREEQERLERKKRLEEIMKRTRRTEATDKKTSDQRNGDIAKGALTGGTEVSALPCTTNAPGNGKPVGSPHVVTSHQSKVTVESTPDLEKQPNENGVSVQNENFEEIINLPIGSKPSRLDVTNSESPEIPLNPILAFDDEGTLGPLPQVDGVQTQQTAEVI

SEQ ID NO: 904343 - protein, 250 aa, Homo sapiens
AAAPHPGPGPSPAGRRPSPAEEGADWTAGAPAFHTFSIRHLAPTSGHPLGDPGSPPVCQRQTPTFCFQKEEEARVREEAERVRQEREKHFQREEQERLERKKRLEEIMKRTRRTEATDKKTSDQRNGDIAKGALTGGTEVSALPCTTNAPGNGKPVGSPHVVTSHQSKVTVESTPDLEKQPNENGVSVQNENFEEIINLPIGSKPSRLDVTNSESPEIPLNPILAFDDEGTLGPLPQVDGVQTQQTAEVI

SEQ ID NO: 904344 - protein, 712 aa, Homo sapiens; identical to SEQ ID NO: 904341

SEQ ID NO: 904345 - protein, 605 aa, Homo sapiens
MAELGAGGDGHRGGDGAVRSETAPDSYKVQDKKNASSRPASAISGQNNNHSGNKPDPPPVLRVDDRQRLARERREEREKQLAAREIVWLEREERARQHYEKHLEERKKRLEEQRQKEERRRAAVEEKRRQRLEEDKERHEAVVRRTMERSQKPKQKHNRWSWGGSLHGSPSIHSADPDRRSVSTMNLSKYVDPVISKRLSSSSATLLNSPDRARRLQLSPWESSVVNRLLTPTHSFLARSKSTAALSGEAASCSPIIMPYKAAHSRNSMDRPKLFVTPPEGSSRRRIIHGTASYKKERERENVLFLTSGTRRAVSPSNPKARQPARSRLWLPSKSLPHLPGTPRPTSSLPPGSVKAAPAQVRPPSPGNIRPVKREVKVEPEKKDPEKEPQKVANEPSLKGRAPLVKVEEATVEERTPAEPEVGPAAPAMAPAPASAPAPASAPAPAPVPTPAMVSAPSSTVNASASVKTSAGTTDPEEATRLLAEKRRLAREQREKEERERREQEELERQKREELAQRVAEERTTRREEESRRLEAEQAREKEEQLQRQAEERALREREEAERAQRQKEEEARVREEAERVRQEREKHFQREEQERLERKKVAAS

SEQ ID NO: 904346 - protein, 749 aa, Homo sapiens
MAELGAGGDGHRGGDGAVRSETAPDSYKVQDKKNASSRPASAISGQNNNHSGNKPDPPPVLRVDDRQRLARERREEREKQLAAREIVWLEREERARQHYEKHLEERKKRLEEQRQKEERRRAAVEEKRRQRLEEDKERHEAVVRRTMERSQKPKQKHNRWSWGGSLHGSPSIHSADPDRRSVSTMNLSKYVDPVISKRLSSSSATLLNSPDRARRLQLSPWESSVVNRLLTPTHSFLARSKSTAALSGEAASCSPIIMPYKAAHSRNSMDRPKLFVTPPEGSSRRRIIHGTASYKKERERENVLFLTSGTRRAVSPSNPKARQPARSRLWLPSKSLPHLPGTPRPTSSLPPGSVKAAPAQVRPPSPGNIRPVKREVKVEPEKKDPEKEPQKVANEPSLKGRAPLVKVEEATVEERTPAEPEVGPAAPAMAPAPASAPAPASAPAPAPVPTPAMVSAPSSTVNASASVKTSAGTTDPEEATRLLAEKRRLAREQREKEERERREQEELERQKREELAQRVAEERTTRREEESRRLEAEQAREKEEQLQRQAEERALREREEAERAQRQKEEEARVREEAERVRQEREKHFQREEQERLERKKRLEEIMKRTRRTEATDKKTSDQRNGDIAKGALTGGTEVSALPCTTNAPGNGKPVGSPHVVTSHQSKVTVESTPDLEKQPNENGVSVQNENFEEIINLPIGSKPSRLDVTNSESPEIPLNPILAFDDEGTLGPLPQVDGVQTQQTAEVI

SEQ ID NO: 904347 - protein, 655 aa, Homo sapiens
MAELGAGGDGHRGGDGAVRSETAPDSYKVQDKKNASSRPASAISGQNNNHSGNKPDPPPVLRVDDRQRLARERREEREKQLDPDRRSVSTMNLSKYVDPVISKRLSSSSATLLNSPDRARRLQLSPWESSVVNRLLTPTHSFLARSKSTAALSGEAASCSPIIMPYKAAHSRNSMDRPKLFVTPPEGSSRRRIIHGTASYKKERERENVLFLTSGTRRAVSPSNPKARQPARSRLWLPSKSLPHLPGTPRPTSSLPPGSVKAAPAQVRPPSPGNIRPVKREVKVEPEKKDPEKEPQKVANEPSLKGRAPLVKVEEATVEERTPAEPEVGPAAPAMAPAPASAPAPASAPAPAPVPTPAMVSAPSSTVNASASVKTSAGTTDPEEATRLLAEKRRLAREQREKEERERREQEELERQKREELAQRVAEERTTRREEESRRLEAEQAREKEEQLQRQAEERALREREEAERAQRQKEEEARVREEAERVRQEREKHFQREEQERLERKKRLEEIMKRTRRTEATDKKTSDQRNGDIAKGALTGGTEVSALPCTTNAPGNGKPVGSPHVVTSHQSKVTVESTPDLEKQPNENGVSVQNENFEEIINLPIGSKPSRLDVTNSESPEIPLNPILAFDDEGTLGPLPQVDGVQTQQTAEVI

SEQ ID NO: 904348 - protein, 712 aa, Homo sapiens; identical to SEQ ID NO: 904341

SEQ ID NO: 904349 - protein, 649 aa, Homo sapiens
MAELGAGGDGHRGGDGAVRSETAPDSYKVQDKKNASSRPASAISGQNNNHSGNKPDPPPVLRVDDRQRLARERREEREKQLAAREIVWLEREERARQHYEKHLEERKKRLEEQRQKEERRRAAVEEKRRQRLEEDKERHEAVVRRTMERSQKPKQKHNRWSWGGSLHGSPSIHSADPDRRSVSTMNLSKYVDPVISKRLSSSSATLLNSPDRARRLQLSPWESSVVNRLLTPTHSFLARSKSTAALSGEAASCSPIIMPYKAAHSRNSMDRPKLFVTPPEGSSRRRIIHGTASYKKERERENVLFLTSGTRRAVSPSNPKARQPARSRLWLPSKSLPHLPGTPRPTSSLPPGSVKAAPAQVRPPSPGNIRPVKREVKVEPEKKDPEKEPQKVANEPSLKGRAPLVKVEEATVEERTPAEPEVGPAAPAMAPAPASAPAPASAPAPAPVPTPAMVSAPSSTVNASASVKTSAGTTDPEEATRLLAEKRRLAREQREKEERERREQEELERQKREELAQRVAEERTTRREEESRRLEAEQAREKEEQLQRQAEERALREREEAERAQRQKEEEARVREEAERVRQEREKHFQREEQERLERKKRLEEIMKRTRRTEATDKKTSDQRNGDIAKGALTGGTGISVNELKPIYI

SEQ ID NO: 904350 - protein, 113 aa, Homo sapiens
LPSKSLPHLPGTPRPTSSLPPGSVKAAPAQVRPPSPGNIRPVKREVKVEPEKKDPEKEPQKVANEPSLKGRAPLVKVEEATVEERTPAEPEVGPGKSKLTCGLGALSFSPALF

SEQ ID NO: 904351 - protein, 863 aa, Homo sapiens
MTIPVFLIPVSLDNQAMLHYIRDKTAVPYFSNLVWFIGSHVIELDDCVQTDEEHRNRGKLSDLVAEHLDHLHYLNDILIINCEFLNDVLTDHLLNRLFLPLYVYSLENQDKGGERPKISLPVSLYLLSQVFLIIHHAPLVNSLAEVILNGDLSEMYAKTEQDIQRSSAKPSIRCFIKPTETLERSLEMNKHKGKRRVQKRPNYKNVGEEEDEEKGPTEDAQEDAEKAKGTEGGSKGIKTSGESEEIEMVIMERSKLSELAASTSVQEQNTTDEEKSAAATCSESTQWSRPFLDMVYHALDSPDDDYHALFVLCLLYAMSHNKGMDPEKLERIQLPVPNAAEKTTYNHPLAERLIRIMNNAAQPDGKIRLATLELSCLLLKQQVLMSAGCIMKDVHLACLEGAREESVHLVRHFYKGEDIFLDMFEDEYRSMTMKPMNVEYLMMDASILLPPTGTPLTGIDFVKRLPCGDVEKTRRAIRVFFMLRSLSLQLRGEPETQLPLTREEDLIKTDDVLDLNNSDLIACTVITKDGGMVQRFLAVDIYQMSLVEPDVSRLGWGVVKFAGLLQDMQVTGVEDDSRALNITIHKPASSPHSKPFPILQATFIFSDHIRCIIAKQRLAKGRIQARRMKMQRIAALLDLPIQPTTEVLGFGLGSSTSTQHLPFRFYDQGRRGSSDPTVQRSVFASVDKVPGFAVAQCINQHSSPSLSSQSPPSASGSPSGSGSTSHCDSGGTSSSSTPSTAQSPADAPMSPELPKPHLPDQLVIVNETEADSKPSKNVARSAAVETASLSPSLVPARQPTISLLCEDTADTLSVESLTLVPPVDPHSLRSLTGMPPLSTPAAACTEPVGEEAACAEPVGTAED

SEQ ID NO: 904352 - protein, 683 aa, Homo sapiens
MEREALASVLFPPQCVSGVQVAAVGHVLDVFGVIYAYLFSNMSMCINLGLKSCLDSSQSPFWLPEIEMVIMERSKLSELAASTSVQEQNTTDEEKSAAATCSESTQWSRPFLDMVYHALDSPDDDYHALFVLCLLYAMSHNKGMDPEKLERIQLPVPNAAEKTTYNHPLAERLIRIMNNAAQPDGKIRLATLELSCLLLKQQVLMSAGCIMKDVHLACLEGAREESVHLVRHFYKGEDIFLDMFEDEYRSMTMKPMNVEYLMMDASILLPPTGTPLTGIDFVKRLPCGDVEKTRRAIRVFFMLRSLSLQLRGEPETQLPLTREEDLIKTDDVLDLNNSDLIACTVITKDGGMVQRFLAVDIYQMSLVEPDVSRLGWGVVKFAGLLQDMQVTGVEDDSRALNITIHKPASSPHSKPFPILQATFIFSDHIRCIIAKQRLAKGRIQARRMKMQRIAALLDLPIQPTTEVLGFGLGSSTSTQHLPFRFYDQGRRGSSDPTVQRSVFASVDKVPGFAVAQCINQHSSPSLSSQSPPSASGSPSGSGSTSHCDSGGTSSSSTPSTAQSPADAPMSPELPKPHLPDQLVIVNETEADSKPSKNVARSAAVETASLSPSLVPARQPTISLLCEDTADTLSVESLTLVPPVDPHSLRSLTGMPPLSTPAAACTEPVGEEAACAEPVGTAED

SEQ ID NO: 904353 - protein, 159 aa, Homo sapiens
SGVAGKDADECSACRRPTVMAATGFSAPNGSCHGTSRTVNSDAPMSPELPKPHLPDQLVIVNETEADSKPSKNVARSAAVETASLSPSLVPARQPTISLLCEDTADTLSVESLTLVPPVDPHSLRSLTGMPPLSTPAAACTEPVGEEAACAEPVGTAED

SEQ ID NO: 904354 - protein, 1051 aa, Homo sapiens
MFGRSRSWVGGGHGKTSRNIHSLDHLKYLYHVLTKNTTVTEQNRNLLVETIRSITEILIWGDQNDSSVFDFFLEKNMFVFFLNILRQKSGRYVCVQLLQTLNILFENISHETSLYYLLSNNYVNSIIVHKFDFSDEEIMAYYISFLKTLSLKLNNHTVHFFYNEHTNDFALYTEAIKFFNHPESMVRIAVRTITLNVYKVDNQAMLHYIRDKTAVPYFSNLVWFIGSHVIELDDCVQTDEEHRNRGKLSDLVAEHLDHLHYLNDILIINCEFLNDVLTDHLLNRLFLPLYVYSLENQDKGGERPKISLPVSLYLLSQVFLIIHHAPLVNSLAEVILNGDLSEMYAKTEQDIQRSSAKPSIRCFIKPTETLERSLEMNKHKGKRRVQKRPNYKNVGEEEDEEKGPTEDAQEDAEKAKGTEGGSKGIKTSGESEEIEMVIMERSKLSELAASTSVQEQNTTDEEKSAAATCSESTQWSRPFLDMVYHALDSPDDDYHALFVLCLLYAMSHNKGMDPEKLERIQLPVPNAAEKTTYNHPLAERLIRIMNNAAQPDGKIRLATLELSCLLLKQQVLMSAGCIMKDVHLACLEGAREESVHLVRHFYKGEDIFLDMFEDEYRSMTMKPMNVEYLMMDASILLPPTGTPLTGIDFVKRLPCGDVEKTRRAIRVFFMLRSLSLQLRGEPETQLPLTREEDLIKTDDVLDLNNSDLIACTVITKDGGMVQRFLAVDIYQMSLVEPDVSRLGWGVVKFAGLLQDMQVTGVEDDSRALNITIHKPASSPHSKPFPILQATFIFSDHIRCIIAKQRLAKGRIQARRMKMQRIAALLDLPIQPTTEVLGFGLGSSTSTQHLPFRFYDQGRRGSSDPTVQRSVFASVDKVPGFAVAQCINQHSSPSLSSQSPPSASGSPSGSGSTSHCDSGGTSSSSTPSTAQSPADAPMSPELPKPHLPDQLVIVNETEADSKPSKNVARSAAVETASLSPSLVPARQPTISLLCEDTADTLSVESLTLVPPVDPHSLRSLTGMPPLSTPAAACTEPVGEEAACAEPVGTAED

SEQ ID NO: 904355 - protein, 940 aa, Homo sapiens [sequence omitted]

SEQ ID NO: 904356 - protein, 882 aa, Homo sapiens
MFGRSRSWVGGGHGKTSRNIHSLDHLKYLYHVLTKNTTVTEQNRNLLVETIRSITEILIWGDQNDSSVFDFFLEKNMFVFFLNILRQKSGRYVCVQLLQTLNILFENISHETSLYYLLSNNYVNSIIVHKFDFSDEEIMAYYISFLKTLSLKLNNHTVHFFYNEHTNDFALYTEAIKFFNHPESMVRIAVRTITLNVYKVDNQAMLHYIRDKTAVPYFSNLVWFIGSHVIELDDCVQTDEEHRNRGKLSDLVAEHLDHLHYLNDILIINCEFLNDVLTDHLLNRLFLPLYVYSLENQDKGGERPKISLPVSLYLLSQVFLIIHHAPLVNSLAEVILNGDLSEMYAKTEQDIQRSSAKPSIRCFIKPTETLERSLEMNKHKGKRRVQKRPNYKNVGEEEDEEKGPTEDAQEDAEKAKGTEGGSKGIKTSGESEEIEMVIMERSKLSELAASTSVQEQNTTDEEKSAAATCSESTQWSRPFLDMVYHALDSPDDDYHALFVLCLLYAMSHNKGMDPEKLERIQLPVPNAAEKTTYNHPLAERLIRIMNNAAQPDGKIRLATLELSCLLLKQQVLMSAGCIMKDVHLACLEGAREESVHLVRHFYKGEDIFLDMFEDEYRSMTMKPMNVEYLMMDASILLPPTGTPLTGIDFVKRLPCGDVEKTRRAIRVFFMLRSLSLQLRGEPETQLPLTREEDLIKTDDVLDLNNSDLIACTVITKDGGMVQRFLAVDIYQMSLVEPDVSRLGWGVVKFAGLLQDMQVTGVEDDSRALNITIHKPASSPHSKPFPILQATFIFSDHIRCIIAKQRLAKGRIQARRMKMQRIAALLDLPIQPTTEVLGFGLGSSTSTQHLPFRFYDQGRRGSSDPTVQRSVFASVDKVPGFQG

SEQ ID NO: 904357 - protein, 1051 aa, Homo sapiens; identical to SEQ ID NO: 904354

SEQ ID NO: 904358 - protein, 629 aa, Homo sapiens
MFGRSRSWVGGGHGKTSRNIHSLDHLKYLYHVLTKNTTVTEQNRNLLVETIRSITEILIWGDQNDSSVFDFFLEKNMFVFFLNILRQKSGRYVCVQLLQTLNILFENISHETSLYYLLSNNYVNSIIVHKFDFSDEEIMAYYISFLKTLSLKLNNHTVHFFYNEHTNDFALYTEAIKFFNHPESMVRIAVRTITLNVYKVDNQAMLHYIRDKTAVPYFSNLVWFIGSHVIELDDCVQTDEEHRNRGKLSDLVAEHLDHLHYLNDILIINCEFLNDVLTDHLLNRLFLPLYVYSLENQDKGGERPKISLPVSLYLLSQVFLIIHHAPLVNSLAEVILNGDLSEMYAKTEQDIQRSSAKPSIRCFIKPTETLERSLEMNKHKGKRRVQKRPNYKNVGEEEDEEKGPTEDAQEDAEKAKGTEGGSKGIKTSGESEEIEMVIMERSKLSELAASTSVQEQNTTDEEKSAAATCSESTQWSRPFLDMVYHALDSPDDDYHALFVLCLLYAMSHNKGMDPEKLERIQLPVPNAAEKTTYNHPLAERLIRIMNNAAQPDGKIRLATLELSCLLLKQQVLMSAGCIMKDVHLACLEGAREESVHLVRHFYKVIGRAQMDSSMVCIVETEVWCLVLCR

SEQ ID NO: 904359 - protein, 60 aa, Homo sapiens
MPFPLLLTVQDMQVTGVEDDSRALNITIHKPASSPHSKPFPILQATFIFSDHIRCIIAKQ

SEQ ID NO: 904360 - protein, 1051 aa, Homo sapiens; identical to SEQ ID NO: 904354

SEQ ID NO: 904361 - protein, 755 aa, Homo sapiens
RGSCRRENAKISCGALYLLSQVFLIIHHAPLVNSLAEVILNGDLSEMYAKTEQDIQRSSAKPSIRCFIKPTETLERSLEMNKHKGKRRVQKRPNYKNVGEEEDEEKGPTEDAQEDAEKAKGTEGGSKGIKTSGESEEIEMVIMERSKLSELAASTSVQEQNTTDEEKSAAATCSESTQWSRPFLDMVYHALDSPDDDYHALFVLCLLYAMSHNKGMDPEKLERIQLPVPNAAEKTTYNHPLAERLIRIMNNAAQPDGKIRLATLELSCLLLKQQVLMSAGCIMKDVHLACLEGAREESVHLVRHFYKGEDIFLDMFEDEYRSMTMKPMNVEYLMMDASILLPPTGTPLTGIDFVKRLPCGDVEKTRRAIRVFFMLRSLSLQLRGEPETQLPLTREEDLIKTDDVLDLNNSDLIACTVITKDGGMVQRFLAVDIYQMSLVEPDVSRLGWGVVKFAGLLQDMQVTGVEDDSRALNITIHKPASSPHSKPFPILQATFIFSDHIRCIIAKQRLAKGRIQARRMKMQRIAALLDLPIQPTTEVLGFGLGSSTSTQHLPFRFYDQGRRGSSDPTVQRSVFASVDKVPGFAVAQCINQHSSPSLSSQSPPSASGSPSGSGSTSHCDSGGTSSSSTPSTAQSPADAPMSPELPKPHLPDQLVIVNETEADSKPSKNVARSAAVETASLSPSLVPARQPTISLLCEDTADTLSVESLTLVPPVDPHSLRSLTGMPPLSTPAAACTEPVGEEAACAEPVGTAED

SEQ ID NO: 904362 - protein, 570 aa, Homo sapiens
MVYHALDSPDDDYHALFVLCLLYAMSHNKGMDPEKLERIQLPVPNAAEKTTYNHPLAERLIRIMNNAAQPDGKIRLATLELSCLLLKQQVLMSAGCIMKDVHLACLEGAREESVHLVRHFYKGEDIFLDMFEDEYRSMTMKPMNVEYLMMDASILLPPTGTPLTGIDFVKRLPCGDVEKTRRAIRVFFMLRSLSLQLRGEPETQLPLTREEDLIKTDDVLDLNNSDLIACTVITKDGGMVQRFLAVDIYQMSLVEPDVSRLGWGVVKFAGLLQDMQVTGVEDDSRALNITIHKPASSPHSKPFPILQATFIFSDHIRCIIAKQRLAKGRIQARRMKMQRIAALLDLPIQPTTEVLGFGLGSSTSTQHLPFRFYDQGRRGSSDPTVQRSVFASVDKVPGFAVAQCINQHSSPSLSSQSPPSASGSPSGSGSTSHCDSGGTSSSSTPSTAQSPADAPMSPELPKPHLPDQLVIVNETEADSKPSKNVARSAAVETASLSPSLVPARQPTISLLCEDTADTLSVESLTLVPPVDPHSLRSLTGMPPLSTPAAACTEPVGEEAACAEPVGTAED

SEQ ID NO: 904363 - protein, 922 aa, Homo sapiens
MFGRSRSWVGGGHGKTSRNIHSLDHLKYLYHVLTKNTTVTEQNRNLLVETIRSITEILIWGDQNDSSVFDFFLEKNMFVFFLNILRQKSGRYVCVQLLQTLNILFENISHETSLYYLLSNNYVNSIIVHKFDFSDEEIMAYYISFLKTLSLKLNNHTVHFFYNEHTNDFALYTEAIKFFNHPESMVRIAVRTITLNVYKVDNQAMLHYIRDKTAVPYFSNLVWFIGSHVIELDDCVQTDEEHRNRGKLSDLVAEHLDHLHYLNDILIINCEFLNDVLTDHLLNRLFLPLYVYSLENQDKGGERPKISLPVSLYLLSQVFLIIHHAPLVNSLAEVILNGDLSEMYAKTEQDIQRSSAKPSIRCFIKPTETLERSLEMNKHKGKRRVQKRPNYKNVGEEEDEEKGPTEDAQEDAEKAKGTEGGSKGIKTSGESEEIEMVIMERSKLSELAASTSVQEQNTTDEEKSAAATCSESTQWSRPFLDMVYHALDSPDDDYHALFVLCLLYAMSHNKGMDPEKLERIQLPVPNAAEKTTYNHPLAERLIRIMNNAAQPDGKIRLATLELSCLLLKQQVLMSAGCIMKDVHLACLEGAREESVHLVRHFYKGEDIFLDMFEDEYRSMTMKPMNVEYLMMDASILLPPTGTPLTGIDFVKRLPCGDVEKTRRAIRVFFMLRSLSLQLRGEPETQLPLTREEDLIKTDDVLDLNNSDLIACTVITKDGGMVQRFLAVDIYQMSLVEPDVSRLGWGVVKFAGLLQDMQVTGVEDDSRALNITIHKPASSPHSKPFPILQATFIFSDHIRCIIAKQRLAKGRIQARRMKMQRIAALLDLPIQPTTEVLGFGLGSSTSTQHLPFRFYDQGRRGSSDPTVQRSVFASVDKVPGEPAPRPAPQLVHHGGRSRSFSLWSLCELPFLSQKPRRLAAPAS

SEQ ID NO: 904364 - protein, 923 aa, Homo sapiens
MFGRSRSWVGGGHGKTSRNIHSLDHLKYLYHVLTKNTTVTEQNRNLLVETIRSITEILIWGDQNDSSVFDFFLEKNMFVFFLNILRQKSGRYVCVQLLQTLNILFENISHETSLYYLLSNNYVNSIIVHKFDFSDEEIMAYYISFLKTLSLKLNNHTVHFFYNEHTNDFALYTEAIKFFNHPESMVRIAVRTITLNVYKVDNQAMLHYIRDKTAVPYFSNLVWFIGSHVIELDDCVQTDEEHRNRGKLSDLVAEHLDHLHYLNDILIINCEFLNDVLTDHLLNRLFLPLYVYSLENQDKGGERPKISLPVSLYLLSQVFLIIHHAPLVNSLAEVILNGDLSEMYAKTEQDIQRSSAKPSIRCFIKPTETLERSLEMNKHKGKRRVQKRPNYKNVGEEEDEEKGPTEDAQEDAEKAKGTEGGSKGIKTSGESEEIEMVIMERSKLSELAASTSVQEQNTTDEEKSAAATCSESTQWSRPFLDMVYHALDSPDDDYHALFVLCLLYAMSHNKGMDPEKLERIQLPVPNAAEKTTYNHPLAERLIRIMNNAAQPDGKIRLATLELSCLLLKQQVLMSAGCIMKDVHLACLEGAREESVHLVRHFYKGEDIFLDMFEDEYRSMTMKPMNVEYLMMDASILLPPTGTPLTGIDFVKRLPCGDVEKTRRAIRVFFMLRSLSLQLRGEPETQLPLTREEDLIKTDDVLDLNNSDLIACTVITKDGGMVQRFLAVDIYQMSLVEPDVSRLGWGVVKFAGLLQDMQVTGVEDDSRALNITIHKPASSPHSKPFPILQATFIFSDHIRCIIAKQRLAKGRIQARRMKMQRIAALLDLPIQPTTEVLGFGLGSSTSTQHLPFRFYDQGRRGSSDPTVQRSVFASVDKVPALLTAAVERQPRWPLPSLLVPWLTDCCGGLCLLIYRRFSRIVFKI

SEQ ID NO: 904365 - protein, 892 aa, Homo sapiens
MFGRSRSWVGGGHGKTSRNIHSLDHLKYLYHVLTKNTTVTEQNRNLLVETIRSITEILIWGDQNDSSVFDFFLEKNMFVFFLNILRQKSGRYVCVQLLQTLNILFENISHETSLYYLLSNNYVNSIIVHKFDFSDEEIMAYYISFLKTLSLKLNNHTVHFFYNEHTNDFALYTEAIKFFNHPESMVRIAVRTITLNVYKVDNQAMLHYIRDKTAVPYFSNLVWFIGSHVIELDDCVQTDEEHRNRGKLSDLVAEHLDHLHYLNDILIINCEFLNDVLTDHLLNRLFLPLYVYSLENQDKGGERPKISLPVSLYLLSQVFLIIHHAPLVNSLAEVILNGDLSEMYAKTEQDIQRSSAKPSIRCFIKPTETLERSLEMNKHKGKRRVQKRPNYKNVGEEEDEEKGPTEDAQEDAEKAKGTEGGSKGIKTSGESEEIEMVIMERSKLSELAASTSVQEQNTTDEEKSAAATCSESTQWSRPFLDMVYHALDSPDDDYHALFVLCLLYAMSHNKGMDPEKLERIQLPVPNAAEKTTYNHPLAERLIRIMNNAAQPDGKIRLATLELSCLLLKQQVLMSAGCIMKDVHLACLEGAREESVHLVRHFYKGEDIFLDMFEDEYRSMTMKPMNVEYLMMDASILLPPTGTPLTGIDFVKRLPCGDVEKTRRAIRVFFMLRSLSLQLRGEPETQLPLTREEDLIKTDDVLDLNNSDLIACTVITKDGGMVQRFLAVDIYQMSLVEPDVSRLGWGVVKFAGLLQDMQVTGVEDDSRALNITIHKPASSPHSKPFPILQATFIFSDHIRCIIAKQRLAKGRIQARRMKMQRIAALLDLPIQPTTEVLGFGLGSSTSTQHLPFRFYDQGRRGSSDPTVQRSVFASVDKVPDPSLCSCISYMCQS

SEQ ID NO: 904366 - protein, 212 aa, Homo sapiens
MFGRSRSWVGGGHGKTSRNIHSLDHLKYLYHVLTKNTTVTEQNRNLLVETIRSITEILIWGDQNDSSVFDFFLEKNMFVFFLNILRQKSGRYVCVQLLQTLNILFENISHETSLYYLLSNNYVNSIIVHKFDFSDEEIMAYYISFLKTLSLKLNNHTVHFFYNEHTNDFALYTEAIKFFNHPESMVRIAVRTITLNVYKVDNTSRGGPHRVS

SEQ ID NO: 904367 - protein, 129 aa, Homo sapiens
SVCFRFFSPNPDAPMSPELPKPHLPDQLVIVNETEADSKPSKNVARSAAVETASLSPSLVPARQPTISLLCEDTADTLSVESLTLVPPVDPHSLRSLTGMPPLSTPAAACTEPVGEEAACAEPVGTAED

SEQ ID NO: 904368 - protein, 399 aa, Homo sapiens
MVSTAPSSASIGWVVPTAPAPGLSWPTDPHGPLLEASAALIFLQPACGAGLERPVPSAAAARLALPATTSLGPAAVPLASLAPAASRDVRPGGMGQAVNSCVGALNGGSCDAATGACRCPTGFLGTDCNLTCPQGRFGPNCTHVCGCGQGAACDPVTGTCLCPPGRAGVRCERGCPQNRFGVGCEHTCSCRNGGLCHASNGSCSCGLGWTGRHCELACPPGRYGAACHLECSCHNNSTCEPATGTCRCGPGFYGQAASTPVPLASTGLAARGCAGVNMEPPATPSVADASALPASTATSVRGGVSQVHLERAATSAVTVTGGHPVTLSPVSAFAHQGAQEPPVTWIAEGASLGPAAPCTVTAGVGLTATLSVGSVTVWMATWGPRAGKVGPSGSPRTRP

SEQ ID NO: 904369 - protein, 203 aa, Homo sapiens
RAGGGFSRAPGLAGFTHSGQTGHFCHRVPLSRGNRRPSACPPGFHGAGCQGLCWCQHGAPCDPISGRCLCPAGFHGHFCERGCEPGSFGEGCHQRCDCDGGAPCDPVTGLCLCPPGRSGATCNLDCRRGQFGPSCTLHCDCGGGADCDPVSGQCHCVDGYMGPTCREGGPLRLPENPSLAQGSAGTLPASSRPTSRSGGPARH

SEQ ID NO: 904370 - protein, 240 aa, Homo sapiens [sequence omitted]

SEQ ID NO: 904371 - protein, 240 aa, Homo sapiens [sequence omitted]

SEQ ID NO: 904372 - protein, 162 aa, Homo sapiens
MTVGKSSKMLQHIDYRMRCILQDGRIFIGTFKAFDKHMNLILCDCDEFRKIKPKNAKQPEREEKRVLGLVLLRGENLVSMTVEGPPPKDTGIARVPLAGAAGGPGVGRAAGRGVLGFNFPALFDGAVRWGPAVAPRKPSWFRVWPRRGPPGPRFPYRPAGSR

SEQ ID NO: 904373 - protein, 71 aa, Homo sapiens
MTVGKSSKMLQHIDYRMRCILQDGRIFIGTFKAFDKHMNLILCDCDEFRKINKECDSTQSVKVEGHPPRYC

SEQ ID NO: 904374 - protein, 77 aa, Homo sapiens
RPHTTTTKFAADRHPNTVPTRTGHSAPTRRQSNPTSRHYGSSTWYETTHGPTNWASPCSRDANRHAASGNETPSTRH

SEQ ID NO: 904375 - protein, 240 aa, Homo sapiens [sequence omitted]

SEQ ID NO: 904376 - protein, 240 aa, Homo sapiens [sequence omitted]

SEQ ID NO: 904377 - protein, 240 aa, Homo sapiens [sequence omitted]

SEQ ID NO: 904378 - protein, 240 aa, Homo sapiens [sequence omitted]

SEQ ID NO: 904379 - protein, 240 aa, Homo sapiens [sequence omitted]

SEQ ID NO: 904380 - protein, 240 aa, Homo sapiens [sequence omitted]

SEQ ID NO: 904381 - protein, 193 aa, Homo sapiens
MTVGKSSKMLQHIDYRMRCILQDGRIFIGTFKAFDKHMNLILCDCDEFRKIKPKNAKQPEREEKRVLGLVLLRGENLVSMTVEGPPPKDTGIARVPLAGAAGGPGVGRAAGRGVPAGVPIPQAPAGLAGPVRGVGGPSQQVMTPQGRGTVAAAAVAATASIAGAPTQYPPGRGTPPPPVGRATPPPGKGSLST

SEQ ID NO: 904382 - protein, 240 aa, Homo sapiens [sequence omitted]

SEQ ID NO: 904383 - protein, 240 aa, Homo sapiens [sequence omitted]

SEQ ID NO: 904384 - protein, 240 aa, Homo sapiens [sequence omitted]

SEQ ID NO: 904385 - protein, 232 aa, Homo sapiens
MLQHIDYRMRCILQDGRIFIGTFKAFDKHMNLILCDCDEFRKIKPKNAKQPEREEKRVLGLVLLRGENLVSMTVEGPPPKDTGIARVPLAGAAGGPGVGRAAGRGVPAGVPIPQAPAGLAGPVRGVGGPSQQVMTPQGRGTVAAAAVAATASIAGAPTQYPPGRGTPPPPVGRATPPPGIMAPPPGMRPPMGPPIGLPPARGTPIGMPPPGMRPPPPGIRGPPPPGMRPPRP

SEQ ID NO: 904386 - protein, 232 aa, Homo sapiens; identical to SEQ ID NO: 904385

SEQ ID NO: 904387 - protein, 161 aa, Homo sapiens
MTVEGPPPKDTGIARVPLAGAAGGPGVGRAAGRGVPAGVPIPQAPAGLAGPVRGVGGPSQQVMTPQGRGTVAAAAVAATASIAGAPTQYPPGRGTPPPPVGRATPPPGIMAPPPGMRPPMGPPIGLPPARGTPIGMPPPGMRPPPPGIRGPPPPGMRPPRP

SEQ ID NO: 904388 - protein, 232 aa, Homo sapiens; identical to SEQ ID NO: 904385

SEQ ID NO: 904389 - protein, 88 aa, Homo sapiens
MTVGKSSKMLQHIDYRMRCILQDGRIFIGTFKAFDKHMNLILCDCDEFRKIKPKNAKQPEREEKRVLGLALLRRRCYGGARYGGARYG

SEQ ID NO: 904390 - protein, 156 aa, Homo sapiens
MERARDRLHLRRTTEQHVPEVEVQVKRRRTASLSNQECQLYPRRSQQQQVPVVDFQAELRQAFLAETPRGNDSTGKRHCSSCCCCCDCQYCWSPNTVPTRTGHSAPTRRQSNPTSRHYGSSTWYETTHGPTNWASPCSRDANRHAASGNETPSTRH

SEQ ID NO: 904391 - protein, 240 aa, Homo sapiens [sequence omitted]

SEQ ID NO: 904392 - protein, 240 aa, Homo sapiens [sequence omitted]

SEQ ID NO: 904393 - protein, 240 aa, Homo sapiens [sequence omitted]

SEQ ID NO: 904394 - protein, 240 aa, Homo sapiens [sequence omitted]

SEQ ID NO: 904395 - protein, 240 aa, Homo sapiens [sequence omitted]

SEQ ID NO: 904396 - protein, 240 aa, Homo sapiens [sequence omitted]

SEQ ID NO: 904397 - protein, 240 aa, Homo sapiens [sequence omitted]

SEQ ID NO: 904398 - protein, 240 aa, Homo sapiens [sequence omitted]

SEQ ID NO: 904399 - protein, 285 aa, Homo sapiens
  misc_feature (274)..(274): Xaa can be any naturally occurring amino acid
  misc_feature (278)..(278): Xaa can be any naturally occurring amino acid
MTVGKSSKMLQHIDYRMRCILQDGRIFIGTFKAFDKHMNLILCDCDEFRKIKPKNAKQPEREEKRVLGLVLLRGENLVSMTVEGPPPKDTGIARVPLAGAAGGPGVGRAAGRGVPAGVPIPQAPAGLAGPVRGVGGPSQQVMTPQGRGTVAAAAVAATASIAGAPTQYPPGRGTPPPPVGRATPPPGIMAPPPGMRPPMGPPIGLPPARGTPIGMPASCQGAKRPARPLLRLCVPGVVALRCDPAHVWAQPGSAPQEGGQLDNKKENSVNGYYXEKKXKSFIAEV

SEQ ID NO: 904400 - protein, 213 aa, Homo sapiens
MTVGKSSKMLQHIDYRMRCILQDGRIFIGTFKAFDKHMNLILCDCDEFRKIKPKNAKQPEREEKRVLGLVLLRGENLVSMTVEGPPPKDTGIARVPLAGAAGGPGVGRAAGRGVPAGVPIPQAPAGLAGPVRGVGGPSQQVMTPQGRGTVAAAAVAATASIAGAPTQYPPGRGTPPPPVGRATPPPGIMAPPIGGPMGGLIPGGGAIMPGGGV

SEQ ID NO: 904401 - protein, 240 aa, Homo sapiens [sequence omitted]

SEQ ID NO: 904402 - protein, 240 aa, Homo sapiens [sequence omitted]

SEQ ID NO: 904403 - protein, 240 aa, Homo sapiens [sequence omitted]

SEQ ID NO: 904404 - protein, 162 aa, Homo sapiens; identical to SEQ ID NO: 904372

SEQ ID NO: 904405 - protein, 137 aa, Homo sapiens
MTVGKSSKMLQHIDYRMRCILQDGRIFIGTFKAFDKHMNLILCDCDEFRKIKPKNAKQPEREEKRVLGLVLLRGENLVSMTVEGPPPKDTGGRTLGSRGRVEEGEIQGETPPGGGAEGDPVGRRRRIGQQRARHPRR

SEQ ID NO: 904406 - protein, 813 aa, Homo sapiens
MAGVVLHFASCSDTLFYLYRYSEFLFFSTCCTLSKAKRKLILGSRKAEAFGEMETRMCKNETTTSRIKKKKCQSSRVLSDVQEGGGIIFMEHILWNTVSIVPAFNEYCWFFRTVAFFSFFFSCVQLINLYRAYHTIDVYEILSELNEAALLIFVYVRRYLTVQAGVSGINITHCSLEHLSSNDPFTLSSRVAGTAVACQHAWLILVFNFFRVGISLCCLDWSWTPGLMPSSCLSWYCRCEPLCQVLIFFMLENKFLGILYYFLMTISHQNLGLSDICLHTFIPCSQPFPDRGHLSYLVFTSTCLLPCDDIYSVFLGMVLGFLVVVKMPVIPALWEVEAGGSPEVRSSSPAWPTWRNPTSTKNTKISLAWWQAPVIPTTQEAKAGELLEPEEAEVAVSRDRANGTPFSLSDRGGDSHLKVKKKNRNQQLLFEFTGVRSPLLHGEMGNIYSIEIFETRYGGSEPVIPALWEAELGGSPDIRSLRLAWPTEQYPVSKIQKLPRLGGVCLWSQLLRRLRQENHLNLGGKGCSEPRPCHCTPAWVTSETPSGKKKKKMRYKVQRMYLLSQYKVKKVGNVVEVYVDKGIRWLYNEEGGCRHGETVLLALPLSVSSVWVTGILFHNACLPMSFKNYYSVEMISRKNLAGLICFAEPIQLKKRGPYYVPKNQEGGSHLNLMFSYCESFSVELNENTVTLRVEVVHLNCSGCFLSFGCFVCIDIFILCYIICSLVAKIELKDTVPEIYDFMFRRYVSGIIVWVLMRKSGLHYCATLVSCQKVSSLDLLQNPFFGLCVSYVVPALILFVCPLSFYTICLHLTL

SEQ ID NO: 904407 - protein, 72 aa, Homo sapiens
MTVGKSSKMLQHIDYRMRCILQDGRIFIGTFKAFDKHMNLILCDCDEFRKINQRMRQHTRSVKVEGHPPRYC

SEQ ID NO: 904408 - protein, 124 aa, Homo sapiens
MTPQGRGTVAAAAVAATASIAGAPTQYPPGRGTPPPPVGRATPPPGIMAPPPGMRPPMGPPIGLPPARGTPIGMPPPGMRPPPPGIRGEAFLLALVCWYGWPLDFGMSDYAAYLKKTCFQDLFN

SEQ ID NO: 904409 - protein, 112 aa, Homo sapiens
MGSRLSQPFESYITAPPGTAAAPAKPAPPATPGAPTSPAEHRLLKTCWSCRVLSGLGLMGAGGYVYWVARKPMKMGYPPSPWTITQMVIGLSIATWGIVVMADPKGKAYRVV

SEQ ID NO: 904410 - protein, 112 aa, Homo sapiens; identical to SEQ ID NO: 904409

SEQ ID NO: 904411 - protein, 112 aa, Homo sapiens; identical to SEQ ID NO: 904409

SEQ ID NO: 904412 - protein, 112 aa, Homo sapiens; identical to SEQ ID NO: 904409

SEQ ID NO: 904413 - protein, 112 aa, Homo sapiens; identical to SEQ ID NO: 904409

SEQ ID NO: 904414 - protein, 105 aa, Homo sapiens
MGSRLSQPFESYITAPPGTAAAPAKPAPPATPGAPTSPAEHRLLKTCWSCRVLSGLGLMGAGGYVYWVARKPMKMGYPPSPWTITQMVIGLSENQGTALGRVGYL

SEQ ID NO: 904415 - protein, 112 aa, Homo sapiens; identical to SEQ ID NO: 904409

SEQ ID NO: 904416 - protein, 129 aa, Homo sapiens
MGSRLSQPFESYITAPPGTAAAPAKPAPPATPGAPTSPAEHRLLKTCWSCRVLSGLGLMGAGGHCHLGYRCHGRPQREGLPRCLKVPPVNLSSVSVPFPVTHRAGMEFNGCSGQTLVHGQTSLLWILQD

SEQ ID NO: 904417 - protein, 129 aa, Homo sapiens; identical to SEQ ID NO: 904416

SEQ ID NO: 904418 - protein, 910 aa, Homo sapiens
MGVRGLQGFVGSTCPHICTVVNFKELAEHHRSKYPGCTPTIVVDAMCCLRYWYTPESWICGGQWREYFSALRDFVKTFTAAGIKLIFFFDGMVEQDKRDEWVKRRLKNNREISRIFHYIKSHKEQPGRNMFFIPSGLAVFTRFALKTLGQETLCSLQEADYEVASYGLQHNCLGILGEDTDYLIYDTCPYFSISELCLESLDTVMLCREKLCESLGLCVADLPLLACLLGNDIIPEGMFESFRYKCLSSYTSVKENFDKKGNIILAVSDHISKVLYLYQGEKKLEEILPLGPNKALFYKGMASYLLPGQKSPWFFQKPKGVITLDKQVISTSSDAESREEVPMCSDAESRQEVPMCTGPESRREVPVYTDSEPRQEVPMCSDPEPRQEVPTCTGPESRREVPMCSDPEPRQEVPMCTGPEARQEVPMYTDSEPRQEVPMYTDSEPRQEVPMYTGSEPRQEVPMYTGPESRQEVPMYTGPESRQEVLIRTDPESRQEIMCTGHESKQEVPICTDPISKQEDSMCTHAEINQKLPVATDFEFKLEALMCTNPEIKQEDPTNVGPEVKQQVTMVSDTEILKVARTHHVQAESYLVYNIMSSGEIECSNTLEDELDQALPSQAFIYRPIRQRVYSLLLEDCQDVTSTCLAVKEWFVYPGNPLRHPDLVRPLQMTIPGGTPSLKILWLNQEPEIQVRRLDTLLACFNLSSSREELQAVESPFQALCCLLIYLFVQVDTLCLEDLHAFIAQALCLQGKSTSQLVNLQPDYINPRAVQLGSLLVRGLTTLVLVNSACGFPWKTSDFMPWNVFDGKLFHQKYLQSEKGYAVEVLLEQNRSRLTKFHNLKAVVCKACMKENRRITGRAHWGSHHAGRWGRQGSSYHRTGSGYSRSSQGQPWRDQGPGSRQYEHDQWRRY

SEQ ID NO: 904419 - protein, 910 aa, Homo sapiens; identical to SEQ ID NO: 904418

SEQ ID NO: 904420 - protein, 910 aa, Homo sapiens; identical to SEQ ID NO: 904418

SEQ ID NO: 904421 - protein, 910 aa, Homo sapiens; identical to SEQ ID NO: 904418

SEQ ID NO: 904422 - protein, 493 aa, Homo sapiens
MGVRGLQGFVGSTCPHICTVVNFKELAEHHRSKYPGCTPTIVVDAMCCLRYWYTPESWICGGQWREYFSALRDFVKTFTAAGIKLIFFFDGMVEQDKRDEWVKRRLKNNREISRIFHYIKSHKEQPGRNMFFIPSGLAVFTRFALKTLGQETLCSLQEADYEVASYGLQHNCLGILGEDTDYLIYDTCPYFSISELCLESLDTVMLCREKLCESLGLCVADLPLLACLLGNDIIPEGMFESFRYKCLSSYTSVKENFDKKGNIILAVSDHISKVLYLYQGEKKLEEILPLGPNKALFYKGMASYLLPGQKSPWFFQKPKGVITLDKQVISTSSDAESREEVPMCSDAESRQEVPMCTGPESRREVPVYTDSEPRQEVPMCSDPEPRQEVPTCTGPESRREVPMCSDPEPRQEVPMCTGPEARQEVPMYTDSEPRQEVPMYTDSEPRQEVPMYTGSEPRQEVPMYTGPESRQEVPKTIIVNIFMCFILIFHSYI

SEQ ID NO: 904423 - protein, 167 aa, Homo sapiens
HRVPEKARAEGSERENNYGCGVVGGEMTTLVLDNGAYNAKIGYSHENVSVIPNCQFRSKTARLKTFTANQIDEIKDPSGLFYILPFQKGYLVNWDVQRQVWDYLFGKEMYQVDFLDTNIIITEPYFNFTSIQESMNEILFEEYQFQAVLRVNVPYCRSKKKKEAIIR

SEQ ID NO: 904424 - protein, 291 aa, Homo sapiens
HRVPEKARAEGSERENNYGCGVVGGEMTTLVLDNGAYNAKIGYSHENVSVIPNCQFRSKTARLKTFTANQIDEIKDPSGLFYILPFQKGYLVNWDVQRQVWDYLFGKEMYQVDFLDTNIIITEPYFNFTSIQESMNEILFEEYQFQAVLRVNAGALSAHRYFRDNPSELCCIIVDSGYSFTHIVPYCRSKKKKEAIIRINVGGKLLTNHLKEIISYRQLHVMDETHVINQVKEDVCYVSQDFYRDMDIAKLKGEENTVMIDYVLPDFSTIKKGFCKPYYLCLGRWKIDIRE

SEQ ID NO: 904425 - protein, 314 aa, Homo sapiens
MYQVDFLDTNIIITEPYFNFTSIQESMNEILFEEYQFQAVLRVNAGALSAHRYFRDNPSELCCIIVDSGYSFTHIVPYCRSKKKKEAIIRINVGGKLLTNHLKEIISYRQLHVMDETHVINQVKEDVCYVSQDFYRDMDIAKLKGEENTVMIDYVLPDFSTIKKGFCKPREEMVLSGKYKSGEQILRLANERFAVPEILFNPSDIGIQEMGIPEAIVYSIQNLPEEMQPHFFKNIVLTGGNSLFPGFRDRVYSEVRCLTPTDYDVSVVLPENPITYAWEGGKLISENDDFEDMVVTREDYEENGHSVCEEKFDI

SEQ ID NO: 904426 - protein, 391 aa, Homo sapiens
HRVPEKARAEGSERENNYGCGVVGGEMTTLVLDNGAYNAKIGYSHENVSVIPNCQFRSKTARLKTFTANQIDEIKDPSGLFYILPFQKGYLVNWDVQRQVWDYLFGKEMYQVDFLDTNIIITEPYFNFTSIQESMNEILFEEYQFQAVLRVNVPYCRSKKKKEAIIRINVGGKLLTNHLKEIISYRQLHVMDETHVINQVKEDVCYVSQDFYRDMDIAKLKGEENTVMIDYVLPDFSTIKKGFCKPREEMVLSGKYKSGEQILRLANERFAVPEILFNPSDIGIQEMGIPEAIVYSIQNLPEEMQPHFFKNIVLTGGNSLFPGFRDRVYSEVRCLTPTDYDVSVVLPENPITYAWEGGKLISENDDFEDMVVTREDYEENGHSVCEEKFDI

SEQ ID NO: 904427 - protein, 422 aa, Homo sapiens
HRVPEKARAEGSERENNYGCGVVGGEMTTLVLDNGAYNAKIGYSHENVSVIPNCQFRSKTARLKTFTANQIDEIKDPSGLFYILPFQKGYLVNWDVQRQVWDYLFGKEMYQVDFLDTNIIITEPYFNFTSIQESMNEILFEEYQFQAVLRVNAGALSAHRYFRDNPSELCCIIVDSGYSFTHIVPYCRSKKKKEAIIRINVGGKLLTNHLKEIISYRQLHVMDETHVINQVKEDVCYVSQDFYRDMDIAKLKGEENTVMIDYVLPDFSTIKKGFCKPREEMVLSGKYKSGEQILRLANERFAVPEILFNPSDIGIQEMGIPEAIVYSIQNLPEEMQPHFFKNIVLTGGNSLFPGFRDRVYSEVRCLTPTDYDVSVVLPENPITYAWEGGKLISENDDFEDMVVTREDYEENGHSVCEEKFDI

SEQ ID NO: 904428 - protein, 402 aa, Homo sapiens
HRVPEKARAEGSERENNYGCGVVGGEMTTLVLDNGAYNAKIGYSHENVSVIPNCQFRSKTARLKTFTANQIDEIKDPSGLFYILPFQKGYLVNWDVQRQVWDYLFGKEMYQVDFLDTNIIITEPYFNFTSIQESMNEILFEEYQFQAVLRVNAGALSAHRYFRDNPSELCCIIVDSGYSFTHIVPYCRSKKKKEAIIRINVGGKLLTNHLKEIISYRQLHVMDETHVINQVKEDVCYVSQDFYRDMDIAKLKGEENTVMIDYVLPDFSTIKKGFCKPREEMVLSGKYKSGEQILRLANERFAVPEILFNPSDIGIQEMGIPEAIVYSIQNLPEGFRDRVYSEVRCLTPTDYDVSVVLPENPITYAWEGGKLISENDDFEDMVVTREDYEENGHSVCEEKFDI

SEQ ID NO: 904429 - protein, 288 aa, Homo sapiens
MNEILFEEYQFQAVLRVNAGALSAHRYFRDNPSELCCIIVDSGYSFTHIVPYCRSKKKKEAIIRINVGGKLLTNHLKEIISYRQLHVMDETHVINQVKEDVCYVSQDFYRDMDIAKLKGEENTVMIDYVLPDFSTIKKGFCKPREEMVLSGKYKSGEQILRLANERFAVPEILFNPSDIGIQEMGIPEAIVYSIQNLPEEMQPHFFKNIVLTGGNSLFPGFRDRVYSEVRCLTPTDYDVSVVLPENPITYAWEGGKLISENDDFEDMVVTREDYEENGHSVCEEKFDI

SEQ ID NO: 904430 - protein, 153 aa, Homo sapiens
HRVPEKARAEGSERENNYGCGVVGGEMTTLVLDNGAYNAKIGYSHENVSVIPNCQFRSKTARLKTFTANQIDEIKDPSGLFYILPFQKGYLVNWDVQRQVWDYLFGKEMYQVDFLDTNIIITEPYFNFTSIQESMNEILFEEYQFQAVLRVNG

SEQ ID NO: 904431 - protein, 251 aa, Homo sapiens
DCVHTLHSRDTWLKKARVVRLGEVPYKMVKGFSNRARKARLAEPQLREENDLGLFGYWQTEEYQPPVAVDGKVPRNEFGNVYLFLPSMMPIGCVQLNLPNLHRVARKLDIDCVQAITGFDFHGGYSHPVTDGYIVCEEFKDVLLTAWENEQAVIERKEKEKKEKRALGNWKLLAKGLLIRERLKRRYGPKVSAGSLQRRQAQGQFLGDAAQKGLAQILPQPQVRDSFVLGHLSLLSLRPLVFTLLGKVSLE

SEQ ID NO: 904432 - protein, 153 aa, Homo sapiens
MWPTVFHKLGREERQSRQQVRGFDIALCPHRTDGYIVCEEFKDVLLTAWENEQAVIERKEKEKKEKRALGNWKLLAKGLLIRERLKRRYGPKVSAGSLQRRQAQGQFLGDAAQKGLAQILPQPQVRDSFVLGHLSLLSLRPLVFTLLGKVSLE

SEQ ID NO: 904433 - protein, 241 aa, Homo sapiens
DCVHTLHSRDTWLKKARVVRLGEVPYKMVKGFSNRARKARLAEPQLREENDLGLFGYWQTEEYQPPVAVDGKVPRNEFGNVYLFLPSMMPIGCVQLNLPNLHRVARKLDIDCVQAITGFDFHGGYSHPVTDGYIVCEEFKDVLLTAWENEQAVIERKEKERLKRRYGPKSEAAAPHTDAGGGLSSDEEEGTSSQAEAARILAASWPQNREDEEKQKLKGGPKKTKREKKAAASHLFPFEQL

SEQ ID NO: 904434 - protein, 262 aa, Homo sapiens
DCVHTLHSRDTWLKKARVVRLGEVPYKMVKGFSNRARKARLAEPQLREENDLGLFGYWQTEEYQPPVAVDGKVPRNEFGNVYLFLPSMMPIGCVQLNLPNLHRVARKLDIDCVQAITGFDFHGGYSHPVTDGYIVCEEFKDVLLTAWENEQAVIERKEKEKKEKRALGNWKLLAKGLLIRERLKRRYGPKSEAAAPHTDAGGGLSSDEEEGTSSQAEAARILAASWPQNREDEEKQKLKGGPKKTKREKKAAASHLFPFEQL

SEQ ID NO: 904435 - protein, 251 aa, Homo sapiens; identical to SEQ ID NO: 904431

SEQ ID NO: 904436 - protein, 105 aa, Homo sapiens
SYLFLWLSGIVYHFVNQINFLEVRLGVKERLYSKVVYISVFTFTVSILIFFLKMSVLNTFLPLHFCLQKKEKRALGNWKLLAKGLLIRERLKRRYGPKVSAGSLQ

SEQ ID NO: 904437 - protein, 262 aa, Homo sapiens; identical to SEQ ID NO: 904434

SEQ ID NO: 904438 - protein, 251 aa, Homo sapiens; identical to SEQ ID NO: 904431

SEQ ID NO: 904439 - protein, 251 aa, Homo sapiens; identical to SEQ ID NO: 904431

SEQ ID NO: 904440 - protein, 251 aa, Homo sapiens; identical to SEQ ID NO: 904431

SEQ ID NO: 904441 - protein, 452 aa, Homo sapiens
TFNRRNPRERSPTPPAPQPPQPPQPVRPAPSSAMAKEGVEKAEETEQMIEKEAGKEPAEGGGGDGSHRLGDAQEMRAVVLAGFGGLNKLRLFRKAMPEPQDGELKIRVKACGLNFIDLMVRQGNIDNPPKTPLVPGFECSGIVEALGDSVKGYEIGDRVMAFVNYNAWAEVVCTPVEFVYKIPDDMSFSEAAAFPMNFVTAYVMLFEVANLREGMSVLVHSAGGGVGQAVAQLCSTVPNVTVFGTASTFKHEAIKDSVTHLFDRNADYVQEVKRISAEGVDIVLDCLCGDNTGKGLSLLKPLGTYILYGSSNMVTGETKSFFSFAKSWWQVEKVNPIKLYEENKVIAGFSLLNLLFKQGRAGLIRGVVEKLIGLYNQKKIKPVVDSLWALEEVKEAMQRIHDRGNIGKLILDVEKTPTPLMANDSTETSEAGEEEEDHEGDSENKERMPFIQ

SEQ ID NO: 904442 - protein, 452 aa, Homo sapiens; identical to SEQ ID NO: 904441

SEQ ID NO: 904443 - protein, 452 aa, Homo sapiens; identical to SEQ ID NO: 904441

SEQ ID NO: 904444 - protein, 2298 aa, Homo sapiens [sequence omitted]

SEQ ID NO: 904445 - protein, 2152 aa, Homo sapiens
TREIPLRSHIFILANSTRTDALLLRLSLVVGKEVFYTALWGSVLASPSIRLPASVFVVGHINRDAPGREQKYMLGTNHQLTVKSLRASLLDSNVLVQRNNLEIVLFFFPFYTCLDSNERAIPLLRSDIVRILSAATQTLLRRDMSLNRRLYAWLLGSDIKGNTVVPESEISNSYEDQSSYFFEKYSKDLLVEGLAEILHQKFIDADVEERHHAYLKPFRVLISLLDKPEIGPQVVGNLFLEVIRAFYSYCRDALGSDLKLSYTQSGNSLISAIKENRNASEIVKTVNLLITSLSTDFLWDYMTRCFEECFRPVKQRYSVRNSVSPPPTVSELCALLVFLLDVIPLELYSEVQTQYLPQVLGCLVQPLAEDMEALSLPELTHALKTCFKVLSKVQMPPSYLDTESTSGTSSPVKGENGKIILETKAVIPGDEDASFPPLKSEDSGIGLSASSPELSEHLRVPRVSLERDDVWKKGGSMQRTFLCIQELIANFASKNIFGVQLTASGEESKSEEPAGKRDRDGTQSLAANDSSRKNSWEPKPITVPQFKQMLSDLFTARGSPFKTKSSESPSSSPSSPARKNGGEWDVEKVVIDLGGSREERREAFAAACHLLLDCATFPVYLSEEETEQLCATLFQLPGAGDSSFPSWLKSLMTICCCVTDCYLQNVAISTLLEVINHSQSLALVIEDKMKRYKSSGHNPFFGKLQMVTVPPIAPGILKVIAEKTDFYQRVARVLWNQLNKETREHHVTCVELFYRLHCLAPTANICEDIICHALLDPDKGTRLEALFRFSVIWHLTREIQGSRVTSHNRSFDRSLFVVLDSLACTDGAIGAAAQGWLVRALSLGDVARILEPVLLLLLQPKTQRTSIHCLKQENSADDLHRWFNRKKTSFREACAVPEPQESGSEEHLPLSQFTTVDREAIWAEVEKEPEKYPLRGELSEEELPYYVELPDRTAHGAPDSSEHTESADTSSGHTDSENTSSFSSPSHDLQELSNEENCCAPIHMGGRAYPKRSALLAAFQSESFKAGAKLSLVRVDSDKTQASESFSSDEEADLELQALTTSRLLKQQRERQEAVEALFKHILLYLQPYDSRRVLYAFSVLEAVLKTNPKEFIEAVSRTSMDTSSTAHLNLISNLLARHQEALIGQSFYGKLQTQVPNVCPHSLLLELLTYLCLSFLRSYYPCYLKVSHRDILGNRDVQVKSVEVLIRIMMQLVSVAKSSEGKNVEFIHSLLQRCKVQEFVLLSLSASMYTSQKRYGLATAHHGRALPEDSLFEESLINLGQDQIWSEHPLQIELLKLLQVLIVLEHHLGRAHEEAENQPDLSREWQRALNFQQAISALQYVQPHPLTSQGLLVSAVVRGLQPAYGYGMHPAWVSLVTHSLPYFGKSLGWTVTPFVVQICKNLDDLVKQYESESVKLSVSTTSKRENISPDYPLTLLEGLTTISHFCLLEQANQNKKTMAAGDPANLRNARNAILEELPRTVNTMALLWNVLRKEETQKRPVDLLGATKGSSSVYFKTTKTIRQKILDFLNPLTAHLGVQLTAAVAAVWSRKKAQRHSKMKIIPTASASQLTLVDLVCALSTLQTDTLLHLVKEVVKRPPQVKGGDEKSPLVDIPVLQFCYAFLQRLPVPALQENFSSLLGVLKESVQLNLAPPGYFLLLSMLNDFVTRTPNLENKKDQKDLQEITQKILEAVGNIAGSSLEQTSWLSRNLEVKAQPQASLEESDAEEDLYDAAAASAMVSSSAPSVYSVQALSLLAEVLASLLDMVYRSDEKEKAVPLISRLLYYVFPYLRNHSAYNAPSFRAGAQLLSSLSGYAYTKRAWRKEVLELFLDPAFFQMDTSCVHWKSIIDHLLTHEKTMFKDLMNMQSSSLKLFSSFEQKAMLLKRQAFAVFSGELDQYHLYLPLIQERLTDNLRVGQTSIVAAQMFLFFRVLLLRISPQHLTSLWPIMVSELIQTFTQLEEDLKDEDESLRSTNKVNRTKVSVPDANGPSVGEIPQSELILYLSACKFLDTALSFPPDKMPLFQIYRWAFIPEVDTEGPAFLSDVEENHQECKPHTVRILELLKLKFGEISSSDEITMKSEFPLLRQHSVSSIRQLMPFFMTLNGAFKTQRQLPADSPGTPFLDFPVTDSPRILKQLEECIEYDFLEHPEC

SEQ ID NO: 904446 - protein, 1772 aa, Homo sapiens
MDPEEQELLNDYRYRSYSSVIEKALRNFESSSEWADLISSLGKLNKALQSNLRYSLLPRRLLISKRLAQCLHPALPSGVHLKALETYEIIFKIVGTKWLAKDLFLYSCGLFPLLAHAAVSVRPVLLTLYEKYFLPLQKLLLPSLQAFIVGLLPGLEEGSEISDRTDALLLRLSLVVGKEVFYTALWGSVLASPSIRLPASVFVVGHINRDAPGREQKYMLGTNHQLTVKSLRASLLDSNVLVQRNNLEIVLFFFPFYTCLDSNERAIPLLRSDIVRILSAATQTLLRRDMSLNRRLYAWLLGSDIKGNTVVPESEISNSYEDQSSYFFEKYSKDLLVEGLAEILHQKFIDADVEERHHAYLKPFRVLISLLDKPEIGPQVVGNLFLEVIRAFYSYCRDALGSDLKLSYTQSGNSLISAIKENRNASEIVKTVNLLITSLSTDFLWDYMTRCFEECFRPVKQRYSVRNSVSPPPTVSELCALLVFLLDVIPLELYSEVQTQYLPQVLGCLVQPLAEDMEALSLPELTHALKTCFKVLSKVQMPPSYLDTESTSGTSSPVKGENGKIILETKAVIPGDEDASFPPLKSEDSGIGLSASSPELSEHLRVPRVSLERDDVWKKGGSMQRTFLCIQELIANFASKNIFGVQLTASGEESKSEEPAGKRDRDGTQSLAANDSSRKNSWEPKPITVPQFKQMLSDLFTARGSPFKTKSSESPSSSPSSPARKNGGEWDVEKVVIDLGGSREERREAFAAACHLLLDCATFPVYLSEEETEQLCATLFQLPGAGDSSFPSWLKSLMTICCCVTDCYLQNVAISTLLEVINHSQSLALVIEDKMKRYKSSGHNPFFGKLQMVTVPPIAPGILKVIAEKTDFYQRVARVLWNQLNKETREHHVTCVELFYRLHCLAPTANICEDIICHALLDPDKGTRLEALFRFSVIWHLTREIQGSRVTSHNRSFDRSLFVVLDSLACTDGAIGAAAQGWLVRALSLGDVARILEPVLLLLLQPKTQRTSIHCLKQENSADDLHRWFNRKKTSFREACAVPEPQESGSEEHLPLSQFTTVDREAIWAEVEKEPEKYPLRGELSEEELPYYVELPDRTAHGAPDSSEHTESADTSSGHTDSENTSSFSSPSHDLQELSNEENCCAPIHMGGRAYPKRSALLAAFQSESFKAGAKLSLVRVDSDKTQASESFSSDEEADLELQALTTSRLLKQQRERQEAVEALFKHILLYLQPYDSRRVLYAFSVLEAVLKTNPKEFIEAVSRTSMDTSSTAHLNLISNLLARHQEALIGQSFYGKLQTQVPNVCPHSLLLELLTYLCLSFLRSYYPCYLKVSHRDILGNRDVQVKSVEVLIRIMMQLVSVAKSSEGKNVEFIHSLLQRCKVQEFVLLSLSASMYTSQKRYGLATAHHGRALPEDSLFEESLINLGQDQIWSEHPLQIELLKLLQVLIVLEHHLGRAHEEAENQPDLSREWQRALNFQQAISALQYVQPHPLTSQGLLVSAVVRGLQPAYGYGMHPAWVSLVTHSLPYFGKSLGWTVTPFVVQICKNLDDLVKQYESESVKLSVSTTSKRENISPDYPLTLLEGLTTISHFCLLEQANQNKKTMAAGDPANLRNARNAILEELPRTVNTMALLWNVLRKEETQKRPVDLLGATKGSSSVYFKTTKTIRQKILDFLNPLTAHLGVQLTAAVAAVWSRKKAQRHSKMKIIPTASASQLTLVDLVCALSTLQTDTLLHLVKEVVKRPPQVKGGDEKSPLVDIPVLQFCYAFLQR

SEQ ID NO: 904447 - protein, 2171 aa, Homo sapiens
MDPEEQELLNDYRYRSYSSVIEKALRNFESSSEWADLISSLGKLNKALQSNLRYSLLPRRLLISKRLAQCLHPALPSGVHLKALETYEIIFKIVGTKWLAKDLFLYSCGLFPLLAHAAVSVRPVLLTLYEKYFLPLQKLLLPSLQAFIVGLLPGLEEGSEISDRTDALLLRLSLVVGKEVFYTALWGSVLASPSIRLPASVFVVGHINRDAPGREQKYMLGTNHQLTVKSLRASLLDSNVLVQRNNLEIVLFFFPFYTCLDSNERAIPLLRSDIVRILSAATQTLLRRDMSLNRRLYAWLLGSDIKGNTVVPESEISNSYEDQSSYFFEKYSKDLLVEGLAEILHQKFIDADVEERHHAYLKPFRVLISLLDKPEIGPQVVGNLFLEVIRAFYSYCRDALGSDLKLSYTQSGNSLISAIKENRNASEIVKTVNLLITSLSTDFLWDYMTRCFEECFRPVKQRYSVRNSVSPPPTVSELCALLVFLLDVIPLELYSEVQTQYLPQVLGCLVQPLAEDMEALSLPELTHALKTCFKVLSKVQMPPSYLDTESTSGTSSPVKGENGKIILETKAVIPGDEDASFPPLKSEDSGIGLSASSPELSEHLRVPRVSLERDDVWKKGGSMQRTFLCIQELIANFASKNIFGVQLTASGEESKSEEPAGKRDRDGTQSLAANDSSRKNSWEPKPITVPQFKQMLSDLFTARGSPFKTKSSESPSSSPSSPARKNGGEWDVEKVVIDLGGSREERREAFAAACHLLLDCATFPVYLSEEETEQLCATLFQLPGAGDSSFPSWLKSLMTICCCVTDCYLQNVAISTLLEVINHSQSLALVIEDKMKRYKSSGHNPFFGKLQMVTVPPIAPGILKVIAEKTDFYQRVARVLWNQLNKETREHHVTCVELFYRLHCLAPTANICEDIICHALLDPDKGTRLEALFRFSVIWHLTREIQGSRVTSHNRSFDRSLFVVLDSLACTDGAIGAAAQGWLVRALSLGDVARILEPVLLLLLQPKTQRTSIHCLKQENSADDLHRWFNRKKTSFREACAVPEPQESGSEEHLPLSQFTTVDREAIWAEVEKEPEKYPLRGELSEEELPYYVELPDRTAHGAPDSSEHTESADTSSGHTDSENTSSFSSPSHDLQELSNEENCCAPIHMGGRAYPKRSALLAAFQSESFKAGAKLSLVRVDSDKTQASESFSSDEEADLELQALTTSRLLKQQRERQEAVEALFKHILLYLQPYDSRRVLYAFSVLEAVLKTNPKEFIEAVSRTSMDTSSTAHLNLISNLLARHQEALIGQSFYGKLQTQVPNVCPHSLLLELLTYLCLSFLRSYYPCYLKVSHRDILGNRDVQVKSVEVLIRIMMQLVSVAKSSEGKNVEFIHSLLQRCKVQEFVLLSLSASMYTSQKRYGLATAHHGRALPEDSLFEESLINLGQDQIWSEHPLQIELLKLLQVLIVLEHHLGRAHEEAENQPDLSREWQRALNFQQAISALQYVQPHPLTSQGLLVSAVVRGLQPAYGYGMHPAWVSLVTHSLPYFGKSLGWTVTPFVVQICKNLDDLVKQYESESVKLSVSTTSKRENISPDYPLTLLEGLTTISHFCLLEQANQNKKTMAAGDPANLRNARNAILEELPRTVNTMALLWNVLRKEETQKRPVDLLGATKGSSSVYFKTTKTIRQKILDFLNPLTAHLGVQLTAAVAAVWSRKKAQRHSKMKIIPTASASQLTLVDLVCALSTLQTDTLLHLVKEVVKRPPQVKGGDEKSPLVDIPVLQFCYAFLQRLPVPALQENFSSLLGVLKESVQLNLAPPGYFLLLSMLNDFVTRTPNLENKKDQKDLQEITQKILEAVGNIAGSSLEQTSWLSRNLEVKAQPQASLEESDAEEDLYDAAAASAMVSSSAPSVYSVQALSLLAEVLASLLDMVYRSDEKEKAVPLISRLLYYVFPYLRNHSAYNAPSFRAGAQLLSSLSGYAYTKRAWRKEVLELFLDPAFFQMDTSCVHWKSIIDHLLTHEKTMFKDLMNMQSSSLKLFSSFEQKAMLLKRQAFAVFSGELDQYHLYLPLIQERLTDNLRVGQTSIVAAQMFLFFRVLLLRISPQHLTSLWPIMVSELIQTFTQLEEDLKDEDESLRSTHQVNRTKVSVRSNPGRFLSTSNSSLYDGQRNKAYFTKRLPPSVFLRSSNQP

SEQ ID NO: 904448 - protein, 64 aa, Homo sapiens
CCCSFSNGVFIRPVGVQRASPLSPGRGKYTPDLSSFMEMSAITNCCKDICSFPGASERGPHPPR

SEQ ID NO: 904449 - protein, 120 aa, Homo sapiens [sequence omitted]

SEQ ID NO: 904450 - protein, 2298 aa, Homo sapiens [sequence omitted]

SEQ ID NO: 904451 - protein, 2291 aa, Homo sapiens
MDPEEQELLNDYRYRSYSSVIEKALRNFESSSEWADLISSLGKLNKALQSNLRYSLLPRRLLISKRLAQCLHPALPSGVHLKALETYEIIFKIVGTKWLAKDLFLYSCGLFPLLAHAAVSVRPVLLTLYEKYFLPLQKLLLPSLQAFIVGLLPGLEEGSEISDRTDALLLRLSLVVGKEVFYTALWGSVLASPSIRLPASVFVVGHINRDAPGREQKYMLGTNHQLTVKSLRASLLDSNVLVQRNNLEIVLFFFPFYTCLDSNERAIPLLRSDIVRILSAATQTLLRRDMSLNRRLYAWLLGSDIKGNTVVPESEISNSYEDQSSYFFEKYSKDLLVEGLAEILHQKFIDADVEERHHAYLKPFRVLISLLDKPEIGPQVVGNLFLEVIRAFYSYCRDALGSDLKLSYTQSGNSLISAIKENRNASEIVKTVNLLITSLSTDFLWDYMTRCFEECFRPVKQRYSVRNSVSPPPTVSELCALLVFLLDVIPLELYSEVQTQYLPQVLGCLVQPLAEDMEALSLPELTHALKTCFKVLSKVQMPPSYLDTESTSGTSSPVKGENGKIILETKAVIPGDEDASFPPLKSEDSGIGLSASSPELSEHLRVPRVSLERDDVWKKGGSMQRTFLCIQELIANFASKNIFGVQLTASGEESKSEEPAGKRDRDGTQSLAANDSSRKNSWEPKPITVPQFKQMLSDLFTARGSPFKTKSSESPSSSPSSPARKNGGEWDVEKVVIDLGGSREERREAFAAACHLLLDCATFPVYLSEEETEQLCATLFQLPGAGDSSFPSWLKSLMTICCCVTDCYLQNVAISTLLEVINHSQSLALVIEDKMKRYKSSGHNPFFGKLQMVTVPPIAPGILKVIAEKTDFYQRVARVLWNQLNKETREHHVTCVELFYRLHCLAPTANICEDIICHALLDPDKGTRLEALFRFSVIWHLTREIQGSRVTSHNRSFDRSLFVVLDSLACTDGAIGAAAQGWLVRALSLGDVARILEPVLLLLLQPKTQRTSIHCLKQENSADDLHRWFNRKKTSFREACAVPEPQESGSEEHLPLSQFTTVDREAIWAEVEKEPEKYPLRGELSEEELPYYVELPDRTAHGAPDSSEHTESADTSSGHTDSENTSSFSSPSHDLQELSNEENCCAPIHMGGRAYPKRSALLAAFQSESFKAGAKLSLVRVDSDKTQASESFSSDEEADLELQALTTSRLLKQQRERQEAVEALFKHILLYLQPYDSRRVLYAFSVLEAVLKTNPKEFIEAVSRTSMDTSSTAHLNLISNLLARHQEALIGQSFYGKLQTQVPNVCPHSLLLELLTYLCLSFLRSYYPCYLKVSHRDILGNRDVQVKSVEVLIRIMMQLVSVAKSSEGKNVEFIHSLLQRCKVQEFVLLSLSASMYTSQKRYGLATAHHGRALPEDSLFEESLINLGQDQIWSEHPLQIELLKLLQVLIVLEHHLGRAHEEAENQPDLSREWQRALNFQQAISALQYVQPHPLTSQGLLVSAVVRGLQPAYGYGMHPAWVSLVTHSLPYFGKSLGWTVTPFVVQICKNLDDLVKQYESESVKLSVSTTSKRENISPDYPLTLLEGLTTISHFCLLEQANQNKKTMAAGDPANLRNARNAILEELPRTVNTMALLWNVLRKEETQKRPVDLLGATKGSSSVYFKTTKTIRQKILDFLNPLTAHLGVQLTAAVAAVWSRKKAQRHSKMKIIPTASASQLTLVDLVCALSTLQTDTLLHLVKEVVKRPPQVKGGDEKSPLVDIPVLQFCYAFLQRLPVPALQENFSSLLGVLKESVQLNLAPPGYFLLLSMLNDFVTRTPNLENKKDQKDLQEITQKILEAVGNIAGSSLEQTSWLSRNLEVKAQPQASLEESDAAAASAMVSSSAPSVYSVQALSLLAEVLASLLDMVYRSDEKEKAVPLISRLLYYVFPYLRNHSAYNAPSFRAGAQLLSSLSGYAYTKRAWRKEVLELFLDPAFFQMDTSCVHWKSIIDHLLTHEKTMFKDLMNMQSSSLKLFSSFEQKAMLLKRQAFAVFSGELDQYHLYLPLIQERLTDNLRVGQTSIVAAQMFLFFRVLLLRISPQHLTSLWPIMVSELIQTFTQLEEDLKDEDESLRSTNKVNRTKVSVPDANGPSVGEIPQSELILYLSACKFLDTALSFPPDKMPLFQIYRWAFIPEVDTEGPAFLSDVEENHQECKPHTVRILELLKLKFGEISSSDEITMKSEFPLLRQHSVSSIRQLMPFFMTLNGAFKTQRQLPADSPGTPFLDFPVTDSPRILKQLEECIEYDFLEHPEC

SEQ ID NO: 904452 - protein, 2298 aa, Homo sapiens [sequence omitted]

SEQ ID NO: 904453 - protein, 1792 aa, Homo sapiens
MDPEEQELLNDYRYRSYSSVIEKALRNFESSSEWADLISSLGKLNKALQSNLRYSLLPRRLLISKRLAQCLHPALPSGVHLKALETYEIIFKIVGTKWLAKDLFLYSCGLFPLLAHAAVSVRPVLLTLYEKYFLPLQKLLLPSLQAFIVGLLPGLEEGSEISDRTDALLLRLSLVVGKEVFYTALWGSVLASPSIRLPASVFVVGHINRDAPGREQKYMLGTNHQLTVKSLRASLLDSNVLVQRNNLEIVLFFFPFYTCLDSNERAIPLLRSDIVRILSAATQTLLRRDMSLNRRLYAWLLGSDIKGNTVVPESEISNSYEDQSSYFFEKYSKDLLVEGLAEILHQKFIDADVEERHHAYLKPFRVLISLLDKPEIGPQVVGNLFLEVIRAFYSYCRDALGSDLKLSYTQSGNSLISAIKENRNASEIVKTVNLLITSLSTDFLWDYMTRCFEECFRPVKQRYSVRNSVSPPPTVSELCALLVFLLDVIPLELYSEVQTQYLPQVLGCLVQPLAEDMEALSLPELTHALKTCFKVLSKVQMPPSYLDTESTSGTSSPVKGENGKIILETKAVIPGDEDASFPPLKSEDSGIGLSASSPELSEHLRVPRVSLERDDVWKKGGSMQRTFLCIQELIANFASKNIFGVQLTASGEESKSEEPAGKRDRDGTQSLAANDSSRKNSWEPKPITVPQFKQMLSDLFTARGSPFKTKSSESPSSSPSSPARKNGGEWDVEKVVIDLGGSREERREAFAAACHLLLDCATFPVYLSEEETEQLCATLFQLPGAGDSSFPSWLKSLMTICCCVTDCYLQNVAISTLLEVINHSQSLALVIEDKMKRYKSSGHNPFFGKLQMVTVPPIAPGILKVIAEKTDFYQRVARVLWNQLNKETREHHVTCVELFYRLHCLAPTANICEDIICHALLDPDKGTRLEALFRFSVIWHLTREIQGSRVTSHNRSFDRSLFVVLDSLACTDGAIGAAAQGWLVRALSLGDVARILEPVLLLLLQPKTQRTSIHCLKQENSADDLHRWFNRKKTSFREACAVPEPQESGSEEHLPLSQFTTVDREAIWAEVEKEPEKYPLRGELSEEELPYYVELPDRTAHGAPDSSEHTESADTSSGHTDSENTSSFSSPSHDLQELSNEENCCAPIHMGGRAYPKRSALLAAFQSESFKAGAKLSLVRVDSDKTQASESFSSDEEADLELQALTTSRLLKQQRERQEAVEALFKHILLYLQPYDSRRVLYAFSVLEAVLKTNPKEFIEAVSRTSMDTSSTAHLNLISNLLARHQEALIGQSFYGKLQTQVPNVCPHSLLLELLTYLCLSFLRSYYPCYLKVSHRDILGNRDVQVKSVEVLIRIMMQLVSVAKSSEGKNVEFIHSLLQRCKVQEFVLLSLSASMYTSQKRYGLATAHHGRALPEDSLFEESLINLGQDQIWSEHPLQIELLKLLQVLIVLEHHLGRAHEEAENQPDLSREWQRALNFQQAISALQYVQPHPLTSQGLLVSAVVRGLQPAYGYGMHPAWVSLVTHSLPYFGKSLGWTVTPFVVQICKNLDDLVKQYESESVKLSVSTTSKRENISPDYPLTLLEGLTTISHFCLLEQANQNKKTMAAGDPANLRNARNAILEELPRTVNTMALLWNVLRKEETQKRPVDLLGATKGSSSVYFKTTKTIRQKILDFLNPLTAHLGVQLTAAVAAVWSRKKAQRHSKMKIIPTASASQLTLVDLVCALSTLQTDTLLHLVKEVVKRPPQVKGGDEKSPLVDIPVLQFCYAFLQSVFTLPPTTLFRSHLAMSLTL

SEQ ID NO: 904454 - protein, 898 aa, Homo sapiens
MAAAGGAEGRRAALEAAAAAAPERGGGSCVLCCGDLEATALGRCDHPVCYRCSTKMRVLCEQRYCAVCREELRQVVFGKKLPAFATIPIHQLQHEKKYDIYFADGKVYALYRQLLQHECPRCPELPPFSLFGDLEQHMRRQHELFCCRLCLQHLQIFTYERKWYSRKDLARHRMQGDPDDTSHRGHPLCKFCDERYLDNDELLKHLRRDHYFCHFCDSDGAQDYYSDYAYLREHFREKHFLCEEGRCSTEQFTHAFRTEIDLKAHRTACHSRSRAEARQNRHIDLQFSYAPRHSRRNEGVVGGEDYEEVDRYSRQGRVARAGTRGAQQSRRGSWRYKREEEDREVAAAVRASVAAQQQEEARRSEDQEEGGRPKKEEAAARGPEDPRGPRRSPRTQGEGPGPKETSTNGPVSQEAFSVTGPAAPGALPPPSPKLKDEDFPSLSASTSSSCSTAATPGPVGLALPYAIPARGRSAFQEEDFPALVSSVPKPGTAPTSLVSAWNSSSSSKKVAQPPLSAQATGSGQPTRKAGKGSRGGRKGGPPFTQEEEEDGGPALQELLSTRPTGSVSSTLGLASIQPSKVGKKKKVGSEKPGTTLPQPPPATCPPGALQAPEAPASRAEGPVAVVVNGHTEGPAPARSAPKEPPGLPRPLGSFPCPTPQEDFPALGGPCPPRMPPPPGFSAVVLLKGTPPPPPPGLVPPISKPPPGFSGLLPSPHPACVPSPATTTTTKAPRLLPAPRAYLVPENFRERNLQLIQSIRDFLQSDEARFSEFKSHSGEFRQGLISAAQYYKSCRDLLGENFQKVFNELLVLLPDTAKQQELLSAHTDFCNREKPLSTKSKKNKKSAWQATTQQAGLDCRVCPTCQQVLAHGDASSHQALHAARDDDFPSLQAIARIIT

SEQ ID NO: 904455 - protein, 1294 aa, Homo sapiens
GSQAARRRAGREGAGSRTMAAAGGAEGRRAALEAAAAAAPERGGGSCVLCCGDLEATALGRCDHPVCYRCSTKMRVLCEQRYCAVCREELRQVVFGKKLPAFATIPIHQLQHEKKYDIYFADGKVYALYSVSRASPWVLASLWLWPFTSHSPHNRRHFGGHLVHQCWGQAPGFPSCDWGGLPGPPGGRAGGCAGERHAQVVQHLPRGHLEGHTRCVSQARGLKILERVQLSQGWSLRGGAAHGLRARARLLTQAMCTAMALHLSWVTGLGLVSGPAPGGDTECPGAVGGSRCLPRQLLQHECPRCPELPPFSLFGDLEQHMRRQHELFCCRLCLQHLQVCPPSDPGESLGGWVVQGMWPHGWEGLVHLLLLAPDGPLRVRLHVAGRPLAAGGALSRPLLLRHWPVGRGRRLGVPQPVPSLLCLVIFTYERKWYSRKDLARHRMQGDPDDTSHRGHPLCKFCDERYLDNDELLKHLRRDHYFCHFCDSDGAQDYYSDYAYLREHFREKHFLCEEGRCSTEQFTHAFRTEIDLKAHRTACHSRSRAEARQNRHIDLQFSYAPRHSRRNEGVVGGEDYEEVDRYSRQGRVARAGTRGAQQSRRGSWRYKREEEDREVAAAVRASVAAQQQEEARRSEDQEEGGRPKKEEAAARGPEDPRGPRRSPRTQGEGPGPKETSTNGPVSQEAFSVTGPAAPGCVGVPGLRVWAPRGEWCMVGGCGQPQVGAGRAGMEPRGLIAVDQLCFPAPSALPPPSPKLKDEDFPSLSASTSSSCSTAATPGPVGLALPYAIPARGRSAFQEEDFPALVSSVPKPGTAPTSLVSAWNSSSSSKKVAQPPLSAQATGSGQPTRKAGKGSRGGRKGGPPFTQEEEEDGGPALQELLSTRPTGSVSSTLGLASIQPSKVGKKKKVGSEKPGTTLPQPPPATCPPGALQAPEAPASRAEGPVAVVVNGHTEGPAPARSAPKEPPGLPRPLGSFPCPTPQEDFPALGGPCPPRMPPPPGFSAVVLLKGTPPPPPPGLVPPISKPPPGFSGLLPSPHPACVPSPATTTTTKASVWVSCLVSTGGGGTVPSPWATVKAEASTSSLPSDPQTQAAACPTGVPSPRELPGEEPSAHPVHQGLPAERRGPLQRVQEPLRGVQTGQAGPGSPDGSGGPGAGCQPVFIQGPGQRGWLSPALRWQGLISAAQYYKSCRDLLGENFQKVFNELLVLLPDTAKQQELLSAHTDFCNREKPLSTKSKKNKKSAWQATTQQAGLDCRVCPTCQQVLAHGDASSHQALHAARDDDFPSLQAIARIIT

SEQ ID NO: 904456 - protein, 533 aa, Homo sapiens
MYEAGGESAEGAEDPRGPRRSPRTQGEGPGPKETSTNGPVSQEAFSVTGPAAPGCVGVPGALPPPSPKLKDEDFPSLSASTSSSCSTAATPGPVGLALPYAIPARGRSAFQEEDFPALVSSVPKPGTAPTSLVSAWNSSSSSKKVAQPPLSAQATGSGQPTRKAGKGSRGGRKGGPPFTQEEEEDGGPALQELLSTRPTGSVSSTLGLASIQPSKVGKKKKVGSEKPGTTLPQPPPATCPPGALQAPEAPASRAEGPVAVVVNGHTEGPAPARSAPKEPPGLPRPLGSFPCPTPQEDFPALGGPCPPRMPPPPGFSAVVLLKGTPPPPPPGLVPPISKPPPGFSGLLPSPHPACVPSPATTTTTKAPRLLPAPRAYLVPENFRERNLQLIQSIRDFLQSDEARFSEFKSHSGEFRQGLISAAQYYKSCRDLLGENFQKVFNELLVLLPDTAKQQELLSAHTDFCNREKPLSTKSKKNKKSAWQATTQQAGLDCRVCPTCQQVLAHGDASSHQALHAARDDDFPSLQAIARIIT

SEQ ID NO: 904457 - protein, 244 aa, Homo sapiens
KLALEARQPAVSEGPLWVLSCHPSGFSAVVLLKGTPPPPPPGLVPPISKPPPGFSGLLPSPHPACVPSPATTTTTKAPRLLPAPRAYLVPENFRERNLQLIQSIRDFLQSDEARFSEFKSHSGEFRQGLISAAQYYKSCRDLLGENFQKVFNELLVLLPDTAKQQELLSAHTDFCNREKPLSTKSKKNKKSAWQATTQQAGLDCRVCPTCQQVLAHGDASSHQALHAARDDDFPSLQAIARIIT

SEQ ID NO: 904458 - protein, 144 aa, Homo sapiens
LKRASSLCRKSLRDFLKRASSSGEFRQGLISAAQYYKSCRDLLGENFQKVFNELLVLLPDTAKQQELLSAHTDFCNREKPLSTKSKKNKKSAWQATTQQAGLDCRVCPTCQQVLAHGDASSHQALHAARDDDFPSLQAIARIIT

SEQ ID NO: 904459 - protein, 837 aa, Homo sapiens
GSQAARRRAGREGAGSRTMAAAGGAEGRRAALEAAAAAAPERGGGSCVLCCGDLEATALGRCDHPVCYRCSTKMRVLCEQRYCAVCREELRQVVFGKKLPAFATIPIHQLQHEKKYDIYFADGKVYALYRQLLQHECPRCPELPPFSLFGDLEQHMRRQHELFCCRLCLQHLQIFTYERKWYSRKDLARHRMQGDPDDTSHRGHPLCKFCDERYLDNDELLKHLRRDHYFCHFCDSDGAQDYYSDYAYLREHFREKHFLCEEGRCSTEQFTHAFRTEIDLKAHRTACHSRSRAEARQNRHIDLQFSYAPRHSRRNEGVVGGEDYEEVDRYSRQGRVARAGTRGAQQSRRGSWRYKREEEDREVAAAVRASVAAQQQEEARRSEDQEEGGRPKKEEAAARGPEDPRGPRRSPRTQGEGPGPKETSTNGPVSQEAFSVTGPAAPGALPPPSPKLKDEDFPSLSASTSSSCSTAATPGPVGLALPYAIPARGRSAFQEEDFPALVSSVPKPGTAPTSLVSAWNSSSSSKKVAQPPLSAQATGSGQPTRKAGKGSRGGRKGGPPFTQEEEEDGGPALQELLSTRPTGSVSSTLGLASIQPSKVGKKKKVGSEKPGTTLPQPPPATCPPGALQAPEAPASRAEGPVAVVVNGHTEGPAPARSAPKEPPGLPRPLGSFPCPTPQEDFPALGGPCPPRMPPPPGFSSCGAPEGHACARDREGNRRGAQSGGASGAGSEEGTETRKKREAKRTKKEGEEAGRERKKRESGRSARTEETRREEAENSTRGEEGREGRGRREAGKEPRGQDRRSKEERTRRRQRREQSRRPSEGRAAREDEAKGGKT

SEQ ID NO: 904460 - protein, 240 aa, Homo sapiens
GSQAARRRAGREGAGSRTMAAAGGAEGRRAALEAAAAAAPERGGGSCVLCCGDLEATALGRCDHPVCYRCSTKMRVLCEQRYCAVCREELRQVVFGKKLPAFATIPIHQLQHEKKYDIYFADGKVYALYRQPAARHVVPACAPELSTCIRSSSGDLESDEHAVMAATEASYLLPVADAHSEGNRIRQRSPCPTSKWTPAKRLGYPPPANGTPWSSGLSAMLGVVAPQMTTVVYQCGTRLL

SEQ ID NO: 904461 - protein, 196 aa, Homo sapiens
GSQAARRRAGREGAGSRTMAAAGGAEGRRAALPYAIPARGRSAFQEEDFPALVSSVPKPGTEDTRLVLVPSPPGNTEPPRVTLQDPRPCQPYDPAQRGRPNTRRPTHTNTSHSTEATRSTRHQATDTPPQASPQYATKPSVPARKPHRWRQQDQRNSHTQTQPEKKSRDTENSRTPDPTTESQLTARQANHQVRNK

SEQ ID NO: 904462 - protein, 1294 aa, Homo sapiens; identical to SEQ ID NO: 904455

SEQ ID NO: 904463 - protein, 904 aa, Homo sapiens
MAAAGGAEGRRAALEAAAAAAPERGGGSCVLCCGDLEATALGRCDHPVCYRCSTKMRVLCEQRYCAVCREELRQVVFGKKLPAFATIPIHQLQHEKKYDIYFADGKVYALYRQLLQHECPRCPELPPFSLFGDLEQHMRRQHELFCCRLCLQHLQIFTYERKWYSRKDLARHRMQGDPDDTSHRGHPLCKFCDERYLDNDELLKHLRRDHYFCHFCDSDGAQDYYSDYAYLREHFREKHFLCEEGRCSTEQFTHAFRTEIDLKAHRTACHSRSRAEARQNRHIDLQFSYAPRHSRRNEGVVGGEDYEEVDRYSRQGRVARAGTRGAQQSRRGSWRYKREEEDREVAAAVRASVAAQQQEEARRSEDQEEGGRPKKEEAAARGPEDPRGPRRSPRTQGEGPGPKETSTNGPVSQEAFSVTGPAAPGCVGVPGALPPPSPKLKDEDFPSLSASTSSSCSTAATPGPVGLALPYAIPARGRSAFQEEDFPALVSSVPKPGTAPTSLVSAWNSSSSSKKVAQPPLSAQATGSGQPTRKAGKGSRGGRKGGPPFTQEEEEDGGPALQELLSTRPTGSVSSTLGLASIQPSKVGKKKKVGSEKPGTTLPQPPPATCPPGALQAPEAPASRAEGPVAVVVNGHTEGPAPARSAPKEPPGLPRPLGSFPCPTPQEDFPALGGPCPPRMPPPPGFSAVVLLKGTPPPPPPGLVPPISKPPPGFSGLLPSPHPACVPSPATTTTTKAPRLLPAPRAYLVPENFRERNLQLIQSIRDFLQSDEARFSEFKSHSGEFRQGLISAAQYYKSCRDLLGENFQKVFNELLVLLPDTAKQQELLSAHTDFCNREKPLSTKSKKNKKSAWQATTQQAGLDCRVCPTCQQVLAHGDASSHQALHAARDDDFPSLQAIARIIT

SEQ ID NO: 904464 - protein, 157 aa, Homo sapiens
MYEAGGESAEGGLIQSIRDFLQSDEARFSEFKSHSGEFRQGLISAAQYYKSCRDLLGENFQKVFNELLVLLPDTAKQQELLSAHTDFCNREKPLSTKSKKNKKSAWQATTQQAGLDCRVCPTCQQVLAHGDASSHQALHAARDDDFPSLQAIARIIT

SEQ ID NO: 904465 - protein, 898 aa, Homo sapiens; identical to SEQ ID NO: 904454

SEQ ID NO: 904466 - protein, 698 aa, Homo sapiens
GSQAARRRAGREGAGSRTMAAAGGAEGRRAALEAAAAAAPERGGGSCVLCCGDLEATALGRCDHPVCYRCSTKMRVLCEQRYCAVCREELRQVVFGKKLPAFATIPIHQLQHEKKYDIYFADGKVYALYRQLLQHECPRCPELPPFSLFGDLEQHMRRQHELFCCRLCLQHLQIFTYERKWYSRKDLARHRMQGDPDDTSHRGHPLCKFCDERYLDNDELLKHLRRDHYFCHFCDSDGAQDYYSDYAYLREHFREKHFLCEEGRCSTEQFTHAFRTEIDLKAHRTACHSRSRAEARQNRHIDLQFSYAPRHSRRNEGVVGGEDYEEVDRYSRQGRVARAGTRGAQQSRRGSWRYKREEEDREVAAAVRASVAAQQQEEARRSEDQEEGGRPKKEEAAARGPEDPRGPRRSPRTQGEGPGPKETSTNGPVSQEAFSVTGPAAPGALPPPSPKLKDEDFPSLSASTSSSCSTAATPGPVGLALPYAIPARGRSAFQEEDFPALVSSVPKPGTAPTSLVSAWNSSSSSKKVAQPPLSAQATGSGQPTRKAGKGSRGGRKGGPPFTQEEEEDGGPALQELLSTRPTGSVSSTLGLASIQPSKVGKKKKVGSEKPGTTLPQPPPATCPPGALQAPEAPASRAEGPVAVVVNGHTEGPAPARSAPKEPPGLPRPLGSFPCPTPQEDFPALGGPCPPRMPPPPAP

SEQ ID NO: 904467 - protein, 124 aa, Homo sapiens
SEAVDGKLSIFIHKREDQSSHEVLQPLLSSSEGRPFRLGTGANMEKVVKMDRDRTNGGCCEVITEEAAAALRKATKWAQSGLIVSIGPPVESINPETVSGLSTGDKKKTAQTSICRERNSELAR

SEQ ID NO: 904468 - protein, 150 aa, Homo sapiens
MSRLGLRRRQEFLSVTTIAVMSGRGKQGGKARAKAKSRSSRAGLQFPVGRVHRLLRKGNYAERVGAGAPVYMAAVLEYLTAEILELAGNAARDNKKTRIIPRHLQLAIRNDEELNKLLGKVTIAQGGVLPNIQAVLLPKKTESHHKAKGK

SEQ ID NO: 904469 - protein, 160 aa, Homo sapiens
PISNITPLNFFFSALSSGRQEFLSVTTIAVMSGRGKQGGKARAKAKSRSSRAGLQFPVGRVHRLLRKGNYAERVGAGAPVYMAAVLEYLTAEILELAGNAARDNKKTRIIPRHLQLAIRNDEELNKLLGKVTIAQGGVLPNIQAVLLPKKTESHHKAKGK

SEQ ID NO: 904470 - protein, 153 aa, Homo sapiens
AAAFSATFPIARQEFLSVTTIAVMSGRGKQGGKARAKAKSRSSRAGLQFPVGRVHRLLRKGNYAERVGAGAPVYMAAVLEYLTAEILELAGNAARDNKKTRIIPRHLQLAIRNDEELNKLLGKVTIAQGGVLPNIQAVLLPKKTESHHKAKGK

SEQ ID NO: 904471 - protein, 153 aa, Homo sapiens; identical to SEQ ID NO: 904470

SEQ ID NO: 904472 - protein, 153 aa, Homo sapiens; identical to SEQ ID NO: 904470

SEQ ID NO: 904473 - protein, 301 aa, Homo sapiens
MSRLGLRRRQEFLSVTTIAVMSGRGKQGGKARAKAKSRSSRAGLQFPVGRVHRLLRKGNYAERVGAGAPVYMAAVLEYLTAEILELAGNAARDNKKTRIIPRHLQLAIRNDEELNKLLGKVTIRQRASEADVRPKWAQPGPRLEGAPVNSKGSFQSHPRFQIKELLMLATLSPAFLKKKNERTTTRKSKKGAHEKKRTPVRSTKGSRTHSSVARGGPQRVARHKNRRRARADTTAETTRKQESMGTSERRTTLVGETIVGHTPAHDKTRKKANNKNQRDKADTRDDTAGQQEGDEVRENNI

SEQ ID NO: 904474 - protein, 70 aa, Homo sapiens
FSFGNGYLSQAPKPSKKTYSRAQAGQQQKAPRGHGGQLGLEKTEMSPEATCPGQTPFPLAVQFRVKGTGG

SEQ ID NO: 904475 - protein, 1409 aa, Homo sapiens
GTPGGGAGCVLAGGLAEPESGSGHGAGLSPGKRDALRRRRAGKQSGRERGRPRWLQSRRSPCCPARALRVLLGAVSRQERWEPGLGGSRSSVGRRVAGGAAGAGTGGAGPAGRLLPPPAPGSPAAPAAVSPAAGQPRPPAPASRGPMPARIGYYEIDRTIGKGNFAVVKRATHLVTKAKVAIKIIDKTQLDEENLKKIFREVQIMKMLCHPHIIRLYQVMETERMIYLVTEYASGGEIFDHLVAHGRMAEKEARRKFKQIVTAVYFCHCRNIVHRDLKAENLLLDANLNIKIADFGFSNLFTPGQLLKTWCGSPPYAAPELFEGKEYDGPKVDIWSLGVVLYVLVCGALPFDGSTLQNLRARVLSGKFRIPFFMSTECEHLIRHMLVLDPNKRLSMEQICKHKWMKLGDADPNFDRLIAECQQLKEERQVDPLNEDVLLAMEDMGLDKEQTLQSLRSDAYDHYSAIYSLLCDRHKRHKTLRLGALPSMPRALAFQAPVNIQAEQAGTAMNISVPQVQLINPENQIVEPDGTLNLDSDEGEEPSPEALVRYLSMRRHTVGVADPRTEVMEDLQKLLPGFPGVNPQAPFLQVAPNVNFMHNLLPMQNLQPTGQLEYKEQSLLQPPTLQLLNGMGPLGRRASDGGANIQLHAQQLLKRPRGPSPLVTMTPAVPAVTPVDEESSDGEPDQEAVQSSTYKDSNTLHLPTERFSPVRRFSDGAASIQAFKAHLEKMGNNSSIKQLQQECEQLQKMYGGQIDERTLEKTQQQHMLYQQEQHHQILQQQIQDSICPPQPSPPLQAACENQPALLTHQLQRLRIQPSSPPPNHPNNHLFRQPSNSPPPMSSAMIQPHGAASSSQFQGLPSRSAIFQQQPENCSSPPNVALTCLGMQQPAQSQQVTIQVQEPVDMLSNMPGTAAGSSGRGISISPSAGQMQMQHRTNLMATLSYGHRPLSKQLSADSAEAHSLNVNRFSPANYDQAHLHPHLFSDQSRGSPSSYSPSTGVGFSPTQALKVPPLDQFPTFPPSAHQQPPHYTTSALQQALLSPTPPDYTRHQQVPHILQGLLSPRHSLTGHSDIRLPPTEFAQLIKRQQQQRQQQQQQQQQQEYQELFRHMNQGDAGSLAPSLGGQSMTERQALSYQNADSYHHHTSPQHLLQIRAQECVSQASSPTPPHGYAHQPALMHSESMEEDCSCEGAKDGFQDSKSSSTLTKGCHDSPLLLSTGGPGDPESLLGTVSHAQELGIHPYGHQPTAAFSKNKVPSREPVIGNCMDRSSPGQAVELPDHNGLGYPARPSVHEHHRPRALQRHHTIQNSDDAYVQLDNLPGMSLVAGKALSSARMSDAVLSQSSLMGSQQFQDGENEECGASLGGHEHPDLSDGSQHLNSSCYPSTCITDILLSYKHPEVSFSMEQAGV

SEQ ID NO: 904476 - protein, 69 aa, Homo sapiens
REEMRETGKKMQPVRLDHGTAHGSSTIKFSSNKFKTLSVLLSHLHLFRLHVKISQPSLPISSRGMSHFV

SEQ ID NO: 904477 - protein, 1311 aa, Homo sapiens
NKMAAAAASGAGGAAGAGTGGAGPAGRLLPPPAPGSPAAPAAVSPAAGQPRPPAPASRGPMPARIGYYEIDRTIGKGNFAVVKRATHLVTKAKVAIKIIDKTQLDEENLKKIFREVQIMKMLCHPHIIRLYQVMETERMIYLVTEYASGGEIFDHLVAHGRMAEKEARRKFKQIVTAVYFCHCRNIVHRDLKAENLLLDANLNIKIADFGFSNLFTPGQLLKTWCGSPPYAAPELFEGKEYDGPKVDIWSLGVVLYVLVCGALPFDGSTLQNLRARVLSGKFRIPFFMSTECEHLIRHMLVLDPNKRLSMEQICKHKWMKLGDADPNFDRLIAECQQLKEERQVDPLNEDVLLAMEDMGLDKEQTLQSLRSDAYDHYSAIYSLLCDRHKRHKTLRLGALPSMPRALAFQAPVNIQAEQAGTAMNISVPQVQLINPENQIVEPDGTLNLDSDEGEEPSPEALVRYLSMRRHTVGVADPRTEVMEDLQKLLPGFPGVNPQAPFLQVAPNVNFMHNLLPMQNLQPTGQLEYKEQSLLQPPTLQLLNGMGPLGRRASDGGANIQLHAQQLLKRPRGPSPLVTMTPAVPAVTPVDEESSDGEPDQEAVQRYLANRSKRHTLAMTNPTAEIPPDLQRQLGQQPFRSRVWPPHLVPDQHRSTYKDSNTLHLPTERFSPVRRFSDGAASIQAFKAHLEKMGNNSSIKQLQQECEQLQKMYGGQIDERTLEKTQQQHMLYQQEQHHQILQQQIQDSICPPQPSPPLQAACENQPALLTHQLQRLRIQPSSPPPNHPNNHLFRQPSNSPPPMSSAMIQPHGAASSSQFQGLPSRSAIFQQQPENCSSPPNVALTCLGMQQPAQSQQVTIQVQEPVDMLSNMPGTAAGSSGRGISISPSAGQMQMQHRTNLMATLSYGHRPLSKQLSADSAEAHSAHQQPPHYTTSALQQALLSPTPPDYTRHQQVPHILQGLLSPRHSLTGHSDIRLPPTEFAQLIKRQQQQRQQQQQQQQQQEYQELFRHMNQGDAGSLAPSLGGQSMTERQALSYQNADSYHHHTSPQHLLQIRAQECVSQASSPTPPHGYAHQPALMHSESMEEDCSCEGAKDGFQDSKSSSTLTKGCHDSPLLLSTGGPGDPESLLGTVSHAQELGIHPYGHQPTAAFSKNKVPSREPVIGNCMDRSSPGQAVELPDHNGLGYPARPSVHEHHRPRALQRHHTIQNSDDAYVQLDNLPGMSLVAGKALSSARMSDAVLSQSSLMGSQQFQDGENEECGASLGGHEHPDLSDGSQHLNSSCYPSTCITDILLSYKHPEVSFSMEQAGV

SEQ ID NO: 904478 - protein, 1297 aa, Homo sapiens
MAAAAASGAGGAAGAGTGGAGPAGRLLPPPAPGSPAAPAAVSPAAGQPRPPAPASRGPMPARIGYYEIDRTIGKGNFAVVKRATHLVTKAKVAIKIIDKTQLDEENLKKIFREVQIMKMLCHPHIIRLYQVMETERMIYLVTEYASGGEIFDHLVAHGRMAEKEARRKFKQIVTAVYFCHCRNIVHRDLKAENLLLDANLNIKIADFGFSNLFTPGQLLKTWCGSPPYAAPELFEGKEYDGPKVDIWSLGVVLYVLVCGALPFDGSTLQNLRARVLSGKFRIPFFMSTECEHLIRHMLVLDPNKLNAECQQLKEERQVDPLNEDVLLAMEDMGLDKEQTLQAEQAGTAMNISVPQVQLINPENQIVEPDGTLNLDSDEGEEPSPEALVRYLSMRRHTVGVADPRTEVMEDLQKLLPGFPGVNPQAPFLQVAPNVNFMHNLLPMQNLQPTGQLEYKEQSLLQPPTLQLLNGMGPLGRRASDGGANIQLHAQQLLKRPRGPSPLVTMTPAVPAVTPVDEESSDGEPDQEAVQRYLANRSKRHTLAMTNPTAEIPPDLQRQLGQQPFRSRVWPPHLVPDQHRSTYKDSNTLHLPTERFSPVRRFSDGAASIQAFKAHLEKMGNNSSIKQLQQECEQLQKMYGGQIDERTLEKTQQQHMLYQQEQHHQILQQQIQDSICPPQPSPPLQAACENQPALLTHQLQRLRIQPSSPPPNHPNNHLFRQPSNSPPPMSSAMIQPHGAASSSQFQGLPSRSAIFQQQPENCSSPPNVALTCLGMQQPAQSQQVTIQVQEPVDMLSNMPGTAAGSSGRGISISPSAGQMQMQHRTNLMATLSYGHRPLSKQLSADSAEAHSLNVNRFSPANYDQAHLHPHLFSDQSRGSPSSYSPSTGVGFSPTQALKVPPLDQFPTFPPSAHQQPPHYTTSALQQALLSPTPPDYTRHQQVPHILQGLLSPRHSLTGHSDIRLPPTEFAQLIKRQQQQRQQQQQQQQQQEYQELFRHMNQGDAGSLAPSLGGQSMTERQALSYQNADSYHHHTSPQHLLQIRAQECVSQASSPTPPHGYAHQPALMHSESMEEDCSCEGAKDGFQDSKSSSTLTKGCHDSPLLLSTGGPGDPESLLGTVSHAQELGIHPYGHQPTAAFSKNKVPSREPVIGNCMDRSSPGQAVELPDHNGLGYPARPSVHEHHRPRALQRHHTIQNSDDAYVQLDNLPGMSLVAGKALSSARMSDAVLSQSSLMGSQQFQDGENEECGASLGGHEHPDLSDGSQHLNSSCYPSTCITDILLSYKHPEVSFSMEQAGV

SEQ ID NO: 904479 - protein, 998 aa, Homo sapiens
  misc_feature (3)..(3): Xaa can be any naturally occurring amino acid
FSXIAHCKGQTLRRIPMQLDVGSSHLMPSGQGGPFHSTAVAWAAVGETAPCTHVPQVQLINPENQIVEPDGTLNLDSDEGEEPSPEALVRYLSMRRHTVGVADPRTEVMEDLQKLLPGFPGVNPQAPFLQVAPNVNFMHNLLPMQNLQPTGQLEYKEQSLLQPPTLQLLNGMGPLGRRASDGGANIQLHAQQLLKRPRGPSPLVTMTPAVPAVTPVDEESSDGEPDQEAVQRYLANRSKRHTLAMTNPTAEIPPDLQRQLGQQPFRSRVWPPHLVPDQHRSTYKDSNTLHLPTERFSPVRRFSDGAASIQAFKAHLEKMGNNSSIKQLQQECEQLQKMYGGQIDERTLEKTQQQHMLYQQEQHHQILQQQIQDSICPPQPSPPLQAACENQPALLTHQLQRLRIQPSSPPPNHPNNHLFRQPSNSPPPMSSAMIQPHGAASSSQFQGLPSRSAIFQQQPENCSSPPNVALTCLGMQQPAQSQQVTIQVQEPVDMLSNMPGTAAGSSGRGISISPSAGQMQMQHRTNLMATLSYGHRPLSKQLSADSAEAHSLNVNRFSPANYDQAHLHPHLFSDQSRGSPSSYSPSTGVGFSPTQALKVPPLDQFPTFPPSAHQQPPHYTTSALQQALLSPTPPDYTRHQQVPHILQGLLSPRHSLTGHSDIRLPPTEFAQLIKRQQQQRQQQQQQQQQQEYQELFRHMNQGDAGSLAPSLGGQSMTERQALSYQNADSYHHHTSPQHLLQIRAQECVSQASSPTPPHGYAHQPALMHSESMEEDCSCEGAKDGFQDSKSSSTLTKGCHDSPLLLSTGGPGDPESLLGTVSHAQELGIHPYGHQPTAAFSKNKVPSREPVIGNCMDRSSPGQAVELPDHNGLGYPARPSVHEHHRPRALQRHHTIQNSDDAYVQLDNLPGMSLVAGKALSSARMSDAVLSQSSLMGSQQFQDGENEECGASLGGHEHPDLSDGSQHLNSSCYPSTCITDILLSYKHPEVSFSMEQAGV

SEQ ID NO: 904480 - protein, 110 aa, Homo sapiens
SGGAQTGQSSDDAYVQLDNLPGMSLVAGKALSSARMSDAVLSQSSLMGSQQFQDGENEECGASLGGHEHPDLSDGSQHLNSSCYPSTCITDILLSYKHPEVSFSMEQAGV

SEQ ID NO: 904481 - protein, 1339 aa, Homo sapiens
NKMAAAAASGAGGAAGAGTGGAGPAGRLLPPPAPGSPAAPAAVSPAAGQPRPPAPASRGPMPARIGYYEIDRTIGKGNFAVVKRATHLVTKAKVAIKIIDKTQLDEENLKKIFREVQIMKMLCHPHIIRLYQVMETERMIYLVTEYASGGEIFDHLVAHGRMAEKEARRKFKQIVTAVYFCHCRNIVHRDLKAENLLLDANLNIKIADFGFSNLFTPGQLLKTWCGSPPYAAPELFEGKEYDGPKVDIWSLGVVLYVLVCGALPFDGSTLQNLRARVLSGKFRIPFFMSTECEHLIRHMLVLDPNKRLSMEQICKHKWMKLGDADPNFDRLIAECQQLKEERQVDPLNEDVLLAMEDMGLDKEQTLQSLRSDAYDHYSAIYSLLCDRHKRHKTLRLGALPSMPRALAFQAPVNIQAEQAGTAMNISVPQVQLINPENQIVEPDGTLNLDSDEGEEPSPEALVRYLSMRRHTVGVADPRTEVMEDLQKLLPGFPGVNPQAPFLQVAPNVNFMHNLLPMQNLQPTGQLEYKEQSLLQPPTLQLLNGMGPLGRRASDGGANIQLHAQQLLKRPRGPSPLVTMTPAVPAVTPVDEESSDGEPDQEAVQRYLANRSKRHTLAMTNPTAEIPPDLQRQLGQQPFRSRVWPPHLVPDQHRSTYKDSNTLHLPTERFSPVRRFSDGAASIQAFKAHLEKMGNNSSIKQLQQECEQLQKMYGGQIDERTLEKTQQQHMLYQQEQHHQILQQQIQDSICPPQPSPPLQAACENQPALLTHQLQRLRIQPSSPPPNHPNNHLFRQPSNSPPPMSSAMIQPHGAASSSQFQGLPSRSAIFQQQPENCSSPPNVALTCLGMQQPAQSQQVTIQVQEPVDMLSNMPGTAAGSSGRGISISPSAGQMQMQHRTNLMATLSYGHRPLSKQLSADSAEAHSLNVNRFSPANYDQAHLHPHLFSDQSRGSPSSYSPSTGVGFSPTQALKVPPLDQFPTFPPSAHQQPPHYTTSALQQALLSPTPPDYTRHQQVPHILQGLLSPRHSLTGHSDIRLPPTEFAQLIKRQQQQRQQQQQQQQQQEYQELFRHMNQGDAGSLAPSLGGQSMTERQALSYQNADSYHHHTSPQHLLQIRAQECVSQASSPTPPHGYAHQPALMHSESMEEDCSCEGAKDGFQDSKSSSTLTKGCHDSPLLLSTGGPGDPESLLGTVSHAQELGIHPYGHQPTAAFSKNKVPSREPVIGNCMDRSSPGQAVELPDHNGLGYPARPSVHEHHRPRALQRHHTIQNSDDAYVQLDNLPGMSLVAGKALSSARMSDAVLSQSSLMGSQQFQDGENEDILLSYKHPEVSFSMEQAGV

SEQ ID NO: 904482 - protein, 1371 aa, Homo sapiens
NKMAAAAASGAGGAAGAGTGGAGPAGRLLPPPAPGSPAAPAAVSPAAGQPRPPAPASRGPMPARIGYYEIDRTIGKGNFAVVKRATHLVTKAKVAIKIIDKTQLDEENLKKIFREVQIMKMLCHPHIIRLYQVMETERMIYLVTEYASGGEIFDHLVAHGRMAEKEARRKFKQIVTAVYFCHCRNIVHRDLKAENLLLDANLNIKIADFGFSNLFTPGQLLKTWCGSPPYAAPELFEGKEYDGPKVDIWSLGVVLYVLVCGALPFDGSTLQNLRARVLSGKFRIPFFMSTECEHLIRHMLVLDPNKRLSMEQICKHKWMKLGDADPNFDRLIAECQQLKEERQVDPLNEDVLLAMEDMGLDKEQTLQSLRSDAYDHYSAIYSLLCDRHKRHKTLRLGALPSMPRALAFQAPVNIQAEQAGTAMNISVPQVQLINPENQIVEPDGTLNLDSDEGEEPSPEALVRYLSMRRHTVGVADPRTEVMEDLQKLLPGFPGVNPQAPFLQVAPNVNFMHNLLPMQNLQPTGQLEYKEQSLLQPPTLQLLNGMGPLGRRASDGGANIQLHAQQLLKRPRGPSPLVTMTPAVPAVTPVDEESSDGEPDQEAVQRYLANRSKRHTLAMTNPTAEIPPDLQRQLGQQPFRSRVWPPHLVPDQHRSTYKDSNTLHLPTERFSPVRRFSDGAASIQAFKAHLEKMGNNSSIKQLQQECEQLQKMYGGQIDERTLEKTQQQHMLYQQEQHHQILQQQIQDSICPPQPSPPLQAACENQPALLTHQLQRLRIQPSSPPPNHPNNHLFRQPSNSPPPMSSAMIQPHGAASSSQFQGLPSRSAIFQQQPENCSSPPNVALTCLGMQQPAQSQQVTIQVQEPVDMLSNMPGTAAGSSGRGISISPSAGQMQMQHRTNLMATLSYGHRPLSKQLSADSAEAHSLNVNRFSPANYDQAHLHPHLFSDQSRGSPSSYSPSTGVGFSPTQALKVPPLDQFPTFPPSAHQQPPHYTTSALQQALLSPTPPDYTRHQQVPHILQGLLSPRHSLTGHSDIRLPPTEFAQLIKRQQQQRQQQQQQQQQQEYQELFRHMNQGDAGSLAPSLGGQSMTERQALSYQNADSYHHHTSPQHLLQIRAQECVSQASSPTPPHGYAHQPALMHSESMEEDCSCEGAKDGFQDSKSSSTLTKGCHDSPLLLSTGGPGDPESLLGTVSHAQELGIHPYGHQPTAAFSKNKVPSREPVIGNCMDRSSPGQAVELPDHNGLGYPARPSVHEHHRPRALQRHHTIQNSDDAYVQLDNLPGMSLVAGKALSSARMSDAVLSQSSLMGSQQFQDGENEECGASLGGHEHPDLSDGSQHLNSSCYPSTCITDILLSYKHPEVSFSMEQAGV

SEQ ID NO: 904483 - protein, 427 aa, Homo sapiens
NKMAAAAASGAGGAAGAGTGGAGPAGRLLPPPAPGSPAAPAAVSPAAGQPRPPAPASRGPMPARIGYYEIDRTIGKGNFAVVKRATHLVTKAKVAIKIIDKTQLDEENLKKIFREVQIMKMLCHPHIIRLYQVMETERMIYLVTEYASGGEIFDHLVAHGRMAEKEARRKFKQIVTAVYFCHCRNIVHRDLKAENLLLDANLNIKIADFGFSNLFTPGQLLKTWCGSPPYAAPELFEGKEYDGPKVDIWSLGVVLYVLVCGALPFDGSTLQNLRARVLSGKFRIPFFMSTECEHLIRHMLVLDPNKRLSMEQICKHKWMKLGDADPNFDRLIAECQQLKEERQVDPLNEDVLLAMEDMGLDKEQTLQSLRSDAYDHYSAIYSLLCDRHKRHKTLRLGALPSMPRALAFQRKTNRCERKQLTGAVPLR

SEQ ID NO: 904484 - protein, 93 aa, Homo sapiens
KMEEKVCSIIVCMTHHHLHTHTTVVFFVSPDVINCTSSLFGMQSLGVVLYVLVCGALPFDGSTLQNLRARVLSGKFRIPFFMSTGKGVASTQL

SEQ ID NO: 904485 - protein, 1371 aa, Homo sapiens; identical to SEQ ID NO: 904482

SEQ ID NO: 904486 - protein, 1323 aa, Homo sapiens
NKMAAAAASGAGGAAGAGTGGAGPAGRLLPPPAPGSPAAPAAVSPAAGQPRPPAPASRGPMPARIGYYEIDRTIGKGNFAVVKRATHLVTKAKVAIKIIDKTQLDEENLKKIFREVQIMKMLCHPHIIRLYQVMETERMIYLVTEYASGGEIFDHLVAHGRMAEKEARRKFKQIVTAVYFCHCRNIVHRDLKAENLLLDANLNIKIADFGFSNLFTPGQLLKTWCGSPPYAAPELFEGKEYDGPKVDIWSLGVVLYVLVCGALPFDGSTLQNLRARVLSGKFRIPFFMSTECEHLIRHMLVLDPNKRLSMEQICKHKWMKLGDADPNFDRLIAECQQLKEERQVDPLNEDVLLAMEDMGLDKEQTLQAEQAGTAMNISVPQVQLINPENQIVEPDGTLNLDSDEGEEPSPEALVRYLSMRRHTVGVADPRTEVMEDLQKLLPGFPGVNPQAPFLQVAPNVNFMHNLLPMQNLQPTGQLEYKEQSLLQPPTLQLLNGMGPLGRRASDGGANIQLHAQQLLKRPRGPSPLVTMTPAVPAVTPVDEESSDGEPDQEAVQRYLANRSKRHTLAMTNPTAEIPPDLQRQLGQQPFRSRVWPPHLVPDQHRSTYKDSNTLHLPTERFSPVRRFSDGAASIQAFKAHLEKMGNNSSIKQLQQECEQLQKMYGGQIDERTLEKTQQQHMLYQQEQHHQILQQQIQDSICPPQPSPPLQAACENQPALLTHQLQRLRIQPSSPPPNHPNNHLFRQPSNSPPPMSSAMIQPHGAASSSQFQGLPSRSAIFQQQPENCSSPPNVALTCLGMQQPAQSQQVTIQVQEPVDMLSNMPGTAAGSSGRGISISPSAGQMQMQHRTNLMATLSYGHRPLSKQLSADSAEAHSLNVNRFSPANYDQAHLHPHLFSDQSRGSPSSYSPSTGVGFSPTQALKVPPLDQFPTFPPSAHQQPPHYTTSALQQALLSPTPPDYTRHQQVPHILQGLLSPRHSLTGHSDIRLPPTEFAQLIKRQQQQRQQQQQQQQQQEYQELFRHMNQGDAGSLAPSLGGQSMTERQALSYQNADSYHHHTSPQHLLQIRAQECVSQASSPTPPHGYAHQPALMHSESMEEDCSCEGAKDGFQDSKSSSTLTKGCHDSPLLLSTGGPGDPESLLGTVSHAQELGIHPYGHQPTAAFSKNKVPSREPVIGNCMDRSSPGQAVELPDHNGLGYPARPSVHEHHRPRALQRHHTIQNSDDAYVQLDNLPGMSLVAGKALSSARMSDAVLSQSSLMGSQQFQDGENEECGASLGGHEHPDLSDGSQHLNSSCYPSTCITDILLSYKHPEVSFSMEQAGV

SEQ ID NO: 904487 - protein, 976 aa, Homo sapiens
DSLFLSSVKGMRVYVCTAFQAEQAGTAMNISVPQVQLINPENQIVEPDGTLNLDSDEGEEPSPEALVRYLSMRRHTVGVADPRTEVMEDLQKLLPGFPGVNPQAPFLQVAPNVNFMHNLLPMQNLQPTGQLEYKEQSLLQPPTLQLLNGMGPLGRRASDGGANIQLHAQQLLKRPRGPSPLVTMTPAVPAVTPVDEESSDGEPDQEAVQRYLANRSKRHTLAMTNPTAEIPPDLQRQLGQQPFRSRVWPPHLVPDQHRSTYKDSNTLHLPTERFSPVRRFSDGAASIQAFKAHLEKMGNNSSIKQLQQECEQLQKMYGGQIDERTLEKTQQQHMLYQQEQHHQILQQQIQDSICPPQPSPPLQAACENQPALLTHQLQRLRIQPSSPPPNHPNNHLFRQPSNSPPPMSSAMIQPHGAASSSQFQGLPSRSAIFQQQPENCSSPPNVALTCLGMQQPAQSQQVTIQVQEPVDMLSNMPGTAAGSSGRGISISPSAGQMQMQHRTNLMATLSYGHRPLSKQLSADSAEAHSLNVNRFSPANYDQAHLHPHLFSDQSRGSPSSYSPSTGVGFSPTQALKVPPLDQFPTFPPSAHQQPPHYTTSALQQALLSPTPPDYTRHQQVPHILQGLLSPRHSLTGHSDIRLPPTEFAQLIKRQQQQRQQQQQQQQQQEYQELFRHMNQGDAGSLAPSLGGQSMTERQALSYQNADSYHHHTSPQHLLQIRAQECVSQASSPTPPHGYAHQPALMHSESMEEDCSCEGAKDGFQDSKSSSTLTKGCHDSPLLLSTGGPGDPESLLGTVSHAQELGIHPYGHQPTAAFSKNKVPSREPVIGNCMDRSSPGQAVELPDHNGLGYPARPSVHEHHRPRALQRHHTIQNSDDAYVQLDNLPGMSLVAGKALSSARMSDAVLSQSSLMGSQQFQDGENEECGASLGGHEHPDLSDGSQHLNSSCYPSTCITDILLSYKHPEVSFSMEQAGV

SEQ ID NO: 904488 - protein, 1339 aa, Homo sapiens; identical to SEQ ID NO: 904481

SEQ ID NO: 904489 - protein, 76 aa, Homo sapiens
GAYTCRTSDEADVQLDNLPGMSLVAGKALSSARMSDAVLSQSSLMGSQQFQDGENEDILLSYKHPEVSFSMEQAGV

SEQ ID NO: 904490 - protein, 651 aa, Homo sapiens
MAAAAASGAGGAAGAGTGGAGPAGRLLPPPAPGSPAAPAAVSPAAGQPRPPAPASRGPMPARIGYYEIDRTIGKGNFAVVKRATHLVTKAKVAIKIIDKTQLDEENLKKIFREVQIMKMLCHPHIIRLYQVMETERMIYLVTEYASGGEIFDHLVAHGRMAEKEARRKFKQIVTAVYFCHCRNIVHRDLKAENLLLDANLNIKIADFGFSNLFTPGQLLKTWCGSPPYAAPELFEGKEYDGPKVDIWSLGVVLYVLVCGALPFDGSTLQNLRARVLSGKFRIPFFMSTECEHLIRHMLVLDPNKRLSMEQICKHKWMKLGDADPNFDRLIAECQQLKEERQVDPLNEDVLLAMEDMGLDKEQTLQSLRSDAYDHYSAIYSLLCDRHKRHKTLRLGALPSMPRALAFQAPVNIQAEQAGTAMNISVPQVQLINPENQIVEPDGTLNLDSDEGEEPSPEALVRYLSMRRHTVGVADPRTEVMEDLQKLLPGFPGVNPQAPFLQVAPNVNFMHNLLPMQNLQPTGQLEYKEQSLLQPPTLQLLNGMGPLGRRASDGGANIQLHAQQLLKRPRGPSPLVTMTPAVPAVTPVDEESSDGEPDQEAVQRYLANRSKRHTLAMTNPTAEIPPDLQRQLGQQPFRSRVWPPHLVPDQHR

SEQ ID NO: 904491 - protein, 263 aa, Homo sapiens
MFGSSRGGVRGGQDQFNWEDVKTDKQRENYLGNSLMAPVGRWQKGRDLTWYAKGRAPCAGPSREEELAAVREAEREALLAALGYKNVKKQPTGLSKEDFAEVCKREGGDPEEKGVDRLLGLGSASGSVGRVAMSREDKEAAKLGLSVFTHHRVESGGPGTSAASARRKPRAEDQTESSCESHRKSKKEKKKKKKRKHKKEKKKKDKEHRRPAEATSSPTSPERPRHHHHDSDSNSPCCKRRKRGHSGDRRSPSRRWHDRGSEA

SEQ ID NO: 904492 - protein, 155 aa, Homo sapiens
MFGSSRGGVRGGQDQFNWEDVKTDKQRENYLGNSLMAPVGRWQKGRDLTWYAKGRAPCAGPSREEELAAVREAEREALLAALGYKNVKKQPTGLSKEDFAEVCKREGGDPEEKGVDRLLGLGSASGSVGRVAMSREDKEAAKLGLSVFTVIPRPA

SEQ ID NO: 904493 - protein, 295 aa, Homo sapiens
MFGSSRGGVRGGQDQFNWEDVKTDKQRENYLGNSLMAPVGRWQKGRDLTWYAKGRAPCAGPSREEELAAVREAEREALLAALGYKNVKKQPTGLSKEDFAEVCKREGGDPEEKGVDRLLGLGSARCGRVSRGGQHWALIARVRRTPAVLSSSPCPCSGSVGRVAMSREDKEAAKLGLSVFTHHRVESGGPGTSAASARRKPRAEDQTESSCESHRKSKKEKKKKKKRKHKKEKKKKDKEHRRPAEATSSPTSPERPRHHHHDSDSNSPCCKRRKRGHSGDRRSPSRRWHDRGSEA

SEQ ID NO: 904494 - protein, 191 aa, Homo sapiens
MRGPEPRGGTGSRAGGGARGAAGRPDFAEVCKREGGDPEEKGVDRLLGLGSASGSVGRVAMSREDKEAAKLGLSVFTHHRVESGGPGTSAASARRKPRAEDQTESSCESHRKSKKEKKKKKKRKHKKEKKKKDKEHRRPAEATSSPTSPERPRHHHHDSDSNSPCCKRRKRGHSGDRRSPSRRWHDRGSEA

SEQ ID NO: 904495 - protein, 90 aa, Homo sapiens
KRGPKYWQWSGAVPWEGTQDLGRGLFLPWVAPPGLLLDGEPGPDPKSGLVGAGRKVSTCQGHGWGGAGGAVEMGILHLFLTHVATGHVTT

SEQ ID NO: 904496 - protein, 263 aa, Homo sapiens; identical to SEQ ID NO: 904491

SEQ ID NO: 904497 - protein, 228 aa, Homo sapiens
MAPVGRWQKGRDLTWYAKGRAPCAGPSREEELAAVREAEREALLAALGYKNVKKQPTGLSKEDFAEVCKREGGDPEEKGVDRLLGLGSASGSVGRVAMSREDKEAAKLGLSVFTHHRVESGGPGTSAASARRKPRAEDQTESSCESHRKSKKEKKKKKKRKHKKEKKKKDKEHRRPAEATSSPTSPERPRHHHHDSDSNSPCCKRRKRGHSGDRRSPSRRWHDRGSEA

SEQ ID NO: 904498 - protein, 370 aa, Homo sapiens
MFGSSRGGVRGGQDQFNWEDVKTDKQRENYLGNSLMAPVGRWQKGRDLTWYAKGRAPCAGPSREEELAAVREAEREALLAALGYKNVKKQPTGLSKEVTPRGGGRVEGRGCGADSSAPCALAPAGLRGGLQAGRRRPRGEGRGPAAGAGERKVRAGFQGRAALGSIARVRRTPAVLSSSPCPCSGSVGRVAMSREDKEAAKLGLSVFTVIPRPACPQQGLTGVGRGGGTERSSPGRCGAWCGAGPQTPPQSSLLPQHHRVESGGPGTSAASARRKPRAEDQTESSCESHRKSKKEKKKKKKRKHKKEKKKKDKEHRRPAEATSSPTSPERPRHHHHDSDSNSPCCKRRKRGHSGDRRSPSRRWHDRGSEA

SEQ ID NO: 904499 - protein, 196 aa, Homo sapiens
MFGSSRGGVRGGQDQFNWEDVKTDKQRENYLGNSLMAPVGRWQKGRDLTWYAKGRAPCAGPSREEELAAVREAEREALLAALGYKNVKKQPTGLSKEDFAEVCKREGGDPEEKGVDRLLGLGSASGSVGRVAMSREDKEAAKLGLSVFTHHRVESGGPGTSAASARRKPRAEDQTESSCESHRKSKKEKKKKKKRL

SEQ ID NO: 904500 - protein, 157 aa, Homo sapiens
MFGSSRGGVRGGQDQFNWEDVKTDKQRENYLGNSLMAPVGRWQKGRDLTWYAKGRAPCAGPSREEELAAVREAEREALLAALGYKNVKKQPTGLSKEDFAEVCKREGGDPEEKGVDQAQEVPVRKGWCAPNMVRRYTQLPIRDQDQQDRTRLPGPRT

SEQ ID NO: 904501 - protein, 104 aa, Homo sapiens
SRRGFRVASRSAASLAGARVRAVAGLAAGQDSRQEPCLSGGGLCDPARWTGQKAVPGSPAPLSDPTEAACPPWEPEVGPTRISSSTPSWDPSPGEVALACLLFH

SEQ ID NO: 904502 - protein, 97 aa, Homo sapiens
RGGTTGRGPRRSDFWARGHARAVQSWPGPPVGLLCSLPCLPPDAGPCCSLRTIRSSCSCHPHLETCLCAHLKMGSVPVLKCPVAAPVVEDQGLRFGT

SEQ ID NO: 904503 - protein, 512 aa, Homo sapiens
LPPWLPRRFPVSCVLSGSPSAGGGGLGGGAGFQAGALPLRWRALRPCEMDGTEGSAGQPGPAERSHRSSVSSVGARAADVLVYLADDTVVPLAVENLPSLSAHELHRAVREVLQLPDIALDVFALWLVSPLLEVQLKPKHQPYKLGRQWPELLLRFTSAPDDDVAMDEPFLQFRRNVFFPKRRELQIHDEEVLRLLYEEAKGNVLAARYPCDVEDCEALGALVCRVQLGPYQPGRRQACDLREKLDSFLPAHLCKRGQSLFAALRGRGARAGPGEQGLLNAYRQVQEVSSDGGCEAALGTHYRAYLLKCHELPFYGCAFFHGEVDKPAQGFLHRGGRKPVSVAISLEGVHVIDSREKHVLLGLRFQELSWDHTSPEEEEPILWLEFDGDSEGTPVNKLLKIYSKQAELMSSLIEYCIELSQAAEPAGPQDSATGSPSDPSSSLAPVQRPKLRRQGSVVSSRIQHLSTIDYVEDGKGIRRVKPKRTTSFFSRQLSLGQGSYTVVQPGDSLEQG

SEQ ID NO: 904504 - protein, 512 aa, Homo sapiens; identical to SEQ ID NO: 904503

SEQ ID NO: 904505 - protein, 187 aa, Homo sapiens
KQRQQWLVLTVAEPPAPGICSPGEPQTAARTRWRSGAGGMVSTYRVAVLGARGVGKSAIVRQFLYNEFSEVCVPTTARRLYLPAVVMNGHVHDLQILDFPPISAFPVNTLQMESPSVAQAGVQWHDLGSLQSSPPGFKRFSCLSLLSSWITGTCDHTQLIFVFLVEMGFHHVGQAGLKLLTSSDPPA

SEQ ID NO: 904506 - protein, 242 aa, Homo sapiens
KQRQQWLVLTVAEPPAPGICSPGEPQTAARTRWRSGAGGMVSTYRVAVLGARGVGKSAIVRQFLYNEFSEVCVPTTARRLYLPAVVMNGHVHDLQILDFPPISAFPVNTLQEWADTCCRGLRSVHAYILVYDICCFDSFEYVKTIRQQILETRVIGTSETPIIIVGNKRDLQRGRVIPRWNVSHLVRKTWKCGYVECSAKYNWHILLLFSELLKSVGCARCKHVHAALRFQGALRRNRCAIM

SEQ ID NO: 904507 - protein, 242 aa, Homo sapiens; identical to SEQ ID NO: 904506

SEQ ID NO: 904508 - protein, 242 aa, Homo sapiens; identical to SEQ ID NO: 904506

SEQ ID NO: 904509 - protein, 180 aa, Homo sapiens
MTNFDVTYNWIQDKCVPLVREITFENGEELTEEGLPFLILFHMKEDTESLEIFQNEVARQLISEKGTINFLHADCDKFRHPLLHIQKTPADCPVIAIDSFRHMYVFGDFKDVLIPGKLKQFVFDLHSGKLHREFHHGPDPTDTAPGEQAQDVASSPPESSFQKLAPSEYRYTLLRDRDEL

SEQ ID NO: 904510 - protein, 180 aa, Homo sapiens; identical to SEQ ID NO: 904509

SEQ ID NO: 904511 - protein, 180 aa, Homo sapiens; identical to SEQ ID NO: 904509

SEQ ID NO: 904512 - protein, 180 aa, Homo sapiens; identical to SEQ ID NO: 904509

SEQ ID NO: 904513 - protein, 180 aa, Homo sapiens; identical to SEQ ID NO: 904509

SEQ ID NO: 904514 - protein, 504 aa, Homo sapiens
APPPAAEPARAPAPPPLARPRVQKTRLHTPGPPPRSLMGVGVPKVSFVRSIGGALDYHSHKAPRPPPAPRPLAAGFQSPPRLHFPTGLPALPPSLPRHEPNWASGRGAGRVPAHRRRRRPLQPLSRLYRRGSCIVHSGRRWNRQSGVTELEKRRAEPPITSSPGDPSRVRPRPAQPPEPPAPGGPAPASQLLHSRSRRRPPPGTWTLTLAPPPSDPEEYSPSCKRRRTVEDFNKFCTFVLAYAGYIPYPKEELPLRSSPSPANSTAGTIDSDGWDAGFSDIASSVPLPVSDRCFSHLQPTLLQRAKPSNFLLDRKKTDKLKKKKKRKRRDSDAPGKEGYRGGLLKLEAADPYVETPTSPTLQDIPQAPSDPCSGWDSDTPSSGSCATVSPDQVKEIKTEGKRTIVRQGKQVVFRDEDSTGNDEDIMVDSDDDSWDLVTCFCMKPFAGRPMIECNECHTWIHLSCAKIRKSNVPEVFVCQKCRDSKFDIRRSNRSRTGSRKLFLD

SEQ ID NO: 904515 - protein, 138 aa, Homo sapiens
MLSQDDYTKQLQNPSSGSCATVSPDQVKEIKTEGKRTIVRQGKQVVFRDEDSTGNDEDIMVDSDDDSWDLVTCFCMKPFAGRPMIECNECHTWIHLSCAKIRKSNVPEVFVCQKCRDSKFDIRRSNRSRTGSRKLFLD

SEQ ID NO: 904516 - protein, 504 aa, Homo sapiens; identical to SEQ ID NO: 904514

SEQ ID NO: 904517 - protein, 504 aa, Homo sapiens; identical to SEQ ID NO: 904514

SEQ ID NO: 904518 - protein, 504 aa, Homo sapiens; identical to SEQ ID NO: 904514

SEQ ID NO: 904519 - protein, 504 aa, Homo sapiens; identical to SEQ ID NO: 904514

SEQ ID NO: 904520 - protein, 504 aa, Homo sapiens; identical to SEQ ID NO: 904514

SEQ ID NO: 904521 - protein, 504 aa, Homo sapiens; identical to SEQ ID NO: 904514

SEQ ID NO: 904522 - protein, 202 aa, Homo sapiens
AGLPVGRVRPLSRPLLGPDTGSVANIFKGLVILPEMSLVIRNLQRVIPIRRAPLRSKIEIVRRILGVQKFDLGIICVDNKNIQHINRIYRDRNVPTDVLSFPFHEHLKAGEFPQPDFPDDYNLGDIFLGVEYIFHQCKENEDYNDVLTVTATHGLCHLLGFTHGTEAEWQQMFQKEKAVLDELGRRTGTRLQPLTRGLFGGS

SEQ ID NO: 904523 - protein, 213 aa, Homo sapiens
RSFRSARLESFWPDSAASFHRPSLLLPPCGKCSVANIFKGLVILPEMSLVIRNLQRVIPIRRAPLRSKIEIVRRILGVQKFDLGIICVDNKNIQHINRIYRDRNVPTDVLSFPFHEHLKAGEFPQPDFPDDYNLGDIFLGVEYIFHQCKENEDYNDVLTVTATHGLCHLLGFTHGTEAEWQQMFQKEKAVLDELGRRTGTRLQPLTRGLFGGS

SEQ ID NO: 904524 - protein, 156 aa, Homo sapiens
AGLPVGRVRPLSRPLLGPDTGSVANIFKGLVILPEMSLVIRNLQRVIPIRRAPLRSKIEIVRRILGVQKFDLGIICVDNKNIQHINRIYRDRNVPTDVLSFPFHEHLKAGEFPQPDFPDDYNLGDIFLGVEYIFHQCKENEDYNDVLTVSGDAEII

SEQ ID NO: 904525 - protein, 170 aa, Homo sapiens
RSFRSARLESFWPDSAASFHRPSLLLPPCGKCSVANIFKGLVILPEMSLVIRNLQRVIPIRRAPLRSKIEIVRRILGVQKFDLGIICVDNKNIQHINRIYRDRNVPTDVLSFPFHEVTATHGLCHLLGFTHGTEAEWQQMFQKEKAVLDELGRRTGTRLQPLTRGLFGGS

SEQ ID NO: 904526 - protein, 163 aa, Homo sapiens
  misc_feature (2)..(2): Xaa can be any naturally occurring amino acid
  misc_feature (4)..(4): Xaa can be any naturally occurring amino acid
PXGXLASRQKFGTRPPLSRPLLGPDTGSVANIFKGLVILPEMSLVIRNLQRVIPIRRAPLRSKIEIHLKAGEFPQPDFPDDYNLGDIFLGVEYIFHQCKENEDYNDVLTVTATHGLCHLLGFTHGTEAEWQQMFQKEKAVLDELGRRTGTRLQPLTRGLFGGS

SEQ ID NO: 904527 - protein, 202 aa, Homo sapiens; identical to SEQ ID NO: 904522

SEQ ID NO: 904528 - protein, 114 aa, Homo sapiens
AGLPVGRVRPLSRPLLGPDTGSVANIFKGLVILPEMSLVIRNLQRVIPIRRAPLRSKIEIVTATHGLCHLLGFTHGTEAEWQQMFQKEKAVLDELGRRTGTRLQPLTRGLFGGS

SEQ ID NO: 904529 - protein, 97 aa, Homo sapiens
TSGRVFSLPSESVAFTRVGLRAPQTPEDPAPNAYLSPLLSLPHSSPFSPQPLPLPAPRRVRAPLSARTPNPPPFLWEPLLPLRPPGVLLAGFRGILP

SEQ ID NO: 904530 - protein, 106 aa, Homo sapiens
MRAARALLPLLLQACWTAAQDEPETPRAVAFQDCPVDLFFVLDTSESVALRLKPYGALVDKVKSFTKRFIDNLRDRYYRCDRNLVWNAGALHYSDEVEAGRGGSRL

SEQ ID NO: 904531 - protein, 1028 aa, Homo sapiens
MRAARALLPLLLQACWTAAQDEPETPRAVAFQDCPVDLFFVLDTSESVALRLKPYGALVDKVKSFTKRFIDNLRDRYYRCDRNLVWNAGALHYSDEVEIIQGLTRMPGGRDALKSSVDAVKYFGKGTYTDCAIKKGLEQLLVGGSHLKENKYLIVVTDGHPLEGYKEPCGGLEDAVNEAKHLGVKVFSVAITPDHLEPRLSIIATDHTYRRNFTAADWGQSRDAEEAISQTIDTIVDMIKNNVEQVCCSFECQPARGPPGLRGDPGFEGERGKPGLPGEKGEAGDPGRPGDLGPVGYQGMKGEKGSRGEKGSRGPKGYKGEKGKRGIDGVDGVKGEMGYPGLPGCKGSPGFDGIQGPPGPKGDPGAFGLKGEKGEPGADGEAGRPGSSGPSGDEGQPGEPGPPGEKGEAGDEGNPGPDGAPGERGGPGERGPRGTPGTRGPRGDPGEAGPQGDQGREGPVGVPGDPGEAGPIGPKGYRGDEGPPGSEGARGAPGPAGPPGDPGLMGERGEDGPAGNGTEGFPGFPGYPGNRGAPGINGTKGYPGLKGDEGEAGDPGDDNNDIAPRGVKGAKGYRGPEGPQGPPGHQGPPGPDECEILDIIMKMCSCCECKCGPIDLLFVLDSSESIGLQNFEIAKDFVVKVIDRLSRDELVKFEPGQSYAGVVQYSHSQMQEHVSLRSPSIRNVQELKEAIKSLQWMAGGTFTGEALQYTRDQLLPPSPNNRIALVITDGRSDTQRDTTPLNVLCSPGIQVVSVGIKDVFDFIPGSDQLNVISCQGLAPSQGRPGLSLVKENYAELLEDAFLKNVTAQICIDKKCPDYTCPITFSSPADITILLDGSASVGSHNFDTTKRFAKRLAERFLTAGRTDPAHDVRVAVVQYSGTGQQRPERASLQFLQNYTALASAVDAMDFINDATDVNDALGYVTRFYREASSGAAKKRLLLFSDGNSQGATPAAIEKAVQEAQRAGIEIFVVVVGRQVNEPHIRVLVTGKTAEYDVAYGESHLFRVPSYQALLRGVFHQTVSRKVALG

SEQ ID NO: 904532 - protein, 969 aa, Homo sapiens
GVIDATPMRFIDNLRDRYYRCDRNLVWNAGALHYSDEVEIIQGLTRMPGGRDALKSSVDAVKYFGKGTYTDCAIKKGLEQLLVGGSHLKENKYLIVVTDGHPLEGYKEPCGGLEDAVNEAKHLGVKVFSVAITPDHLEPRLSIIATDHTYRRNFTAADWGQSRDAEEAISQTIDTIVDMIKNNVEQVCCSFECQPARGPPGLRGDPGFEGERGKPGLPGEKGEAGDPGRPGDLGPVGYQGMKGEKGSRGEKGSRGPKGYKGEKGKRGIDGVDGVKGEMGYPGLPGCKGSPGFDGIQGPPGPKGDPGAFGLKGEKGEPGADGEAGRPGSSGPSGDEGQPGEPGPPGEKGEAGDEGNPGPDGAPGERGGPGERGPRGTPGTRGPRGDPGEAGPQGDQGREGPVGVPGDPGEAGPIGPKGYRGDEGPPGSEGARGAPGPAGPPGDPGLMGERGEDGPAGNGTEGFPGFPGYPGNRGAPGINGTKGYPGLKGDEGEAGDPGDDNNDIAPRGVKGAKGYRGPEGPQGPPGHQGPPGPDECEILDIIMKMCSCCECKCGPIDLLFVLDSSESIGLQNFEIAKDFVVKVIDRLSRDELVKFEPGQSYAGVVQYSHSQMQEHVSLRSPSIRNVQELKEAIKSLQWMAGGTFTGEALQYTRDQLLPPSPNNRIALVITDGRSDTQRDTTPLNVLCSPGIQVVSVGIKDVFDFIPGSDQLNVISCQGLAPSQGRPGLSLVKENYAELLEDAFLKNVTAQICIDKKCPDYTCPITFSSPADITILLDGSASVGSHNFDTTKRFAKRLAERFLTAGRTDPAHDVRVAVVQYSGTGQQRPERASLQFLQNYTALASAVDAMDFINDATDVNDALGYVTRFYREASSGAAKKRLLLFSDGNSQGATPAAIEKAVQEAQRAGIEIFVVVVGRQVNEPHIRVLVTGKTAEYDVAYGESHLFRVPSYQALLRGVFHQTVSRKVALG

SEQ ID NO: 904533 - protein, 1028 aa, Homo sapiens; identical to SEQ ID NO: 904531

SEQ ID NO: 904534 - protein, 937 aa, Homo sapiens
DSERTMELCYNTLSNVLTIMPSLEGPTPPPDSSSVSHDRYSGSRSATFCSAAASLKEDSIKVLLRNSTEARKPQRKALKTRGDAVNEAKHLGVKVFSVAITPDHLEPRLSIIATDHTYRRNFTAADWGQSRDAEEAISQTIDTIVDMIKNNVEQVCCSFECQPARGPPGLRGDPGFEGERGKPGLPGEKGEAGDPGRPGDLGPVGYQGMKGEKGSRGEKGSRGPKGYKGEKGKRGIDGVDGVKGEMGYPGLPGCKGSPGFDGIQGPPGPKGDPGAFGLKGEKGEPGADGEAGRPGSSGPSGDEGQPGEPGPPGEKGEAGDEGNPGPDGAPGERGGPGERGPRGTPGTRGPRGDPGEAGPQGDQGREGPVGVPGDPGEAGPIGPKGYRGDEGPPGSEGARGAPGPAGPPGDPGLMGERGEDGPAGNGTEGFPGFPGYPGNRGAPGINGTKGYPGLKGDEGEAGDPGDDNNDIAPRGVKGAKGYRGPEGPQGPPGHQGPPGPDECEILDIIMKMCSCCECKCGPIDLLFVLDSSESIGLQNFEIAKDFVVKVIDRLSRDELVKFEPGQSYAGVVQYSHSQMQEHVSLRSPSIRNVQELKEAIKSLQWMAGGTFTGEALQYTRDQLLPPSPNNRIALVITDGRSDTQRDTTPLNVLCSPGIQVVSVGIKDVFDFIPGSDQLNVISCQGLAPSQGRPGLSLVKENYAELLEDAFLKNVTAQICIDKKCPDYTCPITFSSPADITILLDGSASVGSHNFDTTKRFAKRLAERFLTAGRTDPAHDVRVAVVQYSGTGQQRPERASLQFLQNYTALASAVDAMDFINDATDVNDALGYVTRFYREASSGAAKKRLLLFSDGNSQGATPAAIEKAVQEAQRAGIEIFVVVVGRQVNEPHIRVLVTGKTAEYDVAYGESHLFRVPSYQALLRGVFHQTVSRKVALG

SEQ ID NO: 904535 - protein, 833 aa, Homo sapiens
MRAARALLPLLLQACWTAAQDEPETPRAVAFQDCPVDLFFVLDTSESVALRLKPYGALVDKVKSFTKRFIDNLRDRYYRCDRNLVWNAGALHYSDEVEIIQGLTRMPGGRDALKSSVDAVKYFGGEKGKRGIDGVDGVKGEMGYPGLPGCKGSPGFDGIQGPPGPKGDPGAFGLKGEKGEPGADGEAGRPGSSGPSGDEGQPGEPGPPGEKGEAGDEGNPGPDGAPGERGGPGERGPRGTPGTRGPRGDPGEAGPQGDQGREGPVGVPGDPGEAGPIGPKGYRGDEGPPGSEGARGAPGPAGPPGDPGLMGERGEDGPAGNGTEGFPGFPGYPGNRGAPGINGTKGYPGLKGDEGEAGDPGDDNNDIAPRGVKGAKGYRGPEGPQGPPGHQGPPGPDECEILDIIMKMCSCCECKCGPIDLLFVLDSSESIGLQNFEIAKDFVVKVIDRLSRDELVKFEPGQSYAGVVQYSHSQMQEHVSLRSPSIRNVQELKEAIKSLQWMAGGTFTGEALQYTRDQLLPPSPNNRIALVITDGRSDTQRDTTPLNVLCSPGIQVVSVGIKDVFDFIPGSDQLNVISCQGLAPSQGRPGLSLVKENYAELLEDAFLKNVTAQICIDKKCPDYTCPITFSSPADITILLDGSASVGSHNFDTTKRFAKRLAERFLTAGRTDPAHDVRVAVVQYSGTGQQRPERASLQFLQNYTALASAVDAMDFINDATDVNDALGYVTRFYREASSGAAKKRLLLFSDGNSQGATPAAIEKAVQEAQRAGIEIFVVVVGRQVNEPHIRVLVTGKTAEYDVAYGESHLFRVPSYQALLRGVFHQTVSRKVALG

SEQ ID NO: 904536 - protein, 652 aa, Homo sapiens
QIADLVRRETGARDHLETGQPGEPGPPGEKGEAGDEGNPGPDGAPGERGGPGERGPRGTPGTRGPRGDPGEAGPQGDQGREGPVGVPGDPGEAGPIGPKGYRGDEGPPGSEGARGAPGPAGPPGDPGLMGERGEDGPAGNGTEGFPGFPGYPGNRGAPGINGTKGYPGLKGDEGEAGDPGDDNNDIAPRGVKGAKGYRGPEGPQGPPGHQGPPGPDECEILDIIMKMCSCCECKCGPIDLLFVLDSSESIGLQNFEIAKDFVVKVIDRLSRDELVKFEPGQSYAGVVQYSHSQMQEHVSLRSPSIRNVQELKEAIKSLQWMAGGTFTGEALQYTRDQLLPPSPNNRIALVITDGRSDTQRDTTPLNVLCSPGIQVVSVGIKDVFDFIPGSDQLNVISCQGLAPSQGRPGLSLVKENYAELLEDAFLKNVTAQICIDKKCPDYTCPITFSSPADITILLDGSASVGSHNFDTTKRFAKRLAERFLTAGRTDPAHDVRVAVVQYSGTGQQRPERASLQFLQNYTALASAVDAMDFINDATDVNDALGYVTRFYREASSGAAKKRLLLFSDGNSQGATPAAIEKAVQEAQRAGIEIFVVVVGRQVNEPHIRVLVTGKTAEYDVAYGESHLFRVPSYQALLRGVFHQTVSRKVALG

SEQ ID NO: 904537 - protein, 1028 aa, Homo sapiens; identical to SEQ ID NO: 904531

SEQ ID NO: 904538 - protein, 1028 aa, Homo sapiens; identical to SEQ ID NO: 904531

SEQ ID NO: 904539 - protein, 1028 aa, Homo sapiens; identical to SEQ ID NO: 904531

SEQ ID NO: 904540 - protein, 1028 aa, Homo sapiens; identical to SEQ ID NO: 904531

SEQ ID NO: 904541 - protein, 446 aa, Homo sapiens
MRAARALLPLLLQACWTAAQDEPETPRAVAFQDCPVDLFFVLDTSESVALRLKPYGALVDKVKSFTKRFIDNLRDRYYRCDRNLVWNAGALHYSDEVEIIQGLTRMPGGRDALKSSVDAVKYFGKGTYTDCAIKKGLEQLLVGGSHLKENKYLIVVTDGHPLEGYKEPCGGLEDAVNEAKHLGVKVFSVAITPDHLEPRLSIIATDHTYRRNFTAADWGQSRDAEEAISQTIDTIVDMIKNNVEQVCCSFECQPARGPPGLRGDPGFEGERGKPGLPGEKGEAGDPGRPGDLGPVGYQGMKGEKGSRGEKGSRGPKGYKGEKGKRGIDGVDGVKGEMGYPGLPGCKGSPGFDGIQGPPGPKGDPGAFGLKGEKGEPGADGEAGRPGSSGPSGDEGQPGEPGPPGEKGEAGDEGNPGPDGAPGERGGPGERGPRGTPGTRGPRGDPP

SEQ ID NO: 904542 - protein, 1028 aa, Homo sapiens; identical to SEQ ID NO: 904531

SEQ ID NO: 904543 - protein, 1028 aa, Homo sapiens; identical to SEQ ID NO: 904531

SEQ ID NO: 904544 - protein, 1078 aa, Homo sapiens
MRAARALLPLLLQACWTAAQDEPETPRAVAFQDCPVDLFFVLDTSESVALRLKPYGALVDKVKSFTKRFIDNLRDRYYRCDRNLVWNAGALHYSDEVEIIQGLTRMPGGRDALKSSVDAVKYFGKGTYTDCAIKKGLEQLLVGGSHLKENKYLIVVTDGHPLEGYKEPCGGLEDAVNEAKHLGVKVFSVAITPDHLEPRLSIIATDHTYRRNFTAADWGQSRDAEEAISQTIDTIVDMIKNNVEQVCCSFECQPARGPPGLRGDPGFEGERGKPGLPGEKGEAGDPGRPGDLGPVGYQGMKGEKGSRGEKGSRGPKGYKGEKGKRGIDGVDGVKGEMGYPGLPGCKGSPGFDGIQGPPGPKGDPGAFGLKGEKGEPGADGEAGRPGSSGPSGDEGQPGEPGPPGEKGEAGDEGNPGPDGAPGERGGPGERGPRGTPGTRGPRGDPGEAGPQGDQGREGPVGVPGDPGEAGPIGPKGYRGDEGPPGSEGARGAPGPAGPPGDPGLMGERGEDGPAGNGTEGFPGFPGYPGNRGAPGINGTKGYPGLKGDEGEAGDPGDDNNDIAPRGVKGAKGYRGPEGPQGPPGHQGPPGPDECEILDIIMKMCSCCECKCGPIDLLFVLDSSESIGLQNFEIAKDFVVKVIDRLSRDELVKFEPGQSYAGVVQYSHSQMQEHVSLRSPSIRNVQELKEAIKSLQWMAGGTFTGEALQYTRDQLLPPSPNNRIALVITDGRSDTQRDTTPLNVLCSPGIQVVSVGIKDVFDFIPGSDQLNVISCQGLAPSQGRPGLSLVKENYAELLEDAFLKKRHHPKQQKQEKIQIDTNPNTLRRPNPRMLKTDSQTKRKAERSRPGGSDQDARSERKSSAVKVTDVPKVLLKMSNVTSRTQVRGNNGYSPSQQTITNKAIERHKTTNTGIPTRHPQEAKARHLNQKPKPRNRTAEPLKPMGGPVRMLRGDLIILPNERAEPRRKEKEQAREGSEGVGPAGRTKRSVEERDWDEMAGEAQGGKNVERKGAELPGNKKLRWPQRRAAEVAGGEGHNIERRIRRRRGKVRECEAEGDVDKTSLGWKGGVGGGEEERGV

SEQ ID NO: 904545 - protein, 250 aa, Homo sapiens
MRAARALLPLLLQACWTAAQDEPETPRAVAFQDCPVDLFFVLDTSESVALRLKPYGALVDKVKSFTKRFIDNLRDRYYRCDRNLVWNAGALHYSDEVEIIQGLTRMPGGRDALKSSVDAVKYFGKGTYTDCAIKKGLEQLLVGGSHLKENKYLIVVTDGHPLEGYKEPCGGLEDAVNEAKHLGVKVFSVAITPDHLEPRLSIIATDHTYRRNFTAADWGQSRDAEEAISQTIDTIVDMIPTALEAAADQH

SEQ ID NO: 904546 - protein, 309 aa, Homo sapiens
MRAARALLPLLLQACWTAAQDEPETPRAVAFQDCPVDLFFVLDTSESVALRLKPYGALVDKVKSFTKRFIDNLRDRYYRCDRNLVWNAGALHYSDEVEIIQGLTRMPGGRDALKSSVDAVKYFGKGTYTDCAIKKGLEQLLVGGSHLKENKYLIVVTDGHPLEGYKEPCGGLEDAVNEAKHLGVKVFSVAITPDHLEPRLSIIATDHTYRRNFTAADWGQSRDAEEAISQTIDTIVDMIKNNVEQVCCSFECQPARGPPGLRGDPGFEGERGKPGLPGEKGEAGDPGRPGDLGPVGTSDDGVHWDPLER

SEQ ID NO: 904547 - protein, 1002 aa, Homo sapiens
PSPNNRIALVITDGRSDTSESVALRLKPYGALVDKVKSFTKRFIDNLRDRYYRCDRNLVWNAGALHYSDEVEIIQGLTRMPGGRDALKSSVDAVKYFGKGTYTDCAIKKGLEQLLVGGSHLKENKYLIVVTDGHPLEGYKEPCGGLEDAVNEAKHLGVKVFSVAITPDHLEPRLSIIATDHTYRRNFTAADWGQSRDAEEAISQTIDTIVDMIKNNVEQVCCSFECQPARGPPGLRGDPGFEGERGKPGLPGEKGEAGDPGRPGDLGPVGYQGMKGEKGSRGEKGSRGPKGYKGEKGKRGIDGVDGVKGEMGYPGLPGCKGSPGFDGIQGPPGPKGDPGAFGLKGEKGEPGADGEAGRPGSSGPSGDEGQPGEPGPPGEKGEAGDEGNPGPDGAPGERGGPGERGPRGTPGTRGPRGDPGEAGPQGDQGREGPVGVPGDPGEAGPIGPKGYRGDEGPPGSEGARGAPGPAGPPGDPGLMGERGEDGPAGNGTEGFPGFPGYPGNRGAPGINGTKGYPGLKGDEGEAGDPGDDNNDIAPRGVKGAKGYRGPEGPQGPPGHQGPPGPDECEILDIIMKMCSCCECKCGPIDLLFVLDSSESIGLQNFEIAKDFVVKVIDRLSRDELVKFEPGQSYAGVVQYSHSQMQEHVSLRSPSIRNVQELKEAIKSLQWMAGGTFTGEALQYTRDQLLPPSPNNRIALVITDGRSDTQRDTTPLNVLCSPGIQVVSVGIKDVFDFIPGSDQLNVISCQGLAPSQGRPGLSLVKENYAELLEDAFLKNVTAQICIDKKCPDYTCPITFSSPADITILLDGSASVGSHNFDTTKRFAKRLAERFLTAGRTDPAHDVRVAVVQYSGTGQQRPERASLQFLQNYTALASAVDAMDFINDATDVNDALGYVTRFYREASSGAAKKRLLLFSDGNSQGATPAAIEKAVQEAQRAGIEIFVVVVGRQVNEPHIRVLVTGKTAEYDVAYGESHLFRVPSYQALLRGVFHQTVSRKVALG

SEQ ID NO: 904548 - protein, 1028 aa, Homo sapiens; identical to SEQ ID NO: 904531

SEQ ID NO: 904549 - protein, 894 aa, Homo sapiens
VSRCPLLSRGSHLKENKYLIVVTDGHPLEGYKEPCGGLEDAVNEAKHLGVKVFSVAITPDHLEPRLSIIATDHTYRRNFTAADWGQSRDAEEAISQTIDTIVDMIKNNVEQVCCSFECQPARGPPGLRGDPGFEGERGKPGLPGEKGEAGDPGRPGDLGPVGYQGMKGEKGSRGEKGSRGPKGYKGEKGKRGIDGVDGVKGEMGYPGLPGCKGSPGFDGIQGPPGPKGDPGAFGLKGEKGEPGADGEAGRPGSSGPSGDEGQPGEPGPPGEKGEAGDEGNPGPDGAPGERGGPGERGPRGTPGTRGPRGDPGEAGPQGDQGREGPVGVPGDPGEAGPIGPKGYRGDEGPPGSEGARGAPGPAGPPGDPGLMGERGEDGPAGNGTEGFPGFPGYPGNRGAPGINGTKGYPGLKGDEGEAGDPGDDNNDIAPRGVKGAKGYRGPEGPQGPPGHQGPPGPDECEILDIIMKMCSCCECKCGPIDLLFVLDSSESIGLQNFEIAKDFVVKVIDRLSRDELVKFEPGQSYAGVVQYSHSQMQEHVSLRSPSIRNVQELKEAIKSLQWMAGGTFTGEALQYTRDQLLPPSPNNRIALVITDGRSDTQRDTTPLNVLCSPGIQVVSVGIKDVFDFIPGSDQLNVISCQGLAPSQGRPGLSLVKENYAELLEDAFLKNVTAQICIDKKCPDYTCPITFSSPADITILLDGSASVGSHNFDTTKRFAKRLAERFLTAGRTDPAHDVRVAVVQYSGTGQQRPERASLQFLQNYTALASAVDAMDFINDATDVNDALGYVTRFYREASSGAAKKRLLLFSDGNSQGATPAAIEKAVQEAQRAGIEIFVVVVGRQVNEPHIRVLVTGKTAEYDVAYGESHLFRVPSYQALLRGVFHQTVSRKVALG

SEQ ID NO: 904550 - protein, 732 aa, Homo sapiens
MRAARALLPLLLQACWTAAQDEPETPRAVAFQDCPVDLFFVLDTSESVALRLKPYGALVDKVKSFTKRFIDNLRDRYYRCDRNLVWNAGALHYSDEVEIIQGLTRMPGGRDALKSSVDAVKYFGKGTYTDCAIKKGLEQLLVGGSHLKENKYLIVVTDGHPLEGYKEPCGGLEDAVNEAKHLGVKVFSVAITPDHLEPRLSIIATDHTYRRNFTAADWGQSRDAEEAISQTIDTIVDMIKNNVEQVCCSFECQPARGPPETDNNDIAPRGVKGAKGYRGPEGPQGPPGHQGPPGPDECEILDIIMKMCSCCECKCGPIDLLFVLDSSESIGLQNFEIAKDFVVKVIDRLSRDELVKFEPGQSYAGVVQYSHSQMQEHVSLRSPSIRNVQELKEAIKSLQWMAGGTFTGEALQYTRDQLLPPSPNNRIALVITDGRSDTQRDTTPLNVLCSPGIQVVSVGIKDVFDFIPGSDQLNVISCQGLAPSQGRPGLSLVKENYAELLEDAFLKNVTAQICIDKKCPDYTCPITFSSPADITILLDGSASVGSHNFDTTKRFAKRLAERFLTAGRTDPAHDVRVAVVQYSGTGQQRPERASLQFLQNYTALASAVDAMDFINDATDVNDALGYVTRFYREASSGAAKKRLLLFSDGNSQGATPAAIEKAVQEAQRAGIEIFVVVVGRQVNEPHIRVLVTGKTAEYDVAYGESHLFRVPSYQALLRGVFHQTVSRKVALG

SEQ ID NO: 904551 - protein, 441 aa, Homo sapiens
GQGTGGEGRALLTPPPPACCECKCGPIDLLFVLDSSESIGLQNFEIAKDFVVKVIDRLSRDELVKFEPGQSYAGVVQYSHSQMQEHVSLRSPSIRNVQELKEAIKSLQWMAGGTFTGEALQYTRDQLLPPSPNNRIALVITDGRSDTQRDTTPLNVLCSPGIQVVSVGIKDVFDFIPGSDQLNVISCQGLAPSQGRPGLSLVKENYAELLEDAFLKNVTAQICIDKKCPDYTCPITFSSPADITILLDGSASVGSHNFDTTKRFAKRLAERFLTAGRTDPAHDVRVAVVQYSGTGQQRPERASLQFLQNYTALASAVDAMDFINDATDVNDALGYVTRFYREASSGAAKKRLLLFSDGNSQGATPAAIEKAVQEAQRAGIEIFVVVVGRQVNEPHIRVLVTGKTAEYDVAYGESHLFRVPSYQALLRGVFHQTVSRKVALG

SEQ ID NO: 904552 - protein, 442 aa, Homo sapiens
MGGGGLFLGLRRGDPNVSACCECKCGPIDLLFVLDSSESIGLQNFEIAKDFVVKVIDRLSRDELVKFEPGQSYAGVVQYSHSQMQEHVSLRSPSIRNVQELKEAIKSLQWMAGGTFTGEALQYTRDQLLPPSPNNRIALVITDGRSDTQRDTTPLNVLCSPGIQVVSVGIKDVFDFIPGSDQLNVISCQGLAPSQGRPGLSLVKENYAELLEDAFLKNVTAQICIDKKCPDYTCPITFSSPADITILLDGSASVGSHNFDTTKRFAKRLAERFLTAGRTDPAHDVRVAVVQYSGTGQQRPERASLQFLQNYTALASAVDAMDFINDATDVNDALGYVTRFYREASSGAAKKRLLLFSDGNSQGATPAAIEKAVQEAQRAGIEIFVVVVGRQVNEPHIRVLVTGKTAEYDVAYGESHLFRVPSYQALLRGVFHQTVSRKVALG

SEQ ID NO: 904553 - protein, 332 aa, Homo sapiens
ARHPGVVLRPALALEVVEGALYEQYRRSVQHCQALRHWEGDQNAQRALKYPLPAVVSVGIKDVFDFIPGSDQLNVISCQGLAPSQGRPGLSLVKENYAELLEDAFLKNVTAQICIDKKCPDYTCPITFSSPADITILLDGSASVGSHNFDTTKRFAKRLAERFLTAGRTDPAHDVRVAVVQYSGTGQQRPERASLQFLQNYTALASAVDAMDFINDATDVNDALGYVTRFYREASSGAAKKRLLLFSDGNSQGATPAAIEKAVQEAQRAGIEIFVVVVGRQVNEPHIRVLVTGKTAEYDVAYGESHLFRVPSYQALLRGVFHQTVSRKVALG

SEQ ID NO: 904554 - protein, 1028 aa, Homo sapiens; identical to SEQ ID NO: 904531

SEQ ID NO: 904555 - protein, 1028 aa, Homo sapiens; identical to SEQ ID NO: 904531

SEQ ID NO: 904556 - protein, 146 aa, Homo sapiens
TSSGLECSQRPCEYSLRSGSVLVSSGLQGCRAKVQAGHQQDPQETVARFFLRKSLESQDTTLLPALCRVLRGSALSWHHLRRALWGLSPELVSPAQGPLGLSPELASPVQGPLGLSPELASPGFPTPGSPALPSCPPSLLPAQLLP

SEQ ID NO: 904557 - protein, 677 aa, Homo sapiens
MRAARALLPLLLQACWTAAQDEPETPRAVAFQDCPVDLFFVLDTSESVALRLKPYGALVDKVKSFTKRFIDNLRDRYYRCDRNLVWNAGALHYSDEVEIIQGLTRMPGGRDALKSSVDAVKYFGKGTYTDCAIKKGLEQLLVGGSHLKENKYLIVVTDGHPLEGYKEPCGGLEDAVNEAKHLGVKVFSVAITPDHLEPRLSIIATDHTYRRNFTAADWGQSRDAEEAISQTIDTIVDMIKNNVEQVCCSFECQPARGPPGLRGDPGFEGERGKPGLPGEKGEAGDPGRPGDLGPVGYQGMKGEKGSRGEKGSRGPKGYKGEKGKRGIDGVDGVKGEMGYPGLPGCKGSPGFDGIQGPPGPKGDPGAFGLKGEKGEPGADGEAGRPGSSGPSGDEGQPGEPGPPGEKGEAGDEGNPGPDGAPGERGGPGERGPRGTPGTRGPRGDPGEAGPQGDQGREGPVGVPGDPGEAGPIGPKGYRGDEGPPGSEGARGAPGPAGPPGDPGLMGERGEDGPAGNGTEGFPGFPGYPGNRGAPGINGTKGYPGLKGDEGEAGDPGDDNNDIAPRGVKGAKGYRGPEGPQGPPGHQGPPGPDECEILDIIMKMCSCCECKCGPIDLLFVLDSSESIGLQNFEIAKDFVVKVIDRLSRDELVKPGMKSNTSLMPTETTWMPGLQSTLS

SEQ ID NO: 904558 - protein, 328 aa, Homo sapiens
  misc_feature (315)..(315): Xaa can be any naturally occurring amino acid
MRAARALLPLLLQACWTAAQDEPETPRAVAFQDCPVDLFFVLDTSESVALRLKPYGALVDKVKSFTKRFIDNLRDRYYRCDRNLVWNAGALHYSDEVEIIQGLTRMPGGRDALKSSVDAVKYFGKGTYTDCAIKKGLEQLLVGGSHLKENKYLIVVTDGHPLEGYKEPCGGLEDAVNEAKHLGVKVFSVAITPDHLEPRLSIIATDHTYRRNFTAADWGQSRDAEEAISQTIDTIVDMIKNNVEQVCCSFECQPARGPPGLRGDPGFEGERGKPGLPGEKGEAGDPGRPGDLGPVGYQGMKGEKGSRGEKGSRDXRAPFSHFRLSCAE

SEQ ID NO: 904559 - protein, 448 aa, Homo sapiens
MLTFMASDSEEEVCDERTSLMSAESPTPRSCQEGRQGPEDGENTAQWRSQENEEDGEEDPDRYVCSGVPGRPPGLEEELTLKYGAKHVIMLFVPVTLCMIVVVATIKSVRFYTEKNGQLIYTPFTEDTPSVGQRLLNSVLNTLIMISVIVVMTIFLVVLYKYRCYKFIHGWLIMSSLMLLFLFTYIYLGEVLKTYNVAMDYPTLLLTVWNFGAVGMVCIHWKGPLVLQQAYLIMISALMALVFIKYLPEWSAWVILGAISVYDLVAVLCPKGPLRMLVETAQERNEPIFPALIYSSAMVWTVGMAKLDPSSQGALQLPYDPEMEEDSYDSFGEPSYPEVFEPPLTGYPGEELEEEEERGVKLGLGDFIFYSVLVGKAAATGSGDWNTTLACFVAILIGLCLTLLLLAVFKKALPALPISITFGLIFYFSTDNLVRPFMDTLASHQLYI

SEQ ID NO: 904560 - protein, 448 aa, Homo sapiens; identical to SEQ ID NO: 904559

SEQ ID NO: 904561 - protein, 481 aa, Homo sapiens
MLAGTVRFARHCLKFFPAQKPACVDFGASRGRAMLTFMASDSEEEVCDERTSLMSAESPTPRSCQEGRQGPEDGENTAQWRSQENEEDGEEDPDRYVCSGVPGRPPGLEEELTLKYGAKHVIMLFVPVTLCMIVVVATIKSVRFYTEKNGQLIYTPFTEDTPSVGQRLLNSVLNTLIMISVIVVMTIFLVVLYKYRCYKFIHGWLIMSSLMLLFLFTYIYLGEVLKTYNVAMDYPTLLLTVWNFGAVGMVCIHWKGPLVLQQAYLIMISALMALVFIKYLPEWSAWVILGAISVYDLVAVLCPKGPLRMLVETAQERNEPIFPALIYSSAMVWTVGMAKLDPSSQGALQLPYDPEMEEDSYDSFGEPSYPEVFEPPLTGYPGEELEEEEERGVKLGLGDFIFYSVLVGKAAATGSGDWNTTLACFVAILIGLCLTLLLLAVFKKALPALPISITFGLIFYFSTDNLVRPFMDTLASHQLYI

SEQ ID NO: 904562 - protein, 275 aa, Homo sapiens
MSSLMLLFLFTYIYLGEVLKTYNVAMDYPTLLLTVWNFGAVGMVCIHWKGPLVLQQAYLIMISALMALVFIKYLPEWSAWVILGAISVYDLVAVLCPKGPLRMLVETAQERNEPIFPALIYSSAMVWTVGMAKLDPSSQGALQLPYDPEMEEDSYDSFGEPSYPEVFEPPLTGYPGEELEEEEERGVKLGLGDFIFYSVLVGKAAATGSGDWNTTLACFVAILIGLCLTLLLLAVFKKALPALPISITFGLIFYFSTDNLVRPFMDTLASHQLYI

SEQ ID NO: 904563 - protein, 448 aa, Homo sapiens; identical to SEQ ID NO: 904559

SEQ ID NO: 904564 - protein, 441 aa, Homo sapiens
MLTFMASDSEEEVCDERTSLMSAESPTPRSCQEGRQGPEDGENTAQWRSQENEEDGEEDPDRYVCSGVPGRPPGLEEELTLKYGAKHVIMLFVPVTLCMIVVVATIKSVRFYTEKNGQLIYTPFTEDTPSVGQRLLNSVLNTLIMISVIVVMTIFLVVLYKYRCYKFIHGWLIMSSLMLLFLFTYIYLGEVLKTYNVAMDYPTLLLTVWNFGAVGMVCIHWKGPLVLQQAYLIMISALMALVFIKYLPEWSAWVILGAISVYDLVAVLCPKGPLRMLVETAQERNEPIFPALIYSSAMVWTVGMAKLDPSSQGALQLPYDPEMEEDSYDSFGEPSYPEVFEPPLTGYPGEELEEEEERGVKLGLGDFIFYSVLVGKAAATGSGDWNTTLACFVAILIGLCLTLLLLAVFKKALPALPISITFGLIFYFFTDRKHSRFIQMN

SEQ ID NO: 904565 - protein, 109 aa, Homo sapiens
ALNTSRAVAGPGKIMGCLAPLSDWSSNKLLCPGTETMTHSSCPHQGSPRSPSPPCPAGGLCLTLLLLAVFKKALPALPISITFGLIFYFSTDNLVRPFMDTLASHQLYI

SEQ ID NO: 904566 - protein, 881 aa, Homo sapiens [sequence omitted]

SEQ ID NO: 904567 - protein, 881 aa, Homo sapiens [sequence omitted]

SEQ ID NO: 904568 - protein, 881 aa, Homo sapiens [sequence omitted]

SEQ ID NO: 904569 - protein, 881 aa, Homo sapiens [sequence omitted]

SEQ ID NO: 904570 - protein, 881 aa, Homo sapiens [sequence omitted]

SEQ ID NO: 904571 - protein, 714 aa, Homo sapiens
MLSRLFRMHGLFVASHPWEVIVGTVTLTICMMSMNMFTGNNKICGWNYECPKFEEDVLSSDIIILTITRCIAILYIYFQFQNLRQLGSKYILGIAGLFTIFSSFVFSTVVIHFLDKELTGLNEALPFFLLLIDLSRASTLAKFALSSNSQDEVRENIARGMAILGPTFTLDALVECLVIGVGTMSGVRQLEIMCCFGCMSVLANYFVFMTFFPACVSLVLELSRESREGRPIWQLSHFARVLEEEENKPNPVTQRVKMIMSLGLVLVHAHSRWIADPSPQNSTADTSKVSLGLDENVSKRIEPSVSLWQFYLSKMISMDIEQVITLSLALLLAVKYIFFEQTETESTLSLKNPITSPVVTQKKVPDNCCRREPMLVRNNQKCDSVEEETGINRERKVEVIKPLVAETDTPNRATFVVGNSSLLDTSSVLVTQEPEIELPREPRPNEECLQILGNAEKGAKFLSDAEIIQLVNAKHIPAYKLETLMETHERGVSIRRQLLSKKLSEPSSLQYLPYRDYNYSLVMGACCENVIGYMPIPVGVAGPLCLDEKEFQVPMATTEGCLVASTNRGCRAIGLGGGASSRVLADGMTRGPVVRLPRACDSAEVKAWLETSEGFAVIKEAFDSTSRFARLQKLHTSIAGRNLYIRFQSRSGDAMGMNMISKGTEKALSKLHEYFPEMQILAVSGNYCTDKKPAAINWIEGRGKCIKDYHRGYD

SEQ ID NO: 904572 - protein, 673 aa, Homo sapiens
MHGLFVASHPWEVIVGTVTLTICMMSMNMFTGNNKICGWNYECPKFEEDVLSSDIIILTITRCIAILYIYFQFQNLRQLGSKYILGIAGLFTIFSSFVFSTVVIHFLDKELTGLNEALPFFLLLIDLSRASTLAKFALSSNSQDEVRENIARGMAILGPTFTLDALVECLVIGVGTMSGVRQLEIMCCFGCMSVLANYFVFMTFFPACVSLVLELSRESREGRPIWQLSHFARVLEEEENKPNPVTQRVKMIMSLGLVLVHAHSRWIADPSPQNSTADTSKVSLGLDENVSKRIEPSVSLWQFYLSKMISMDIEQVITLSLALLLAVKYIFFEQTETESTLSLKNPITSPVVTQKKVPDNCCRREPMLVRNNQKCDSVEEETGINRERKVEVIKPLVAETDTPNRATFVVGNSSLLDTSSVLVTQEPEIELPREPRPNEECLQILGNAEKGAKFLSDAEIIQLVNAKHIPAYKLETLMETHERGVSIRRQLLSKKLSEPSSLQYLPYRDYNYSLVMGACCENVIGYMPIPVGVAGPLCLDEKEFQVPMATTEGCLVASTNRGCRAIGLGGGASSRVLADGMTRGPVVRLPRACDSAEVKAWLETSEGFAVIKEAFDSTSRFARLQKLHTSIAGRNLYIRFQSRSGDAMGMNMISKVSVGRVSESTFIKMKVLL

SEQ ID NO: 904573 - protein, 107 aa, Homo sapiens
MHGLFVASHPWEVIVGTVTLTICMMSMNMFTGNNKICGWNYECPKFEEDVLSSDIIILTITRCIAILYIYFQFQNLRQLGSKYILGNSFTYLTSGVIRFLICCGNKP

SEQ ID NO: 904574 - protein, 881 aa, Homo sapiens [sequence omitted]

SEQ ID NO: 904575 - protein, 931 aa, Homo sapiens
MHGLFVASHPWEVIVGTVTLTICMMSMNMFTGNNKICGWNYECPKFEEDVLSSDIIILTITRCIAILYIYFQFQNLRQLGSKYILGIAGLFTIFSSFVFSTVVIHFLDKELTGLNEALPFFLLLIDLSRASTLAKFALSSNSQDEVRENIARGMAILGPTFTLDALVECLVIGVGTMSGVRQLEIMCCFGCMSVLANYFVFMTFFPACVSLVLELSRESREGRPIWQLSHFARVLEEEENKPNPVTQRVKMIMSLGLVLVHAHSRWIADPSPQNSTADTSKVSLGLDENVSKRIEPSVSLWQFYLSKMISMDIEQVITLSLALLLAVKYIFFEQTETESTLSLKNPITSPVVTQKKVPDNCCRREPMLVRNNQKCDSVEEETGINRERKVEVIKPLVAETDTPNRATFVVGNSSLLDTSSVLVTQEPEIELPREPRPNEECLQILGNAEKGAKFLSDAEIIQLVNAKHIPAYKLETLMETHERGVSIRRQLLSKKLSEPSSLQYLPYRDYNYSLVMGACCENVIGYMPIPVGVAGPLCLDEKEFQVPMATTEGCLVASTNRGCRAIGVSWHLYICQFEKYIISKAMRRVLRTISDTFWVKHEHFWVTCACFSNIYCVLGGGASSRVLADGMTRGPVVRLPRACDSAEVKAWLETSEGFAVIKEAFDSTSRFARLQKLHTSIAGRNLYIRFQSRSGDAMGMNMISKGTEKALSKLHEYFPEMQILAVSGNYCTDKKPAAINWIEGRGKSVVCEAVIPAKVVREVLKTTTEAMIEVNINKNLVGSAMAGSIGGYNAHAANIVTAIYIACGQDAAQNVGSSNCITLMEASGPTNEDLYISCTMPSIEIGTVGGGTNLLPQQACLQMLGVQGACKDNPGENARQLARIVCGTVMAGELSLMAALAAGHLVKSHMIHNRSKINLQDLQGACTKKTA

SEQ ID NO: 904576 - protein, 881 aa, Homo sapiens [sequence omitted]

SEQ ID NO: 904577 - protein, 581 aa, Homo sapiens
MHGLFVASHPWEVIVGTVTLTICMMSMNMFTGNNKICGWNYECPKFEEDVLSSDIIILTITRCIAILYIYFQFQNLRQLGSKYILGIAGLFTIFSSFVFSTVVIHFLDKELTGLNEALPFFLLLIDLSRASTLAKFALSSNSQDEVRENIARGMAILGPTFTLDALVECLVIGVGTMSGVRQLEIMCCFGCMSVLANYFVFMTFFPACVSLVLELSRESREGRPIWQLSHFARVLEEEENKPNPVTQRVKMIMSLGLVLVHAHSRWIADPSPQNSTADTSKVSLGLDENVSKRIEPSVSLWQFYLSKMISMDIEQVITLSLALLLAVKYIFFEQTETESTLSLKNPITSPVVTQKKVPDNCCRREPMLVRNNQKCDSVEEETGINRERKVEVIKPLVAETDTPNRATFVVGNSSLLDTSSVLVTQEPEIELPREPRPNEECLQILGNAEKGAKFLSDAEIIQLVNAKHIPAYKLETLMETHERGVSIRRQLLSKKLSEPSSLQYLPYRDYNYSLVMGACCENVIGYMPIPVGVAGPLCLDEKEFQVPMATTEGCLVASTNRGCRAIGVSWHLYICQFKNTS

SEQ ID NO: 904578 - protein, 329 aa, Homo sapiens
MGATGDAEQPRGPSGAERGGLELGDAGAAGQLVLTNPWNIMIKHRQVQRRGRRSQMTTSFTDPAISMDLLRAVLQPSINEEIQTVFNKYMKFFQKAALNVRDNVGEEVDAEQLIQEACRSCLEQAKLLFSDGEKVIPRLTHELPGIKRGRQAEEECAHRGSPLPKKRKGRPPGHILSSDRAAAGMVWKPKSCEPIRREGPKWDPARLNESTTFVLGSRANKALGMGGTRGRIYIKHPHLFKYAADPQDKHWLAEQHHMRATGGKMAYLLIEEDIRDLAASDDYRGCLDLKLEELKSFVLPSWMVEKMRKYMETLRTENEHRAVEAPPQT

SEQ ID NO: 904579 - protein, 329 aa, Homo sapiens; identical to SEQ ID NO: 904578

SEQ ID NO: 904580 - protein, 105 aa, Homo sapiens
MGGTRGRIYIKHPHLFKYAADPQDKHWLAEQHHMRATGGKMAYLLIEEDIRDLAASDDYRGCLDLKLEELKSFVLPSWMVEKMRKYMETLRTENEHRAVEAPPQT

SEQ ID NO: 904581 - protein, 248 aa, Homo sapiens
MGATGDAEQPRGPSGAERGGLELGDAGAAGQLVLTNPWNIMIKHRQVQRRGRRSQMTTSFTDPAISMDLLRAVLQPSINEEIQTVFNKYMKFFQKAALNVRDNVGEEVDAEQLIQEACRSCLEQAKLLFSDGEKVIPRLTHELPGIKRGRQAEEECAHRGSPLPKKRKGRPPGHILSSDRAAAGMVWKPKSCEPIRREGPKWDPARLNESTTFVLGSRANKALGMGGTRGRIYIKHPHLFKVGDCWEE

SEQ ID NO: 904582 - protein, 88 aa, Homo sapiens
EEVDAEQLIQEACRSCLEQVRPKGTRDAGTRFSSRASDKKCDLKPDVVAHTCNPSTVGGQGGQITQGQEFETSLGNVAKPHLYKQYEN

SEQ ID NO: 904583 - protein, 155 aa, Homo sapiens
MGATGDAEQPRGPSGAERGGLELGDAGAAGQLVLTNPWNIMIKHRQVQRRGRRSQMTTSFTDPAISMDLLRAVLQPSINEEIQTVFNKYMKFFQKAALNVRDNVGEEVDAEQLIQEACRSCLEQVRGGSSYHGPIWYHGDEHPAASLPLWCGQEA

SEQ ID NO: 904584 - protein, 284 aa, Homo sapiens
MGATGDAEQPRGPSGAERGGLELGDAGAAGQLVLTNPWNIMIKHRQVQRRGRRSQMTTSFTDPAISMDLLRAVLQPSINEEIQTVFNKYMKFFQKAALNVRDNVGEEVDAEQLIQEACRSCLEQAKLLFSDGEKVIPRLTHELPGIKRGRQAEEECAHRGSPLPKKRKGRPPGHILSSDRAAAGMVWKPKSCEPIRREGPKWDPARLNESTTFVLGSRANKALGMGGTRGRIYIKHPHLFKYAADPQDKHWLAEQHHMRATGGKMAYLLIEEDIRDLAASDDYR

SEQ ID NO: 904585 - protein, 124 aa, Homo sapiens
RSSDVHGATFRPVTESSGVVGAGGAMGATGDAEQPRGPSGAERGGLELGDAGAAGQLVLTNPWNIMIKHRQVQRRGRRSQMTTSFTDPAISMDLLRAVLQPSINEEIQTVFNKYMKVRGTQDKK

SEQ ID NO: 904586 - protein, 359 aa, Homo sapiens
MDPLGPAKPQWSWRCCLTTLLFQLLMAVCFFSYLRVSQDDPTVYPNGSRFPDSTGTPAHSIPLILLWTWPFNKPIALPRCSEMVPGTADCNITADRKVYPQADAVIVHHREVMYNPSAQLPRSPRRQGQRWIWFSMESPSHCWQLKAMDGYFNLTMSYRSDSDIFTPYGWLEPWSGQPAHPPLNLSAKTELVAWAVSNWGPNSARVRYYQSLQAHLKVDVYGRSHKPLPQGTMMETLSRYKFYLAFENSLHPDYITEKLWRNALEAWAVPVVLGPSRSNYERFLPPDAFIHVDDFQSPKDLARYLQELDKDHARYLSYFRWRETLRPRSFSWALAFCKACWKLQEESRYQTRGIAAWFT

SEQ ID NO: 904587 - protein, 359 aa, Homo sapiens; identical to SEQ ID NO: 904586

SEQ ID NO: 904588 - protein, 359 aa, Homo sapiens; identical to SEQ ID NO: 904586

SEQ ID NO: 904589 - protein, 286 aa, Homo sapiens
MDPLGPAKPQWSWRCCLTTLLFQLLMAVCFFSYLRVSQDDPTVYPNGSRFPDSTGTPAHSIPLILLWTWPFNKPIALPRCSEMVPGTADCNITADRKVYPQADAVIVHHREVMYNPSAQLPRSPRRQGQRWIWFSMESPSHCWQLKAMDGYFNLTMSYRSDSDIFTPYGWLEPWSGQPAHPPLNLSAKTELVAWAVSNWGPNSARVRYYQSLQAHLKVDVYGRSHKPLPQGTMMETLSRYKFYLAFENSLHPDYITEKLWRNALEAWAVPVVLGPSRRTSFSWGLT

SEQ ID NO: 904590 - protein, 109 aa, Homo sapiens
MTGVVVGKGRVSAPGTLPPSFCCVVWPLPRPQNPAVTRPRPLSSRALCTLAPPVSRASRRDPVHPLLEERPVSRSPSPSSISQKVSRRSSVQGAAAVHSNLGDTVRLSQ

SEQ ID NO: 904591 - protein, 359 aa, Homo sapiens; identical to SEQ ID NO: 904586

SEQ ID NO: 904592 - protein, 364 aa, Homo sapiens
MDPLGPAKPQWSWRCCLTTLLFQLLMAVCFFSYLRVSQDDPTVYPNGSRFPDSTGTPAHSIPLILLWTWPFNKPIALPRCSEMVPGTADCNITADRKVYPQADAVIVHHREVMYNPSAQLPRSPRRQGQRWIWFSMESPSHCWQLKAMDGYFNLTMSYRSDSDIFTPYGWLEPWSGQPAHPPLNLSAKTELVAWAVSNWGPNSARVRYYQSLQAHLKVDVYGRSHKPLPQGTMMETLSRYKFYLAFENSLHPDYITEKLWRNALEAWAVPVVLGPSRSNYERFLPPDAFIHVDDFQSPKDLARYLQELDKDHARYLSYFRWRETLRPRSFSWALAFCKACWKLQEESSGGLIYLRTRLPEASPA

SEQ ID NO: 904593 - protein, 537 aa, Homo sapiens
RALYGRGDGASRRQAPRAGKRGRGARLMPGGGASAASGRLLTAAEQRGSREAAGSASRSGFGGSGGGRGGASGPGSGSGGPGGPAGRMSLTPKELSSLLSIISEEAGGGSTFEGLSTAFHHYFSKADHFRLGSVLVMLLQQPDLLPSAAQRLTALYLLWEMYRTEPLAANPFAASFAHLLNPAPPARGGQEPDRPPLSGFLPPITPPEKFFLSQLMLAPPRELFKKTPRQIALMDVGNMGQSVDISGLQLALAERQSELPTQSKASFPSILSDPDPDSSNSGFDSSVASQITEALVSGPKPPIESHFRPEFIRPPPPLHICEDELAWLNPTEPDHAIQWDKSMCVKNSTGVEIKRIMAKAFKSPLSSPQQTQLLGELEKDPKLVYHIGLTPAKLPDLVENNPLVAIEMLLKLMQSSQITEYFSVLVNMDMSLHSMEVVNRLTTAVDLPPEFIHLYISNCISTCEQIKDKYMQNRLVRLVCVFLQSLIRNKIINVQDLFIEVQAFCIEFSRIREAAGLFRLLKTLDTGETPSETKMSK

SEQ ID NO: 904594 - protein, 329 aa, Homo sapiens
ADSKNLSTTLSEDLLYVQTYTHFLSLSESGPLFFSVTDSLPQLVACLFSLLMMSIILSFPSILSDPDPDSSNSGFDSSVASQITEALVSGPKPPIESHFRPEFIRPPPPLHICEDELAWLNPTEPDHAIQWDKSMCVKNSTGVEIKRIMAKAFKSPLSSPQQTQLLGELEKDPKLVYHIGLTPAKLPDLVENNPLVAIEMLLKLMQSSQITEYFSVLVNMDMSLHSMEVVNRLTTAVDLPPEFIHLYISNCISTCEQIKDKYMQNRLVRLVCVFLQSLIRNKIINVQDLFIEVQAFCIEFSRIREAAGLFRLLKTLDTGETPSETKMSK

SEQ ID NO: 904595 - protein, 537 aa, Homo sapiens; identical to SEQ ID NO: 904593

SEQ ID NO: 904596 - protein, 474 aa, Homo sapiens
RALYGRGDGASRRQAPRAGKRGRGARLMPGGGASAASGRLLTAAEQRGSREAAGSASRSGFGGSGGGRGGASGPGSGSGGPGGPAGRMSLTPKELSSLLSIISEEAGGGSTFEGLSTAFHHYFSKADHFRLGSVLVMLLQQPDLLPSAAQRLTALYLLWEMYRTEPLAANPFAASFAHLLNPAPPARGGQEPDRPPLSGFLPPITPPEKFFLSQLMLAPPRELFKKTPRQIALMDVGNMGQSVDISGLQLALAERQSELPTQSKASFPSILSDPDPDSSNSGFDSSVASQITEALVSGPKPPIESHFRPEFIRPPPPLHICEDELAWLNPTEPDHAIQWDKSMCVKNSTGVEIKRIMAKAFKSPLSSPQQTQLLGELEKDPKLVYHIGLTPAKLPDLVENNPLVAIEMLLKLMQSSQITEYFSVLVNMDMSLHSMEVVNRLTTAVDLPPEFIHLYISNCISTCEQIKDKYMQVI

SEQ ID NO: 904597 - protein, 398 aa, Homo sapiens
RALYGRGDGASRRQAPRAGKRGRGARLMPGGGASAASGRLLTAAEQRGSREAAGSASRSGFGGSGGGRGGASGPGSGSGGPGGPAGRMSLTPKELSSLLSIISEEAGGGSTFEGLSTAFHHYFSKADHFRLGSVLVMLLQQPDLLPSAAQRLTALYLLWEMYRTEPLAANPFAASFAHLLNPAPPARGGQEPDRPPLSGFLPPITPPEKFFLSQLMLAPPRELFKKTPRQIALMDVGNMGQSVDISGLQLALAERQSELPTQSKASFPSILSDPDPDSSNSGFDSSVASQITEALVSGPKPPIESHFRPEFIRPPPPLHICEDELAWLNPTEPDHAIQWDKSMCVKNSTGVEIKRIMAKAFKSPLSSPQQTQLLGELEKDPKLVYHIDQDREILSDLA

SEQ ID NO: 904598 - protein, 255 aa, Homo sapiens
RALYGRGDGASRRQAPRAGKRGRGARLMPGGGASAASGRLLTAAEQRGSREAAGSASRSGFGGSGGGRGGASGPGSGSGGPGGPAGRMSLTPKELSSLLSIISEEAGGGSTFEGLSTAFHHYFSKADHFRLGSVLVMLLQQPDLLPSAAQRLTALYLLWEMYRTEPLAANPFAASFAHLLNPAPPARGGQEPDRPPLSGFLPPITPPEKFFLSQLMLAPPRELFKKTPRQIALMDVGNMGQSVDISGLQLALADW

SEQ ID NO: 904599 - protein, 537 aa, Homo sapiens; identical to SEQ ID NO: 904593

SEQ ID NO: 904600 - protein, 537 aa, Homo sapiens; identical to SEQ ID NO: 904593

SEQ ID NO: 904601 - protein, 519 aa, Homo sapiens
RALYGRGDGASRRQAPRAGKRGRGARLMPGGGASAASGRLLTAAEQRGSREAAGSASRSGFGGSGGGRGGASGPGSGSGGPGGPAGRMSLTPKELSSLLSIISEEAGGGSTFEGLSTAFHHYFSKADHFRLGSVLVMLLQQPDLLPSAAQRLTALYLLWEMYRTEPLAANPFAASFAHLLNPAPPARGGQEPDRPPLSGFLPPITPPEKFFLSQLMLAPPRELFKKTPRQIALMDVGNMGQSVDISGLQLALAERQSELPTQSKASFPSILSDPDPDSSNSGFDSSVASQITEALVSGPKPPIESHFRPEFIRPPPPLHICEDELAWLNPTEPDHAIQWDKSMCVKNSTGVEIKRIMAKAFKSPLSSPQQTQLLGELEKDPKLVYHIGLTPAKLPDLVEITEYFSVLVNMDMSLHSMEVVNRLTTAVDLPPEFIHLYISNCISTCEQIKDKYMQNRLVRLVCVFLQSLIRNKIINVQDLFIEVQAFCIEFSRIREAAGLFRLLKTLDTGETPSETKMSK

SEQ ID NO: 904602 - protein, 549 aa, Homo sapiens
RALYGRGDGASRRQAPRAGKRGRGARLMPGGGASAASGRLLTAAEQRGSREAAGSASRSGFGGSGGGRGGASGPGSGSGGPGGPAGRMSLTPKELSSLLSIISEEAGGGSTFEGLSTAFHHYFSKADHFRLGSVLVMLLQQPDLLPSAAQRLTALYLLWEMYRTEPLAANPFAASFAHLLNPAPPARGGQEPDRPPLSGFLPPITPPEKFFLSQLMLAPPRELFKKTPRQIALMDVGNMGQSVDISGLQLALAERQSELPTQSKASFPSILSDPDPDSSNSGFDSSVASQITEALVSGPKPPIESHFRPEFIRPPPPLHICEDELAWLNPTEPDHAIQWDKSMCVKNSTGVEIKRIMAKAFKSPLSSPQQTQLLGELEKDPKLVYHIGLTPAKLPDLVENNPLVAIEMLLKLMQSSQITEYFSVLVNMDMSLHSMEVVNRLTTAVDLPPEFIHLYISNCISTCEQIKDKYMQNRLVRLVCVFLQSLIRNKIINVQDLFIEVQAFCIEFSRKRPAASRILLNSIREAAGLFRLLKTLDTGETPSETKMSK

SEQ ID NO: 904603 - protein, 104 aa, Homo sapiens [sequence omitted]

SEQ ID NO: 904604 - protein, 259 aa, Homo sapiens
LLGAGRAVATDSRPAPARVQDPVVPSCCPGARTEAPGARQGSRSTRAMARPRLGSALPSAAAFGWLRPRPNFQATVSRRRRAGPSLPPPAARSGAPATPRLWLGCGSGACPDCDAATAWGQFAQSGGWLGRPRGSTIPRVGDVPCPGLTSRVRKTGWTTQPKAEPRQGPSLSPGSGGLTGPGVRACPRAWGGRRDGLAGSAPGPPGGAAAVAADPGPEAAQAASQVRGPTVGRRALSRPHLTRLQNAAENAAVGPLQGP

SEQ ID NO: 904605 - protein, 399 aa, Homo sapiens
AHPAARPRPPPLVVAPRPRARPARPPPAATMSTGLRYKSKLATPEDKQDIDKQYVGFATLPNQVHRKSVKKGFDFTLMVAGESGLGKSTLVHSLFLTDLYKDRKLLSAEERISQTVEILKHTVDIEEKGVKLKLTIVDTPGFGDAVNNTECWKPITDYVDQQFEQYFRDESGLNRKNIQDNRVHCCLYFISPFGHGLRPVDVGFMKALHEKVNIVPLIAKADCLVPSEIRKLKERIREEIDKFGIHVYQFPECDSDEDEDFKQQDRELKESAPFAVIGSNTVVEAKGQRVRGRLYPWGIVEVENQAHCDFVKLRNMLIRTHMHDLKDVTCDVHYENYRAHCIQQMTSKLTQDSRMESPIPILPLPTPDAETEKLIRMKDEELRRMQEMLQRMKQQMQDQ

SEQ ID NO: 904606 - protein, 573 aa, Homo sapiens
LLGAGRAVATDSRPAPARVQDPVVPSCCPGARTEAPGARQGSRSTRAMARPRLGSALPSAAAFGWLRPRPNFQATVSRRRRAGPSLPPPAARSGAPATPRLWLGCGSGACPDCDAATAWGQFAQSGGWLGRPRGSTIPRVGDVPCPGLTSRVRKTGWTTQPKAEPRQGPSLSPGSGGLTGPGVRACPRAWGGRRDGLAGSAPGPPGGAAAVAADPGPEAAQEDIDKQYVGFATLPNQVHRKSVKKGFDFTLMVAGESGLGKSTLVHSLFLTDLYKDRKLLSAEERISQTVEILKHTVDIEEKGVKLKLTIVDTPGFGDAVNNTECWKPITDYVDQQFEQYFRDESGLNRKNIQDNRVHCCLYFISPFGHGLRPVDVGFMKALHEKVNIVPLIAKADCLVPSEIRKLKERIREEIDKFGIHVYQFPECDSDEDEDFKQQDRELKESAPFAVIGSNTVVEAKGQRVRGRLYPWGIVEVENQAHCDFVKLRNMLIRTHMHDLKDVTCDVHYENYRAHCIQQMTSKLTQDSRMESPIPILPLPTPDAETEKLIRMKDEELRRMQEMLQRMKQQMQDQ

SEQ ID NO: 904607 - protein, 407 aa, Homo sapiens
ISRLLPTGPPLIFANEMPHPGNRTLCCLLIPHLVRDRVLGFWRNLCVPTLFHPVPKDIDKQYVGFATLPNQVHRKSVKKGFDFTLMVAGESGLGKSTLVHSLFLTDLYKDRKLLSAEERISQTVEILKHTVDIEEKGVKLKLTIVDTPGFGDAVNNTECWKPITDYVDQQFEQYFRDESGLNRKNIQDNRVHCCLYFISPFGHGLRPVDVGFMKALHEKVNIVPLIAKADCLVPSEIRKLKERIREEIDKFGIHVYQFPECDSDEDEDFKQQDRELKESAPFAVIGSNTVVEAKGQRVRGRLYPWGIVEVENQAHCDFVKLRNMLIRTHMHDLKDVTCDVHYENYRAHCIQQMTSKLTQDSRMESPIPILPLPTPDAETEKLIRMKDEELRRMQEMLQRMKQQMQDQ

SEQ ID NO: 904608 - protein, 314 aa, Homo sapiens
HGHSCLSGRTGVEETGYRRCGCGSALIIDWLPILKHTVDIEEKGVKLKLTIVDTPGFGDAVNNTECWKPITDYVDQQFEQYFRDESGLNRKNIQDNRVHCCLYFISPFGHGLRPVDVGFMKALHEKVNIVPLIAKADCLVPSEIRKLKERIREEIDKFGIHVYQFPECDSDEDEDFKQQDRELKESAPFAVIGSNTVVEAKGQRVRGRLYPWGIVEVENQAHCDFVKLRNMLIRTHMHDLKDVTCDVHYENYRAHCIQQMTSKLTQDSRMESPIPILPLPTPDAETEKLIRMKDEELRRMQEMLQRMKQQMQDQ

SEQ ID NO: 904609 - protein, 113 aa, Homo sapiens
MREMLSDNVGASEDVCGDTEDPVGAVRMLWGCCGDSKDTGGSEDAVDTADAVGTMTLWTVRTLWGRRGHCGVRTLGAVRTLWTVGRCGGGEDAVGAVEDAVDGENAVGTLRML

SEQ ID NO: 904610 - protein, 399 aa, Homo sapiens; identical to SEQ ID NO: 904605

SEQ ID NO: 904611 - protein, 399 aa, Homo sapiens; identical to SEQ ID NO: 904605

SEQ ID NO: 904612 - protein, 377 aa, Homo sapiens
AHPAARPRPPPLVVAPRPRARPARPPPAATMSTGLRYKSKLATPEDKQDIDKQYVGFATLPNQVHRKSVKKGFDFTLMVAGESGLGKSTLVHSLFLTDLYKDRKLLSAEERISQTVEILKHTVDIEEKGVKLKLTIVDTPGFGDAVNNTECWKPITDYVDQQFEQYFRDESGLNRKNIQDNRVHCCLYFISPFGHGLRPVDVGFMKALHEKVNIVPLIAKADCLVPSEIRKLKERIREEIDKFGIHVYQFPECDSDEDEDFKQQDRELKESAPFAVIGSNTVVEAKGQRVRGRLYPWGIVEVENQAHCDFVKLRNMLIRTHMHDLKDVTCDVHYENYRAHCIQQMTRCAPQPRARPRPSGPAHVSITEGRSCQPTQT

SEQ ID NO: 904613 - protein, 491 aa, Homo sapiens
LLGAGRAVATDSRPAPARVQDPVVPSCCPGARTEAPGARQGSRSTRAMARPRLGSALPSAAAFGWLRPRPNFQATVSRRRRAGPSLPPPAARSAGACDAPPLARVRERGLPGLRRRHSLGPVRPVRGMARSASGVDDPPEDIDKQYVGFATLPNQVHRKSVKKGFDFTLMVAGESGLGKSTLVHSLFLTDLYKDRKLLSAEERISQTVEILKHTVDIEEKGVKLKLTIVDTPGFGDAVNNTECWKPITDYVDQQFEQYFRDESGLNRKNIQDNRVHCCLYFISPFGHGLRPVDVGFMKALHEKVNIVPLIAKADCLVPSEIRKLKERIREEIDKFGIHVYQFPECDSDEDEDFKQQDRELKESAPFAVIGSNTVVEAKGQRVRGRLYPWGIVEVENQAHCDFVKLRNMLIRTHMHDLKDVTCDVHYENYRAHCIQQMTSKLTQDSRMESPIPILPLPTPDAETEKLIRMKDEELRRMQEMLQRMKQQMQDQ

SEQ ID NO: 904614 - protein, 399 aa, Homo sapiens; identical to SEQ ID NO: 904605

SEQ ID NO: 904615 - protein, 399 aa, Homo sapiens; identical to SEQ ID NO: 904605

SEQ ID NO: 904616 - protein, 409 aa, Homo sapiens
AHPAARPRPPPLVVAPRPRARPARPPPAATMSTGLRYKSKLATPEDKQDIDKQYVGFATLPNQVHRKSVKKGFDFTLMVAGESGLGKSTLVHSLFLTDLYKDRKLLSAEERISQTVEILKHTVDIEEKGVKLKLTIVDTPGFGDAVNNTECWKPITDYVDQQFEQYFRDESGLNRKNIQDNRVHCCLYFISPFGHGLRPVDVGFMKALHEKVNIVPLIAKADCLVPSEIRKLKERIREEIDKFGIHVYQFPECDSDEDEDFKQQDRELKVLSLSPSFPQESAPFAVIGSNTVVEAKGQRVRGRLYPWGIVEVENQAHCDFVKLRNMLIRTHMHDLKDVTCDVHYENYRAHCIQQMTSKLTQDSRMESPIPILPLPTPDAETEKLIRMKDEELRRMQEMLQRMKQQMQDQ

SEQ ID NO: 904617 - protein, 542 aa, Homo sapiens
LLGAGRAVATDSRPAPARVQDPVVPSCCPGARTEAPGARQGSRSTRAMARPRLGSALPSAAAFGWLRPRPNFQATVSRRRRAGPSLPPPAARSGAPATPRLWLGCGSGACPDCDAATAWGQFAQSGGWLGRPRGSTIPRVGDVPCPGLTSRVRKTGWTTQPKAEPRQGPSLSPGSGGLTGPGVRACPRAWGGRRDGLAGSAPGPPGGAAAVAADPGPEAAQEDIDKQYVGFATLPNQVHRKSVKKGFDFTLMVAGESGLGKSTLVHSLFLTDLYKDRKLLSAEERISQTVEILKHTVDIEEKGVKLKLTIVDTPGFGDAVNNTECWKPITDYVDQQFEQYFRDESGLNRKNIQDNRVHCCLYFISPFGHGEIRKLKERIREEIDKFGIHVYQFPECDSDEDEDFKQQDRELKESAPFAVIGSNTVVEAKGQRVRGRLYPWGIVEVENQAHCDFVKLRNMLIRTHMHDLKDVTCDVHYENYRAHCIQQMTSKLTQDSRMESPIPILPLPTPDAETEKLIRMKDEELRRMQEMLQRMKQQMQDQ

SEQ ID NO: 904618 - protein, 117 aa, Homo sapiens
MLWGCCGDSKDTGGSEDAVDTADAVGTMTLWTVRTLWGRRGHCGVRTLGAVRTLWTVGRCGGGEDAVGAVEDAVDGENAVGTLRCCEDAVGAVRTLWTVRTLWGWRRLCGGGEDSVD

SEQ ID NO: 904619 - protein, 290 aa, Homo sapiens
RREVFGQVCEKTAGPELGGYPRCCAWVPGAASGALWRAEAAQHLLGAGRAVATDSRPAPARVQDPVVPSCCPGARTEAPGARQGSRSTRAMARPRLGSALPSAAAFGWLRPRPNFQATVSRRRRAGPSLPPPAARSGAPATPRLWLGCGSGACPDCDAATAWGQFAQSGGWLGRPRGSTIPRVGDVPCPGLTSRVRKTGWTTQPKAEPRQGPSLSPGSGGLTGPGVRACPRAWGGRRDGLAGSAPGPPGGAAAVAADPGPEAAQGACVERAERGSVTPRAPGLGMGSPSP

SEQ ID NO: 904620 - protein, 457 aa, Homo sapiens
MAQVLHVPAPFPGTPGPASPPAFPAKDPDPPYSVETPYGYRLDLDFLKYVDDIEKGHTLRRVAVQRRPRLSSLPRGPGSWWTSTESLCSNASGDSRHSAYSYCGRGFYPQYGALETRGGFNPRVERTLLDARRRLEDQAATPTGLGSLTPSAAGSTASLVGVGLPPPTPRSSGLSTPVPPSAGHLAHVREQMAGALRKLRQLEEQVKLIPVLQVKLSVLQEEKRQLTVQLKSQKFLGHPTAGRGRSELCLDLPDPPEDPVALETRSVGTWVRERDLGMPDGEAALAAKVAVLETQLKKALQELQAAQARQADPQPQAWPPPDSPVRVDTVRVVEGPREVEVVASTAAGAPAQRAQSLEPYGTGLRALAMPGRPESPPVFRSQEVVETMCPVPAAATSNVHMVKKISITERSCDGAAGKRSQAGRGEWLGGGGASFFPWLILDSQNARVQAGCGGACL

SEQ ID NO: 904621 - protein, 851 aa, Homo sapiens
MAQVLHVPAPFPGTPGPASPPAFPAKDPDPPYSVETPYGYRLDLDFLKYVDDIEKGHTLRRVAVQRRPRLSSLPRGPGSWWTSTESLCSNASGDSRHSAYSYCGRGFYPQYGALETRGGFNPRVERTLLDARRRLEDQAATPTGLGSLTPSAAGSTASLVGVGLPPPTPRSSGLSTPVPPSAGHLAHVREQMAGALRKLRQLEEQVKLIPVLQVKLSVLQEEKRQLTVQLKSQKFLGHPTAGRGRSELCLDLPDPPEDPVALETRSVGTWVRERDLGMPDGEAALAAKVAVLETQLKKALQELQAAQARQADPQPQAWPPPDSPVRVDTVRVVEGPREVEVVASTAAGAPAQRAQSLEPYGTGLRALAMPGRPESPPVFRSQEVVETMCPVPAAATSNVHMVKKISITERSCDGAAGLPEVPAESSSSPPGSEVASLTQPEKSTGRVPTQEPTHREPTRQAASQESEEAGGTGGPPAGVRSIMKRKEEVADPTAHRRSLQFVGVNGGYESSSEDSSTAENISDNDSTENEAPEPRERVPSVAEAPQLRPAGTAAAKTSRQECQLSRESQHIPTAEGASGSNTEEEIRMELSPDLISACLALEKYLDNPNALTERELKVAYTTVLQEWLRLACRSDAHPELVRRHLVTFRAMSARLLDYVVNIADSNGNTALHYSVSHANFPVVQQLLDSGVCKVDKQNRAGYSPIMLTALATLKTQDDIETVLQLFRLGNINAKASQAGQTALMLAVSHGRVDVVKALLACEADVNVQDDDGSTALMCACEHGHKEIAGLLLAVPSCDISLTDRDGSTALMVALDAGQSEIASMLYSRMNIKCSFAPMSDDESPTSSSAEE

SEQ ID NO: 904622 - protein, 851 aa, Homo sapiens; identical to SEQ ID NO: 904621

SEQ ID NO: 904623 - protein, 143 aa, Homo sapiens
AGFITPLVTGGLFEIQEEISKLRVHFTIRAGQTALMLAVSHGRVDVVKALLACEADVNVQDDDGSTALMCACEHGHKEIAGLLLAVPSCDISLTDRDGSTALMVALDAGQSEIASMLYSRMNIKCSFAPMSDDESPTSSSAEE

SEQ ID NO: 904624 - protein, 851 aa, Homo sapiens; identical to SEQ ID NO: 904621

SEQ ID NO: 904625 - protein, 152 aa, Homo sapiens
TLGRRDPGKAAAGARKVLKDREAKTETWKDRERDTERDAEGQRRGERRRETETLTVSFMACFGPLRISTSLSFLCLFLGEQQKGKGSKPLKMCFVIRSALQTKYARCPFEASELSLQGFKATFQQEKALRARRFIKEGKALVSLLRKVGFLA

SEQ ID NO: 904626 - protein, 851 aa, Homo sapiens; identical to SEQ ID NO: 904621

SEQ ID NO: 904627 - protein, 851 aa, Homo sapiens; identical to SEQ ID NO: 904621

SEQ ID NO: 904628 - protein, 851 aa, Homo sapiens; identical to SEQ ID NO: 904621

SEQ ID NO: 904629 - protein, 386 aa, Homo sapiens
PPLSSPPGGPPAGVRSIMKRKEEVADPTAHRRSLQFVGVNGGYESSSEDSSTAENISDNDSTENEAPEPRERVPSVAEAPQLRPAGTAAAKTSRQECQLSRESQHIPTAEGASGSNTEEEIRMELSPDLISACLALEKYLDNPNALTERELKVAYTTVLQEWLRLACRSDAHPELVRRHLVTFRAMSARLLDYVVNIADSNGNTALHYSVSHANFPVVQQLLDSGVCKVDKQNRAGYSPIMLTALATLKTQDDIETVLQLFRLGNINAKASQAGQTALMLAVSHGRVDVVKALLACEADVNVQDDDGSTALMCACEHGHKEIAGLLLAVPSCDISLTDRDGSTALMVALDAGQSEIASMLYSRMNIKCSFAPMSDDESPTSSSAEE

SEQ ID NO: 904630 - protein, 851 aa, Homo sapiens; identical to SEQ ID NO: 904621

SEQ ID NO: 904631 - protein, 841 aa, Homo sapiens
MAQVLHVPAPFPGTPGPASPPAFPAKDPDPPYSVETPYGYRLDLDFLKYVDDIEKGHTLRRVAVQRRPRLSSLPRGPGSWWTSTESLCSNASGDSRHSAYSYCGRGFYPQYGALETRGGFNPRVERTLLDARRRLEDQAATPTGLGSLTPSAAGSTASLVGVGLPPPTPRSSGLSTPVPPSAGHLAHVREQMAGALRKLRQLEEQVKLIPVLQVKLSVLQEEKRQLTVQLKSQKFLGHPTAGRGRSELCLDLPDPPEDPVALETRSVGTWVRERDLGMPDGEAALAAKVAVLETQLKKALQELQAAQARQADPQPQAWPPPDSPVRVDTVRVVEGPREVEVVASTAAGAPAQRAQSLEPYGTGLRALAMPGRPESPPVFRSQEVVETMCPVPAAATSNVHMVKKISITERSCDGAAGLPEVPAESSSSPPGSEVASLTQPEKSTGRVPTQEPTHREPTRQAASQESEEAGGTGGPPAGVRSIMKRKEEVADPTAHRRSLQFVGVNGGYESSSEDSSTAENISDNDSTENEAPEPRERVPSVAEAPQLRPAGTAAAKTSRQECQLSRESQHIPTAEGASGSNTEEEIRMELSPDLISACLALEKYLDNPNALTERELKVAYTTVLQEWLRLACRSDAHPELVRRHLVTFRAMSARLLDYVVNIADSNGNTALHYSVSHANFPVVQQLLDSGVCKVDKQNRAGYSPIMLTALATLKTQDDIETVLQLFRLGNINAKASQAGQTALMLAVSHGRVDVVKALLACEADVNVQDDDGSTALMCACEHGHKEIAGLLLAVPSCDISLTDRDGSTALMVALDAGQSEIASMLYSRMNIKCSVSLNPAG

SEQ ID NO: 904632 - protein, 851 aa, Homo sapiens; identical to SEQ ID NO: 904621

SEQ ID NO: 904633 - protein, 304 aa, Homo sapiens
MSIFPKISLRPEVENYLKEGFMNKEIVTALGKQEAERKFETLLKHLSHPPSFTTVRVNTHLASVQHVKNLLLDELQKQFNGLSVPILQHPDLQDVLLIPVIGPRKNIKKQQCEAIVGAQCGNAVLRGAHVYAPGIVSASQFMKAGDVISVYSDIKGKCKKGAKEFDGTKVFLGNGISELSRKEIFSGLPELKGMGIRMTEPVYLSPSFDSVLPRYLFLQNLPSALVSHVLNPQPGEKILDLCAAPGGKTTHIAALMHDQVCCGLLEVHPRPCLTGYHQWRLQNSKNCCLFLPLEASSERALARC

SEQ ID NO: 904634 - protein, 197 aa, Homo sapiens [sequence omitted]

SEQ ID NO: 904635 - protein, 304 aa, Homo sapiens; identical to SEQ ID NO: 904633

SEQ ID NO: 904636 - protein, 272 aa, Homo sapiens
MSIFPKISLRPEVENYLKEGFMNKEIVTALGKQEAERKFETLLKHLSHPPSFTTVRVNTHLASVQHVKNLLLDELQKQFNGLSVPILQHPDLQDVLLIPVIGPRKNIKKQQCEAIVGAQCGNAVLRGAHVYAPGIVSASQFMKAGDVISVYSDIKGKCKKGAKEFDGTKVFLGNGISELSRKEIFSGLPELKGMGIRMTEPVYLSPSFDSVLPRYLFLQNLPSALVSHVLNPQPGEKILDLCAAPGGKTTHIAALMHDQAVQLLKPEGVPGL

SEQ ID NO: 904637 - protein, 109 aa, Homo sapiens
GIVGPHDPDLQASGDQPREDSSKGVEPTFVGGWHHFGNIHHKRAFGFTADLRSNTGGQAFPQCVFDHWQILPGDPFDNSSRPSQVVAETRKRKGLKEGIPALDNFLDKL

SEQ ID NO: 904638 - protein, 132 aa, Homo sapiens
DAAVILEDPSKLAVGDHCNKAFRQTAADPGPIFKVFDAIMNFKKEETAKLIEKLDIKLDSEDKDKEGKPLLKAVMRRWLPAGDALLQMITIHLPSPVTAQKYRCELLYEGPPDDEAAMGIKSCTSPVAVPHP

SEQ ID NO: 904639 - protein, 346 aa, Homo sapiens
YVGTVMAHRWWRHPMWWSGYLPVNESFGFSADREANTGVQAFPQCVFDHWQILPGDPFDNSSRPSQVVAETRKRKGLKEGIPALDNFLDKLRRPFLQRLPPRGLAAPTGPNILTDITKGVQYLNEIKDSVVAGFQWATKEGALCEENMRGVRFDVHDVTLHADAIHRGGGQIIPTARRCLYASVLTAQPRLMEPIYLVEIQCPEQVVGGIYGVLNRKRGPELHLEICLKDLEEDHACIPIKKSDPVVSYRETVSEESNVLCLSKSPKKAQPAVHEGAAFPDGLAEDIDKGEVSARQELKQRARYLAEKYEWDVAEARKIWCFGPDGTGPTSSPTSPRDVLTMYQHD

SEQ ID NO: 904640 - protein, 255 aa, Homo sapiens
MKARPFPDGLAEDIDKGEVSARQELKQRARYLAEKYEWDVAEARKIWCFGPDGTGPNILTDITKGVQYLNEIKDSVVAGFQWATKEGALCEENMRGVRFDVHDVTLHADAIHRGGGQIIPTARRCLYASVLTAQPRLMEPIYLVEIQCPEQVVGGIYGVLNRKRGHVFEESQVAGTPMFVVKAYLPVNESFGFTADLRSNTGGQAFPQCVFDHWQILPGDPFDNSSRPSQVVAETRKRKGLKEGIPALDNFLDKL

SEQ ID NO: 904641 - protein, 418 aa, Homo sapiens
GRVGRPTRSTILMMGRYVEPIEDVPCGNIVGLVGVDQFLVKTGTITTFEHAHNMRVMKFSVSPVVRVAVEAKNPADLPKLVEGLKRLAKSDPMVQCIIEESGEHIIAGAGELHLEICLKDLEEDHACIPIKKSDPVVSYRETVSEESNVLCLSKSPNKHNRLYMKARPFPDGLAEDIDKGEVSARQELKQRARYLAEKYEWDVAEARKIWCFGPDGTGPNILTDITKGVQYLNEIKDSVVAGFQWATKEGALCEENMRGVRFDVHDVTLHADAIHRGGGQIIPTARRCLYASVLTAQPRLMEPIYLVEIQCPEQVVGGIYGVLNRKRGHVFEESQVAGTPMFVVKAYLPVNESFGFTADLRSNTGGQAFPQCVFDHWQILPGDPFDNSSRPSQVVAETRKRKGLKEGIPALDNFLDKL

SEQ ID NO: 904642 - protein, 418 aa, Homo sapiens; identical to SEQ ID NO: 904641

SEQ ID NO: 904643 - protein, 418 aa, Homo sapiens; identical to SEQ ID NO: 904641

SEQ ID NO: 904644 - protein, 418 aa, Homo sapiens; identical to SEQ ID NO: 904641

SEQ ID NO: 904645 - protein, 418 aa, Homo sapiens; identical to SEQ ID NO: 904641

SEQ ID NO: 904646 - protein, 418 aa, Homo sapiens; identical to SEQ ID NO: 904641

SEQ ID NO: 904647 - protein, 418 aa, Homo sapiens; identical to SEQ ID NO: 904641

SEQ ID NO: 904648 - protein, 418 aa, Homo sapiens; identical to SEQ ID NO: 904641

SEQ ID NO: 904649 - protein, 418 aa, Homo sapiens; identical to SEQ ID NO: 904641

SEQ ID NO: 904650 - protein, 418 aa, Homo sapiens; identical to SEQ ID NO: 904641

SEQ ID NO: 904651 - protein, 418 aa, Homo sapiens; identical to SEQ ID NO: 904641

SEQ ID NO: 904652 - protein, 418 aa, Homo sapiens; identical to SEQ ID NO: 904641

SEQ ID NO: 904653 - protein, 418 aa, Homo sapiens; identical to SEQ ID NO: 904641

SEQ ID NO: 904654 - protein, 418 aa, Homo sapiens; identical to SEQ ID NO: 904641

SEQ ID NO: 904655 - protein, 418 aa, Homo sapiens; identical to SEQ ID NO: 904641

SEQ ID NO: 904656 - protein, 418 aa, Homo sapiens; identical to SEQ ID NO: 904641

SEQ ID NO: 904657 - protein, 259 aa, Homo sapiens
GRVGRPTRSTILMMGRYVEPIEDVPCGNIVGLVGVDQFLVKTGTITTFEHAHNMRVMKFSVSPVVRVAVEAKNPADLPKLVEGLKRLAKSDPMVQCIIEESGEHIIAGAGELHLEICLKDLEEDHACIPIKASVLTAQPRLMEPIYLVEIQCPEQVVGGIYGVLNRKRGHVFEESQVAGTPMFVVKAYLPVNESFGFTADLRSNTGGQAFPQCVFDHWQILPGDPFDNSSRPSQVVAETRKRKGLKEGIPALDNFLDKL

SEQ ID NO: 904658 - protein, 418 aa, Homo sapiens; identical to SEQ ID NO: 904641

SEQ ID NO: 904659 - protein, 418 aa, Homo sapiens; identical to SEQ ID NO: 904641

SEQ ID NO: 904660 - protein, 354 aa, Homo sapiens
GRVGRPTRSTILMMGRYVEPIEDVPCGNIVGLVGVDQFLVKTGTITTFEHAHNMRVMKFSVSPVVRVAVEAKNPADLPKLVEGLKRLAKSDPMVQCIIEESGEHIIAGAGELHLEICLKDLEEDHACIPIKKSDPVVSYRETVSEESNVLCLSKSPNKHNRLYMKARPFPDGLAEDIDKGEVSARQELKQRARYLAEKYEWDVAEARKIWCFGPDGTGPNILTDITKGVQYLNEIKDSVVAGFQWATKEGALCEENMRGVRFDVHDVTLHADAIHRGGGQIIPTARRCLYASVLTAQPRLMEPIYLVEIQCPEQVVGGIYGVLNRKRGPRSTHSTTSSNSQTTPGDCPDTATLP

SEQ ID NO: 904661 - protein, 85 aa, Homo sapiens
GRVGRPTRSTILMMGRYVEPIEDVPCGNIVGLVGVDQFLVKTGTITTFEHAHNMRVMKFTRSTHSTTSSNSQTTPGDCPDTATLP

SEQ ID NO: 904662 - protein, 426 aa, Homo sapiens
GRVGRPTRSTILMMGRYVEPIEDVPCGNIVGLVGVDQFLVKTGTITTFEHAHNMRVMKFSVSPVVRVAVEAKNPADLPKLVEGLKRLAKSDPMVQCIIEESGEHIIAGAGELHLEICLKDLEEDHACIPIKKSDPVVSYRETVSEESNVLCLSKSPNKHNRLYMKARPFPDGLAEDIDKGEVSARQELKQRARYLAEKYEWDVAEARKIWCFGPDGTGPNILTDITKGVQYLNEIKDSVVAGFQWATKEGALCEENMRGVRFDVHDVTLHADAIHRGGGQIIPTARRCLYASVLTAQPRLMEPIYLVEIQCPEQVVGGIYGVLNRKRGHVFEESQVAGTPMFVVKAYLPVNESFGFTADLRSNTGGQAFPQCPPPLCCPDSTEEGTAGEAVVLAHCLSPSVLKEKRQPAVRAVRKASLCCPAVHLL

SEQ ID NO: 904663 - protein, 336 aa, Homo sapiens
GRVGRPTRSTILMMGRYVEPIEDVPCGNIVGLVGVDQFLVKTGTITTFEHAHNMRVMKFSVSPVVRVAVEAKNPADLPKLVEGLKRLAKSDPMVQCIIEESGEHIIAGAGELHLEICLKDLEEDHACIPIKKSDPVVSYRETVSEESNVLCLSKSPNKHNRLYMKARPFPDGLAEDIDKGEVSARQELKQRARYLAEKYEWDVAEARKIWCFGPDGTGPNILTDITKGVQYLNEIKDSVVAGFQWATKEGALCEENMRGVRFDVHDVTLHADAIHRGGGQIIPTARRCLYASVLTAQPRLMEPIYLVEIQCPEQVVGGIYGVLNRKRGRNTRVDDF

SEQ ID NO: 904664 - protein, 135 aa, Homo sapiens
SVPAALIYREPASRSVGTIPLGRRRSSCPEQVVGGIYGVLNRKRGHVFEESQVAGTPMFVVKAYLPVNESFGFTADLRSNTGGQAFPQCVFDHWQILPGDPFDNSSRPSQVVAETRKRKGLKEGIPALDNFLDKL

SEQ ID NO: 904665 - protein, 137 aa, Homo sapiens
GRVGRPTRSTILMMGRYVEPIEDVPCGNIVGLVGVDQFLVKTGTITTFEHAHNMRVMKFSVSPVVRVAVEAKNPADLPKLVEGLKRLAKSDPMVQCIIEESGEHIIAGAGELHLEICLKDLEEDHACIPIKPASPSR

SEQ ID NO: 904666 - protein, 42 aa, Homo sapiens
ALSPVSPGVCVQTETVLRQAIAERIKPVLMMNKMDRALLELQ

SEQ ID NO: 904667 - protein, 138 aa, Homo sapiens
MPTAIENVMKKLWGEYFDPANGKFSKSATSPEGKKLPRTFCQLILDPIFKVFDAIMNFKKEETAKLIEKLDIKTWHEGTGHEFMSRAFMPRKRIPGFSLLCVFVLLLHGAMMPAEVVSTMKPYWRMKALDMKGSSRST

SEQ ID NO: 904668 - protein, 418 aa, Homo sapiens; identical to SEQ ID NO: 904641

SEQ ID NO: 904669 - protein, 348 aa, Homo sapiens
GRVGRPTRSRCGQVRPHGAVHHRGVGRAHHRGRRRAAPGDLPEGPGGGPRLHPHQACIPIKKSDPVVSYRETVSEESNVLCLSKSPNKHNRLYMKARPFPDGLAEDIDKGEVSARQELKQRARYLAEKYEWDVAEARKIWCFGPDGTGPNILTDITKGVQYLNEIKDSVVAGFQWATKEGALCEENMRGVRFDVHDVTLHADAIHRGGGQIIPTARRCLYASVLTAQPRLMEPIYLVEIQCPEQVVGGIYGVLNRKRGHVFEESQVAGTPMFVVKAYLPVNESFGFTADLRSNTGGQAFPQCVFDHWQILPGDPFDNSSRPSQVVAETRKRKGLKEGIPALDNFLDKL

SEQ ID NO: 904670 - protein, 418 aa, Homo sapiens; identical to SEQ ID NO: 904641

SEQ ID NO: 904671 - protein, 418 aa, Homo sapiens; identical to SEQ ID NO: 904641

SEQ ID NO: 904672 - protein, 418 aa, Homo sapiens; identical to SEQ ID NO: 904641

SEQ ID NO: 904673 - protein, 418 aa, Homo sapiens; identical to SEQ ID NO: 904641

SEQ ID NO: 904674 - protein, 418 aa, Homo sapiens; identical to SEQ ID NO: 904641

SEQ ID NO: 904675 - protein, 398 aa, Homo sapiens
GRVGRPTRSTILMMGRYVEPIEDVPCGNIVGLVGVDQFLVKTGTITTFEHAHNMRVMKFSVSPVVRVAVEAKNPADLPKLVEGLKRLAKSDPMVQCIIEESGEHIIAGAGELHLEICLKDLEEDHACIPIKITQPYTLDAVSFNIYFQSSDGLAEDIDKGEVSARQELKQRARYLAEKYEWDVAEARKIWCFGPDGTGPNILTDITKGVQYLNEIKDSVVAGFQWATKEGALCEENMRGVRFDVHDVTLHADAIHRGGGQIIPTARRCLYASVLTAQPRLMEPIYLVEIQCPEQVVGGIYGVLNRKRGHVFEESQVAGTPMFVVKAYLPVNESFGFTADLRSNTGGQAFPQCVFDHWQILPGDPFDNSSRPSQVVAETRKRKGLKEGIPALDNFLDKL

SEQ ID NO: 904676 - protein, 418 aa, Homo sapiens; identical to SEQ ID NO: 904641

SEQ ID NO: 904677 - protein, 465 aa, Homo sapiens
GRVGRPTRSTILMMGRYVEPIEDVPCGNIVGLVGVDQFLVKTGTITTFEHAHNMRVMKFSVSPVVRVAVEAKNPADLPKLVEGLKRLAKSDPMVQCIIEESGEHIIAGAGELHLEICLKDLEEDHACIPIKKSDPVVSYRETVSEESNVLCLSKSPNKHNRLYMKARPFPDGLAEDIDKGEVSARQELKQRARYLAEKYEWDVAEARKIWCFGPDGTGPNILTDITKGVQYLNEIKDSVVAGFQWATKEGALCEENMRGVRFDVHDVTLHADAIHRGGGQIIPTARRCLYASVLTAQPRLMEPIYLVEIQCPEQVVGGIYGVLNRKRGHVFEESQVAGTPMFVVKAYLPVNESFGFTADLRSNTGGQAFPQCVFDHWQILPGDPLTSWTNCRRPFLQRLPPRGLAAPTAPRPRILRRHLETVPTQRRSPERFLGPAACCHHSTITLDAVSFNIYFQSPEAADTPS

SEQ ID NO: 904678 - protein, 418 aa, Homo sapiens; identical to SEQ ID NO: 904641

SEQ ID NO: 904679 - protein, 418 aa, Homo sapiens; identical to SEQ ID NO: 904641

SEQ ID NO: 904680 - protein, 418 aa, Homo sapiens; identical to SEQ ID NO: 904641

SEQ ID NO: 904681 - protein, 418 aa, Homo sapiens; identical to SEQ ID NO: 904641

SEQ ID NO: 904682 - protein, 425 aa, Homo sapiens
GRVGRPTRSTILMMGRYVEPIEDVPCGNIVGLVGVDQFLVKTGTITTFEHAHNMRVMKFSVSPVVRVAVEAKNPADLPKLVEGLKRLAKSDPMVQCIIEESGEHIIAGAGELHLEICLKDLEEDHACIPIKKSDPVVSYRETVSEESNVLCLSKSPNKHNRLYMKARPFPDGLAEDIDKGEVSARQELKQRARYLAEKYEWDVAEARKIWCFGPDGTGPNILTDITKGVQYLNEIKDSVVAGFQWATKEGALCEENMRGVRFDVHDVTLHADAIHRGGGQIIPTARRCLYASVLTAQPRLMEPIYLVEIQCPEQVVGGIYGVLNRKRGHVFEESQVAGTPMFVVKAYLPVNESFGFTADLRSNTGGQAFPQCVFDHWQILPGDPFSQHPQHHVLEFSDDTWRLSRHSDAPLRGFWGPLRAAITQP

SEQ ID NO: 904683 - protein, 418 aa, Homo sapiens; identical to SEQ ID NO: 904641

SEQ ID NO: 904684 - protein, 125 aa, Homo sapiens
EDHDVRMSKNYIVPSSYIPPPELHFSLKEKRKCSSDVFEESQVAGTPMFVVKAYLPVNESFGFTADLRSNTGGQAFPQCVFDHWQILPGDPFDNSSRPSQVVAETRKRKGLKEGIPALDNFLDKL

SEQ ID NO: 904685 - protein, 360 aa, Homo sapiens
GRVGRPTRSTILMMGRYVEPIEDVPCGNIVGLVGVDQFLVKTGTITTFEHAHNMRVMKFSVSPVVRVAVEAKNPADLPKLVEGLKRLAKSDPMVQCIIEESGEHIIAGAGELHLEICLKDLEEDHACIPIKKSDPVVSYRETVSEESNVLCLSKSPNKHNRLYMKARPFPDGLAEDIDKGEVSARQELKQRARYLAEKYEWDVAEARKIWCFGPDGTGPNILTDITKGVQYLNEIKDSVVAGFQWATKEGALCEENMRGVRFDVHDVTLHADAIHRGGGQIIPTARRCLYASVLTAQPRLMEPIYLVEIQGTPNTFSISSEGNSDVQTNFNKRIKRFIWVHGPQWLLPQKGERNTRVDDF

SEQ ID NO: 904686 - protein, 433 aa, Homo sapiens
GRVGRPTRSTILMMGRYVEPIEDVPCGNIVGLVGVDQFLVKTGTITTFEHAHNMRVMKFSVSPVVRVAVEAKNPADLPKLVEGLKRLAKSDPMVQCIIEESGEHIIAGAGELHLEICLKDLEEDHACIPIKKSDPVVSYRETVSEESNVLCLSKSPNKHNRLYMKARPFPDGLAEDIDKGEVSARQELKQRARYLAEKYEWDVAEARKIWCFGPDGTGPNILTDITKGVQYLNEIKDSVVAGFQWATKEGALCEENMRGVRFDVHDVTLHADAIHRGGGQIIPTARRCLYASVLTAQPRLMEPIYLVEIQCPEQVVGGIYGVLNRKRGHVFEESQVAGTPMFVVKFAAKGEGQLGPAERAKKVEDMMKKLWGDRYFDPPNGKFSKSATSPEGKKLPRTFCQLILDPILYFTFLYSVVLLLLVFIFYTLAIPQS

SEQ ID NO: 904687 - protein, 577 aa, Homo sapiens
GRVGRPTRSTILMMGRYVEPIEDVPCGNIVGLVGVDQFLVKTGTITTFEHAHNMRVMKFSVSPVVRVAVEAKNPADLPKLVEGLKRLAKSDPMVQCIIEESGEHIIAGAGELHLEICLKDLEEDHACIPIKFDSSLTVSRYETTGSDFLMGIQAWSSSRYFRQISRCSFPAPAMMCSPDSSMMHCTMGSDLASRFSKSATSPEGKKLPRTFCQLILDPIFKVFDAIMNFKKEETAKLIEILDSQDWTARQGQRRQPLLKSVMPRWLPAGDALLQMITIHLPSPVTAQKYRCELLYEGPPDDEAAMGIKSCDPKGPLMMYISKMVPTSDKGRFYAFGRVFSGLVSTGLKVRIMGPNYTPGKKEDLYLKPIQRTILMMGRYVEPIEDVPCGNIVGLVGVDQFLVKTGTITTFEHAHNMRVMKFSVSPVVRVAVEAKNPADLPKLVEGLKRLAKSDPMVAVHHRGVGRAHHRGAGELHLEICLKDLEEDHACIPIKKSDPVVSYRETVSEESNVLCLSKSPNKHNRLYMKGTPNTFSISSEGNSDVQTNFNKRIKRFIWVHGPQWLLPQKGERNTRVDDF

SEQ ID NO: 904688 - protein, 136 aa, Homo sapiens
RWGRMSGQEGSEDLAMGLVPGVPCHGGGMSRTEAKDKGGLALVGASPGMSHGGRSSLASDSIPDSLGQVCGSCPPDESLPSISAISLFYELSENDLNFIKQSKDGAGFLINLIDSPGHVDFSSEVTAALRVTDGAL

SEQ ID NO: 904689 - protein, 77 aa, Homo sapiens
EPPTITKFAAARPMRAAPASEWEIMQLLRMCPPHLMLICLMVMPRVQDLVTCAVVNTQRLGRSVSLVLPSFKVHGKI

SEQ ID NO: 904690 - protein, 70 aa, Homo sapiens
TLGSRVTHAKYIVQVDGKIGLFRGLSPRLMSNALSTVTRGSMKKVSFSSSCFSWWLTSELTSIEYVASVR

SEQ ID NO: 904691 - protein, 384 aa, Homo sapiens
MSRCPPPSPPGAMGASDPEVAPWARGGAAGMAGAGAGAGARGGAAAGVEARARDPPPAHRAHPRHPRPAAQPSARRMDGGSGGLGSGDNAPTTEALFVALGAGVTALSHPLLYVKLLIQVGHEPMPPTLGTNVLGRKVLYLPSFFTYAKYIVQVDGKIGLFRGLSPRLMSNALSTVTRGSMKKVFPPDEIEQVSNKDDMKTSLKKVVKETSYEMMMQCVSRMLAHPLHVISMRCMVQFVGREAKYSGVLSSIGKIFKEEGLLGFFVGLIPHLLGDVVFLWGCNLLAHFINAYLVDDSFSQALAIRSYTKFVMGIAVSMLTYPFLLVGDLMAVNNCGLQAGLPPYSPVFKSWIHCWKYLSVQGQLFRGSSLLFRRVSSGSCFALE

SEQ ID NO: 904692 - protein, 372 aa, Homo sapiens
MGASDPEVAPWARGGAAGMAGAGAGAGARGGAAAGVEARARDPPPAHRAHPRHPRPAAQPSARRMDGGSGGLGSGDNAPTTEALFVALGAGVTALSHPLLYVKLLIQVGHEPMPPTLGTNVLGRKVLYLPSFFTYAKYIVQVDGKIGLFRGLSPRLMSNALSTVTRGSMKKVFPPDEIEQVSNKDDMKTSLKKVVKETSYEMMMQCVSRMLAHPLHVISMRCMVQFVGREAKYSGVLSSIGKIFKEEGLLGFFVGLIPHLLGDVVFLWGCNLLAHFINAYLVDDSFSQALAIRSYTKFVMGIAVSMLTYPFLLVGDLMAVNNCGLQAGLPPYSPVFKSWIHCWKYLSVQGQLFRGSSLLFRRVSSGSCFALE

SEQ ID NO: 904693 - protein, 368 aa, Homo sapiens
CRLVPAGSDGGAAGMAGAGAGAGARGGAAAGVEARARDPPPAHRAHPRHPRPAAQPSARRMDGGSGGLGSGDNAPTTEALFVALGAGVTALSHPLLYVKLLIQVGHEPMPPTLGTNVLGRKVLYLPSFFTYAKYIVQVDGKIGLFRGLSPRLMSNALSTVTRGSMKKVFPPDEIEQVSNKDDMKTSLKKVVKETSYEMMMQCVSRMLAHPLHVISMRCMVQFVGREAKYSGVLSSIGKIFKEEGLLGFFVGLIPHLLGDVVFLWGCNLLAHFINAYLVDDSFSQALAIRSYTKFVMGIAVSMLTYPFLLVGDLMAVNNCGLQAGLPPYSPVFKSWIHCWKYLSVQGQLFRGSSLLFRRVSSGSCFALE

SEQ ID NO: 904694 - protein, 372 aa, Homo sapiens; identical to SEQ ID NO: 904692

SEQ ID NO: 904695 - protein, 372 aa, Homo sapiens; identical to SEQ ID NO: 904692

SEQ ID NO: 904696 - protein, 427 aa, Homo sapiens
MGASDPEVAPWARGGAAGMAGAGAGAGARGGAAAGVEARARDPPPAHRAHPRHPRPAAQPSARRMDGGSGGLGSGDNAPTTEALFVALGAGVTALSHPLLYVKLLIQVGHEPMPPTLGTNVLGRKVLYLPSFFTYAKYIVQVDGKIGLFRGLSPRLMSNALSTVTRGSMKKVFPPDEIEQVSNKDDMKTSLKKVVKETSYEMMMQCVSRMLAHPLHVISMRCMVQFVGREAKYSGVLSSIGKIFKEEGLLGFFVGLIPHLLGDVVFLWGCNLLAHFINAYLVDDSVSDTPGGLGNDQNPGSQFSQALAIRSYTKFVMGIAVSMLTYPFLLVGDLMAVNNCGLQAGLPPYSPVFKSWIHCWKYLSVQVSKHWTAEAFPVLCYILQLKWFCGCFIACKDKWFHGIQYCEEILGIYKAFKFSSYIISERI

SEQ ID NO: 904697 - protein, 389 aa, Homo sapiens
MGASDPEVAPWARGGAAGMAGAGAGAGARGGAAAGVEARARDPPPAHRAHPRHPRPAAQPSARRMDGGSGGLGSGDNAPTTEALFVALGAGVTALSHPLLYVKLLIQVGHEPMPPTLGTNVLGRKVLYLPSFFTYAKYIVQVDGKIGLFRGLSPRLMSNALSTVTRGSMKKVFPPDEIEQVSNKDDMKTSLKKVVKETSYEMMMQCVSRMLAHPLHVISMRCMVQFVGREAKYSGVLSSIGKIFKEEGLLGFFVGLIPHLLGDVVFLWGCNLLAHFINAYLVDDSVSDTPGGLGNDQNPGSQFSQALAIRSYTKFVMGIAVSMLTYPFLLVGDLMAVNNCGLQAGLPPYSPVFKSWIHCWKYLSVQGQLFRGSSLLFRRVSSGSCFALE

SEQ ID NO: 904698 - protein, 406 aa, Homo sapiens
MGASDPEVAPWARGGAAGMAGAGAGAGARGGAAAGVEARARDPPPAHRAHPRHPRPAAQPSARRMDGGSGGLGSGDNAPTTEALFVALGAGVTALSHPLLYVKLLIQVGHEPMPPTLGTNVLGRKVLYLPSFFTYAKYIVQVDGKIGLFRGLSPRLMSNALSTVTRGSMKKVFPPDEIEQVSNKDDMKTSLKKVVKETSYEMMMQCVSRMLAHPLHVISMRCMVQFVGREAKYSCPAGPPSQEAQLAMVPHFGVINGKLAHSPRLIMSGVLSSIGKIFKEEGLLGFFVGLIPHLLGDVVFLWGCNLLAHFINAYLVDDSFSQALAIRSYTKFVMGIAVSMLTYPFLLVGDLMAVNNCGLQAGLPPYSPVFKSWIHCWKYLSVQGQLFRGSSLLFRRVSSGSCFALE

SEQ ID NO: 904699 - protein, 216 aa, Homo sapiens
MSNALSTVTRGSMKKVFPPDEIEQVSNKDDMKTSLKKVVKETSYEMMMQCVSRMLAHPLHVISMRCMVQFVGREAKYSGVLSSIGKIFKEEGLLGFFVGLIPHLLGDVVFLWGCNLLAHFINAYLVDDSFSQALAIRSYTKFVMGIAVSMLTYPFLLVGDLMAVNNCGLQAGLPPYSPVFKSWIHCWKYLSVQGQLFRGSSLLFRRVSSGSCFALE

SEQ ID NO: 904700 - protein, 231 aa, Homo sapiens
SNSCDDPRSEILGLSQTKVAVIVTRGSMKKVFPPDEIEQVSNKDDMKTSLKKVVKETSYEMMMQCVSRMLAHPLHVISMRCMVQFVGREAKYSGVLSSIGKIFKEEGLLGFFVGLIPHLLGDVVFLWGCNLLAHFINAYLVDDSFSQALAIRSYTKFVMGIAVSMLTYPFLLVGDLMAVNNCGLQAGLPPYSPVFKSWIHCWKYLSVQGQLFRGSSLLFRRVSSGSCFALE

SEQ ID NO: 904701 - protein, 149 aa, Homo sapiens
MVRRPCVSAEAGVLSSIGKIFKEEGLLGFFVGLIPHLLGDVVFLWGCNLLAHFINAYLVDDSFSQALAIRSYTKFVMGIAVSMLTYPFLLVGDLMAVNNCGLQAGLPPYSPVFKSWIHCWKYLSVQGQLFRGSSLLFRRVSSGSCFALE

SEQ ID NO: 904702 - protein, 384 aa, Homo sapiens
MGASDPEVAPWARGGAAGMAGAGAGAGARGGAAAGVEARARDPPPAHRAHPRHPRPAAQPSARRMDGGSGGLGSGDNAPTTEALFVALGAGVTALSHPLLYVKLLIQVGHEPMPPTLGTNVLGRKVLYLPSFFTYAKYIVQVDGKIGLFRGLSPRLMSNALSTVTRGSMKKVFPPDEIEQVSNKDDMKTSLKKVVKETSYEMMMQCVSRMLAHPLHVISMRCMVQFVGREAKYSGVLSSIGKIFKEEGLLGFFVGLIPHLLGDVVFLWGCNLLAHFINAYLVDDSVSDTPGGLGNDQNPGSQFSQALAIRSYTKFVMGIAVSMLTYPFLLVGDLMAVNNCGLQAGLPPYSPVAHPAAQLGASFSCFVHRVWSPGTWPPSCLGLC

SEQ ID NO: 904703 - protein, 116 aa, Homo sapiens
VYIILSLETNPLWYVVNIFFINAYLVDDSFSQALAIRSYTKFVMGIAVSMLTYPFLLVGDLMAVNNCGLQAGLPPYSPVFKSWIHCWKYLSVQGQLFRGSSLLFRRVSSGSCFALE

SEQ ID NO: 904704 - protein, 380 aa, Homo sapiens
MGASDPEVAPWARGGAAGMAGAGAGAGARGGAAAGVEARARDPPPAHRAHPRHPRPAAQPSARRMDGGSGGLGSGDNAPTTEALFVALGAGVTALSHPLLYVKLLIQVGHEPMPPTLGTNVLGRKVLYLPSFFTYAKYIVQVDGKIGLFRGLSPRLMSNALSTVTRGSMKKVFPPDEIEQVSNKDDMKTSLKKVVKETSYEMMMQCVSRMLAHPLHVISMRCMVQFVGREAKYSGVLSSIGKIFKEEGLLGFFVGLIPHLLGDVVFLWGCNLLAHFINAYLVDDSVSDTPGGLGNDQNPGSQFSQALAIRSYTKFVMGIAVSMLTYPFLLVGDLMAVNNCGLQAGLPPYSPVFKSWIHCWKYLSVQGQALPRLQAAFRVS

SEQ ID NO: 904705 - protein, 345 aa, Homo sapiens
  misc_feature (287)..(287): Xaa can be any naturally occurring amino acid
  misc_feature (294)..(294): Xaa can be any naturally occurring amino acid
  misc_feature (306)..(306): Xaa can be any naturally occurring amino acid
  misc_feature (311)..(311): Xaa can be any naturally occurring amino acid
  misc_feature (313)..(313): Xaa can be any naturally occurring amino acid
  misc_feature (319)..(319): Xaa can be any naturally occurring amino acid
  misc_feature (321)..(321): Xaa can be any naturally occurring amino acid
MGASDPEVAPWARGGAAGMAGAGAGAGARGGAAAGVEARARDPPPAHRAHPRHPRPAAQPSARRMDGGSGGLGSGDNAPTTEALFVALGAGVTALSHPLLYVKLLIQVGHEPMPPTLGTNVLGRKVLYLPSFFTYAKYIVQVDGKIGLFRGLSPRLMSNALSTVTRGSMKKVFPPDEIEQVSNKDDMKTSLKKVVKETSYEMMMQCVSRMLAHPLHVISMRCMVQFVGREAKYSGVLSSIGKIFKEEGLLGFFVGLIPHLLGDVVFLWGCNLLAHFINAYLVDDSFXRPCIRSXQSRDGIQYASDXPSCSXDXCCDTAXAXGSPTPVSIWITLSLISGSLEVTAS

SEQ ID NO: 904706 - protein, 103 aa, Homo sapiens
CEVIYRILTSALLAHCKTTPTQQQPDVLQPSRASVPYLPCVCPDVGLSGGGAAPSGLGHPADLGKVRRGGELAESPYLADLLSLSCAEGQRMAYGGPGWMGKG

SEQ ID NO: 904707 - protein, 266 aa, Homo sapiens
MGASDPEVAPWARGGAAGMAGAGAGAGARGGAAAGVEARARDPPPAHRAHPRHPRPAAQPSARRMDGGSGGLGSGDNAPTTEALFVALGAGVTALSHPLLYVKLLIQVGHEPMPPTLGTNVLGRKVLYLPSFFTYAKYIVQVDGKIGLFRGLSPRLMSNALSTVTRGSMKKVFPPDEIEQVSNKDDMKTSLKKVVKETSYEMMMQCVSRMLAHPLHVISMRCMVQFVGREAKYRWVTLGTGRVALLPFQSRPGQAVLGLVAAPFLP

SEQ ID NO: 904708 - protein, 223 aa, Homo sapiens
MSRCPPPSPPGAMGASDPEVAPWARGGAAGMAGAGAGAGARGGAAAGVEARARDPPPAHRAHPRHPRPAAQPSARRMDGGSGGLGSGDNAPTTEALFVALGAGVTALSHPLLYVKLLIQVGHEPMPPTLGTNVLGRKVLYLPSFFTYAKYIVQVDGKIGLFRGLSPRLMSNALSTVTRGSMKKVFPPDEIEQVYQPVKPGSLSAEVGLEIGDQIARSQCRRLL

SEQ ID NO: 904709 - protein, 100 aa, Homo sapiens
IFAMCLSRCGTEARLGWSTSGCCGLEPSRASVPYLPCVCPDVGLSGGGAAPSGLGHPADLGKVRRGGELAESPYLADLLSLSCAEGQRMAYGGPGWMGKG

SEQ ID NO: 904710 - protein, 372 aa, Homo sapiens; identical to SEQ ID NO: 904692

SEQ ID NO: 904711 - protein, 389 aa, Homo sapiens; identical to SEQ ID NO: 904697

SEQ ID NO: 904712 - protein, 354 aa, Homo sapiens
MAGAGAGAGARGGAAAGVEARARDPPPAHRAHPRHPRPAAQPSARRMDGGSGGLGSGDNAPTTEALFVALGAGVTALSHPLLYVKLLIQVGHEPMPPTLGTNVLGRKVLYLPSFFTYAKYIVQVDGKIGLFRGLSPRLMSNALSTVTRGSMKKVFPPDEIEQVSNKDDMKTSLKKVVKETSYEMMMQCVSRMLAHPLHVISMRCMVQFVGREAKYSGVLSSIGKIFKEEGLLGFFVGLIPHLLGDVVFLWGCNLLAHFINAYLVDDSFSQALAIRSYTKFVMGIAVSMLTYPFLLVGDLMAVNNCGLQAGLPPYSPVFKSWIHCWKYLSVQGQLFRGSSLLFRRVSSGSCFALE

SEQ ID NO: 904713 - protein, 447 aa, Homo sapiens
MGASDPEVAPWARGGAAGMAGAGAGAGARGGAAAGVEARARDPPPAHRAHPRHPRPAAQPSARRMDGGSGGLGSGDNAPTTEALFVALGAGVTALSHPLLYVKLLIQVGHEPMPPTLGTNVLGRKVLYLPSFFTYAKYIVQVDGKIGLFRGLSPRLMSNALSTVTRGSMKKVFPPDEIEQVSNKDDMKTSLKKVVKETSYEMMMQCVSRMLAHPLHVISMRCMVQFVGREAKYSGVLSSIGKIFKEEGLLGFFVGLIPHLLGDVVFLWGCNLLAHFINAYLVDDSVSDTPGGLGNDQNPGSQFSQALAIRSYTKFVMGVSCASCPSFPLPCGPKRGLGGQPWYMAGGRSWYRVLAWCVPAPWAGVGHWHSGLSGFQIAVSMLTYPFLLVGDLMAVNNCGLQAGLPPYSPVFKSWIHCWKYLSVQGQLFRGSSLLFRRVSSGSCFALE

SEQ ID NO: 904714 - protein, 308 aa, Homo sapiens [sequence omitted]

SEQ ID NO: 904715 - protein, 410 aa, Homo sapiens
MGASDPEVAPWARGGAAGMAGAGAGAGARGGAAAGVEARARDPPPAHRAHPRHPRPAAQPSARRMDGGSGGLGSGDNAPTTEALFVALGAGVTALSHPLLYVKLLIQVGHEPMPPTLGTNVLGRKVLYLPSFFTYAKYIVQVDGKIGLFRGLSPRLMSNALSTVTRGSMKKVFPPDEIEQVSNKDDMKTSLKKVVKETSYEMMMQCVSRMLAHPLHVISMRCMVQFVGREAKYSGVLSSIGKIFKEEGLLGFFVGLIPHLLGDVVFLWGCNLLAHFINAYLVDDSFSQALAIRSYTKFVMGIAVSMLTYPFLLVGDLMAVNNCGLQAGLPPYSPVFKSWIHCWKYLSVQVSKHWTAEAFPVLCYILQLKWFCGCFIACKDKWFHGIQYCEEILGIYKAFKFSSYIISERI

SEQ ID NO: 904716 - protein, 261 aa, Homo sapiens
RLGRGWWLIGRGEEGLYLPSFFTYAKYIVQVDGKIGLFRGLSPRLMSNALSTVTRGSMKKVFPPDEIEQVSNKDDMKTSLKKVVKETSYEMMMQCVSRMLAHPLHVISMRCMVQFVGREAKYSGVLSSIGKIFKEEGLLGFFVGLIPHLLGDVVFLWGCNLLAHFINAYLVDDSFSQALAIRSYTKFVMGIAVSMLTYPFLLVGDLMAVNNCGLQAGLPPYSPVFKSWIHCWKYLSVQGQLFRGSSLLFRRVSSGSCFALE

SEQ ID NO: 904717 - protein, 233 aa, Homo sapiens
MSNALSTVTRGSMKKVFPPDEIEQVSNKDDMKTSLKKVVKETSYEMMMQCVSRMLAHPLHVISMRCMVQFVGREAKYSGVLSSIGKIFKEEGLLGFFVGLIPHLLGDVVFLWGCNLLAHFINAYLVDDSVSDTPGGLGNDQNPGSQFSQALAIRSYTKFVMGIAVSMLTYPFLLVGDLMAVNNCGLQAGLPPYSPVFKSWIHCWKYLSVQGQLFRGSSLLFRRVSSGSCFALE

SEQ ID NO: 904718 - protein, 177 aa, Homo sapiens
TGPSQRNHSQGNGPLSTHPLHVISMRCMVQFVGREAKYSGVLSSIGKIFKEEGLLGFFVGLIPHLLGDVVFLWGCNLLAHFINAYLVDDSFSQALAIRSYTKFVMGIAVSMLTYPFLLVGDLMAVNNCGLQAGLPPYSPVFKSWIHCWKYLSVQGQLFRGSSLLFRRVSSGSCFALE

SEQ ID NO: 904719 - protein, 108 aa, Homo sapiens
MCLSRCGVERGWGCTQWIGSPGRPREGEARWGVGRIPIPRRFAESVLCRGPENGLWGPRLDGERLMGSDPTPSTPPVSPAPILQLSWEHHSPALYIGCGPLARGHHHV

SEQ ID NO: 904720 - protein, 87 aa, Homo sapiens
SRGSLNIRVITKFVMGIAVSMLTYPFLLVGDLMAVNNCGLQAGLPPYSPVFKSWIHCWKYLSVQGQLFRGSSLLFRRVSSGSCFALE

SEQ ID NO: 904721 - protein, 82 aa, Homo sapiens
  misc_feature (16)..(16): Xaa can be any naturally occurring amino acid
  misc_feature (33)..(33): Xaa can be any naturally occurring amino acid
TYSNYYKFVIKTAVCXLTYPFLLEGDLISKNSXKLQAGLPPYSPVFKSWIHCWKYLSVQGQLFRGSSLLFRRVSSGSCFALE

SEQ ID NO: 904722 - protein, 100 aa, Homo sapiens; identical to SEQ ID NO: 904709

SEQ ID NO: 904723 - protein, 95 aa, Homo sapiens
EPPTITKFAAASTGGKWARLCLCFSQHYFSDMRAAPASEWEIMQLLRMCPPHLMLICLMVMPRVQDLVTCAVVNTQRLGRSVSLVLPSFKVHGKI

SEQ ID NO: 904724 - protein, 109 aa, Homo sapiens
MAATFQLPGHQEMPLTFQDVAVYFSQAEGRQLGPQQRALYRDVMLENYGNVASLGFPVPKPELISQLEQGKELWVLNLLGAEEPDILKSCQKGENGWDANPGSSLPILP

SEQ ID NO: 904725 - protein, 113 aa, Homo sapiens
MAATFQLPGHQEMPLTFQDVAVYFSQAEGRQLGPQQRALYRDVMLENYGNVASLGFPVPKPELISQLEQGKELWVLNLLGAEEPDILKSCQKVILSVAERGVFVGFMYLEAVL

SEQ ID NO: 904726 - protein, 960 aa, Homo sapiens
RRTEAPQGAGKPACAQLGPARPLHPSPPPPRLWTRFCGRVRSGLGATAQLLGASSVASPGRANRWGSVGPGRSAKRAGRRGGRGEGAGRRRPVQEEPVLGAAGATDGLQRPGGGDRGAALEGWTEDHSWLPASPRSLGPSAASPRPPSHVLSLGEAAPSRGSLPQVGQAGRTALHPISRAFSRSGPRELPAFTPEPGVPGSPRALALAVLGFQESLSSRARRPVLHSDLPPATQEATAAISFCLLAILPHPWLNGAEPEFSPLKVSSGRLQARAVSCLLLETTAAHAHRMAATFQLPGHQEMPLTFQDVAVYFSQAEGRQLGPQQRALYRDVMLENYGNVASLGFPVPKPELISQLEQGKELWVLNLLGAEEPDILKSCQKDSEVGTKKELSILNQKFSEEVKTPEFVSRRLLRDNAQAAEFREAWGREGKLKERVGNSAGQSLNKPNIHKRVLTEATVGRERSLGERTQECSAFDRNLNLDQNVVRLQRNKTGERVFKCDICSKTFKYNSDLSRHQRSHTGEKPYECGRCGRAFTHSSNLVLHHHIHTGNKPFKCDECGKTFGLNSHLRLHRRIHTGEKPFGCGECGKAFSRSSTLIQHRIIHTGEKPYKCNECGRGFSQSPQLTQHQRIHTGEKPHECSHCGKAFSRSSSLIQHERIHTGEKPHKCNQCGKAFSQSSSLFLHHRVHTGEKPYVCNECGRAFGFNSHLTEHVRIHTGEKPYVCNECGKAFRRSSTLVQHRRVHTGEKPYQCVECGKAFSQSSQLTLHQRVHTGEKPYDCGDCGKAFSRRSTLIQHQKVHSGETRKCRKHGPAFVHGSSLTADGQIPTGEKHGRAFNHGANLILRWTVHTGEKSFGCNEYGKAFSPTSRPTEDQIMHAGEKPYKCQECGNAFSGKSTLIQHQVTHTGQKPCHCSVYGKAFSQSSQLTPPQQTRVGEKPALNDGSKRYFIHIKKIFQERHF

SEQ ID NO: 904727 - protein, 671 aa, Homo sapiens
MAATFQLPGHQEMPLTFQDVAVYFSQAEGRQLGPQQRALYRDVMLENYGNVASLGFPVPKPELISQLEQGKELWVLNLLGAEEPDILKSCQKDSEVGTKKELSILNQKFSEEVKTPEFVSRRLLRDNAQAAEFREAWGREGKLKERVGNSAGQSLNKPNIHKRVLTEATVGRERSLGERTQECSAFDRNLNLDQNVVRLQRNKTGERVFKCDICSKTFKYNSDLSRHQRSHTGEKPYECGRCGRAFTHSSNLVLHHHIHTGNKPFKCDECGKTFGLNSHLRLHRRIHTGEKPFGCGECGKAFSRSSTLIQHRIIHTGEKPYKCNECGRGFSQSPQLTQHQRIHTGEKPHECSHCGKAFSRSSSLIQHERIHTGEKPHKCNQCGKAFSQSSSLFLHHRVHTGEKPYVCNECGRAFGFNSHLTEHVRIHTGEKPYVCNECGKAFRRSSTLVQHRRVHTGEKPYQCVECGKAFSQSSQLTLHQRVHTGEKPYDCGDCGKAFSRRSTLIQHQKVHSGETRKCRKHGPAFVHGSSLTADGQIPTGEKHGRAFNHGANLILRWTVHTGEKSFGCNEYGKAFSPTSRPTEDQIMHAGEKPYKCQECGNAFSGKSTLIQHQVTHTGQKPCHCSVYGKAFSQSSQLTPPQQTRVGEKPALNDGSKRYFIHIKKIFQERHF

SEQ ID NO: 904728 - protein, 960 aa, Homo sapiens; identical to SEQ ID NO: 904726

SEQ ID NO: 904729 - protein, 398 aa, Homo sapiens
RRTEAPQGAGKPACAQLGPARPLHPSPPPPRLWTRFCGRVRSGLGATAQLLGASSVASPGRANRWGSVGPGRSAKRAGRRGGRGEGAGRRRPVQEEPVLGAAGATDGLQRPGGGDRGAALEGWTEDHSWLPASPRSLGPSAASPRPPSHVLSLGEAAPSRGSLPQVGQAGRTALHPISRAFSRSGPRELPAFTPEPGVPGSPRALALAVLGFQESLSSRARRPVLHSDLPPATQEATAAISFCLLAILPHPWLNGAEPEFSPLKVSSGRLQARAVSCLLLETTAAHAHRMAATFQLPGHQEMPLTFQDVAVYFSQAEGRQLGPQQRALYRDVMLENYGNVASLGFPVPKPELISQLEQGKELWVLNLLGAEEPDILKSCQKGENGWDANPGSSLPILP

SEQ ID NO: 904730 - protein, 671 aa, Homo sapiens; identical to SEQ ID NO: 904727

SEQ ID NO: 904731 - protein, 73 aa, Homo sapiens
PKNSARGMLENYGNVASLGFPVPKPELISQLEQGKELWVLNLLGAEEPDILKSCQKGENGWDANPGSSLPILP

SEQ ID NO: 904732 - protein, 131 aa, Homo sapiens
GVLRPRRGRGSLRVRSSARPALFILARPLPGSGPGSVGGSVPGSVRLRSSSALPRWLPRVEQTGDAADLPGCGRVLLSGGGAAAGPPAAGALPGCDAGELWERGLSGYQVSPLLKIVITDKKFFKGRFIEA

SEQ ID NO: 904733 - protein, 960 aa, Homo sapiens; identical to SEQ ID NO: 904726

SEQ ID NO: 904734 - protein, 762 aa, Homo sapiens
RRTEAPQGAGKPACAQLGPARPLHPSPPPPRLWTRFCGRVRSGLGATAQLLGASSVASPGRANRWGSVGPGRSAKRAGRRGGRGEGAGRRRPVQEEPVLGAAGATDGLQRPGGGDRGAALEGWTEDHSWLPASPRSLGPSAASPRPPSHVLSLGEAAPSRGSLPQVGQAGRTALHPISRAFSRSGPRELPAFTPEPGVPGSPRALALAVLGFQESLSSRARRPVLHSDLPPATQEATAAISFCLLAILPHPWLNGAEPEFSPLKVSSGRLQARAVSCLLLETTAAHAHRMAATFQLPGHQEMPLTFQDVAVYFSQAEGRQLGPQQRALYRDVMLENYGNVASLGFPVPKPELISQLEQGKELWVLNLLGAEEPDILKSCQKDSEVGTKKELSILNQKFSEEVKTPEFVSRRLLRDNAQAAEFREAWGREGKLKERVGNSAGQSLNKPNIHKRVLTEATVGRERSLGERTQECSAFDRNLNLDQNVVRLQRNKTGERVFKCDICSKTFKYNSDLSRHQRSHTGEKPYECGRCGRAFTHSSNLVLHHHIHTGNKPFKCDECGKTFGLNSHLRLHRRIHTGEKPFGCGECGKAFSRSSTLIQHRIIHTGEKPYKCNECGRGFSQSPQLTQHQRIHTGEKPHECSHCGKAFSRSSSLIQHERIHTGEKPHKCNQCGKAFSQSSSLFLHHRVHTGEKPYVCNECGRAFGFNSHLTEHVRIHTGEKPYVCNECVRRSLFRRPFRLLWESWYEALPLKEEPELLPNCQP

SEQ ID NO: 904735 - protein, 170 aa, Homo sapiens
LPAGAARLKIMDPPGARNWAGAATRTPGVPVYKGREQAASLEALFGALDPFPSVLTAARQTPAAKMVKQIESKTAFQEALDAAGDKLVVVDFSATWCGPCKMIKPFFHSLSEKYSNVIFLEVDVDDCQDVASECEVKCMPTFQFFKKGQKVGEFSGANKEKLEATINELV

SEQ ID NO: 904736 - protein, 125 aa, Homo sapiens
APGAGRGRGAATGAEVRPGARAPATRTPGVPVYKGREQAASLEALFGALDPFPSVLTAARQTPAAKMVKQIESKTAFQEALDAAGDKLVVVDFSATWCGPCKMIKPFFHSLSVASECEVCMPIPF

SEQ ID NO: 904737 - protein, 171 aa, Homo sapiens
APGAGRGRGAATGAEVRPGARAPATRTPGVPVYKGREQAASLEALFGALDPFPSVLTAARQTPAAKMVKQIESKTAFQEALDAAGDKLVVVDFSATWCGPCKMIKPFFHSLSEKYSNVIFLEVDVDDCQDVASECEVKCMPTFQFFKKGQKVGEFSGANKEKLEATINELV

SEQ ID NO: 904738 - protein, 171 aa, Homo sapiens; identical to SEQ ID NO: 904737

SEQ ID NO: 904739 - protein, 171 aa, Homo sapiens; identical to SEQ ID NO: 904737

SEQ ID NO: 904740 - protein, 171 aa, Homo sapiens; identical to SEQ ID NO: 904737

SEQ ID NO: 904741 - protein, 171 aa, Homo sapiens; identical to SEQ ID NO: 904737

SEQ ID NO: 904742 - protein, 151 aa, Homo sapiens
APGAGRGRGAATGAEVRPGARAPATRTPGVPVYKGREQAASLEALFGALDPFPSVLTAARQTPAAKMVKQIESKTAFQEALDAAGDKLVVVDFSATWCGPCKMIKPFFHDVASECEVKCMPTFQFFKKGQKVGEFSGANKEKLEATINELV

SEQ ID NO: 904743 - protein, 157 aa, Homo sapiens
APGAGRGRGAATGAEVRPGARAPATRTPGVPVYKGREQAASLEALFGALDPFPSVLTAARQTPAAKMVKQIESKTAFQEALDAAGDKLVVVDFSATWCGPCKMIKPFFHSLSEKYSNVIFLEVDVDDCQDVASECEVKCMPTFQFFKKGQKSFAPTF

SEQ ID NO: 904744 - protein, 201 aa, Homo sapiens
APGAGRGRGAATGAEVRPGARAPATRTPGVPVYKGREQAASLEALFGALDPFPSVLTAARQTPAAKMVKQIESKTAFQEALDAAGDKLVVVDFSATWCGPCKMIKPFFHSLSEKYSNVIFLEVDVDDCQDVASECEVKCMPTFQFFKKGQKVASSFCKAHTTWLRSQLLQVYHLQRPGFLKSSLALDLLTIYGCWSRLASV

SEQ ID NO: 904745 - protein, 87 aa, Homo sapiens
APGAGRGRGAATGAEVRPGARAPATRTPGVPVYKGREQAASLEALFGALDPFPSVLTAARQTPAAKMVKQIESKTAFQEALDAAVPL

SEQ ID NO: 904746 - protein, 142 aa, Homo sapiens
APGAGRGRGAATGAEVRPGARAPATRTPGVPVYKGREQAASLEALFGALDPFPSVLTAARQTPAAKMVKQIESKTAFQEALDAAGDKLVVVDFSATWCGPCKMIKPFFHTFCPFLKNWNVACIWLHTLKHILTVIHIYVQDM

SEQ ID NO: 904747 - protein, 171 aa, Homo sapiens; identical to SEQ ID NO: 904737

SEQ ID NO: 904748 - protein, 171 aa, Homo sapiens; identical to SEQ ID NO: 904737

SEQ ID NO: 904749 - protein, 171 aa, Homo sapiens; identical to SEQ ID NO: 904737

SEQ ID NO: 904750 - protein, 171 aa, Homo sapiens; identical to SEQ ID NO: 904737

SEQ ID NO: 904751 - protein, 171 aa, Homo sapiens; identical to SEQ ID NO: 904737

SEQ ID NO: 904752 - protein, 87 aa, Homo sapiens; identical to SEQ ID NO: 904745

SEQ ID NO: 904753 - protein, 116 aa, Homo sapiens
APGAGRGRGAATGAEVRPGARAPATRTPGVPVYKGREQAASLEALFGALDPFPSVLTAARQTPAAKMVKQIESKDVASECEVKCMPTFQFFKKGQKVGEFSGANKEKLEATINELV

SEQ ID NO: 904754 - protein, 139 aa, Homo sapiens
APGAGRGRGAATGAEVRPGARAPATRTPGVPVYKGREQAASLEALFGALDPFPSVLTAARQTPAAKMVKQIESKTAFQEALDAAGDKLVVVDFSATWCGPCKMIKPFFHSLSEKYSNVIFLEVDVDDCQRYVAGNMRYC

SEQ ID NO: 904755 - protein, 117 aa, Homo sapiens
APGAGRGRGAATGAEVRPGARAPATRTPGVPVYKGREQAASLEALFGALDPFPSVLTAARQTPAAKMVKQIESKTAFQEALDAAGDKLVVVDFSATWCGPCKMIKPFFHRTSSIKFA

SEQ ID NO: 904756 - protein, 137 aa, Homo sapiens
HTSAERMASRKAGTRGKVAATKQAQRGSSNVFSMFEQAQIQEFKEAFSCIDQNRDGIICKADLRETYSQLGKVSVPEEELDAMLQEGKGPINFTVFLTLFGEKLNGQPQEHLVLPMFTQRKGCNRIVSSFYQEKVLP

SEQ ID NO: 904757 - protein, 122 aa, Homo sapiens
SSHTSAERMASRKAGTRGKVAATKQAQRGSSNVFSMFEQAQIQEFKEAFSCIDQNRDGIICKADLRETYSQLGKVSVPEEELDAMLQEGKGPINFTVFLTLFGEKLNGDRPRGSHPECLPHV

SEQ ID NO: 904758 - protein, 122 aa, Homo sapiens; identical to SEQ ID NO: 904757

SEQ ID NO: 904759 - protein, 139 aa, Homo sapiens
SSHTSAERMASRKAGTRGKVAATKQAQRGSSNVFSMFEQAQIQEFKEAFSCIDQNRDGIICKADLRETYSQLGKVSVPEEELDAMLQEGKGPINFTVFLTLFGEKLNGQPQEHLVLPMFTQRKGCNRIVSSFYQEKVLP

SEQ ID NO: 904760 - protein, 209 aa, Homo sapiens
HTSAERMASRKAGTRGKVAATKQAQRGSSNVFSMFEQAQIQEFKEAFSCIDQNRDGIICKADLRETYSQLGCVHPPPTLRTGVPTLSCWAGGSGLGDRTLLPCFPSSPSPHTALPPLSRLASTSPSRPTAASAPPAPVARMEGGRPGPSGGHPGSLCAPHAPPPAGEGECPRGGAGRHAARGQGPHQLHRLPHALWGEAQWGQTPRKPS

SEQ ID NO: 904761 - protein, 133 aa, Homo sapiens
TPLQREWPAGRRGPGARWQPPSRPNVVLPTSFPCLNKPRYRSSKKAGGCSHLKAPIPQAFSCIDQNRDGIICKADLRETYSQLGKVSVPEEELDAMLQEGKGPINFTVFLTLFGEKLNGDRPRGSHPECLPHV

SEQ ID NO: 904762 - protein, 130 aa, Homo sapiens
SSHTSAERMASRKAGTRGKVAATKQAQRGSSNVFSMFEQAQIQEFKEAFSCIDQNRDGIICKADLRETYSQLGKVSVPEEELDAMLQEGKNPIFTKNTKISQAWWLVTVVPATLEAEAKESLEPRRRRLQ

SEQ ID NO: 904763 - protein, 100 aa, Homo sapiens
HTSAERMASRKAGTRGKVAATKQAQRGSSNVFSMFEQAQIQEFKEAFSCIDQNRDGIICKADLRETYSQLEGSFPGGVDAISKGRPIITFLVLGSYGNPE

SEQ ID NO: 904764 - protein, 68 aa, Homo sapiens
MLQEGKGPINFTVFLTLFGEKLNGGQPPGGILVLPHFSPRKGCNKISEELSTRESFPKVRDLPNHDLR

SEQ ID NO: 904765 - protein, 88 aa, Homo sapiens
HTSAERMASRKAGTRGKVAATKQAQRGSSNVFSMFEQAQIQEFKELFSTSTFLELGVASLKAPFKGFSLLTRLYGYLKEALGNYSVGK

SEQ ID NO: 904766 - protein, 122 aa, Homo sapiens; identical to SEQ ID NO: 904757

SEQ ID NO: 904767 - protein, 122 aa, Homo sapiens; identical to SEQ ID NO: 904757

SEQ ID NO: 904768 - protein, 120 aa, Homo sapiens
HTSAERMASRKAGTRGKVAATKQAQRGSSNVFSMFEQAQIQEFKEAFSCIDQNRDGIICKADLRETYSQLGKVSVPEEELDAMLQEGKGPINFTVFLTLFGEKLNGDRPRGSHPECLPHV

SEQ ID NO: 904769 - protein, 143 aa, Homo sapiens
HTSAERMASRKAGTRGKVAATKQAQRGSSNVFSMFEQAQIQEFKEVSPPPPTFPRAGGCSHLKAPIPQAFSCIDQNRDGIICKADLRETYSQLGKVSVPEEELDAMLQEGKGPINFTVFLTLFGEKLNGDRPRGSHPECLPHV

SEQ ID NO: 904770 - protein, 98 aa, Homo sapiens
SSHTSAERMASRKAGTRGKVAATKQAQRGSSNVFSMFEQAQIQEFKEAFSCIDQNRDGIICKADLRETYSQLGKVSVPEEELDAMLQEGKGQTPRKPS

SEQ ID NO: 904771 - protein, 90 aa, Homo sapiens
HTSAERMASRKAGTRGKVAATKQAQRGSSNVFSMFEQAQIQEFKEAFSCIDQNRDGIICKADLRETYSQLGEAAQPLQYSSPAPSLGLHP

SEQ ID NO: 904772 - protein, 143 aa, Homo sapiens; identical to SEQ ID NO: 904769

SEQ ID NO: 904773 - protein, 209 aa, Homo sapiens
MRIPTSTPRGLVIQDYDADKMFPAFGFGAQIPPQWQVSHEFPMNFNPSNPYCNGIQGIVEAYRSCLPQIKLYGPTNFSPIINHVARFAAAATQQQTASQYFVLLIITDGVITDLDETRQAIVNASRLPMSIIIVGVGGADFSAMEFLDGDGGSLRSPLGEVAIRDIVQFVPFRQFQNAPKEALAQCACPVVSCPRCYRGCAKRVEISDE

SEQ ID NO: 904774 - protein, 537 aa, Homo sapiens
MAAQCVTKVALNVSCANLLDKDIGSKSDPLCVLFLNTSGQQWYEVERTERIKNCLNPQFSKTFIIDYYFEVVQKLKFGVYDIDNKTIELSDDDFLGECECTLGQIVSSKKLTRPLVMKTGRPAGKGSITISAEEIKDNRVVLFEMEARKLDNKDLFGKSDPYLEFHKQTSDGNWLMVHRTEVVKNNLNPVWRPFKISLNSLCYGDMDKTIKVECYDYDNDGSHDLIGTFQTTMTKLKEASRSSPVEFECINEKKRQKKKSYKNSGVISVKQCEITVECTFLDYIMGGCQLNFTVGVDFTGSNGDPRSPDSLHYISPNGVNEYLTALWSVGLVIQDYDADKMFPAFGFGAQIPPQWQVSHEFPMNFNPSNPYCNGIQGIVEAYRSCLPQIKLYGPTNFSPIINHVARFAAAATQQQTASQYFVLLIITDGVITDLDETRQAIVNASRLPMSIIIVGVGGADFSAMEFLDGDGGSLRSPLGEVAIRDIVQFVPFRQFQNAPKEALAQCVLAEIPQQVVGYFNTYKLLPPKNPATKQQKQ

SEQ ID NO: 904775 - protein, 429 aa, Homo sapiens
LYDSRASRHLKRKTAGKGSITISAEEIKDNRVVLFEMEARKLDNKDLFGKSDPYLEFHKQTSDGNWLMVHRTEVVKNNLNPVWRPFKISLNSLCYGDMDKTIKVECYDYDNDGSHDLIGTFQTTMTKLKEASRSSPVEFECINEKKRQKKKSYKNSGVISVKQCEITVECTFLDYIMGGCQLNFTVGVDFTGSNGDPRSPDSLHYISPNGVNEYLTALWSVGLVIQDYDADKMFPAFGFGAQIPPQWQVSHEFPMNFNPSNPYCNGIQGIVEAYRSCLPQIKLYGPTNFSPIINHVARFAAAATQQQTASQYFVLLIITDGVITDLDETRQAIVNASRLPMSIIIVGVGGADFSAMEFLDGDGGSLRSPLGEVAIRDIVQFVPFRQFQNAPKEALAQCVLAEIPQQVVGYFNTYKLLPPKNPATKQQKQ

SEQ ID NO: 904776 - protein, 537 aa, Homo sapiens; identical to SEQ ID NO: 904774

SEQ ID NO: 904777 - protein, 537 aa, Homo sapiens; identical to SEQ ID NO: 904774

SEQ ID NO: 904778 - protein, 537 aa, Homo sapiens; identical to SEQ ID NO: 904774

SEQ ID NO: 904779 - protein, 217 aa, Homo sapiens
MRIPTSTPRGLVIQDYDADKMFPAFGFGAQIPPQWQVSHEFPMNFNPSNPYCNGIQGIVEAYRSCLPQIKLYGPTNFSPIINHVARFAAAATQQQTASQYFVLLIITDGVITDLDETRQAIVNASRLPMSIIIVGVGGADFSAMEFLDGDGGSLRSPLGEVAIRDIVQFVPFRQFQNAPKEALAQCVLAEIPQQVVGYFNTYKLLPPKNPATKQQKQ

SEQ ID NO: 904780 - protein, 95 aa, Homo sapiens
NQLERCRTALFLGFKKPCPTQWCRYLSSALLARRRWELTLLNLPNIRRRQESCEPRLSQCLSALRLQQGGSTGSIRNPGCSLPCGLQQPPRTQAR

SEQ ID NO: 904781 - protein, 872 aa, Homo sapiens
MRTREEELKSLGADFTFGFIQVMDGEKDPRNLLVAFRIVHDLISRDYSLGPFVEELFEVTSCYFPIDFTPPPNDPHGIQREDLILSLRAVLASTPRFAEFLLPLLIEKVDSEVLSAKLDSLQTLNACCAVYGQKELKDFLPSLWASIRREVFQTASERVEAEGLAALHSLTACLSRSVLRADAEDLLDSFLSNILQDCRHHLCEPDMKLVWPSAKLLQAAAGASARACDSVTSNVLPLLLEQFHKHSQSSQRRTILEMLLGFLKLQQKWSYEDKDQRPLNGFKDQLCSLVFMALTDPSTQLQLVGIRTLTVLGAQPDLLSYEDLELAVGHLYRLSFLKEDSQSCRVAALEASGTLAALYPVAFSSHLVPKLAEELRVGESNLTNGDEPTQCSRHLCCLQALSAVSTHPSIVKETLPLLLQHLWQVNRGNMVAQSSDVIAVCQSLRQMAEKCQQDPESCWYFHQTAIPCLLALAVQASMPEKEPSVLRKVLLEDEVLAAMVSVIGTATTHLSPELAAQSVTHIVPLFLDGNVSFLPENSFPSRFQPFQDGSSGQRRLIALLMAFVCSLPRNVEIPQLNQLMRELLELSCCHSCPFSSTAAAKCFAGLLNKHPAGQQLDEFLQLAVDKVEAGLGSGPCRSQAFTLLLWVTKALVLRYHPLSSCLTARLMGLLSDPELGPAAADGFSLLMSDCTDVLTRAGHAEVRIMFRQRFFTDNVPALVQGFHAAPQDVKPNYLKGLSHVLNRLPKPVLLPELPTLLSLLLEALSCPDCVVQLSTLSCLQPLLLEAPQVMSLHVDTLVTKFLNLSSSPSMAVRIAALQCMHALTRLPTPVLLPYKPQVIRALAKPLDDKKRLVRKEAVSARGEWFLLGSPGS

SEQ ID NO: 904782 - protein, 666 aa, Homo sapiens
MKLVWPSAKLLQAAAGASARACDSVTSNVLPLLLEQFHKHSQSSQRRTILEMLLGFLKLQQKWSYEDKDQRPLNGFKDQLCSLVFMALTDPSTQLQLVGIRTLTVLGAQPDLLSYEDLELAVGHLYRLSFLKEDSQSCRVAALEASGTLAALYPVAFSSHLVPKLAEELRVGESNLTNGDEPTQCSRHLCCLQALSAVSTHPSIVKETLPLLLQHLWQVNRGNMVAQSSDVIAVCQSLRQMAEKCQQDPESCWYFHQTAIPCLLALAVQASMPEKEPSVLRKVLLEDEVLAAMVSVIGTATTHLSPELAAQSVTHIVPLFLDGNVSFLPENSFPSRFQPFQDGSSGQRRLIALLMAFVCSLPRNVEIPQLNQLMRELLELSCCHSCPFSSTAAAKCFAGLLNKHPAGQQLDEFLQLAVDKVEAGLGSGPCRSQAFTLLLWVTKALVLRYHPLSSCLTARLMGLLSDPELGPAAADGFSLLMSDCTDVLTRAGHAEVRIMFRQRFFTDNVPALVQGFHAAPQDVKPNYLKGLSHVLNRLPKPVLLPELPTLLSLLLEALSCPDCVVQLSTLSCLQPLLLEAPQVMSLHVDTLVTKFLNLSSSPSMAVRIAALQCMHALTRLPTPVLLPYKPQVIRALAKPLDDKKRLVRKEAVSARGEWFLLGSPGS

SEQ ID NO: 904783 - protein, 811 aa, Homo sapiens
SEYEAGVNWPPNDPHGIQREDLILSLRAVLASTPRFAEFLLPLLIEKVDSEVLSAKLDSLQTLNACCAVYGQKELKDFLPSLWASIRREVFQTASERVEAEGLAALHSLTACLSRSVLRADAEDLLDSFLSNILQDCRHHLCEPDMKLVWPSAKLLQAAAGASARACDSVTSNVLPLLLEQFHKHSQSSQRRTILEMLLGFLKLQQKWSYEDKDQRPLNGFKDQLCSLVFMALTDPSTQLQLVGIRTLTVLGAQPDLLSYEDLELAVGHLYRLSFLKEDSQSCRVAALEASGTLAALYPVAFSSHLVPKLAEELRVGESNLTNGDEPTQCSRHLCCLQALSAVSTHPSIVKETLPLLLQHLWQVNRGNMVAQSSDVIAVCQSLRQMAEKCQQDPESCWYFHQTAIPCLLALAVQASMPEKEPSVLRKVLLEDEVLAAMVSVIGTATTHLSPELAAQSVTHIVPLFLDGNVSFLPENSFPSRFQPFQDGSSGQRRLIALLMAFVCSLPRNVEIPQLNQLMRELLELSCCHSCPFSSTAAAKCFAGLLNKHPAGQQLDEFLQLAVDKVEAGLGSGPCRSQAFTLLLWVTKALVLRYHPLSSCLTARLMGLLSDPELGPAAADGFSLLMSDCTDVLTRAGHAEVRIMFRQRFFTDNVPALVQGFHAAPQDVKPNYLKGLSHVLNRLPKPVLLPELPTLLSLLLEALSCPDCVVQLSTLSCLQPLLLEAPQVMSLHVDTLVTKFLNLSSSPSMAVRIAALQCMHALTRLPTPVLLPYKPQVIRALAKPLDDKKRLVRKEAVSARGEWFLLGSPGS

SEQ ID NO: 904784 - protein, 666 aa, Homo sapiens; identical to SEQ ID NO: 904782

SEQ ID NO: 904785 - protein, 865 aa, Homo sapiens
MRTREEELKSLGADFTFGFIQVMDGEKDPRNLLVAFRIVHDLISRDYSLGPFVEELFEVTSCYFPIDFTPPPNDPHGIQREDLILSLRAVLASTPRFAEFLLPLLIEKVDSEVLSAKLDSLQTLNACCAVYGQKELKDFLPSLWASIRREVFQTASERVEAEGLAALHSLTACLSRSVLRADAEDLLDSFLSNILQDCRHHLCEPDMKLVWPSAKLLQAAAGASARACDSVTSNVLPLLLEQFHKHSQSSQRRTILEMLLGFLKLQQKWSYEDKDQRPLNGFKDQLCSLVFMALTDPSTQLQLVGIRTLTVLGAQPDLLSYEDLELAVGHLYRLSFLKEDSQSCRVAALEASGTLAALYPVAFSSHLVPKLAEELRVGESNLTNGDEPTQCSRHLCCLQALSAVSTHPSIVKETLPLLLQHLWQVNRGNMVAQSSDVIAVCQSLRQMAEKCQQDPESCWYFHQTAIPCLLALAVQASMPEKEPSVLRKVLLEDEVLAAMVSVIGTATTHLSPELAAQSVTHIVPLFLDGNVSFLPENSFPSRFQPFQDGSSGQRRLIALLMAFVCSLPRNVEIPQLNQLMRELLELSCCHSCPFSSTAAAKCFAGLLNKHPAGQQLDEFLQLAVDKVEAGLGSGPCRSQAFTLLLWVTKALVLRYHPLSSCLTARLMGLLSDPELGPAAADGFSLLMSDCTDVLTRAGHAEVRIMFRQRFFTDNVPALVQGFHAAPQDVKPNYLKGLSHVLNRLPKPVLLPELPTALSCPDCVVQLSTLSCLQPLLLEAPQVMSLHVDTLVTKFLNLSSSPSMAVRIAALQCMHALTRLPTPVLLPYKPQVIRALAKPLDDKKRLVRKEAVSARGEWFLLGSPGS

SEQ ID NO: 904786 - protein, 589 aa, Homo sapiens
MRTREEELKSLGADFTFGFIQVMDGEKDPRNLLVAFRIVHDLISRDYSLGPFVEELFEVTSCYFPIDFTPPPNDPHGIQREDLILSLRAVLASTPRFAEFLLPLLIEKVDSEVLSAKLDSLQTLNACCAVYGQKELKDFLPSLWASIRREVFQTASERVEAEGLAALHSLTACLSRSVLRADAEDLLDSFLSNILQDCRHHLCEPDMKLVWPSAKLLQAAAGASARACDSVTSNVLPLLLEQFHKHSQSSQRRTILEMLLGFLKLQQKWSYEDKDQRPLNGFKDQLCSLVFMALTDPSTQLQLVGIRTLTVLGAQPDLLSYEDLELAVGHLYRLSFLKEDSQSCRVAALEASGTLAALYPVAFSSHLVPKLAEELRVGESNLTNGDEPTQCSRHLCCLQALSAVSTHPSIVKETLPLLLQHLWQVNRGNMVAQSSDVIAVCQSLRQMAEKCQQDPESCWYFHQTAIPCLLALAVQASMPEKEPSVLRKVLLEDEVLAAMVSVIGTATTHLSPELAAQSVTHIVPLFLDGNVSFLPENSFPSRFQPFQDGSSGQRRLIALLMAFVCSLPRNVSEHIWEVLLFNLDKVTPG

SEQ ID NO: 904787 - protein, 879 aa, Homo sapiens
MRTREEELKSLGADFTFGFIQVMDGEKDPRNLLVAFRIVHDLISRDYSLGPFVEELFEVTSCYFPIDFTPPPNDPHGIQREDLILSLRAVLASTPRFAEFLLPLLIEKVDSEVLSAKLDSLQTLNACCAVYGQKELKDFLPSLWASIRREVFQTASERVEAEGLAALHSLTACLSRSVLRADAEDLLDSFLSNILQDCRHHLCEPDMKLVWPSAKLLQAAAGASARACDSVTSNVLPLLLEQFHKHSQYPLKRYQSSQRRTILEMLLGFLKLQQKWSYEDKDQRPLNGFKDQLCSLVFMALTDPSTQLQLVGIRTLTVLGAQPDLLSYEDLELAVGHLYRLSFLKEDSQSCRVAALEASGTLAALYPVAFSSHLVPKLAEELRVGESNLTNGDEPTQCSRHLCCLQALSAVSTHPSIVKETLPLLLQHLWQVNRGNMVAQSSDVIAVCQSLRQMAEKCQQDPESCWYFHQTAIPCLLALAVQASMPEKEPSVLRKVLLEDEVLAAMVSVIGTATTHLSPELAAQSVTHIVPLFLDGNVSFLPENSFPSRFQPFQDGSSGQRRLIALLMAFVCSLPRNVEIPQLNQLMRELLELSCCHSCPFSSTAAAKCFAGLLNKHPAGQQLDEFLQLAVDKVEAGLGSGPCRSQAFTLLLWVTKALVLRYHPLSSCLTARLMGLLSDPELGPAAADGFSLLMSDCTDVLTRAGHAEVRIMFRQRFFTDNVPALVQGFHAAPQDVKPNYLKGLSHVLNRLPKPVLLPELPTLLSLLLEALSCPDCVVQLSTLSCLQPLLLEAPQVMSLHVDTLVTKFLNLSSSPSMAVRIAALQCMHALTRLPTPVLLPYKPQVIRALAKPLDDKKRLVRKEAVSARGEWFLLGSPGS

SEQ ID NO: 904788 - protein, 872 aa, Homo sapiens; identical to SEQ ID NO: 904781

SEQ ID NO: 904789 - protein, 784 aa, Homo sapiens
MRTREEELKSLGADFTFGFIQVMDGEKDPRNLLVAFRIVHDLISRDYSLGPFVEELFEVTSCYFPIDFTPPPNDPHGIQREDLILSLRAVLASTPRFAEFLLPLLIEKVDSEVLSAKLDSLQTLNACCAVYGQKELKDFLPSLWASIRREVFQTASERVEAEGLAALHSLTACLSRSVLRADAEDLLDSFLSNILQDCRHHLCEPDMKLVWPSAKLLQAAAGASARACDSVTSNVLPLLLEQFHKHSQSSQRRTILEMLLGFLKLQQKWSYEDKDQRPLNGFKDQLCSLVFMALTDPSTQLQLVGIRTLTVLGAQPDLLSYEDLELAVGHLYRLSFLKEDSQSCRVAALEASGTLAALYPVAFSSHLVPKLAEELRVGESNLTNGDEPTQCSRHLCCLQALSAVSTHPSIVKETLPLLLQHLWQVNRGNMVAQSSDVIAVCQSLRQMAEKCQQDPESCWYFHQTAIPCLLALAVQASMPEKEPSVLRKVLLEDEVLAAMVSVIGTATTHLSPELAAQSVTHIVPLFLDGNVSFLPENSFPSRFQPFQDGSSGQRRLIALLMAFVCSLPRNVEIPQLNQLMRELLELSCCHSCPFSSTAAAKCFAGLLNKHPAGQQLDEFLQLAVDKVEAGLGSGPCRSQAFTLLLWVTKALVLRYHPLSSCLTARLMGLLSDPELGPAAADGFSLLMSDCTDVLTRAGHAEVRIMFRQRFFTDNVPALVQGFHAAPQDVKPNYLKGLSHVLNRLPKPVLLPELPTLLSLLLEALSCPDCVVQLSTLCCMAVQRT

SEQ ID NO: 904790 - protein, 443 aa, Homo sapiens
MVAQSSDVIAVCQSLRQMAEKCQQDPESCWYFHQTAIPCLLALAVQASMPEKEPSVLRKVLLEDEVLAAMVSVIGTATTHLSPELAAQSVTHIVPLFLDGNVSFLPENSFPSRFQPFQDGSSGQRRLIALLMAFVCSLPRNVEIPQLNQLMRELLELSCCHSCPFSSTAAAKCFAGLLNKHPAGQQLDEFLQLAVDKVEAGLGSGPCRSQAFTLLLWVTKALVLRYHPLSSCLTARLMGLLSDPELGPAAADGFSLLMSDCTDVLTRAGHAEVRIMFRQRFFTDNVPALVQGFHAAPQDVKPNYLKGLSHVLNRLPKPVLLPELPTLLSLLLEALSCPDCVVQLSTLSCLQPLLLEAPQVMSLHVDTLVTKFLNLSSSPSMAVRIAALQCMHALTRLPTPVLLPYKPQVIRALAKPLDDKKRLVRKEAVSARGEWFLLGSPGS

SEQ ID NO: 904791 - protein, 92 aa, Homo sapiens
LLRLGPRGLSAFALWPLPRLWRRRRLWVPYGASCTTSSWVSKRAPLTRWLQVLSRESRTPNSGTRNPAFVTGATPLSHLAPGEGSGTPDTVL

SEQ ID NO: 904792 - protein, 535 aa, Homo sapiens
MRTREEELKSLGADFTFGFIQVMDGEKDPRNLLVAFRIVHDLISRDYSLGPFVEELFEVTSCYFPIDFTPPPNDPHGIQREDLILSLRAVLASTPRFAEFLLPLLIEKVDSEVLSAKLDSLQTLNACCAVYGQKELKDFLPSLWASIRREVFQTASERVEAEGLAALHSLTACLSRSVLRADAEDLLDSFLSNILQDCRHHLCEPDMKLVWPSAKLLQAAAGASARACDSVTSNVLPLLLEQFHKHSQSSQRRTILEMLLGFLKLQQKWSYEDKDQRPLNGFKDQLCSLVFMALTDPSTQLQLVGIRTLTVLGAQPDLLSYEDLELAVGHLYRLSFLKEDSQSCRVAALEASGTLAALYPVAFSSHLVPKLAEELRVGESNLTNGDEPTQCSRHLCCLQALSAVSTHPSIVKETLPLLLQHLWQVNRGNMVAQSSDVIAVCQSLRQMAEKCQQDPESCWYFHQTAIPCLLALAVQASMPEKEAQSEETTMHEEVSKHGRRQGQEKQANYIGPTVTVARIEDGARNRPDRKHRTQH

SEQ ID NO: 904793 - protein, 126 aa, Homo sapiens
SRFILPERTLLSLLLEALSCPDCVVQLSTLSCLQPLLLEAPQVMSLHVDTLVTKFLNLSSSPSMAVRIAALQCMHALTRLPTPVLLPYKPQVIRALAKPLDDKKRLVRKEAVSARGEWFLLGSPGS

SEQ ID NO: 904794 - protein, 257 aa, Homo sapiens
MRTREEELKSLGADFTFGFIQVMDGEKDPRNLLVAFRIVHDLISRDYSLGPFVEELFEVTSCYFPIDFTPPPNDPHGIQREDLILSLRAVLASTPRFAEFLLPLLIEKVDSEVLSAKLDSLQTLNACCAVYGQKELKDFLPSLWASIRREVFQTASERVEAEGLAALHSLTACLSRSVLRADAEDLLDSFLSNILQDCRHHLCEPDMKLVWPSAKLLQAAAGASARACDSVTSNVLPLLLEQFHKHSQVREQNLWGK

SEQ ID NO: 904795 - protein, 237 aa, Homo sapiens
MRTREEELKSLGADFTFGFIQVMDGEKDPRNLLVAFRIVHDLISRDYSLGPFVEELFEVTSCYFPIDFTPPPNDPHGIQREDLILSLRAVLASTPRFAEFLLPLLIEKVDSEVLSAKLDSLQTLNACCAVYGQKELKDFLPSLWASIRREVFQTASERVEAEGLAALHSLTACLSRSVLRADAEDLLDSFLSNILQGNGAVAARKGSEHNRNDIPCLGAVAHACNPCTLGGRGGWIT

SEQ ID NO: 904796 - protein, 279 aa, Homo sapiens
MAAAAAVEAAAPMGALWGLVHDFVVGQQEGPADQVAADVKSGNYTVLQVVEALGSSLENPEPRTRARGIQLLSQVLLHCHTLLLEKEEGTGVTNRNVFLDVLSPVVHLILFYENRLKDHHLVIPSVLQGLKALSLCVALPPGLAVSVLKAIFQEVHVQSLPQVDRHTVYNIITNFMRTREEELKSLGADFTFGFIQVMDGEKDPRNLLVAFRIVHDLISRDYSLGLCGGVLKVNPVISYDLTLQLMIHGSREKTHLNFSDVLVLTEWSRCPRCNGPGTA

SEQ ID NO: 904797 - protein, 1030 aa, Homo sapiens [sequence omitted]

SEQ ID NO: 904798 - protein, 194 aa, Homo sapiens
MAAAAAVEAAAPMGALWGLVHDFVVGQQEGPADQVAADVKSGNYTVLQVVEALGSSLENPEPRTRARGIQLLSQVLLHCHTLLLEKEVVHLILFYENRLKDHHLVIPSVLQGLKALSLCVALPPGLAVSVLKAIFQEVHVQSLPQVDRHTVYNIITNFMRTREEGKRQSFLGNVKSKHILLFPLLVGLILPGVI

SEQ ID NO: 904799 - protein, 1047 aa, Homo sapiens
MAAAAAVEAAAPMGALWGLVHDFVVGQQEGPADQVAADVKSGNYTVLQVVEALGSSLENPEPRTRARGIQLLSQVLLHCHTLLLEKEEGTGVTNRNVFLDVLSPVVHLILFYENRLKDHHLVIPSVLQGLKALSLCVALPPGLAVSVLKAIFQEVHVQSLPQVDRHTVYNIITNFMRTREEELKSLGADFTFGFIQVMDGEKDPRNLLVAFRIVHDLISRDYSLGPFVEELFEVTSCYFPIDFTPPPNDPHGIQREDLILSLRAVLASTPRFAEFLLPLLIEKVDSEVLSAKLDSLQTLNACCAVYGQKELKDFLPSLWASIRREVFQTASERVEAEGLAALHSLTACLSRSVLRADAEDLLDSFLSNILQDCRHHLCEPDMKLVWPSAKLLQAAAGASARACDSVTSNVLPLLLEQFHKHSQSSQRRTILEMLLGFLKLQQKWSYEDKDQRPLNGFKDQLCSLVFMALTDPSTQLQLVGIRTLTVLGAQPDLLSYEDLELAVGHLYRLSFLKEDSQSCRVAALEASGTLAALYPVAFSSHLVPKLAEELRVGESNLTNGDEPTQCSRHLCCLQALSAVSTHPSIVKETLPLLLQHLWQVNRGNMVAQSSDVIAVCQSLRQMAEKCQQDPESCWYFHQTAIPCLLALAVQASMPEKEPSVLRKVLLEDEVLAAMVSVIGTATTHLSPELAAQSVTHIVPLFLDGNVSFLPENSFPSRFQPFQDGSSGQRRLIALLMAFVCSLPRNVEIPQLNQLMRELLELSCCHSCPFSSTAAAKCFAGLLNKHPAGQQLDEFLQLAVDKVEAGLGSGPCRSQAFTLLLWVTKALVLRYHPLSSCLTARLMGLLSDPELGPAAADGFSLLMSDCTDVLTRAGHAEVRIMFRQRFFTDNVPALVQGFHAAPQDVKPNYLKGLSHVLNRLPKPVLLPELPTLLSLLLEALSCPDCVVQLSTLSCLQPLLLEAPQVMSLHVDTLVTKFLNLSSSPSMAVRIAALQCMHALTRLPTPVLLPYKPQVIRALAKPLDDKKRLVRKEAVSARGEWFLLGSPGS

SEQ ID NO: 904800 - protein, 800 aa, Homo sapiens
MALSYTILALLPYNYSAVLASTPRFAEFLLPLLIEKVDSEVLSAKLDSLQTLNACCAVYGQKELKDFLPSLWASIRREVFQTASERVEAEGLAALHSLTACLSRSVLRADAEDLLDSFLSNILQDCRHHLCEPDMKLVWPSAKLLQAAAGASARACDSVTSNVLPLLLEQFHKHSQSSQRRTILEMLLGFLKLQQKWSYEDKDQRPLNGFKDQLCSLVFMALTDPSTQLQLVGIRTLTVLGAQPDLLSYEDLELAVGHLYRLSFLKEDSQSCRVAALEASGTLAALYPVAFSSHLVPKLAEELRVGESNLTNGDEPTQCSRHLCCLQALSAVSTHPSIVKETLPLLLQHLWQVNRGNMVAQSSDVIAVCQSLRQMAEKCQQDPESCWYFHQTAIPCLLALAVQASMPEKEPSVLRKVLLEDEVLAAMVSVIGTATTHLSPELAAQSVTHIVPLFLDGNVSFLPENSFPSRFQPFQDGSSGQRRLIALLMAFVCSLPRNVEIPQLNQLMRELLELSCCHSCPFSSTAAAKCFAGLLNKHPAGQQLDEFLQLAVDKVEAGLGSGPCRSQAFTLLLWVTKALVLRYHPLSSCLTARLMGLLSDPELGPAAADGFSLLMSDCTDVLTRAGHAEVRIMFRQRFFTDNVPALVQGFHAAPQDVKPNYLKGLSHVLNRLPKPVLLPELPTLLSLLLEALSCPDCVVQLSTLSCLQPLLLEAPQVMSLHVDTLVTKFLNLSSSPSMAVRIAALQCMHALTRLPTPVLLPYKPQVIRALAKPLDDKKRLVRKEAVSARGEWFLLGSPGS

SEQ ID NO: 904801 - protein, 703 aa, Homo sapiens
DRRLGTRPGWWADAEDLLDSFLSNILQDCRHHLCEPDMKLVWPSAKLLQAAAGASARACDSVTSNVLPLLLEQFHKHSQSSQRRTILEMLLGFLKLQQKWSYEDKDQRPLNGFKDQLCSLVFMALTDPSTQLQLVGIRTLTVLGAQPDLLSYEDLELAVGHLYRLSFLKEDSQSCRVAALEASGTLAALYPVAFSSHLVPKLAEELRVGESNLTNGDEPTQCSRHLCCLQALSAVSTHPSIVKETLPLLLQHLWQVNRGNMVAQSSDVIAVCQSLRQMAEKCQQDPESCWYFHQTAIPCLLALAVQASMPEKEPSVLRKVLLEDEVLAAMVSVIGTATTHLSPELAAQSVTHIVPLFLDGNVSFLPENSFPSRFQPFQDGSSGQRRLIALLMAFVCSLPRNVEIPQLNQLMRELLELSCCHSCPFSSTAAAKCFAGLLNKHPAGQQLDEFLQLAVDKVEAGLGSGPCRSQAFTLLLWVTKALVLRYHPLSSCLTARLMGLLSDPELGPAAADGFSLLMSDCTDVLTRAGHAEVRIMFRQRFFTDNVPALVQGFHAAPQDVKPNYLKGLSHVLNRLPKPVLLPELPTLLSLLLEALSCPDCVVQLSTLSCLQPLLLEAPQVMSLHVDTLVTKFLNLSSSPSMAVRIAALQCMHALTRLPTPVLLPYKPQVIRALAKPLDDKKRLVRKEAVSARGEWFLLGSPGS

SEQ ID NO: 904802 - protein, 932 aa, Homo sapiens [sequence omitted]

SEQ ID NO: 904803 - protein, 666 aa, Homo sapiens; identical to SEQ ID NO: 904782

SEQ ID NO: 904804 - protein, 872 aa, Homo sapiens; identical to SEQ ID NO: 904781

SEQ ID NO: 904805 - protein, 564 aa, Homo sapiens
QAVGAGCPDLLSYEDLELAVGHLYRLSFLKEDSQSCRVAALEASGTLAALYPVAFSSHLVPKLAEELRVGESNLTNGDEPTQCSRHLCCLQALSAVSTHPSIVKETLPLLLQHLWQVNRGNMVAQSSDVIAVCQSLRQMAEKCQQDPESCWYFHQTAIPCLLALAVQASMPEKEPSVLRKVLLEDEVLAAMVSVIGTATTHLSPELAAQSVTHIVPLFLDGNVSFLPENSFPSRFQPFQDGSSGQRRLIALLMAFVCSLPRNVEIPQLNQLMRELLELSCCHSCPFSSTAAAKCFAGLLNKHPAGQQLDEFLQLAVDKVEAGLGSGPCRSQAFTLLLWVTKALVLRYHPLSSCLTARLMGLLSDPELGPAAADGFSLLMSDCTDVLTRAGHAEVRIMFRQRFFTDNVPALVQGFHAAPQDVKPNYLKGLSHVLNRLPKPVLLPELPTLLSLLLEALSCPDCVVQLSTLSCLQPLLLEAPQVMSLHVDTLVTKFLNLSSSPSMAVRIAALQCMHALTRLPTPVLLPYKPQVIRALAKPLDDKKRLVRKEAVSARGEWFLLGSPGS

SEQ ID NO: 904806 - protein, 719 aa, Homo sapiens
MRTREEELKSLGADFTFGFIQVMDGEKDPRNLLVAFRIVHDLISRDYSLGPFVEELFEVTSCYFPIDFTPPPNDPHGIQREDLILSLRAVLASTPRFAEFLLPLLIEKVDSEVLSAKLDSLQTLNACCAVYGQKELKDFLPSLWASIRREVFQTASERVEAEGLAALHSLTACLSRSVLRADAEDLLDSFLSNILQDCRHHLCEPDMKLVWPSAKLLQAAAGASARACDSVTSNVLPLLLEQFHKHSQSSQRRTILEMLLGFLKLQQKWSYEDKDQRPLNGFKDQLCSLVFMALTDPSTQLQLVGIRTLTVLGAQPDLLSYEDLELAVGHLYRLSFLKEDSQSCRVAALEASGTLAALYPVAFSSHLVPKLAEELRVGESNLTNGDEPTQCSRHLCCLQALSAVSTHPSIVKETLPLLLQHLWQVNRGNMVAQSSDVIAVCQSLRQMAEKCQQDPESCWYFHQTAIPCLLALAVQASMPEKEPSVLRKVLLEDEVLAAMVSVIGTATTHLSPELAAQSVTHIVPLFLDGNVSFLPENSFPSRFQPFQDGSSGQRRLIALLMAFVCSLPRNVEIPQLNQLMRELLELSCCHSCPFSSTAAAKCFAGLLNKHPAGQQLDEFLQLAVDKVEAGLGSGPCRSQAFTLLLWVTKALVLRYHPLSSCLTARVRPFWRQKNPGPKQTFWLLLFLPRTSILPCVFFVFFSFFFLETGSYSVTQAGVQ

SEQ ID NO: 904807 - protein, 293 aa, Homo sapiens [sequence omitted]

SEQ ID NO: 904808 - protein, 381 aa, Homo sapiens
MRTREEELKSLGADFTFGFIQVMDGEKDPRNLLVAFRIVHDLISRDYSLGPFVEELFEVTSCYFPIDFTPPPNDPHGIQREDLILSLRAVLASTPRFAEFLLPLLIEKVDSEVLSAKLDSLQTLNACCAVYGQKELKDFLPSLWASIRREVFQTASERVEAEGLAALHSLTACLSRSVLRADAEDLLDSFLSNILQDCRHHLCEPDMKLVWPSAKLLQAAAGASARACDSVTSNVLPLLLEQFHKHSQSSQRRTILEMLLGFLKLQQKWSYEDKDQRPLNGFKDQLCSLVFMALTDPSTQLQLVGIRTLTVLGAQPDLLSYEDLELAVGHLYRLSFLKEDSQSCRVAALEASGTLAALYPVAFSSHLVPKLAEELRVGMCL

SEQ ID NO: 904809 - protein, 137 aa, Homo sapiens
MRTREEELKSLGADFTFGFIQVMDGEKDPRNLLVAFRIVHDLISRDYSLGPFVEELFEVTSCYFPIDFTPPPNDPHGIQREDLILSLRAVLASTPRFAEFLLPLLIEKVDSEVLSAKLDSLQTLVSDFSSLQDPATF

SEQ ID NO: 904810 - protein, 108 aa, Homo sapiens [sequence omitted]

SEQ ID NO: 904811 - protein, 215 aa, Homo sapiens
QVVMRFNNSLLPTEPSQQLQAYVAWVNAQLKKRPAVKPVQDLRQDLRDGVILAYLIEIVAGEKLSGVQLSPGNQQEMKNNVEKVLQFVASKKIRMHQTSAKDIVDGNLKSIMRLVLALAAHFKPGSSRTVNQGRDSRAPLQSHRPHCATAVAQGAAAALADVCHDMSRSGRDVFRYRQRNSSMDEEIENPYWSVRALVQQYEGQQRSPSESSCSR

SEQ ID NO: 904812 - protein, 683 aa, Homo sapiens
MLACLTRGNLLDVLQEGFNEQQLQAYVAWVNAQLKKRPAVKPVQDLRQDLRDGVILAYLIEIVAGEKLSGVQLSPGNQQEMKNNVEKVLQFVASKKIRMHQTSAKDIVDGNLKSIMRLVLALAAHFKPGSSRTVNQGRDSRAPLQSHRPHCATAVAQGAAAALADVCHDMSRSGRDVFRYRQRNSSMDEEIENPYWSVRALVQQYEGQQRSPSESSCSSLTSPSPIHSAKSESIITQSEEKADFVIIPAEGIENRTEGTDSPLSRDWRPGSPGTYLETSWEEQLLEQQEYLEKEMEEAKKMISGLQALLLNGSLPEDEQERPLALCEPGVNPEEQLIIIQSRLDQSMEENQDLKKELLKCKQEARNLQGIKDALQQRLTQQDTSVLQLKQELLRANMDKDELHNQNVDLQRKLDERNRLLGEYKKELGQKDRLLQQHQAKLEEALRKLSDVSYHQVDLERELEHKDVLLAHCMKREADEATNYNSHNSQSNGFLLPTAGKGATSVSNRGTSDLQLVRDALRSLRNSFSGHDPQHHTIDSLEQGISSLMERLHVMETQKKQERKVRVKSPRTQVGSEYRESWPPNSKLPHSQSSPTVSSTCTKVLYFTDRSLTPFMVNIPKRLEEVTLKDFKAAIDREGNHRYHFKALDPEFGTVKEEIFHDDDAIPGWEGKIVAWVEEDHGEN

SEQ ID NO: 904813 - protein, 472 aa, Homo sapiens
MGGTQVKCLTSPSPIHSAKSESIITQSEEKADFVIIPAEGIENRTEGTDSPLSRDWRPGSPGTYLETSWEEQLLEQQEYLEKEMEEAKKMISGLQALLLNGSLPEDEQERPLALCEPGVNPEEQLIIIQSRLDQSMEENQDLKKELLKCKQEARNLQGIKDALQQRLTQQDTSVLQLKQELLRANMDKDELHNQNVDLQRKLDERNRLLGEYKKELGQKDRLLQQHQAKLEEALRKLSDVSYHQVDLERELEHKDVLLAHCMKREADEATNYNSHNSQSNGFLLPTAGKGATSVSNRGTSDLQLVRDALRSLRNSFSGHDPQHHTIDSLEQGISSLMERLHVMETQKKQERKVRVKSPRTQVGSEYRESWPPNSKLPHSQSSPTVSSTCTKVLYFTDRSLTPFMVNIPKRLEEVTLKDFKAAIDREGNHRYHFKALDPEFGTVKEEIFHDDDAIPGWEGKIVAWVEEDHGEN

SEQ ID NO: 904814 - protein, 596 aa, Homo sapiens
MLACLTRGNLLDVLQEGFNEQQLQAYVAWVNAQLKKRPAVKPVQDLRQDLRDGVILAYLIEIVAGEKLSGVQLSPGNQQEMKNNVEKVLQFVASKKIRMHQTSAKDIVDGNLKSIMRLVLALAAHFKPGSSRTVNQGRDSRAPLQSHRPHCATAVAQGAAAALADVCHDMSRSGRDVFRYRQRNSSMDEEIENPYWSVRALVQQYEGQQRSPSESSCSSLTSPSPIHSAKSESIITQSEEKADFVIIPAEGIENRTEGTDSPLSRDWRPGSPGTYLETSWEEQLLEQQEYLEKEMEEAKKMISGLQALLLNGSLPEDEQERPLALCEPGVNPEEQLIIIQSRLDQSMEENQDLKKELLKCKQEARNLQGIKDALQQRLTQQDTSVLQLKQELLRANMDKDELHNQNVDLQRKLDERNRLLGEYKKELGQKDRLLQQHQAKLEEALRKLSDVSYHQVDLERELEHKDVLLAHCMKREADEATNYNSHNSQSNGFLLPTAGKGATSVSNRGTSDLQLVRDALRSLRNSFSGHDPQHHTIDSLEQGISSLMERLHVMETQKKQERKVRVKSPRTQVGSEYRESWPPNSSKYPFLLSRDS

SEQ ID NO: 904815 - protein, 316 aa, Homo sapiens [sequence omitted]

SEQ ID NO: 904816 - protein, 132 aa, Homo sapiens
MELNLSHSAAPGFITDSAASSAGKKRARAEGGGGARVEIGKKRSPATSAWVITPAVGPRRRGRVGDTLTFYLGGRHPNLTVYILSFSRESCSIAGPSVSWLPCPPLHLPPKRRSVTSHMFHSGGGEREATIS

SEQ ID NO: 904817 - protein, 338 aa, Homo sapiens
MTTTLVSATIFDLSEVLCKGNKMLNYSAPSAGGCLLDRKAVGTPAGGGFPRRHSVTLPSSKFHQNQLLSSLKGEPAPALSSRDSRFRDRSFSEGGERLLPTQKQPGGGQVNSSRYKTELCRPFEENGACKYGDKCQFAHGIHELRSLTRHPKYKTELCRTFHTIGFCPYGPRCHFIHNAEERRALAGARDLSADRPRLQHSFSFAGFPSAAATAAATGLLDSPTSITPPPILSADDLLGSPTLPDGTNNPFAFSSQELASLFAPSMGLPGGGSPTTFLFRPMSESPHMFDSPPSPQDSLSDQEGYLSSSSSSHSGSDSPTLDNSRRLPIFSRLSISDD

SEQ ID NO: 904818 - protein, 338 aa, Homo sapiens; identical to SEQ ID NO: 904817

SEQ ID NO: 904819 - protein, 338 aa, Homo sapiens; identical to SEQ ID NO: 904817

SEQ ID NO: 904820 - protein, 338 aa, Homo sapiens; identical to SEQ ID NO: 904817

SEQ ID NO: 904821 - protein, 338 aa, Homo sapiens; identical to SEQ ID NO: 904817

SEQ ID NO: 904822 - protein, 338 aa, Homo sapiens; identical to SEQ ID NO: 904817

SEQ ID NO: 904823 - protein, 338 aa, Homo sapiens; identical to SEQ ID NO: 904817

SEQ ID NO: 904824 - protein, 140 aa, Homo sapiens
MTTTLVSATIFDLSEVLCKGNKMLNYSAPSAGGCLLDRKAVGTPAGGGFPRRHSVTLPSSKFHQNQLLSSLKGEPAPALSSRDSRFRDRSFSEGGERLLPTQKQPGGGQVNSSRYKTELCRPFEENGASLRILSRTRRAT

SEQ ID NO: 904825 - protein, 338 aa, Homo sapiens; identical to SEQ ID NO: 904817

SEQ ID NO: 904826 - protein, 338 aa, Homo sapiens; identical to SEQ ID NO: 904817

SEQ ID NO: 904827 - protein, 338 aa, Homo sapiens; identical to SEQ ID NO: 904817

SEQ ID NO: 904828 - protein, 132 aa, Homo sapiens; identical to SEQ ID NO: 904816

SEQ ID NO: 904829 - protein, 338 aa, Homo sapiens; identical to SEQ ID NO: 904817

SEQ ID NO: 904830 - protein, 397 aa, Homo sapiens
MNWHLPLFLLASVTLPSICSHFNPLSLEELGSNTGIQVFNQIVKSRPHDNIVISPHGIASVLGMLQLGADGRTKKQLAMVMRYGVNGVGKILKKINKAIVSKKNKDIVTVANAVFVKNASEIEVPFVTRNKDVFQCEVRNVNFEDPASACDSINAWVKNETRDMIDNLLSPDLIDGVLTRLVLVNAVYFKGLWKSRFQPENTKKRTFVAADGKSYQVPMLAQLSVFRCGSTSAPNDLWYNFIELPYHGESISMLIALPTESSTPLSAIIPHISTKTIDSWMSIMVPKRVQVILPKFTAVAQTDLKEPLKVLGITDMFDSSKANFAKITRSENLHVSHILQKAKIEVSEDGTKASAATTAILIARSSPPWFIVDRPFLFFIRHNPTGAVLFMGQINKP

SEQ ID NO: 904831 - protein, 397 aa, Homo sapiens; identical to SEQ ID NO: 904830

SEQ ID NO: 904832 - protein, 397 aa, Homo sapiens; identical to SEQ ID NO: 904830

SEQ ID NO: 904833 - protein, 397 aa, Homo sapiens; identical to SEQ ID NO: 904830

SEQ ID NO: 904834 - protein, 487 aa, Homo sapiens
GTSPGIPPATSHTPIRETHVQLGPGWRRTSGSARLPGAFRAQPHDTDPWRGGIREVAGGEGASWRPGAGTLRPAATQRRRREGGARRAGGGGGRRGGGPRGAADKAPAAAAASLRCGAARAARRLQAPPLPLSGCDPPRRRRFAASSDSPRRRDQAPAPVAAAPPSAAAPWGSSERGVGKILKKINKAIVSKKNKDIVTVANAVFVKNASEIEVPFVTRNKDVFQCEVRNVNFEDPASACDSINAWVKNETRDMIDNLLSPDLIDGVLTRLVLVNAVYFKGLWKSRFQPENTKKRTFVAADGKSYQVPMLAQLSVFRCGSTSAPNDLWYNFIELPYHGESISMLIALPTESSTPLSAIIPHISTKTIDSWMSIMVPKRVQVILPKFTAVAQTDLKEPLKVLGITDMFDSSKANFAKITRSENLHVSHILQKAKIEVSEDGTKASAATTAILIARSSPPWFIVDRPFLFFIRHNPTGAVLFMGQINKP

SEQ ID NO: 904835 - protein, 153 aa, Homo sapiens
  misc_feature (138)..(138): Xaa can be any naturally occurring amino acid
MNWHLPLFLLASVTLPSICSHFNPLSLEELGSNTGIQVFNQIVKSRPHDNIVISPHGIASVLGMLQLGADGRTKKQLAMVMRYGVNGVGKILKKINKAIVSKKNKDIVTVANAVFVKNASEIEVPFVTYGNTYFKSKXSQCVLNGCENILIYI

SEQ ID NO: 904836 - protein, 173 aa, Homo sapiens
VGLEDPMRDASINAWVKNETKDMIDNLLSPDLIDGVLTRLVLVNAVYFKGLWKSRFQPENTKKRTFVAADGKSYQVPMLAQLSVFRCGSTSAPNDLWYNFIELPYHGESISMLIALPTESSTPLSAIIPHISTKTIDSWMSIMVPKRVQVILPKFTAVAQTDLMEASRMGTEL

SEQ ID NO: 904837 - protein, 397 aa, Homo sapiens; identical to SEQ ID NO: 904830

SEQ ID NO: 904838 - protein, 345 aa, Homo sapiens
ARAERGSGGPADAAQPGDGRTKKQLAMVMRYGVNGVGKILKKINKAIVSKKNKDIVTVANAVFVKNASEIEVPFVTRNKDVFQCEVRNVNFEDPASACDSINAWVKNETRDMIDNLLSPDLIDGVLTRLVLVNAVYFKGLWKSRFQPENTKKRTFVAADGKSYQVPMLAQLSVFRCGSTSAPNDLWYNFIELPYHGESISMLIALPTESSTPLSAIIPHISTKTIDSWMSIMVPKRVQVILPKFTAVAQTDLKEPLKVLGITDMFDSSKANFAKITRSENLHVSHILQKAKIEVSEDGTKASAATTAILIARSSPPWFIVDRPFLFFIRHNPTGAVLFMGQINKP

SEQ ID NO: 904839 - protein, 111 aa, Homo sapiens
FLHFCFHARFTAVAQTDLKEPLKVLGITDMFDSSKANFAKITRSENLHVSHILQKAKIEVSEDGTKASAATTAILIARSSPPWFIVDRPFLFFIRHNPTGAVLFMGQINKP

SEQ ID NO: 904840 - protein, 232 aa, Homo sapiens
RYEPWYSPRHLTHPHPGDPRAAGPGLAPHLGVCASPRRVPGAAPRHGPLAGRHPRSRRRRGGVLEAGRGDAAARGHTKEAAGRRGKAGRGRGRQEGAGARAAPPIKPPPPRQPACAVGLPGLRGVCRRHRCLFPAVTLLAAAASLRPPTPRAAETRLPLRLRPHRPPRPPPGDPASAVVLGGRNHELASPPLPLGLCDAAFHLLPLQSSVSRGTRLQHGDPGFQSDCEVEAS

SEQ ID NO: 904841 - protein, 38 aa, Homo sapiens
MRERFFLALGFVERYNWNRRFHFFCSMSCRAWVPPEEL

SEQ ID NO: 904842 - protein, 85 aa, Homo sapiens
MRERFFLALGFVERYNWNRRLRSKGMRERFFLALGFMEWPNWNQRLRSNLKGKVRGSLELESEAAVSYDHTTAPQLWVTAQDPNA

SEQ ID NO: 904843 - protein, 202 aa, Homo sapiens
MEESMEEEEGGSYEAMMDDQNHNNWEAAVDGFRQPLPPPPPPSSIPAPAREPPGGQLLAVPAVSVDRKGPKEGLPMGPQPPPEANGVIMMLKSCDAAAAVAKAAPAPTASSTININTSTSKFLMNVITIEDYKSTYWPKLDGAIDQLLTQSPGDYIPISYEQIYSCVYKCVCQQHSEQMYSDLIKKITNHLERVSKELQVKN

SEQ ID NO: 904844 - protein, 176 aa, Homo sapiens
MEESMEEEEGGSYEAMMDDQNHNNWEAAVDGFRQPLPPPPPPSSIPAPAREPPGGQLLAVPAVSVDRKGPKEGLPMGPQPPPEANGVIMMLKSCDAAAAVAKAAPAPTASSTININTSTSKFLMNVITIEDYKSTYWPKLDGAIDQLLTQSPGDYIPISYEQIYRYKTVHAGWLSG

SEQ ID NO: 904845 - protein, 325 aa, Homo sapiens
MEESMEEEEGGSYEAMMDDQNHNNWEAAVDGFRQPLPPPPPPSSIPAPAREPPGGQLLAVPAVSVDRKGPKEGLPMGPQPPPEANGVIMMLKSCDAAAAVAKAAPAPTASSTININTSTSKFLMNVITIEDYKSTYWPKLDGAIDQLLTQSPGDYIPISYEQIYSCVYKCVCQQHSEQMYSDLIKKITNHLERVSKELQASPPDLYIERFNIALGQYMGALQSIVPLFIYMNKFYIETKLNRDLKDDLIKLFTEHVAEKHIYSLMPLLLEAQSTPFQVTPSTMANIVKGLYTLRPGKHFSFLLGLELFVTAFSKRAVVLYVFCEA

SEQ ID NO: 904846 - protein, 215 aa, Homo sapiens
MSACCIRLFYRVGGGEGGEQHSEQMYSDLIKKITNHLERVSKELQASPPDLYIERFNIALGQYMGALQSIVPLFIYMNKFYIETKLNRDLKDDLIKLFTEHVAEKHIYSLMPLLLEAQSTPFQVTPSTMANIVKGLYTLRPEWVQMAPTLFSKFIPNILPPAVESELSEYAAQDQKFQRELIQNGFTRGDQSRKRAGDELAYNSSSACASSRGYR

SEQ ID NO: 904847 - protein, 176 aa, Homo sapiens; identical to SEQ ID NO: 904844

SEQ ID NO: 904848 - protein, 103 aa, Homo sapiens
AAAAVAKAAPAPTASSTININTSTSKFCESSLSLQPWLFSTSLGRRIHPLLEKAPLPLFQASVFPLLPVRLRLPASFPLTVPSPSFGVCGQRLSGPGFLYYLA

SEQ ID NO: 904849 - protein, 369 aa, Homo sapiens
MEESMEEEEGGSYEAMMDDQNHNNWEAAVDGFRQPLPPPPPPSSIPAPAREPPGGQLLAVPAVSVDRKGPKEGLPMGPQPPPEANGVIMMLKSCDAAAAVAKAAPAPTASSTININTSTSKFLMNVITIEDYKSTYWPKLDGAIDQLLTQSPGDYIPISYEQIYSCVYKCVCQQHSEQMYSDLIKKITNHLERVSKELQASPPDLYIERFNIALGQYMGALQSIVPLFIYMNKFYIETKLNRDLKDDLIKLFTEHVAEKHIYSLMPLLLEAQSTPFQVTPSTMANIVKGLYTLRPEWVQMAPTLFSKFIPNILPPAVESELSEYAAQDQKFQRELIQNGFTRGDQSRKRAGDELAYNSSSACASSRGYR

SEQ ID NO: 904850 - protein, 176 aa, Homo sapiens; identical to SEQ ID NO: 904844

SEQ ID NO: 904851 - protein, 130 aa, Homo sapiens
MEESMEEEEGGSYEAMMDDQNHNNWEAAVDGFRQPLPPPPPPSSIPAPAREPPGGQLLAVPAVSVDRKGPKEGLPMGPQPPPEANGVIMMLKSCDAAAAVAKAAPAPTASSTININTSTSKFCQPSRSLY

SEQ ID NO: 904852 - protein, 255 aa, Homo sapiens
MEESMEEEEGGSYEAMMDDQNHNNWEAAVDGFRQPLPPPPPPSSIPAPAREPPGGQLLAVPAVSVDRKGPKEGLPMGPQPPPEANGVIMMLKSCDAAAAVAKAAPAPTASSTININTSTSKFLMNVITIEDYKSTYWPKLDGAIDQLLTQSPGDYIPISYEQIYSCVYKCVCQQHSEQMYSDLIKKITNHLERVSKELQASPPDLYIERFNIALGQYMGALQSIVPLFIYMVSKSSFLLPKYLGVLLRAQIDAES

SEQ ID NO: 904853 - protein, 420 aa, Homo sapiens
MAGPAFGATHFLPLHPSQVMAQLIKAHMTPKKNKKNPRLVLSVEIARPLGRAGAPVGGRGAPGSLLDWRHEPPTGVVGLGSPFGGLGLCAHRLVWPCVTRAAQAATLVKLLVAKILCMVGVFFFMLLGSLLPVKIIETDFEKAHRSKKILSLCNTFGGGVFLATCFNALLPAVREKLQKVLSLGHISTDYPLAETILLLGFFMTVFLEQLILTFRKEKPSFIDLETFNAGSDVGSDSEYESPFMGGARGHALYVEPHGHGPSLSVQGLSRASPVRLLSLAFALSAHSVFEGLALGLQEEGEKVVSLFVGVAVHETLVAVALGISMARSAMPLRDAAKLAVTVSAMIPLGIGLGLGIESAQGVPGSVASVLLQGLAGGTFLFITFLEILAKELEEKSDRLLKVLFLVLGYTVLAGMVFLKW

SEQ ID NO: 904854 - protein, 75 aa, Homo sapiens
TRPPTRRGTRGSTHASGKMAEVEQKKKRTFRKFTYRGVDLDQLLDMSYEQLMQLYSARQRRRLEPGPAAEAALPC

SEQ ID NO: 904855 - protein, 70 aa, Homo sapiens
NVRLYWSESLDVKMAEVEQKKKRTFRKFTYRGVDLDQLLDMSYEQLMQLYSARQRRRLEPGPAAEAALPC

SEQ ID NO: 904856 - protein, 70 aa, Homo sapiens
EASRGWGESDEGKMAEVEQKKKRTFRKFTYRGVDLDQLLDMSYEQLMQLYSARQRRRLEPGPAAEAALPC

SEQ ID NO: 904857 - protein, 43 aa, Homo sapiens
MWRWFYNVRELALVLPSLFALRTSPFADGVIPRGPTVGFPSCP

SEQ ID NO: 904858 - protein, 351 aa, Homo sapiens
MSLQLVWWGSVAHSGDLGCAPTDWFGPAVTRAAQAATLVKLLVAKILCMVGVFFFMLLGSLLPVKIIETDFEKAHRSKKILSLCNTFGGGVFLATCFNALLPAVREKLQKVLSLGHISTDYPLAETILLLGFFMTVFLEQLILTFRKEKPSFIDLETFNAGSDVGSDSEYESPFMGGARGHALYVEPHGHGPSLSVQGLSRASPVRLLSLAFALSAHSVFEGLALGLQEEGEKVVSLFVGVAVHETLVAVALGISMARSAMPLRDAAKLAVTVSAMIPLGIGLGLGIESAQGVPGSVASVLLQGLAGGTFLFITFLEILAKELEEKSDRLLKVLFLVLGYTVLAGMVFLKW

SEQ ID NO: 904859 - protein, 47 aa, Homo sapiens
MGNAPTTGAGQHWRTTLHEYTLGASQFQCIVANPGIFAENCPRTVEI

SEQ ID NO: 904860 - protein, 76 aa, Homo sapiens
RRHHFRLLHGRRSFLALLQALQPEVVKTHLRDMIILPEMVGSMVGVYNGKTFNQVEIKPEMIGHYLGRVLHHLTSP

SEQ ID NO: 904861 - protein, 74 aa, Homo sapiens
  misc_feature (14)..(14): Xaa can be any naturally occurring amino acid
  misc_feature (17)..(17): Xaa can be any naturally occurring amino acid
FKTPFYYYYYYYYXAAXKTTEGALLRIRQDGRSRAEEEADLPQVHLPRRGPRPAAGHVLRAADAAVQCAPAAAA

SEQ ID NO: 904862 - protein, 103 aa, Homo sapiens
MLCKVFFVRNSRFFEEMTTNFGFLLLCENIRPQQHVIVEGKIKVRKMAEVEQKKKRTFRKFTYRGVDLDQLLDMSYEQLMQLYSARQRRRLEPGPAAEAALPC

SEQ ID NO: 904863 - protein, 47 aa, Homo sapiens; identical to SEQ ID NO: 904859

SEQ ID NO: 904864 - protein, 71 aa, Homo sapiens
RKRGNQARNEAGCEMAEVEQKKKRTFRKFTYRGVDLDQLLDMSYEQLMQLYSARQRRRLEPGPAAEAALPC

SEQ ID NO: 904865 - protein, 47 aa, Homo sapiens; identical to SEQ ID NO: 904859

SEQ ID NO: 904866 - protein, 82 aa, Homo sapiens
RSNIRMVSSTPLLKRLRKAKKEAPPMEKPEVVKTHLRDMIILPEMVGSMVGVYNGKTFNQVEIKPEMIGHYLGRVLHHLTSP

SEQ ID NO: 904867 - protein, 109 aa, Homo sapiens
MEKPEVVKTHLRDMIILPEMVGSMVGVYNGKTFNQVEIKVCAAVPAGWGGLGSLMQAGSADTQLCSWSPAARDDRPLPGASSPSPYKPVKQWPARHSGPPTSSRFIPLK

SEQ ID NO: 904868 - protein, 176 aa, Homo sapiens
MEKPEVVKTHLRDMIILPEMVGSMVGVYNGKTITLQARKAMAGPAFGATHFLPLHPSQVMAQLIKAHMTPVLCAACSSWRPELWEGPGPASGSWCEEVQVGRSGVCGSVVWMVSWCRRLTAVRALPQLGCPCSCLQGQLWSWVPKPRCVAPSLLAPSAFLTSGQLPGLTLSSGYLT

SEQ ID NO: 904869 - protein, 138 aa, Homo sapiens
AGLIGRGDGRSRAEEEADLPQVHLPRRGPRPAAGHVLVGLELLGSSDPPASTSRSAGITGGSHCALPAFPCVFRGLWPELYAAAPCLRLWSPGRLFSLNLCSHTVALACEGEQLMQLYSARQRRRLEPGPAAEAALPC

SEQ ID NO: 904870 - protein, 66 aa, Homo sapiens
TLGKVRGWVWAEVEQKKKRTFRKFTYRGVDLDQLLDMSYEQLMQLYSARQRRRLEPGPAAEAALPC

SEQ ID NO: 904871 - protein, 73 aa, Homo sapiens
SHLKQLTPLVRIRHEEMAEVEQKKKRTFRKFTYRGVDLDQLLDMSYEQLMQLYSARQRRRLEPGPAAEAALPC

SEQ ID NO: 904872 - protein, 67 aa, Homo sapiens
GWYGRKFWIKMAEVEQKKKRTFRKFTYRGVDLDQLLDMSYEQLMQLYSARQRRRLEPGPAAEAALPC

SEQ ID NO: 904873 - protein, 73 aa, Homo sapiens; identical to SEQ ID NO: 904871

SEQ ID NO: 904874 - protein, 79 aa, Homo sapiens
  misc_feature (15)..(16): Xaa can be any naturally occurring amino acid
DMSYEQLMQLYSVPXXAAEAPPMEKPEVVKTHLRDMIILPEMVGSMVGVYNGKTFNQVEIKPEMIGHYLGRVLHHLTSP

SEQ ID NO: 904875 - protein, 109 aa, Homo sapiens
  misc_feature (22)..(22): Xaa can be any naturally occurring amino acid
DLGLSLFTLPCISRVNLLKKRXLIGHGSAGLYRKHSSICFWGGPQGASSHTLRAEVEQKKKRTFRKFTYRGVDLDQLLDMSYEQLMQLYSARQRRRLEPGPAAEAALPC

SEQ ID NO: 904876 - protein, 109 aa, Homo sapiens; identical to SEQ ID NO: 904875
  misc_feature (22)..(22): Xaa can be any naturally occurring amino acid

SEQ ID NO: 904877 - protein, 136 aa, Homo sapiens
MAGPAFGATHFLPLHPSQVMAQLIKAHMTPVLCAACSSWRPELWEGPGPASGSWCEEVQVGRSGVCGSVVWMVSWCRRLTAVRALPQLGCPCSCLQGQLWSWVPKPRCVAPSLLAPSAFLTSGQLPGLTLSSGYLT

SEQ ID NO: 904878 - protein, 47 aa, Homo sapiens; identical to SEQ ID NO: 904859

SEQ ID NO: 904879 - protein, 109 aa, Homo sapiens; identical to SEQ ID NO: 904867

SEQ ID NO: 904880 - protein, 152 aa, Homo sapiens
MEKPEVVKTHLRDMIILPEMVGSMVGVYNGKTFNQVEIKPEIDSATTLGEFSNSTLTKRPPGVKKKANLGPGPPGNRGPTPTSFPRFIPLLPKRVLKLGGGVSQGAFALQEGAGDLIEPSPKRRHNTKKNKICPKGRHLYHVVAGRWTGERQ

SEQ ID NO: 904881 - protein, 74 aa, Homo sapiens; identical to SEQ ID NO: 904861
  misc_feature (14)..(14): Xaa can be any naturally occurring amino acid
  misc_feature (17)..(17): Xaa can be any naturally occurring amino acid

SEQ ID NO: 904882 - protein, 70 aa, Homo sapiens
WCGSGYGEGSGGEGVSDRVGEALGKAGPRGAAARGDRSHSSRRRRQQSAHCLQQINIKIGSLCLLLDIGN

SEQ ID NO: 904883 - protein, 490 aa, Homo sapiens
MATEFIKSCCGGCFYGETEKHNFSVERDFKAAVPNSQNATISVPPLTSVSVKPQLGCTEDYLLSKLPSDGKEVPFVVPKFKLSYIQPRTQETPSHLEELEGSARASFGDRKVELSSSSQHGPSYDVYNPFYMYQHISPDLSRRFPPRSEVTRLYGSVCDLRTNKLPGSPGLSKSMFDLTNSSQRFIQRHDSLSSVPSSSSSRKNSQGSNRSLDTITLSGDERDFGRLNVKLFYNSSVEQIWITVLQCRDLSWPSSYGDTPTVSIKGILTLPKPVHFKSSAKEGSNAIEFMETFVFAIKLQNLQTVRLVFKIQTQTPRKKTIGECSMSLRTLSTQEMDYSLDITPPSKISVCHAELELGTCFQAVNSRIQLQILEARYLPSSSTPLTLSFFVKVGMFSSGELIYKKKTRLLKASNGRVKWGETMIFPLIQSEKEIVFLIKLYSRSSVRRKHFVGQIWISEDSNNIEAVNQWKETVINPEKVVIRWHKLNPS

SEQ ID NO: 904884 - protein, 484 aa, Homo sapiens
MATEFIKSCCGGCFYGETEKHNFSVERDFKAAVPNSQNATISVPPLTSVSVKPQLGCTEDYLLSKLPSDGKEVPFVVPKFKLSYIQPRTQETPSHLEELEGSARASFGDRKVELSSSSQHGPSYDVYNPFYMYQHISPDLSRRFPPRSEVTRLYGSVCDLRTNKLPGSPGLSKSMFDLTNSSQRFIQRHDSLSSVPSSSSSRKNSQGSNRSLGDERDFGRLNVKLFYNSSVEQIWITVLQCRDLSWPSSYGDTPTVSIKGILTLPKPVHFKSSAKEGSNAIEFMETFVFAIKLQNLQTVRLVFKIQTQTPRKKTIGECSMSLRTLSTQEMDYSLDITPPSKISVCHAELELGTCFQAVNSRIQLQILEARYLPSSSTPLTLSFFVKVGMFSSGELIYKKKTRLLKASNGRVKWGETMIFPLIQSEKEIVFLIKLYSRSSVRRKHFVGQIWISEDSNNIEAVNQWKETVINPEKVVIRWHKLNPS

SEQ ID NO: 904885 - protein, 490 aa, Homo sapiens; identical to SEQ ID NO: 904883

SEQ ID NO: 904886 - protein, 103 aa, Homo sapiens [sequence omitted]

SEQ ID NO: 904887 - protein, 138 aa, Homo sapiens
MESPLIYVSVLLLNIFEFSSGIVYNKDDTEKRFACSNKGFPQENEIIKLYLFLENLKIQCFFQTENEIASKAMLSVFTSGGLAPSLGIMNSTYNGIFHFNLTLFSDRILWLVDIPRENITQSTDIAAVEEWLVRITLH

SEQ ID NO: 904888 - protein, 490 aa, Homo sapiens; identical to SEQ ID NO: 904883

SEQ ID NO: 904889 - protein, 276 aa, Homo sapiens
LVLEVSIAPSLEVSIVLVLEVSIAQIWITVLQCRDLSWPSSYGDTPTVSIKGILTLPKPVHFKSSAKEGSNAIEFMETFVFAIKLQNLQTVRLVFKIQTQTPRKKTIGECSMSLRTLSTQEMDYSLDITPPSKISVCHAELELGTCFQAVNSRIQLQILEARYLPSSSTPLTLSFFVKVGMFSSGELIYKKKTRLLKASNGRVKWGETMIFPLIQSEKEIVFLIKLYSRSSVRRKHFVGQIWISEDSNNIEAVNQWKETVINPEKVVIRWHKLNPS

SEQ ID NO: 904890 - protein, 70 aa, Homo sapiens; identical to SEQ ID NO: 904882

SEQ ID NO: 904891 - protein, 701 aa, Homo sapiens
VKVMVDSGDRKRAISSVCTYIVYQCSRPAPLHSRDLHSMIVAAFQCLCVWLTEHPDMLDEKDCLKEVLEIVELGISGSKSKNNEQEVKYKGDKEPNPASMRVKDAAEATLTCIMQLLGAFPSPSGPASPCSLVNETTLIKYSRLPTINKHSFRYFVLDNSVILAMLEQPLGNEQNDFFPSVTVLVRGMSGRLAWAQQLCLLPRGAKANQKLFVPEPRPVPKNDVGFKYSVKHRPFPEEVDKIPFVKADLSIPDLHEIVTEELEERHEKLRSGMAQQIAYEIHLEQQSEEELQKRSFPDPVTDCKPPPPAQEFQTARLFLSHFGFLSLEALKEPANSRLPPHLIALDSTIPGFFDDIGYLDLLPCRPFDTVFIFYMKPGQKTNQEILKNVESSRTVQPHFLEFLLSLGWSVDVGRHPGWTGHVSTSWSINCCDDGEGSQQEVISSEDIGASIFNGQKKVLYYADALTEIAFVVPSPVESLTDSLESNISDQDSDSNMDLMPGILKQPSLTLELFPNHTDNLNSSQRLSPSSRMRKLPQGRPVPPLGPETRVSVVWVERYDDIENFPLSELMTEISTGVETTANSSTSLRSTTLEKEVPVIFIHPLNTGLFRIKIQGATGKFNMVIPLVDGMIVSRRALGFLVRQTVINICRRKRLESDSYSPPHVRRKQKITDIVNKYRNKQLEPEFYTSLFQEVGLKNCSS

SEQ ID NO: 904892 - protein, 215 aa, Homo sapiens
ENRCPLLAAASVVEFILKQPSLTLELFPNHTDNLNSSQRLSPSSRMRKLPQGRPVPPLGPETRVSVVWVERYDDIENFPLSELMTEISTGVETTANSSTSLRSTTLEKEVPVIFIHPLNTGLFRIKIQGATGKFNMVIPLVDGMIVSRRALGFLVRQTVINICRRKRLESDSYSPPHVRRKQKITDIVNKYRNKQLEPEFYTSLFQEVGLKNCSS

SEQ ID NO: 904893 - protein, 701 aa, Homo sapiens; identical to SEQ ID NO: 904891

SEQ ID NO: 904894 - protein, 701 aa, Homo sapiens; identical to SEQ ID NO: 904891

SEQ ID NO: 904895 - protein, 701 aa, Homo sapiens; identical to SEQ ID NO: 904891

SEQ ID NO: 904896 - protein, 261 aa, Homo sapiens
VKVMVDSGDRKRAISSVCTYIVYQCSRPAPLHSRDLHSMIVAAFQCLCVWLTEHPDMLDEKDCLKEVLEIVELGISGSKSKNNEQEVKYKGDKEPNPASMRVKDAAEATLTCIMQLLGAFPSPSGPASPCSLVNETTLIKYSRLPTINKHSFRYFVLDNSVILAMLEQPLGNEQNDFFPSVTVLVRGMSGRLAWAQQLCLLPRGAKANQKLFVPEPRPVPKNDVGFKYSVKHRPFPEEVDKIPFVKADLSIPDLHEIVTEE

SEQ ID NO: 904897 - protein, 701 aa, Homo sapiens; identical to SEQ ID NO: 904891

SEQ ID NO: 904898 - protein, 261 aa, Homo sapiens; identical to SEQ ID NO: 904896

SEQ ID NO: 904899 - protein, 701 aa, Homo sapiens; identical to SEQ ID NO: 904891

SEQ ID NO: 904900 - protein, 701 aa, Homo sapiens; identical to SEQ ID NO: 904891

SEQ ID NO: 904901 - protein, 91 aa, Homo sapiens
MAANATTNPSQLLPLELVDKCIGSRIHIVMKSDKEIVGTLLGFDDFVNMVLEDVTEFEITPEGRRITKLDQILLNGNNITMLVPGGEGPEV

SEQ ID NO: 904902 - protein, 91 aa, Homo sapiens; identical to SEQ ID NO: 904901

SEQ ID NO: 904903 - protein, 78 aa, Homo sapiens
LLVLFGYVLCLLVWFSFRACVLFCASFSVSRSGMVALLVLSVFSVSLVCCSSVHTAVLVVASFVLFLSLLAPLVVWVL

SEQ ID NO: 904904 - protein, 91 aa, Homo sapiens; identical to SEQ ID NO: 904901

SEQ ID NO: 904905 - protein, 94 aa, Homo sapiens
YVTRAAGLAEPVVSAGPGELVDKCIGSRIHIVMKSDKEIVGTLLGFDDFVNMVLEDVTEFEITPEGRRITKLDQILLNGNNITMLVPGGEGPEV

SEQ ID NO: 904906 - protein, 94 aa, Homo sapiens; identical to SEQ ID NO: 904905

SEQ ID NO: 904907 - protein, 78 aa, Homo sapiens; identical to SEQ ID NO: 904903

SEQ ID NO: 904908 - protein, 91 aa, Homo sapiens; identical to SEQ ID NO: 904901

SEQ ID NO: 904909 - protein, 78 aa, Homo sapiens; identical to SEQ ID NO: 904903

SEQ ID NO: 904910 - protein, 94 aa, Homo sapiens; identical to SEQ ID NO: 904905

SEQ ID NO: 904911 - protein, 101 aa, Homo sapiens
TVSLFLLLILFLFAATTNPSQLLPLELVDKCIGSRIHIVMKSDKEIVGTLLGFDDFVNMVLEDVTEFEITPEGRRITKLDQILLNGNNITMLVPGGEGPEV

SEQ ID NO: 904912 - protein, 101 aa, Homo sapiens; identical to SEQ ID NO: 904911

SEQ ID NO: 904913 - protein, 91 aa, Homo sapiens; identical to SEQ ID NO: 904901

SEQ ID NO: 904914 - protein, 91 aa, Homo sapiens; identical to SEQ ID NO: 904901

SEQ ID NO: 904915 - protein, 102 aa, Homo sapiens
SGKRVEEEREEEEGGGGAVAEEQEQEGDGEEKVLGGMALLLLQALPSPLSARAEPPQDKEACVGTNNQSYICDTGHCCGQSQCQHPATWQSNQGRGEPREKH

SEQ ID NO: 904916 - protein, 390 aa, Homo sapiens
SGKRVEEEREEEEGGGGAVAEEQEQEGDGEEKVLGGMALLLLQALPSPLSARAEPPQDKEACVGTNNQSYICDTGHCCGQSQCCNYYYELWWFWLVWTIIIILSCCCVCHHRRAKHRLQAQQRQHEINLIAYREAHNYSALPFYFRFLPNYLLPPYEEVVNRPPTPPPPYSAFQLQQQQLLPPQCGPAGGSPPGIDPTRGSQGAQSSPLSEPSRSSTRPPSIADPDPSDLPVDRAATKAPGMEPSGSVAGLGELDPGAFLDKDAECREELLKDDSSEHGAPDSKEKTPGRHRRFTGDSGIEVCVCNRGHHDDDLKEFNTLIDDALDGPLDFCDSCHVRPPGDEEEGLCQPSEEQAREPGHPHLPRPPACLLLNTINEQDSPNSQSSSSPS

SEQ ID NO: 904917 - protein, 390 aa, Homo sapiens; identical to SEQ ID NO: 904916

SEQ ID NO: 904918 - protein, 390 aa, Homo sapiens; identical to SEQ ID NO: 904916

SEQ ID NO: 904919 - protein, 115 aa, Homo sapiens
LVGAGSGGRGGAWGLGPGARAWGAGGRPLPTPGAPRPAARLTEGQGALFCAAGGLLGGGPLEEAKTARGVRPLKSPASPARPACGGCGGYTAGRAGAFRLPVFKVETSRTSLLDV

SEQ ID NO: 904920 - protein, 386 aa, Homo sapiens
MADHSFSDGVPSDSVEAAKNASNTEKLTDQVMQNPRVLAALQERLDNVPHTPSSYIETLPKAVKRRINALKQLQVRCAHIEAKFYEEVHDLERKYAALYQPLFDKRREFITGDVEPTDAESEWHSENEEEEKLAGDMKSKVVVTEKAAATAEEPDPKGIPEFWFTIFRNVDMLSELVQEYDEPILKHLQDIKVKFSDPGQPMSFVLEFHFEPNDYFTNSVLTKTYKMKSEPDKADPFSFEGPEIVDCDGCTIDWKKGKNVTVKTIKKKQKHKGRGTVRTITKQVPNESFFNFFNPLKASGDGESLDEDSEFTLASDFEIGHFFRERIVPRAVLYFTGEAIEDDDNFEEGEEGEEEELEGDEEGEDEDDAEINPKKEPSQPAECKQQ

SEQ ID NO: 904921 - protein, 386 aa, Homo sapiens; identical to SEQ ID NO: 904920

SEQ ID NO: 904922 - protein, 386 aa, Homo sapiens; identical to SEQ ID NO: 904920

SEQ ID NO: 904923 - protein, 386 aa, Homo sapiens; identical to SEQ ID NO: 904920

SEQ ID NO: 904924 - protein, 362 aa, Homo sapiens
MADHSFSDGVPSDSVEAAKNASNTEKLTDQVMQNPRVLAALQERLDNVPHTPSSYIETLPKAVKRRINALKQLQVRCAHIEAKFYEEVHDLERKYAALYQPLFDKRREFITGDVEPTDAESEWHSENEEEEKLAGDMKSKVVVTEKAAATAEEPDPKGIPEFWFTIFRNVDMLSELVQSFVLEFHFEPNDYFTNSVLTKTYKMKSEPDKADPFSFEGPEIVDCDGCTIDWKKGKNVTVKTIKKKQKHKGRGTVRTITKQVPNESFFNFFNPLKASGDGESLDEDSEFTLASDFEIGHFFRERIVPRAVLYFTGEAIEDDDNFEEGEEGEEEELEGDEEGEDEDDAEINPKKEPSQPAECKQQ

SEQ ID NO: 904925 - protein, 362 aa, Homo sapiens; identical to SEQ ID NO: 904924

SEQ ID NO: 904926 - protein, 386 aa, Homo sapiens; identical to SEQ ID NO: 904920

SEQ ID NO: 904927 - protein, 107 aa, Homo sapiens [sequence omitted]

SEQ ID NO: 904928 - protein, 346 aa, Homo sapiens [sequence omitted]

SEQ ID NO: 904929 - protein, 429 aa, Homo sapiens
MADHSFSDGVPSDSVEAAKNASNTEKLTDQVMQNPRVLAALQERLDNVPHTPSSYIETLPKAVKRRINALKQLQVRCAHIEAKFYEEVHDLERKYAALYQPLFDKRREFITGDVEPTDAESEWHSENEEEEKLAGDMKSKVVVTEKAAATAEEPDPKGIPEFWFTIFRNVDMLSELVQEYDEPILKHLQDIKVKFSDPGQPMSFVLEFHFEPNDYFTNSVLTKTYKMKSEPDKADPFSFEGPEIVDCDGCTIDWKKGKNVTVKTIKKKQKHKGRGTVRTITKQVPNESFFNFFNPLKASGDGESLFPKAVKRRINALKQLQVRCAHIEAKFYEEVHDLERKYAVPFRFRICWFNIAGDKFSSRAEFGTRGSGTGHGQVATPDPWLFTAGCLRTFLTLAVCFVCTLFFSLGLVFFFHLEIAFPDRRTQVV

SEQ ID NO: 904930 - protein, 306 aa, Homo sapiens
MADHSFSDGVPSDSVEAAKNASNTEKLTDQVMQNPRVLAALQERLDNVPHTPSSYIETLPKAVKRRINALKQLQVRCAHIEAKFYEEVHDLERKYAALYQPLFDKRREFITGDVEPTDAESEWHSENEEEEKLAGDMKSKVVVTEKAAATAEEPDPKGIPEFWFTIFRNVDMLSELVQEYDEPILKHLQDIKVKFSDPGQPMSFVLEFHFEPNDYFTNSVLTKTYKMKSEPDKADPFSFEGPEIVDCDGCTIDWKKGKNVTVKTIKKKQKHKGRGTVRTITKQVPNESFFNFFNPLKASGDGESLG

SEQ ID NO: 904931 - protein, 344 aa, Homo sapiens
MADHSFSDGVPSDSVEAAKNASNTEKLTDQVMQNPRVLAALQERLDNVPHTPSSYIETLPKAVKRRINALKQLQVRCAHIEAKFYEEVHDLERKYAALYQPLFDKRREFITGDVEPTDAESEWHSENEEEEKLAGDMKSKVVVTEKAAATAEEPDPKGIPEFWFTIFRNVDMLSELVQEYDEPILKHLQDIKVKFSDPGQPMSFVLEFHFEPNDYFTNSVLTKTYKMKSEPDKADPFSFEGPEIVDCDGCTIDWKKGKNVTVKTIKKKQKHKGRGTVRTITKQVPNESFFNFFNPLKASGDGESLVRFVVNSLIFLLKSLLSECLLVYLLKKVQSWLCVDWVCQ

SEQ ID NO: 904932 - protein, 375 aa, Homo sapiens
MADHSFSDGVPSDSVEAAKNASNTEKLTDQVMQNPRVLAALQERLDNVPHTPSSYIETLPKAVKRRINALKQLQVRCAHIEAKFYEEVHDLERKYAALYQPLFDKRREFITGDVEPTDAESEWHSENEEEEKLAGDMKSKVVVTEKAAATAEEPDPKGIPEFWFTIFRNVDMLSELVQEYDEPILKHLQDIKVKFSDPGQPMSFVLEFHFEPNDYFTNSVLTKTYKMKSEPDKADPFSFEGPEIVDCDGCTIDWKKGKNVTVKTIKKKQKHKGRGTVRTITKQVPNESFFNFFNPLKASGDGESLDEDSEFTLASDFEIGHFFRERIVPRAVLYFTGEAIEDDDNFEEGEEGEEEELEGDEEGEDEDDAEINPKV

SEQ ID NO: 904933 - protein, 76 aa, Homo sapiens
LIEDSQVTTQRNERSEWSFFNFFNPLKASGDGESLDEDSEFTLASDFEIGHFFRERIVPRAVLYFTGEAIEDDDNV

SEQ ID NO: 904934 - protein, 386 aa, Homo sapiens; identical to SEQ ID NO: 904920

SEQ ID NO: 904935 - protein, 386 aa, Homo sapiens; identical to SEQ ID NO: 904920

SEQ ID NO: 904936 - protein, 377 aa, Homo sapiens
MADHSFSDGVPSDSVEAAKNASNTEKLTDQVMQNPRVLAALQERLDNVPHTPSSYIETLPKAVKRRINALKQLQVRCAHIEAKFYEEVHDLERKYAALYQPLFDKRREFITGDVEPTDAESEWHSENEEEEKLAGDMKSKVVVTEKAAATAEEPDPKGIPEFWFTIFRNVDMLSELVQEYDEPILKHLQDIKVKFSDPGQPMSFVLEFHFEPNDYFTNSVLTKTYKMKSEPDKADPFSFEGPEIVDCDGCTIDWKKGKNVTVKTIKKKQKHKGRGTVRTITKQVPNESFFNFFNPLKASGDGESLDEDSEFTLASDFEIGHFFRERIVPRAVLYFTGEAIEDDDNFEEGEEGEEEELEGDEEGEDEDDAEINPKTPQ

SEQ ID NO: 904937 - protein, 398 aa, Homo sapiens
MADHSFSDGVPSDSVEAAKNASNTEKLTDQVMQNPRVLAALQERLDNVPHTPSSYIETHEDVVFLTPFFSLPKAVKRRINALKQLQVRCAHIEAKFYEEVHDLERKYAALYQPLFDKRREFITGDVEPTDAESEWHSENEEEEKLAGDMKSKVVVTEKAAATAEEPDPKGIPEFWFTIFRNVDMLSELVQEYDEPILKHLQDIKVKFSDPGQPMSFVLEFHFEPNDYFTNSVLTKTYKMKSEPDKADPFSFEGPEIVDCDGCTIDWKKGKNVTVKTIKKKQKHKGRGTVRTITKQVPNESFFNFFNPLKASGDGESLDEDSEFTLASDFEIGHFFRERIVPRAVLYFTGEAIEDDDNFEEGEEGEEEELEGDEEGEDEDDAEINPKKEPSQPAECKQQ

SEQ ID NO: 904938 - protein, 116 aa, Homo sapiens
LIEDSQVTTQRNERSEWSFFNFFNPLKASGDGESLDEDSEFTLASDFEIGHFFRERIVPRAVLYFTGEAIEDDDNFEEGEEGEEEELEGDEEGEDEDDAEINPKKEPSQPAECKQQ

SEQ ID NO: 904939 - protein, 107 aa, Homo sapiens [sequence omitted]

SEQ ID NO: 904940 - protein, 360 aa, Homo sapiens
MADHSFSDGVPSDSVEAAKNASNTEKLTDQVMQNPRVLAALQERLDNVPHTPSSYIETLPKAVKRRINALKQLQVRCAHIEAKFYEEVHDLERKYAALYQPLFDKRREFITGDVEPTDAESEWHSENEEEEKLAGDMKSKVVVTEKAAATAEEPDPKGIPEFWFTIFRNVDMLSELVQEYDEPILKHLQDIKVKFSDPGQPMSFVLEFHFEPNDYFTNSVLTKTYKMKSEPDKADPFSFEGPEIVDCDGCTIDWKKGKNVTVKTIKKKQKHKGRGTVRTITKQVPNESFFNFFNPLKASGDGESLDEDSEFTLASDFEIGHFFRERIVPRAVLYFTGEAIEDDDNFEEGDSVQSKPEPPG

SEQ ID NO: 904941 - protein, 303 aa, Homo sapiens
MADHSFSDGVPSDSVEAAKNASNTEKLTDQVMQNPRVLAALQERLDNVPHTPSSYIETLPKAVKRRINALKQLQVRCAHIEAKFYEEVHDLERKYAALYQPLFDKRREFITGDVEPTDAESEWHSENEEEEKLAGDMKSKVVVTEKAAATAEEPDPKGIPEFWFTIFRNVDMLSELVQEYDEPILKHLQDIKVKFSDPGQPMSFVLEFHFEPNDYFTNSVLTKTYKMKSEPDKADPFSFEGPEIVDCDGCTIDWKKGKNVTVKTIKKKQKHKGRGTVRTITKQVPNESFFNFFNPLKGKSVGC

SEQ ID NO: 904942 - protein, 604 aa, Homo sapiens
MADHSFSDGVPSDSVEAAKNASNTEKLTDQVMQNPRVLAALQERLDNVPHTPSSYIETLPKAVKRRINALKQLQVRCAHIEAKFYEEVHDLERKYAALYQPLFDKRREFITGDVEPTDAESEWHSENEEEEKLAGDMKSKVVVTEKAAATAEEPDPKGIPEFWFTIFRNVDMLSELVQEYDEPILKHLQDIKVKFSDPGQPMSFVLEFHFEPNDYFTNSVLTKTYKMKSEPDKADPFSFEGPEIVDCDGVYYGLEKRTNVPVQPSEKPNLWSSLVTLATVPRSLHLNLKRGKHGEIILPLKKPHRNPDACGRTKKKEHTKCENPKCDGVKLYSMTKAKNTTDTTTSHRSHDSNNPPTHNTTNNNKQMLTTTPPHTPHNQTTRRTKGRAQGTRSRQPARRTAAAHEEEKKTRADDRHSNSEQKERRRREEGSTGKKKRGRTEDREEEKRGRTRGGKGRPGRRRTHRTRRRSPTSKETPADERAGAPTTPRRTTTQSHNRRPSETTQDKHNQGEAAATKQRGKEEKRRERGERRARRNRQAKRARRTKKRRGTDTRTHGREAREQTRERHERAKKTTRGTEESRNENKAGRGKTTRPGQTKEQRGQ

SEQ ID NO: 904943 - protein, 296 aa, Homo sapiens [sequence omitted]

SEQ ID NO: 904944 - protein, 296 aa, Homo sapiens [sequence omitted]

SEQ ID NO: 904945 - protein, 230 aa, Homo sapiens
VLTGSYLYPDPNLKYGFNEGHSFRRQYKPLSLNRLQYLIDLGRVDPSQPIDLTQLVNGRGVTIQPLKRDYGVQLVEEGADTFTAKVNIEVQLASELAIAAIEKNGGVVTTAFYDPRSLDIVCKPVPFFLRGQPIPKRMLPPEELVPYYTDAKNRGYLADPAKFPEARLELARKYGYILPDITKDELFKMLCTRKDPRQIFFGLAPGWVVNMADKKILKPTDENLLKYYTS

SEQ ID NO: 904946 - protein, 296 aa, Homo sapiens [sequence omitted]

SEQ ID NO: 904947 - protein, 511 aa, Homo sapiens
GRVGRPRVRRNKNLAEIGKRRSFIAAPCQIITNTSTLLKNYQDNNKMLVLALENEKSKVKEAQDIILQLRKECYYLTCQLYALKGKLTSQQTVEPAQNQEICSSGMDPNSDDSSRNLFVKDLPQIPLEETELPGQGESFQIEDQIPTIPQDTLGVDFDSGEAKSTDNVLPRTVSVRSSLKKHCNSICQFDSLDDFETSHLAGKSFEFERVGFLDPLVNMHIPENVQHNACQWSKDQVNLSPKLIQPGTFTKTKEDILESKSEQTKSKQRDTQERKREEKRKANRRKSKRMSKYKENKSENKKTVPQKKMHKSVSSNDAYNFNLEEGVHLTPFRQKVSNDSNREENNESEVSLCESSGSGDDSDDLYLPTCKYIQNPTSNSDRPVTRPLAKRALKYTDEKETEGSKPTKTPTTTPPETQQSPHLSLKDITNVSLYPVVKIRRLSLSPKKNKASPAVALPKRRCTASVNYKEPTLASKLRRGDPFTDLCFLNSPIFKQKKDLRRSKKSMKQIQ

SEQ ID NO: 904948 - protein, 527 aa, Homo sapiens
MAKERCLKKSFQDSLEDIKKRMKEKRNKNLAEIGKRRSFIAAPCQIITNTSTLLKNYQDNNKMLVLALENEKSKVKEAQDIILQLRKECYYLTCQLYALKGKLTSQQTVEPAQNQEICSSGMDPNSDDSSRNLFVKDLPQIPLEETELPGQGESFQIEDQIPTIPQDTLGVDFDSGEAKSTDNVLPRTVSVRSSLKKHCNSICQFDSLDDFETSHLAGKSFEFERVGFLDPLVNMHIPENVQHNACQWSKDQVNLSPKLIQPGTFTKTKEDILESKSEQTKSKQRDTQERKREEKRKANRRKSKRMSKYKENKSENKKTVPQKKMHKSVSSNDAYNFNLEEGVHLTPFRQKVSNDSNREENNESEVSLCESSGSGDDSDDLYLPTCKYIQNPTSNSDRPVTRPLAKRALKYTDEKETEGSKPTKTPTTTPPETQQSPHLSLKDITNVSLYPVVKIRRLSLSPKKNKASPAVALPKRRCTASVNYKEPTLASKLRRGDPFTDLCFLNSPIFKQKKDLRRSKKSMKQIQ

SEQ ID NO: 904949 - protein, 527 aa, Homo sapiens; identical to SEQ ID NO: 904948

SEQ ID NO: 904950 - protein, 527 aa, Homo sapiens; identical to SEQ ID NO: 904948

SEQ ID NO: 904951 - protein, 577 aa, Homo sapiens
MSHQPLSCLTEKEDSPSESTGNGPPHLAHPNLDTFTPEELLQQMKELLTENHQLKEAMKLNNQAMKGRFEELSAWTEKQKEERQFFEIQSKEAKERLMALSHENEKLKEELGKLKGKSERSSEDPTDDSRLPRAEAEQEKDQLRTQVVRLQAEKADLLGIVSELQLKLNSSGSSEDSFVEIRMAEGEAEGSVKEIKHSPGPTRTVSTGTALSKYRSRSADGAKNYFEHEELTVSQLLLCLREGNQKVERLEVALKEAKERVSDFEKKTSNRSEIETQTEGSTEKENDEEKGPETVGSEVEALNLQVTSLFKELQEAHTKLSEAELMKKRLQEKCQALERKNSAIPSELNEKQELVYTNKKLELQVESMLSEIKMEQAKTEDEKSKLTVLQMTHNKLLQEHNNALKTIEELTRKESEKVDRAVLKELSEKLELAEKALASKQLQMDEMKQTIAKQEEDLETMTILRAQMEVYCSDFHAERAAREKIHEEKEQLALQLAVLLKENDAFEDGGRQSLMEMQSRHGARTSDSDQQAYLVQRGAEDRDWRQQRNIPIHSCPKCGEVLPDIDTLQIHVMDCII

SEQ ID NO: 904952 - protein, 577 aa, Homo sapiens; identical to SEQ ID NO: 904951

SEQ ID NO: 904953 - protein, 577 aa, Homo sapiens; identical to SEQ ID NO: 904951

SEQ ID NO: 904954 - protein, 571 aa, Homo sapiens
MSHQPLSCLTEKEDSPSESTGNGPPHLAHPNLDTFTPEELLQQMKELLTENHQLKEAMKLNNQAMKGRFEELSAWTEKQKEERQFFEIQSKEAKERLMALSHENEKLKEELGKLKGKSERSSEDPTDDSRLPRAEAEQEKDQLRTQVVRLQAEKADLLGIVSELQLKLNSSGSSEDSFVEIRMAEGEAEGSVKEIKHSPGPTRTVSTGTSRSADGAKNYFEHEELTVSQLLLCLREGNQKVERLEVALKEAKERVSDFEKKTSNRSEIETQTEGSTEKENDEEKGPETVGSEVEALNLQVTSLFKELQEAHTKLSEAELMKKRLQEKCQALERKNSAIPSELNEKQELVYTNKKLELQVESMLSEIKMEQAKTEDEKSKLTVLQMTHNKLLQEHNNALKTIEELTRKESEKVDRAVLKELSEKLELAEKALASKQLQMDEMKQTIAKQEEDLETMTILRAQMEVYCSDFHAERAAREKIHEEKEQLALQLAVLLKENDAFEDGGRQSLMEMQSRHGARTSDSDQQAYLVQRGAEDRDWRQQRNIPIHSCPKCGEVLPDIDTLQIHVMDCII

SEQ ID NO: 904955 - protein, 577 aa, Homo sapiens; identical to SEQ ID NO: 904951

SEQ ID NO: 904956 - protein, 549 aa, Homo sapiens
MSHQPLSCLTEKEDSPSESTGNGPPHLAHPNLDTFTPEELLQQMKELLTENHQLKEAMKLNNQAMKGRFEELSAWTEKQKEERQFFEIQSKEAKERLMALSHENEKLKEELGKLKGKSERSSEDPTDDSRLPRAEAEQEKDQLRTQVVRLQAEKADLLGIVSELQLKLNSSGSSEDSFVEIRMAEGEAEGSVKEIKHSPGPTRTVSTGTSRSADGAKNYFEHEELTVSQLLLCLREGNQKVERLEVALKEAKEREKENDEEKGPETVGSEVEALNLQVTSLFKELQEAHTKLSEAELMKKRLQEKCQALERKNSAIPSELNEKQELVYTNKKLELQVESMLSEIKMEQAKTEDEKSKLTVLQMTHNKLLQEHNNALKTIEELTRKESEKVDRAVLKELSEKLELAEKALASKQLQMDEMKQTIAKQEEDLETMTILRAQMEVYCSDFHAERAAREKIHEEKEQLALQLAVLLKENDAFEDGGRQSLMEMQSRHGARTSDSDQQAYLVQRGAEDRDWRQQRNIPIHSCPKCGEVLPDIDTLQIHVMDCII

SEQ ID NO: 904957 - protein, 403 aa, Homo sapiens
MESSSFKLVPVILGYSLLSLWNFSDENLLTFILNRALSKYRSRSADGAKNYFEHEELTVSQLLLCLREGNQKVERLEVALKEAKERVSDFEKKTSNRSEIETQTEGSTEKENDEEKGPETVGSEVEALNLQVTSLFKELQEAHTKLSEAELMKKRLQEKCQALERKNSAIPSELNEKQELVYTNKKLELQVESMLSEIKMEQAKTEDEKSKLTVLQMTHNKLLQEHNNALKTIEELTRKESEKVDRAVLKELSEKLELAEKALASKQLQMDEMKQTIAKQEEDLETMTILRAQMEVYCSDFHAERAAREKIHEEKEQLALQLAVLLKENDAFEDGGRQSLMEMQSRHGARTSDSDQQAYLVQRGAEDRDWRQQRNIPIHSCPKCGEVLPDIDTLQIHVMDCII

SEQ ID NO: 904958 - protein, 487 aa, Homo sapiens
MSHQPLSCLTEKEDSPSESTGNGPPHLAHPNLDTFTPEELLQQMKELLTENHQLKEAMKLNNQAMKGRFEELSAWTEKQKEERQFFEIQSKEAKERLMALSHENEKLKEELGKLKGKSERSSEDPTDDSRLPRAEAEQEKDQLRTQVVRLQAEKADLLGIVSELQLKLNSSGSSEDSFVEIRMAEGEAEGSVKEIKHSPGPTRTVSTGTALSKYRSRSADGAKNYFEHEELTVSQLLLCLREGNQKVERLEVALKEAKERVSDFEKKTSNRSEIETQTEGSTEKENDEEKGPETVGSEVEALNLQVTSLFKELQEAHTKLSEAELMKKRLQEKCQALERKNSAIPSELNEKQELVYTNKKLELQVESMLSEIKMEQAKTEDEKSKLTVLQMTHNKLLQEHNNALKTIEELTRKESEKVDRAVLKELSEKLELAEKALASKQLQMDEMKQTIAKQEEDLETMTILRAQMEVYILILPGFGIISHIVTY

SEQ ID NO: 904959 - protein, 262 aa, Homo sapiens
MSHQPLSCLTEKEDSPSESTGNGPPHLAHPNLDTFTPEELLQQMKELLTENHQLKEAMKLNNQAMKGRFEELSAWTEKQKEERQFFEIQSKEAKERLMALSHENEKLKEELGKLKGKSERSSEDPTDDSRLPRAEAEQEKDQLRTQVVRLQAEKADLLGIVSELQLKLNSSGSSEDSFVEIRMAEGEAEGSVKEIKHSPGPTRTVSTGTALSKYRSRSADGAKNYFEHEELTVSQLLLCLREGNQKVERLEVALKEAKESMK

SEQ ID NO: 904960 - protein, 241 aa, Homo sapiens [sequence omitted]

SEQ ID NO: 904961 - protein, 241 aa, Homo sapiens [sequence omitted]

SEQ ID NO: 904962 - protein, 577 aa, Homo sapiens; identical to SEQ ID NO: 904951

SEQ ID NO: 904963 - protein, 577 aa, Homo sapiens; identical to SEQ ID NO: 904951

SEQ ID NO: 904964 - protein, 577 aa, Homo sapiens; identical to SEQ ID NO: 904951

SEQ ID NO: 904965 - protein, 535 aa, Homo sapiens
NCSSRLNSSGSSEDSFVEIRMAEGDADGLGKRNQAESWAHVEQSPLARADLQMGPRALSHENEKLKEELGKLKGKSERSSEDPTDDSRLPRAEAEQEKDQLRTQVVRLQAEKADLLGIVSELQLKLNSSGSSEDSFVEIRMAEGEAEGSVKEIKHSPGPTRTVSTGTALSKYRSRSADGAKNYFEHEELTVSQLLLCLREGNQKVERLEVALKEAKERVSDFEKKTSNRSEIETQTEGSTEKENDEEKGPETVGSEVEALNLQVTSLFKELQEAHTKLSEAELMKKRLQEKCQALERKNSAIPSELNEKQELVYTNKKLELQVESMLSEIKMEQAKTEDEKSKLTVLQMTHNKLLQEHNNALKTIEELTRKESEKVDRAVLKELSEKLELAEKALASKQLQMDEMKQTIAKQEEDLETMTILRAQMEVYCSDFHAERAAREKIHEEKEQLALQLAVLLKENDAFEDGGRQSLMEMQSRHGARTSDSDQQAYLVQRGAEDRDWRQQRNIPIHSCPKCGEVLPDIDTLQIHVMDCII

SEQ ID NO: 904966 - protein, 116 aa, Homo sapiens
  misc_feature (1)..(1): Xaa can be any naturally occurring amino acid
XQGSLILLIPPPLFHAERAAREKIHEEKEQLALQLAVLLKENDAFEDGGRQSLMEMQSRHGARTSDSDQQAYLVQRGAEDRDWRQQRNIPIHSCPKCGEVLPDIDTLQIHVMDCII

SEQ ID NO: 904967 - protein, 333 aa, Homo sapiens [sequence omitted]

SEQ ID NO: 904968 - protein, 75 aa, Homo sapiens
EYEVELMLKLAICSSSETNTTACKMELMELSYLFPGAEDRDWRQQRNIPIHSCPKCGEVLPDIDTLQIHVMDCII

SEQ ID NO: 904969 - protein, 388 aa, Homo sapiens
MKETRGYGGDAPFCTRLNHSYTGMWAPERSAEARGNLTRPPGSGEDCGSVSVAFPITMLLTGFVGNALAMLLVSRSYRRRESKRKKSFLLCIGWLALTDLVGQLLTTPVVIVVYLSKQRWEHIDPSGRLCTFFGLTMTVFGLSSLFIASAMAVERALAIRAPHWYASHMKTRATRAVLLGVWLAVLAFALLPVLGVGQYTVQWPGTWCFISTGRGGNGTSSSHNWGNLFFASAFAFLGLLALTVTFSCNLATIKALVSRCRAKATASQSSAQWGRITTETAIQLMGIMCVLSVCWSPLLIMMLKMIFNQTSVEHCKTHTEKQKECNFFLIAVRLASLNQILDPWVYLLLRKILLRKFCQVANAVSSCSNDGQKGQPISLSNEIIQTEA

SEQ ID NO: 904970 - protein, 365 aa, Homo sapiens
MKETRGYGGDAPFCTRLNHSYTGMWAPERSAEARGNLTRPPGSGEDCGSVSVAFPITMLLTGFVGNALAMLLVSRSYRRRESKRKKSFLLCIGWLALTDLVGQLLTTPVVIVVYLSKQRWEHIDPSGRLCTFFGLTMTVFGLSSLFIASAMAVERALAIRAPHWYASHMKTRATRAVLLGVWLAVLAFALLPVLGVGQYTVQWPGTWCFISTGRGGNGTSSSHNWGNLFFASAFAFLGLLALTVTFSCNLATIKALVSRCRAKATASQSSAQWGRITTETAIQLMGIMCVLSVCWSPLLIMMLKMIFNQTSVEHCKTHTEKQKECNFFLIAVRLASLNQILDPWVYLLLRKILLRKFCQEEFWGN

SEQ ID NO: 904971 - protein, 374 aa, Homo sapiens
MKETRGYGGDAPFCTRLNHSYTGMWAPERSAEARGNLTRPPGSGEDCGSVSVAFPITMLLTGFVGNALAMLLVSRSYRRRESKRKKSFLLCIGWLALTDLVGQLLTTPVVIVVYLSKQRWEHIDPSGRLCTFFGLTMTVFGLSSLFIASAMAVERALAIRAPHWYASHMKTRATRAVLLGVWLAVLAFALLPVLGVGQYTVQWPGTWCFISTGRGGNGTSSSHNWGNLFFASAFAFLGLLALTVTFSCNLATIKALVSRCRAKATASQSSAQWGRITTETAIQLMGIMCVLSVCWSPLLIMMLKMIFNQTSVEHCKTHTEKQKECNFFLIAVRLASLNQILDPWVYLLLRKILLRKFCQMRKRRLREQEEFWGN

SEQ ID NO: 904972 - protein, 402 aa, Homo sapiens
MKETRGYGGDAPFCTRLNHSYTGMWAPERSAEARGNLTRPPGSGEDCGSVSVAFPITMLLTGFVGNALAMLLVSRSYRRRESKRKKSFLLCIGWLALTDLVGQLLTTPVVIVVYLSKQRWEHIDPSGRLCTFFGLTMTVFGLSSLFIASAMAVERALAIRAPHWYASHMKTRATRAVLLGVWLAVLAFALLPVLGVGQYTVQWPGTWCFISTGRGGNGTSSSHNWGNLFFASAFAFLGLLALTVTFSCNLATIKALVSRCRAKATASQSSAQWGRITTETAIQLMGIMCVLSVCWSPLLIMMLKMIFNQTSVEHCKTHTEKQKECNFFLIAVRLASLNQILDPWVYLLLRKILLRKFCQMRKRRLREQEMGPDGRCFCHAWRQVPRTWCSSHDREPCSVQLS

SEQ ID NO: 904973 - protein, 393 aa, Homo sapiens
MKETRGYGGDAPFCTRLNHSYTGMWAPERSAEARGNLTRPPGSGEDCGSVSVAFPITMLLTGFVGNALAMLLVSRSYRRRESKRKKSFLLCIGWLALTDLVGQLLTTPVVIVVYLSKQRWEHIDPSGRLCTFFGLTMTVFGLSSLFIASAMAVERALAIRAPHWYASHMKTRATRAVLLGVWLAVLAFALLPVLGVGQYTVQWPGTWCFISTGRGGNGTSSSHNWGNLFFASAFAFLGLLALTVTFSCNLATIKALVSRCRAKATASQSSAQWGRITTETAIQLMGIMCVLSVCWSPLLIMMLKMIFNQTSVEHCKTHTEKQKECNFFLIAVRLASLNQILDPWVYLLLRKILLRKFCQEMGPDGRCFCHAWRQVPRTWCSSHDREPCSVQLS

SEQ ID NO: 904974 - protein, 390 aa, Homo sapiens
MKETRGYGGDAPFCTRLNHSYTGMWAPERSAEARGNLTRPPGSGEDCGSVSVAFPITMLLTGFVGNALAMLLVSRSYRRRESKRKKSFLLCIGWLALTDLVGQLLTTPVVIVVYLSKQRWEHIDPSGRLCTFFGLTMTVFGLSSLFIASAMAVERALAIRAPHWYASHMKTRATRAVLLGVWLAVLAFALLPVLGVGQYTVQWPGTWCFISTGRGGNGTSSSHNWGNLFFASAFAFLGLLALTVTFSCNLATIKALVSRCRAKATASQSSAQWGRITTETAIQLMGIMCVLSVCWSPLLIMMLKMIFNQTSVEHCKTHTEKQKECNFFLIAVRLASLNQILDPWVYLLLRKILLRKFCQIRYHTNNYASSSTSLPCQCSSTLMWSDHLER

SEQ ID NO: 904975 - protein, 445 aa, Homo sapiens
MKETRGYGGDAPFCTRLNHSYTGMWAPERSAEARGNLTRPPGSGEDCGSVSVAFPITMLLTGFVGNALAMLLVSRSYRRRESKRKKSFLLCIGWLALTDLVGQLLTTPVVIVVYLSKQRWEHIDPSGRLCTFFGLTMTVFGLSSLFIASAMAVERALAIRAPHWYASHMKTRATRAVLLGVWLAVLAFALLPVLGVGQYTVQWPGTWCFISTGRGGNGTSSSHNWGNLFFASAFAFLGLLALTVTFSCNLATIKALVSRCRAKATASQSSAQWGRITTETAIQLMGIMCVLSVCWSPLLIMMLKMIFNQTSVEHCKTHTEKQKECNFFLIAVRLASLNQILDPWVYLLLRKILLRKFCQMRKRRLREQEMGPDGRCFCHAWRQVPRTWCSSHDRGILGKLKPAFLPGSHHWKLHDSLFVKEKKITETPTSQTILFYFFPQAHPQI

SEQ ID NO: 904976 - protein, 391 aa, Homo sapiens
MKETRGYGGDAPFCTRLNHSYTGMWAPERSAEARGNLTRPPGSGEDCGSVSVAFPITMLLTGFVGNALAMLLVSRSYRRRESKRKKSFLLCIGWLALTDLVGQLLTTPVVIVVYLSKQRWEHIDPSGRLCTFFGLTMTVFGLSSLFIASAMAVERALAIRAPHWYASHMKTRATRAVLLGVWLAVLAFALLPVLGVGQYTVQWPGTWCFISTGRGGNGTSSSHNWGNLFFASAFAFLGLLALTVTFSCNLATIKALVSRCRAKATASQSSAQWGRITTETAIQLMGIMCVLSVCWSPLLIMMLKMIFNQTSVEHCKTHTEKQKECNFFLIAVRLASLNQILDPWVYLLLRKILLRKFCQMRKRRLREQFWRPASSGSGCQQIRCLEEFWGN

SEQ ID NO: 904977 - protein, 217 aa, Homo sapiens
WEHIDPSGRLCTFFGLTMTVFGLSSLFIASAMAVERALAIRAPHWYASHMKTRATRAVLLGVWLAVLAFALLPVLGVGQYTVQWPGTWCFISTGRGGNGTSSSHNWGNLFFASAFAFLGLLALTVTFSCNLATIKALVSRCRAKATASQSSAQWGRITTETAIQLMGIMCVLSVCWSPLLVGSSRVGGSQDACASKREPKTLLSGSTRRGVFATAER

SEQ ID NO: 904978 - protein, 390 aa, Homo sapiens; identical to SEQ ID NO: 904974

SEQ ID NO: 904979 - protein, 390 aa, Homo sapiens; identical to SEQ ID NO: 904974

SEQ ID NO: 904980 - protein, 425 aa, Homo sapiens
MKETRGYGGDAPFCTRLNHSYTGMWAPERSAEARGNLTRPPGSGEDCGSVSVAFPITMLLTGFVGNALAMLLVSRSYRRRESKRKKSFLLCIGWLALTDLVGQLLTTPVVIVVYLSKQRWEHIDPSGRLCTFFGLTMTVFGLSSLFIASAMAVERALAIRAPHWYASHMKTRATRAVLLGVWLAVLAFALLPVLGVGQYTVQWPGTWCFISTGRGGNGTSSSHNWGNLFFASAFAFLGLLALTVTFSCNLATIKALVSRCRAKATASQSSAQWGRITTETAIQLMGIMCVLSVCWSPLLIMMLKMIFNQTSVEHCKTHTEKQKECNFFLIAVRLASLNQILDPWVYLLLRKILLRKFCQMRKRRLREQAPLLPTSTVIDPSRFCAQPFRWFLDLSFPAMSSSHPQLPLTLASFKLLREPCSVQLS

SEQ ID NO: 904981 - protein, 418 aa, Homo sapiens
MKETRGYGGDAPFCTRLNHSYTGMWAPERSAEARGNLTRPPGSGEDCGSVSVAFPITMLLTGFVGNALAMLLVSRSYRRRESKRKKSFLLCIGWLALTDLVGQLLTTPVVIVVYLSKQRWEHIDPSGRLCTFFGLTMTVFGLSSLFIASAMAVERALAIRAPHWYASHMKTRATRAVLLGVWLAVLAFALLPVLGVGQYTVQWPGTWCFISTGRGGNGTSSSHNWGNLFFASAFAFLGLLALTVTFSCNLATIKALVSRCRAKATASQSSAQWGRITTETAIQLMGIMCVLSVCWSPLLIMMLKMIFNQTSVEHCKTHTEKQKECNFFLIAVRLASLNQILDPWVYLLLRKILLRKFCQMRKRRLREQLICSLQNSQIQRATAHCGQVQTYRVLNREEMEVLVSSINVYTRISTVKTE

SEQ ID NO: 904982 - protein, 390 aa, Homo sapiens; identical to SEQ ID NO: 904974

SEQ ID NO: 904983 - protein, 278 aa, Homo sapiens
MPPSAPASTTPTQACGRPSVPPRRGATSRALQGLARIADRCPWPSRSPCCSLVSWATHWPCCSCRAATGAGRASARSPSCCASAGWRSPTWSGSFSPPRSSSSCTCPSSSHNWGNLFFASAFAFLGLLALTVTFSCNLATIKALVSRCRAKATASQSSAQWGRITTETAIQLMGIMCVLSVCWSPLLIMMLKMIFNQTSVEHCKTHTEKQKECNFFLIAVRLASLNQILDPWVYLLLRKILLRKFCQIRYHTNNYASSSTSLPCQCSSTLMWSDHLER

SEQ ID NO: 904984 - protein, 427 aa, Homo sapiens
QHLTACEALSVPLSFATNMRFTFPLMAIVLEIAMIVLFGLFVEYETDQTVLEQLNITKPTDMGIFFELYPLFQDVHVMIFVGFGFLMTFLKKYGFSSVGINLLVAALGLQWGTIVQGILQSQGQKFNIGIKNMINADFSAATVLISFGAVLGKTSPTQMLIMTILEIVFFAHNEYLVSEIFKASDIGASMTIHAFGAYFGLAVAGILYRSGLRKGHENEESAYYSDLFAMIGTLFLWMFWPSFNSAIAEPGDKQCRAIVNTYFSLAACVLTAFAFSSLVEHRGKLNMVHIQNATLAGGVAVGTCADMAIHPFGSMIIGSIAGMVSVLGYKFLTPLFTTKLRIHDTCGVHNLHGLPGVVGGLAGIVAVAMGASNTSMAMQAAALGSSIGTAVVGGLMTGLILKLPLWGQPSDQNCYDDSVYWKVPKTR

SEQ ID NO: 904985 - protein, 411 aa, Homo sapiens
QHLTACEALSVPLSFATNMRFTFPLMAIVLEIAMIVLFGLFVEYETDQTVLEQLNITKPTDMGIFFELYPLFQDVHVMIFVGFGFLMTFLKKYGFSSVGINLLVAALGLQWGTIVQGILQSQGQKFNIGIKNMINADFSAATVLISFGAVLGKTSPTQMLIMTILEIVFFAHNEYLVSEIFKASDIGASMTIHAFGAYFGLAVAGILYRSGLRKGHENEESAYYSDLFAMIGTLFLWMFWPSFNSAIAEPGDKQCRAIVNTYFSLAACVLTAFAFSSLVEHRGKLNMVHIQNATLAGGVAVGTCADMAIHPFGSMIIGSIAGMVSVLGYKFLTPLFTTKLRIHDTCGVHNLHGLPGVVGGLAGIVAVAMGASNTSMAMQAAALGSSIGTAVVGGLMTGQHKKMNTSLYLML

SEQ ID NO: 904986 - protein, 103 aa, Homo sapiens
MFWPSFNSAIAEPGDKQCRAIVNTYFSLAACVLTAFAFSSLVEHRGKLNMVHIQNATLAGGVAVGTCADMAIHPFGSMIIGSIAGMVSVLGYKFLTVKVQQMF

SEQ ID NO: 904987 - protein, 190 aa, Homo sapiens
MFWPSFNSAIAEPGDKQCRAIVNTYFSLAACVLTAFAFSSLVEHRGKLNMVHIQNATLAGGVAVGTCADMAIHPFGSMIIGSIAGMVSVLGYKFLTPLFTTKLRIHDTCGVHNLHGLPGVVGGLAGIVAVAMGASNTSMAMQAAALGSSIGTAVVGGLMTGLILKLPLWGQPSDQNCYDDSVYWKVPKTR

SEQ ID NO: 904988 - protein, 427 aa, Homo sapiens; identical to SEQ ID NO: 904984

SEQ ID NO: 904989 - protein, 369 aa, Homo sapiens
QHLTACEALSVPLSFATNMRFTFPLMAIVLEIAMIVLFGLFVEYETDQTVLEQLNITKPTDMGIFFELYPLFQDVHVMIFVGFGFLMTFLKKYGFSSVGINLLVAALGLQWGTIVQGILQSQGQKFNIGIKNMINADFSAATVLISFGAVLGKTSPTQMLIMTILEIVFFAHNEYLVSEIFKASDIGASMTIHAFGAYFGLAVAGILYRSGLRKGHENEESAYYSDLFAMIGTLFLWMFWPSFNSAIAEPGDKQCRAIVNTYFSLAACVLTAFAFSSLVEHRGKLNMVHIQNATLAGGVAVGTCADMAIHPFGSMIIGSIAGMVSVLGYKFLTVYGHAGSCTGFLYRNSSCWRSDDRFNSKVASLGTAI

SEQ ID NO: 904990 - protein, 284 aa, Homo sapiens
SWTAVVPLVSVNMEAEESEKAATEQEPLEGTEQTLDAEEEQEESEEAACGSKKRVVPGIVYLGHIPPRFRPLHVRNLLSAYGEVGRVFFQAEDRFVRRKKKAAAAAGGKKRSYTKDYTEGWVEFRDKRIAKRVAASLHNTPMGARRRSPFRYDLWNLKYLHRFTWSHLSEHLAFERQVRRQRLRAEVAQAKRETDFYLQSVERGQRFLAADGDPARPDGSWTFAQRPTEQELRARKAARPGGRERARLATAQDKARSNKGLLARIFGAPPPSESMEGPSLVRDS

SEQ ID NO: 904991 - protein, 284 aa, Homo sapiens; identical to SEQ ID NO: 904990

SEQ ID NO: 904992 - protein, 280 aa, Homo sapiens
GPEFPGFNMEAEESEKAATEQEPLEGTEQTLDAEEEQEESEEAACGSKKRVVPGIVYLGHIPPRFRPLHVRNLLSAYGEVGRVFFQAEDRFVRRKKKAAAAAGGKKRSYTKDYTEGWVEFRDKRIAKRVAASLHNTPMGARRRSPFRYDLWNLKYLHRFTWSHLSEHLAFERQVRRQRLRAEVAQAKRETDFYLQSVERGQRFLAADGDPARPDGSWTFAQRPTEQELRARKAARPGGRERARLATAQDKARSNKGLLARIFGAPPPSESMEGPSLVRDS

SEQ ID NO: 904993 - protein, 143 aa, Homo sapiens
MGARRRSPFRYDLWNLKYLHRFTWSHLSEHLAFERQVRRQRLRAEVAQAKRETDFYLQSVERGQRFLAADGDPARPDGSWTFAQRPTEQELRARKAARPGGRERARLATAQDKARSNKGLLARIFGAPPPSESMEGPSLVRDS

SEQ ID NO: 904994 - protein, 138 aa, Homo sapiens
MARSDASSFRLRYLHRFTWSHLSEHLAFERQVRRQRLRAEVAQAKRETDFYLQSVERGQRFLAADGDPARPDGSWTFAQRPTEQELRARKAARPGGRERARLATAQDKARSNKGLLARIFGAPPPSESMEGPSLVRDS

SEQ ID NO: 904995 - protein, 284 aa, Homo sapiens; identical to SEQ ID NO: 904990

SEQ ID NO: 904996 - protein, 284 aa, Homo sapiens; identical to SEQ ID NO: 904990

SEQ ID NO: 904997 - protein, 284 aa, Homo sapiens; identical to SEQ ID NO: 904990

SEQ ID NO: 904998 - protein, 262 aa, Homo sapiens
GPEFPGFNMEAEESEKAATEQEPLEGTEQTLDAEEEQEESEEAACGSKKRVVPGIVYLGHIPPRFRPLHVRNLLSAYGEVGRVFFQAEDRFVRRKKKAAAAAGGKRIAKRVAASLHNTPMGARRRSPFRYDLWNLKYLHRFTWSHLSEHLAFERQVRRQRLRAEVAQAKRETDFYLQSVERGQRFLAADGDPARPDGSWTFAQRPTEQELRARKAARPGGRERARLATAQDKARSNKGLLARIFGAPPPSESMEGPSLVRDS

SEQ ID NO: 904999 - protein, 111 aa, Homo sapiens
  misc_feature (74)..(74): Xaa can be any naturally occurring amino acid
MSKNGSSASLCASSAPIAGQLRYVAESIGFRKCKNQGEHKIRKDHALHGHIHNESPGTCNLFNVPLETSRSLLXRRNTCKQARHSILDSTHARCDSATGPFSHPRLRTAEE

SEQ ID NO: 905000 - protein, 1148 aa, Homo sapiens
MTTPTRRSTRNTRAETASQSQRSPISDNSGCDAPGNSNPSLSVPSSAESEKQTRQAPKRKSVRRGRKPPLLKKKLRSSVAAPEKSSSNDSVDEETAESDTSPVLEKEHQPDVDSSNICTVQTHVENQSANCLKSCNEQIEESEKHTANYDTEERVGSSSSESCAQDLPVLVGEEGEVKKLENTGIEANVLCLESEISENILEKGGDPLEKQDQISGLSQSEVKTDVCTVHLPNDFPTCLTSESKVYQPVSCPLSDLSENVESVVNEEKITESSLVEITEHKDFTLKTEELIESPKLESSEGEIIQTVDRQSVKSPEVQLLGHVETEDVEIIATCDTFGNEDFNNIQDSENNLLKNNLLNTKLEKSLEEKNESLTEHPRSTELPKTHIEQIQKHFSEDNNEMIPMECDSFCSDQNESEVEPSVNADLKQMNENSVTHCSENNMPSSDLADEKVETVSQPSESPKDTIDKTKKPRTRRSRFHSPSTTWSPNKDTPQEKKRPQSPSPRRETGKESRKSQSPSPKNESARGRKKSRSQSPKKDIARERRQSQSRSPKRDTTRESRRSESLSPRRETSRENKRSQPRVKDSSPGEKSRSQSRERESDRDGQRRERERRTRKWSRSRSHSRSPSRCRTKSKSSSFGRIDRDSYSPRWKGRWANDGWRCPRGNDRYRKNDPEKQNENTRKEKNDIHLDADDPNSADKHRNDCPNWITEKINSGPDPRTRNPEKLKESHWEENRNENSGNSWNKNFGSGWVSNRGRGRGNRGRGTYRSSFAYKDQNENRWQNRKPLSGNSNSSGSESFKFVEQQSYKRKSEQEFSFDTPADRSGWTSASSWAVRKTLPADVQNYYSRRGRNSSGPQSGWMKQEEETSGQDSSLKDQTNQQVDGSQLPINMMQPQMNVMQQQMNAQHQPMNIFPYPVGVHAPLMNIQRNPFNIHPQLPLHLHTGVPLMQVATPTSVSQGLPPPPPPPPPSQQVNYIASQPDGKQLQGIPSSSHVSNNMSTPVLPAPTAAPGNTGMVQGPSSGNTSSSSHSKASNAAVKLAESKVSVAVEASADSSKTDKKLQIQEKAAQEVKLAIKPFYQNKDITKEEYKEIVRKAVDKVCHSKSGEVNSTKVANLVKAYVDKYKYSRKGSQKKTLEEPVSTEKNIG

SEQ ID NO: 905001 - protein, 1148 aa, Homo sapiens; identical to SEQ ID NO: 905000

SEQ ID NO: 905002 - protein, 1474 aa, Homo sapiens
MQEGGSEAVGRRGRGKVGRKLIPGRRQGGWRAQHARTERGQATGKRVSARLKATGTWETLFQREMKKKTVCTLNMGDKKYEDMEGEENGDNTISTGLLYSEADRCPICLNCLLEKEVGFPESCNHVFCMTCILKWAEELFIPIKTLETLASCPIDRKPFQAVFKFSALEGYVKVQVKKQLRETKDKKNENSFEKQVSCHENSKSCIRRKAIVREDLLSAKVCDLKWIHRNSLYSETGGKKNAAIKINKPQRSNWSTNQCFRNFFSNMFSSVSHSGESSFTYRAYCTEFIEASEISALIRQKRHELELSWFPDTLPGIGRIGFIPWNVETEVLPLISSVLPRTIFPTSTISFEHFGTSCKGYALAHTQEGEEKKQTSGTSNTRGSRRKPAMTTPTRRSTRNTRAETASQSQRSPISDNSGCDAPGNSNPSLSVPSSAESEKQTRQAPKRKSVRRGRKPPLLKKKLRSSVAAPEKSSSNDSVDEETAESDTSPVLEKEHQPDVDSSNICTVQTHVENQSANCLKSCNEQIEESEKHTANYDTEERVGSSSSESCAQDLPVLVGEEGEVKKLENTGIEANVLCLESEISENILEKGGDPLEKQDQISGLSQSEVKTDVCTVHLPNDFPTCLTSESKVYQPVSCPLSDLSENVESVVNEEKITESSLVEITEHKDFTLKTEELIESPKLESSEGEIIQTVDRQSVKSPEVQLLGHVETEDVEIIATCDTFGNEDFNNIQDSENNLLKNNLLNTKLEKSLEEKNESLTEHPRSTELPKTHIEQIQKHFSEDNNEMIPMECDSFCSDQNESEVEPSVNADLKQMNENSVTHCSENNMPSSDLADEKVETVSQPSESPKDTIDKTKKPRTRRSRFHSPSTTWSPNKDTPQEKKRPQSPSPRRETGKESRKSQSPSPKNESARGRKKSRSQSPKKDIARERRQSQSRSPKRDTTRESRRSESLSPRRETSRENKRSQPRVKDSSPGEKSRSQSRERESDRDGQRRERERRTRKWSRSRSHSRSPSRCRTKSKSSSFGRIDRDSYSPRWKGRWANDGWRCPRGNDRYRKNDPEKQNENTRKEKNDIHLDADDPNSADKHRNDCPNWITEKINSGPDPRTRNPEKLKESHWEENRNENSGNSWNKNFGSGWVSNRGRGRGNRGRGTYRSSFAYKDQNENRWQNRKPLSGNSNSSGSESFKFVEQQSYKRKSEQEFSFDTPADRSGWTSASSWAVRKTLPADVQNYYSRRGRNSSGPQSGWMKQEEETSGQDSSLKDQTNQQVDGSQLPINMMQPQMNVMQQQMNAQHQPMNIFPYPVGVHAPLMNIQRNPFNIHPQLPLHLHTGVPLMQVATPTSVSQGLPPPPPPPPPSQQVNYIASQPDGKQLQGIPSSSHVSNNMSTPVLPAPTAAPGNTGMVQGPSSGNTSSSSHSKASNAAVKLAESKVSVAVEASADSSKTDKASSRLRATFIILYMIKEKKYQLFIV

SEQ ID NO: 905003 - protein, 1473 aa, Homo sapiens
MKKKTVCTLNMGDKKYEDMEGEENGDNTISTGLLYSEADRCPICLNCLLEKEVGFPESCNHVFCMTCILKWAEELFIPIKTLETLASCPIDRKPFQAVFKFSALEGYVKVQVKKQLRETKDKKNENSFEKQVSCHENSKSCIRRKAIVREDLLSAKVCDLKWIHRNSLYSETGGKKNAAIKINKPQRSNWSTNQCFRNFFSNMFSSVSHSGESSFTYRAYCTEFIEASEISALIRQKRHELELSWFPDTLPGIGRIGFIPWNVETEVLPLISSVLPRTIFPTSTISFEHFGTSCKGYALAHTQEGEEKKQTSGTSNTRGSRRKPAMTTPTRRSTRNTRAETASQSQRSPISDNSGCDAPGNSNPSLSVPSSAESEKQTRQAPKRKSVRRGRKPPLLKKKLRSSVAAPEKSSSNDSVDEETAESDTSPVLEKEHQPDVDSSNICTVQTHVENQSANCLKSCNEQIEESEKHTANYDTEERVGSSSSESCAQDLPVLVGEEGEVKKLENTGIEANVLCLESEISENILEKGGDPLEKQDQISGLSQSEVKTDVCTVHLPNDFPTCLTSESKVYQPVSCPLSDLSENVESVVNEEKITESSLVEITEHKDFTLKTEELIESPKLESSEGEIIQTVDRQSVKSPEVQLLGHVETEDVEIIATCDTFGNEDFNNIQDSENNLLKNNLLNTKLEKSLEEKNESLTEHPRSTELPKTHIEQIQKHFSEDNNEMIPMECDSFCSDQNESEVEPSVNADLKQMNENSVTHCSENNMPSSDLADEKVETVSQPSESPKDTIDKTKKPRTRRSRFHSPSTTWSPNKDTPQEKKRPQSPSPRRETGKESRKSQSPSPKNESARGRKKSRSQSPKKDIARERRQSQSRSPKRDTTRESRRSESLSPRRETSRENKRSQPRVKDSSPGEKSRSQSRERESDRDGQRRERERRTRKWSRSRSHSRSPSRCRTKSKSSSFGRIDRDSYSPRWKGRWANDGWRCPRGNDRYRKNDPEKQNENTRKEKNDIHLDADDPNSADKHRNDCPNWITEKINSGPDPRTRNPEKLKESHWEENRNENSGNSWNKNFGSGWVSNRGRGRGNRGRGTYRSSFAYKDQNENRWQNRKPLSGNSNSSGSESFKFVEQQSYKRKSEQEFSFDTPADRSGWTSASSWAVRKTLPADVQNYYSRRGRNSSGPQSGWMKQEEETSGQDSSLKDQTNQQVDGSQLPINMMQPQMNVMQQQMNAQHQPMNIFPYPVGVHAPLMNIQRNPFNIHPQLPLHLHTGVPLMQVATPTSVSQGLPPPPPPPPPSQQVNYIASQPDGKQLQGIPSSSHVSNNMSTPVLPAPTAAPGNTGMVQGPSSGNTSSSSHSKASNAAVKLAESKVSVAVEASADSSKTDKKLQIQEKAAQEVKLAIKPFYQNKDITKEEYKEIVRKAVDKVCHSKSGEVNSTKVANLVKAYVDKYKYSRKGSQKKTLEEPVSTEKNIG

SEQ ID NO: 905004 - protein, 686 aa, Homo sapiens
MKKKTVCTLNMGDKKYEDMEGEENGDNTISTGLLYSEADRCPICLNCLLEKEVGFPESCNHVFCMTCILKWAEELFIPIKTLETLASCPIDRKPFQAVFKFSALEGYVKVQVKKQLRETKDKKNENSFEKQVSCHENSKSCIRRKAIVREDLLSAKVCDLKWIHRNSLYSETGGKKNAAIKINKPQRSNWSTNQCFRNFFSNMFSSVSHSGESSFTYRAYCTEFIEASEISALIRQKRHELELSWFPDTLPGIGRIGFIPWNVETEVLPLISSVLPRTIFPTSTISFEHFGTSCKGYALAHTQEGEEKKQTSGTSNTRGSRRKPAMTTPTRRSTRNTRAETASQSQRSPISDNSGCDAPADRSGWTSASSWAVRKTLPADVQNYYSRRGRNSSGPQSGWMKQEEETSGQDSSLKDQTNQQVDGSQLPINMMQPQMNVMQQQMNAQHQPMNIFPYPVGVHAPLMNIQRNPFNIHPQLPLHLHTGVPLMQVATPTSVSQGLPPPPPPPPPSQQVNYIASQPDGKQLQGIPSSSHVSNNMSTPVLPAPTAAPGNTGMVQGPSSGNTSSSSHSKASNAAVKLAESKVSVAVEASADSSKTDKKLQIQEKAAQEVKLAIKPFYQNKDITKEEYKEIVRKAVDKVCHSKSGEVNSTKVANLVKAYVDKYKYSRKGSQKKTLEEPVSTEKNIG

SEQ ID NO: 905005 - protein, 150 aa, Homo sapiens [sequence omitted]

SEQ ID NO: 905006 - protein, 1500 aa, Homo sapiens
MQEGGSEAVGRRGRGKVGRKLIPGRRQGGWRAQHARTERGQATGKRVSARLKATGTWETLFQREMKKKTVCTLNMGDKKYEDMEGEENGDNTISTGLLYSEADRCPICLNCLLEKEVGFPESCNHVFCMTCILKWAEELFIPIKTLETLASCPIDRKPFQAVFKFSALEGYVKVQVKKQLRETKDKKNENSFEKQVSCHENSKSCIRRKAIVREDLLSAKVCDLKWIHRNSLYSETGGKKNAAIKINKPQRSNWSTNQCFRNFFSNMFSSVSHSGESSFTYRAYCTEFIEASEISALIRQKRHELELSWFPDTLPGIGRIGFIPWNVETEVLPLISSVLPRTIFPTSTISFEHFGTSCKGYALAHTQEGEEKKQTSGTSNTRGSRRKPAMTTPTRRSTRNTRAETASQSQRSPISDNSGCDAPGNSNPSLSVPSSAESEKQTRQAPKRKSVRRGRKPPLLKKKLRSSVAAPEKSSSNDSVDEETAESDTSPVLEKEHQPDVDSSNICTVQTHVENQSANCLKSCNEQIEESEKHTANYDTEERVGSSSSESCAQDLPVLVGEEGEVKKLENTGIEANVLCLESEISENILEKGGDPLEKQDQISGLSQSEVKTDVCTVHLPNDFPTCLTSESKVYQPVSCPLSDLSENVESVVNEEKITESSLVEITEHKDFTLKTEELIESPKLESSEGEIIQTVDRQSVKSPEVQLLGHVETEDVEIIATCDTFGNEDFNNIQDSENNLLKNNLLNTKLEKSLEEKNESLTEHPRSTELPKTHIEQIQKHFSEDNNEMIPMECDSFCSDQNESEVEPSVNADLKQMNENSVTHCSENNMPSSDLADEKVETVSQPSESPKDTIDKTKKPRTRRSRFHSPSTTWSPNKDTPQEKKRPQSPSPRRETGKESRKSQSPSPKNESARGRKKSRSQSPKKDIARERRQSQSRSPKRDTTRESRRSESLSPRRETSRENKRSQPRVKDSSPGEKSRSQSRERESDRDGQRRERERRTRKWSRSRSHSRSPSRCRTKSKSSSFGRIDRDSYSPRWKGRWANDGWRCPRGNDRYRKNDPEKQNENTRKEKNDIHLDADDPNSADKHRNDCPNWITEKINSGPDPRTRNPEKLKESHWEENRNENSGNSWNKNFGSGWVSNRGRGRGNRGRGTYRSSFAYKDQNENRWQNRKPLSGNSNSSGSESFKFVEQQSYKRKSEQEFSFDTPADRSGWTSASSWAVRKTLPADVQNYYSRRGRNSSGPQSGWMKQEEETSGQDSSLKDQTNQQVDGSQLPINMMQPQMNVMQQQMNAQHQPMNIFPYPVGVHAPLMNIQRNPFNIHPQLPLHLHTGVPLMQVATPTSVSQGLPPPPPPPPPSQQVNYIASQPDGKQLQGIPSSSHVSNNMSTPVLPAPTAAPGNTGMVQGPSSGNTSSSSHSKASNAAVKLAESKVSVAVEASADSSKTDKKLQIQEKAAQEVKLAIKPFYQNKDITKEEYKEIVRKAVDKCVLLECSIQKM

SEQ ID NO: 905007 - protein, 1474 aa, Homo sapiens; identical to SEQ ID NO: 905002

SEQ ID NO: 905008 - protein, 305 aa, Homo sapiens
MKKKTVCTLNMGDKKYEDMEGEENGDNTISTGLLYSEADRCPICLNCLLEKEVGFPESCNHVFCMTCILKWAEELFIPIKTLETLASCPIDRKPFQAVFKFSALEGYVKVQVKKQLRETKDKKNENSFEKQVSCHENSKSCIRRKAIVREDLLSAKVCDLKWIHRNSLYSETGGKKNAAIKINKPQRSNWSTNQCFRNFFSNMFSSVSHSGESSFTYRAYCTEFIEASEISALIRQKRHELELSWFPDTLPGIGRIGFIPWNVETEVLPLISSVLPRTIFPTSTISFEHFGKVCEIIFYFKNYYY

SEQ ID NO: 905009 - protein, 305 aa, Homo sapiens; identical to SEQ ID NO: 905008

SEQ ID NO: 905010 - protein, 182 aa, Homo sapiens
MKKKTVCTLNMGDKKYEDMEGEENGDNTISTGLLYSEADRCPICLNCLLEKEVGFPESCNHVFCMTCILKWAEELFIPIKTLETLASCPIDRKPFQAVFKFSALEGYVKVQVKKQLRETKDKKNENSFEKQVSCHENSKSCIRRKAIVREDLLSAKVCDLKWIHSKLLFACGFYLFFCCFLI

SEQ ID NO: 905011 - protein, 1463 aa, Homo sapiens
MKKKTVCTLNMGDKKYEDMEGEENGDNTISTGLLYSEADRCPICLNCLLEKEVGFPESCNHVFCMTCILKWAETLASCPIDRKPFQAVFKFSALEGYVKVQVKKQLRETKDKKNENSFEKQVSCHENSKSCIRRKAIVREDLLSAKVCDLKWIHRNSLYSETGGKKNAAIKINKPQRSNWSTNQCFRNFFSNMFSSVSHSGESSFTYRAYCTEFIEASEISALIRQKRHELELSWFPDTLPGIGRIGFIPWNVETEVLPLISSVLPRTIFPTSTISFEHFGTSCKGYALAHTQEGEEKKQTSGTSNTRGSRRKPAMTTPTRRSTRNTRAETASQSQRSPISDNSGCDAPGNSNPSLSVPSSAESEKQTRQAPKRKSVRRGRKPPLLKKKLRSSVAAPEKSSSNDSVDEETAESDTSPVLEKEHQPDVDSSNICTVQTHVENQSANCLKSCNEQIEESEKHTANYDTEERVGSSSSESCAQDLPVLVGEEGEVKKLENTGIEANVLCLESEISENILEKGGDPLEKQDQISGLSQSEVKTDVCTVHLPNDFPTCLTSESKVYQPVSCPLSDLSENVESVVNEEKITESSLVEITEHKDFTLKTEELIESPKLESSEGEIIQTVDRQSVKSPEVQLLGHVETEDVEIIATCDTFGNEDFNNIQDSENNLLKNNLLNTKLEKSLEEKNESLTEHPRSTELPKTHIEQIQKHFSEDNNEMIPMECDSFCSDQNESEVEPSVNADLKQMNENSVTHCSENNMPSSDLADEKVETVSQPSESPKDTIDKTKKPRTRRSRFHSPSTTWSPNKDTPQEKKRPQSPSPRRETGKESRKSQSPSPKNESARGRKKSRSQSPKKDIARERRQSQSRSPKRDTTRESRRSESLSPRRETSRENKRSQPRVKDSSPGEKSRSQSRERESDRDGQRRERERRTRKWSRSRSHSRSPSRCRTKSKSSSFGRIDRDSYSPRWKGRWANDGWRCPRGNDRYRKNDPEKQNENTRKEKNDIHLDADDPNSADKHRNDCPNWITEKINSGPDPRTRNPEKLKESHWEENRNENSGNSWNKNFGSGWVSNRGRGRGNRGRGTYRSSFAYKDQNENRWQNRKPLSGNSNSSGSESFKFVEQQSYKRKSEQEFSFDTPADRSGWTSASSWAVRKTLPADVQNYYSRRGRNSSGPQSGWMKQEEETSGQDSSLKDQTNQQVDGSQLPINMMQPQMNVMQQQMNAQHQPMNIFPYPVGVHAPLMNIQRNPFNIHPQLPLHLHTGVPLMQVATPTSVSQGLPPPPPPPPPSQQVNYIASQPDGKQLQGIPSSSHVSNNMSTPVLPAPTAAPGNTGMVQGPSSGNTSSSSHSKASNAAVKLAESKVSVAVEASADSSKTDKKLQIQEKAAQEVKLAIKPFYQNKDITKEEYKEIVRKAVDKVCHSKSGEVNSTKVANLVKAYVDKYKYSRKGSQKKTLEEPVSTEKNIG

SEQ ID NO: 905012 - protein, 1148 aa, Homo sapiens; identical to SEQ ID NO: 905000

SEQ ID NO: 905013 - protein, 1537 aa, Homo sapiens
MQEGGSEAVGRRGRGKVGRKLIPGRRQGGWRAQHARTERGQATGKRVSARLKATGTWETLFQREMKKKTVCTLNMGDKKYEDMEGEENGDNTISTGLLYSEADRCPICLNCLLEKEVGFPESCNHVFCMTCILKWAEELFIPIKTLETLASCPIDRKPFQAVFKFSALEGYVKVQVKKQLRETKDKKNENSFEKQVSCHENSKSCIRRKAIVREDLLSAKVCDLKWIHRNSLYSETGGKKNAAIKINKPQRSNWSTNQCFRNFFSNMFSSVSHSGESSFTYRAYCTEFIEASEISALIRQKRHELELSWFPDTLPGIGRIGFIPWNVETEVLPLISSVLPRTIFPTSTISFEHFGTSCKGYALAHTQEGEEKKQTSGTSNTRGSRRKPAMTTPTRRSTRNTRAETASQSQRSPISDNSGCDAPGNSNPSLSVPSSAESEKQTRQAPKRKSVRRGRKPPLLKKKLRSSVAAPEKSSSNDSVDEETAESDTSPVLEKEHQPDVDSSNICTVQTHVENQSANCLKSCNEQIEESEKHTANYDTEERVGSSSSESCAQDLPVLVGEEGEVKKLENTGIEANVLCLESEISENILEKGGDPLEKQDQISGLSQSEVKTDVCTVHLPNDFPTCLTSESKVYQPVSCPLSDLSENVESVVNEEKITESSLVEITEHKDFTLKTEELIESPKLESSEGEIIQTVDRQSVKSPEVQLLGHVETEDVEIIATCDTFGNEDFNNIQDSENNLLKNNLLNTKLEKSLEEKNESLTEHPRSTELPKTHIEQIQKHFSEDNNEMIPMECDSFCSDQNESEVEPSVNADLKQMNENSVTHCSENNMPSSDLADEKVETVSQPSESPKDTIDKTKKPRTRRSRFHSPSTTWSPNKDTPQEKKRPQSPSPRRETGKESRKSQSPSPKNESARGRKKSRSQSPKKDIARERRQSQSRSPKRDTTRESRRSESLSPRRETSRENKRSQPRVKDSSPGEKSRSQSRERESDRDGQRRERERRTRKWSRSRSHSRSPSRCRTKSKSSSFGRIDRDSYSPRWKGRWANDGWRCPRGNDRYRKNDPEKQNENTRKEKNDIHLDADDPNSADKHRNDCPNWITEKINSGPDPRTRNPEKLKESHWEENRNENSGNSWNKNFGSGWVSNRGRGRGNRGRGTYRSSFAYKDQNENRWQNRKPLSGNSNSSGSESFKFVEQQSYKRKSEQEFSFDTPADRSGWTSASSWAVRKTLPADVQNYYSRRGRNSSGPQSGWMKQEEETSGQDSSLKDQTNQQVDGSQLPINMMQPQMNVMQQQMNAQHQPMNIFPYPVGVHAPLMNIQRNPFNIHPQLPLHLHTGVPLMQVATPTSVSQGLPPPPPPPPPSQQVNYIASQPDGKQLQGIPSSSHVSNNMSTPVLPAPTAAPGNTGMVQGPSSGNTSSSSHSKASNAAVKLAESKVSVAVEASADSSKTDKKLQIQEKAAQEVKLAIKPFYQNKDITKEEYKEIVRKAVDKVCHSKSGEVNSTKVANLVKAYVDKYKYSRKGSQKKTLEEPVSTEKNIG

SEQ ID NO: 905014 - protein, 1464 aa, Homo sapiens
MQEGGSEAVGRRGRGKVGRKLIPGRRQGGWRAQHARTERGQATGKRVSARLKATGTWETLFQREMKKKTVCTLNMGDKKYEDMEGEENGDNTISTGLLYSEADRCPICLNCLLEKEVGFPESCNHVFCMTCILKWAEELFIPIKTLETLASCPIDRKPFQAVFKFSALEGYVKVQVKKQLRETKDKKNENSFEKQVSCHENSKSCIRRKAIVREDLLSAKVCDLKWIHRNSLYSETGGKKNAAIKINKPQRSNWSTNQCFRNFFSNMFSSVSHSGESSFTYRAYCTEFIEASEISALIRQKRHELELSWFPDTLPGIGRIGFIPWNVETEVLPLISSVLPRTIFPTSTISFEHFGTSCKGYALAHTQEGEEKKQTSGTSNTRGSRRKPAMTTPTRRSTRNTRAETASQSQRSPISDNSGCDAPGNSNPSLSVPSSAESEKQTRQAPKRKSVRRGRKPPLLKKKLRSSVAAPEKSSSNDSVDEETAESDTSPVLEKEHQPDVDSSNICTVQTHVENQSANCLKSCNEQIEESEKHTANYDTEERVGSSSSESCAQDLPVLVGEEGEVKKLENTGIEANVLCLESEISENILEKGGDPLEKQDQISGLSQSEVKTDVCTVHLPNDFPTCLTSESKVYQPVSCPLSDLSENVESVVNEEKITESSLVEITEHKDFTLKTEELIESPKLESSEGEIIQTVDRQSVKSPEVQLLGHVETEDVEIIATCDTFGNEDFNNIQDSENNLLKNNLLNTKLEKSLEEKNESLTEHPRSTELPKTHIEQIQKHFSEDNNEMIPMECDSFCSDQNESEVEPSVNADLKQMNENSVTHCSENNMPSSDLADEKVETVSQPSESPKDTIDKTKKPRTRRSRFHSPSTTWSPNKDTPQEKKRPQSPSPRRETGKESRKSQSPSPKNESARGRKKSRSQSPKKDIARERRQSQSRSPKRDTTRESRRSESLSPRRETSRENKRSQPRVKDSSPGEKSRSQSRERESDRDGQRRERERRTRKWSRSRSHSRSPSRCRTKSKSSSFGRIDRDSYSPRWKGRWANDGWRCPRGNDRYRKNDPEKQNENTRKEKNDIHLDADDPNSADKHRNDCPNWITEKINSGPDPRTRNPEKLKESHWEENRNENSGNSWNKNFGSGWVSNRGRGRGNRGRGTYRSSFAYKDQNENRWQNRKPLSGNSNSSGSESFKFVEQQSYKRKSEQEFSFDTPADRSGWTSASSWAVRKTLPADVQNYYSRRGRNSSGPQSGWMKQEEETSGQDSSLKDQTNQQVDGSQLPINMMQPQMNVMQQQMNAQHQPMNIFPYPVGVHAPLMNIQRNPFNIHPQLPLHLHTGVPLMQVATPTSVSQGLPPPPPPPPPSQQVNYIASQPDGKQLQKLQIQEKAAQEVKLAIKPFYQNKDITKEEYKEIVRKAVDKVCHSKSGEVNSTKVANLVKAYVDKYKYSRKGSQKKTLEEPVSTEKNIG

SEQ ID NO: 905015 - protein, 1463 aa, Homo sapiens; identical to SEQ ID NO: 905011

SEQ ID NO: 905016 - protein, 1537 aa, Homo sapiens; identical to SEQ ID NO: 905013

SEQ ID NO: 905017 - protein, 1507 aa, Homo sapiens
MQEGGSEAVGRRGRGKVGRKLIPGRRQGGWRAQHARTERGQATGKRVSARLKATGTWETLFQREMKKKTVCTLNMGDKKYEDMEGEENGDNTISTGLLYSEADRCPICLNCLLEKEVGFPESCNHVFCMTCILKWAEELFIPIKTLETLASCPIDRKPFQAVFKFSALEGYVKVQVKKQLRETKDKKNENSFEKQVSCHENSKSCIRRKAIVREDLLSAKVCDLKWIHRNSLYSETGGKKNAAIKINKPQRSNWSTNQCFRNFFSNMFSSVSHSGESSFTYRAYCTEFIEASEISALIRQKRHELELSWFPDTLPGIGRIGFIPWNVETEVLPLISSVLPRTIFPTSTISFEHFGTSCKGYALAHTQEGEEKKQTSGTSNTRGSRRKPAMTTPTRRSTRNTRAETASQSQRSPISDNSGCDAPGNSNPSLSVPSSAESEKQTRQAPKRKSVRRGRKPPLLKKKLRSSVAAPEKSSSNDSVDEETAESDTSPVLEKEHQPDVDSSNICTVQTHVENQSANCLKSCNEQIEESEKHTANYDTEERVGSSSSESCAQDLPVLVGEEGEVKKLENTGIEANVLCLESEISENILEKGGDPLEKQDQISGLSQSEVKTDVCTVHLPNDFPTCLTSESKVYQPVSCPLSDLSENVESVVNEEKITESSLVEITEHKDFTLKTEELIESPKLESSEGEIIQTVDRQSVKSPEVQLLGHVETEDVEIIATCDTFGNEDFNNIQDSENNLLKNNLLNTKLEKSLEEKNESLTEHPRSTELPKTHIEQIQKHFSEDNNEMIPMECDSFCSDQNESEVEPSVNADLKQMNENSVTHCSENNMPSSDLADEKVETVSQPSESPKDTIDKTKKPRTRRSRFHSPSTTWSPNKDTPQEKKRPQSPSPRRETGKESRKSQSPSPKNESARGRKKSRSQSPKKDIARERRQSQSRSPKRDTTRESRRSESLSPRRETSRENKRSQPRVKDSSPGEKSRSQSRERESDRDGQRRERERRTRKWSRSRSHSRSPSRCRTKSKSSSFGRIDRDSYSPRWKGRWANDGWRCPRGNDRYRKNDPEKQNENTRKEKNDIHLDADDPNSADKHRNDCPNWITEKINSGPDPRTRNPEKLKESHWEENRNENSGNSWNKNFGSGWVSNRGRGRGNRGRGTYRSSFAYKDQNENRWQNRKPLSGNSNSSGSESFKFVEQQSYKRKSEQEFSFDTPADRSGWTSASSWAVRKTLPADVQNYYSRRGRNSSGPQSGWMKQEEETSGQDSSLKDQTNQQVDGSQLPINMMQPQMNVMQQQMNAQHQPMNIFPYPVGVHAPLMNIQRNPFNIHPQLPLHLHTGVPLMQVATPTSVSQGLPPPPPPPPPSQQVNYIASQPDGKQLQGIPSSSHVSNNMSTPVLPAPTAAPGNTGMVQGPSSGNTSSSSHSKASNAAVKLAESKVSVAVEASADSSKTDKKLQIQEKAAQEVKLAIKPFYQNKDITKEEYKEIVRKAVDKVSYGFSGVCARCFEPPLF

SEQ ID NO: 905018 - protein, 1484 aa, Homo sapiens
MQEGGSEAVGRRGRGKVGRKLIPGRRQGGWRAQHARTERGQATGKRVSARLKATGTWETLFQREMKKKTVCTLNMGDKKYEDMEGEENGDNTISTGLLYSEADRCPICLNCLLEKEVGFPESCNHVFCMTCILKWAEELFIPIKTLETLASCPIDRKPFQAVFKFSALEGYVKVQVKKQLRETKDKKNENSFEKQVSCHENSKSCIRRKAIVREDLLSAKVCDLKWIHRNSLYSETGGKKNAAIKINKPQRSNWSTNQCFRNFFSNMFSSVSHSGESSFTYRAYCTEFIEASEISALIRQKRHELELSWFPDTLPGIGRIGFIPWNVETEVLPLISSVLPRTIFPTSTISFEHFGTSCKGYALAHTQEGEEKKQTSGTSNTRGSRRKPAMTTPTRRSTRNTRAETASQSQRSPISDNSGCDAPGNSNPSLSVPSSAESEKQTRQAPKRKSVRRGRKPPLLKKKLRSSVAAPEKSSSNDSVDEETAESDTSPVLEKEHQPDVDSSNICTVQTHVENQSANCLKSCNEQIEESEKHTANYDTEERVGSSSSESCAQDLPVLVGEEGEVKKLENTGIEANVLCLESEISENILEKGGDPLEKQDQISGLSQSEVKTDVCTVHLPNDFPTCLTSESKVYQPVSCPLSDLSENVESVVNEEKITESSLVEITEHKDFTLKTEELIESPKLESSEGEIIQTVDRQSVKSPEVQLLGHVETEDVEIIATCDTFGNEDFNNIQDSENNLLKNNLLNTKLEKSLEEKNESLTEHPRSTELPKTHIEQIQKHFSEDNNEMIPMECDSFCSDQNESEVEPSVNADLKQMNENSVTHCSENNMPSSDLADEKVETVSQPSESPKDTIDKTKKPRTRRSRFHSPSTTWSPNKDTPQEKKRPQSPSPRRETGKESRKSQSPSPKNESARGRKKSRSQSPKKDIARERRQSQSRSPKRDTTRESRRSESLSPRRETSRENKRSQPRVKDSSPGEKSRSQSRERESDRDGQRRERERRTRKWSRSRSHSRSPSRCRTKSKSSSFGRIDRDSYSPRWKGRWANDGWRCPRGNDRYRKNDPEKQNENTRKEKNDIHLDADDPNSADKHRNDCPNWITEKINSGPDPRTRNPEKLKESHWEENRNENSGNSWNKNFGSGWVSNRGRGRGNRGRGTYRSSFAYKDQNENRWQNRKPLSGNSNSSGSESFKFVEQQSYKRKSEQEFSFDTPADRSGWTSASSWAVRKTLPADVQNYYSRRGRNSSGPQSGWMKQEEETSGQDSSLKDQTNQQVDGSQLPINMMQPQMNVMQQQMNAQHQPMNIFPYPVGVHAPLMNIQRNPFNIHPQLPLHLHTGVPLMQVATPTSVSQGLPPPPPPPPPSQQVNYIASQPDGKQLQGIPSSSHVSNNMSTPVLPAPTAAPGNTGMVQGPSSGNTSSSSHSKASNAAVKLAESKKLQIQEKAAQEVKLAIKPFYQNKDITKEEYKEIVRKAVDKCVLLECSIQKM

SEQ ID NO: 905019 - protein, 160 aa, Homo sapiens
MKKKTVCTLNMGDKKYEDMEGEENGDNTISTGLLYSEADRCPICLNCLLEKEVGFPESCNHVFCMTCILKWAEELFIPIKTLETLASCPIDRKPFQAVFKFSALEGYVKVQVKKQLRETKDKKNENSFEKQVSCHENSKSCIRLVINFRSGMQMSGTEVN

SEQ ID NO: 905020 - protein, 221 aa, Homo sapiens
QFQAKTSKVESDQPQNSNDASMDATDQVVYKHCTVSGQTDAAKNAAAPAASSGSGTSTPLIPSPKPEPEKTSPKPEYPAEKPKQSDPSPPSQGTKPALPLASTSSDPPQASTAQPQPQPQPPKQPQLIGRPPSASQTPVPSSPLQISMTSLQNSLPPQLLQYQCDQCTVAFPTLELWQEHQHMHFLAAQNQFLHSPFLERPMDMPYMIFDPNNPLMTGQLL

SEQ ID NO: 905021 - protein, 269 aa, Homo sapiens
SYENQAETKDNEKRELTNERYIRTSNMQYQCKKCNVVFPRIFDLITHQKKQCYKDEDDDAQDESQTEDSMDATDQVVYKHCTVSGQTDAAKNAAAPAASSGSGTSTPLIPSPKPEPEKTSPKPEYPAEKPKQSDPSPPSQGTKPALPLASTSSDPPQASTAQPQPQPQPPKQPQLIGRPPSASQTPVPSSPLQISMTSLQNSLPPQLLQYQCDQCTVAFPTLELWQEHQHMHFLAAQNQFLHSPFLERPMDMPYMIFDPNNPLMTGQLL

SEQ ID NO: 905022 - protein, 469 aa, Homo sapiens
MSIHFSSPVFTSRSAAFSGRGAQVRLSSARPGGLGSSSLYGLGASRPRVAVRSAYGGPVGAGIREVTINQSLLAPLRLDADPSLQRVRQEESEQIKTLNNKFASFIDKVRFLEQQNKLLETKWTLLQEQKSAKSSRLPDIFEAQIAGLRGQLEALQVDGGRLEAELRSMQDVVEDFKNKYEDEINRRTAAENEFVVLKKDVDAAYMSKVELEAKVDALNDEINFLRTLNETELTELQSQISDTSVVLSMDNSRSLDLDGIIAEVKAQYEEMAKCSRAEAEAWYQTKFETLQAQAGKHGDDLRNTRNEISEMNRAIQRLQAEIDNIKNQRAKLEAAIAEAEERGELALKDARAKQEELEAALQRAKQDMARQLREYQELMSVKLALDIEIATYRKLLEGEESRLAGDGVGAVNISVMNSTGGSSSGGGIGLTLGGTMGSNALSFSSSAGPGLLKAYSIRTASASRRSARD

SEQ ID NO: 905023 - protein, 469 aa, Homo sapiens; identical to SEQ ID NO: 905022

SEQ ID NO: 905024 - protein, 469 aa, Homo sapiens; identical to SEQ ID NO: 905022

SEQ ID NO: 905025 - protein, 469 aa, Homo sapiens; identical to SEQ ID NO: 905022

SEQ ID NO: 905026 - protein, 469 aa, Homo sapiens; identical to SEQ ID NO: 905022

SEQ ID NO: 905027 - protein, 436 aa, Homo sapiens
KIRLVRGRVLIGRARVAVRSAYGGPVGAGIREVTINQSLLAPLRLDADPSLQRVRQEESEQIKTLNNKFASFIDKVRFLEQQNKLLETKWTLLQEQKSAKSSRLPDIFEAQIAGLRGQLEALQVDGGRLEAELRSMQDVVEDFKNKYEDEINRRTAAENEFVVLKKDVDAAYMSKVELEAKVDALNDEINFLRTLNETELTELQSQISDTSVVLSMDNSRSLDLDGIIAEVKAQYEEMAKCSRAEAEAWYQTKFETLQAQAGKHGDDLRNTRNEISEMNRAIQRLQAEIDNIKNQRAKLEAAIAEAEERGELALKDARAKQEELEAALQRAKQDMARQLREYQELMSVKLALDIEIATYRKLLEGEESRLAGDGVGAVNISVMNSTGGSSSGGGIGLTLGGTMGSNALSFSSSAGPGLLKAYSIRTASASRRSARD

SEQ ID NO: 905028 - protein, 486 aa, Homo sapiens
MSIHFSSPVFTSRSAAFSGRGAQVRLSSARPGGLGSSSLYGLGASRPRVAVRSAYGGPVGAGIREVTINQSLLAPLRLDADPSLQRVRQEESEQIKTLNNKFASFIDKVRFLEQQNKLLETKWTLLQEQKSAKSSRLPDIFEAQIAGLRGQLEALQVDGGRLEAELRSMQDVVEDFKNKYEDEINRRTAAENEFVVLKKDVDAAYMSKVELEAKVDALNDEINFLRTLNETELTELQSQISDTSVVLSMDNSRSLDLDGIIAEVKAQYEEMAKCSRAEAEAWYQTKFETLQAQAGKHGDDLRNTRNEISEMNRAIQRLQAEIDNIKNQVLAWADGRKVLDVHRACGGRLRLAGQKKATTGSTLILSTLLAPGSGCRALSLGAHHSLQGQRTAEDLIMTHMALSHPLQPHFPRFPSLCSGHANLLPASCICQEWSCFRAFALGVASPWNVVLPALSMVVVFSSLGFRKRPLLRDGTLKHQPLYRQPV

SEQ ID NO: 905029 - protein, 434 aa, Homo sapiens
MSIHFSSPVFTSRSAAFSGRGAQVRLSSARPGGLGSSSLYGLGASRPRVAVRSAYGGPVGAGIREVTINQSLLAPLRLDADPSLQRVRQEESEQIKTLNNKFASFIDKVRFLEQQNKLLETKWTLLQEQKSAKSSRLPDIFEAQIAGLRGQLEALQVDGGRLEAELRSMQDVVEDFKNKYEDEINRRTAAENEFVVLKKDVDAAYMSKVELEAKVDALNDEINFLRTLNETELTELQSQISDTSVVLSMDNSRSLDLDGIIAEVKAQYEEMAKCSRAEAEAWYQTKFETLQAQAGKHGDDLRNTRNEISEMNRAIQRLQAEIDNIKNQRAKLEAAIAEAEERGELALKDARAKQEELEAALQRAKQDMARQLREYQELMSVKLALDIEIATYRKLLEGEESRKEPSSLSVLCPQVGWRWSGSREYLCDEFHWWQ

SEQ ID NO: 905030 - protein, 424 aa, Homo sapiens
MSIHFSSPVFTSRSAAFSGRGAQVRLSSARPGGLGSSSLYGLGASRPRVAVRSAYGGPVGAGIREVTINQSLLAPLRLDADPSLQRVRQEESEQIKTLNNKFASFIDKVRFLEQQNKLLETKWTLLQEQKSAKSSRLPDIFEAQIAGLRGQLEALQVDGGRLEAELRSMQDVVEDFKNKYEDEINRRTAAENEFVVLKKDVDAAYMSKVELEAKVDALNDEINFLRTLNETELTELQSQISDTSVVLSMDNSRSLDLDGIIAEVMSVKLALDIEIAEIDNIKTRAKLEAAIAEAEERGELALKDARAKQEELEAALQRAKQDMARQLREYQELMSVKLALDIEIATYRKLLEGEESRLAGDGVGAVNISVMNSTGGSSSGGGIGLTLGGTMGSNALSFSSSAGPGLLKAYSIRTASASRRSARD

SEQ ID NO: 905031 - protein, 381 aa, Homo sapiens
LGRIIHLTLRVEIALGNKATLRFQKKKKKKREFHHIAQAGLKQSARLRLPDIFEAQIAGLRGQLEALQVDGGRLEAELRSMQDVVEDFKNKYEDEINRRTAAENEFVVLKKDVDAAYMSKVELEAKVDALNDEINFLRTLNETELTELQSQISDTSVVLSMDNSRSLDLDGIIAEVKAQYEEMAKCSRAEAEAWYQTKFETLQAQAGKHGDDLRNTRNEISEMNRAIQRLQAEIDNIKNQRAKLEAAIAEAEERGELALKDARAKQEELEAALQRAKQDMARQLREYQELMSVKLALDIEIATYRKLLEGEESRLAGDGVGAVNISVMNSTGGSSSGGGIGLTLGGTMGSNALSFSSSAGPGLLKAYSIRTASASRRSARD

SEQ ID NO: 905032 - protein, 296 aa, Homo sapiens
ALLYCRYEDEINRRTAAENEFVVLKKDVDAAYMSKVELEAKVDALNDEINFLRTLNETELTELQSQISDTSVVLSMDNSRSLDLDGIIAEVKAQYEEMAKCSRAEAEAWYQTKFETLQAQAGKHGDDLRNTRNEISEMNRAIQRLQAEIDNIKNQRAKLEAAIAEAEERGELALKDARAKQEELEAALQRAKQDMARQLREYQELMSVKLALDIEIATYRKLLEGEESRLAGDGVGAVNISVMNSTGGSSSGGGIGLTLGGTMGSNALSFSSSAGPGLLKAYSIRTASASRRSARD

SEQ ID NO: 905033 - protein, 432 aa, Homo sapiens
MSIHFSSPVFTSRSAAFSGRGAQVRLSSARPGGLGSSSLYGLGASRPRVAVRSAYGGPVGAGIREVTINQSLLAPLRLDADPSLQRVRQEESEQIKTLNNKFASFIDKVRFLEQQNKLLETKWTLLQEQKSAKSSRLPDIFEAQIAGLRGQLEALQVDGGRLEAELRSMQDVVEDFKNKYEDEINRRTAAENEFVVLKKDVDAAYMSKVELEAKVDALNDEINFLRTLNETELTELQSQISDTSVVLSMDNSRSLDLDGIIAEVKAQYEEMAKCSRAEAEAWYQTKFETLQAQAGKHGDDLRNTRNEISEMNRAIQRLQAEIDNIKNQAIAEAEECGELALKDARAKQEELEAALQRAKQDMARQLREYQELMSVKLALDIEIATYRKLLEGEESRLAGDGVGAVNISVMNSTGGSSSGGGIGLALGGTMGS

SEQ ID NO: 905034 - protein, 221 aa, Homo sapiens
MDNSRSLDLDGIIAEVKAQYEEMAKCSRAEAEAWYQTKFETLQAQAGKHGDDLRNTRNEISEMNRAIQRLQAEIDNIKNQRAKLEAAIAEAEERGELALKDARAKQEELEAALQRAKQDMARQLREYQELMSVKLALDIEIATYRKLLEGEESRLAGDGVGAVNISVMNSTGGSSSGGGIGLTLGGTMGSNALSFSSSAGPGLLKAYSIRTASASRRSARD

SEQ ID NO: 905035 - protein, 242 aa, Homo sapiens
MKGGHLNCSTHNYQYTSVVLSMDNSRSLDLDGIIAEVKAQYEEMAKCSRAEAEAWYQTKFETLQAQAGKHGDDLRNTRNEISEMNRAIQRLQAEIDNIKNQRAKLEAAIAEAEERGELALKDARAKQEELEAALQRAKQDMARQLREYQELMSVKLALDIEIATYRKLLEGEESRLAGDGVGAVNISVMNSTGGSSSGGGIGLTLGGTMGSNALSFSSSAGPGLLKAYSIRTASASRRSARD

SEQ ID NO: 905036 - protein, 184 aa, Homo sapiens
MLSLAERQTASTEGRGSEDREWPDGQAGRQTGEPQLTAALLPTRAKLEAAIAEAEERGELALKDARAKQEELEAALQRAKQDMARQLREYQELMSVKLALDIEIATYRKLLEGEESRLAGDGVGAVNISVMNSTGGSSSGGGIGLTLGGTMGSNALSFSSSAGPGLLKAYSIRTASASRRSARD

SEQ ID NO: 905037 - protein, 71 aa, Homo sapiens
YEALGPGMGVRAGNISVMNSTGGSSSGGGIGLTLGGTMGSNALSFSSSAGPGLLKAYSIRTASASRRSARD

SEQ ID NO: 905038 - protein, 69 aa, Homo sapiens
MGSLVGSLTLKRALLFSLPAVMNSTGGSSSGGGIGLTLGGTMGSNALSFSSSAGPGLLKAYSIRTASAS

SEQ ID NO: 905039 - protein, 116 aa, Homo sapiens
MDSLVLGGVGGANEATLSKLPGCSLQDGQAGRQTGEPQLTAALLPTRAKLEAAIAEAEERGELALKDARAKQEELEAALQRAKQDMARQLREYQELMSVKLALDIEIATYRKLLEG

SEQ ID NO: 905040 - protein, 469 aa, Homo sapiens; identical to SEQ ID NO: 905022

SEQ ID NO: 905041 - protein, 469 aa, Homo sapiens; identical to SEQ ID NO: 905022

SEQ ID NO: 905042 - protein, 469 aa, Homo sapiens; identical to SEQ ID NO: 905022

SEQ ID NO: 905043 - protein, 469 aa, Homo sapiens; identical to SEQ ID NO: 905022

SEQ ID NO: 905044 - protein, 486 aa, Homo sapiens; identical to SEQ ID NO: 905028

SEQ ID NO: 905045 - protein, 388 aa, Homo sapiens
MSIHFSSPVFTSRSAAFSGRGAQVRLSSARPGGLGSSSLYGLGASRPRVAVRSAYGGPVGAGIREVTINQSLLAPLRLDADPSLQRVRQEESEQIKTLNNKFASFIDKVRFLEQQNKLLETKWTLLQEQKSAKSSRLPDIFEAQIAGLRGQLEALQVDGGRLEAELRSMQDVVEDFKNKYEDEINRRTAAENEFVVLKKDVDAAYMSKVELEAKVDALNDEINFLRTLNETELTELQSQISDTSVVLSMDNSRSLDLDGIIAEVKAQYEEMAKCSRAEAEAWYQTKFETLQAQAGKHGDDLRNTRNEISEMNRAIQRLQAEIDNIKNQVGQVLLASPATWGMQGWPAEAKLRMWSRRFPSPGQSWCHCLRPPCEISSTECSWPGPGMG

SEQ ID NO: 905046 - protein, 355 aa, Homo sapiens
MNKLLETKWTLLQEQKSAKSSRLPDIFEAQIAGLRGQLEALQVDGGRLEAELRSMQDVVEDFKNKYEDEINRRTAAENEFVVLKKDVDAAYMSKVELEAKVDALNDEINFLRTLNETELTELQSQISDTSVVLSMDNSRSLDLDGIIAEVKAQYEEMAKCSRAEAEAWYQTKFETLQAQAGKHGDDLRNTRNEISEMNRAIQRLQAEIDNIKNQRAKLEAAIAEAEERGELALKDARAKQEELEAALQRAKQDMARQLREYQELMSVKLALDIEIATYRKLLEGEESRLAGDGVGAVNISVMNSTGGSSSGGGIGLTLGGTMGSNALSFSSSAGPGLLKAYSIRTASASRRSARD

SEQ ID NO: 905047 - protein, 486 aa, Homo sapiens; identical to SEQ ID NO: 905028

SEQ ID NO: 905048 - protein, 398 aa, Homo sapiens
MSIHFSSPVFTSRSAAFSGRGAQVRLSSARPGGLGSSSLYGLGASRPRVAVRSAYGGPVGAGIREVTINQSLLAPLRLDADPSLQRVRQEESEQIKTLNNKFASFIDKVRFLEQQNKLLETKWTLLQEQKSAKSSRLPDIFEAQIAGLRGQLEALQVDGGRLEAELRSMQDVVEDFKNKYEDEINRRTAAENEFVVLKKDVDAAYMSKVELEAKVDALNDEINFLRTLNETELTELQSQISDTSVVLSMDNSRSLDLDGIIAEVKAQYEEMAKCSRAEAEAWYQTKFETLQAQAGKHGDDLRNTRNEISEMNRAIQRLQAEIDNIKNQRASGRRMPSGESGNRGPACRPREDVGTAVRANDMSRLANSDIGKGAKTKTTQGGRDQRAKEGNKTTVKRR

SEQ ID NO: 905049 - protein, 286 aa, Homo sapiens
EPATFHTGQVIATPAWSNQSYSSLGNKREAKVDALNDEINFLRTLNETELTELQSQISDTSVVLSMDNSRSLDLDGIIAEVKAQYEEMAKCSRAEAEAWYQTKFETLQAQAGKHGDDLRNTRNEISEMNRAIQRLQAEIDNIKNQRAKLEAAIAEAEERGELALKDARAKQEELEAALQRAKQDMARQLREYQELMSVKLALDIEIATYRKLLEGEESRLAGDGVGAVNISVMNSTGGSSSGGGIGLTLGGTMGSNALSFSSSAGPGLLKAYSIRTASASRRSARD

SEQ ID NO: 905050 - protein, 207 aa, Homo sapiens
GQALKHWSGTEAWSGTEAWYQRHKFETLQAQAGKHGDDLRNTRNEISEMNRAIQRLQAEIDNIKNQRAKLEAAIAEAEERGELALKDARAKQEELEAALQRAKQDMARQLREYQELMSVKLALDIEIATYRKLLEGEESRLAGDGVGAVNISVMNSTGGSSSGGGIGLTLGGTMGSNALSFSSSAGPGLLKAYSIRTASASRRSARD

SEQ ID NO: 905051 - protein, 99 aa, Homo sapiens
LLEVVALGCSLLLALDIEIATYRKLLEGEESRLAGDGVGAVNISVMNSTGGSSSGGGIGLTLGGTMGSNALSFSSSAGPGLLKAYSIRTASASRRSARD

SEQ ID NO: 905052 - protein, 78 aa, Homo sapiens
LFAWLFVRLMVWLMGGVGAVNISVMNSTGGSSSGGGIGLTLGGTMGSNALSFSSSAGPGLLKAYSIRTASASRRSARD

SEQ ID NO: 905053 - protein, 617 aa, Homo sapiens
FTVEDHTMQRDFRWLWVYEIGYAADNSRTLNVDSTAMTLPMSDPTAWATAMNNLGMAPLGIAGQPILPDFDPALGMMTGIPPITPMMPGLGIVPPPIPPDMPVVKEIIHCKSCTLFPPNPNLPPPATRERPPGCKTVFVGGLPENGTEQIIVEVFEQCGEIIAIRKSKKNFCHIRFAEEYMVDKALYLSGYRIRLGSSTDKKDTGRLHVDFAQARDDLYEWECKQRMLAREERHRRRMEEERLRPPSPPPVVHYSDHECSIVAEKLKDDSKFSEAVQTLLTWIERGEVNRRSANNFYSMIQSANSHVRRLVNEKAAHEKDMEEAKEKFKQALSGILIQFEQIVAVYHSASKQKAWDHFTKAQRKNISVWCKQAEEIRNIHNDELMGIRREEEMEMSDDEIEEMTETKETEESALVSQAEALKEENDSLRWQLDAYRNEVELLKQEQGKVHREDDPNKEQQLKLLQQALQGMQQHLLKVQEEYKKKEAELEKLKDDKLQVEKMLENLKEKESCASRLCASNQDSEYPLEKTMNSSPIKSEREALLVGIISTFLHVHPFGASIEYICSYLHRLDNKICTSDVECLMGRLQHTFKQEMTGVGASLEKRWKFCGFEGLKLT

SEQ ID NO: 905054 - protein, 581 aa, Homo sapiens
MTLPMSDPTAWATAMNNLGMAPLGIAGQPILPDFDPALGMMTGIPPITPMMPGLGIVPPPIPPDMPVVKEIIHCKSCTLFPPNPNLPPPATRERPPGCKTVFVGGLPENGTEQIIVEVFEQCGEIIAIRKSKKNFCHIRFAEEYMVDKALYLSGYRIRLGSSTDKKDTGRLHVDFAQARDDLYEWECKQRMLAREERHRRRMEEERLRPPSPPPVVHYSDHECSIVAEKLKDDSKFSEAVQTLLTWIERGEVNRRSANNFYSMIQSANSHVRRLVNEKAAHEKDMEEAKEKFKQALSGILIQFEQIVAVYHSASKQKAWDHFTKAQRKNISVWCKQAEEIRNIHNDELMGIRREEEMEMSDDEIEEMTETKETEESALVSQAEALKEENDSLRWQLDAYRNEVELLKQEQGKVHREDDPNKEQQLKLLQQALQGMQQHLLKVQEEYKKKEAELEKLKDDKLQVEKMLENLKEKESCASRLCASNQDSEYPLEKTMNSSPIKSEREALLVGIISTFLHVHPFGASIEYICSYLHRLDNKICTSDVECLMGRLQHTFKQEMTGVGASLEKRWKFCGFEGLKLT

SEQ ID NO: 905055 - protein, 113 aa, Homo sapiens
MLCPQESCASRLCASNQDSEYPLEKTMNSSPIKSEREALLVGIISTFLHVHPFGASIEYICSYLHRLDNKICTSDVECLMGRLQHTFKQEMTGVGASLEKRWKFCGFEGLKLT

SEQ ID NO: 905056 - protein, 581 aa, Homo sapiens; identical to SEQ ID NO: 905054

SEQ ID NO: 905057 - protein, 78 aa, Homo sapiens
VCESPALGQSAGSRPGSARRAFRKRVARRGAPRGHYEPRNCRAGPIFRGCIRTSASVAGELEVREAESPGGRGWGLWD

SEQ ID NO: 905058 - protein, 617 aa, Homo sapiens; identical to SEQ ID NO: 905053

SEQ ID NO: 905059 - protein, 172 aa, Homo sapiens
MASDEGKLFVGGLSFDTNEQSLEQVFSKYGQISEVVVVKDRETQRSRGFGFVTFENIDDAKDAMMAMNGKSVDGRQIRVDQAGKSSDNRSRGYRGGSAGGRGFFRGGRGRGRGFSRGGGDRGYGGNRFESRSGGYGGSRDYYSSRSQSGGYSDRSSGGSYRDSYDSYATHNE

SEQ ID NO: 905060 - protein, 168 aa, Homo sapiens
MASDEGKLFVGGLSFDTNEQSLEQVFSKYGQISEVVVVKDRETQRSRGFGFVTFENIDDAKDAMMAMNGKSVDGRQIRVDQAGKSSDNRSRGYRGGSAGGRGFFRGGRGRGRGFSRGGGDRGYGGNRFESRSGGYGGSRDYYSSRSQSGGYSDRSSGGSYRDSYDSYG

SEQ ID NO: 905061 - protein, 180 aa, Homo sapiens
TEPAPRNPLVAAMASDEGKLFVGGLSFDTNEQSLEQVFSKYGQISEVVVVKDRETQRSRGFGFVTFENIDDAKDAMMAMNGKSVDGRQIRVDQAGKSSDNRSRGYRGGSAGGRGFFRGGRGRGRGFSRGGGDRGYGGNRFESRSGGYGGSRDYYSSRSQSGGYSDRSSGGSYRDSYDSYG

SEQ ID NO: 905062 - protein, 172 aa, Homo sapiens; identical to SEQ ID NO: 905059

SEQ ID NO: 905063 - protein, 172 aa, Homo sapiens; identical to SEQ ID NO: 905059

SEQ ID NO: 905064 - protein, 172 aa, Homo sapiens; identical to SEQ ID NO: 905059

SEQ ID NO: 905065 - protein, 172 aa, Homo sapiens; identical to SEQ ID NO: 905059

SEQ ID NO: 905066 - protein, 172 aa, Homo sapiens; identical to SEQ ID NO: 905059

SEQ ID NO: 905067 - protein, 172 aa, Homo sapiens; identical to SEQ ID NO: 905059

SEQ ID NO: 905068 - protein, 172 aa, Homo sapiens; identical to SEQ ID NO: 905059

SEQ ID NO: 905069 - protein, 172 aa, Homo sapiens; identical to SEQ ID NO: 905059

SEQ ID NO: 905070 - protein, 299 aa, Homo sapiens
MASDEGKLFVGGLSFDTNEQSLEQVFSKYGQISEVVVVKDRETQRSRGFGFVTFENIDDAKDAMMAMNGKSVDGRQIRVDQAGKSSDNRSRGYRGGSAGGRGFFRGGRGRGRGFSRGGGDRGYGGNRFESRSGGYGGSRDYYSSRSQSGGYSDRSSGGSYRDSYDSYGKSHSEGATLLWPAVGARFTLVPSPSTLGWTLRPCHCACPEEAHLSSQSHFYRRTQKPNETDQKGKGERGPAGQSARCMCGLWGEAASCCFGAFTLCLLLVLSYTQRVKTLPAQDRPSNGCVFKDCGSFAER

SEQ ID NO: 905071 - protein, 199 aa, Homo sapiens
MASDEGKLFVGGLSFDTNEQSLEQVFSKYGQISEVVVVKDRETQRSRGFGFVTFENIDDAKDAMMAMNGKVRIRVLSRSPSRGWGTHLLTRPALCLQSVDGRQIRVDQAGKSSDNRSRGYRGGSAGGRGFFRGGRGRGRGFSRGGGDRGYGGNRFESRSGGYGGSRDYYSSRSQSGGYSDRSSGGSYRDSYDSYATHNE

SEQ ID NO: 905072 - protein, 97 aa, Homo sapiens
SHGQRIVQEQNAEIRRWYRGGSAGGRGFFRGGRGRGRGFSRGGGDRGYGGNRFESRSGGYGGSRDYYSSRSQSGGYSDRSSGGSYRDSYDSYATHNE

SEQ ID NO: 905073 - protein, 297 aa, Homo sapiens
MASDEGKLFVGGLSFDTNEQSLEQVFSKYGQISEVVVVKDRETQRSRGFGFVTFENIDDAKDAMMAMNGKSVDGRQIRVDQAGKSSDNRSRGYRGGSAGGRGFFRGGRGRGRGFSRGGGDRGYGGNRFESRSGGYGGSRDYYSSRSQSGGYSDRSSGGSYRDSYDSYGKSHSEGATLLWPAVGARFTLVPSPSTLGWTLRPCHCACPEEAHLSSQSHFYRRTQKPNETDQKGKGERGPAGQSARCMCGRRPASLGCGGWLLPGRRPRPGLASGVKLPLVASVPLHCACFLSSATHNE

SEQ ID NO: 905074 - protein, 244 aa, Homo sapiens
MSSRWSRSSQSTDRSLKSVDGRQIRVDQAGKSSDNRSRGYRGGSAGGRGFFRGGRGRGRGFSRGGGDRGYGGNRFESRSGGYGGSRDYYSSRSQSGGYSDRSSGGSYRDSYDSYGKSHSEGATLLWPAVGARFTLVPSPSTLGWTLRPCHCACPEEAHLSSQSHFYRRTQKPNETDQKGKGERGPAGQSARCMCGRRPASLGCGGWLLPGRRPRPGLASGVKLPLVASVPLHCACFLSSATHNE

SEQ ID NO: 905075 - protein, 135 aa, Homo sapiens [sequence omitted]

SEQ ID NO: 905076 - protein, 172 aa, Homo sapiens
MASDEGKLFVGGLSFDTNEQSLEQVFSKYGQISEVVVVKDRETQRSRGFGFVTFENIDDAKDAMMAMNGKSVDGRQIRVDQAGKSSDNRSRGYRGGSAGGRGFFRGGRGRGRGFSRGGGDRGYGGNRFESRSGGYGGSRDYYSSRSQSGGYSDRSSGGSYRDSYDSYATHNL

SEQ ID NO: 905077 - protein, 172 aa, Homo sapiens; identical to SEQ ID NO: 905059

SEQ ID NO: 905078 - protein, 135 aa, Homo sapiens [sequence omitted]

SEQ ID NO: 905079 - protein, 274 aa, Homo sapiens
MASDEGKLFVGGLSFDTNEQSLEQVFSKYGQISEVVVVKDRETQRSRGFGFVTFENIDDAKDAMMAMNGKSVDGRQIRVDQAGKSSDNRSRGYRGGSAGGRGFFRGGRGRGRGFSRGGGDRGYGGNRFESRSGGYGGSRDYYSSRSQSGGYSDRSSGGSYRDSYDSYGKSHSEGATLLWPAVGARFTLVPSPSTLGWTLRPCHCACPEEAHLSSQSHFYRRTQKPNETDQKGKGERGPAGQSARCMCGRRPASLGWSPRLFSLPSSSFQEALRQ

SEQ ID NO: 905080 - protein, 202 aa, Homo sapiens
MASDEGKLFVGGLSFDTNEQSLEQVFSKYGQISEVVVVKDRETQRSRGFGFVTFENIDDAKDAMMAMNGKSVDGRQIRVDQAGKSSDNRSRGYRGGSAGGRGFFRGGRGRGRGFSRGGGDRGYGGNRFESRSGGYGGSRDYYSSRSQSGGYSDRSSGGSYRDSYDSYEAGQRAEARGIPGRPQTASRLASSAVASRVLSILC

SEQ ID NO: 905081 - protein, 168 aa, Homo sapiens; identical to SEQ ID NO: 905060

SEQ ID NO: 905082 - protein, 168 aa, Homo sapiens; identical to SEQ ID NO: 905060

SEQ ID NO: 905083 - protein, 85 aa, Homo sapiens
GDLEDPIRRVSECSVVGPRRVWQQLPWSPSPCVHLCCAPHSRRADVPERFLKMFIYIVLFYWKTYAYSIDVVFAVAEEFLYAERA

SEQ ID NO: 905084 - protein, 55 aa, Homo sapiens
YSLFPVCAGGGDRGYGGNRFESRSGGYGGSRDYYSSRSQSVATVSLSLRSPQRRY

SEQ ID NO: 905085 - protein, 172 aa, Homo sapiens; identical to SEQ ID NO: 905059

SEQ ID NO: 905086 - protein, 172 aa, Homo sapiens; identical to SEQ ID NO: 905059

SEQ ID NO: 905087 - protein, 172 aa, Homo sapiens; identical to SEQ ID NO: 905059

SEQ ID NO: 905088 - protein, 297 aa, Homo sapiens; identical to SEQ ID NO: 905073

SEQ ID NO: 905089 - protein, 190 aa, Homo sapiens
TPRRGGGPGGVSGCSEAAMASDEGKLFVGGLSFDTNEQSLEQVFSKYGQISEVVVVKDRETQRSRGFGFVTFENIDDAKDAMMAMNGKSVDGRQIRVDQAGKSSDNRSRGYRGGSAGGRGFFRGGRGRGRGFSRGGGDRGYGGNRFESRSGGYGGSRDYYSSRSQSGGYSDRSSGGSYRDSYDSYATHNE

SEQ ID NO: 905090 - protein, 172 aa, Homo sapiens; identical to SEQ ID NO: 905059

SEQ ID NO: 905091 - protein, 119 aa, Homo sapiens
MSSRWSRSSQSTDRSLKSVDGRQIRVDQAGKSSDNRSRGYRGGSAGGRGFFRGGRGRGRGFSRGGGDRGYGGNRFESRSGGYGGSRDYYSSRSQSGGYSDRSSGGSYRDSYDSYATHNE

SEQ ID NO: 905092 - protein, 135 aa, Homo sapiens [sequence omitted]

SEQ ID NO: 905093 - protein, 286 aa, Homo sapiens
MSSRWSRSSQSTDRSLKTSLPCTVVVVKDRETQRSRGFGFVTFENIDDAKDAMMAMNGKSVDGRQIRVDQAGKSSDNRSRGYRGGSAGGRGFFRGGRGRGRGFSRGGGDRGYGGNRFESRSGGYGGSRDYYSSRSQSGGYSDRSSGGSYRDSYDSYGKSHSEGATLLWPAVGARFTLVPSPSTLGWTLRPCHCACPEEAHLSSQSHFYRRTQKPNETDQKGKGERGPAGQSARCMCGRRPASLGCGGWLLPGRRPRPGLASGVKLPLVASVPLHCACFLSSATHNE

SEQ ID NO: 905094 - protein, 135 aa, Homo sapiens [sequence omitted]

SEQ ID NO: 905095 - protein, 135 aa, Homo sapiens [sequence omitted]

SEQ ID NO: 905096 - protein, 284 aa, Homo sapiens
MASDEGKLFVGGLSFDTNEQSLEQVFSKYGQISEVVVVKDRETQRSRGFGFVTFENIDDAKDAMMAMNGKSVDGRQIRVDQAGKSSDNRSRGYRGGSAGGRGFFRGGRGRGRGFSRGGGDRGYGGNRFDVHLCCAPHSRRADVPERFLKMFIYIVLFYWKTYAYSIDVVFAVAEEFLYAVFFGFTKPIKRPCEMNLALTIPLHCTTHSLLRAPAARPEQREKVEKQRVCKPSLGPAELEREAQQTGAGQGRGARRGTGAGSSGLRAALGGFWQWWPEGWTVRAA

SEQ ID NO: 905097 - protein, 148 aa, Homo sapiens
SFDTNEQSLEQVFSKYGQISEVVVVKDRETQRSRGFGFVTFENIDDAKDAMMAMNGKSVDGRQIRVTAAMASDEGKLFVGGLSFDTNEQSLEQVFSKYGQISEVVVVKDRETQRSRGFGFVTFENIDDAKDAMMAMNGKRPSVLCAPQ

SEQ ID NO: 905098 - protein, 172 aa, Homo sapiens; identical to SEQ ID NO: 905059

SEQ ID NO: 905099 - protein, 168 aa, Homo sapiens; identical to SEQ ID NO: 905060

SEQ ID NO: 905100 - protein, 102 aa, Homo sapiens
GGRGRSQPPFRAGLLPAPSLTKWGRRRRGPAGPAGRTWRPRAWEPGRVLSPRPRGHRRSSRGGGLAPRRSHPNFHGSKKYFPIRGRSLPRQLRTTIKVFQGS

SEQ ID NO: 905101 - protein, 107 aa, Homo sapiens
MGKGDPKKPRGKMSSYAFFVQTCREEHKKKHPDASVNFSEFSKKCSERWKTMSAKEKGKFEDMAKADKARYEQRNENLYPSQRGDKKEVQGSQCTQEASFGLLPLLL

SEQ ID NO: 905102 - protein, 107 aa, Homo sapiens; identical to SEQ ID NO: 905101

SEQ ID NO: 905103 - protein, 107 aa, Homo sapiens; identical to SEQ ID NO: 905101

SEQ ID NO: 905104 - protein, 107 aa, Homo sapiens; identical to SEQ ID NO: 905101

SEQ ID NO: 905105 - protein, 107 aa, Homo sapiens; identical to SEQ ID NO: 905101

SEQ ID NO: 905106 - protein, 107 aa, Homo sapiens; identical to SEQ ID NO: 905101

SEQ ID NO: 905107 - protein, 107 aa, Homo sapiens; identical to SEQ ID NO: 905101

SEQ ID NO: 905108 - protein, 107 aa, Homo sapiens; identical to SEQ ID NO: 905101

SEQ ID NO: 905109 - protein, 107 aa, Homo sapiens; identical to SEQ ID NO: 905101

SEQ ID NO: 905110 - protein, 107 aa, Homo sapiens; identical to SEQ ID NO: 905101

SEQ ID NO: 905111 - protein, 138 aa, Homo sapiens
MGKGDPKKPRGKMSSYAFFVQTCREEHKKKHPDASVNFSEFSKKCSERWKTMSAKEKGKFEDMAKADKARYEQRNENLYPSQRGDNSAFFLFCSEYRPKIKGEHPGLSIGDVAKKLGEMWNNTAADDKQPYEQEGCEG

SEQ ID NO: 905112 - protein, 107 aa, Homo sapiens; identical to SEQ ID NO: 905101

SEQ ID NO: 905113 - protein, 107 aa, Homo sapiens; identical to SEQ ID NO: 905101

SEQ ID NO: 905114 - protein, 107 aa, Homo sapiens; identical to SEQ ID NO: 905101

SEQ ID NO: 905115 - protein, 107 aa, Homo sapiens; identical to SEQ ID NO: 905101

SEQ ID NO: 905116 - protein, 107 aa, Homo sapiens; identical to SEQ ID NO: 905101

SEQ ID NO: 905117 - protein, 132 aa, Homo sapiens
QLFILPHALYFRIEFKYNIKYAWTKYKALSSTLYTSSFRPSSSSALSIAQKSKENILACPLVMLRRNWERCGITLLQMTSSLMNKKAAKAERKNTNKDIAAYRAKGKGLMQQNNKGVVKAEKSKKKEGRGGR

SEQ ID NO: 905118 - protein, 158 aa, Homo sapiens
TLTKETCLRVAVPWSARAWSGAAGSWGDPRRWEREGLPKPAGVPWTLSAGAAFTAGPRRASVVRSPKASVELKLPQSACSQRVITHGAAPPCLPRAHLRGQGLFYQDSGVFLLLSSLPDLLTVRGAAKAQGLCIPRPVLTSQQPICPCCSNSSCPALF

SEQ ID NO: 905119 - protein, 107 aa, Homo sapiens; identical to SEQ ID NO: 905101

SEQ ID NO: 905120 - protein, 107 aa, Homo sapiens; identical to SEQ ID NO: 905101

SEQ ID NO: 905121 - protein, 107 aa, Homo sapiens; identical to SEQ ID NO: 905101

SEQ ID NO: 905122 - protein, 107 aa, Homo sapiens; identical to SEQ ID NO: 905101

SEQ ID NO: 905123 - protein, 107 aa, Homo sapiens; identical to SEQ ID NO: 905101

SEQ ID NO: 905124 - protein, 107 aa, Homo sapiens; identical to SEQ ID NO: 905101

SEQ ID NO: 905125 - protein, 107 aa, Homo sapiens; identical to SEQ ID NO: 905101

SEQ ID NO: 905126 - protein, 107 aa, Homo sapiens; identical to SEQ ID NO: 905101

SEQ ID NO: 905127 - protein, 107 aa, Homo sapiens; identical to SEQ ID NO: 905101

SEQ ID NO: 905128 - protein, 132 aa, Homo sapiens; identical to SEQ ID NO: 905117

SEQ ID NO: 905129 - protein, 103 aa, Homo sapiens
LDRYILLYLSSISAVVYRPSGSGRENSGLVQRGGIKATLERCGITLLQMTSSLMNKKAAKAERKNTNKDIAAYRAKGKGLMQQNNKGVVKAEKSKKKEGRGGR

SEQ ID NO: 905130 - protein, 107 aa, Homo sapiens; identical to SEQ ID NO: 905101

SEQ ID NO: 905131 - protein, 256 aa, Homo sapiens
MPGPATDAGKIPFCDAKEEIRAGLESSEGGGGPERPGARGQRQNIVWRNVVLMSLLHLGAVYSLVLIPKAKPLTLLWAYFCFLLAALGVTAGAHRLWSHRSYRAKLPLRIFLAVANSMAFQNDIFEWSRDHRAHHKYSETDADPHNARRGFFFSHIGWLFVRKHRDVIEKGRKLDVTDLLADPVVRIQRNTQHIQKEGRALNQEAACEMLREWHQGHILKVTLPGLHILALLHTHCNHSEKCCLMLRALSVSLEVF

SEQ ID NO: 905132 - protein, 330 aa, Homo sapiens
MPGPATDAGKIPFCDAKEEIRAGLESSEGGGGPERPGARGQRQNIVWRNVVLMSLLHLGAVYSLVLIPKAKPLTLLWAYFCFLLAALGVTAGAHRLWSHRSYRAKLPLRIFLAVANSMAFQNDIFEWSRDHRAHHKYSETDADPHNARRGFFFSHIGWLFVRKHRDVIEKGRKLDVTDLLADPVVRIQRKYYKISVVLMCFVVPTLVPWYIWGESLWNSYFLASILRYTISLNISWLVNSAAHMYGNRPYDKHISPRQNPLVALGAIGEGFHNYHHTFPFDYSASEFGLNFNPTTWFIDFMCWLGLATDRKRATKPMIEARKARTGDSSA

SEQ ID NO: 905133 - protein, 190 aa, Homo sapiens
MPGPATDAGKIPFCDAKEEIRAGLESSEGGGGPERPGARGQRQNIVWRNVVLMSLLHLGAVYSLVLIPKAKPLTLLWAYFCFLLAALGVTAGAHRLWSHRSYRAKLPLRIFLAVANSMAFQNDIFEWSRDHRAHHKYSETDADPHNARRGFFFSHIGWLFVRKHRDVIEKGRKLDVTDLLADPVVRIQRK

SEQ ID NO: 905134 - protein, 371 aa, Homo sapiens
MAAVCYINPLEWQKPPPPPSSSARAERLPACRCCGRPPRPAMPGPATDAGKIPFCDAKEEIRAGLESSEGGGGPERPGARGQRQNIVWRNVVLMSLLHLGAVYSLVLIPKAKPLTLLWAYFCFLLAALGVTAGAHRLWSHRSYRAKLPLRIFLAVANSMAFQNDIFEWSRDHRAHHKYSETDADPHNARRGFFFSHIGWLFVRKHRDVIEKGRKLDVTDLLADPVVRIQRKYYKISVVLMCFVVPTLVPWYIWGESLWNSYFLASILRYTISLNISWLVNSAAHMYGNRPYDKHISPRQNPLVALGAIGEGFHNYHHTFPFDYSASEFGLNFNPTTWFIDFMCWLGLATDRKRATKPMIEARKARTGDSSA

SEQ ID NO: 905135 - protein, 132 aa, Homo sapiens
MCFVVPTLVPWYIWGESLWNSYFLASILRYTISLNISWLVNSAAHMYGNRPYDKHISPRQNPLVALGAIGEGFHNYHHTFPFDYSASEFGLNFNPTTWFIDFMCWLGLATDRKRATKPMIEARKARTGDSSA

SEQ ID NO: 905136 - protein, 362 aa, Homo sapiens
RAGCRRGLAVREIPPKGKARATLISIGNACCLRVGPTATCAARANPFCTEEIRAGLESSEGGGGPERPGARGQRQNIVWRNVVLMSLLHLGAVYSLVLIPKAKPLTLLWAYFCFLLAALGVTAGAHRLWSHRSYRAKLPLRIFLAVANSMAFQNDIFEWSRDHRAHHKYSETDADPHNARRGFFFSHIGWLFVRKHRDVIEKGRKLDVTDLLADPVVRIQRKYYKISVVLMCFVVPTLVPWYIWGESLWNSYFLASILRYTISLNISWLVNSAAHMYGNRPYDKHISPRQNPLVALGAIGEGFHNYHHTFPFDYSASEFGLNFNPTTWFIDFMCWLGLATDRKRATKPMIEARKARTGDSSA

SEQ ID NO: 905137 - protein, 228 aa, Homo sapiens
THAYDHASAGMSPNPWTFQNDIFEWSRDHRAHHKYSETDADPHNARRGFFFSHIGWLFVRKHRDVIEKGRKLDVTDLLADPVVRIQRKYYKISVVLMCFVVPTLVPWYIWGESLWNSYFLASILRYTISLNISWLVNSAAHMYGNRPYDKHISPRQNPLVALGAIGEGFHNYHHTFPFDYSASEFGLNFNPTTWFIDFMCWLGLATDRKRATKPMIEARKARTGDSSA

SEQ ID NO: 905138 - protein, 199 aa, Homo sapiens
MPGPATDAGKIPFCDAKEEIRAGLESSEGGGGPERPGARGQRQNIVWRNVVLMSLLHLGAVYSLVLIPKAKPLTLLWAYFCFLLAALGVTAGAHRLWSHRSYRAKLPLRIFLAVANSMAFQNDIFEWSRDHRAHHKYSETDADPHNARRGFFFSQPKKLFKSILLRFNIRVWTCDLIAIAKIRQIYVVMCLNMMLTLTG

SEQ ID NO: 905139 - protein, 330 aa, Homo sapiens; identical to SEQ ID NO: 905132

SEQ ID NO: 905140 - protein, 330 aa, Homo sapiens; identical to SEQ ID NO: 905132

SEQ ID NO: 905141 - protein, 252 aa, Homo sapiens
MPGPATDAGKIPFCDAKEEIRAGLESSEGGGGPERPGARGQRQNIVWRNVVLMSLLHLGAVYSLVLIPKAKPLTLLWAYFCFLLAALGVTAGAHRLWSHSTQRRMLTPTMPAGASSSPILGGCLFASIEMLLRRGESLTSLTCLLILWSGSRESTIRSPWCSCALWSPRWCPGTSGERVCGIPTSWPLFSAIPSHSTSAGWSTAPPTCMETGPMTSTSALGRTHSSLWVPLVKASIITITPFPLTTLRVNLA

SEQ ID NO: 905142 - protein, 561 aa, Homo sapiens
MCALFILFLVFGACLALPVLLCVTGMLHSHVLVLVPIPPVFPVYWVMRFSVPSLGCLCRSWFLAGLLSLFLGPRCQILWVRRFVPCRLIMRDMVYSDVEDAQAVGVPRSLSADVPGTSVGTTKHMSTTEIFSTFSESGTTGSSKQGQLTFKHFSQFLNNYPQMLAERTATHMGEEEAPAGIVGVSHPSLEYFVWARWSLDHSKMSFWKAMDLADSQKYPQRQLGPVGPVAPQAMGTICHTSERPGGSRSEAQSRVSGLALGMSTREPGARGQRQNIVWRNVVLMSLLHLGAVYSLVLIPKAKPLTLLWAYFCFLLAALGVTAGAHRLWSHRSYRAKLPLRIFLAVANSMAFQNDIFEWSRDHRAHHKYSETDADPHNARRGFFFSHIGWLFVRKHRDVIEKGRKLDVTDLLADPVVRIQRKYYKISVVLMCFVVPTLVPWYIWGESLWNSYFLASILRYTISLNISWLVNSAAHMYGNRPYDKHISPRQNPLVALGAIGEGFHNYHHTFPFDYSASEFGLNFNPTTWFIDFMCWLGLATDRKRATKPMIEARKARTGDSSA

SEQ ID NO: 905143 - protein, 330 aa, Homo sapiens; identical to SEQ ID NO: 905132

SEQ ID NO: 905144 - protein, 132 aa, Homo sapiens
MPGPATDAGKIPFCDAKEEIRAGLESSEGGGGPERPGARGQRQNIVWRNVVLMSLLHLGAVYSLVLIPKAKPLTLLWAYFCFLLAALGVTAGAHRLWSHRSYRAKLPLRIFLAVANSMAFQAAAEVVLTQMP

SEQ ID NO: 905145 - protein, 119 aa, Homo sapiens
MLRAPRAILGFVNKQQAHDLLINKPDGTFLLRFSDSEIGGITIAWKFDSPERNLWNLKPFTTRDFSIRSLADRLGDLSYLIYVFPDRPKDEVFSKYYTPVLAKAVDGYVKPQIKQVVPE

SEQ ID NO: 905146 - protein, 208 aa, Homo sapiens [sequence omitted]

SEQ ID NO: 905147 - protein, 72 aa, Homo sapiens
RIKRADRRGAESVTEEKFTVLFESQFSVGSNELVFQVKVRPPALLPPLLQVTQEVEGPASGLLAAMPSDSLL

SEQ ID NO: 905148 - protein, 48 aa, Homo sapiens
MLRAPRAILGFVNKQQAHDLLINKPDGTFLLRFSDSEIGGITIAWKFD

SEQ ID NO: 905149 - protein, 76 aa, Homo sapiens
IRHEGIQECAESLSVCNLVDKEVEKIGSRIWWVDRGPGTWRVGPLASWKKQKQKTAVKDKLQISHVLRACGIWSEG

SEQ ID NO: 905150 - protein, 542 aa, Homo sapiens
IQWKRRQQLAGNGGPPEGSLDVLQSWCEKLAEIIWQNRQQIRRAEHLCQQLPIPGPVEEMLAEVNATITDIISALVTSTFIIEKQPPQVLKTQTKFAATVRLLVGGKLNVHMNPPQVKATIISEQQAKSLLKNENTRNECSGEILNNCCVMEYHQATGTLSAHFRNMSLKRIKRADRRGAESVTEEKFTVLFESQFSVGSNELVFQVKTLSLPVVVIVHGSQDHNATATVLWDNAFAEPGRVPFAVPDKVLWPQLCEALNMKFKAEVQSNRGLTKENLVFLAQKLFNNSSSHLEDYSGLSVSWSQFNRENLPGWNYTFWQWFDGVMEVLKKHHKPHWNDGAILGFVNKQQAHDLLINKPDGTFLLRFSDSEIGGITIAWKFDSPERNLWNLKPFTTRDFSIRSLADRLGDLSYLIYVFPDRPKDEVFSKYYTPVLAKAVDGYVKPQIKQVVPEFVNASADAGGSSATYMDQAPSPAVCPQAPYNMYPQNPDHVLDQDGEFDLDETMDVARHVEELLRRPMDSLDSRLSPPAGLFTSARGSLS

SEQ ID NO: 905151 - protein, 542 aa, Homo sapiens; identical to SEQ ID NO: 905150

SEQ ID NO: 905152 - protein, 237 aa, Homo sapiens
NSARAARVGFGAQVPPDWQVSHEFALNFNPSNPYCAGIQGIVDAYRQALPQVRLYGPTNFAPIINHVARFAAQAAHQGTASQYFMLLLLTDGAVTDVEATREAVVRASNLPMSVIIVGVGGADFEAMEQLDADGGPLHTRSGQAAARDIVQFVPYRRFQNAPREALAQTVLAEVPTQLVSYFRAQGWAPLKPLPPSAKDPATGPPGLGSLGGCGKSSILCPRGPSGPQPNPSHSPQC

SEQ ID NO: 905153 - protein, 573 aa, Homo sapiens
MKMMHMAHCVTLVQLSISCDHLIDKDIGSKSDPLCVLLQDVGGGSWAELGRTERVRNCSSPEFSKTLQLEYRFETVQKLRFGIYDIDNKTPELRDDDFLGGAECSLGQIVSSQVLTLPLMLKPGKPAGRGTITVSAQELKDNRVVTMEVEARNLDKKDFLGKSDPFLEFFRQGDGKWHLVYRSEVIKNNLNPTWKRFSVPVQHFCGGNPSTPIQVQCSDYDSDGSHDLIGTFHTSLAQLQAVPAEFECIHPEKQQKKKSYKNSGTIRVKICRVETEYSFLDYVMGGCQINFTVGVDFTGSNGDPSSPDSLHYLSPTGVNEYLMALWSVGSVVQDYDSDKLFPAFGFGAQVPPDWQVSHEFALNFNPSNPYCAGIQGIVDAYRQALPQVRLYGPTNFAPIINHVARFAAQAAHQGTASQYFMLLLLTDGAVTDVEATREAVVRASNLPMSVIIVGVGGADFEAMEQLDADGGPLHTRSGQAAARDIVQFVPYRRFQNAPREALAQTVLAEVPTQLVSYFRAQGWAPLKPLPPSAKDPATGPPGLGSLGGCGKSSILCPRGPSGPQPNPSHSPQC

SEQ ID NO: 905154 - protein, 573 aa, Homo sapiens; identical to SEQ ID NO: 905153

SEQ ID NO: 905155 - protein, 645 aa, Homo sapiens
RRAGLSVTTCDTDGWLACARGIQATADIADMRGPRRRWWLRWAPGSRSGWGCRPRGGGTRAGGVIRGLGSGAAQLSPMAHCVTLVQLSISCDHLIDKDIGSKSDPLCVLLQDVGGGSWAELGRTERVRNCSSPEFSKTLQLEYRFETVQKLRFGIYDIDNKTPELRDDDFLGGAECSLGQIVSSQVLTLPLMLKPGKPAGRGTITVSAQELKDNRVVTMEVEARNLDKKDFLGKSDPFLEFFRQGDGKWHLVYRSEVIKNNLNPTWKRFSVPVQHFCGGNPSTPIQVQCSDYDSDGSHDLIGTFHTSLAQLQAVPAEFECIHPEKQQKKKSYKNSGTIRVKICRVETEYSFLDYVMGGCQINFTVGVDFTGSNGDPSSPDSLHYLSPTGVNEYLMALWSVGSVVQDYDSDKLFPAFGFGAQVPPDWQVSHEFALNFNPSNPYCAGIQGIVDAYRQALPQVRLYGPTNFAPIINHVARFAAQAAHQGTASQYFMLLLLTDGAVTDVEATREAVVRASNLPMSVIIVGVGGADFEAMEQLDADGGPLHTRSGQAAARDIVQFVPYRRFQNAPREALAQTVLAEVPTQLVSYFRAQGWAPLKPLPPSAKDPATGPPGLGSLGGCGKSSILCPRGPSGPQPNPSHSPQC

SEQ ID NO: 905156 - protein, 568 aa, Homo sapiens
MAHCVTLVQLSISCDHLIDKDIGSKSDPLCVLLQDVGGGSWAELGRTERVRNCSSPEFSKTLQLEYRFETVQKLRFGIYDIDNKTPELRDDDFLGGAECSLGQIVSSQVLTLPLMLKPGKPAGRGTITVSAQELKDNRVVTMEVEARNLDKKDFLGKSDPFLEFFRQGDGKWHLVYRSEVIKNNLNPTWKRFSVPVQHFCGGNPSTPIQVQCSDYDSDGSHDLIGTFHTSLAQLQAVPAEFECIHPEKQQKKKSYKNSGTIRVKICRVETEYSFLDYVMGGCQINFTVGVDFTGSNGDPSSPDSLHYLSPTGVNEYLMALWSVGSVVQDYDSDKLFPAFGFGAQVPPDWQVSHEFALNFNPSNPYCAGIQGIVDAYRQALPQVRLYGPTNFAPIINHVARFAAQAAHQGTASQYFMLLLLTDGAVTDVEATREAVVRASNLPMSVIIVGVGGADFEAMEQLDADGGPLHTRSGQAAARDIVQFVPYRRFQNAPREALAQTVLAEVPTQLVSYFRAQGWAPLKPLPPSAKDPATGPPGLGSLGGCGKSSILCPRGPSGPQPNPSHSPQC

SEQ ID NO: 905157 - protein, 549 aa, Homo sapiens
MKMMHMAHCVTLVQLSISCDHLIDKDIGSKSDPLCVLLQDVGGGSWAELGRTERVRNCSSPEFSKTLQLEYRFETVQKLRFGIYDIDNKTPELRDDDFLGGAECSLGQIVSSQVLTLPLMLKPGKPAGRGTITDFLGKSDPFLEFFRQGDGKWHLVYRSEVIKNNLNPTWKRFSVPVQHFCGGNPSTPIQVQCSDYDSDGSHDLIGTFHTSLAQLQAVPAEFECIHPEKQQKKKSYKNSGTIRVKICRVETEYSFLDYVMGGCQINFTVGVDFTGSNGDPSSPDSLHYLSPTGVNEYLMALWSVGSVVQDYDSDKLFPAFGFGAQVPPDWQVSHEFALNFNPSNPYCAGIQGIVDAYRQALPQVRLYGPTNFAPIINHVARFAAQAAHQGTASQYFMLLLLTDGAVTDVEATREAVVRASNLPMSVIIVGVGGADFEAMEQLDADGGPLHTRSGQAAARDIVQFVPYRRFQNAPREALAQTVLAEVPTQLVSYFRAQGWAPLKPLPPSAKDPATGPPGLGSLGGCGKSSILCPRGPSGPQPNPSHSPQC

SEQ ID NO: 905158 - protein, 605 aa, Homo sapiens
MKMMHMAHCVTLVQLSISCDHLIDKDIGSKSDPLCVLLQDVGGGSWAELGRTERVRNCSSPEFSKTLQLEYRFETVQKLRFGIYDIDNKTPELRDDDFLGGAECSLGQIVSSQVLTLPLMLKPGKPAGRGTITVSAQELKDNRVVTMEVEARNLDKKDFLGKSDPFLEFFRQGDGKWHLVYRSEVIKNNLNPTWKRFSVPVQHFCGGNPSTPIQVQCSDYDSDGSHDLIGTFHTSLAQLQAVPAEFECIHPEKQQKKKSYKNSGTIRVKICRVRQKPMYTKALIPELHDTNCYHPRHDPGFIVQVETEYSFLDYVMGGCQINFTVGVDFTGSNGDPSSPDSLHYLSPTGVNEYLMALWSVGSVVQDYDSDKLFPAFGFGAQVPPDWQVSHEFALNFNPSNPYCAGIQGIVDAYRQALPQVRLYGPTNFAPIINHVARFAAQAAHQGTASQYFMLLLLTDGAVTDVEATREAVVRASNLPMSVIIVGVGGADFEAMEQLDADGGPLHTRSGQAAARDIVQFVPYRRFQNAPREALAQTVLAEVPTQLVSYFRAQGWAPLKPLPPSAKDPATGPPGLGSLGGCGKSSILCPRGPSGPQPNPSHSPQC

SEQ ID NO: 905159 - protein, 612 aa, Homo sapiens [sequence omitted]

SEQ ID NO: 905160 - protein, 612 aa, Homo sapiens [sequence omitted]

SEQ ID NO: 905161 - protein, 612 aa, Homo sapiens [sequence omitted]

SEQ ID NO: 905162 - protein, 612 aa, Homo sapiens [sequence omitted]

SEQ ID NO: 905163 - protein, 573 aa, Homo sapiens; identical to SEQ ID NO: 905153

SEQ ID NO: 905164 - protein, 671 aa, Homo sapiens
RRAGLSVTTCDTDGWLACARGIQATARYRGHERPAKEVVAALGSGKPFGLGLSAAGRRHSRGGGNSGSGFWCRAAFPGLTWPLLLVKEIHLLFYQMAHCVTLVQLSISCDHLIDKDIGSKSDPLCVLLQDVGGGSWAELGRTERVRNCSSPEFSKTLQLEYRFETVQKLRFGIYDIDNKTPELRDDDFLGGAECSLGQIVSSQVLTLPLMLKPGKPAGRGTITDFLGKSDPFLEFFRQGDGKWHLVYRSEVIKNNLNPTWKRFSVPVQHFCGGNPSTPIQVQCSDYDSDGSHDLIGTFHTSLAQLQAVPAEFECIHPEKQQKKKSYKNSGTIRVKICRVRQKPMYTKALIPELHDTNCYHPRHDPGFIVQVETEYSFLDYVMGGCQINFTVGVDFTGSNGDPSSPDSLHYLSPTGVNEYLMALWSVGSVVQDYDSDKLFPAFGFGAQVPPDWQVSHEFALNFNPSNPYCAGIQGIVDAYRQALPQVRLYGPTNFAPIINHVARFAAQAAHQGTASQYFMLLLLTDGAVTDVEATREAVVRASNLPMSVIIVGVGGADFEAMEQLDADGGPLHTRSGQAAARDIVQFVPYRRFQNAPREALAQTVLAEVPTQLVSYFRAQGWAPLKPLPPSAKDPATGPPGLGSLGGCGKSSILCPRGPSGPQPNPSHSPQC

SEQ ID NO: 905165 - protein, 932 aa, Homo sapiens
MAVVIRLQGLPIVAGTMDIRHFFSGLTIPDGGVHIVGGELGEAFIVFATDEDARLGMMRTGGTIKGSKVTLLLSSKTEMQNMIELSRRRFETANLDIPPANASRSGPPPSSGMSSRVNLPTTVSNFNNPSPSVVTATTSVHESNKNIQTFSTASVGTAPPNMGASFGSPTFSSTVPSTASPMNTVPPPPIPPIPAMPSLPPMPSIPPIPVPPPVPTLPPVPPVPPIPPVPSVPPMTPLPPMSGMPPLNPPPVAPLPAGMNGSGAPMNLNNNLNPMFLGPLNPVNPIQMNSQSSVKPLPINPDDLYVSVHGMPFSAMENDVRDFFHGLRVDAVHLLKDHVGRNNGNGLVKFLSPQDTFEALKRNRMLMIQRYVEVSPATERQWVAAGGHITFKQNMGPSGQTHPPPQTLPRSKSPSGQKRSRSRSPHEAGFCVYLKGLPFEAENKHVIDFFKKLDIVEDSIYIAYGPNGKATGEGFVEFRNEADYKAALCRHKQYMGNRFIQVHPITKKGMLEKIDMIRKRLQNFSYDQREMILNPEGDVNSAKVCAHITNIPFSITKMDVLQFLEGIPVDENAVHVLVDNNGQGLGQALVQFKNEDDARKSERLHRKKLNGREAFVHVVTLEDMREIEKNPPAQGKKGLKMPVPGNPAVPGMPNAGLPGVGLPSAGLPGAGLPSTGLPGSAITSAGLPGAGMPSAGIPSAGGEEHAFLTVGSKEANNGPPFNFPGNFGGSNAFGPPIPPPGLGGGAFGDARPGMPSVGNSGLPGLGLDVPGFGGGPNNLSGPSGFGGGPQNFGNGPGSLGGPPGFGSGPPGLGSAPGHLGGPPAFGPGPGPGPGPGPIHIGGPPGFASSSGKPGPTVIKVQNMPFTVSIDEILDFFYGYQVIPGSVCLKYNEKGMPTGEAMVAFESRDEATAAVIDLNDRPIGSRKVKLVLG

SEQ ID NO: 905166 - protein, 512 aa, Homo sapiens
MKMMHMAHCVTLVQLSISCDHLIDKDIGSKSDPLCVLLQDVGGGSWAELGRTERVRNCSSPEFSKTLQLEYRFETVQKLRFGIYDIDNKTPELRDDDFLGGAECSLGQIVSSQVLTLPLMLKPGKPAGRGTITVSAQELKDNRVVTMEVEARNLDKKDFLGKSDPFLEFFRQGDGKWHLVYRSEVIKNNLNPTWKRFSVPVQHFCGGNPSTPIQVQCSDYDSDGSHDLIGTFHTSLAQLQAVPAEFECIHPEKQQKKKSYKNSGTIRVKICRVETEYSFLDYVMGGCQINFTVGVDFTGSNGDPSSPDSLHYLSPTGVNEYLMALWSVGSVVQDYDSDKLFPAFGFGAQVPPDWQVSHEFALNFNPSNPYCAGIQGIVDAYRQALPQVRLYGPTNFAPIINHVARFAAQAAHQGTASQYFMLLLLTDGAVTDVEATREAVVRASNLPMSVIIVGVGGADFEAMEQLDADGGPLHTRSGQAAARDIVQFVPYRRFQNVSRCKFDLGVYPFTFP

SEQ ID NO: 905167 - protein, 932 aa, Homo sapiens; identical to SEQ ID NO: 905165

SEQ ID NO: 905168 - protein, 518 aa, Homo sapiens
MKMMHMAHCVTLVQLSISCDHLIDKDIGSKSDPLCVLLQDVGGGSWAELGRTERVRNCSSPEFSKTLQLEYRFETVQKLRFGIYDIDNKTPELRDDDFLGGAECSLGQIVSSQVLTLPLMLKPGKPAGRGTITVSAQELKDNRVVTMEVEARNLDKKDFLGKSDPFLEFFRQGDGKWHLVYRSEVIKNNLNPTWKRFSVPVQHFCGGNPSTPIQVQCSDYDSDGSHDLIGTFHTSLAQLQAVPAEFECIHPEKQQKKKSYKNSGTIRVKICRVETEYSFLDYVMGGCQINFTVGVDFTGSNGDPSSPDSLHYLSPTGVNEYLMALWSVGSVVQDYDSDKLFPAFGFGAQVPPDWQVSHEFALNFNPSNPYCAGIQGIVDAYRQALPQVRLYGPTNFAPIINHVARFAAQAAHQGTASQYFMLLLLTDGAVTDVEATREAVVAPREALAQTVLAEVPTQLVSYFRAQGWAPLKPLPPSAKDPATGPPGLGSLGGCGKSSILCPRGPSGPQPNPSHSPQC

SEQ ID NO: 905169 - protein, 932 aa, Homo sapiens; identical to SEQ ID NO: 905165

SEQ ID NO: 905170 - protein, 612 aa, Homo sapiens [sequence omitted]

SEQ ID NO: 905171 - protein, 612 aa, Homo sapiens [sequence omitted]

SEQ ID NO: 905172 - protein, 612 aa, Homo sapiens [sequence omitted]

SEQ ID NO: 905173 - protein, 612 aa, Homo sapiens [sequence omitted]

SEQ ID NO: 905174 - protein, 612 aa, Homo sapiens [sequence omitted]

SEQ ID NO: 905175 - protein, 151 aa, Homo sapiens
MAHCVTLVQLSISCDHLIDKDIGSKSDPLCVLLQDVGGGSWAELGRTERVRNCSSPEFSKTLQLEYRFETVQKLRFGIYDIDNKTPELRDDDFLGGAECSLGQIVVPSQGNWTLPPLMLERPGKNWLGPGGEQSKGLQLQEIKGTNPCNNP

SEQ ID NO: 905176 - protein, 353 aa, Homo sapiens
ERGAAERAERPFCEAAKEVVGEGGGGCVGLREAVRAGAVGRGAEALARGMAHCVTLVQLSISCDHLIDKDIGSKSDPLCVLLQDVGGGSWAELGRTERVRNCSSPEFSKTLQLEYRFETVQKLRFGIYDIDNKTPELRDDDFLGGAECSLGQIVSSQVLTLPLMLKPGKPAGRGTITVSAQELKDNRVVTMEVEARNLDKKDFLGKSDPFLEFFRQGDGKWHLVYRSEVIKNNLNPTWKRFSVPVQHFCGGNPSTPIQVQCFRIMTSGRGHTCSSNREHFQTTGWAPTGQRKPRHEYGSGSTPVKSTATTDKPPRHLGHIRGERIVAVKPQNTNSGQQPRHVETISVTGDTSP

SEQ ID NO: 905177 - protein, 573 aa, Homo sapiens; identical to SEQ ID NO: 905153

SEQ ID NO: 905178 - protein, 568 aa, Homo sapiens; identical to SEQ ID NO: 905156

SEQ ID NO: 905179 - protein, 663 aa, Homo sapiens
RRAGLSVTTCDTDGWLACARGIQATARYRGHERPAKEVVAALGSGKPFGLGLSAAGRRHSRGGGNSGSGFWCRAAFPGLTWPLLLVKEIHLLFYQMAHCVTLVQLSISCDHLIDKDIGSKSDPLCVLLQDVGGGSWAELGRTERVRNCSSPEFSKTLQLEYRFETVQKLRFGIYDIDNKTPELRDDDFLGGAECSLGQIVSSQVLTLPLMLKPGKPAGRGTITVSAQELKDNRVVTMEVEARNLDKKDFLGKSDPFLEFFRQGDGKWHLVYRSEVIKNNLNPTWKRFSVPVQHFCGGNPSTPIQVQCSDYDSDGSHDLIGTFHTSLAQLQAVPAEFECIHPEKQQKKKSYKNSGTIRVKICRVETEYSFLDYVMGGCQINFTVGVDFTGSNGDPSSPDSLHYLSPTGVNEYLMALWSVGSVVQDYDSDKLFPAFGFGAQVPPDWQVSHEFALNFNPSNPYCAGIQGIVDAYRQALPQVRLYGPTNFAPIINHVARFAAQAAHQGTASQYFMLLLLTDGAVTDVEATREAVVRASNLPMSVIIVGVGGADFEAMEQLDADGGPLHTRSGQAAARDIVQFVPYRRFQNAPREALAQTVLAEVPTQLVSYFRAQGWAPLKPLPPSAKDPATGPPGLGSLGGCGKSSILCPRGPSGPQPNPSHSPQC

SEQ ID NO: 905180 - protein, 621 aa, Homo sapiens
RRAGLSVTTCDTDGWLACARGIQATADIADMRGPRRRWWLRWAPGSRSGWGCRPRGGGTRAGGVIRGLGSGAAQLSPMAHCVTLVQLSISCDHLIDKDIGSKSDPLCVLLQDVGGGSWAELGRTERVRNCSSPEFSKTLQLEYRFETVQKLRFGIYDIDNKTPELRDDDFLGGAECSLGQIVSSQVLTLPLMLKPGKPAGRGTITDFLGKSDPFLEFFRQGDGKWHLVYRSEVIKNNLNPTWKRFSVPVQHFCGGNPSTPIQVQCSDYDSDGSHDLIGTFHTSLAQLQAVPAEFECIHPEKQQKKKSYKNSGTIRVKICRVETEYSFLDYVMGGCQINFTVGVDFTGSNGDPSSPDSLHYLSPTGVNEYLMALWSVGSVVQDYDSDKLFPAFGFGAQVPPDWQVSHEFALNFNPSNPYCAGIQGIVDAYRQALPQVRLYGPTNFAPIINHVARFAAQAAHQGTASQYFMLLLLTDGAVTDVEATREAVVRASNLPMSVIIVGVGGADFEAMEQLDADGGPLHTRSGQAAARDIVQFVPYRRFQNAPREALAQTVLAEVPTQLVSYFRAQGWAPLKPLPPSAKDPATGPPGLGSLGGCGKSSILCPRGPSGPQPNPSHSPQC

SEQ ID NO: 905181 - protein, 612 aa, Homo sapiens [sequence omitted]

SEQ ID NO: 905182 - protein, 612 aa, Homo sapiens [sequence omitted]

SEQ ID NO: 905183 - protein, 573 aa, Homo sapiens; identical to SEQ ID NO: 905153

SEQ ID NO: 905184 - protein, 932 aa, Homo sapiens; identical to SEQ ID NO: 905165

SEQ ID NO: 905185 - protein, 932 aa, Homo sapiens; identical to SEQ ID NO: 905165

SEQ ID NO: 905186 - protein, 932 aa, Homo sapiens; identical to SEQ ID NO: 905165

SEQ ID NO: 905187 - protein, 508 aa, Homo sapiens
MKMMHMAHCVTLVQLSISCDHLIDKDIGSKSDPLCVLLQDVGGGSWAELGRTERVRNCSSPEFSKTLQLEYRFETVQKLRFGIYDIDNKTPELRDDDFLGGAECSLGQIVSSQVLTLPLMLKPGKPAGRGTITVSAQELKDNRVVTMEVEARNLDKKDFLGKSDPFLEFFRQGDGKWHLVYRSEVIKNNLNPTWKRFSVPVQHFCGGNPSTPIQVQCSDYDSDGSHDLIGTFHTSLAQLQAVPAEFECIHPEKQQKKKSYKNSGTIRVKICRVETEYSFLDYVMGGCQINFTVGVDFTGSNGDPSSPDSLHYLSPTGVNEYLMALWSVGSVVQDYDSDKLFPAFGFGAQVPPDWQVSHEFALNFNPSNPYCAGIQGIVDAYRQALPQVRLYGPTNFAPIINHVARFAAQAAHQGTASQYFMLLLLTDGAVTDVEATREAVVRASNLPMSVIIVGVGGADFEAMEQLDADGGPLHTRSGQAAARDIVQFVPTAGRMPGGLGPGSQCHRV

SEQ ID NO: 905188 - protein, 612 aa, Homo sapiens [sequence omitted]

SEQ ID NO: 905189 - protein, 638 aa, Homo sapiens
MAVVIRLQGLPIVAGTMDIRHFFSGLTIPDGGVHIVGGELGEAFIVFATDEDARLGMMRTGGTIKGSKVTLLLSSKTEMQNMIELSRRRFETANLDIPPANASRSGPPPSSGMSSRVNLPTTVSNFNNPSPSVVTATTSVHESNKNIQTFSTASVGTAPPNMGASFGSPTFSSTVPSTASPMNTVPPPPIPPIPAMPSLPPMPSIPPIPVPPPVPTLPPVPPVPPIPPVPSVPPMTPLPPMSGMPPLNPPPVAPLPAGMNGSGAPMNLNNNLNPMFLGPLNPVNPIQMNSQSSVKPLPINPDDLYVSVHGMPFSAMENDVRDFFHGLRVDAVHLLKDHVGRNNGNGLVKFLSPQDTFEALKRNRMLMIQRYVEVSPATERQWVAAGGHITFKQNMGPSGQTHPPPQTLPRSKSPSGQKRSRSRSPHEAGFCVYLKGLPFEAENKHVIDFFKKLDIVEDSIYIAYGPNGKATGEGFVEFRNEADYKAALCRHKQYMGNRFIQVHPITKKGMLEKIDMIRKRLQNFSYDQREMILNPEGDVNSAKVCAHITNIPFSITKMDVLQFLEGIPVDENAVHVLVDNNGQGLGQALVQNAQCGTARCGTAQCRTSRCRPAQHRTAWFSNNQCRTAWCGNAQCRNT

SEQ ID NO: 905190 - protein, 612 aa, Homo sapiens [sequence omitted]

SEQ ID NO: 905191 - protein, 612 aa, Homo sapiens [sequence omitted]

SEQ ID NO: 905192 - protein, 767 aa, Homo sapiens
MAVVIRLQGLPIVAGTMDIRHFFSGLTIPDGGVHIVGGELGEAFIVFATDEDARLGMMRTGGTIKGSKVTLLLSSKTEMQNMIELSRRRFETANLDIPPANASRSGPPPSSGMSSRVNLPTTVSNFNNPSPSVVTATTSVHESNKNIQTFSTASVGTAPPNMGASFGSPTFSSTVPSTASPMNTVPPPPIPPIPAMPSLPPMPSIPPIPVPPPVPTLPPVPPVPPIPPVPSVPPMTPLPPMSGMPPLNPPPVAPLPAGMNGSGAPMNLNNNLNPMFLGPLNPVNPIQMNSQSSVKPLPINPDDLYVSVHGMPFSAMENDVRDFFHGLRVDAVHLLKDHVGRNNGNGLVKFLSPQDTFEALKRNRMLMIQRYVEVSPATERQWVAAGGHITFKQNMGPSGQTHPPPQTLPRSKSPSGQKRSRSRSPHEAGFCVYLKGLPFEAENKHVIDFFKKLDIVEDSIYIAYGPNGKATGEGFVEFRNEADYKAALCRHKQYMGNRFIQVHPITKKGMLEKIDMIRKRLQNFSYDQREMILNPEGDVNSAKVCAHITNIPFSITKMDVLQFLEGIPVDENAVHVLVDNNGQGLGQALVQFKNEDDARKSERLHRKKLNGREAFVHVVTLEDMREIEKNPPAQGKKGLKMPVPGNPAVPGMPNAGLPGVGLPSAGLPGAGLPSTGLPGSAITSAGLPGAGMPSAGIPSAGGEEHAFLTVGSKEANNGPPFNFPGNFGGSNAFGPPIPPPGLGGGAFGDARPGMPSVGNSGLPVYDE

SEQ ID NO: 905193 - protein, 357 aa, Homo sapiens
FGAGCRLSPQRPGTPAVHAFGPPWLTHRPRRRTMDAPRQVVNFGPGPAKLPHSVLLEIQKELLDYKGVGISVLEMSHRSSDFAKIINNTENLVRELLAVPDNYKVIFLQGGGCGQFSAVPLNLIGLKAGRCADYVVTGAWSAKAAEEAKKFGTINIVHPKLGSYTKIPDPSTWNLNPDASYVYYCANETVHGVEFDFIPDVKGAVLVCDMSSNFLSKPVDVSKFGVIFAGAQKNVGSAGVTVVIVRDDLLGFALRECPSVLEYKVQAGNSSLYNTPPCFSIYVMGLVLEWIKNNGGAAAMEKLSSIKSQTIYEIIDNSQGFYVSVGGIRASLYNAVTIEDVQKLAAFMKKFLEMHQL

SEQ ID NO: 905194 - protein, 370 aa, Homo sapiens
MDAPRQVVNFGPGPAKLPHSVLLEIQKELLDYKGVGISVLEMSHRSSDFAKIINNTENLVRELLAVPDNYKVIFLQGGGCGQFSAVPLNLIGLKAGRCADYVVTGAWSAKAAEEAKKFGTINIVHPKLGSYTKIPDPSTWNLNPDASYVYYCANETVHGVEFDFIPDVKGAVLVCDMSSNFLSKPVDVSKFGVIFAGAQKNVGSAGVTVVIVRDDLLGFALRECPSVLEYKVQAGNSSLYNTPPCFSIYVMGLVLEWIKNNGGAAAMEKLSSIKSQTIYEIIDNSQGFYVCPVEPQNRSKMNIPFRIGNAKGDDALEKRFLDKALELNMLSLKGHRSVGGIRASLYNAVTIEDVQKLAAFMKKFLEMHQL

SEQ ID NO: 905195 - protein, 323 aa, Homo sapiens
FGAGCRLSPQRPGTPAVHAFGPPWLTHRPRRRTMDAPRQVVNFGPGPAKLPHSVLLEIQKELLDYKGVGISVLEMSHRSSDFAKIINNTENLVRELLAVPDNYKVIFLQGGGCGQFSAVPLNLIGLKAGRCADYVVTGAWSAKAAEEAKKFGTINIVHPKLGSYTKIPDPSTWNLNPDASYVYYCANETVHGVEFDFIPDVKGAVLVCDMSSNFLSKPVDVSKFGVIFAGAQKNVGSAGVTVVIVRDDLLGFALRECPSVLEYKVQAGNSSLYNTPPCFSIYVMGLVLEWIKNNGGAAAMEKLSSIKSQTIYEIIDNSQGFYV

SEQ ID NO: 905196 - protein, 425 aa, Homo sapiens
GTRTDKLTKAVPNAYSDGSVRLVTLSVTDGASITDDICVHSLCDLKLYPGNLRATMDAPRQVVNFGPGPAKLPHSVLLEIQKELLDYKGVGISVLEMSHRSSDFAKIINNTENLVRELLAVPDNYKVIFLQGGGCGQFSAVPLNLIGLKAGRCADYVVTGAWSAKAAEEAKKFGTINIVHPKLGSYTKIPDPSTWNLNPDASYVYYCANETVHGVEFDFIPDVKGAVLVCDMSSNFLSKPVDVSKFGVIFAGAQKNVGSAGVTVVIVRDDLLGFALRECPSVLEYKVQAGNSSLYNTPPCFSIYVMGLVLEWIKNNGGAAAMEKLSSIKSQTIYEIIDNSQGFYVCPVEPQNRSKMNIPFRIGNAKGDDALEKRFLDKALELNMLSLKGHRSVGGIRASLYNAVTIEDVQKLAAFMKKFLEMHQL

SEQ ID NO: 905197 - protein, 323 aa, Homo sapiens
  misc_feature (12)..(12): Xaa can be any naturally occurring amino acid
MFEKIIKNKENXVGELVAVPDNYKVIFLQGGGCGQFSAVPLNLIGLKAGRCADYVVTGAWSAKAAEEAKKFGTINIVHPKLGSYTKIPDPSTWNLNPDASYVYYCANETVHGVEFDFIPDVKGAVLVCDMSSNFLSKPVDVSKFGVIFAGAQKNVGSAGVTVVIVRDDLLGFALRECPSVLEYKVQAGNSSLYNTPPCFSIYVMGLVLEWIKNNGGAAAMEKLSSIKSQTIYEIIDNSQGFYVCPVEPQNRSKMNIPFRIGNAKGDDALEKRFLDKALELNMLSLKGHRSVGGIRASLYNAVTIEDVQKLAAFMKKFLEMHQL

SEQ ID NO: 905198 - protein, 220 aa, Homo sapiens
FGAGCRLSPQRPGTPAVHAFGPPWLTHRPRRRTMDAPRQVVNFGPGPAKLPHSVLLEIQKELLDYKGVGISVLEMSHRSSDFAKIINNTENLVRELLIYVMGLVLEWIKNNGGAAAMEKLSSIKSQTIYEIIDNSQGFYVCPVEPQNRSKMNIPFRIGNAKGDDALEKRFLDKALELNMLSLKGHRSVGGIRASLYNAVTIEDVQKLAAFMKKFLEMHQL

SEQ ID NO: 905199 - protein, 403 aa, Homo sapiens
FGAGCRLSPQRPGTPAVHAFGPPWLTHRPRRRTMDAPRQVVNFGPGPAKLPHSVLLEIQKELLDYKGVGISVLEMSHRSSDFAKIINNTENLVRELLAVPDNYKVIFLQGGGCGQFSAVPLNLIGLKAGRCADYVVTGAWSAKAAEEAKKFGTINIVHPKLGSYTKIPDPSTWNLNPDASYVYYCANETVHGVEFDFIPDVKGAVLVCDMSSNFLSKPVDVSKFGVIFAGAQKNVGSAGVTVVIVRDDLLGFALRECPSVLEYKVQAGNSSLYNTPPCFSIYVMGLVLEWIKNNGGAAAMEKLSSIKSQTIYEIIDNSQGFYVCPVEPQNRSKMNIPFRIGNAKGDDALEKRFLDKALELNMLSLKGHRSVGGIRASLYNAVTIEDVQKLAAFMKKFLEMHQL

SEQ ID NO: 905200 - protein, 403 aa, Homo sapiens; identical to SEQ ID NO: 905199

SEQ ID NO: 905201 - protein, 398 aa, Homo sapiens
VTRGRPTRRGRVGAFGPPWLTHRPRRRTMDAPRQVVNFGPGPAKLPHSVLLEIQKELLDYKGVGISVLEMSHRSSDFAKIINNTENLVRELLAVPDNYKVIFLQGGGCGQFSAVPLNLIGLKAGRCADYVVTGAWSAKAAEEAKKFGTINIVHPKLGSYTKIPDPSTWNLNPDASYVYYCANETVHGVEFDFIPDVKGAVLVCDMSSNFLSKPVDVSKFGVIFAGAQKNVGSAGVTVVIVRDDLLGFALRECPSVLEYKVQAGNSSLYNTPPCFSIYVMGLVLEWIKNNGGAAAMEKLSSIKSQTIYEIIDNSQGFYVCPVEPQNRSKMNIPFRIGNAKGDDALEKRFLDKALELNMLSLKGHRSVGGIRASLYNAVTIEDVQKLAAFMKKFLEMHQL

SEQ ID NO: 905202 - protein, 329 aa, Homo sapiens [sequence omitted]

SEQ ID NO: 905203 - protein, 199 aa, Homo sapiens
RERERERPNFLSKPVDVSKFGVIFAGAQKNVGSAGVTVVIVRDDLLGFALRECPSVLEYKVQAGNSSLYNTPPCFSIYVMGLVLEWIKNNGGAAAMEKLSSIKSQTIYEIIDNSQGFYVCPVEPQNRSKMNIPFRIGNAKGDDALEKRFLDKALELNMLSLKGHRSVGGIRASLYNAVTIEDVQKLAAFMKKFLEMHQL

SEQ ID NO: 905204 - protein, 67 aa, Homo sapiens
RAEDHLIVQKTTFVQKITTVQKITSRAEDHLIVQKTTFVQKITYRAEDHLIVQKITYLIYVDTFRIY

SEQ ID NO: 905205 - protein, 123 aa, Homo sapiens
MLRIDNDRVVCAVATALRNMALDVRNKELIGKYAMRDLVHRLPGGNNSNNTASKAMSDDTVTAVCCTLHEVITKNMENAKAWADSGGIEKLVNITKGRGDRSSLKVVKAAAQVLNTLWQYRDL

SEQ ID NO: 905206 - protein, 1250 aa, Homo sapiens
MFARKPPGAAPLGAMPVPDQPSSASEKTSSLSPGLNTSNGDGSETETTSAILASVKEQELQFERLTRELEAERQIVASQLERCKLGSETGSMSSMSSAEEQFQWQSQDGQKDIEDELTTGLELVDSCIRSLQESGILDPQDYSTGERPSLLSQSALQLNSKPEGSFQYPASYHSNQTLALGETTPSQLPARGTQARATGQSFSQGTTSRAGHLAGPEPAPPPPPPPREPFAPSLGSAFHLPDAPPAAAAAALYYSSSTLPAPPRGGSPLAAPQGGSPTKLQRGGSAPEGATYAAPRGSSPKQSPSRLAKSYSTSSPINIVVSSAGLSPIRVTSPPTVQSTISSSPIHQLSSTIGTYATLSPTKRLVHASEQYSKHSQELYATATLQRPGSLAAGSRASYSSQHGHLGPELRALQSPEHHIDPIYEDRVYQKPPMRSLSQSQGDPLPPAHTGTYRTSTAPSSPGVDSVPLQRTGSQHGPQNAAAATFQRASYAAGPASNYADPYRQLQYCPSVESPYSKSGPALPPEGTLARSPSIDSIQKDPREFGWRDPELPEVIQMLQHQFPSVQSNAAAYLQHLCFGDNKIKAEIRRQGGIQLLVDLLDHRMTEVHRSACGALRNLVYGKANDDNKIALKNCGGIPALVRLLRKTTDLEIRELVTGVLWNLSSCDALKMPIIQDALAVLTNAVIIPHSGWENSPLQDDRKIQLHSSQVLRNATGCLRNVSSAGEEARRRMRECDGLTDALLYVIQSALGSSEIDSKTVENCVCILRNLSYRLAAETSQGQHMGTDELDGLLCGEANGKDAESSGCWGKKKKKKKSQDQWDGVGPLPDCAEPPKGIQMLWHPSIVKPYLTLLSECSNPDTLEGAAGALQNLAAGSWKGWAEDVAGMAYALRSLPEGAPCLPQWSVYIRAAVRKEKGLPILVELLRIDNDRVVCAVATALRNMALDVRNKELIGKYAMRDLVHRLPGGNNSNNTASKAMSDDTVTAVCCTLHEVITKNMENAKALRDAGGIEKLVGISKSKGDKHSPKVVKAASQVLNSMWQYRDLRSLYKKDGWSQYHFVASSSTIERDRQRPYSSSRTPSISPVRVSPNNRSASAPASPREMISLKERKTDYECTGSNATYHGAKGEHTSRKDAMTAQNTGISTLYRNSYGAPAEDIKHNQVSAQPVPQEPSRKDYETYQPFQNSTRNYDESFFEDQVHHRPPASEYTMHLGLKSTGNYVDFYSAARPYSELNYETSHYPASPDSWV

SEQ ID NO: 905207 - protein, 1225 aa, Homo sapiens
MFARKPPGAAPLGAMPVPDQPSSASEKTSSLSPGLNTSNGDGSETETTSAILASVKEQELQFERLTRELEAERQIVASQLERCKLGSETGSMSSMSSAEEQFQWQSQDGQKDIEDELTTGLELVDSCIRSLQESGILDPQDYSTGERPSLLSQSALQLNSKPEGSFQYPASYHSNQTLALGETTPSQLPARGTQARATGQSFSQGTTSRAGHLAGPEPAPPPPPPPREPFAPSLGSAFHLPDAPPAAAAAALYYSSSTLPAPPRGGSPLAAPQGGSPTKLQRGGSAPEGATYAAPRGSSPKQSPSRLAKSYSTSSPINIVVSSAGLSPIRVTSPPTVQSTISSSPIHQLSSTIGTYATLSPTKRLVHASEQYSKHSQELYATATLQRPGSLAAGSRASYSSQHGHLGPELRALQSPEHHIDPIYEDRVYQKPPMRSLSQSQGDPLPPAHTGTYRTSTAPSSPGVDSVPLQRTGSQHGPQNAAAATFQRASYAAGPASNYADPYRQLQYCPSVESPYSKSGPALPPEGTLARSPSIDSIQKDPREFGWRDPELPEVIQMLQHQFPSVQSNAAAYLQHLCFGDNKIKAEIRRQGGIQLLVDLLDHRMTEVHRSACGALRNLVYGKANDDNKIALKNCGGIPALVRLLRKTTDLEIRELVTGVLWNLSSCDALKMPIIQDALAVLTNAVIIPHSGWENSPLQDDRKIQLHSSQVLRNATGCLRNVSSAGEEARRRMRECDGLTDALLYVIQSALGSSEIDSKTVENCVCILRNLSYRLAAETSQGQHMGTDELDGLLCGEANGKDAESSGCWGKKKKKKKSQDQWDGVGPLPDCAEPPKGIQMLWHPSIVKPYLTLLSECSNPDTLEGAAGALQNLAAGSWKWSVYIRAAVRKEKGLPILVELLRIDNDRVVCAVATALRNMALDVRNKELIGKYAMRDLVHRLPGGNNSNNTASKAMSDDTVTAVCCTLHEVITKNMENAKALRDAGGIEKLVGISKSKGDKHSPKVVKAASQVLNSMWQYRDLRSLYKKDGWSQYHFVASSSTIERDRQRPYSSSRTPSISPVRVSPNNRSASAPASPREMISLKERKTDYECTGSNATYHGAKGEHTSRKDAMTAQNTGISTLYRNSYGAPAEDIKHNQVSAQPVPQEPSRKDYETYQPFQNSTRNYDESFFEDQVHHRPPASEYTMHLGLKSTGNYVDFYSAARPYSELNYETSHYPASPDSWV

SEQ ID NO: 905208 - protein, 326 aa, Homo sapiens
MLRIDNDRVVCAVATALRNMALDVRNKELIGKYAMRDLVHRLPGGNNSNNTASKAMSDDTVTAVCCTLHEVITKNMENAKALRDAGGIEKLVGISKSKGDKHSPKVVKAASQVLNSMWQYRDLRSLYKKDGWSQYHFVASSSTIERDRQRPYSSSRTPSISPVRVSPNNRSASAPASPREMISLKERKTDYECTGSNATYHGAKGEHTSRKDAMTAQNTGISTLYRNSYGAPAEDIKHNQVSAQPVPQEPSRKDYETYQPFQNSTRNYDESFFEDQVHHRPPASEYTMHLGLKSTGNYVDFYSAARPYSELNYETSHYPASPDSWV

SEQ ID NO: 905209 - protein, 367 aa, Homo sapiens
VHSMTLLLGISSSGCRTADIGEPQMLLPDRSSGSFVSEEYLAVEVSVHPYWGVPPSYGYSGVRDPLEEAVCPFSDLKLHAEENPGGNNSNNTASKAMSDDTVTAVCCTLHEVITKNMENAKALRDAGGIEKLVGISKSKGDKHSPKVVKAASQVLNSMWQYRDLRSLYKKDGWSQYHFVASSSTIERDRQRPYSSSRTPSISPVRVSPNNRSASAPASPREMISLKERKTDYECTGSNATYHGAKGEHTSRKDAMTAQNTGISTLYRNSYGAPAEDIKHNQVSAQPVPQEPSRKDYETYQPFQNSTRNYDESFFEDQVHHRPPASEYTMHLGLKSTGNYVDFYSAARPYSELNYETSHYPASPDSWV

SEQ ID NO: 905210 - protein, 105 aa, Homo sapiens
  misc_feature (10)..(11): Xaa can be any naturally occurring amino acid
AVKETNEERXXERTRCEFRVSAQPVPQEPSRKDYETYQPFQNSTRNYDESFFEDQVHHRPPASEYTMHLGLKSTGNYVDFYSAARPYSELNYETSHYPASPDSWV

SEQ ID NO: 905211 - protein, 103 aa, Homo sapiens
  misc_feature (14)..(14): Xaa can be any naturally occurring amino acid
TTTPNAPHCDTLKXKPCVSAQPVPQEPSRKDYETYQPFQNSTRNYDESFFEDQVHHRPPASEYTMHLGLKSTGNYVDFYSAARPYSELNYETSHYPASPDSWV

SEQ ID NO: 905212 - protein, 1225 aa, Homo sapiens; identical to SEQ ID NO: 905207

SEQ ID NO: 905213 - protein, 113 aa, Homo sapiens
MFARKPPGAAPLGAMPVPDQPSSASEKTSSLSPGLNTSNGDGSETETTSAILASVKEQELQFERLTRELEAERQIVASQLERCKLGSETGSMSSMRSRRKTLHLPTSTSVVST

SEQ ID NO: 905214 - protein, 326 aa, Homo sapiens; identical to SEQ ID NO: 905208

SEQ ID NO: 905215 - protein, 1145 aa, Homo sapiens
MFARKPPGAAPLGAMPVPDQPSSASEKTSSLSPGLNTSNGDGSETETTSAILASVKEQELQFERLTRELEAERQIVASQLERCKLGSETGSMSSMSSAEEQFQWQSQDGQKDIEDELTTGLELVDSCIRSLQESGILDPQDYSTGERPSLLSQSALQLNSKPEGSFQYPASYHSNQTLALGETTPSQLPARGTQARATGQSFSQGTTSRAGHLAGPEPAPPPPPPPREPFAPSLGSAFHLPDAPPAAAAAALYYSSSTLPAPPRGGSPLAAPQGGSPTKLQRGGSAPEGATYAAPRGSSPKQSPSRLAKSYSTSSPINIVVSSAGLSPIRVTSPPTVQSTISSSPIHQLSSTIGTYATLSPTKRLVHASEQYSKHSQELYATATLQRPGSLAAGSRASYSSQHGHLGPELRALQSPEHHIDPIYEDRVYQKPPMRSLSQSQGDPLPPAHTGTYRTSTAPSSPGVDSVPLQRTGSQHGPQNAAAATFQRASYAAGPASNYADPYRQLQYCPSVESPYSKSGPALPPEGTLARSPSIDSIQKDPREFGWRDPELPEVIQMLQHQFPSVQSNAAAYLQHLCFGDNKIKAEIRRQGGIQLLVDLLDHRMTEVHRSACGALRNLVYGKANDDNKIALKNCGGIPALVRLLRKTTDLEIRELVTGVLWNLSSCDALKMPIIQDALAVLTNAVIIPHSGWENSPLQDDRKIQLHSSQVLRNATGCLRNVSSAGEEARRRMRECDGLTDALLYVIQSALGSSEIDSKTVENCVCILRNLSYRLAAETSQGQHMGTDELDGLLCGEANGKDAESSGCWGKKKKKKKSQDQWDGVGPLPDCAEPPKGIQMLWHPSIVKPYLTLLSECSNPDTLEGAAGALQNLAAGSWKGWAEDVAGMAYALRSLPEGAPCLPQWSVYIRAAVRKEKGLPILVELLRIDNDRVVCAVATALRNMALDVRNKELIGKYAMRDLVHRLPGGNNSNNTASKAMSDDTVTAVCCTLHEVITKNMENAKALRDAGGIEKLVGISKSKGDKHSPKVVKAASQVLNSMWQYRDLRSLYKKDGWSQYHFVASSSTIERDRQRPYSSSRTPSISPVRVSPNNRSASAPASPREMISLKERKTDYECTGSNATYHGSPLRRVRVNSIMASVCIKA

SEQ ID NO: 905216 - protein, 219 aa, Homo sapiens
MPREDTDEFIYLPEQFRSLYKKDGWSQYHFVASSSTIERDRQRPYSSSRTPSISPVRVSPNNRSASAPASPREMISLKERKTDYECTGSNATYHGAKGEHTSRKDAMTAQNTGISTLYRNSYGAPAEDIKHNQVSAQPVPQEPSRKDYETYQPFQNSTRNYDESFFEDQVHHRPPASEYTMHLGLKSTGNYVDFYSAARPYSELNYETSHYPASPDSWV

SEQ ID NO: 905217 - protein, 102 aa, Homo sapiens
  misc_feature (9)..(10): Xaa can be any naturally occurring amino acid
YQRKSYKEXXQNKAHLVSAQPVPQEPSRKDYETYQPFQNSTRNYDESFFEDQVHHRPPASEYTMHLGLKSTGNYVDFYSAARPYSELNYETSHYPASPDSWV

SEQ ID NO: 905218 - protein, 1429 aa, Homo sapiens
PLHEQLELYHTVMYRNYQRKNDMDEPPPFDYGSGDEDGKSEKRKNKDPLYAKMEERFYRYGIKPEWMMIHRILNHSFDKKGDVHYLIKWKDLPYDQCTWEIDDIDIPYYDNLKQAYWGHRELMLGEDTRLPKRLLKKGKKLRDDKQEKPPDTPIVDPTVKFDKQPWYIDSTGGTLHPYQLEGLNWLRFSWAQGTDTILADEMGLGKTVQTIVFLYSLYKEGHSKGPYLVSAPLSTIINWEREFEMWAPDFYVVTYTGDKESRSVIRENEFSFEDNAIRSGKKVFRMKKEVQIKFHVLLTSYELITIDQAILGSIEWACLVVDEAHRLKNNQSKFFRVLNSYKIDYKLLLTGTPLQNNLEELFHLLNFLTPERFNNLEGFLEEFADISKEDQIKKLHDLLGPHMLRRLKADVFKNMPAKTELIVRVELSQMQKKYYKFILTRNFEALNSKGGGNQVSLLNIMMDLKKCCNHPYLFPVAAVEAPVLPNGSYDGSSLVKSSGKLMLLQKMLKKLRDEGHRVLIFSQMTKMLDLLEDFLEYEGYKYERIDGGITGGLRQEAIDRFNAPGAQQFCFLLSTRAGGLGINLATADTVIIYDSDWNPHNDIQAFSRAHRIGQNKKVMIYRFVTRASVEERITQVAKRKMMLTHLVVRPGLGSKSGSMTKQELDDILKFGTEELFKDDVEGMMSQGQRPVTPIPDVQSSKGGNLAASAKKKHGSTPPGDNKDVEDSSVIHYDDAAISKLLDRNQDATDDTELQNMNEYLSSFKVAQYVVREEDGVEEVEREIIKQEENVDPDYWEKLLRHHYEQQQEDLARNLGKGKRIRKQVNYNDASQEDQEWQDELSDNQSEYSIGSEDEDEDFEERPEGQSGRRQSRRQLKSDRDKPLPPLLARVGGNIEVLGFNARQRKAFLNAIMRWGMPPQDAFNSHWLVRDLRGKSEKEFRAYVSLFMRHLCEPGADGAETFADGVPREGLSRQHVLTRIGVMSLVRKKVQEFEHVNGKYSTPDLIPEGPEGKKPGEVISSDPNTPVPASPAHLLPAPLGLPDKMEAQLGYMDEKDPGAQKPRQPLEVQALPAALDRVESEDKHESPASKERAREERPEETEKAPPSPEQLPREEVLPEKEKILDKLELSLIHSRGDSSELRPDDTKAEEKEPIETQQNGDKEEDDEGKKEDKKGKFKFMFNIADGGFTELHTLWQNEERAAVSSGKIYDIWHRRHDYWLLAGIVTHGYARWQDIQNDPRYMILNEPFKSEVHKGNYLEMKNKFLARRFKLLEQALVIEEQLRRAAYLNMTQDPNHPAMALNARLAEVECLAESHQHLSKESLAGNKPANAVLHKVLNQLEELLSDMKADVTRLPSMLSRIPPVAARLQMSERSILSRLTNRAGDPTIQQGAFGSSQMYSNNFGPNFRGPGPGGIVNYNQMPLGPYVTDI

SEQ ID NO: 905219 - protein, 1461 aa, Homo sapiens
PLHEQLELYHTVMYRNYQRKNDMDEPPPFDYGSGDEDGKSEKRKNKDPLYAKMEERFYRYGIKPEWMMIHRILNHSFDKKGDVHYLIKWKDLPYDQCTWEIDDIDIPYYDNLKQAYWGHRELMLGEDTRLPKRLLKKGKKLRDDKQEKPPDTPIVDPTVKFDKQPWYIDSTGGTLHPYQLEGLNWLRFSWAQGTDTILADEMGLGKTVQTIVFLYSLYKEGHSKGPYLVSAPLSTIINWEREFEMWAPDFYVVTYTGDKESRSVIRENEFSFEDNAIRSGKKVFRMKKEVQIKFHVLLTSYELITIDQAILGSIEWACLVVDEAHRLKNNQSKFFRVLNSYKIDYKLLLTGTPLQNNLEELFHLLNFLTPERFNNLEGFLEEFADISKEDQIKKLHDLLGPHMLRRLKADVFKNMPAKTELIVRVELSQMQKKYYKFILTRNFEALNSKGGGNQVSLLNIMMDLKKCCNHPYLFPVAAVEAPVLPNGSYDGSSLVKSSGKLMLLQKMLKKLRDEGHRVLIFSQMTKMLDLLEDFLEYEGYKYERIDGGITGGLRQEAIDRFNAPGAQQFCFLLSTRAGGLGINLATADTVIIYDSDWNPHNDIQAFSRAHRIGQNKKVMIYRFVTRASVEERITQVAKRKMMLTHLVVRPGLGSKSGSMTKQELDDILKFGTEELFKDDVEGMMSQGQRPVTPIPDVQSSKGGNLAASAKKKHGSTPPGDNKDVEDSSVIHYDDAAISKLLDRNQDATDDTELQNMNEYLSSFKVAQYVVREEDGVEEVEREIIKQEENVDPDYWEKLLRHHYEQQQEDLARNLGKGKRIRKQVNYNDASQEDQEWQDELSDNQSEYSIGSEDEDEDFEERPEGQSGRRQSRRQLKSDRDKPLPPLLARVGGNIEVLGFNARQRKAFLNAIMRWGMPPQDAFNSHWLVRDLRGKSEKEFRAYVSLFMRHLCEPGADGAETFADGVPREGLSRQHVLTRIGVMSLVRKKVQEFEHVNGKYSTPDLIPEGPEGKKPGEVISSDPNTPVPASPAHLLPAPLGLPDKMEAQLGYMDEKDPGAQKPRQPLEVQALPAALDRVESEDKHESPASKERAREERPEETEKAPPSPEQLPRASCSVTQAGVQWRHLGSWEPLSPRLKRPSHLSFLKEEVLPEKEKILDKLELSLIHSRGDSSELRPDDTKAEEKEPIETQQNGDKEEDDEGKKEDKKGKFKFMFNIADGGFTELHTLWQNEERAAVSSGKIYDIWHRRHDYWLLAGIVTHGYARWQDIQNDPRYMILNEPFKSEVHKGNYLEMKNKFLARRFKLLEQALVIEEQLRRAAYLNMTQDPNHPAMALNARLAEVECLAESHQHLSKESLAGNKPANAVLHKVLNQLEELLSDMKADVTRLPSMLSRIPPVAARLQMSERSILSRLTNRAGDPTIQQISSRPRDFPVLQRSFPAEPRLPGHLPDPHGREKLPPF

SEQ ID NO: 905220 - protein, 1456 aa, Homo sapiens
PLHEQLELYHTVMYRNYQRKNDMDEPPPFDYGSGDEDGKSEKRKNKDPLYAKMEERFYRYGIKPEWMMIHRILNHSFDKKGDVHYLIKWKDLPYDQCTWEIDDIDIPYYDNLKQAYWGHRELMLGEDTRLPKRLLKKGKKLRDDKQEKPPDTPIVDPTVKFDKQPWYIDSTGGTLHPYQLEGLNWLRFSWAQGTDTILADEMGLGKTVQTIVFLYSLYKEGHSKGPYLVSAPLSTIINWEREFEMWAPDFYVVTYTGDKESRSVIRENEFSFEDNAIRSGKKVFRMKKEVQIKFHVLLTSYELITIDQAILGSIEWACLVVDEAHRLKNNQSKFFRVLNSYKIDYKLLLTGTPLQNNLEELFHLLNFLTPERFNNLEGFLEEFADISKEDQIKKLHDLLGPHMLRRLKADVFKNMPAKTELIVRVELSQMQKKYYKFILTRNFEALNSKGGGNQVSLLNIMMDLKKCCNHPYLFPVAAVEAPVLPNGSYDGSSLVKSSGKLMLLQKMLKKLRDEGHRVLIFSQMTKMLDLLEDFLEYEGYKYERIDGGITGGLRQEAIDRFNAPGAQQFCFLLSTRAGGLGINLATADTVIIYDSDWNPHNDIQAFSRAHRIGQNKKVMIYRFVTRASVEERITQVAKRKMMLTHLVVRPGLGSKSGSMTKQELDDILKFGTEELFKDDVEGMMSQGQRPVTPIPDVQSSKGGNLAASAKKKHGSTPPGDNKDVEDSSVIHYDDAAISKLLDRNQDATDDTELQNMNEYLSSFKVAQYVVREEDGVLSPKSSLWVSPGGLSFPPLLPTLRADLEEVEREIIKQEENVDPDYWEKLLRHHYEQQQEDLARNLGKGKRIRKQVNYNDASQEDQEWQDELSDNQSEYSIGSEDEDEDFEERPEGQSGRRQSRRQLKSDRDKPLPPLLARVGGNIEVLGFNARQRKAFLNAIMRWGMPPQDAFNSHWLVRDLRGKSEKEFRAYVSLFMRHLCEPGADGAETFADGVPREGLSRQHVLTRIGVMSLVRKKVQEFEHVNGKYSTPDLIPEGPEGKKPGEVISSDPNTPVPASPAHLLPAPLGLPDKMEAQLGYMDEKDPGAQKPRQPLEVQALPAALDRVESEDKHESPASKERAREERPEETEKAPPSPEQLPREEVLPEKEKILDKLELSLIHSRGDSSELRPDDTKAEEKEPIETQQNGDKEEDDEGKKEDKKGKFKFMFNIADGGFTELHTLWQNEERAAVSSGKIYDIWHRRHDYWLLAGIVTHGYARWQDIQNDPRYMILNEPFKSEVHKGNYLEMKNKFLARRFKLLEQALVIEEQLRRAAYLNMTQDPNHPAMALNARLAEVECLAESHQHLSKESLAGNKPANAVLHKVLNQLEELLSDMKADVTRLPSMLSRIPPVAARLQMSERSILSRLTNRAGDPTIQQGAFGSSQMYSNNFGPNFRGPGPGGIVNYNQMPLGPYVTDI

SEQ ID NO: 905221 - protein, 879 aa, Homo sapiens
  misc_feature (866)..(866): Xaa can be any naturally occurring amino acid
  misc_feature (870)..(870): Xaa can be any naturally occurring amino acid
  misc_feature (876)..(876): Xaa can be any naturally occurring amino acid
PLHEQLELYHTVMYRNYQRKNDMDEPPPFDYGSGDEDGKSEKRKNKDPLYAKMEERFYRYGIKPEWMMIHRILNHSFDKKGDVHYLIKWKDLPYDQCTWEIDDIDIPYYDNLKQAYWGHRELMLGEDTRLPKRLLKKGKKLRDDKQEKPPDTPIVDPTVKFDKQPWYIDSTGGTLHPYQLEGLNWLRFSWAQGTDTILADEMGLGKTVQTIVFLYSLYKEGHSKGPYLVSAPLSTIINWEREFEMWAPDFYVVTYTGDKESRSVIRENEFSFEDNAIRSGKKVFRMKKEVQIKFHVLLTSYELITIDQAILGSIEWACLVVDEAHRLKNNQSKFFRVLNSYKIDYKLLLTGTPLQNNLEELFHLLNFLTPERFNNLEGFLEEFADISKEDQIKKLHDLLGPHMLRRLKADVFKNMPAKTELIVRVELSQMQKKYYKFILTRNFEALNSKGGGNQVSLLNIMMDLKKCCNHPYLFPVAAVEAPVLPNGSYDGSSLVKSSGKLMLLQKMLKKLRDEGHRVLIFSQMTKMLDLLEDFLEYEGYKYERIDGGITGGLRQEAIDRFNAPGAQQFCFLLSTRAGGLGINLATADTVIIYDSDWNPHNDIQAFSRAHRIGQNKKVMIYRFVTRASVEERITQVAKRKMMLTHLVVRPGLGSKSGSMTKQELDDILKFGTEELFKDDVEGMMSQGQRPVTPIPDVQSSKGGNLAASAKKKHGSTPPGDNKDVEDSSVIHYDDAAISKLLDRNQDATDDTELQNMNEYLSSFKVAQYVVREEDGVEEVEREIIKQEENVDPDYWEKLLRHHYEQQQEDLARNLGKGKRIRKQVNYNDASQEDQEWQDELSDNQSEYSIGSEDEDEDFEERPEGQXWTNXQFPEGXLKN

SEQ ID NO: 905222 - protein, 1429 aa, Homo sapiens; identical to SEQ ID NO: 905218

SEQ ID NO: 905223 - protein, 1456 aa, Homo sapiens; identical to SEQ ID NO: 905220

SEQ ID NO: 905224 - protein, 604 aa, Homo sapiens
PLFHSRGIGVALESPTPSPPASGVHGACASFLTSSPGGSESKATPWRAVSASQELQHPQGGQRSPLPGDLTPARPNPAYPLTVECQRSCSRPVPAPLPPHTHPPGSSCFYSSFSFITKATAPGAQRRAVTQAERGRMGFLGTGTWILVLVLPIQAFPKPGGSQDKSLHNRELSAERPLNEQIAEAEEDKIKKTYPPENKPGQSNYSFVDNLNLLKAITEKEKIEKERQSIRSSPLDNKLNVEDVDSTKNRKLIDDYDSTKSGLDHKFQDDPDGLHQLDGTPLTAEDIVHKIAARIYEENDRAVFDKIVSKLLNLGLITESQAHTLEDEVAEVLQKLISKEANNYEEDPNKPTSWTENQAGKIPEKVTPMAAIQDGLAKGENDETVSNTLTLTNGLERRTKTYSEDNFEELQYFPNFYALLKSIDSEKEAKEKETLITIMKTLIDFVKMMVKYGTISPEEGVSYLENLDEMIALQTKNKLEKNATDNISKLFPAPSEKSHEETDSTKEEAAKMEKEYGSLKDSTKDDNSNPGGKTDEPKGKTEAYLEAIRKNIEWLKKHDKKGNKEDYDLSKMRDFINKQADAYVEKGILDKEEAEAIKRIYSSL

SEQ ID NO: 905225 - protein, 604 aa, Homo sapiens; identical to SEQ ID NO: 905224

SEQ ID NO: 905226 - protein, 468 aa, Homo sapiens
MGFLGTGTWILVLVLPIQAFPKPGGSQDKSLHNRELSAERPLNEQIAEAEEDKIKKTYPPENKPGQSNYSFVDNLNLLKAITEKEKIEKERQSIRSSPLDNKLNVEDVDSTKNRKLIDDYDSTKSGLDHKFQDDPDGLHQLDGTPLTAEDIVHKIAARIYEENDRAVFDKIVSKLLNLGLITESQAHTLEDEVAEVLQKLISKEANNYEEDPNKPTSWTENQAGKIPEKVTPMAAIQDGLAKGENDETVSNTLTLTNGLERRTKTYSEDNFEELQYFPNFYALLKSIDSEKEAKEKETLITIMKTLIDFVKMMVKYGTISPEEGVSYLENLDEMIALQTKNKLEKNATDNISKLFPAPSEKSHEETDSTKEEAAKMEKEYGSLKDSTKDDNSNPGGKTDEPKGKTEAYLEAIRKNIEWLKKHDKKGNKEDYDLSKMRDFINKQADAYVEKGILDKEEAEAIKRIYSSL

SEQ ID NO: 905227 - protein, 604 aa, Homo sapiens; identical to SEQ ID NO: 905224

SEQ ID NO: 905228 - protein, 604 aa, Homo sapiens; identical to SEQ ID NO: 905224

SEQ ID NO: 905229 - protein, 87 aa, Homo sapiens
PVYITTVKTAWLECKHVVFGKVLEGMEMVRTVESTKTDSRDNFGVFATGEKGFGYKNSKFHRVIKDFMIQGGDFTRGDGTGRKEHLR

SEQ ID NO: 905230 - protein, 169 aa, Homo sapiens
GGKRARRPPGAREQPQSPPPARGGAGSLATAAPPSSGLSCPGCFRLRLWMLRLSERNMKVLLAAALIAGSVFFLLLPGPSAADEKKKGPKVTVKVYFDLRIGDEDVGRVIFGLFGKTVPKTVDNFVALATGEKGFGYKNSKFHRVIKDFMIQGGDFTRGDGTGRKEHLR

SEQ ID NO: 905231 - protein, 139 aa, Homo sapiens
TRRSIYGEERFPCFRLRLWMLRLSERNMKVLLAAALIAGSVFFLLLPGPSAADEKKKGPKVTVKVYFDLRIGDEDVGRVIFGLFGKTVPKTVDNFVALATGEKGFGYKNSKFHRVIKDFMIQGGDFTRGDGTGRKEHLR

SEQ ID NO: 905232 - protein, 134 aa, Homo sapiens
HASGCPGCFRLRLWMLRLSERNMKVLLAAALIAGSVFFLLLPGPSAADEKKKGPKVTVKVYFDLRIGDEDVGRVIFGLFGKTVPKTVDNFVALATGEKGFGYKNSKFHRVIKDFMIQGGDFTRGDGTGRKEHLR

SEQ ID NO: 905233 - protein, 134 aa, Homo sapiens; identical to SEQ ID NO: 905232

SEQ ID NO: 905234 - protein, 134 aa, Homo sapiens; identical to SEQ ID NO: 905232

SEQ ID NO: 905235 - protein, 134 aa, Homo sapiens; identical to SEQ ID NO: 905232

SEQ ID NO: 905236 - protein, 134 aa, Homo sapiens; identical to SEQ ID NO: 905232

SEQ ID NO: 905237 - protein, 134 aa, Homo sapiens; identical to SEQ ID NO: 905232

SEQ ID NO: 905238 - protein, 134 aa, Homo sapiens; identical to SEQ ID NO: 905232

SEQ ID NO: 905239 - protein, 134 aa, Homo sapiens; identical to SEQ ID NO: 905232

SEQ ID NO: 905240 - protein, 134 aa, Homo sapiens; identical to SEQ ID NO: 905232

SEQ ID NO: 905241 - protein, 134 aa, Homo sapiens; identical to SEQ ID NO: 905232

SEQ ID NO: 905242 - protein, 134 aa, Homo sapiens; identical to SEQ ID NO: 905232

SEQ ID NO: 905243 - protein, 134 aa, Homo sapiens; identical to SEQ ID NO: 905232

SEQ ID NO: 905244 - protein, 139 aa, Homo sapiens; identical to SEQ ID NO: 905231

SEQ ID NO: 905245 - protein, 114 aa, Homo sapiens
MAQGGKSIYGERFPDENFKLKHYGPGWVSMANAGKDTNGSQFFITTVKTAWLDGKHVVFGKVLEGMEVVRKVESTKTDSRDKPLKDVIIADCGKIEGGEALCHRQGVGHRDIFL

SEQ ID NO: 905246 - protein, 114 aa, Homo sapiens; identical to SEQ ID NO: 905245

SEQ ID NO: 905247 - protein, 220 aa, Homo sapiens
TRRSIYGEGSFPCFRLRLWMLRLSERNMKVLLAAALIAGSVFFLLLPGPSAADEKKKGPKVTVKVYFDLRIGDEDVGRVIFGLFGKTVPKTVDNFVALATGESPGEMAQGGKSIYGERFPDENFKLKHYGPGWVSMANAGKDTNGSQFFITTVKTAWLDGKHVVFGKVLEGMEVVRKVESTKTDSRDKPLKDVIIADCGKIEGGEALCHRQGVGHRDIFL

SEQ ID NO: 905248 - protein, 403 aa, Homo sapiens
SARLLPLPSAFLPLLLASSSFVFLSLVVFSHFSSFFSSSFSLSPPLPLRLLSLLISSLFPPFSSSSLSLLVASVLSSLSFFALVSSVLLSCLSLFFCGRLVGALLLAFGFGSVSPVVFVGCLASPVSLSISFFFFLFVSSLFFSVFMSPHVSFVFWRRAAVLLILAPRFCFVHPPLFVSPPLRQCSFVYVFFPLSSEALVVCLSRYLGYAVCCCPFLCVAPPSPASFFVVFPSLLPMLLSLVRCGSHSVFPPPCVCYLFVVVLRAPSRSASTVFIILSCPPLFGGSPVVSYKISLVATPLISFGLPPFSGVGDPFCARPPPFFVFFFVVFLFFFHSQLSFIPVHSLLRGFDSPESKGQPLFSAPPHTSLAAFSSAAMPVSFVLIGKQAGQPQQSSFSGEFRPC

SEQ ID NO: 905249 - protein, 139 aa, Homo sapiens; identical to SEQ ID NO: 905231

SEQ ID NO: 905250 - protein, 139 aa, Homo sapiens; identical to SEQ ID NO: 905231

SEQ ID NO: 905251 - protein, 139 aa, Homo sapiens; identical to SEQ ID NO: 905231

SEQ ID NO: 905252 - protein, 403 aa, Homo sapiens; identical to SEQ ID NO: 905248

SEQ ID NO: 905253 - protein, 139 aa, Homo sapiens; identical to SEQ ID NO: 905231

SEQ ID NO: 905254 - protein, 139 aa, Homo sapiens; identical to SEQ ID NO: 905231

SEQ ID NO: 905255 - protein, 152 aa, Homo sapiens
TRRSIYGEERFPCFRLRLWMLRLSERNMKVLLAAALIAGSVFFLLLPGPSAADEKKKGPKVTVKRGKQRGGAGGAPPKKHVTFKVYFDLRIGDEDVGRVIFGLFGKTVPKVVPVKAKNVAEDGDEDEEAESATAKRAAEDDEDDDVDTKKQE

SEQ ID NO: 905256 - protein, 92 aa, Homo sapiens
RVDNGSRVDNGSRVDNGSQFFITTVKTAWLDGKHVVFGKVLEGMEVVRKVESTKTDSRDKPLKDVIIADCGKIEGGEALCHRQGVGHRDIFL

SEQ ID NO: 905257 - protein, 95 aa, Homo sapiens
AYYYYIRGRVDANAGKDTNGSQFFITTVKTAWLDGKHVVFGKVLEGMEVVRKVESTKTDSRDKPLKDVIIADCGKIEGGEALCHRQGVGHRDIFL

SEQ ID NO: 905258 - protein, 134 aa, Homo sapiens; identical to SEQ ID NO: 905232

SEQ ID NO: 905259 - protein, 134 aa, Homo sapiens; identical to SEQ ID NO: 905232

SEQ ID NO: 905260 - protein, 134 aa, Homo sapiens; identical to SEQ ID NO: 905232

SEQ ID NO: 905261 - protein, 134 aa, Homo sapiens; identical to SEQ ID NO: 905232

SEQ ID NO: 905262 - protein, 134 aa, Homo sapiens; identical to SEQ ID NO: 905232

SEQ ID NO: 905263 - protein, 134 aa, Homo sapiens; identical to SEQ ID NO: 905232

SEQ ID NO: 905264 - protein, 134 aa, Homo sapiens; identical to SEQ ID NO: 905232

SEQ ID NO: 905265 - protein, 134 aa, Homo sapiens; identical to SEQ ID NO: 905232

SEQ ID NO: 905266 - protein, 134 aa, Homo sapiens; identical to SEQ ID NO: 905232

SEQ ID NO: 905267 - protein, 134 aa, Homo sapiens; identical to SEQ ID NO: 905232

SEQ ID NO: 905268 - protein, 139 aa, Homo sapiens; identical to SEQ ID NO: 905231

SEQ ID NO: 905269 - protein, 159 aa, Homo sapiens
TRRSIYGEERFPCFRLRLWMLRLSERNMKVLLAAALIAGSVFFLLLPGPSAADEKKKGPKVTVKRGKQRGGAGGAPPKKHVTFKVYFDLRIGDEDVGRVIFGLFGKTVPKTVDNFVALATGEKGFGYKNSKFHRVIKDFMIQGGDFTRGDGTGRKEHLR

SEQ ID NO: 905270 - protein, 114 aa, Homo sapiens; identical to SEQ ID NO: 905245

SEQ ID NO: 905271 - protein, 114 aa, Homo sapiens; identical to SEQ ID NO: 905245

SEQ ID NO: 905272 - protein, 139 aa, Homo sapiens; identical to SEQ ID NO: 905231

SEQ ID NO: 905273 - protein, 139 aa, Homo sapiens; identical to SEQ ID NO: 905231

SEQ ID NO: 905274 - protein, 139 aa, Homo sapiens; identical to SEQ ID NO: 905231

SEQ ID NO: 905275 - protein, 139 aa, Homo sapiens; identical to SEQ ID NO: 905231

SEQ ID NO: 905276 - protein, 80 aa, Homo sapiens
TRRSIYGEERFPCFRLRLWMLRLSERNMKVLLAAALIAGSVFFLLLPGPSAADEKKKGPKVTVKVYFDLRIGEHQDRQPG

SEQ ID NO: 905277 - protein, 398 aa, Homo sapiens
MWLLLTMASLISVLGTTHGLFGKLHPGSPEVTMNISQMITYWGYPNEEYEVVTEDGYILEVNRIPYGKKNSGNTGQRPVVFLQHGLLASATNWISNLPNNSLAFILADAGYDVWLGNSRGNTWARRNLYYSPDSVEFWAFSFDEMAKYDLPATIDFIVKKTGQKQLHYVGHSQGTTIGFIAFSTNPSLAKRIKTFYALAPVATVKYTKSLINKLRFVPQSLFKFIFGDKIFYPHNFFDQFLATEVCSREMLNLLCSNALFIICGFDSKNFNTSRLDVYLSHNPAGTSVQNMFHWTQAVKSGKFQAYDWGSPVQNRMHYDQSQPPYYNVTAMNVPIAVWNGGKDLLADPQDVGLLLPKLPNLIYHKEIPFYNHLDFIWAMDAPQEVYNDIVSMISEDKK

SEQ ID NO: 905278 - protein, 108 aa, Homo sapiens
MFHWTQAVKSGKFQAYDWGSPVQNRMHYDQSQPPYYNVTAMNVPIAVWNGGKDLLADPQDVGLLLPKLPNLIYHKEIPFYNHLDFIWAMDAPQEVYNDIVSMISEDKK

SEQ ID NO: 905279 - protein, 149 aa, Homo sapiens
ASSQVLRCPVCCQAVRELRTLALAGRVVESHFGLFADGSDFRHPVFSAVKSGKFQAYDWGSPVQNRMHYDQSQPPYYNVTAMNVPIAVWNGGKDLLADPQDVGLLLPKLPNLIYHKEIPFYNHLDFIWAMDAPQEVYNDIVSMISEDKK

SEQ ID NO: 905280 - protein, 398 aa, Homo sapiens; identical to SEQ ID NO: 905277

SEQ ID NO: 905281 - protein, 802 aa, Homo sapiens
MPRIMIKGGVWRNTEDEILKAAVMKYGKNQWSRIASLLHRKSAKQCKARWYEWLDPSIKKTEWSREEEEKLLHLAKLMPTQWRTIAPIIGRTAAQCLEHYEFLLDKAAQRDNEEETTDDPRKLKPGEIDPNPETKPARPDPIDMDEDELEMLSEARARLANTQGKKAKRKAREKQLEEARRLAALQKRRELRAAGIEIQKKRKRKRGVDYNAEIPFEKKPALGFYDTSEENYQALDADFRKLRQQDLDGELRSEKEGRDRKKDKQHLKRKKESDLPSAILQTSGVSEFTKKRSKLVLPAPQISDAELQEVVKVGQASEIARQTAEESGITNSASSTLLSEYNVTNNSVALRTPRTPASQDRILQEAQNLMALTNVDTPLKGGLNTPLHESDFSGVTPQRQVVQTPNTVLSTPFRTPSNGAEGLTPRSGTTPKPVINSTPGRTPLRDKLNINPEDGMADYSDPSYVKQMERESREHLRLGLLGLPAPKNDFEIVLPENAEKELEEREIDDTYIEDAADVDARKQAIRDAERVKEMKRMHKAVQKDLPRPSEVNETILRPLNVEPPLTDLQKSEELIKKEMITMLHYDLLHHPYEPSGNKKGKTVGFGTNNSEHITYLEHNPYEKFSKEELKKAQDVLVQEMEVVKQGMSHGELSSEAYNQVWEECYSQVLYLPGQSRYTRANLASKKDRIESLEKRLEINRGHMTTEAKRAAKMEKKMKILLGGYQSRAMGLMKQLNDLWDQIEQAHLELRTFEELKKHEDSAIPRRLECLKEDVQRQQEREKELQHRYADLLLEKETLKSKF

SEQ ID NO: 905282 - protein, 802 aa, Homo sapiens; identical to SEQ ID NO: 905281

SEQ ID NO: 905283 - protein, 802 aa, Homo sapiens; identical to SEQ ID NO: 905281

SEQ ID NO: 905284 - protein, 784 aa, Homo sapiens
MPRIMIKGGVWRNTEDEILKAAVMKYGKNQWSRIASLLHRKSAKQCKARWYEWLDPSIKKTEWSREEEEKLLHLAKLMPTQWRTIAPIIGRTAAQCLEHYEFLLDKAAQRDNEEETTDDPRKLKPGEIDPNPETKPARPDPIDMDEDELEMLSEARARLANTQGKKAKRKAREKQLEEARRLAALQKRRELRAAGIEIQKKRKRKRGVDYNAEIPFEKKPALGFYDTSEENYQALDADFRKLRQQDLDGELRSEKEGRDRKKDKQHLKRKKESDLPSAILQTSGVSEFTKKRSKLVLPAPQISDAELQEVITNSASSTLLSEYNVTNNSVALRTPRTPASQDRILQEAQNLMALTNVDTPLKGGLNTPLHESDFSGVTPQRQVVQTPNTVLSTPFRTPSNGAEGLTPRSGTTPKPVINSTPGRTPLRDKLNINPEDGMADYSDPSYVKQMERESREHLRLGLLGLPAPKNDFEIVLPENAEKELEEREIDDTYIEDAADVDARKQAIRDAERVKEMKRMHKAVQKDLPRPSEVNETILRPLNVEPPLTDLQKSEELIKKEMITMLHYDLLHHPYEPSGNKKGKTVGFGTNNSEHITYLEHNPYEKFSKEELKKAQDVLVQEMEVVKQGMSHGELSSEAYNQVWEECYSQVLYLPGQSRYTRANLASKKDRIESLEKRLEINRGHMTTEAKRAAKMEKKMKILLGGYQSRAMGLMKQLNDLWDQIEQAHLELRTFEELKKHEDSAIPRRLECLKEDVQRQQEREKELQHRYADLLLEKETLKSKF

SEQ ID NO: 905285 - protein, 736 aa, Homo sapiens
MPRIMIKGGVWRNTEDEILKAAVMKYGKNQWSRIASLLHRKSAKQCKARWYEWLDPSIKKTEWSREEEEKLLHLAKLMPTQWRTIAPIIGRTAAQCLEHYEFLLDKAAQRDNEEETTDDPRKLKPGEIDPNPETKPARPDPIDMDEDELEMLSEARARLANTQGKKAKRKAREKQLEEARRLAALQKRRELRAAGIEIQKKRKRKRGVDYNAEIPFEKKPALGFYDTSEENYQALDADFRKLRQQDLDGELRSEKEGRDRKKDKQHLKRKKESDLPSAILQTSGVSEFTKKRSKLVLPAPQISDAELQEVVKVGQASEIARQTAEESGITNSASSTLLSEYNVTNNSVALRTPRTPASQDRILQEAQNLMALTNVDTPLKGGLNTPLHESDFSGVTPQRQVVQTPNTVLSTPFRTPSNGAEGLTPRSGTTPKPVINSTPGRTPLRDKLNINPEDGMADYSDPSYVKQMERESREHLRLGLLGLPAPKNDFEIVLPENAEKELEEREIDDTYIEDAADVDARKQAIRDAERVKEMKRMHKAVQKDLPRPSEVNETILRPLNVEPPLTDLQKSEELIKKEMITMLHYDLLHHPYEPSGNKKGKTVGFGTNNSEHITYLEHNPYEKFSKEELKKINRGHMTTEAKRAAKMEKKMKILLGGYQSRAMGLMKQLNDLWDQIEQAHLELRTFEELKKHEDSAIPRRLECLKEDVQRQQEREKELQHRYADLLLEKETLKSKF

SEQ ID NO: 905286 - protein, 121 aa, Homo sapiens
  misc_feature (15)..(15): Xaa can be any naturally occurring amino acid
  misc_feature (19)..(19): Xaa can be any naturally occurring amino acid
  misc_feature (25)..(25): Xaa can be any naturally occurring amino acid
EGPPRPARFRFSPRXYCLXQPLWGXNQPAAKMEKKMKILLGGYQSRAMGLMKQLNDLWDQIEQAHLELRTFEELKKHEDSAIPRRLECLKEDVQRQQEREKELQHRYADLLLEKETLKSKF

SEQ ID NO: 905287 - protein, 802 aa, Homo sapiens; identical to SEQ ID NO: 905281

SEQ ID NO: 905288 - protein, 802 aa, Homo sapiens; identical to SEQ ID NO: 905281

SEQ ID NO: 905289 - protein, 802 aa, Homo sapiens; identical to SEQ ID NO: 905281

SEQ ID NO: 905290 - protein, 705 aa, Homo sapiens
MPRIMIKGGVWRNTEDEILKAAVMKYGKNQWSRIASLLHRKSAKQCKARWYEWLDPSIKKTEWSREEEEKLLHLAKLMPTQWRTIAPIIGRTAAQCLEHYEFLLDKAAQRDNEEETTDDPRKLKPGEIDPNPETKPARPDPIDMDEDELEMLSEARARLANTQGKKAKRKAREKQLEEARRLAALQKRRELRAAGIEIQKKRKRKRGVDYNAEIPFEKKPALGFYDTSEENYQALDADFRKLRQQDLDGELRSEKEGRDRKKDKQHLKRKKESDLPSAILQTSGVSEFTKKRSKLVLPAPQISDAELQEVVKVGQASEIARQTAEESGITNSASSTLLSEYNVTNNSVALRTPRTPASQDRILQEAQNLMALTNVDTPLKGGLNTPLHESDFSGVTPQRQVVQTPNTVLSTPFRTPSNGAEGLTPRSGTTPKPVINSTPGRTPLRDKLNINPEDGMADYSDPSYVKQMERESREHLRLGLLGLPAPKNDFEIVLPENAEKELEEREIDDTYIEDAADVDARKQAIRDAERVKEMKRMHKAVQKDLPRPSEVNETILRPLNVEPPLTDLQKSEELIKKEMITMLHYDLLHHPYEPSGNKKGKTVGFGTNNSEHITYLEHNPYEKFSKEELKKAQDVLVQEMEVVKQGMSHGELSSEAYNQVWEECYSQVLYLPGQSRYTRANLASKKDRIESLEKRLEVQEISPSL

SEQ ID NO: 905291 - protein, 635 aa, Homo sapiens
MPRIMIKGGVWRNTEDEILKAAVMKYGKNQWSRIASLLHRKSAKQCKARWYEWLDPSIKKTEWSREEEEKLLHLAKLMPTQWRTIAPIIGRTAAQCLEHYEFLLDKAAQRDNEEETTDDPRKLKPGEIDPNPETKPARPDPIDMDEDELEMLSEARARLANTQGKKAKRKAREKQLEEARRLAALQKRRELRAAGIEIQKKRKRKRGVDYNAEIPFEKKPALGFYDTSEENYQALDADFRKLRQQDLDGELRSEKEGRDRKKDKQHLKRKKESDLPSAILQTSGVSEFTKKRSKLVLPAPQISDAELQEVVKVGQASEIARQTAEESGITNSASSTLLSEYNVTNNSVALRTPRTPASQDRILQEAQNLMALTNVDTPLKGGLNTPLHESDFSGVTPQRQVVQTPNTVLSTPFRTPSNGAEGLTPRSGTTPKPVINSTPGRTPLRDKLNINPEDGMADYSDPSYVKQMERESREHLRLGLLGLPAPKNDFEIVLPENAEKELEEREIDDTYIEDAADVDARKQAIRDAERVKEMKRMHKAVQKDLPRPSEVNETILRPLNVEPPLTDLQKSEELIKKEMITMLHYDLLHHPYEPSGNKKGKTVGFGTNNSEHITYLEHNPYVQLLTHGLAPWISS

SEQ ID NO: 905292 - protein, 489 aa, Homo sapiens
GPLCSRVRAAGPLRRTGRRKFDGAGRVAVERRRGSSAGFPCSQRSRRPAEPGRGIPDRRRRGPIGRVNMDLENKVKKMGLGHEQGFGAPCLKCKEKCEGFELHFWRKICRNCKCGQEEHDVLLSNEEDRKVGKLFEDTKYTTLIAKLKSDGIPMYKRNVMILTNPVAAKKNVSINTVTYEWAPPVQNQALARQYMQMLPKEKQPVAGSEGAQYRKKQLAKQLPAHDQDPSKCHELSPREVKEMEQFVKKYKSEALGVGDVKLPCEMDAQGPKQMNIPGGDRSTPAAVGAMEDKSAEHKRTQYSCYCCKLSMKEGDPAIYAERAGYDKLWHPACFVCSTCHELLVDMIYFWKNEKLYCGRHYCDSEKPRCAGCDELIFSNEYTQAENQNWHLKHFCCFDCDSILAGEIYVMVNDKPVCKPCYVKNHAVVCQGCHNAIDPEVQRVTYNNFSWHASTECFLCSCCSKCLIGQKFMPVEGMVFCSVECKKRMS

SEQ ID NO: 905293 - protein, 412 aa, Homo sapiens
MGLGHEQGFGAPCLKCKEKCEGFELHFWRKICRNCKCGQEEHDVLLSNEEDRKVGKLFEDTKYTTLIAKLKSDGIPMYKRNVMILTNPVAAKKNVSINTVTYEWAPPVQNQALARQYMQMLPKEKQPVAGSEGAQYRKKQLAKQLPAHDQDPSKCHELSPREVKEMEQFVKKYKSEALGVGDVKLPCEMDAQGPKQMNIPGGDRSTPAAVGAMEDKSAEHKRTQYSCYCCKLSMKEGDPAIYAERAGYDKLWHPACFVCSTCHELLVDMIYFWKNEKLYCGRHYCDSEKPRCAGCDELIFSNEYTQAENQNWHLKHFCCFDCDSILAGEIYVMVNDKPVCKPCYVKNHAVVCQGCHNAIDPEVQRVTYNNFSWHASTECFLCSCCSKCLIGQKFMPVEGMVFCSVECKKRMS

SEQ ID NO: 905294 - protein, 489 aa, Homo sapiens; identical to SEQ ID NO: 905292

SEQ ID NO: 905295 - protein, 489 aa, Homo sapiens; identical to SEQ ID NO: 905292

SEQ ID NO: 905296 - protein, 410 aa, Homo sapiens
RVPDCTPRDFTMHQNDVNDSDTALLSEKYVVTWERPCEEHDVLLSNEEDRKVGKLFEDTKYTTLIAKLKSDGIPMYKRNVMILTNPVAAKKNVSINTVTYEWAPPVQNQALARQYMQMLPKEKQPVAGSEGAQYRKKQLAKQLPAHDQDPSKCHELSPREVKEMEQFVKKYKSEALGVGDVKLPCEMDAQGPKQMNIPGGDRSTPAAVGAMEDKSAEHKRTQYSCYCCKLSMKEGDPAIYAERAGYDKLWHPACFVCSTCHELLVDMIYFWKNEKLYCGRHYCDSEKPRCAGCDELIFSNEYTQAENQNWHLKHFCCFDCDSILAGEIYVMVNDKPVCKPCYVKNHAVVCQGCHNAIDPEVQRVTYNNFSWHASTECFLCSCCSKCLIGQKFMPVEGMVFCSVECKKRMS

SEQ ID NO: 905297 - protein, 489 aa, Homo sapiens; identical to SEQ ID NO: 905292

SEQ ID NO: 905298 - protein, 473 aa, Homo sapiens
GPLCSRVRAAGPLRRTGRRKFDGAGRVAVERRRGSSAGFPCSQRSRRPAEPGRGIPDRRRRGPIGRVNMDLENKVKKMGLGHEQGFGAPCLKCKEKCEGFELHFWRKICRNCKCGQEEHDVLLSNEEDRKVGKLFEDTKYTTLIAKLKSDGIPMYKRNVMILTNPVAAKKNVSINTVTYEWAPPVQNQALARQYMQMLPKEKQPVAGSEGAQYRKKQLAKQLPAHDQDPSKCHELSPREVKEMEQFVKKYKSEALGVGDVKLPCEMDAQGPKQMNIPGGDRSTPAAVGAMEDKSAEHKRTQYSCYCCKLSMKEGDPAIYAERAGYDKLWHPACFVCSTCHELLVDMIYFWKNEKLYCGRHYCDSEKPRCAGCDELIFSNEYTQAENQNWHLKHFCCFDCDSILAGEIYVMVNDKPVCKPCYVKNHAVVRSVLRIWLPQPALGLEFMLFLKPLTNGKQKAVLLSRKQIIPTTGC

SEQ ID NO: 905299 - protein, 208 aa, Homo sapiens
GPLCSRVRAAGPLRRTGRRKFDGAGRVAVERRRGSSAGFPCSQRSRRPAEPGRGIPDRRRRGPIGRVNMDLENKVKKVGGRSWRAAAASPARVARRAAAGGAEVGGARGPPGVSPALGLRCPGPRDLAPWVEEVLGGPASSPHSGATELEARARAGAGLFSPVSRNPSGCRCWKLYLRCFSSACASSKGKDELRASAGETVTLPGSGS

SEQ ID NO: 905300 - protein, 489 aa, Homo sapiens; identical to SEQ ID NO: 905292

SEQ ID NO: 905301 - protein, 489 aa, Homo sapiens; identical to SEQ ID NO: 905292

SEQ ID NO: 905302 - protein, 330 aa, Homo sapiens [sequence omitted]

SEQ ID NO: 905303 - protein, 179 aa, Homo sapiens
MKEGDPAIYAERAGYDKLWHPACFVCSTCHELLVDMIYFWKNEKLYCGRHYCDSEKPRCAGCDELIFSNEYTQAENQNWHLKHFCCFDCDSILAGEIYVMVNDKPVCKPCYVKNHAVVCQGCHNAIDPEVQRVTYNNFSWHASTECFLCSCCSKCLIGQKFMPVEGMVFCSVECKKRMS

SEQ ID NO: 905304 - protein, 395 aa, Homo sapiens
GPLCSRVRAAGPLRRTGRRKFDGAGRVAVERRRGSSAGFPCSQRSRRPAEPGRGIPDRRRRGPIGRVNMDLENKVKKMGLGHEQGFGAPCLKCKEKCEGFELHFWRKICRNCKCGQEEHDVLLSNEEDRKVGKLFEDTKYTTLIAKLKSDGIPMYKRNVMILTNPVAAKKNVSINTVTYEWAPPVQNQALARQYMQMLPKEKQPVAGSEGAQYRKKQLAKQLPAHDQDPSKCHELSPREVKEMEQFVKKYKSEALGVGDVKLPCEMDAQGPKQMNIPGGDRSTPAAVGAMEDKSAEHKRTQYSCYCCKLSMKEGDPAIYAERAGYDKLWHPACFVCSTCHELLVDMIYFWKNEKLYCGRHYCDSEKPRCAGCDELIITTEYTQPSSPARDPLDDS

SEQ ID NO: 905305 - protein, 370 aa, Homo sapiens
MISWNDAQNSGKHSASYTGYYKGHYSRTAQRKRCGGQGRRAQRSTPRSLARVSQRGPTRYADAPTPIRPSQDSTMTLNNVTMRQGTVGMQPQQQRWSIPADGRHLMVQKEPHQYSHRNRHSATPEDHCRRSWSSDSTDSVISSESGNTYYRVVLIGEQGVGKSTLANIFAGVHDSMDSDCEVLGEDTYERTLMVDGESATIILLDMWENKGENEWLHDHCMQVGDAYLIVYSITDRASFEKASELRIQLRRARQTEDIPIILVGNKSDLVRCREVSVSEGRACAVVFDCKFIETSAAVQHNVKELFEGIVRQVRLRRDSKEKNERRLAYQKRKESMPRKARRFWGKIVAKNNKNMAFKLKSKSCHDLSVL

SEQ ID NO: 905306 - protein, 296 aa, Homo sapiens
MTLNNVTMRQGTVGMQPQQQRWSIPADGRHLMVQKEPHQYSHRNRHSATPEDHCRRSWSSDSTDSVISSESGNTYYRVVLIGEQGVGKSTLANIFAGVHDSMDSDCEVLGEDTYERTLMVDGESATIILLDMWENKGENEWLHDHCMQVGDAYLIVYSITDRASFEKASELRIQLRRARQTEDIPIILVGNKSDLVRCREVSVSEGRACAVVFDCKFIETSAAVQHNVKELFEGIVRQVRLRRDSKEKNERRLAYQKRKESMPRKARRFWGKIVAKNNKNMAFKLKSKSCHDLSVL

SEQ ID NO: 905307 - protein, 296 aa, Homo sapiens; identical to SEQ ID NO: 905306

SEQ ID NO: 905308 - protein, 95 aa, Homo sapiens
SMISWNDAQNSGKHSASYTGYYKGHYSRTAQRKRCGGQGRRAQRSTPRSLARVSQRGPTRYADAPTPIRPSQVRGTARDGEGREWEFPSPQNFRS

SEQ ID NO: 905309 - protein, 296 aa, Homo sapiens; identical to SEQ ID NO: 905306

SEQ ID NO: 905310 - protein, 278 aa, Homo sapiens
MTLNNVTMRQGTVGMQPQQQRWSIPADGRHLMVQKEPHQYSHRNRHSATPEDHCRRSWSSDSTDSVISSESGNTYYRVVLIGEQGVGKSTLANIFAGVHDSMDSDCEVLGEDTYERTLMVDGESATIILLDMWENKGENEWLHDHCMQVGDAYLIVYSITDRASFEKASELRIQLRRARQTEDIPIILVGNKMVFDCKFIETSAAVQHNVKELFEGIVRQVRLRRDSKEKNERRLAYQKRKESMPRKARRFWGKIVAKNNKNMAFKLKSKSCHDLSVL

SEQ ID NO: 905311 - protein, 207 aa, Homo sapiens
MISWNDAQNSGKHSASYTGYYKGHYSRTAQRKRCGGQGRRAQRSTPRSLARVSQRGPTRYADAPTPIRPSQDSTMTLNNVTMRQGTVGMQPQQQRWSIPADGRHLMVQKEPHQYSHRNRHSATPEDHCRRSWSSDSTDSVISSESGNTYYRVVLIGEQGVGKSTLANIFAGVHDSMDSDCEVLGGRCPSPSGLLSTRGGPGRKSEGG

SEQ ID NO: 905312 - protein, 171 aa, Homo sapiens
MAAACGPGAAGYCLLLGLHLFLLTAGPALGWNDPDRMLLRDVKALTLHYDRYTTSRRLDPIPQLKCVGGTAGCDSYTPKVIQCQNKGWDGYDVQWECKTDLDIAYKFGKTVVSCEGYESSEDQYVLRGSCGLEYNLDYTELGLQKLKESGKQHGFASFSDYYYKVVLGGFL

SEQ ID NO: 905313 - protein, 171 aa, Homo sapiens; identical to SEQ ID NO: 905312

SEQ ID NO: 905314 - protein, 171 aa, Homo sapiens; identical to SEQ ID NO: 905312

SEQ ID NO: 905315 - protein, 171 aa, Homo sapiens; identical to SEQ ID NO: 905312

SEQ ID NO: 905316 - protein, 171 aa, Homo sapiens; identical to SEQ ID NO: 905312

SEQ ID NO: 905317 - protein, 135 aa, Homo sapiens
MLLRDVKALTLHYDRYTTSRRLDPIPQLKCVGGTAGCDSYTPKVIQCQNKGWDGYDVQWECKTDLDIAYKFGKTVVSCEGYESSEDQYVLRGSCGLEYNLDYTELGLQKLKESGKQHGFASFSDYYYKVVLGGFL

SEQ ID NO: 905318 - protein, 135 aa, Homo sapiens; identical to SEQ ID NO: 905317

SEQ ID NO: 905319 - protein, 132 aa, Homo sapiens
TIEPVPGNSYDRYTTSRRLDPIPQLKCVGGTAGCDSYTPKVIQCQNKGWDGYDVQWECKTDLDIAYKFGKTVVSCEGYESSEDQYVLRGSCGLEYNLDYTELGLQKLKESGKQHGFASFSDYYYKVVLGGFL

SEQ ID NO: 905320 - protein, 171 aa, Homo sapiens; identical to SEQ ID NO: 905312

SEQ ID NO: 905321 - protein, 167 aa, Homo sapiens
MSGLITIVVLLGIAFVVYKLFLSDGQYSPPPYSEYPPFSHRYQRFTNSAGPPPPGFKSEFTGPQNTGHGATSGFGSAFTGQQGYENSGPGFWTGLGTGGILGYLFGSNRAATPFSDSWYYPSYPPSYPGTWNRAYSPLHGGSGSYSVCSNSDTKTRTASGYGGTRRR

SEQ ID NO: 905322 - protein, 167 aa, Homo sapiens; identical to SEQ ID NO: 905321

SEQ ID NO: 905323 - protein, 143 aa, Homo sapiens
MAAACGPGAAGYCLLLGLHLFLLTAGPALGWNDPDRMLLRDVKALTLHYDRYTTSRRLDPIPQLKCVGGTAGCDSYTPKVIQCQNKGWDGYDVQWECKTDLDIAYKFGKTVVSCEGYESSEDQYVLRGSCGLEYNLDYTELGL

SEQ ID NO: 905324 - protein, 171 aa, Homo sapiens; identical to SEQ ID NO: 905312

SEQ ID NO: 905325 - protein, 159 aa, Homo sapiens
  misc_feature (32)..(32): Xaa can be any naturally occurring amino acid
QRNLKQVMSVPGREPSTSFPCSPGQKPHSSLXLHSPVSRAPASVQLPPGNLPSSHDYLCPSHSCFSLFPIPFLSQVIVPASCRIRHELHRTLSILHFPTVTRDSPTQQDLLPQALSLSSQDHRILAMVQLLVLAVLLQDNKDMKIQDQGSGQAWELVEY

SEQ ID NO: 905326 - protein, 171 aa, Homo sapiens; identical to SEQ ID NO: 905312

SEQ ID NO: 905327 - protein, 171 aa, Homo sapiens; identical to SEQ ID NO: 905312

SEQ ID NO: 905328 - protein, 175 aa, Homo sapiens
MSGLITIVVLLGIAFVVYKLFLSDGQYSPPPYSEYPPFSHRYQRFTNSAGPPPPGFKSEFTGPQNTGHGATSGFGSAFTGQQGYENSGPGFWTGLGTGGILGYLFGSNRAATPFSDSWYYPSYPPSYPGTWNRAYSPLHGGSGSYSDMVVPGDDKVESWSQTLDAEILDFSSLSL

SEQ ID NO: 905329 - protein, 171 aa, Homo sapiens; identical to SEQ ID NO: 905312

SEQ ID NO: 905330 - protein, 164 aa, Homo sapiens
MAAACGPGAAGYCLLLGLHLFLLTAGPALGWNDPDRMLLRDVKALTLHYDRYTTSRRLDPIPQLKCVGGTAGCDSYTPKVIQCQNKGWDGYDVQWECKTDLDIAYKFGKTVVSCEGYESSEDQYVLRGSCGLEYNLDYTELGLQKLKESVFSQGNGRKQLRATD

SEQ ID NO: 905331 - protein, 74 aa, Homo sapiens
MAAACGPGAAGYCLLLGLHLFLLTAGPALGWNDPGECCQGPQALRSPFSAAVSRCRLPCVSVRRLPGAWVPGYP

SEQ ID NO: 905332 - protein, 171 aa, Homo sapiens; identical to SEQ ID NO: 905312

SEQ ID NO: 905333 - protein, 171 aa, Homo sapiens; identical to SEQ ID NO: 905312

SEQ ID NO: 905334 - protein, 171 aa, Homo sapiens; identical to SEQ ID NO: 905312

SEQ ID NO: 905335 - protein, 171 aa, Homo sapiens; identical to SEQ ID NO: 905312

SEQ ID NO: 905336 - protein, 135 aa, Homo sapiens; identical to SEQ ID NO: 905317

SEQ ID NO: 905337 - protein, 167 aa, Homo sapiens; identical to SEQ ID NO: 905321

SEQ ID NO: 905338 - protein, 167 aa, Homo sapiens; identical to SEQ ID NO: 905321

SEQ ID NO: 905339 - protein, 117 aa, Homo sapiens
MAAACGPGAAGYCLLLGLHLFLLTAGPALGWNDPDRMLLRDVKALTLHYDRYTTSRRLDPIPQLKCVGGTAGCDSYTPKVIQCQNKGWDGYDVQWECKTDLDIAYKFGKKRFLWLGV

SEQ ID NO: 905340 - protein, 167 aa, Homo sapiens; identical to SEQ ID NO: 905321

SEQ ID NO: 905341 - protein, 171 aa, Homo sapiens; identical to SEQ ID NO: 905312

SEQ ID NO: 905342 - protein, 171 aa, Homo sapiens; identical to SEQ ID NO: 905312

SEQ ID NO: 905343 - protein, 143 aa, Homo sapiens
MAAACGPGAAGYCLLLGLHLFLLTAGPALGWNDPDRMLLRDVKALTLHYDRYTTSRRLDPIPQLKCVGGTAGCDSYTPKVIQCQNKGWDGYDVQWECKTDLDIAYKFGKTVVSCEGYESSEDQYVLMKIQDQGSGQAWELVEY

SEQ ID NO: 905344 - protein, 171 aa, Homo sapiens; identical to SEQ ID NO: 905312

SEQ ID NO: 905345 - protein, 102 aa, Homo sapiens
MAAACGPGAAGYCLLLGLHLFLLTAGPALGWNDPDRMLLRDVKALTLHYDRYTTSRRLDPIPQLKCVGGTAGCDSYTPKVIQCQNKGWDGYDVQVISTTVMA

SEQ ID NO: 905346 - protein, 753 aa, Homo sapiens
TRQQLGFGDKTRCGERAGAFLPEMAGLTAAAPRPGVLLLLLSILHPSRPGGVPGAIPGGVPGGVFYPGAGLGALGGGALGPGGKPLKPVPGGLAGAGLGAGLGAFPAVTFPGALVPGGVADAAAAYKAAKAGAGLGGVPGVGGLGVSAGAVVPQPGAGVKPGKVPGVGLPGVYPGGVLPGARFPGVGVLPGVPTGAGVKPKAPGVGGAFAGIPGVGPFGGPQPGVPLGYPIKAPKLPGGYGLPYTTGKLPYGYGPGGVAGAAGKAGYPTGTGVGPQAAAAAAAKAAAKFGAGAAGVLPGVGGAGVPGVPGAIPGIGGIAGVGTPAAAAAAAAAAKAAKYGAAAGLVPGGPGFGPGVVGVPGAGVPGVGVPGAGIPVVPGAGIPGAAVPGVVSPEAAAKAAAKAAKYGARPGVGVGGIPTYGVGAGGFPGFGVGVGGIPGVAGVPGVGGVPGVGGVPGVGISPEAQAAAAAKAAKYGVGTPAAAAAKAAAKAAQFALLNLAGLVPGVGVAPGVGVAPGVGVAPGVGLAPGVGVAPGVGVAPGVGVAPGIGPGGVAAAAKSAAKVAAKAQLRAAAGLGAGIPGLGVGVGVPGLGVGAGVPGLGVGAGVPGFGAVPGALAAAKAAKYGAAVPGVLGGLGALGGVGIPGGVVGAGPAAAAAAAKAAAKAAQFGLVGAAGLGGLGVGGLGVPGVGGLGGIPPAAAAKAAKYGAAGLGGVLGGAGQFPLGGVAARPGFGLSPIFPGGACLGKACGRKRK

SEQ ID NO: 905347 - protein, 780 aa, Homo sapiens
TRQQLGFGDKTRCGERAGAFLPEMAGLTAAAPRPGVLLLLLSILHPSRPGGVPGAIPGGVPGGVFYPGAGLGALGGGALGPGGKPLKPVPGGLAGAGLGAGLGAFPAVTFPGALVPGGVADAAAAYKAAKAGAGLGGVPGVGGLGVSAGAVVPQPGAGVKPGKVPGVGLPGVYPGGVLPGARFPGVGVLPGVPTGAGVKPKAPGVGGAFAGIPGVGPFGGPQPGVPLGYPIKAPKLPGGYGLPYTTGKLPYGYGPGGVAGAAGKAGYPTGTGVGPQAAAAAAAKAAAKFGAGAAGVLPGVGGAGVPGVPGAIPGIGGIAGVGTPAAAAAAAAAAKAAKYGAAAGLVPGGPGFGPGVVGVPGAGVPGVGVPGAGIPVVPGAGIPGAAVPGVVSPEAAAKAAAKAAKYGARPGVGVGGIPTYGVGAGGFPGFGVGVGGIPGVAGVPGVGGVPGVGGVPGVGISPEAQAAAAAKAAKYGVGTPAAAAAKAAAKAAQFGLVPGVGVAPGVGVAPGVGVAPGVGLAPGVGVAPGVGVAPGVGVAPGIGPGGVAAAAKSAAKVAAKAQLRAAAGLGAGIPGLGVGVGVPGLGVGAGVPGLGVGAGVPGFGAGADEGVRRSLSPELREGDPSSSQHLPSTPSSPRVPGALAAAKAAKYGAAVPGVLGGLGALGGVGIPGGVVGAGPAAAAAAAKAAAKAAQFGLVGAAGLGGLGVGGLGVPGVGGLGGIPPAAAAKAAKYGAAGLGGVLGGAGQFPLGGVAARPGFGLSPIFPGGACLGKACGRKRK

SEQ ID NO: 905348 - protein, 747 aa, Homo sapiens
TRQQLGFGDKTRCGERAGAFLPEMAGLTAAAPRPGVLLLLLSILHPSRPGGVPGAIPGGVPGGVFYPGAGLGALGGGALGPGGKPLKPVPGGLAGAGLGAGLGAFPAVTFPGALVPGGVADAAAAYKAAKAGAGLGGVPGVGGLGVSAGAVVPQPGAGVKPGKVPGVGLPGVYPGGVLPGARFPGVGVLPGVPTGAGVKPKAPGVGGAFAGIPGVGPFGGPQPGVPLGYPIKAPKLPGGYGLPYTTGKLPYGYGPGGVAGAAGKAGYPTGTGVGPQAAAAAAAKAAAKFGAGAAGVLPGVGGAGVPGVPGAIPGIGGIAGVGTPAAAAAAAAAAKAAKYGAAAGLVPGGPGFGPGVVGVPGAGVPGVGVPGAGIPVVPGAGIPGAAVPGVVSPEAAAKAAAKAAKYGARPGVGVGGIPTYGVGAGGFPGFGVGVGGIPGVAGVPGVGGVPGVGGVPGVGISPEAQAAAAAKAAKYGVGTPAAAAAKAAAKAAQFGLVPGVGVAPGVGVAPGVGVAPGVGLAPGVGVAPGVGVAPGVGVAPGIGPGGVAAAAKSAAKVAAKAQLRAAAGLGAGIPGLGVGVGVPGLGVGAGVPGLGVGAGVPGFGAVPGALAAAKAAKYGAAVPGVLGGLGALGGVGIPGGVVGAGPAAAAAAAKAAAKAAQFGLVGAAGLGGLGVGGLGVPGVGGLGGIPPAAAAKAAKYGAAGLGGVLGGAGQFPLGGVAARPGFGLSPIFPGGACLGKACGRKRK

SEQ ID NO: 905349 - protein, 753 aa, Homo sapiens; identical to SEQ ID NO: 905346

SEQ ID NO: 905350 - protein, 728 aa, Homo sapiens
TRQQLGFGDKTRCGERAGAFLPEMAGLTAAAPRPGVLLLLLSILHPSRPGGVPGAIPGGVPGGVFYPGAGLGALGGGALGPGGKPLKPVPGGLAGAGLGAGLGAFPAVTFPGALVPGGVADAAAAYKAAKAGAGLGGVPGVGGLGVSAGAVVPQPGAGVKPGKVPGVGLPGVYPGGVLPGARFPGVGVLPGVPTGAGVKPKAPGVGGAFAGIPGVGPFGGPQPGVPLGYPIKAPKLPGGYGLPYTTGKLPYGYGPGGVAGAAGKAGYPTGTGVGPQAAAAAAAKAAAKFGAGAAGVLPGVGGAGVPGVPGAIPGIGGIAGVGTPAAAAAAAAAAKAAKYGAAAGLVPGGPGFGPGVVGVPGAGVPGVGVPGAGIPVVPGAGIPGAAVPGVVSPEAAAKAAAKAAKYGARPGVGVGGIPTYGVGAGGFPGFGVGVGGIPGVAGVPGVGGVPGVGGVPGVGISPEAQAAAAAKAAKYGLVPGVGVAPGVGVAPGVGVAPGVGLAPGVGVAPGVGVAPGVGVAPGIGPGGVAAAAKSAAKVAAKAQLRAAAGLGAGIPGLGVGVGVPGLGVGAGVPGLGVGAGVPGFGAVPGALAAAKAAKYGAAVPGVLGGLGALGGVGIPGGVVGAGPAAAAAAAKAAAKAAQFGLVGAAGLGGLGVGGLGVPGVGGLGGIPPAAAAKAAKYGAAGLGGVLGGAGQFPLGGVAARPGFGLSPIFPGGACLGKACGRKRK

SEQ ID NO: 905351 - protein, 637 aa, Homo sapiens
TRQQLGFGDKTRCGERAGAFLPEMAGLTAAAPRPGVLLLLLSILHPSRPGGVPGAIPGGVPGGVFYPGAGLGALGGGALGPGGKPLKPVPGGLAGAGLGAGLGAFPAVTFPGALVPGGVADAAAAYKAAKAGAGLGGVPGVGGLGVSAGAVVPQPGAGVKPGKVPGVGLPGVYPGGVLPGARFPGVGVLPGVPTGAGVKPKAPGVGGAFAGIPGVGPFGGPQPGVPLGYPIKAPKLPGGYGLPYTTGKLPYGYGPGGVAGAAGKAGYPTGTGVGPQAAAAAAAKAAAKFGAGAAGVLPGVGGAGVPGVPGAIPGIGGIAGVGTPAAAAAAAAAAKAAKYGAAAGLVPGGPGFGPGVVGVPGAGVPGVGVPGAGIPVVPGAGIPGAAVPGVVSPEAAAKAAAKAAKYGARPGVGVGGIPTYGVGAGGFPGFGVGVGGIPGVAGVPGVGGVPGVGGVPGVGISPEAQAAAAAKAAKYGLVPGVGVAPGVGVAPGVGVAPGVGLAPGVGVAPGVGVAPGVGVAPGIGPGGVAAAAKSAAKVAAKAQLRAAAGLGAGIPGLGVGVGVPGLGVGAGVPGLGVGAGVPGFGAVPGALAAAKAAKYGAAVPGVLGGLGALGGVGIPGGVVGELKPQEGQGGEGI

SEQ ID NO: 905352 - protein, 753 aa, Homo sapiens; identical to SEQ ID NO: 905346

SEQ ID NO: 905353 - protein, 199 aa, Homo sapiens [sequence omitted]

SEQ ID NO: 905354 - protein, 376 aa, Homo sapiens
MVEVLGTQASQFSVFYGQGLGEIYILFPNPSASLRARPASLTELLFYLAPFLSAGARPGVGVGGIPTYGVGAGGFPGFGVGVGGIPGVAGVPGVGGVPGVGGVPGVGISPEAQAAAAAKAAKYGLVPGVGVAPGVGVAPGVGVAPGVGLAPGVGVAPGVGVAPGVGVAPGIGPGGVAAAAKSAAKVAAKAQLRAAAGLGAGIPGLGVGVGVPGLGVGAGVPGLGVGAGVPGFGAVPGALAAAKAAKYGAAVPGVLGGLGALGGVGIPGGVVGAGPAAAAAAAKAAAKAAQFGLVGAAGLGGLGVGGLGVPGVGGLGGIPPAAAAKAAKYGAAGLGGVLGGAGQFPLGGVAARPGFGLSPIFPGGACLGKACGRKRK

SEQ ID NO: 905355 - protein, 753 aa, Homo sapiens; identical to SEQ ID NO: 905346

SEQ ID NO: 905356 - protein, 199 aa, Homo sapiens [sequence omitted]

SEQ ID NO: 905357 - protein, 199 aa, Homo sapiens [sequence omitted]

SEQ ID NO: 905358 - protein, 710 aa, Homo sapiens
TRQQLGFGDKTRCGERAGAFLPEMAGLTAAAPRPGVLLLLLSILHPSRPGGVPGAIPGGVPGGVFYPGAGLGALGGGALGPGGKPLKPVPGGLAGAGLGAGLGAFPAVTFPGALVPGGVADAAAAYKAAKAGAGLGGVPGVGGLGVSAGAVVPQPGAGVKPGKVPGVGLPGVYPGGVLPGARFPGVGVLPGVPTGAGVKPKAPGVGGAFAGIPGVGPFGGPQPGVPLGYPIKAPKLPGGYGLPYTTGKLPYGYGPGGVAGAAGKAGYPTGTGVGPQAAAAAAAKAAAKFGAGAAGVLPGVGGAGVPGVPGAIPGIGGIAGVGTPAAAAAAAAAAKAAKYGAAAGLVPGGPGFGPGVVGVPGAGVPGVGVPGAGIPVVPGAGIPGAAVPGVVSPEAAAKAAAKAAKYGARPGVGVGGIPTYGVGAGGFPGFGVGVGGIPGVAGVPGVGGVPGVGGVPGVGISPEAQAAAAAKAAKYGLVPGVGVAPGVGVAPGVGVAPGVGLAPGVGVAPGVGVAPGVGVAPGIGPGGVAAAAKSAAKVAAKAQLRAAAGLGAGIPGLGVGVGVPGLGVGAGVPGLGVGAGVPGFGAVPGALAAAKAAKYGAAVPGVLGGLGALGGVGIPGGVVGAGPAAAAAAAKAAAKAAQFGLVGAAGLGGLGVGGLGVPGVGGLGGIPPAAAAKAAKYGVAARPGFGLSPIFPGGACLGKACGRKRK

SEQ ID NO: 905359 - protein, 386 aa, Homo sapiens
TRQQLGFGDKTRCGERAGAFLPEMAGLTAAAPRPGVLLLLLSILHPSRPGGVPGAIPGGVPGGVFYPGAGLGALGGGALGPGGKPLKPVPGGLAGAGLGAGLGAFPAVTFPGALVPGGVADAAAAYKAAKAGAGLGGVPGVGGLGVSAGAVVPQPGAGVKPGKVPGVGLPGVYPGGVLPGARFPGVGVLPGVPTGAGVKPKAPGVGGAFAGIPGVGPFGGPQPGVPLGYPIKAPKLPGGYGLPYTTGKLPYGYGPGGVAGAAGKAGYPTGTGVGPQAAAAAAAKAAAKFGAGAAGVLPGVGGAGVPGVPGAIPGIGGIAGVGTPAAAAAAAAAAKAAKYGECLPGWQVHGSGPCIDLGDPSRKARWTWPLFLPKYALFMPPYLCPF

SEQ ID NO: 905360 - protein, 753 aa, Homo sapiens; identical to SEQ ID NO: 905346

SEQ ID NO: 905361 - protein, 753 aa, Homo sapiens; identical to SEQ ID NO: 905346

SEQ ID NO: 905362 - protein, 753 aa, Homo sapiens; identical to SEQ ID NO: 905346

SEQ ID NO: 905363 - protein, 753 aa, Homo sapiens; identical to SEQ ID NO: 905346

SEQ ID NO: 905364 - protein, 710 aa, Homo sapiens; identical to SEQ ID NO: 905358

SEQ ID NO: 905365 - protein, 694 aa, Homo sapiens
TRQQLGFGDKTRCGERAGAFLPEMAGLTAAAPRPGVLLLLLSILHPSRPGGVPGAIPGGVPGGVFYPGAGLGALGGGALGPGGKPLKPVPGGLAGAGLGAGLGAFPAVTFPGALVPGGVADAAAAYKAAKAGAGLGGVPGVGGLGVSAGAVVPQPGAGVKPGKVPGVGLPGVYPGGVLPGVGPFGGPQPGVPLGYPIKAPKLPGGYGLPYTTGKLPYGYGPGGVAGAAGKAGYPTGTGVGPQAAAAAAAKAAAKFGAGAAGVLPGVGGAGVPGVPGAIPGIGGIAGVGTPAAAAAAAAAAKAAKYGAAAGLVPGGPGFGPGVVGVPGAGVPGVGVPGAGIPVVPGAGIPGAAVPGVVSPEAAAKAAAKAAKYGARPGVGVGGIPTYGVGAGGFPGFGVGVGGIPGVAGVPGVGGVPGVGGVPGVGISPEAQAAAAAKAAKYGLVPGVGVAPGVGVAPGVGVAPGVGLAPGVGVAPGVGVAPGVGVAPGIGPGGVAAAAKSAAKVAAKAQLRAAAGLGAGIPGLGVGVGVPGLGVGAGVPGLGVGAGVPGFGAVPGALAAAKAAKYGAAVPGVLGGLGALGGVGIPGGVVGAGPAAAAAAAKAAAKAAQFGLVGAAGLGGLGVGGLGVPGVGGLGGIPPAAAAKAAKYGAAGLGGVLGGAGQFPLGGVAARPGFGLSPIFPGGACLGKACGRKRK

SEQ ID NO: 905366 - protein, 706 aa, Homo sapiens
TRQQLGFGDKTRCGERAGAFLPEMAGLTAAAPRPGVLLLLLSILHPSRPGGVPGAIPGGVPGGVFYPGAGLGALGGGALGPGGKPLKPGLGAFPAVTFPGALVPGGVADAAAAYKAAKAGAGLGGVPGVGGLGVSAGAVVPQPGAGVKPGKVPGVGLPGVYPGGVLPGARFPGVGVLPGVPTGAGVKPKAPGVGPFGGPQPGVPLGYPIKAPKLPGGYGLPYTTGKLPYGYGPGGVAGAAGKAGYPTGTGVGPQAAAAAAAKAAAKFGAGAAGVLPGVGGAGVPGVPGAIPGIGGIAGVGTPAAAAAAAAAAKAAKYGAAAGLVPGGPGFGPGVVGVPGAGVPGVGVPGAGIPVVPGAGIPGAAVPGVVSPEAAAKAAAKAAKYGARPGVGVGGIPTYGVGAGGFPGFGVGVGGIPGVAGVPGVGGVPGVGGVPGVGISPEAQAAAAAKAAKYGLVPGVGVAPGVGVAPGVGVAPGVGLAPGVGVAPGVGVAPGVGVAPGIGPGGVAAAAKSAAKVAAKAQLRAAAGLGAGIPGLGVGVGVPGLGVGAGVPGLGVGAGVPGFGAVPGALAAAKAAKYGAAVPGVLGGLGALGGVGIPGGVVGAGPAAAAAAAKAAAKAAQFGLVGAAGLGGLGVGGLGVPGVGGLGGIPPAAAAKAAKYGAAGLGGVLGGAGQFPLGGVAARPGFGLSPIFPGGACLGKACGRKRK

SEQ ID NO: 905367 - protein, 527 aa, Homo sapiens
VLGPELALFIPTGVGPFGGPQPGVPLGYPIKAPKLPGGYGLPYTTGKLPYGYGPGGVAGAAGKAGYPTGTGVGPQAAAAAAAKAAAKFGAGAAGVLPGVGGAGVPGVPGAIPGIGGIAGVGTPAAAAAAAAAAKAAKYGAAAGLVPGGPGFGPGVVGVPGAGVPGVGVPGAGIPVVPGAGIPGAAVPGVVSPEAAAKAAAKAAKYGARPGVGVGGIPTYGVGAGGFPGFGVGVGGIPGVAGVPGVGGVPGVGGVPGVGISPEAQAAAAAKAAKYGLVPGVGVAPGVGVAPGVGVAPGVGLAPGVGVAPGVGVAPGVGVAPGIGPGGVAAAAKSAAKVAAKAQLRAAAGLGAGIPGLGVGVGVPGLGVGAGVPGLGVGAGVPGFGAVPGALAAAKAAKYGAAVPGVLGGLGALGGVGIPGGVVGAGPAAAAAAAKAAAKAAQFGLVGAAGLGGLGVGGLGVPGVGGLGGIPPAAAAKAAKYGAAGLGGVLGGAGQFPLGGVAARPGFGLSPIFPGGACLGKACGRKRK

SEQ ID NO: 905368 - protein, 199 aa, Homo sapiens [sequence omitted]

SEQ ID NO: 905369 - protein, 801 aa, Homo sapiens
TRQQLGFGDKTRCGERAGAFLPEMAGLTAAAPRPGVLLLLLSILHPSRPGGVPGAIPGGVPGGVFYPGAGLGALGGGALGPGGKPLKPVPGGLAGAGLGAGLGAFPAVTFPGALVPGGVADAAAAYKAAKAGAGLGGVPGVGGLGVSAGAVVPQPGAGVKPGKVPGVGLPGVYPGGVLPGARFPGVGVLPGVPTGAGVKPKAPGVGGAFAGIPGVGPFGGPQPGVPLGYPIKAPKLPGGYGLPYTTGKLPYGYGPGGVAGAAGKAGYPTGTGVGPQAAAAAAAKAAAKFGAGAAGVLPGVGGAGVPGVPGAIPGIGGIAGVGTPAAAAAAAAAAKAAKYGAAAGLVPGGPGFGPGVVGVPGAGVPGVGVPGAGIPVVPGAGIPGAAVPGVVSPEAAAKAAAKAAKYGARPGVGVGGIPTYGVGAGGFPGFGVGVGGIPGVAGVPGVGGVPGVGGVPGVGISPEAQAAAAAKAAKYGLVPGVGVAPGVGVAPGVGVAPGVGLAPGVGVAPGVGVAPGVGVAPGIGPGGVAAAAKSAAKVAAKAQLRAAAGLGAGIPGLGVGVGVPGLGVGAGVPGLGVGAGVPGFGAVPGALAAAKAAKYGAAVPGVLGGLGALGGVGIPGGVVGAGPAAAAAAAKAAAKAAQFGLVGAAGLGGLGVGGLGVPGVGGLGGIPPAAAAKAAKYGAAGLGGVLGGAGQFPLGGVAARPGFGLSPIFPAPAHQDPPLAAIQLVPKHLKPQSWIRSSIPPLLGPLGRLLPTDRCSPHLGRFWVGKPPHTGNSHLALVESIRPSVHSSIGPSIHVPS

SEQ ID NO: 905370 - protein, 670 aa, Homo sapiens
TRQQLGFGDKTRCGERAGAFLPEMAGLTAAAPRPGVLLLLLSILHPSRPGGVPGAIPGGVPGGVFYPGAGLGALGGGALGPGGKPLKPVPGGLAGAGLGAGLGAFPAVTFPGALVPGGVADAAAAYKAAKAGAGLGGVPGVGGLGVSAGAVVPQPGAGVKPGKVPGVGLPGVYPGGVLPGARFPGVGVLPGVPTGAGVKPKAPGVGGAFAGIPGVGPFGGPQPGVPLGYPIKAPKLPGGYGLPYTTGKLPYGYGPGGVAGAAGKAGYPTGTGVGPQAAAAAAAKAAAKFGAGAAGVLPGVGGAGVPGVPGAIPGIGGIAGVGTPAAAAAAAAAAKAAKYGAAAGLVPGGPGFGPGVVGVPGAGVPGVGVPGAGIPVVPGAGIPGAAVPGVVSPEAAAKAAAKAAKYGARPGVGVGGIPTYGVGAGGFPGFGVGVGGIPGVAGVPGVGGVPGVGGVPGVGISPEAQAAAAAKAAKYGLVPGVGVAPGVGVAPGVGVAPGVGLAPGVGVAPGVGVAPGVGVAPGIGPGGVAAAAKSAAKVAAKAQLRAAAGLGAGIPGLGVGVGVPGLGVGAGVPGLGVGAGVPGFGAVPGALAAAKAAKYGAAVPGVLGGLGALGGVGIPGGVVGAGPAAAAAAAKAAAKAAQFGEHWVEVGAAARPPGPQGVGGASDQAL

SEQ ID NO: 905371 - protein, 191 aa, Homo sapiens
MSRKIWRSSGKNTTNHVEVNFIKKFTSERDFHPSISCSITWFLSWSPCWECSQAIREFLSRHPGVTLVIYVARLFWHMDQQNRQGLRDLVNSGVTIQIMRASEYYHCWRNFVNYPPGDEAHWPQYPPLWMMLYALELHCIILSLPPCLKISRRWQNHLTFFRLHLQNCHYQTIPPHILLATGLIHPSVAWR

SEQ ID NO: 905372 - protein, 247 aa, Homo sapiens
IPEEEVQRQSTMTSEKGPSTGDPTLRRRIEPWEFDVFYDPRELRKEACLLYEIKWGMSRKIWRSSGKNTTNHVEVNFIKKFTSERDFHPSISCSITWFLSWSPCWECSQAIREFLSRHPGVTLVIYVARLFWHMDQQNRQGLRDLVNSGVTIQIMRASEYYHCWRNFVNYPPGDEAHWPQYPPLWMMLYALELHCIILSLPPCLKISRRWQNHLTFFRLHLQNCHYQTIPPHILLATGLIHPSVAWR

SEQ ID NO: 905373 - protein, 917 aa, Homo sapiens
REWLNSPNRENFYQLQVRKFPADYIKYWEFAVYLEECELAKQLYPKENDLVFLAPERINEEKKDTERNDIQDLHEYHSGYVHKFRRTSVMRNGKTECYLSIQTQENFPANLNELVNCIVISSLVTTQRKLKAMSLLGSRNQLARAVLNPNPMDFCTKDLLTTTSERIIAYLRDFNEDQKKAIETAYAMVKHSPSVAKICLIHGPPGTGKSKTIVGLLYRLLTENQRKGHSDENSNAKIKQNRVLVCAPSNAAVDELMKKIILEFKEKCKDKKNPLGNCGDINLVRLGPEKSINSEVLKFSLDSQVNHRMKKELPSHVQAMHKRKEFLDYQLDELSRQRALCRGGREIQRQELDENISKVSKERQELASKIKEVQGRPQKTQSIIILESHIICCTLSTSGGLLLESAFRGQGGVPFSCVIVDEAGQSCEIETLTPLIHRCNKLILVGDPKQLPPTVISMKAQEYGYDQSMMARFCRLLEENVEHNMISRLPILQLTVQYRMHPDICLFPSNYVYNRNLKTNRQTEAIRCSSDWPFQPYLVFDVGDGSERRDNDSYINVQEIKLVMEIIKLIKDKRKDVSFRNIGIITHYKAQKTMIQKDLDKEFDRKGPAEVDTVDAFQGRQKDCVIVTCVRANSIQGSIGFLASLQRLNVTITRAKYSLFILGHLRTLMENQHWNQLIQDAQKRGAIIKTCDKNYRHDAVKILKLKPVLQRSLTHPPTIAPEGSRPQGGLPSSKLDSGFAKTSVAASLYHTPSDSKEITLTVTSKDPERPPVHDQLQDPRLLKRMGIEVKGGIFLWDPQPSSPQHPGATPPTGEPGFPVVHQDLSHIQQPAAVVAALSSHKPPVRGEPPAASPEASTCQSKCDDPEEELCHRREARAFSEGEQEKCGSETHHTRRNSRWDKRTLEQEDSSSKKRKLL

SEQ ID NO: 905374 - protein, 917 aa, Homo sapiens; identical to SEQ ID NO: 905373

SEQ ID NO: 905375 - protein, 917 aa, Homo sapiens; identical to SEQ ID NO: 905373

SEQ ID NO: 905376 - protein, 684 aa, Homo sapiens
MKTKIKQNRVLVCAPSNAAVDELMKKIILEFKEKCKDKKNPLGNCGDINLVRLGPEKSINSEVLKFSLDSQVNHRMKKELPSHVQAMHKRKEFLDYQLDELSRQRALCRGGREIQRQELDENISKVSKERQELASKIKEVQGRPQKTQSIIILESHIICCTLSTSGGLLLESAFRGQGGVPFSCVIVDEAGQSCEIETLTPLIHRCNKLILVGDPKQLPPTVISMKAQEYGYDQSMMARFCRLLEENVEHNMISRLPILQLTVQYRMHPDICLFPSNYVYNRNLKTNRQTEAIRCSSDWPFQPYLVFDVGDGSERRDNDSYINVQEIKLVMEIIKLIKDKRKDVSFRNIGIITHYKAQKTMIQKDLDKEFDRKGPAEVDTVDAFQGRQKDCVIVTCVRANSIQGSIGFLASLQRLNVTITRAKYSLFILGHLRTLMENQHWNQLIQDAQKRGAIIKTCDKNYRHDAVKILKLKPVLQRSLTHPPTIAPEGSRPQGGLPSSKLDSGFAKTSVAASLYHTPSDSKEITLTVTSKDPERPPVHDQLQDPRLLKRMGIEVKGGIFLWDPQPSSPQHPGATPPTGEPGFPVVHQDLSHIQQPAAVVAALSSHKPPVRGEPPAASPEASTCQSKCDDPEEELCHRREARAFSEGEQEKCGSETHHTRRNSRWDKRTLEQEDSSSKKRKLL

SEQ ID NO: 905377 - protein, 249 aa, Homo sapiens [sequence omitted]

SEQ ID NO: 905378 - protein, 133 aa, Homo sapiens
MGIEVKGGIFLWDPQPSSPQHPGATPPTGEPGFPVVHQDLSHIQQPAAVVAALSSHKPPVRGEPPAASPEASTCQSKCDDPEEELCHRREARAFSEGEQEKCGSETHHTRRNSRWDKRTLEQEDSSSKKRKLL

SEQ ID NO: 905379 - protein, 680 aa, Homo sapiens
REWLNSPNRENFYQLQVRKFPADYIKYWEFAVYLEECELAKQLYPKENDLVFLAPERINEEKKDTERNDIQDLHEYHSGYVHKFRRTSVMRNGKTECYLSIQTQENFPANLNELVNCIVISSLVTTQRKLKAMSLLGSRNQLARAVLNPNPMDFCTKDLLTTTSERIIAYLRDFNEDQKKAIETAYAMVKHSPSVAKICLIHGPPGTGKSKTIVGLLYRLLTENQRKGHSDENSNAKIKQNRVLVCAPSNAAVDELMKKIILEFKEKCKDKKNPLGNCGDINLVRLGPEKSINSEVLKFSLDSQVNHRMKKELPSHVQAMHKRKEFLDYQLDELSRQRALCRGGREIQRQELDENISKVSKERQELASKIKEVQGRPQKTQSIIILESHIICCTLSTSGGLLLESAFRGQGGVPFSCVIVDEAGQSCEIETLTPLIHRCNKLILVGDPKQLPPTVISMKAQEYGYDQSMMARFCRLLEENVEHNMISRLPILQLTVQYRMHPDICLFPSNYVYNRNLKTNRQTEAIRCSSDWPFQPYLVFDVGDGSERRDNDSYINVQEIKLVMEIIKLIKDKRKDVSFRNIGIITHYKAQKTMIQKDLDKEFDRKGPAEVDTVDAFQGRQKDCVIVTCVRANSIQGSIGFLASLQRLNVTITRAKYSLFILGHLRTLMMRKQAQRGQVT

SEQ ID NO: 905380 - protein, 597 aa, Homo sapiens
REWLNSPNRENFYQLQVRKFPADYIKYWEFAVYLEECELAKQLYPKENDLVFLAPERINEEKKDTERNDIQDLHEYHSGYVHKFRRTSVMRNGKTECYLSIQTQENFPANLNELVNCIVISSLVTTQRKLKAMSLLGSRNQLARAVLNPNPMDFCTKDLLTTTSERIIAYLRDFNEDQKKAIETAYAMVKHSPSVAKICLIHGPPGTGKSKTIVGLLYRLLTENQRKGHSDENSNAKIKQNRVLVCAPSNAAVDELMKKIILEFKEKCKDKKNPLGNCGDINLVRLGPEKSINSEVLKFSLDSQVNHRMKKELPSHVQAMHKRKEFLDYQLDELSRQRALCRGGREIQRQELDENISKVSKERQELASKIKEVQGRPQKTQSIIILESHIICCTLSTSGGLLLESAFRGQGGVPFSCVIVDEAGQSCEIETLTPLIHRCNKLILVGDPKQLPPTVISMKAQEYGYDQSMMARFCRLLEENVEHNMISRLPILQLTVQYRMHPDICLFPSNYVYNRNLKTNRQTEAIRCSSDWPFQPYLVFDVGDGSERRDNDSIIITCSTQHQHTGAWQHHTSTALIHTHQHSKGLLRSVSTPIGNN

SEQ ID NO: 905381 - protein, 917 aa, Homo sapiens; identical to SEQ ID NO: 905373

SEQ ID NO: 905382 - protein, 917 aa, Homo sapiens; identical to SEQ ID NO: 905373

SEQ ID NO: 905383 - protein, 946 aa, Homo sapiens
REWLNSPNRENFYQLQVRKFPADYIKYWEFAVYLEECELAKQLYPKENDLVFLAPERINEEKKDTERNDIQDLHEYHSGYVHKFRRTSVMRNGKTECYLSIQTQENFPANLNELVNCIVISSLVTTQRKLKAMSLLGSRNQLARAVLNPNPMDFCTKDLLTTTSERIIAYLRDFNEDQKKAIETAYAMVKHSPSVAKICLIHGPPGTGKSKTIVGLLYRLLTENQRKGHSDENSNAKIKQNRVLVCAPSNAAVDELMKKIILEFKEKCKDKKNPLGNCGDINLVRLGPEKSINSEVLKFSLDSQVNHRMKKELPSHVQAMHKRKEFLDYQLDELSRQRALCRGGREIQRQELDENISKVSKERQELASKIKEVQGRPQKTQSIIILESHIICCTLSTSGGLLLESAFRGQGGVPFSCVIVDEAGQSCEIETLTPLIHRCNKLILVGDPKQLPPTVISMKAQEYGYDQSMMARFCRLLEENVEHNMISRLPILQLTVQYRMHPDICLFPSNYVYNRNLKTNRQTEAIRCSSDWPFQPYLVFDVGDGSERRDNDSYINVQEIKLVMEIIKLIKDKRKDVSFRNIGIITHYKAQKTMIQKDLDKEFDRKGPAEVDTVDAFQGRQKDCVIVTCVRANSIQGSIGFLASLQRLNVTITRAKYSLFILGHLRTLMQLLPRSFCVHVNHSPFFSPEPKYLHWALKENQHWNQLIQDAQKRGAIIKTCDKNYRHDAVKILKLKPVLQRSLTHPPTIAPEGSRPQGGLPSSKLDSGFAKTSVAASLYHTPSDSKEITLTVTSKDPERPPVHDQLQDPRLLKRMGIEVKGGIFLWDPQPSSPQHPGATPPTGEPGFPVVHQDLSHIQQPAAVVAALSSHKPPVRGEPPAASPEASTCQSKCDDPEEELCHRREARAFSEGEQEKCGSETHHTRRNSRWDKRTLEQEDSSSKKRKLL

SEQ ID NO: 905384 - protein, 960 aa, Homo sapiens
REWLNSPNRENFYQLQVRKFPADYIKYWEFAVYLEECELAKQLYPKENDLVFLAPERINEEKKDTERNDIQDLHEYHSGYVHKFRRTSVMRNGKTECYLSIQTQENFPANLNELVNCIVISSLVTTQRKLKAMSLLGSRNQLARAVLNPNPMDFCTKDLLTTTSERIIAYLRDFNEDQKKAIETAYAMVKHSPSVAKICLIHGPPGTGKSKTIVGLLYRLLTENQRKGHSDENSNAKIKQNRVLVCAPSNAAVDELMKKIILEFKEKCKDKKNPLGNCGDINLVRLGPEKSINSEVLKFSLDSQVNHRMKKELPSHVQAMHKRKEFLDYQLDELSRQRALCRGGREIQRQELDENISKVSKERQELASKIKEVQGRPQKTQSIIILESHIICCTLSTSGGLLLESAFRGQGGVPFSCVIVDEAGQSCEIETLTPLIHRCNKLILVGDPKQLPPTVISMKAQEYGYDQSMMARFCRLLEENVEHNMISRLPILQLTVQYRMHPDICLFPSNYVYNRNLKTNRQTEAIRCSSDWPFQPYLVFDVGDGSERRDNDSYINVQEIKLVMEIIKLIKDKRKDVSFRNIGIITHYKAQKTMIQKDSNSLSKSFCIIVFWACNEFDRKGPAEVDTVDAFQGRQKDCVIVTCVRANSIQGSIGFLASLQRLNVTITRAKYSLFILGHLRTLMQLLPRSFCVHVNHSPFFSPEPKYLHWALKENQHWNQLIQDAQKRGAIIKTCDKNYRHDAVKILKLKPVLQRSLTHPPTIAPEGSRPQGGLPSSKLDSGFAKTSVAASLYHTPSDSKEITLTVTSKDPERPPVHDQLQDPRLLKRMGIEVKGGIFLWDPQPSSPQHPGATPPTGEPGFPVVHQDLSHIQQPAAVVAALSSHKPPVRGEPPAASPEASTCQSKCDDPEEELCHRREARAFSEGEQEKCGSETHHTRRNSRWDKRTLEQEDSSSKKRKLL

SEQ ID NO: 905385 - protein, 257 aa, Homo sapiens
LFLPSHCFKENQHWNQLIQDAQKRGAIIKTCDKNYRHDAVKILKLKPVLQRSLTHPPTIAPEGSRPQGGLPSSKLDSGFAKTSVAASLYHTPSDSKEITLTVTSKDPERPPVHDQLQDPRLLKRMGIEVKGGIFLWDPQPSSPQHPGATPPTGEPGFPVVHQDLSHIQQPAAVVAALSSHKPPVRGEPPAASPEASTCQSKCDDPEEELCHRREARAFSEGEQEKCGSETHHTRRNSRWDKRTLEQEDSSSKKRKLL

SEQ ID NO: 905386 - protein, 680 aa, Homo sapiens; identical to SEQ ID NO: 905379

SEQ ID NO: 905387 - protein, 459 aa, Homo sapiens
REWLNSPNRENFYQLQVRKFPADYIKYWEFAVYLEECELAKQLYPKENDLVFLAPERINEEKKDTERNDIQDLHEYHSGYVHKFRRTSVMRNGKTECYLSIQTQENFPANLNELVNCIVISSLVTTQRKLKAMSLLGSRNQLARAVLNPNPMDFCTKDLLTTTSERIIAYLRDFNEDQKKAIETAYAMVKHSPSVAKICLIHGPPGTGKSKTIVGLLYRLLTENQRKGHSDENSNAKIKQNRVLVCAPSNAAVDELMKKIILEFKEKCKDKKNPLGNCGDINLVRLGPEKSINSEVLKFSLDSQVNHRMKKELPSHVQAMHKRKEFLDYQLDELSRQRALCRGGREIQRQELDENISKVSKERQELASKIKEVQGRPQKTQSIIILESHIICCTLSTSGGLLLESAFRGQGGVPFSCVIVDEAGQSCEIETLTPLIHRCNKLILVGDPKQLPPTVISMF

SEQ ID NO: 905388 - protein, 606 aa, Homo sapiens
MAVAGPAPGAGARPRLDLQFLQRFLQILKVLFPSWSSQNALMFLTLLCLTLLEQFVIYQVGLIPSQYYGVLGNKDLEGFKTLTFLAVMLIVLNSTLKSFDQFTCNLLYVSWRKDLTEHLHRLYFRGRAYYTLNVLRDDIDNPDQRISQDVERFCRQLSSMASKLIISPFTLVYYTYQCFQSTGWLGPVSIFGYFILGTVVNKTLMGPIVMKLVHQEKLEGDFRFKHMQIRVNAEPAAFYRAGHVEHMRTDRRLQRLLQTQRELMSKELWLYIGINTFDYLGSILSYVVIAIPIFSGVYGDLSPAELSTLVSKNAFVCIYLISCFTQLIDLSTTLSDVAGYTHRIGQLRETLLDMSLKSQDCEILGESEWGLDTPPGWPAAEPADTAFLLERVSISAPSSDKPLIKDLSLKISEGQSLLITGNTGTGKTSLLRVLGGLWTSTRGSVQMLTDFGPHGVLFLPQKPFFTDGTLREQVIYPLKEVYPDSGSADDERILRFLELAGLSNLVARTEGLDQQVDWNWYDVLSPGEMQRLSFARLFYLQPKYAVLDEATSALTEEVESELYRIGQQLGMTFISVGHRQSLEKFHSLVLKLCGGGRWELMRIKVE

SEQ ID NO: 905389 - protein, 592 aa, Homo sapiens
MAVAGPAPGAGARPRLDLQFLQRFLQILKVLFPSWSSQNALMFLTLLCLTLLEQFVIYQVGLIPSQYYGVLGNKDLEGFKTLTFLAVMLIVLNSTLKSFDQFTCNLLYVSWRKDLTEHLHRLYFRGRAYYTLNVLRDDIDNPDQRISQDVERFCRQLSSMASKLIISPFTLVYYTYQCFQSTGWLGPVSIFGYFILGTVVNKTLMGPIVMKLVHQEKLEGDFRFKHMQIRVNAEPAAFYRAGHVEHMRTDRRLQRLLQTQRELMSKELWLYIGINTFDYLGSILSYVVIAIPIFSGVYGDLSPAELSTLVSKNAFVCIYLISCFTQLIDLSTTLSDVAGYTHRIGQLRETLLDMSLKSQDCEILGESEWGLDTPPGWPAAEPADTAFLLERVSISAPSSDKPLIKDLSLKISEGQSLLITGNTGTGKTSLLRVLGGLWTSTRGSVQMLTDFGPHGVLFLPQKPFFTDGTLREQVIYPLKEVYPDSGSADDERILRFLELAGLSNLVARTEGLDQQVDWNWYDVLSPGEMQRLSFARLFYLQPKYAVLDEATSALTEEVESELYRIGQQLGMTFISVGHRQSLEKVPVLTRMA

SEQ ID NO: 905390 - protein, 447 aa, Homo sapiens
MASKLIISPFTLVYYTYQCFQSTGWLGPVSIFGYFILGTVVNKTLMGPIVMKLVHQEKLEGDFRFKHMQIRVNAEPAAFYRAGHVEHMRTDRRLQRLLQTQRELMSKELWLYIGINTFDYLGSILSYVVIAIPIFSGVYGDLSPAELSTLVSKNAFVCIYLISCFTQLIDLSTTLSDVAGYTHRIGQLRETLLDMSLKSQDCEILGESEWGLDTPPGWPAAEPADTAFLLERVSISAPSSDKPLIKDLSLKISEGQSLLITGNTGTGKTSLLRVLGGLWTSTRGSVQMLTDFGPHGVLFLPQKPFFTDGTLREQVIYPLKEVYPDSGSADDERILRFLELAGLSNLVARTEGLDQQVDWNWYDVLSPGEMQRLSFARLFYLQPKYAVLDEATSALTEEVESELYRIGQQLGMTFISVGHRQSLEKFHSLVLKLCGGGRWELMRIKVE

SEQ ID NO: 905391 - protein, 503 aa, Homo sapiens
MAVAGPAPGAGARPRLDLQFLQRFLQILKVLFPSWSSQNALMFLTLLCLTLLEQFVIYQVGLIPSQYYGVLGNKDLEGFKTLTFLAVMLIVLNSTLKSFDQFTCNLLYVSWRKDLTEHLHRLYFRGRAYYTLNVLRDDIDNPDQRISQDVERFCRQLSSMASKLIISPFTLVYYTYQCFQSTGWLGPVSIFGYFILGTVVNKTLMGPIVMKLVHQEKLEGDFRFKHMQIRVNAEPAAFYRAGHVEHMRTDRRLQRLLQTQRELMSKELWLYIGINTFDYLGSILSYVVIAIPIFSGVYGDLSPAELSTLVSKNAFVCIYLISCFTQLIDLSTTLSDVAGYTHRIGQLRETLLDMSLKSQDCEILGESEWGLDTPPGWPAAEPADTAFLLERVSISAPSSDKPLIKDLSLKISEGQSLLITGNTGTGKTSLLRVLGGLWTSTRGSVQMLTDFGPHGVLFLPQKPFFTDGTLREQGQSSSGGSLLPPQPRPPTAGTSGTVTSLRS

SEQ ID NO: 905392 - protein, 447 aa, Homo sapiens; identical to SEQ ID NO: 905390

SEQ ID NO: 905393 - protein, 458 aa, Homo sapiens
MAVAGPAPGAGARPRLDLQFLQRFLQILKVLFPSWSSQNALMFLTLLCLTLLEQFVIYQVGLIPSQYYGVLGNKDLEGFKTLTFLAVMLIVLNSTLKSFDQFTCNLLYVSWRKDLTEHLHRLYFRGRAYYTLNVLRDDIDNPDQRISQDVERFCRQLSSMASKLIISPFTLVYYTYQCFQSTGWLGPVSIFGYFILGTVVNKTLMGPIVMKLVHQEKLEGDFRFKHMQIRVNAEPAAFYRAGHVEHMRTDRRLQRLLQTQRELMSKELWLYIGINTFDYLGSILSYVVIAIPIFSGVYGDLSPAELSTLVSKNAFVCIYLISCFTQLIDLSTTLSDVAGYTHRIGQLRETLLDMSLKSQDCEILGESEWGLDTPPGWPAAEPADTAFLLERVSISAPSSDKPLIKDLSLKISEGQSLLITGNTGTGKTSLLRVLGGLWTSTRGDISPEGGLPRLRFCR

SEQ ID NO: 905394 - protein, 447 aa, Homo sapiens; identical to SEQ ID NO: 905390

SEQ ID NO: 905395 - protein, 343 aa, Homo sapiens
MRSLLLSTVGINTFDYLGSILSYVVIAIPIFSGVYGDLSPAELSTLVSKNAFVCIYLISCFTQLIDLSTTLSDVAGYTHRIGQLRETLLDMSLKSQDCEILGESEWGLDTPPGWPAAEPADTAFLLERVSISAPSSDKPLIKDLSLKISEGQSLLITGNTGTGKTSLLRVLGGLWTSTRGSVQMLTDFGPHGVLFLPQKPFFTDGTLREQVIYPLKEVYPDSGSADDERILRFLELAGLSNLVARTEGLDQQVDWNWYDVLSPGEMQRLSFARLFYLQPKYAVLDEATSALTEEVESELYRIGQQLGMTFISVGHRQSLEKFHSLVLKLCGGGRWELMRIKVE

SEQ ID NO: 905396 - protein, 503 aa, Homo sapiens; identical to SEQ ID NO: 905391

SEQ ID NO: 905397 - protein, 592 aa, Homo sapiens; identical to SEQ ID NO: 905389

SEQ ID NO: 905398 - protein, 503 aa, Homo sapiens; identical to SEQ ID NO: 905391

SEQ ID NO: 905399 - protein, 606 aa, Homo sapiens; identical to SEQ ID NO: 905388

SEQ ID NO: 905400 - protein, 546 aa, Homo sapiens
MAVAGPAPGAGARPRLDLQFLQRFLQILKVLFPSWSSQNALMFLTLLCLTLLEQFVIYQVGLIPSQYYGVLGNKDLEGFKTLTFLAVMLIVLNSTLKSFDQFTCNLLYVSWRKDLTEHLHRLYFRGRAYYTLNVLRDDIDNPDQRISQDVERFCRQLSSMASKLIISPFTLVYYTYQCFQSTGWLGPVSIFGYFILGTVVNKTLMGPIVMKLVHQEKLEGDFRFKHMQIRVNAEPAAFYRAGHVEHMRTDRRLQRLLQTQRELMSKELWLYIGINTFDYLGSILSYVVIAIPIFSGVYGDLSPAELSTLVSKNAFVCIYLISCFTQLIDLSTTLSDVAGYTHRIGQLRETLLDMSLKSQDCEILGESEWGLDTPPGWPAAEPADTAFLLERVSISAPSSDKPLIKDLSLKISEGQSLLITGNTGTGKTSLLRVLGGLWTSTRGSVQMLTDFGPHGVLFLPQKPFFTDGTLREQVIYPLKEVYPDSGELVLLRSCPLLLSWLSLLYLTVASSVPLGRGSSQAADSRKRGSSPLPLTVLGSVPRSHLI

SEQ ID NO: 905401 - protein, 149 aa, Homo sapiens
RLVRSECGIGRGAAPGAGARPRLDLQFLQRFLQILKVLFPSWSSQNALMFLTLLCLTLLEQFVIYQVGLIPSQYYGVLGNKDLEGFKTLTFLAVMLIVLNSTLKSFDQFTCNLLYVSWRKDLTEHLHRLYFRGRAYYTLNVLRDDIDNP

SEQ ID NO: 905402 - protein, 503 aa, Homo sapiens; identical to SEQ ID NO: 905391

SEQ ID NO: 905403 - protein, 447 aa, Homo sapiens; identical to SEQ ID NO: 905390

SEQ ID NO: 905404 - protein, 606 aa, Homo sapiens; identical to SEQ ID NO: 905388

SEQ ID NO: 905405 - protein, 613 aa, Homo sapiens
RLVRSECGIGRGAAPGAGARPRLDLQFLQRFLQILKVLFPSWSSQNALMFLTLLCLTLLEQFVIYQVGLIPSQYYGVLGNKDLEGFKTLTFLAVMLIVLNSTLKSFDQFTCNLLYVSWRKDLTEHLHRLYFRGRAYYTLNVLRDDIDNPDQRISQDVERFCRQLSSMASKLIISPFTLVYYTYQCFQSTGWLGPVSIFGYFILGTVVNKTLMGPIVMKLVHQEKLEGDFRFKHMQIRVNAEPAAFYRAGHVEHMRTDRRLQRLLQTQRELMSKELWLYIGINTFDYLGSILSYVVIAIPIFSGVYGDLSPAELSTLVSKNAFVCIYLISCFTQLIDLSTTLSDVAGYTHRIGQLRETLLDMSLKSQDCEILGESEWGLDTPPGWPAAEPADTAFLLERVSISAPSSDKPLIKDLSLKISEGQSLLITGNTGTGKTSLLRVLGGLWTSTRGSVQMLTDFGPHGVLFLPQKPFFTDGTLREQVIYPLKEVYPDSGSADDERILRFLELAGLSNLVARTEGLDQQVDWNWYDVLSPGEMQRLSFARLFYLQPKYAVLDEATSALTEEVESELYRIGQQLGMTFISVGHRQSLEKFHSLVLKLCGGGRWELMRIKVE

SEQ ID NO: 905406 - protein, 503 aa, Homo sapiens; identical to SEQ ID NO: 905391

SEQ ID NO: 905407 - protein, 457 aa, Homo sapiens
MASKLIISPFTLVYYTYQCFQSTGWLGPVSIFGYFILGTVVNKTLMGPIVMKLVHQEKLEGDFRFKHMQIRVNAEPAAFYSPVDIPAFLVRAGHVEHMRTDRRLQRLLQTQRELMSKELWLYIGINTFDYLGSILSYVVIAIPIFSGVYGDLSPAELSTLVSKNAFVCIYLISCFTQLIDLSTTLSDVAGYTHRIGQLRETLLDMSLKSQDCEILGESEWGLDTPPGWPAAEPADTAFLLERVSISAPSSDKPLIKDLSLKISEGQSLLITGNTGTGKTSLLRVLGGLWTSTRGSVQMLTDFGPHGVLFLPQKPFFTDGTLREQVIYPLKEVYPDSGSADDERILRFLELAGLSNLVARTEGLDQQVDWNWYDVLSPGEMQRLSFARLFYLQPKYAVLDEATSALTEEVESELYRIGQQLGMTFISVGHRQSLEKFHSLVLKLCGGGRWELMRIKVE

SEQ ID NO: 905408 - protein, 227 aa, Homo sapiens
EQAEEKHRPSLEIASSSFSLVIPLSSLHISVSPLLAPSVRHSCGCDPLCHRPGNPISSFRPGRTSGHPVGPPLLPGCYLHRPWLPCPGPRVQLIYPLTRSSPTPLRPDDERILEAHWNRHALSNLGDKRQRSGNHQLTGHWYDVLSPGEMQRLSFARLFYLQPKYAVLDEATSALTEEVESELYRIGQQLGMTFISVGHRQSLEKFHSLVLKLCGGGRWELMRIKVE

SEQ ID NO: 905409 - protein, 389 aa, Homo sapiens
MAVAGPAPGAGARPRLDLQFLQRFLQILKVLFPSWSSQNALMFLTLLCLTLLEQFVIYQVGLIPSQYYGVLGNKDLEGFKTLTFLAVMLIVLNSTLKSFDQFTCNLLYVSWRKDLTEHLHRLYFRGRAYYTLNVLRDDIDNPDQRISQDVERFCRQLSSMASKLIISPFTLVYYTYQCFQSTGWLGPVSIFGYFILGTVVNKTLMGPIVMKLVHQEKLEGDFRFKHMQIRVNAEPAAFYRAGHVEHMRTDRRLQRLLQTQRELMSKELWLYIGINTFDYLGSILSYVVIAIPIFSGVYGDLSPAELSTLVSKNAFVCIYLISCFTQLIDLSTTLSDVAGYTHRIGQLRETLLDMSLKSQDDSEDRAQVRHIDPVQEPHGSCAGPLAVVG

SEQ ID NO: 905410 - protein, 606 aa, Homo sapiens; identical to SEQ ID NO: 905388

SEQ ID NO: 905411 - protein, 240 aa, Homo sapiens
MAVAGPAPGAGARPRLDLQFLQRFLQILKVLFPSWSSQNALMFLTLLCLTLLEQFVIYQVGLIPSQYYGVLGNKDLEGFKTLTFLAVMLIVLNSTLKSFDQFTCNLLYVSWRKDLTEHLHRLYFRGRAYYTLNVLRDDIDNPDQRISQDVERFCRQLSSMASKLIISPFTLVYYTYQCFQSTGWLGPVSIFGYFILGTVVNKTLMGPIVMKLVHQEKLEGDFRFKHMQIRVNAEPAAFYR

SEQ ID NO: 905412 - protein, 837 aa, Homo sapiens
MPAERPAGSGGSEAPAMVEQLDTAVITPAMLEEEEQLEAAGLERERKMLEKARMSWDRESTEIRYRRLQHLLEKSNIYSKFLLTKMEQQQLEEQKKKEKLERKKESLKVKKGKNSIDASEEKPVMRKKRGREDESYNISEVMSKEEILSVAKKNKKENEDENSSSTNLCVEDLQKNKDSNSIIKDRLSETVRQNTKFFFDPVRKCNGQPVPFQQPKHFTGGVMRWYQVEGMEWLRMLWENGINGILADEMGLGKTVQCIATIALMIQRGVPGPFLVCGPLSTLPNWMAEFKRFTPDIPTMLYHGTQEERQKLVRNIYKRKGTLQIHPVVITSFEIAMRDRNALQHCYWKYLIVDEGHRIKNMKCRLIRELKRFNADNKLLLTGTPLQNNLSELWSLLNFLLPDVFDDLKSFEILVDITSLSETAEDIMLKKENRMYAYAAPDFNTFLMRRLKSDVALEVPPKREVVVYAPLSKKQEIFYTAIVNRTIANMFGSSEKETIELSPTGRPKRRTRKSINYSKIDDFPNELEKLISQIQPEVDRERAVVEVNIPVESEVNLKLQNIMMLLRKCCNHPYLIEYPIDPVTQEFKIDEELVTNSGKFLILDRMLPELKKRGHKVLLFSQMTSMLDILMDYCHLRDFNFSRLDGSMSYSEREKNMHSFNTDPEVFIFLVSTRAGGLGINLTAADTVIIYDSDWNPQSDLQAQDRCHRIGQTKPVVVYRLVTANTIDQKIVERAAAKRKLEKLIIHKNHFKGGQSGLNLSKNFLDPKELMELLKSRDYEREIKGSREKVISDKDLELLLDRSDLIDQMNASGPIKEKMGIFKILENSEDSSPECLF

SEQ ID NO: 905413 - protein, 156 aa, Homo sapiens
MPAERPAGSGGSEAPAMVEQLDTAVITPAMLEEEEQLEAAGLERERKMLEKARMSWDRESTEIRYRRLQHLLEKSNIYSKFLLTKMEQQQLEEQKKKEKLERKKESLKVKKGKNSIDASEEKPVMRKKRGREDESYNISEVMSKEECKLRCLSTEA

SEQ ID NO: 905414 - protein, 856 aa, Homo sapiens
MVEQLDTAVITPAMLEEEEQLEAAGLERERKMLEKARMSWDRESTEIRYRRLQHLLEKSNIYSKFLLTKMEQQQLEEQKKKEKLERKKESLKVKKGKNSIDASEEKPVMRKKRGREDESYNISEVMSKEEILSVAKKNKKENEDENSSSTNLCVEDLQKNKDSNSIIKDRLSETVRQNTKFFFDPVRKCNGQPVPFQQPKHFTGGVMRWYQVEGMEWLRMLWENGINGILADEMGLGKTVQCIATIALMIQRGVPGPFLVCGPLSTLPNWMAEFKRFTPDIPTMLYHGTQEERQKLVRNIYKRKGTLQIHPVVITSFEIAMRDRNALQHCYWKYLIVDEGHRIKNMKCRLIRELKRFNADNKLLLTGTPLQNNLSELWSLLNFLLPDVFDDLKSFEILVDITSLSETAEDIMLKKENRMYAYAAPDFNTFLMRRLKSDVALEVPPKREVVVYAPLSKKQEIFYTAIVNRTIANMFGSSEKETIELSPTGRPKRRTRKSINYSKIDDFPNELEKLISQIQPEVDRERAVVEVNIPVESEVNLKLQNIMMLLRKCCNHPYLIEYPIDPVTQEFKIDEELVTNSGKFLILDRMLPELKKRGHKVLLFSQMTSMLDILMDYCHLRDFNFSRLDGSMSYSEREKNMHSFNTDPEVFIFLVSTRAGGLGINLTAADTVIIYDSDWNPQSDLQAQDRCHRIGQTKPVVVYRLVTANTIDQKIVERAAAKRKLEKLIIHKNHFKGGQSGLNLSKNFLDPKELMELLKSRDYEREIKGSREKVISDKDLELLLDRSDLIDQMNASGPIKEKMGIFKILENSEDSSPELETGFHHLGLTGPELISGDLPTSASQSAGITSVSHCVA

SEQ ID NO: 905415 - protein, 156 aa, Homo sapiens; identical to SEQ ID NO: 905413

SEQ ID NO: 905416 - protein, 156 aa, Homo sapiens; identical to SEQ ID NO: 905413

SEQ ID NO: 905417 - protein, 156 aa, Homo sapiens; identical to SEQ ID NO: 905413

SEQ ID NO: 905418 - protein, 140 aa, Homo sapiens
MVEQLDTAVITPAMLEEEEQLEAAGLERERKMLEKARMSWDRESTEIRYRRLQHLLEKSNIYSKFLLTKMEQQQLEEQKKKEKLERKKESLKVKKGKNSIDASEEKPVMRKKRGREDESYNISEVMSKEECKLRCLSTEA

SEQ ID NO: 905419 - protein, 650 aa, Homo sapiens
MRWYQVEGMEWLRMLWENGINGILADEMGLGKTVQCIATIALMIQRGVPGPFLVCGPLSTLPNWMAEFKRFTPDIPTMLYHGTQEERQKLVRNIYKRKGTLQIHPVVITSFEIAMRDRNALQHCYWKYLIVDEGHRIKNMKCRLIRELKRFNADNKLLLTGTPLQNNLSELWSLLNFLLPDVFDDLKSFEFLVDITSLSETAEDIMLKKENRMYAYAAPDFNTFLMRRLKSDVALEVPPKREVVVYAPLSKKQEIFYTAIVNRTIANMFGSSEKETIELSPTGRPKRRTRKSINYSKIDDFPNELEKLISQIQPEVDRERAVVEVNIPVESEVNLKLQNIMMLLRKCCNHPYLIEYPIDPVTQEFKIDEELVTNSGKFLILDRMLPELKKRGHKVLLFSQMTSMLDILMDYCHLRDFNFSRLDGSMSYSEREKNMHSFNTDPEVFIFLVSTRAGGLGINLTAADTVIIYDSDWNPQSDLQAQDRCHRIGQTKPVVVYRLVTANTIDQKIVERAAAKRKLEKLIIHKNHFKGGQSGLNLSKNFLDPKELMELLKSRDYEREIKGSREKVISDKDLELLLDRSDLIDQMNASGPIKEKMGIFKILENSEDSSPELETGFHHLGLTGPELISGDLPTSASQSAGITSVSHCVA

SEQ ID NO: 905420 - protein, 156 aa, Homo sapiens; identical to SEQ ID NO: 905413

SEQ ID NO: 905421 - protein, 159 aa, Homo sapiens
MPAERPAGSGGSEAPAMVEQLDTAVITPAMLEEEEQLEAAGLERERKMLEKARMSWDRESTEIRYRRLQHLLEKSNIYSKFLLTKMEQQQLEEQKKKEKLERKKESLKVKKGKNSIDASEEKPVMRKKRGREDESYNISEVMSKEVKIKGRGHLTFDVE

SEQ ID NO: 905422 - protein, 110 aa, Homo sapiens
GSWSPRAWRKDEKKKRTWQPLLHTDLCPLLGGRDHAAGECLLGQPLPREALQQLFSSMPRPARHLPSQPAPGPGRAPGTVWLLGAAAGLSLPRGHDFPPACSLGQDCSEI

SEQ ID NO: 905423 - protein, 862 aa, Homo sapiens
MPLPGGLWWLLCCRRGFTLLHRDYGDGELSGDGDEDEDEETFELRTPSPAGGGRGPLEVTLTQPVRSGPVSNRLQSWEETWSLIPEKGLPEDDPDIVVKGWLYREPRGGGARPWLPPRRAWFVLTRDSLDQFSSSGKGARRLGSLVLTSLCSVTGPERRRKETGLWSVTVSGRKHSVRLCSPRQAEAERWGVALREVIASKAPLETPTQLLLRDIQESCGDPEAVALIYLRNPILRHTSGALYAPLLPLPYGVSAPGPGYAPLREEAVRLFLALQALEGARRPGPLMQGVLQTCRDLPALRDELFLQLAKQTSGPAGPPGLPATQDPAALRYWQLLTCMSCTFRPGGAVRGHLLGHLERTEQALPDSELAEYARFIRKALGRTRGRELVPSLAEISALSQRQELLCTVHCPGAPNAFTFTASAANCGHYNRSCGTEAYPGESAQGATLCPRGNPHLLVKPPLPLTSNQDSLLFQAVGSCLFWLRTGWGERARDPQEGLSLRLRGRHNKGWGPAGGAGRTGDIKPRAPASPHSLTMARTVVLITGCSSGIGLHLAVRLASDPSQSFKVYATLRDLKTQGRLWEAARALACPPGSLETLQLDVRDSKSVAAARERVTEGRVDVLVCNAGLGLLGPLEALGEDAVASVLDVNVVGTVRMLQAFLPDMKRRGSGRVLVTGSVGGLMGLPFNDVYCASKFALEGLCESLAVLLLPFGVHLSLIECGPVHTAFMEKVLGSPEEVLDRTDIHTFHRFYQYLAHSKQVFREAAQNPEEVAEVFLTALRAPKPTLRYFTTERFLPLLRMRLDDPSGSNYVTAMHREVFGDVPAKAEAGAEAGGGAGPGAEDEAGRGAVGDPELGDPPAAPQ

SEQ ID NO: 905424 - protein, 190 aa, Homo sapiens
MEKVLGSPEEVLDRTDIHTFHRFYQYLAHSKQVFREAAQNPEEVAEVSAGLDSRSGGGASSGAQRWPQLSSRRRRSSSPLCAPRSRPCATSPPSASCPCCGCAWTTPAAPTTSPPCTGKCSATFRQRPRLGPRLGAGPGLGQRTRPGAVRWGTLSSAILRPPRSKGFLSRCLPRPSLSPGSVWSLGMGRR

SEQ ID NO: 905425 - protein, 190 aa, Homo sapiens; identical to SEQ ID NO: 905424

SEQ ID NO: 905426 - protein, 135 aa, Homo sapiens
MEKVLGSPEEVLDRTDIHTFHRFYQYLAHSKQVFREAAQNPEEVAEVFLTALRAPKPTLRYFTTERFLPLLRMRLDDPSGSNYVTAMHREVFGDVPAKAEAGAEAGGGAGPGAEDEAGRGAVGDPELGDPPAAPQ

SEQ ID NO: 905427 - protein, 190 aa, Homo sapiens; identical to SEQ ID NO: 905424

SEQ ID NO: 905428 - protein, 152 aa, Homo sapiens
MARTVVLITGCSSGIGLHLAVRLASDPSQSFKVYATLRDLKTQGRLWEAARALACPPGSLETLQLDVRDSKSVAAARERVTEGRVDVLVCNAGLGLLGPLEALGEDAVASVLDVNVVGTVRMLQAFLPDMKRRGSGRVLVTGSVGGLMVGEW

SEQ ID NO: 905429 - protein, 795 aa, Homo sapiens
MPLPGGLWWLLCCRRGFTLLHRDYGDGELSGDGDEDEDEETFELRTPSPAGGGRGPLEVTLTQPVRSGPVSNRLQSWEETWSLIPEKGLPEDDPDIVVKGWLYREPRGGGARPWLPPRRAWFVLTRDSLDQFSSSGKGARRLGSLVLTSLCSVTGPERRRKETGLWSVTVSGRKHSVRLCSPRQAEAERWGVALREVIASKAPLETPTQLLLRDIQESCGDPEAVALIYLRNPILRHTSGALYAPLLPLPYGVSAPGPGYAPLREEAVRLFLALQALEGARRPGPLMQGVLQTCRDLPALRDELFLQLAKQTSGPAGPPGLPATQDPAALRYWQLLTCMSCTFRPGGAVRGHLLGHLERTEQALPDSELAEYARFIRKALGRTRGRELVPSLAEISALSQRQELLCTVHCPGAGACAVAIDSHTTAGEVARELVGRLGLARSRNAFALYEQRGAQERALAGGTLVADVLTRFDLAAEEAGLEDSPDSGWRLCLRLHGPLHPEGLSPDGHELPFLFEQAHALLLRGRPPPPDDTLRALAALRLQSLQRDFSPRVPLPRLDRCPRRLPPPAPPREDPPRPTPRPPPSAALLAGALWSPGLAKRRAERARRGGAGRTAGSIAREGGGGAGTAAAVLGGWKRLRGMGRAEAMAAYLALAAQCPGFGAARYDVLELSTEPGRGAPQKLCLGLGAKAMSLSRPGETEPIHSVSYGHVAACQLMGPHTLALRVGESQLLLQSPQVEEIMQLVNAYLANPSPERPCSSSSPPCQDLPDTSPPSQRPGLDEPQGQSGCLGQLQD

SEQ ID NO: 905430 - protein, 321 aa, Homo sapiens
MPLPGGLWWLLCCRRGFTLLHRDYGDGELSGDGDEDEDEETFELRTPSPAGGGRGPLEVTLTQPVRSGPVSNRLQSWEETWSLIPEKGLPEDDPDIVVKGWLYREPRGGGARPWLPPRRAWFVLTRDSLDQFSSSGAGRTAGSIAREGGGGAGTAAAVLGGWKRLRGMGRAEAMAAYLALAAQCPGFGAARYDVLELSTEPGRGAPQKLCLGLGAKAMSLSRPGETEPIHSVSYGHVAACQLMGPHTLALRVGESQLLLQSPQVEEIMQLVNAYLANPSPERPCSSSSPPCQDLPDTSPPSQRPGLDEPQGQSGCLGQLQD

SEQ ID NO: 905431 - protein, 792 aa, Homo sapiens
  misc_feature (429)..(429): Xaa can be any naturally occurring amino acid
  misc_feature (433)..(434): Xaa can be any naturally occurring amino acid
  misc_feature (436)..(437): Xaa can be any naturally occurring amino acid
  misc_feature (442)..(442): Xaa can be any naturally occurring amino acid
  misc_feature (452)..(453): Xaa can be any naturally occurring amino acid
  misc_feature (460)..(461): Xaa can be any naturally occurring amino acid
  misc_feature (464)..(464): Xaa can be any naturally occurring amino acid
  misc_feature (466)..(466): Xaa can be any naturally occurring amino acid
MPLPGGLWWLLCCRRGFTLLHRDYGDGELSGDGDEDEDEETFELRTPSPAGGGRGPLEVTLTQPVRSGPVSNRLQSWEETWSLIPEKGLPEDDPDIVVKGWLYREPRGGGARPWLPPRRAWFVLTRDSLDQFSSSGKGARRLGSLVLTSLCSVTGPERRRKETGLWSVTVSGRKHSVRLCSPRQAEAERWGVALREVIASKAPLETPTQLLLRDIQESCGDPEAVALIYLRNPILRHTSGALYAPLLPLPYGVSAPGPGYAPLREEAVRLFLALQALEGARRPGPLMQGVLQTCRDLPALRDELFLQLAKQTSGPAGPPGLPATQDPAALRYWQLLTCMSCTFRPGGAVRGHLLGHLERTEQALPDSELAEYARFIRKALGRTRGRELVPSLAEISALSQRQELLCTVHCPGAGACAVAIDSHTTAGEXSISXXSXXLFLSXNSFSLYYHLXXQDLALSXXTSXPXCSPAWPRRKLGWRTRPTPGGDYVCVFTDLCTLRGCPQTVTNCLSSLSRLTLCCCGAGRPHPTTRCAPWRRCACRACIGTSLRGCPCPAWTLSRALLPPPAPPREDPPRPTPRPPPSAALLAGALWSPGLAKRRAERARRGGAGRTAGSIAREGGGGAGTAAAVLGGWKRLRGMGRAEAMAAYLALAAQCPGFGAARYDVLELSTEPGRGAPQKLCLGLGAKAMSLSRPGETEPIHSVSYGHVAACQLMGPHTLALRVGESQLLLQSPQVEEIMQLVNAYLANPSPERPCSSSSPPCQDLPDTSPPSQRPGLDEPQGQSGCLGQLQD

SEQ ID NO: 905432 - protein, 574 aa, Homo sapiens
MPLPGGLWWLLCCRRGFTLLHRDYGDGELSGDGDEDEDEETFELRTPSPAGGGRGPLEVTLTQPVRSGPVSNRLQSWEETWSLIPEKGLPEDDPDIVVKGWLYREPRGGGARPWLPPRRAWFVLTRDSLDQFSSSGKGARRLGSLVLTSLCSVTGPERRRKETGLWSVTVSGRKHSVRLCSPRQAEAERWGVALREVIASKAPLETPTQLLLRDIQESCGDPEAVALIYLRNPILRHTSGALYAPLLPLPYGVSAPGPGYAPLREEAVRLFLALQALEGARRPGPLMQGVLQTCRDLPALRDELFLQLAKQTSGPAGPPGLPATQDPAALRYWQLLTCMSCTFRPGGAVRGHLLGHLERTEQALPDSELAEYARFIRKALGRTRGRELVPSLAEISALSQRQELLCTVHCPGAGACAVAIDSHTTAGEVARELVGRLGLARSRNAFALYEQRGAQERALAGGTLVADVLTRFDLAAEEAGLEDSPDSGWRLCLRLHGPLHPEGLSPDGHELPFLFEQLFSSMPRPARHLPSQPAPGPGRAPGTVWLLGAAAGLSLPRGHDFPPACSLGQDCSEI

SEQ ID NO: 905433 - protein, 792 aa, Homo sapiens; identical to SEQ ID NO: 905431
  misc_feature (429)..(429): Xaa can be any naturally occurring amino acid
  misc_feature (433)..(434): Xaa can be any naturally occurring amino acid
  misc_feature (436)..(437): Xaa can be any naturally occurring amino acid
  misc_feature (442)..(442): Xaa can be any naturally occurring amino acid
  misc_feature (452)..(453): Xaa can be any naturally occurring amino acid
  misc_feature (460)..(461): Xaa can be any naturally occurring amino acid
  misc_feature (464)..(464): Xaa can be any naturally occurring amino acid
  misc_feature (466)..(466): Xaa can be any naturally occurring amino acid

SEQ ID NO: 905434 - protein, 328 aa, Homo sapiens
MARTVVLITGCSSGIGLHLAVRLASDPSQSFKVYATLRDLKTQGRLWEAARALACPPGSLETLQLDVRDSKSVAAARERVTEGRVDVLVCNAGLGLLGPLEALGEDAVASVLDVNVVGTVRMLQAFLPDMKRRGSGRVLVTGSVGGLMGLPFNDVYCASKFALEGLCESLAVLLLPFGVHLSLIECGPVHTAFMEKVLGSPEEVLDRTDIHTFHRFYQYLAHSKQVFREAAQNPEEVAEVFLTALRAPKPTLRYFTTERFLPLLRMRLDDPSGSNYVTAMHREVFGDVPAKAEAGAEAGGGAGPGAEDEAGRGAVGDPELGDPPAAPQ

SEQ ID NO: 905435 - protein, 104 aa, Homo sapiens
MTGGGTCVRGRPPASRERGRHVHRAGLARAVVGQGCGGPRVDGASQKQACQEVTTSLLPAAWARTALRFEGNMDPFGPAGTGHIPHPRATMGVGNFLVCFLIYL

SEQ ID NO: 905436 - protein, 190 aa, Homo sapiens; identical to SEQ ID NO: 905424

SEQ ID NO: 905437 - protein, 190 aa, Homo sapiens; identical to SEQ ID NO: 905424

SEQ ID NO: 905438 - protein, 527 aa, Homo sapiens
MPLPGGLWWLLCCRRGFTLLHRDYGDGELSGDGDEDEDEETFELRTPSPAGGGRGPLEVTLTQPVRSGPVSNRLQSWEETWSLIPEKGLPEDDPDIVVKGWLYREPRGGGARPWLPPRRAWFVLTRDSLDQFSSSGKGARRLGSLVLTSLCSVTGPERRRKETGLWSVTVSGRKHSVRLCSPRQAEAERWGVALREVIASKAPLETPTQLLLRDIQESCGDPEAVALIYLRNPILRHTSGALYAPLLPLPYGVSAPGPGYAPLREEAVRLFLALQALEGARRPGPLMQGVLQTCRDLPALRDELFLQLAKQTSGPAGPPGLPATQDPAALRYWQLLTCMSCTFRPGGAVRGHLLGHLERTEQALPDSELAEYARFIRKALGRTRGRELVPSLAEISALSQRQELLCTVHCPGAGACAVAIDSHTTAGEVARELVGRLGLARSRNAFALYEQRGAQERALAGGTLVADVLTRFDLAAEEAGLEDSPDSGWRLCLRLHGPLHPEGLSPDGQPAKRSRLPSCLQPGPGLL

SEQ ID NO: 905439 - protein, 792 aa, Homo sapiens; identical to SEQ ID NO: 905431
  misc_feature (429)..(429): Xaa can be any naturally occurring amino acid
  misc_feature (433)..(434): Xaa can be any naturally occurring amino acid
  misc_feature (436)..(437): Xaa can be any naturally occurring amino acid
  misc_feature (442)..(442): Xaa can be any naturally occurring amino acid
  misc_feature (452)..(453): Xaa can be any naturally occurring amino acid
  misc_feature (460)..(461): Xaa can be any naturally occurring amino acid
  misc_feature (464)..(464): Xaa can be any naturally occurring amino acid
  misc_feature (466)..(466): Xaa can be any naturally occurring amino acid

SEQ ID NO: 905440 - protein, 153 aa, Homo sapiens
MARTVVLITGCSSGIGLHLAVRLASDPSQSFKGIDRQGQGGREGRSPWRPEGKSDLPPLPKPPVYATLRDLKTQGRLWEAARALACPPGSLETLQLDVRDSKSVAAARERVTEGRVDVLGEPPGSIWAPRSLLRPALKPTCSQAQGARGDRPC

SEQ ID NO: 905441 - protein, 104 aa, Homo sapiens [sequence omitted]

SEQ ID NO: 905442 - protein, 743 aa, Homo sapiens
  misc_feature (429)..(429): Xaa can be any naturally occurring amino acid
  misc_feature (433)..(434): Xaa can be any naturally occurring amino acid
  misc_feature (436)..(437): Xaa can be any naturally occurring amino acid
  misc_feature (442)..(442): Xaa can be any naturally occurring amino acid
  misc_feature (452)..(453): Xaa can be any naturally occurring amino acid
  misc_feature (460)..(461): Xaa can be any naturally occurring amino acid
  misc_feature (464)..(464): Xaa can be any naturally occurring amino acid
  misc_feature (466)..(466): Xaa can be any naturally occurring amino acid
MPLPGGLWWLLCCRRGFTLLHRDYGDGELSGDGDEDEDEETFELRTPSPAGGGRGPLEVTLTQPVRSGPVSNRLQSWEETWSLIPEKGLPEDDPDIVVKGWLYREPRGGGARPWLPPRRAWFVLTRDSLDQFSSSGKGARRLGSLVLTSLCSVTGPERRRKETGLWSVTVSGRKHSVRLCSPRQAEAERWGVALREVIASKAPLETPTQLLLRDIQESCGDPEAVALIYLRNPILRHTSGALYAPLLPLPYGVSAPGPGYAPLREEAVRLFLALQALEGARRPGPLMQGVLQTCRDLPALRDELFLQLAKQTSGPAGPPGLPATQDPAALRYWQLLTCMSCTFRPGGAVRGHLLGHLERTEQALPDSELAEYARFIRKALGRTRGRELVPSLAEISALSQRQELLCTVHCPGAGACAVAIDSHTTAGEXSISXXSXXLFLSXNSFSLYYHLXXQDLALSXXTSXPXCSPAWPRRKLGWRTRPTPGGDYVCVFTDLCTLRGCPQTVTNCLSSLSRLTLCCCGAGRPHPTTRCAPWRRCACRACIGTSLRGCPCPAWTLSRALLPPPAPPREDPPRPTPRPPPSAALLAGALWSPGLAKRRAERARRGGAGRTAGSIAREGGGGAGTAAAVLGGWKRLRGMGRAEAMAAYLALAAQCPGFGAARYDVLELSTEPGRGAPQKLCLGLGAKAMSLSRPGETEPIHSVSYGHVAACQLMGPHTLALRVGESQLLLQSPQAEVKRAEWQ

SEQ ID NO: 905443 - protein, 329 aa, Homo sapiens
MPLPGGLWWLLCCRRGFTLLHRDYGDGELSGDGDEDEDEETFELRTPSPAGGGRGPLEVTLTQPVRSGPVSNRLQSWEETWSLIPEKGLPEDDPDIVVKGWLYREPRGGGARPWLPPRRAWFVLTRDSLDQFSSSGKGARRLGSLVLTSLCSVTGPERRRKETGLWSVTVSGRKHSVRLCSPRQAEAERWGVALREVIASKAPLETPTQLLLRDIQESCGDPEAVALIYLRNPILRHTSGALYAPLLPLPYGVSAPGPGYAPLREEAVRLFLALQALEGARWPPGGGPPFFWGTKFWGAPKKGGGGDFLGGVIVGPPLFTPEENLGPGG

SEQ ID NO: 905444 - protein, 289 aa, Homo sapiens
MKDRLEQLKAKQLTQDDDTDAVEIAIDNTAFMDEFFSEIEETRLNIDKISEHVEEAKKLYSIILSAPIPEPKTKDDLEQLTTEIKKRANNVRNKLKSMEKHIEEDEVRSSADLRIRKSQHSVLSRKFVEVMTKYNEAQVDFRERSKGRIQRQLEITGKKTTDEELEEMLESGNPAIFTSGIIDSQISKQALSEIEGRHKDIVRLESSIKELHDMFMDIAMLVENQGEMLDNIELNVMHTVDHVEKARDETKKAVKYQSQARKKLIIIIVLVVVLLGILALIIGLSVGLN

SEQ ID NO: 905445 - protein, 289 aa, Homo sapiens; identical to SEQ ID NO: 905444

SEQ ID NO: 905446 - protein, 277 aa, Homo sapiens
MKDRLEQLKAKQLTQDDDTDAVEIAIDNTAFMDEFFSEIEETRLNIDKISEHVEEAKKLYSIILSAPIPEPKTKDDLEQLTTEIKKRANNVRNKLKSMEKHIEEDEVRSSADLRIRKSQHSVLSRKFVEVMTKYNEAQVDFRERSKGRIQRQLEITGKKTTDEELEEMLESGNPAIFTSGIIDSQISKQALSEIEGRHKDIVRLESSIKELHDMFMDIAMLVENQGEMLDNIELNVMHTVDHVEKARDETKKAVKYQSQARKKLISLQTGVATLVFR

SEQ ID NO: 905447 - protein, 258 aa, Homo sapiens
MDEFFSEIEETRLNIDKISEHVEEAKKLYSIILSAPIPEPKTKDDLEQLTTEIKKRANNVRNKLKSMEKHIEEDEVRSSADLRIRKSQHSVLSRKFVEVMTKYNEAQVDFRERSKGRIQRQLEITGKKTTDEELEEMLESGNPAIFTSGIIDSQISKQALSEIEGRHKDIVRLESSIKELHDMFMDIAMLVENQGEMLDNIELNVMHTVDHVEKARDETKKAVKYQSQARKKLIIIIVLVVVLLGILALIIGLSVGLN

SEQ ID NO: 905448 - protein, 289 aa, Homo sapiens; identical to SEQ ID NO: 905444

SEQ ID NO: 905449 - protein, 192 aa, Homo sapiens
MEKHIEEDEVRSSADLRIRKSQHSVLSRKFVEVMTKYNEAQVDFRERSKGRIQRQLEITGKKTTDEELEEMLESGNPAIFTSGIIDSQISKQALSEIEGRHKDIVRLESSIKELHDMFMDIAMLVENQGEMLDNIELNVMHTVDHVEKARDETKKAVKYQSQARKKLIIIIVLVVVLLGILALIIGLSVGLN

SEQ ID NO: 905450 - protein, 289 aa, Homo sapiens; identical to SEQ ID NO: 905444

SEQ ID NO: 905451 - protein, 289 aa, Homo sapiens; identical to SEQ ID NO: 905444

SEQ ID NO: 905452 - protein, 255 aa, Homo sapiens
MKDRLEQLKAKQLTQDDDTDAVEIAIDNTAFMDEFFSEIEETRLNIDKISEHVEEAKKLYSIILSAPIPEPKTKDDLEQLTTEIKKRANNVRNKLKSMEKHIEEDEVRSSADLRIRKSQHSVLSRKFVEVMTKYNEAQVDFRERSKGRIQRQLEITGKKTTDEELEEMLESGNPAIFTSGIIDSQISKQALSEIEGRHKDIVRLESSIKELHDMFMDIAMLVENQVSGSESQRGEGGEESSGSTENREKGNTGSQ

SEQ ID NO: 905453 - protein, 122 aa, Homo sapiens [sequence omitted]

SEQ ID NO: 905454 - protein, 252 aa, Homo sapiens
MKDRLEQLKAKQLTQDDDTDAVEIAIDNTAFMDEFFSEIEETRLNIDKISEHVEEAKKLYSIILSAPIPEPKTKDDLEQLTTEIKKRANNVRNKLKSMEKHIEEDEVRSSADLRIRKSQHSVLSRKFVEVMTKYNEAQVDFRERSKGRIQRQLEITGKKTTDEELEEMLESGNPAIFTSGIIDSQISKQALSEIEGRHKDIVRLESSIKELHDMFMDIAMLVENQKLIIIIVLVVVLLGILALIIGLSVGLN

SEQ ID NO: 905455 - protein, 289 aa, Homo sapiens; identical to SEQ ID NO: 905444

SEQ ID NO: 905456 - protein, 289 aa, Homo sapiens; identical to SEQ ID NO: 905444

SEQ ID NO: 905457 - protein, 289 aa, Homo sapiens; identical to SEQ ID NO: 905444

SEQ ID NO: 905458 - protein, 252 aa, Homo sapiens; identical to SEQ ID NO: 905454

SEQ ID NO: 905459 - protein, 67 aa, Homo sapiens
SSTAAARSRPVAPPPGSRDCGLHDPVLGPVRAEAARDCAAPRVPVSDPGRAVPRSPSGARLSGCAAA

SEQ ID NO: 905460 - protein, 884 aa, Homo sapiens
MCKFYTFSDCVKEKKSYFIISFLLCSHPVLMSHLLYYHHSFLQNYLLDTLIQKSILVFLLVSFNLGKLHREIKQIFLMICASYILLECMIVSPEKDGKYEAFAFSHLILNLFSSSFELIFLLYLLLVEFESEKNKNLKQVKDRREIKMVCDYFQRELSNCQNKPGTKQAVINKTTNTHSGEAEVYAIKHLERVNEAFSFSEVNVQCAFFHGNRIGINTLFYTALRPYPEDMVKICYRNFSDTSWNNFKLHPSRLVILIKSSTITNLCMLIAHWPFLEFFPMFFLRDFPQFHEYQQRRVIGSLSFRRGRKGMKKLRDWLKITYLLSSTTGARSSISVSHICVLSFKIYIGNALLTQIGMIKNERKVQIVSSDKLILLDYDFGSIVFYKYFKWRMNTYKMLWNIIFSLIFCYNLVPLHHSNKDKTDPLSKEIIYKIIEINLFEIGNKNSMKILDTTINCLKLLNNHLKYGTFKWLYFICVQFFCALLASEAIIFSKKMTIKYNTLQIVWFTVWKGHRNVQIGRRPSKTQLSNILGDLKLQPNKSFMVLSLIIVIYILDIFLEGMCPTLPHPILLSFKVLRINSSLYNNYILFKKIVVRYFLKDVNFKFTNTYGSLISNRNELQVTEGYKQKVAYHNVIRSRFLAHIWKQQLLGSSTYKSELVLFSLFYKIGFQMRCLSYDYFREKFYMFEMVEYKRLLNISFKKLFLHYNNIFMMCQIKNLTSVSQIYFQSEIFTCQLKFLTRTNVCVFLCLVGIQISQWIFEVVLKLDKIKVIKVTKEIKMVISIFKSNLVVFIVICTSIYHRLYIEKYSMIYIGPKKCWINLTNMADFSYLSLKSSKKEAVTLLFLITLIEMCFKRYNFSIFYILKNKKGLVLSQWPKGNITTM

SEQ ID NO: 905461 - protein, 319 aa, Homo sapiens
QLYGGRALQAGRSTPRLPGLWTPRPCPRPCPRRSSPGLRSAPRADMGKSLSHLPLHSSKEDAYDGVTSENMRNGLVNSEVHNEDGRNGDVSQFPYVEFTGRDSVTCPTCQGTGRIPRGQENQLVALIPYSDQRLRPRRTKLYVMASVFVCLLLSGLAVFFLFPRSIDVKYIGVKSAYVSYDVQKRTIYLNITNTLNITNNNYYSVEVENITAQVQFSKTVIGKARLNNITIIGPLDMKQIDYTVPTVIAEEMSYMYDFCTLISIKVHNIVLMMQVTVTTTYFGHSEQISQERYQYVDCGRNTTYQLGQSEYLNVLQPQQ

SEQ ID NO: 905462 - protein, 765 aa, Homo sapiens
MIVSPEKDGKYEAFAFSHLILNLFSSSFELIFFIISTFSGVRVRKKQEFETSKKIEEKYKMVCDYFQRELSNCQNEAWNKTGCKLIKLQTHIQVKQKYSHKTSRKSELRLLAFLQVNVQCAFFHGNRIGINTLFYTALRPYPEDMVKICYRNFSDTSWNNFKLHPSRLVILIKSSTITNLCMLIAHWPFLEFFPMFFLRDFPQFHEYQQRRVIGSLSFRRGRKGMKKLRDWLKITYLLSSTTGARSSISVSHICVLSFKIYIGNALLTQIGMIKNERKVQIVSSDKLILLDYDFGSIVFYKYFKWRMNTYKMLWNIIFSLIFCENLVPLHHSNKDKTDPLSKEIIYKIIEINLFEIGNKNSMKILDTTINCLKLLNNHLKYGTFKWLYFICVQFFCALLGQEAIIFSKKMTIKYNTLQIVWFTVWKGHRNVQIGRRPSKTQLKNILGDLKLQPNKSFMVLSLIIVIYILDIFLEGMCPTLPHPICLSFKVLRINSSLYNNYILFKKIVCEVLFKRCKFLKFTNTYGSLISNRNELQVTRVISKRLLTIMSLGHRFLAHIWKQQLLGSSTYKSNVVLFSLFYKIGFQMRCLSYDYFREKFYMFEMVEYKRLLNISFKKLFLHYNNIFMMCQIKNLTSVSQIYFQSEIFTCQLKFLTRTNVCVFLCLVGIQISQWIFEVVLKLDKIKWIKVTKEIKMVISIFKSNLVVFIVICTSIYHRLQIEKYSMIYIVTLKMLDLFNKYGRFFITTVLSLLKGSCYPSVFNYIN

SEQ ID NO: 905463 - protein, 319 aa, Homo sapiens; identical to SEQ ID NO: 905461

SEQ ID NO: 905464 - protein, 884 aa, Homo sapiens; identical to SEQ ID NO: 905460

SEQ ID NO: 905465 - protein, 704 aa, Homo sapiens
MVCDYFQRELSNCQNKPGTKQAVINKTTNTHSGEAEVYAIKHLERVNEAFSFSEVNVQCAFFHGNRIGINTLFYTALRPYPEDMVKICYRNFSDTSWNNFKLHPSRLVILIKSSTITNLCMLIAHWPFLEFFPMFFLRDFPQFHEYQQRRVIGSLSFRRGRKGMKKLRDWLKITYLLSSTTGARSSISVSHICVLSFKIYIGNALLTQIGMIKNERKVQIVSSDKLILLDYDFGSIVFYKYFKWRMNTYKMLWNIIFSLIFCYNLVPLHHSNKDKTDPLSKEIIYKIIEINLFEIGNKNSMKILDTTINCLKLLNNHLKYGTFKWLYFICVQFFCALLGQEAIIFSKKMTIKYNTLQIVWFTVWKGHRNVQIGRRPSKTQLKNILGDLKLQPNKSFMVLSLIIVIYILDIFLEGMCPTLPHPICLSFKVLRINSSLYNNYILFKKIVCEVLFKRCEIFKFTNTYGSLISNRNELQVTEGYKQKVAYHNVIRSRFLAHIWKQQLLGSSTYKSELVLFSLFYKIGFQMRCLSYTILGKNFTCLRWWSKKTVNISFKKLFLHYNNIFMMCQIKNLTSVSQIYFQSEIFTCQLKFLTRTNVCVFLCLVGIQISQWIFEVCPVNWIKSSDYKLLKKIKMVISIFKSNLVVFIVICTSIYHRLYIEKYSMIYIVTLKMLDLFNKYGRFFITEVLSLLKGSCYPSVFNYIN

SEQ ID NO: 905466 - protein, 777 aa, Homo sapiens
MICASYILLECMIVSPEKDGKYEAFAFSHLILNLFSSSFELIFFIISTFSGVRVRKKQEFETSKKIEEKYKMVCDYFQRELSNCQNEAWNKTGCKLIKLQTHIQVKQKYSHKTSRKSELRLLAFLQVNVQCAFFHGNRIGINTLFYTALRPYPEDMVKICYRNFSDTSWNNFKLHPSRLVILIKSSTITNLCMLIAHWPFLEFFPMFFLRDFPQFHEYQQRRVIGSLSFRRGRKGMKKLRDWLKITYLLSSTTGARSSISVSHICVLSFKIYIGNALLTQIGMIKNERKVQIVSSDKLILLDYDFGSIVFYKYFKWRMNTYKMLWNIIFSLIFCENLVPLHHSNKDKTDPLSKEIIYKIIEINLFEIGNKNSMKILDTTINCLKLLNNHLKYGTFKWLYFICVQFFCALLGQEAIIFSKKMTIKYNTLQIVWFTVWKGHRNVQIGRRPSKTQLKNILGDLKLQPNKSFMVLSLIIVIYILDIFLEGMCPTLPHPICLSFKVLRINSSLYNNYILFKKIVCEVLFKRCEIFKFTNTYGSLISNRNELQVTEGYKQKVAYHNVIRSRFLAHIWKQQLLGSSTYKSELVLFSLFYKIGFQMRCLSYDYFREKFYMFEMVEYKRLLNISFKKLFLHYNNIFMMCQIKNLTSVSQIYFQSEIFTCQLKFLTRTNVCVFLCLVGIQISQWIFEVCPVNWIKSSDYKLLKSIKMVISIFKSNLVVFIVICTSIYHRLQIEKYSMIYIVTLKMLDLFNKYGRFFITEVLSLLKGSCYPSVFNYIN

SEQ ID NO: 905467 - protein, 319 aa, Homo sapiens; identical to SEQ ID NO: 905461

SEQ ID NO: 905468 - protein, 530 aa, Homo sapiens
MHNGGILPATQSMLKQMSPVQSLHWHGNRQVYGMFPNSGYYTVSTTVNFVNLKKKSVIYGFQSVPSAPPPKAQSVSPVQAPPPGGSAQLLPGKVLVPLAAPSMSVRGGGAGQPLPLVSPPFSVPVQNGAQPPSKIIQLTPVPVSTPSGLVPPLSPATLPGPTSQPQKVLLPSSTRITYVQSAGGHALPLGTSPASSQAGTVTSYGPTSSVALGFTSLGPSGPAFVQPLLSAGQAPLLAPGQVGVSPVPSPQLPPACAAPGGPVITAFYSGSPAPTSSAPLAQPSQAPPSLVYTVATSTTPPAATILPKGPPAPATATPAPTSPFPSATAGSMTYSLVAPKAQRPSPKAPQKVKAAIASIPVGSFEAGASGRPGPAPRQPLEPGPVREPTAPESELEGQPTPPAPPPLPETWTPTARSSPPLPPPAEERTSAKGPETMASKFPSSSSDWRVPGQGLENRGEPPTPPSPAPAPAVAPGGSSESSSGRAAGDTPERKEAAGTGKKVKVRPPPLKKTFDSVDKSGLRRALGRFT

SEQ ID NO: 905469 - protein, 1620 aa, Homo sapiens
FHPSPAALLPVLVPSSYTSHPAPKKEVIMGRPGTVWTNVEPRSVAVFPWHSLVPFLAPSQPDPSVQPSEAQQPASHPVASNQSKEPAESAAVAHERPPGGTGSADPERPPGATCPESPGPGPPHPLGVVESGKGPPPTTEEEASGPPGEPRLDSETESDHDDAFLSIMSPEIQLPLPPGKRRTQSLSALPKERDSSSEKDGRSPNKREKDHIRRPMNAFMIFSKRHRALVHQRHPNQDNRTVSKILGEWWYALGPKEKQKYHDLAFQVKEAHFKAHPDWKWCNKDRKKSSSEAKPTSLGLAGGHKETRERSMSETGTAAAPGVSSELLSVAAQTLLSSDTKAPGSSSCGAERLHTVGGPGSARPRAFSHSGVHSLDGGEVDSQALQELTQMVSGPASYSGPKPSTQYGAPGPFAAPGEGGALAATGRPPLLPTRASRSQRAASEDMTSDEERMVICEEEGDDDVIADDGFGTTDIDLKCKERVTDSESGDSSGEDPEGNKGFGRKVFSPVIRSSFTHCRPPLDPEPPGPPDPPVAFGKGYGSAPSSSASSPASSSASAATSFSLGSGTFKAQESGQGSTAGPLRPPPPGAGGPATPSKATRFLPMDPATFRRKRPESVGGLEPPGPSVIAAPPSGGGNILQTLVLPPNKEEQEGGGARVPSAPAPSLAYGAPAAPLSRPAATMVTNVVRPVSSTPVPIASKPFPTSGRAEASPNDTAGARTEMGTGSRVPGGSPLGVSLVYSDKKSAAATSPAPHLVAGPLLGTVGKAPATVTNLLVGTPGYGAPAPPAVQFIAQGAPGGGTTAGSGAGAGSGPNGPVPLGILQPGALGKAGGITQVQYILPTLPQQLQVAPAPAPAPGTKAAAPSGPAPTTSIRFTLPPGTSTNGKVLAATAPTPGIPILQSVPSAPPPKAQSVSPVQAPPPGGSAQLLPGKVLVPLAAPSMSVRGGGAGQPLPLVSPPFSVPVQNGAQPPSKIIQLTPVPVSTPSGLVPPLSPATLPGPTSQPQKVLLPSSTRITYVQSAGGHALPLGTSPASSQAGTVTSYGPTSSVALGFTSLGPSGPAFVQPLLSAGQAPLLAPGQVGVSPVPSPQLPPACAAPGGPVITAFYSGSPAPTSSAPLAQPSQAPPSLVYTVATSTTPPAATILPKGPPAPATATPAPTSPFPSATAGSMTYSLVAPKAQRPSPKAPQKVKAAIASIPVGSFEAGASGRPGPAPRQPLEPGPVREPTAPESELEGQPTPPAPPPLPETWTPTARSSPPLPPPAEERTSAKGPETMASKFPSSSSDWRVPGQGLENRGEPPTPPSPAPAPAVAPGGSSESSSGRAAGDTPERKEAAGTGKKVKVRPPPLKKTFDSVDNRVLSEVDFEERFAELPEFRPEEVLPSPTLQSLATSPRAILGSYRKKRKNSTDLDSAPEDPTSPKRKMRRRSSCSSEPNTPKSAKCEGDIFTFDRTGTEAEDVLGELEYDKVPYSSLRRTLDQRRALVMQLFQDHGFFPSAQATAAFQARYADIFPSKVCLQLKIREVRQKIMQAATPTEQPPGAEAPLPVPPPTGTAAAPAPTPSPAGGPDPTSPSSDSGTAQAAPPLPPPPESGPGQPGWEGAPQPSPPPPGPSTAATGR

SEQ ID NO: 905470 - protein, 563 aa, Homo sapiens
MTHSVTFVQPLLSAGQAPLLAPGQVGVSPVPSPQLPPACAAPGGPVITAFYSGSPAPTSSAPLAQPSQAPPSLVYTVATSTTPPAATILPKGPPAPATATPAPTSPFPSATAGSMTYSLVAPKAQRPSPKAPQKVKAAIASIPVGSFEAGASGRPGPAPRQPLEPGPVREPTAPESELEGQPTPPAPPPLPETWTPTARSSPPLPPPAEERTSAKGPETMASKFPSSSSDWRVPGQGLENRGEPPTPPSPAPAPAVAPGGSSESSSGRAAGDTPERKEAAGTGKKVKVRPPPLKKTFDSVDNRVLSEVDFEERFAELPEFRPEEVLPSPTLQSLATSPRAILGSYRKKRKNSTDLDSAPEDPTSPKRKMRRRSSCSSEPNTPKSAKCEGDIFTFDRTGTEAEDVLGELEYDKVPYSSLRRTLDQRRALVMQLFQDHGFFPSAQATAAFQARYADIFPSKVCLQLKIREVRQKIMQAATPTEQPPGAEAPLPVPPPTGTAAAPAPTPSPAGGPDPTSPSSDSGTAQAAPPLPPPPESGPGQPGWEGAPQPSPPPPGPSTAATGR

SEQ ID NO: 905471 - protein, 1464 aa, Homo sapiens
FHPSPAALLPVLVPSSYTSHPAPKKEVIMGRPGTVWTNVEPRSVAVFPWHSLVPFLAPSQPDPSVQPSEAQQPASHPVASNQSKEPAESAAVAHERPPGGTGSADPERPPGATCPESPGPGPPHPLGVVESGKGPPPTTEEEASGPPGEPRLDSETESDHDDAFLSIMSPEIQLPLPPGKRRTQSLSALPKERDSSSEKDGRSPNKREKDHIRRPMNAFMIFSKRHRALVHQRHPNQDNRTVSKILGEWWYALGPKEKQKYHDLAFQVKEAHFKAHPDWKWCNKDRKKSSSEAKPTSLGLAGGHKETRERSMSETGTAAAPGVSSELLSVAAQTLLSSDTKAPGSSSCGAERLHTVGGPGSARPRAFSHSGVHSLDGGEVDSQALQELTQMVSGPASYSGPKPSTQYGAPGPFAAPGEGGALAATGRPPLLPTRASRSQRAASEDMTSDEERMVICEEEGDDDVIADDGFGTTDIDLKCKERVTDSESGDSSGEDPEGNKGFGRKVFSPVIRSSFTHCRPPLDPEPPGPPDPPVAFGKGYGSAPSSSASSPASSSASAATSFSLGSGTFKAQESGQGSTAGPLRPPPPGAGGPATPSKATRFLPMDPATFRRKRPESVGGLEPPGPSVIAAPPSGGGNILQTLVLPPNKEEQEGGGARVPSAPAPSLAYGAPAAPLSRPAATMVTNVVRPVSSTPVPIASKPFPTSGRAEASPNDTAGARTEMGTGSRVPGGSPLGVSLVYSDKKSAAATSPAPHLVAGPLLGTVGKAPATVTNLLVGTPGYGAPAPPAVQFIAQGAPGGGTTAGSGAGAGSGPNGPVPLGILQPGALGKAGGITQVQYILPTLPQQLQVAPAPAPAPGTKAAAPSGPAPTTSIRFTLPPGTSTNGKVLAATAPTPGIPILQSVPSAPPPKAQSVSPVQAPPPGGSAQLLPGKVLVPLAAPSMSVRGGGAGQPLPLVSPPFSVPVQNGAQPPSKIIQLTPVPVSTPSGLVPPLSPATLPGPTSQPQKVLLPSSTRITYVQSAGGHALPLGTSPASSQAGTVTSYGPTSSVALGFTSLGPSGPAFVQPLLSAGQAPLLAPGQVGVSPVPSPQLPPACAAPGGPVITAFYSGSPAPTSSAPLAQPSQAPPSLVYTVATSTTPPAATILPKGPPAPATATPAPTSPFPSATAGSMTYSLVAPKAQRPSPKAPQKVKAAIASIPVGSFEAGASGRPGPAPRQPLEPGPVREPTAPESELEGQPTPPAPPPLPETWTPTARSSPPLPPPAEERTSAKGPETMASKFPSSSSDWRVPGQGLENRGEPPTPPSPAPAPAVAPGGSSESSSGRAAGDTPERKEAAGTGKKVKVRPPPLKKTFDSVDNRVLSEVDFEERFAELPEFRPEEVLPSPTLQSLATSPRAILGSYRKKRKNSTDLDSAPEDPTSPKRKMRRRSSCSSEPNTPKSAKCEGDIFTFDRTGAVVGRTLGA

SEQ ID NO: 905472 - protein, 1621 aa, Homo sapiens
EVRAPAGSPLRRTMYSAHRPLMPASSAASRGLGMFVWTNVEPRSVAVFPWHSLVPFLAPSQPDPSVQPSEAQQPASHPVASNQSKEPAESAAVAHERPPGGTGSADPERPPGATCPESPGPGPPHPLGVVESGKGPPPTTEEEASGPPGEPRLDSETESDHDDAFLSIMSPEIQLPLPPGKRRTQSLSALPKERDSSSEKDGRSPNKREKDHIRRPMNAFMIFSKRHRALVHQRHPNQDNRTVSKILGEWWYALGPKEKQKYHDLAFQVKEAHFKAHPDWKWCNKDRKKSSSEAKPTSLGLAGGHKETRERSMSETGTAAAPGVSSELLSVAAQTLLSSDTKAPGSSSCGAERLHTVGGPGSARPRAFSHSGVHSLDGGEVDSQALQELTQMVSGPASYSGPKPSTQYGAPGPFAAPGEGGALAATGRPPLLPTRASRSQRAASEDMTSDEERMVICEEEGDDDVIADDGFGTTDIDLKCKERVTDSESGDSSGEDPEGNKGFGRKVFSPVIRSSFTHCRPPLDPEPPGPPDPPVAFGKGYGSAPSSSASSPASSSASAATSFSLGSGTFKAQESGQGSTAGPLRPPPPGAGGPATPSKATRFLPMDPATFRRKRPESVGGLEPPGPSVIAAPPSGGGNILQTLVLPPNKEEQEGGGARVPSAPAPSLAYGAPAAPLSRPAATMVTNVVRPVSSTPVPIASKPFPTSGRAEASPNDTAGARTEMGTGSRVPGGSPLGVSLVYSDKKSAAATSPAPHLVAGPLLGTVGKAPATVTNLLVGTPGYGAPAPPAVQFIAQGAPGGGTTAGSGAGAGSGPNGPVPLGILQPGALGKAGGITQVQYILPTLPQQLQVAPAPAPAPGTKAAAPSGPAPTTSIRFTLPPGTSTNGKVLAATAPTPGIPILQSVPSAPPPKAQSVSPVQAPPPGGSAQLLPGKVLVPLAAPSMSVRGGGAGQPLPLVSPPFSVPVQNGAQPPSKIIQLTPVPVSTPSGLVPPLSPATLPGPTSQPQKVLLPSSTRITYVQSAGGHALPLGTSPASSQAGTVTSYGPTSSVALGFTSLGPSGPAFVQPLLSAGQAPLLAPGQVGVSPVPSPQLPPACAAPGGPVITAFYSGSPAPTSSAPLAQPSQAPPSLVYTVATSTTPPAATILPKGPPAPATATPAPTSPFPSATAGSMTYSLVAPKAQRPSPKAPQKVKAAIASIPVGSFEAGASGRPGPAPRQPLEPGPVREPTAPESELEGQPTPPAPPPLPETWTPTARSSPPLPPPAEERTSAKGPETMASKFPSSSSDWRVPGQGLENRGEPPTPPSPAPAPAVAPGGSSESSSGRAAGDTPERKEAAGTGKKVKVRPPPLKKTFDSVDNRVLSEVDFEERFAELPEFRPEEVLPSPTLQSLATSPRAILGSYRKKRKNSTDLDSAPEDPTSPKRKMRRRSSCSSEPNTPKSAKCEGDIFTFDRTGTEAEDVLGELEYDKVPYSSLRRTLDQRRALVMQLFQDHGFFPSAQATAAFQARYADIFPSKVCLQLKIREVRQKIMQAATPTEQPPGAEAPLPVPPPTGTAAAPAPTPSPAGGPDPTSPSSDSGTAQAAPPLPPPPESGPGQPGWEGAPQPSPPPPGPSTAATGR

SEQ ID NO: 905473 - protein, 82 aa, Homo sapiens
EVRAPAGSPLRRTMYSAHRPLMPASSAASRGLGMFVWTNVEPRSVAVFPWHSLAPFPRTKHVDHVQYFLLCREAAMSEIKAV

SEQ ID NO: 905474 - protein, 246 aa, Homo sapiens
PGILGRGGRDCRVGEGSTSSPRAILGSYRKKRKNSTDLDSAPEDPTSPKRKMRRRSSCSSEPNTPKSAKCEGDIFTFDRTGTEAEDVLGELEYDKVPYSSLRRTLDQRRALVMQLFQDHGFFPSAQATAAFQARYADIFPSKVCLQLKIREVRQKIMQAATPTEQPPGAEAPLPVPPPTGTAAAPAPTPSPAGGPDPTSPSSDSGTAQAAPPLPPPPESGPGQPGWEGAPQPSPPPPGPSTAATGR

SEQ ID NO: 905475 - protein, 172 aa, Homo sapiens
VGVSPVPSPQLPPACAAPGGPVITAFYSGSPAPTSSAPLAQPSQAPPSLVYTVATSTTPPAATILPKGPPAPATATPAPTSPFPSATGRCQINPEQSELGDPGDGLQSGLAQQTIFSPLAGSMTYSLVAPKAQRPSPKAPQKVKAAIASIPVGSFEAGASGRPGPAPRQPLE

SEQ ID NO: 905476 - protein, 586 aa, Homo sapiens
MSATVVDAVNAAPLSGSKEMSLEEPKKMTREDWRKKKELEEQRKLGNAPAEVDEEGKDINPHIPQYISSVPWYIDPSKRPTLKHQRPQPEKQKQFSSSGEWYKRGVKENSIITKYRKGACENCGAMTHKKKDCFERPRRVGAKFTGTNIAPDEHVQPQLMFDYDGKRDRWNGYNPEEHMKIVEEYAKVDLAKRTLKAQKLQEELASGKLVEQANSPKHQWGEEEPNSQTEKDHNSEDEDEDKYADDIDMPGQNFDSKRRITVRNLRIREDIAKYLRNLDPNSAYYDPKTRAMRENPYANAGKNPDEVSYAGDNFVRYTGDTISMAQTQLFAWEAYDKGSEVHLQADPTKLELLYKSFKVKKEDFKEQQKESILEKYGGQEHLDAPPAELLLAQTEDYVEYSRHGTVIKGQERAVACSKYEEDVKIHNHTHIWGSYWKEGRWGYKCCHSFFKYSYCTGEAGKEIVNSEECIINEITGEESVKKPQTLMELHQEKLKEEKKKKKKKKKKHRKSSSDSDDEEKKHEKLKKALNAEEARLLHVKETMQIDERKRPYNSMYETREPTEEEMEAYRMKRQRPDDPMASFLGQ

SEQ ID NO: 905477 - protein, 79 aa, Homo sapiens
GSVPIRVGVGGGQITMSATVVDAVNAAPLSGSKEMSLEEPKKMTREDWRKKKELEEQRKLGNAPAEVDEEGKDINPEHG

SEQ ID NO: 905478 - protein, 115 aa, Homo sapiens
AVSELYPVLTQTEDYVEYSRHGTVIKGQERAVACSKYEEDVKIHNHTHIWGSYWKEGRWGYKCCHSFFKYSYCTGEAGKEIVNSEECIINEITGEEGGWWKGAGGREKYWAPAPR

SEQ ID NO: 905479 - protein, 586 aa, Homo sapiens; identical to SEQ ID NO: 905476

SEQ ID NO: 905480 - protein, 586 aa, Homo sapiens; identical to SEQ ID NO: 905476

SEQ ID NO: 905481 - protein, 309 aa, Homo sapiens
CSRNPLCVQIENYSMRENLYANAGQNPDEVSYAGDNFVRYTGDTISMAQTQLFAWEAYDKGSEVHLQADPTKLELLYKSFKVKKEDFKEQQKESILEKYGGQEHLDAPPAELLLAQTEDYVEYSRHGTVIKGQERAVACSKYEEDVKIHNHTHIWGSYWKEGRWGYKCCHSFFKYSYCTGEAGKEIVNSEECIINEITGEESVKKPQTLMELHQEKLKEEKKKKKKKKKKHRKSSSDSDDEEKKHEKLKKALNAEEARLLHVKETMQIDERKRPYNSMYETREPTEEEMEAYRMKRQRPDDPMASFLGQ

SEQ ID NO: 905482 - protein, 240 aa, Homo sapiens
MSVVVKILQSQGEKIRKQHGLGNESILEKYGGQEHLDAPPAELLLAQTEDYVEYSRHGTVIKGQERAVACSKYEEDVKIHNHTHIWGSYWKEGRWGYKCCHSFFKYSYCTGEAGKEIVNSEECIINEITGEESVKKPQTLMELHQEKLKEEKKKKKKKKKKHRKSSSDSDDEEKKHEKLKKALNAEEARLLHVKETMQIDERKRPYNSMYETREPTEEEMEAYRMKRQRPDDPMASFLGQ

SEQ ID NO: 905483 - protein, 530 aa, Homo sapiens
MSATVVDAVNAAPLSGSKEMSLEEPKKMTREDWRKKKELEEQRKLGNAPAEVDEEGKDINPHIPQYISSVPWYIDPSKRPTLKHQRPQPEKQKQFSSSGEWYKRGVKENSIITKYRKGACENCGAMTHKKKDCFERPRRVGAKFTGTNIAPDEHVQPQLMFDYDGKRDRWNGYNPEEHMKIVEEYAKVDLAKRTLKAQKLQEELASGKLVEQANSPKHQWGEEEPNSQTEKDHNSEDEDEDKYADDIDMPGQNFDSKRRITVRNLRIREDIAKYLRNLDPNSAYYDPKTRAMRENPYANAGKNPDEVSYAGDNFVRYTGDTISMAQTQLFAWEAYDKGSEVHLQADPTKLELLYKSFKVKKEDFKEQQKESILEKYGGQEHLDAPPAELLLAQTEDYVEYSRHGTVIKGQERAVACSKYEEDVKIHNHTHIWGSYWKEGRWGYKCCHSFFKYSYCTGEAGKEIVNSEECIINEITGEESVKKPQTLMELHQEKLKEEKKKKKKKKKKHRKSSSDSDDEEKKHEKLKKALS

SEQ ID NO: 905484 - protein, 117 aa, Homo sapiens
ILTVHSSISTCEKTQNLMELHQEKLKEEKKKKKKKKKKHRKSSSDSDDEEKKHEKLKKALNAEEARLLHVKETMQIDERKRPYNSMYETREPTEEEMEAYRMKRQRPDDPMASFLGQ

SEQ ID NO: 905485 - protein, 342 aa, Homo sapiens [sequence omitted]

SEQ ID NO: 905486 - protein, 288 aa, Homo sapiens
  misc_feature (227)..(227): Xaa can be any naturally occurring amino acid
MSATVVDAVNAAPLSGSKEMSLEEPKKMTREDWRKKKELEEQRKLGNAPAEVDEEGKDINPHIPQYISSVPWYIDPSKRPTLKHQRPQPEKQKQFSSSGEWYKRGVKENSIITKYRKGACENCGAMTHKKKDCFERPRRVGAKFTGTNIAPDEHVQPQLMFDYDGKRDRWNGYNPEEHMKIVEEYAKVDLAKRTLKAQKLQEELASGKLVEQANSPKTPVGGKRDPXFSEREKILLGEHEVRDILRLFCCPADFGPRRILGGISGLSLAIGGYPRRAMVIAGNLAGRT

SEQ ID NO: 905487 - protein, 119 aa, Homo sapiens
QVVHLSFVFTLITLHFNPPFQLHQEKLKEEKKKKKKKKKKHRKSSSDSDDEEKKHEKLKKALNAEEARLLHVKETMQIDERKRPYNSMYETREPTEEEMEAYRMKRQRPDDPMASFLGQ

SEQ ID NO: 905488 - protein, 99 aa, Homo sapiens
SPPFTTISVIKGQERAVACSKYEEDVKIHNHTHIWGSYWKEGRWGYKCCHSFFKYSYCTGEAGKEIVNSEECIINEITGEEERAVQIVVNGAIYNYLMK

SEQ ID NO: 905489 - protein, 586 aa, Homo sapiens; identical to SEQ ID NO: 905476

SEQ ID NO: 905490 - protein, 610 aa, Homo sapiens
QAVPAESKDGLGASCGGAGGGQITMSATVVDAVNAAPLSGSKEMSLEEPKKMTREDWRKKKELEEQRKLGNAPAEVDEEGKDINPHIPQYISSVPWYIDPSKRPTLKHQRPQPEKQKQFSSSGEWYKRGVKENSIITKYRKGACENCGAMTHKKKDCFERPRRVGAKFTGTNIAPDEHVQPQLMFDYDGKRDRWNGYNPEEHMKIVEEYAKVDLAKRTLKAQKLQEELASGKLVEQANSPKHQWGEEEPNSQTEKDHNSEDEDEDKYADDIDMPGQNFDSKRRITVRNLRIREDIAKYLRNLDPNSAYYDPKTRAMRENPYANAGKNPDEVSYAGDNFVRYTGDTISMAQTQLFAWEAYDKGSEVHLQADPTKLELLYKSFKVKKEDFKEQQKESILEKYGGQEHLDAPPAELLLAQTEDYVEYSRHGTVIKGQERAVACSKYEEDVKIHNHTHIWGSYWKEGRWGYKCCHSFFKYSYCTGEAGKEIVNSEECIINEITGEESVKKPQTLMELHQEKLKEEKKKKKKKKKKHRKSSSDSDDEEKKHEKLKKALNAEEARLLHVKETMQIDERKRPYNSMYETREPTEEEMEAYRMKRQRPDDPMASFLGQ

SEQ ID NO: 905491 - protein, 623 aa, Homo sapiens
MSATVVDAVNAAPLSGSKEMSLEEPKKMTREDWRKKKELEEQRKLGNAPAEVDEEGKDINPHIPQYISSVPWYIDPSKRPTLKHQRPQPEKQKQFSSSGEWYKRGVKENSIITKYRKGACENCGAMTHKKKDCFERPRRVGAKFTGTNIAPDEHVQPQLMFDYDGKRDRWNGYNPEEHMKIVEEYAKVDLAKRTLKAQKLQEELASGKLVEQANSPKHQWGEEEPNSQTEKDHNSEDEDEDKYADDIDMPGQNFDSKRRITVRNLRIREDIAKYLRNLDPNSAYYDPKTRAMRENPYANAGKNPDEVSYAGDNFVRYTGDTISMAQTQLFAWEAYDKGSEVHLQADPTKLELLYKSFKVKKEDFKEQQKESILEKYGGQEHLDAPPAELLLAQTEDYVEYSRHGTVIKGQERAVACSKYEEDVKIHNHTHIWGSYWKEGRWGYKCCHSFFKYSYCTGEAGKEIVNSEECIINEITGEESVKKPQTLMELHQEKLKEEKKKKKKKKAKALSTWRQKIRKYNRDFESHITSYKQNPEQSADEDAEKNEEDSEGSSDEDEDEDGVSAATFLKKKSEAPSGESRKFLKKMADDDEDSEDSEDDEDCDTGPHLRFDSRRRGNNGWLRF

SEQ ID NO: 905492 - protein, 175 aa, Homo sapiens
VDPRLHHTYPPSSYLPHTHIWGSYWKEGRWGYKCCHSFFKYSYCTGEAGKEIVNSEECIINEITGEESVKKPQTLMELHQEKLKEEKKKKKKKKKKHRKSSSDSDDEEKKHEKLKKALNAEEARLLHVKETMQIDERKRPYNSMYETREPTEEEMEAYRMKRQRPDDPMASFLGQ

SEQ ID NO: 905493 - protein, 454 aa, Homo sapiens
MSATVVDAVNAAPLSGSKEMSLEEPKKMTREDWRKKKELEEQRKLGNAPAEVDEEGKDINPHIPQYISSVPWYIDPSKRPTLKHQRPQPEKQKQFSSSGEWYKRGVKENSIITKYRKGACENCGAMTHKKKDCFERPRRVGAKFTGTNIAPDEHVQPQLMFDYDGKRDRWNGYNPEEHMKIVEEYAKVDLAKRTLKAQKLQEELASGKLVEQANSPKHQWGEEEPNSQTEKDHNSEDEDEDKYADDIDMPGQNFDSKRRITVRNLRIREDIAKYLRNLDPNSAYYDPKTRAMRENPYANAGKNPDEVSYAGDNFVRYTGDTISMAQTQLFAWEAYDKGSEVHLQADPTKLELLYKSFKVKKEDFKEQQKESILEKYGGQEHLDAPPAELLLAQTEDYVEYSRHGTVIKGQERAVACSKYEEDVKIHNHTVCAKLEQFCVLVGFALYCIFPLQLY

SEQ ID NO: 905494 - protein, 82 aa, Homo sapiens
  misc_feature (1)..(1): Xaa can be any naturally occurring amino acid
XRHSSSARCLSSASFSLRSGTLLWQRIVMYMAPKSRHPEEQQKVLFLFYSSFNPMLNPLIYNLRNVEVKGALRRALCKESHS

SEQ ID NO: 905495 - protein, 194 aa, Homo sapiens
MSYDRYVAICHPLRYFIIMTWKVCITLAITSWTCGSLLAMVHVSLILRLPFCGPREINHFFCEILSVPQLACADTWLNQVVIFAACMFILVGPLCLVLVSYSHILAAILRIQSGEGRRKAFSTCSSHLCVVGLFFGSASVMYMAPKSRHPEEQQKVLFLFYSSFNPMLNPLIYNLRNVEVKGALRRALCKESHS

SEQ ID NO: 905496 - protein, 194 aa, Homo sapiens; identical to SEQ ID NO: 905495

SEQ ID NO: 905497 - protein, 194 aa, Homo sapiens; identical to SEQ ID NO: 905495

SEQ ID NO: 905498 - protein, 194 aa, Homo sapiens; identical to SEQ ID NO: 905495

SEQ ID NO: 905499 - protein, 194 aa, Homo sapiens; identical to SEQ ID NO: 905495

SEQ ID NO: 905500 - protein, 102 aa, Homo sapiens
MSSEMVKNQTMVTEFLLLGFLLGPRIQMLLFGLFSLFYVFTLLGNGTILGLISLDSRLHTPMYFFLSHLAVVNIAYACNTVPQMLVNLLHPAKPISFAGCMT

SEQ ID NO: 905501 - protein, 424 aa, Homo sapiens
MDFSRRSFHRSLSSSLQAPVVSTVGMQRLGTTPSVYGGAGGRGIRISNSRHTVNYGSDLTGGGDLFVGNEKMAMQNLNDRLASYLEKVRTLEQSNSKLEVQIKQWYETNAPRAGRDYSAYYRQIEELRSQIKDAQLQNARCVLQIDNAKLAAEDFRLKYETERGIRLTVEADLQGLNKVFDDLTLHKTDLEIQIEELNKDLALLKKEHQEEVDGLHKHLGNTVNVEVDAAPGLNLGVIMNEMRQKYEVMAQKNLQEAKEQFERQTAVLQQQVTVNTEELKGTEVQLTELRRTSQSLEIELQSHLSMKESLEHTLEETKARYSSQLANLQSLLSSLEAQLMQIRSNMERQNNEYHILLDIKTRLEQEIATYRRLLEGEDVKTTEYQLSTLEERDIKKTRKIKTVVQEVVDGKVVSSEVKEVEENI

SEQ ID NO: 905502 - protein, 158 aa, Homo sapiens
MDFSRRSFHRSLSSSLQAPVVSTVGMQRLGTTPSVYGGAGGRGIRISNSRHTVNYGSDLTGGGDLFVGNEKMAMQNLNDRLASYLEKVRTLEQSNSKLEVQIKQWYETNAPRAGRDYSAYYRQIEELRSQIKDAQLQNARCVLQIDNAKLAAEDFRLK

SEQ ID NO: 905503 - protein, 424 aa, Homo sapiens; identical to SEQ ID NO: 905501

SEQ ID NO: 905504 - protein, 424 aa, Homo sapiens; identical to SEQ ID NO: 905501

SEQ ID NO: 905505 - protein, 138 aa, Homo sapiens
  misc_feature (138)..(138): Xaa can be any naturally occurring amino acid
MLFLQFLLLALLLPGGDNADASQEHVSFHVIQIFSFVNQSWARGQGSGWLDELQTHGWDSESGTIIFLHNWSKGNFSNEELSDLELLFRFYLFGLTREIQDHASQDYSKYPFEVQVKAGCELHSGKSPNKGFPLKVPX

SEQ ID NO: 905506 - protein, 333 aa, Homo sapiens
MLFLQFLLLALLLPGGDNADASQEHVSFHVIQIFSFVNQSWARGQGSGWLDELQTHGWDSESGTIIFLHNWSKGNFSNEELSDLELLFRFYLFGLTREIQDHASQDYSKYPFEVQVKAGCELHSGKSPEGFFQVAFNGLDLLSFQNTTWVPSPGCGSLAQSVCHLLNHQYEGVTETVYNLIRSTCPRFLLGLLDAGKMYVHRQVRPEAWLSSRPSLGSGQLLLVCHASGFYPKPVWVTWMRNEQEQLGTKHGDILPNADGTWYLQVILEVASEEPAGLSCRVRHSSLGGQDIILYWGHHFSMNWIALVVIVPLVILIVLVLWFKKHCSYQDIL

SEQ ID NO: 905507 - protein, 346 aa, Homo sapiens
MARPGQRWLGKWLVAMVVWALCRLATPLAKNLEPVSWSSLNPKFLSGKGLVIYPKIGDKLDIICPRAEAGRPYEYYKLYLVRPEQAAACSTVLDPNVLVTCNRPEQEIRFTIKFQEFSPNYMGLEFKKHHDYYITSTSNGSLEGLENREGGVCRTRTMKIIMKVGQDPNAVTPEQLTTSRPSKEADNTVKMATQAPGSRGSLGDSDGKHETVNQEEKSGPGASGGSSGDPDGFFNSKVALFAAVGAGCVIFLLIIIFLTVLLLKLRKRHRKHTQQRAAALSLSTLASPKGGSGTAGTEPSDIIIPLRTTENNYCPHYEKVSGDYGHPVYIVQEMPPQSPANIYYKV

SEQ ID NO: 905508 - protein, 323 aa, Homo sapiens
LISQPWSRRRQLQFSSPRLRFLSGKGLVIYPKIGDKLDIICPRAEAGRPYEYYKLYLVRPEQAAACSTVLDPNVLVTCNRPEQEIRFTIKFQEFSPNYMGLEFKKHHDYYITSTSNGSLEGLENREGGVCRTRTMKIIMKVGQDPNAVTPEQLTTSRPSKEADNTVKMATQAPGSRGSLGDSDGKHETVNQEEKSGPGASGGSSGDPDGFFNSKVALFAAVGAGCVIFLLIIIFLTVLLLKLRKRHRKHTQQRAAALSLSTLASPKGGSGTAGTEPSDIIIPLRTTENNYCPHYEKVSGDYGHPVYIVQEMPPQSPANIYYKV

SEQ ID NO: 905509 - protein, 346 aa, Homo sapiens; identical to SEQ ID NO: 905507

SEQ ID NO: 905510 - protein, 346 aa, Homo sapiens; identical to SEQ ID NO: 905507

SEQ ID NO: 905511 - protein, 346 aa, Homo sapiens; identical to SEQ ID NO: 905507

SEQ ID NO: 905512 - protein, 186 aa, Homo sapiens
MVVLLGATTLVLVAVAPWVLSAAAGGKNLKSPQKVEVDIIDDNFILRWNRSDESVGNVTFSFDYQKTGMDNWIKLSGCQNITSTKCNFSSLKLNVYEEIKLRIRAEKENTSSWYEVDSFTPFRKAQIGPPEVHLEAEDKAIVIHISPGTKDSVMWALDGLSFTYSLVIWKNSSGVEKKGLENLFPT

SEQ ID NO: 905513 - protein, 556 aa, Homo sapiens [sequence omitted]

SEQ ID NO: 905514 - protein, 556 aa, Homo sapiens
MTSHDARCSAGCMLAGVLLKREIQVVDIASQNMQHAVDIIDDNFILRWNRSDESVGNVTFSFDYQKTGMDNWIKLSGCQNITSTKCNFSSLKLNVYEEIKLRIRAEKENTSSWYEVDSFTPFRKAQIGPPEVHLEAEDKAIVIHISPGTKDSVMWALDGLSFTYSLVIWKNSSGVEERIENIYSRHKIYKLSPETTYCLKVKAALLTSWKIGVYSPVHCIKTTVENELPPPENIEVSVQNQNYVLKWDYTYANMTFQVQWLHAFLKRNPGNHLYKWKQIPDCENVKTTQCVFPQNVFQKGIYLLRVQASDGNNTSFWSEEIKFDTEIQAFLLPPVFNIRSLSDSFHIYIGAPKQSGNTPVIQDYPLIYEIIFWENTSNAERKIIEKKTDVTVPNLKPLTVYCVKARAHTMDEKLNKSSVFSDAVCEKTKPGNTSKIWLIVGICIALFALPFVIYAAKVFLRCINYVFFPSLKPSSSIDEYFSEQPLKNLLLSTSEEQIEKCFIIENISTIATVEETNQTDEDHKKYSSQTSQDSGNYSNEDESESKTSEELQQDFV

SEQ ID NO: 905515 - protein, 389 aa, Homo sapiens
MVVLLGATTLVLVAVAPWVLSAAAGGKNLKSPQKVEVDIIDDNFILRWNRSDESVGNVTFSFDYQKTGMDNWIKLSGCQNITSTKCNFSSLKLNVYEEIKLRIRAEKENTSSWYEVDSFTPFRKAQIGPPEVHLEAEDKAIVIHISPGTKDSVMWALDGLSFTYSLVIWKNSSGVEERIENIYSRHKIYKLSPETTYCLKVKAALLTSWKIGVYSPVHCIKTTVENELPPPENIEVSVQNQNYVLKWDYTYANMTFQVQWLHAFLKRNPGNHLYKWKQIPDCENVKTTQCVFPQNVFQKGIYLLRVQASDGNNTSFWSEEIKFDTEIQAFLLPPVFNIRSLSDSFHIYIGAPKQSGNTPVIQDYPLIYEIIFWENTSNAEVKRLYSIIL

SEQ ID NO: 905516 - protein, 441 aa, Homo sapiens
MVVLLGATTLVLVAVAPWVLSAAAGGKNLKSPQKVEVDIIDDNFILRWNRSDESVGNVTFSFDYQKTGMDNWIKLSGCQNITSTKCNFSSLKLNVYEEIKLRIRAEKENTSSWYEVDSFTPFRKAQIGPPEVHLEAEDKAIVIHISPGTKDSVMWALDGLSFTYSLVIWKNSSGVEERIENIYSRHKIYKLSPETTYCLKVKAALLTSWKIGVYSPVHCIKTTVENELPPPENIEVSVQNQNYVLKWDYTYANMTFQVQWLHAFLKRNPGNHLYKWKQIPDCENVKTTQCVFPQNVFQKGIYLLRVQASDGNNTSFWSEEIKFDTEIQAFLLPPVFNIRSLSDSFHIYIGAPKQSGNTPVIQDYPLIYEIIFWENTSNAERKIIEKKTDVTVPNLKPLTVYCVKARAHTMDEKLNKSSVFSDAVCEKTKPGQNLLLSFLKM

SEQ ID NO: 905517 - protein, 391 aa, Homo sapiens [sequence omitted]

SEQ ID NO: 905518 - protein, 457 aa, Homo sapiens
MVVLLGATTLVLVAVAPWVLSAAAGGKNLKSPQKVEVDIIDDNFILRWNRSDESVGNVTFSFDYQKTGMDNWIKLSGCQNITSTKCNFSSLKLNVYEEIKLRIRAEKENTSSWYEVDSFTPFRKVENELPPPENIEVSVQNQNYVLKWDYTYANMTFQVQWLHAFLKRNPGNHLYKWKQIPDCENVKTTQCVFPQNVFQKGIYLLRVQASDGNNTSFWSEEIKFDTEIQAFLLPPVFNIRSLSDSFHIYIGAPKQSGNTPVIQDYPLIYEIIFWENTSNAERKIIEKKTDVTVPNLKPLTVYCVKARAHTMDEKLNKSSVFSDAVCEKTKPGNTSKIWLIVGICIALFALPFVIYAAKVFLRCINYVFFPSLKPSSSIDEYFSEQPLKNLLLSTSEEQIEKCFIIENISTIATVEETNQTDEDHKKYSSQTSQDSGNYSNEDESESKTSEELQQDFV

SEQ ID NO: 905519 - protein, 111 aa, Homo sapiens
MKLFVDTDADTRLSRRVLRDISERGRDLEQILSQYITFVKPAFEEFCLPTKKYADVIIPRGADNLVAINLIVQHIQDILNGGPSKRQTNGCLNGYTPSRKRQASESSSRPH

SEQ ID NO: 905520 - protein, 138 aa, Homo sapiens
MAGDSEQTLQNHQQPNGGEPFLIGVSGGTASGKSSVCAKIVQLLGQNEVDYRQKQVVILSQDSFYRVLTSEQKAKALKGQFNFDHPEPFDNETSFSSKNIFQEQKFYFENGGNNTEGLPNGFRPPAWFIWNPFMGSFP

SEQ ID NO: 905521 - protein, 261 aa, Homo sapiens
MAGDSEQTLQNHQQPNGGEPFLIGVSGGTASGKSSVCAKIVQLLGQNEVDYRQKQVVILSQDSFYRVLTSEQKAKALKGQFNFDHPDAFDNELILKTLKEITEGKTVQIPVYDFVSHSRKEETVTVYPADVVLFEGILAFYSQEVRDLFQMKLFVDTDADTRLSRRVLRDISERGRDLEQILSQYITFVKPAFEEFCLPTKKYADVIIPRGADNLVAINLIVQHIQDILNGGPSKRQTNGCLNGYTPSRKRQASESSSRPH

SEQ ID NO: 905522 - protein, 261 aa, Homo sapiens; identical to SEQ ID NO: 905521

SEQ ID NO: 905523 - protein, 111 aa, Homo sapiens; identical to SEQ ID NO: 905519

SEQ ID NO: 905524 - protein, 111 aa, Homo sapiens; identical to SEQ ID NO: 905519

SEQ ID NO: 905525 - protein, 261 aa, Homo sapiens; identical to SEQ ID NO: 905521

SEQ ID NO: 905526 - protein, 261 aa, Homo sapiens; identical to SEQ ID NO: 905521

SEQ ID NO: 905527 - protein, 261 aa, Homo sapiens; identical to SEQ ID NO: 905521

SEQ ID NO: 905528 - protein, 105 aa, Homo sapiens
MLCYLGVTDFEEFCLPTKKYADVIIPRGADNLVAINLIVQHIQDILNGGPSGPFNASGPFNASGPFNASGPFNASGPFNASGPFNASGPFNASGHSRGSCYSDRQ

SEQ ID NO: 905529 - protein, 261 aa, Homo sapiens; identical to SEQ ID NO: 905521

SEQ ID NO: 905530 - protein, 261 aa, Homo sapiens; identical to SEQ ID NO: 905521

SEQ ID NO: 905531 - protein, 168 aa, Homo sapiens
WPLCWFGVEPDQTDVGILYFLTNAFSKEETVTVYPADVVLFEGILAFYSQEVRDLFQMKLFVDTDADTRLSRRVLRDISERGRDLEQILSQYITFVKPAFEEFCLPTKKYADVIIPRGADNLVAINLIVQHIQDILNGGPSKRQTNGCLNGYTPSRKRQASESSSRPH

SEQ ID NO: 905532 - protein, 96 aa, Homo sapiens
LRPGGREGRAWDLTWSWLRYTGKAGISEDIEDLETKKYADVIIPRGADNLVAINLIVQHIQDILNGGPSKRQTNGCLNGYTPSRKRQASESSSRPH

SEQ ID NO: 905533 - protein, 106 aa, Homo sapiens
MPGHESIPGDAFREKKKSHLFLSAFILHSTAGFFNSKEKDVCRVFLFHGESSEVVKGDLCPGRDHPWLFGGGPRALNSRFPRSHGVELLCQGGTALPTRPQVLLWS

SEQ ID NO: 905534 - protein, 451 aa, Homo sapiens
MTPVRMQHSLAGQTYAVPLIQPDLRREEAVQQMADALQYLQKVSGDIFSRISQRVEQSRSQVQAIGEKVSLAQAKIEKIKGSKKAIKVFSSAKYPAPERLQEYGSIFTGAQDPGLQRRPRHRIQSKHRPLDERALQEKLKDFPVCVSTKPEPEDDAEEGLGGLPSNISSVSSLLLFNTTENLYGQKAGPRGVGGGPAWLSGDPGHQTQVQHIGQEPGGDWGGSAREAWDPTVHAVPLMMWERNMGSGQRVSACLTPCRLRRYKKYVFLDPLAGAVTKTHVMLGAETEEKLFDAPLSISKREQLEQQVPENYFYVPDLGQVPEIDVPSYLPDLPGIANDLMYSADLGPGIAPSAPGTIPELPTFHTEVAEPLKADLQDGVLTPPPPPPPPPPAPEVLASASPLPPSTAAPVGQGARQDDSSSSASPSGGSSSLRPPDFWRAQCTRVDFLWVC

SEQ ID NO: 905535 - protein, 374 aa, Homo sapiens
MTPVRMQHSLAGQTYAVPLIQPDLRREEAVQQMADALQYLQKVSGDIFSRISQRVEQSRSQVQAIGEKVSLAQAKIEKIKGSKKAIKVFSSAKYPAPERLQEYGSIFTGAQDPGLQRRPRHRIQSKHRPLDERALQEKLKDFPVCVSTKPEPEDDAEEGLGGLPSNISSVSSLLLFNTTENLYKKYVFLDPLAGAVTKTHVMLGAETEEKLFDAPLSISKREQLEQQVPENYFYVPDLGQVPEIDVPSYLPDLPGIANDLMYSADLGPGIAPSAPGTIPELPTFHTEVAEPLKADLQDGVLTAPATEPPTEREEDKVHAAMENCQGAKDTVQETSRDHTPETAAESDKKLPEDQKAHTRGERRTQIEATGKAQQ

SEQ ID NO: 905536 - protein, 465 aa, Homo sapiens
MTPVRMQHSLAGQTYAVPLIQPDLRREEAVQQMADALQYLQKVSGDIFSRISQRVEQSRSQVQAIGEKVSLAQAKIEKIKGSKKAIKVFSSAKYPAPERLQEYGSIFTGAQDPGLQRRPRHRIQSKHRPLDERALQEKLKDFPVCVSTKPEPEDDAEEGLGGLPSNISSVSSLLLFNTTENLYKKYVFLDPLAGAVTKTHVMLGAETEEKLFDAPLSISKREQLEQQVPENYFYVPDLGQVPEIDVPSYLPDLPGIANDLMYSADLGPGIAPSAPGTIPELPTFHTEVAEPLKADLQDGVLTPPPPPPPPPPAPEVLASASPLPPSTAAPVGQGARQDDSSSSASPSVQGAPREVVDPSGGWATLLESIRQAGGIGKAKLRSMKERKLEKKKQKEQEQVRATSQGGHLMSDLFNKLVMRRKGISGKGPGAGEGPGGAFARVSDSIPPVPPPQQPQAEEDEDDWES

SEQ ID NO: 905537 - protein, 372 aa, Homo sapiens
MTPVRMQHSLAGQTYAVPLIQPDLRREEAVQQMADALQYLQKVSGDIFSRISQRVEQSRSQVQAIGEKVSLAQAKIEKIKGSKKAIKVFSSAKYPAPERLQEYGSIFTGAQDPGLQRRPRHRIQSKHRPLDERALQEKLKDFPVCVSTKPEPEDDAEEGLGGLPSNISSVSSLLLFNTTENLYKKYVFLDPLAGAVTKTHVMLGAETEEKLFDAPLSISKREQLEQQVPENYFYVPDLGQVPEIDVPSYLPDLPGIANDLMYSADLGPGIAPSAPGTIPELPTFHTEVAEPLKADLQDGVLTPPPPPPPPPPAPEVLASASPLPPSTAAPVGQGARQDDSSSSASPSGGSSSLRPPDFWRAQCTRVDFLWVC

SEQ ID NO: 905538 - protein, 248 aa, Homo sapiens
QIFTIPWPSWPSEKLKDFPVCVSTKPEPEDDAEEGLGGLPSNISSVSSLLLFNTTENLYKKYVFLDPLAGAVTKTHVMLGAETEEKLFDAPLSISKREQLEQQVPENYFYVPDLGQVPEIDVPSYLPDLPGIANDLMYSADLGPGIAPSAPGTIPELPTFHTEVAEPLKADLQDGVLTPPPPPPPPPPAPEVLASASPLPPSTAAPVGQGARQDDSSSSASPSGGSSSLRPPDFWRAQCTRVDFLWVC

SEQ ID NO: 905539 - protein, 281 aa, Homo sapiens
MTPVRMQHSLAGQTYAVPLIQPDLRREEAVQQMADALQYLQKVSGDIFSRISQRVEQSRSQVQAIGEKVSLAQAKIEKIKGSKKAIKVFSSAKYPAPERLQEYGSIFTGAQDPGLQRRPRHRIQSKHRPLDERALQVPENYFYVPDLGQVPEIDVPSYLPDLPGIANDLMYSADLGPGIAPSAPGTIPELPTFHTEVAEPLKADLQDGVLTPPPPPPPPPPAPEVLASASPLPPSTAAPVGQGARQDDSSSSASPSGGSSSLRPPDFWRAQCTRVDFLWVC

SEQ ID NO: 905540 - protein, 372 aa, Homo sapiens; identical to SEQ ID NO: 905537

SEQ ID NO: 905541 - protein, 199 aa, Homo sapiens
MTPVRMQHSLAGQTYAVPLIQPDLRREEAVQQMADALQYLQKVSGDIFSRISQRVEQSRSQVQAIGEKVSLAQAKIEKIKGSKKAIKVFSSAKYPAPERLQEYGSIFTGAQDPGLQRRPRHRIQSKHRPLDERALQEKLKDFPVCVSTKPEPEDDAEEGLGGLPSNISSVSSLLLFNTTENLYGQKAGPRGVGGRPGLA

SEQ ID NO: 905542 - protein, 372 aa, Homo sapiens; identical to SEQ ID NO: 905537

SEQ ID NO: 905543 - protein, 399 aa, Homo sapiens
MTPVRMQHSLAGQTYAVPLIQPDLRREEAVQQMADALQYLQKVSGDIFSRISQRVEQSRSQVQAIGEKVSLAQAKIEKIKGSKKAIKVFSSAKYPAPERLQEYGSIFTGAQDPGLQRRPRHRIQSKHRPLDERALQEKLKDFPVCVSTKPEPEDDAEEGLGGLPSNISSVSSLLLFNTTENLYGQKAEAEGCGREARPGLVGTQGIRHRYKKYVFLDPLAGAVTKTHVMLGAETEEKLFDAPLSISKREQLEQQVPENYFYVPDLGQVPEIDVPSYLPDLPGIANDLMYSADLGPGIAPSAPGTIPELPTFHTEVAEPLKADLQDGVLTPPPPPPPPPPAPEVLASASPLPPSTAAPVGQGARQDDSSSSASPSGGSSSLRPPDFWRAQCTRVDFLWVC

SEQ ID NO: 905544 - protein, 171 aa, Homo sapiens
MLGAETEEKLFDAPLSISKREQLEQQVPENYFYVPDLGQVPEIDVPSYLPDLPGIANDLMYSADLGPGIAPSAPGTIPELPTFHTEVAEPLKADLQDGVLTPPPPPPPPPPAPEVLASASPLPPSTAAPVGQGARQDDSSSSASPSGGSSSLRPPDFWRAQCTRVDFLWVC

SEQ ID NO: 905545 - protein, 372 aa, Homo sapiens; identical to SEQ ID NO: 905537

SEQ ID NO: 905546 - protein, 383 aa, Homo sapiens
MTPVRMQHSLAGQTYAVPLIQPDLRREEAVQQMADALQYLQKVSGDIFSRISQRVEQSRSQVQAIGEKVSLAQAKIEKIKGSKKAIKVFSSAKYPAPERLQEYGSIFTGAQDPGLQRRPRHRIQSKHRPLDERALQEKLKDFPVCVSTKPEPEDDAEEGLGGLPSNISSVSSLLLFNTTENLYKKYVFLDPLAGAVTKTHVMLGAETEEKLFDAPLSISKREQLEQQVPENYFYVPDLGQVPEIDVPSYLPDLPGIANDLMYSADLGPGIAPSAPGTIPELPTFHTEVAEPLKADLQDGVLTPPPPPPPSPPDPDLGRCSDMDTARTSCSDLLPWEGVTEPALCGDQLQGAEGWLEATQLGRGLLSACAPWGDGSTQPAPLCS

SEQ ID NO: 905547 - protein, 83 aa, Homo sapiens
QAKIEKIKGSKKAIKVVPIPLCPEATGQSLHFPMPLRPPILCPAAHLYLGLSSRPGFQLHPLLPSNPSPLSLLGPPQTCPCVH

SEQ ID NO: 905548 - protein, 2039 aa, Homo sapiens
MDIVDTFNHLIPTEHLDDALFLGSNLENEVCEDFSASQNVLEDSLKNMLSDKDPMLGSASNQFCLPVLDSNDPNFQMPCSTVVGLDDIMDEGVVKESGNDTIDEEELILPNRNLRDKVEENSVRSPRKSPRLMAQEQVRSLRQSTIAKRSNAAPLSNTKKASGKTVSTAKAGVKQPERSQVKEEVCMSLKPEYHKENRRCSRNSGQIEVVPEVSVSSSHSSVSSCLEMKDEDGLDSKHKCNNPGEIDVPSHELNCSLLSETCVTIGEKKNEALMECKAKPVGSPLFKFSDKEEHEQNDSISGKTGETVVEEMIATRKVEQDSKETVKLSHEDDHILEDAGSSDISSDAACTNPNKTENSLVGLPSCVDEVTECNLELKDTMGIADKTENTLERNKIEPLGYCEDAESNRQLESTEFNKSNLEVVDTSTFGPESNILENAICDVPDQNSKQLNAIESTKIESHETANLQDDRNSQSSSVSYLESKSVKSKHTKPVIHSKQNMTTDAPKKIVAAKYEVIHSKTKVNVKSVKRNTDVPESQQNFHRPVKVRKKQIDKEPKIQSCNSGVKSVKNQAHSVLKKTLQDQTLVQIFKPLTHSLSDKSHAHPGCLKEPHHPAQTGHVSHSSQKQCHKPQQQAPAMKTNSHVKEELEHPGVEHFKEEDKLKLKKPEKNLQPRQRRSSKSFSLDEPPLFIPDNIATIRREGSDHSSSFESKYMWTPSKQCGFCKKPHGNRFMVGCGRCDDWFHGDCVGLSLSQAQQMGEEDKEYVCVKCCAEEDKKTEILDPDTLENQATVEFHSGDKTMECEKLGLSKHTTNDRTKYIDDTVKHKVKILKRESGEGRNSSDCRDNEIKKWQLAPLRKMGQPVLPRRSSEEKSEKIPKESTTVTCTGEKASKPGTHEKQEMKKKKVEKGVLNVHPAASASKPSADQIRQSVRHSLKDILMKRLTDSNLKVPEEKAAKVATKIEKELFSFFRDTDAKYKNKYRSLMFNLKDPKNNILFKKVLKGEVTPDHLIRMSPEELASKELAAWRRRENRHTIEMIEKEQREVERRPITKITHKGEIEIESDAPMKEQEAAMEIQEPAANKSLEKPEGSEKQKEEVDSMSKDTTSQHRQHLFDLNCKICIGRMAPPVDDLSPKKVKVVVGVARKHSDNEAESIADALSSTSNILASEFFEEEKQESPKSTFSPAPRPEMPGTVEVESTFLARLNFIWKGFINMPSVAKFVTKAYPVSGSPEYLTEDLPDSIQVGGRISPQTVWDYVEKIKASGTKEICVVRFTPVTEEDQISYTLLFAYFSSRKRYGVAANNMKQVKDMYLIPLGATDKIPHPLVPFDGPGLELHRPNLLLGLIIRQKLKRQHSACASTSHIAETPESAPPIALPPDKKSKIEVSTEEAPEEENDFFNSFTTVLHKQRNKPQQNLQEDLPTAVEPLMEVTKQEPPKPLRFLPGVLIGWENQPTTLELANKPLPVDDILQSLLGTTGQVYDQAQSVMEQNTVKEIPFLNEQTNSKIEKTDNVEVTDGENKEIKVKVDNISESTDKSAEIETSVVGSSSISAGSLTSLSLRGKPPDVSTEAFLTNLSIQSKQEETVESKEKTLKRQLQEDQENNLQDNQTSNSSPCRSNVGKGNIDGNVSCSENLVANTARSPQFINLKRDPRQAAGRSQPVTTSESKDGDSCRNGEKHMLPGLSHNKEHLTEQINVEEKLCSAEKNSCVQQSDNLKVAQNSPSVENIQTSQAEQAKPLQEDILMQNIETVHPFRRGSAVATSHFEVGNTCPSEFPSKSITFTSRSTSPRTSTNFSPMRPQQPNLQHLKSSPPGFPFPGPPNFPPQSMFGFPPHLPPPLLPPPGFGFAQNPMVPWPPVVHLPGQPQRMMGPLSQASRYIGPQNFYQVKDIRRPERRHSDPWGRQDQQQLDRPFNRGKGDRQRFYSDSHHLKRERHEKEWEQESERHRRRDRSQDKDRDRKSREEGHKDKERARLSHGDRGTDGKASRDSRNVDKKPDKPKSEDYEKDKEREKSKHREGEKDRDRYHKDRDHTDRTKSKR

SEQ ID NO: 905549 - protein, 1985 aa, Homo sapiens
MDIVDTFNHLIPTEHLDDALFLGSNLENEVCEDFSASQNVLEDSLKNMLSDKDPMLGSASNQFCLPVLDSNDPNFQMPCSTEQVRSLRQSTIAKRSNAAPLSNTKKASGKTVSTAKAGVKQPERSQVKEEVCMSLKPEYHKENRRCSRNSGQIEVVPEVSVSSSHSSVSSCLEMKDEDGLDSKHKCNNPGEIDVPSHELNCSLLSETCVTIGEKKNEALMECKAKPVGSPLFKFSDKEEHEQNDSISGKTGETVVEEMIATRKVEQDSKETVKLSHEDDHILEDAGSSDISSDAACTNPNKTENSLVGLPSCVDEVTECNLELKDTMGIADKTENTLERNKIEPLGYCEDAESNRQLESTEFNKSNLEVVDTSTFGPESNILENAICDVPDQNSKQLNAIESTKIESHETANLQDDRNSQSSSVSYLESKSVKSKHTKPVIHSKQNMTTDAPKKIVAAKYEVIHSKTKVNVKSVKRNTDVPESQQNFHRPVKVRKKQIDKEPKIQSCNSGVKSVKNQAHSVLKKTLQDQTLVQIFKPLTHSLSDKSHAHPGCLKEPHHPAQTGHVSHSSQKQCHKPQQQAPAMKTNSHVKEELEHPGVEHFKEEDKLKLKKPEKNLQPRQRRSSKSFSLDEPPLFIPDNIATIRREGSDHSSSFESKYMWTPSKQCGFCKKPHGNRFMVGCGRCDDWFHGDCVGLSLSQAQQMGEEDKEYVCVKCCAEEDKKTEILDPDTLENQATVEFHSGDKTMECEKLGLSKHTTNDRTKYIDDTVKHKVKILKRESGEGRNSSDCRDNEIKKWQLAPLRKMGQPVLPRRSSEEKSEKIPKESTTVTCTGEKASKPGTHEKQEMKKKKVEKGVLNVHPAASASKPSADQIRQSVRHSLKDILMKRLTDSNLKVPEEKAAKVATKIEKELFSFFRDTDAKYKNKYRSLMFNLKDPKNNILFKKVLKGEVTPDHLIRMSPEELASKELAAWRRRENRHTIEMIEKEQREVERRPITKITHKGEIEIESDAPMKEQEAAMEIQEPAANKSLEKPEGSEKQKEEVDSMSKDTTSQHRQHLFDLNCKICIGRMAPPVDDLSPKKVKVVVGVARKHSDNEAESIADALSSTSNILASEFFEEEKQESPKSTFSPAPRPEMPGTVEVESTFLARLNFIWKGFINMPSVAKFVTKAYPVSGSPEYLTEDLPDSIQVGGRISPQTVWDYVEKIKASGTKEICVVRFTPVTEEDQISYTLLFAYFSSRKRYGVAANNMKQVKDMYLIPLGATDKIPHPLVPFDGPGLELHRPNLLLGLIIRQKLKRQHSACASTSHIAETPESAPPIALPPDKKSKIEVSTEEAPEEENDFFNSFTTVLHKQRNKPQQNLQEDLPTAVEPLMEVTKQEPPKPLRFLPGVLIGWENQPTTLELANKPLPVDDILQSLLGTTGQVYDQAQSVMEQNTVKEIPFLNEQTNSKIEKTDNVEVTDGENKEIKVKVDNISESTDKSAEIETSVVGSSSISAGSLTSLSLRGKPPDVSTEAFLTNLSIQSKQEETVESKEKTLKRQLQEDQENNLQDNQTSNSSPCRSNVGKGNIDGNVSCSENLVANTARSPQFINLKRDPRQAAGRSQPVTTSESKDGDSCRNGEKHMLPGLSHNKEHLTEQINVEEKLCSAEKNSCVQQSDNLKVAQNSPSVENIQTSQAEQAKPLQEDILMQNIETVHPFRRGSAVATSHFEVGNTCPSEFPSKSITFTSRSTSPRTSTNFSPMRPQQPNLQHLKSSPPGFPFPGPPNFPPQSMFGFPPHLPPPLLPPPGFGFAQNPMVPWPPVVHLPGQPQRMMGPLSQASRYIGPQNFYQVKDIRRPERRHSDPWGRQDQQQLDRPFNRGKGDRQRFYSDSHHLKRERHEKEWEQESERHRRRDRSQDKDRDRKSREEGHKDKERARLSHGDRGTDGKASRDSRNVDKKPDKPKSEDYEKDKEREKSKHREGEKDRDRYHKDRDHTDRTKSKR

SEQ ID NO: 905550 - protein, 870 aa, Homo sapiens
GRSNIRKVDSTSTVPGISGRGAGENVDFESTFLARLNFIWKGFINMPSVAKFVTKAYPVSGSPEYLTEDLPDSIQVGGRISPQTVWDYVEKIKASGTKEICVVRFTPVTEEDQISYTLLFAYFSSRKRYGVAANNMKQVKDMYLIPLGATDKIPHPLVPFDGPGLELHRPNLLLGLIIRQKLKRQHSACASTSHIAETPESAPPIALPPDKKSKIEVSTEEAPEEENDFFNSFTTVLHKQRNKPQQNLQEDLPTAVEPLMEVTKQEPPKPLRFLPGVLIGWENQPTTLELANKPLPVDDILQSLLGTTGQVYDQAQSVMEQNTVKEIPFLNEQTNSKIEKTDNVEVTDGENKEIKVKVDNISESTDKSAEIETSVVGSSSISAGSLTSLSLRGKPPDVSTEAFLTNLSIQSKQEETVESKEKTLKRQLQEDQENNLQDNQTSNSSPCRSNVGKGNIDGNVSCSENLVANTARSPQFINLKRDPRQAAGRSQPVTTSESKDGDSCRNGEKHMLPGLSHNKEHLTEQINVEEKLCSAEKNSCVQQSDNLKVAQNSPSVENIQTSQAEQAKPLQEDILMQNIETVHPFRRGSAVATSHFEVGNTCPSEFPSKSITFTSRSTSPRTSTNFSPMRPQQPNLQHLKSSPPGFPFPGPPNFPPQSMFGFPPHLPPPLLPPPGFGFAQNPMVPWPPVVHLPGQPQRMMGPLSQASRYIGPQNFYQVKDIRRPERRHSDPWGRQDQQQLDRPFNRGKGDRQRFYSDSHHLKRERHEKEWEQESERHRRRDRSQDKDRDRKSREEGHKDKERARLSHGDRGTDGKASRDSRNVDKKPDKPKSEDYEKDKEREKSKHREGEKDRDRYHKDRDHTDRTKSKR

SEQ ID NO: 905551 - protein, 621 aa, Homo sapiens
MDIVDTFNHLIPTEHLDDALFLGSNLENEVCEDFSASQNVLEDSLKNMLSDKDPMLGSASNQFCLPVLDSNDPNFQMPCSTEQVRSLRQSTIAKRSNAAPLSNTKKASGKTVSTAKAGVKQPERSQVKEEVCMSLKPEYHKENRRCSRNSGQIEVVPEVSVSSSHSSVSSCLEMKDEDGLDSKHKCNNPGEIDVPSHELNCSLLSETCVTIGEKKNEALMECKAKPVGSPLFKFSDKEEHEQNDSISGKTGETVVEEMIATRKVEQDSKETVKLSHEDDHILEDAGSSDISSDAACTNPNKTENSLVGLPSCVDEVTECNLELKDTMGIADKTENTLERNKIEPLGYCEDAESNRQLESTEFNKSNLEVVDTSTFGPESNILENAICDVPDQNSKQLNAIESTKIESHETANLQDDRNSQSSSVSYLESKSVKSKHTKPVIHSKQNMTTDAPKKIVAAKYEVIHSKTKVNVKSVKRNTDVPESQQNFHRPVKVRKKQIDKEPKIQSCNSGVKSVKNQAHSVLKKTLQDQTLVQIFKPLTHSLSDKSHAHPGCLKEPHHPAQTGHVSHSSQKQCHKPQQQAPAMKTNSHVKEELEHPGVEHFKEEDKLKLKKPERINLLLWN

SEQ ID NO: 905552 - protein, 1958 aa, Homo sapiens
MDIVDTFNHLIPTEHLDDALFLGSNLENEVCEDFSASQNVLEDSLKNMLSDKDPMLGSASNQFCLPVLDSNDPNFQMPCSTEQVRSLRQSTIAKRSNAAPLSNTKKASGKTVSTAKAGVKQPERSQVKEEVCMSLKPEYHKENRRCSRNSGQIEVVPEVSVSSSHSSVSSCLEMKDEDGLDSKHKCNNPGEIDVPSHELNCSLLSETCVTIGEKKNEALMECKAKPVGSPLFKFSDKEEHEQNDSISGKTGETVVEEMIATRKVEQDSKETVKLSHEDDHILEDAGSSDISSDAACTNPNKTENSLVGLPSCVDEVTECNLELKDTMGIADKTENTLERNKIEPLGYCEDAESNRQLESTEFNKSNLEVVDTSTFGPESNILENAICDVPDQNSKQLNAIESTKIESHETANLQDDRNSQSSSVSYLESKSVKSKHTKPVIHSKQNMTTDAPKKIVAAKYEVIHSKTKVNVKSVKRNTDVPESQQNFHRPVKVRKKQIDKEPKIQSCNSGVKSVKNQAHSVLKKTLQDQTLVQIFKPLTHSLSDKSHAHPGCLKEPHHPAQTGHVSHSSQKQCHKPQQQAPAMKTNSHVKEELEHPGVEHFKEEDKLKLKKPEKNLQPRQRRSSKSFSLDEPPLFIPDNIATIRREGSDHSSSFESKYMWTPSKQCGFCKKPHGNRFMVGCGRCDDWFHGDCVGLSLSQAQQMGEEDKEYVCVKCCAEEDKKTEILDPDTLENQATVEFHSGDKTMECEKLGLSKHTTNDRTKYIDDTVKHKVKILKRESGEGRNSSDCRDNEIKKWQLAPLRKMGQPVLPRRSSEEKSEKIPKESTTVTCTGEKASKPGTHEKQEMKKKKVEKGVLNVHPAASASKPSADQIRQSVRHSLKDILMKRLTDSNLKVPEEKAAKVATKIEKELFSFFRDTDAKYKNKYRSLMFNLKDPKNNILFKKVLKGEVTPDHLIRMSPEELASKELAAWRRRENRHTIEMIEKEQREVERRPITKITHKGEIEIESDAPMKEQEAAMEIQEPAANKSLEKPEGSEKQKEEVDSMSKDTTSQHRQHLFDLNCKICIGRMAPPVDDLSPKKVKVVVGVARKHSDNEAESIADALSSTSNILASEFFEEEKQESPKSTFSPAPRPEMPGTVEVESTFLARLNFIWKGFINMPSVAKFVTKAYPVSGSPEYLTEDLPDSIQVGGRISPQTVWDYVEKIKASGTKEICVVRFTPVTEEDQISYTLLFAYFSSRKRYGVAANNMKQVKDMYLIPLGATDKIPHPLVPFDGPGLELHRPNLLLGLIIRQKLKRQHSACASTSHIAETPESAPPIALPPDKKSKIEVSTEEAPEEENDFFNSFTTVLHKQRNKPQQNLQEDLPTAVEPLMEVTKQEPPKPLRFLPGVLIGWENQPTTLELANKPLPVDDILQSLLGTTGQVYDQAQSVMEQNTVKEIPFLNEQTNSKIEKTDNVEVTDGENKEIKVKVDNISESTDKSAEIETSVVGSSSISAGSLTSLSLRGKPPDVSTEAFLTNLSIQSKQEETVESKEKTLKRQLQEDQENNLQDNQTSNSSPCRSNVGKGNIDGNVSCSENLVANTARSPQFINLKRDPRQAAGRSQPVTTSESKDGDSCRNGEKHMLPGLSHNKEHLTEQINVEEKLCSAEKNSCVQQSDNLKVAQNSPSVENIQTSQAEQAKPLQEDILMQNIETVHPFRRGSAVATSHFEVGNTCPSEFPSKSITFTSRSTSPRTSTNFSPMRPQQPNLQHLKSSPPGFPFPGPPNFPPQSMFGFPPHLPPPLLPPPGFGFAQNPMVPWPPVVHLPGQPQRMMGPLSQASRYIGPQNFYQVKDIRRPERRHSDPWGRQDQQQLDRPFNRGKGDRQRFYSDSHHLKRERHEKEWEQESERHRRRDRSQDKDRDRKSREEGHKDKERARLSHGDRGTDGKASRDSRNVDKKPDKPKSEDFQELIETCS

SEQ ID NO: 905553 - protein, 682 aa, Homo sapiens
MDIVDTFNHLIPTEHLDDALFLGSNLENEVCEDFSASQNVLEDSLKNMLSDKDPMLGSASNQFCLPVLDSNDPNFQMPCSTEQVRSLRQSTIAKRSNAAPLSNTKKASGKTVSTAKAGVKQPERSQVKEEVCMSLKPEYHKENRRCSRNSGQIEVVPEVSVSSSHSSVSSCLEMKDEDGLDSKHKCNNPGEIDVPSHELNCSLLSETCVTIGEKKNEALMECKAKPVGSPLFKFSDKEEHEQNDSISGKTGETVVEEMIATRKVEQDSKETVKLSHEDDHILEDAGSSDISSDAACTNPNKTENSLVGLPSCVDEVTECNLELKDTMGIADKTENTLERNKIEPLGYCEDAESNRQLESTEFNKSNLEVVDTSTFGPESNILENAICDVPDQNSKQLNAIESTKIESHETANLQDDRNSQSSSVSYLESKSVKSKHTKPVIHSKQNMTTDAPKKIVAAKYEVIHSKTKVNVKSVKRNTDVPESQQNFHRPVKVRKKQIDKEPKIQSCNSGVKSVKNQAHSVLKKTLQDQTLVQIFKPLTHSLSDKSHAHPGCLKEPHHPAQTGHVSHSSQKQCHKPQQQAPAMKTNSHVKEELEHPGVEHFKEEDKLKLKKPEKNLQPRQRRSSKSFSLDEPPLFIPDNIATIRREGSDHSSSFESKYMWTPSKQCGFCKKPHGNRCVCMCV

SEQ ID NO: 905554 - protein, 1985 aa, Homo sapiens; identical to SEQ ID NO: 905549

SEQ ID NO: 905555 - protein, 1985 aa, Homo sapiens; identical to SEQ ID NO: 905549

SEQ ID NO: 905556 - protein, 1641 aa, Homo sapiens
MDIVDTFNHLIPTEHLDDALFLGSNLENEVCEDFSASQNVLEDSLKNMLSDKDPMLGSASNQFCLPVLDSNDPNFQMPCSTEQVRSLRQSTIAKRSNAAPLSNTKKASGKTVSTAKAGVKQPERSQVKEEVCMSLKPEYHKENRRCSRNSGQIEVVPEVSVSSSHSSVSSCLEMKDEDGLDSKHKCNNPGEIDVPSHELNCSLLSETCVTIGEKKNEALMECKAKPVGSPLFKFSDKEEHEQNDSISGKTGETVVEEMIATRKVEQDSKETVKLSHEDDHILEDAGSSDISSDAACTNPNKTENSLVGLPSCVDEVTECNLELKDTMGIADKTENTLERNKIEPLGYCEDAESNRQLESTEFNKSNLEVVDTSTFGPESNILENAICDVPDQNSKQLNAIESTKIESHETANLQDDRNSQSSSVSYLESKSVKSKHTKPVIHSKQNMTTDAPKKIVAAKYEVIHSKTKVNVKSVKRNTDVPESQQNFHRPVKVRKKQIDKEPKIQSCNSGVKSVKNQAHSVLKKTLQDQTLVQIFKPLTHSLSDKSHAHPGCLKEPHHPAQTGHVSHSSQKQCHKPQQQAPAMKTNSHVKEELEHPGVEHFKEEDKLKLKKPEKNLQPRQRRSSKSFSLDEPPLFIPDNIATIRREGSDHSSSFESKYMWTPSKQCGFCKKPHGNRFMVGCGRCDDWFHGDCVGLSLSQAQQMGEEDKEYVCVKCCAEEDKKTEILDPDTLENQATVEFHSGDKTMECEKLGLSKHTTNDRTKYIDDTVKHKVKILKRESGEGRNSSDCRDNEIKKWQLAPLRKMGQPVLPRRSSEEKSEKIPKESTTVTCTGEKASKPGTHEKQEMKKKKVEKGVLNVHPAASASKPSADQIRQSVRHSLKDILMKRLTDSNLKVPEEKAAKVATKIEKELFSFFRDTDAKYKNKYRSLMFNLKDPKNNILFKKVLKGEVTPDHLIRMSPEELASKELAAWRRRENRHTIEMIEKEQREVERRPITKITHKGEIEIESDAPMKEQEAAMEIQEPAANKSLEKPEGSEKQKEEVDSMSKDTTSQHRQHLFDLNCKICIGRMAPPVDDLSPKKVKVVVGVARKHSDNEAESIADALSSTSNILASEFFEEEKQESPKSTFSPAPRPEMPGTVEVESTFLARLNFIWKGFINMPSVAKFVTKAYPVSGSPEYLTEDLPDSIQVGGRISPQTVWDYVEKIKASGTKEICVVRFTPVTEEDQISYTLLFAYFSSRKRYGVAANNMKQVKDMYLIPLGATDKIPHPLVPFDGPGLELHRPNLLLGLIIRQKLKRQHSACASTSHIAETPESAPPIALPPDKKSKIEVSTEEAPEEENDFFNSFTTVLHKQRNKPQQNLQEDLPTAVEPLMEVTKQEPPKPLRFLPGVLIGWENQPTTLELANKPLPVDDILQSLLGTTGQVYDQAQSVMEQNTVKEIPFLNEQTNQNPMVPWPPVVHLPGQPQRMMGPLSQASRYIGPQNFYQVKDIRRPERRHSDPWGRQDQQQLDRPFNRGKGDRQRFYSDSHHLKRERHEKEWEQESERHRRRDRSQDKDRDRKSREEGHKDKERARLSHGDRGTDGKASRDSRNVDKKPDKPKSEDYEKDKEREKSKHREGEKDRDRYHKDRDHTDRTKSKR

SEQ ID NO: 905557 - protein, 125 aa, Homo sapiens
MAKYLAQIIVMGVQVVGRAFARALRQEFAASRAAADARGRAGHRSAAASNLSGLSLQEAQQILNVSKLSPEEVQKNYEHLFKVNDKSVGGSFYLQSKVVRAKERLDEELKIQAQEDREKGQMPHT

SEQ ID NO: 905558 - protein, 125 aa, Homo sapiens; identical to SEQ ID NO: 905557

SEQ ID NO: 905559 - protein, 138 aa, Homo sapiens
TGSGLLTGCLLCPQAKYLAQIIVMGVQVVGRAFARALRQEFAASRAAADARGRAGHRSAAASNLSGLSLQEAQQILNVSKLSPEEVQKNYEHLFKVNDKSVGGSFYLQSKVVRAKERLDEELKIQAQEDREKGQMPHT

SEQ ID NO: 905560 - protein, 145 aa, Homo sapiens
MRWGQSASGSSVKFTRLPACPAKYLAQIIVMGVQVVGRAFARALRQEFAASRAAADARGRAGHRSAAASNLSGLSLQEAQQILNVSKLSPEEVQKNYEHLFKVNDKSVGGSFYLQSKVVRAKERLDEELKIQAQEDREKGQMPHT

SEQ ID NO: 905561 - protein, 72 aa, Homo sapiens
PPLTEPPPLTEPPPLTQNPLLYTEPPPLTEPPPLTEPPPLTERPPLTQNPLLSPNPISVLSFPSTLLLPLTS

SEQ ID NO: 905562 - protein, 145 aa, Homo sapiens; identical to SEQ ID NO: 905560

SEQ ID NO: 905563 - protein, 137 aa, Homo sapiens
MESHVQCSGMFSLAKYLAQIIVMGVQVVGRAFARALRQEFAASRAAADARGRAGHRSAAASNLSGLSLQEAQQILNVSKLSPEEVQKNYEHLFKVNDKSVGGSFYLQSKVVRAKERLDEELKIQAQEDREKGQMPHT

SEQ ID NO: 905564 - protein, 73 aa, Homo sapiens
RRPQGQGKPSAWKRPGKRGRAVPSPRVSEQPWAAVEHESVLAKYLAQIIVMGVQVVGRAFARALRQEFAASTP

SEQ ID NO: 905565 - protein, 72 aa, Homo sapiens; identical to SEQ ID NO: 905561

SEQ ID NO: 905566 - protein, 145 aa, Homo sapiens
MAAEGPKAVGVRGSLRPEPCFKPRGPSDFHLCPSDSTSIPSLSLLFHSGGALGRRRSQERAGPRRLNKASSGVESTGIWSKPLWPRGWVLDTCRLAQVPYLQTPGPCVVTAVTDSTSLGFPICLRGTCCYVLGPVSSPPPLSCQN

SEQ ID NO: 905567 - protein, 472 aa, Homo sapiens
MLNEMDELKELKNNPHRDFYNCRKVDTHIHAAACMNQKHLLRFIKKSYQIDADRVVYSTKEKNLTLKELFAKLKMHPYDLTVDSLDVHAGRQTFQRFDKFNDKYNPVGASELRDLYLKTDNYINGEYFATIIKEVGADLVEAKYQHAEPRLSIYGRSPDEWSKLSSWFVCNRIHCPNMTWMIQVPRIYDVFRSKNFLPHFGKMLENIFMPVFEATINPQADPELSVFLKHITGFDSVDDESKHSGHMFSSKSPKPQEWTLEKNPSYTYYAYYMYANIMVLNSLRKERGMNTFLFRPHCGEAGALTHLMTAFMIADDISHGLNLKKSPVLQYLFFLAQIPIAMSPLSNNSLFLEYAKNPFLDFLQKGLMISLSTDDPMQFHFTKEPLMEEYAIAAQVFKLSTCDMCEVARNSVLQCGISHEEKVKFLGDNYLEEGPAGNDIRRTNVAQIRMAYRYETWCYELNLIAEGLKSTE

SEQ ID NO: 905568 - protein, 775 aa, Homo sapiens
FYSVSQSPHSLLSLLFYCAILESRISATMPLFKLPAEEKQIDDAMRNFAEKVFASEVKDEGGRQEISPFDVDEICPISHHEMQAHIFHLETLSTSTEARRKKRFQGRKTVNLSIPLSETSSTKLSHIDEYISSSPTYQTVPDFQRVQITGDYASGVTVEDFEIVCKGLYRALCIREKYMQKSFQRFPKTPSKYLRNIDGEAWVANESFYPVFTPPVKKGEDPFRTDNLPENLGYHLKMKDGVVYVYPNEAAVSKDEPKPLPYPNLDTFLDDMNFLLALIAQGPVKTYTHRRLKFLSSKFQVHQMLNEMDELKELKNNPHRDFYNCRKVDTHIHAAACMNQKHLLRFIKKSYQIDADRVVYSTKEKNLTLKELFAKLKMHPYDLTVDSLDVHAGRQTFQRFDKFNDKYNPVGASELRDLYLKTDNYINGEYFATIIKEVGADLVEAKYQHAEPRLSIYGRSPDEWSKLSSWFVCNRIHCPNMTWMIQVPRIYDVFRSKNFLPHFGKMLENIFMPVFEATINPQADPELSVFLKHITGFDSVDDESKHSGHMFSSKSPKPQEWTLEKNPSYTYYAYYMYANIMVLNSLRKERGMNTFLFRPHCGEAGALTHLMTAFMIADDISHGLNLKKSPVLQYLFFLAQIPIAMSPLSNNSLFLEYAKNPFLDFLQKGLMISLSTDDPMQFHFTKEPLMEEYAIAAQVFKLSTCDMCEVARNSVLQCGISHEEKVKFLGDNYLEEGPAGNDIRRTNVAQIRMAYRYETWCYELNLIAEGLKSTE

SEQ ID NO: 905569 - protein, 742 aa, Homo sapiens
FYSVSQSPHSLLSLLFYCAILESRISATMPLFKLPAEEKQIDDAMRNFAEKVFASEVKDEGGRQEISPFDVDEICPISHHEMQAHIFHLETLSTSTEARRKKRFQGRKTVNLSIPLSETSSTKLSHIDEYISSSPTYQTVPDFQRVQITGDYASGVTVEDFEIVCKGLYRALCIREKYMQKSFQRFPKTPSKYLRNIDGEAWVANESFYPVFTPPVKKGEDPFRTDNLPENLGYHLKMKDGVVYVYPNEAAVSKDEPKPLPYPNLDTFLDDMNFLLALIAQGPVKTYTHRRLKFLSSKFQVHQMLNEMDELKELKNNPHRDFYNCRKVDTHIHAAACMNQKHLLRFIKKSYQIDADRVVYSTKEKNLTLKELFAKLKMHPYDLTVDSLDVHAGRQTFQRFDKFNDKYNPVGASELRDLYLKTDNYINGEYFATIIKEVGADLVEAKYQHAEPRLSIYGRSPDEWSKLSSWFVCNRIHCPNMTWMIQVPRIYDVFRSKNFLPHFGKMLENIFMPVFEATINPQADPELSVFLKHITGFDSVDDESKHSGHMFSSKSPKPQEWTLEKNPSYTYYAYYMYANIMVLNSLRKERGMNTFLFRPHCGEAGALTHLMTAFMIADDISHGLNLKKSPVLQYLFFLAQIPIAMSPLSNNSLFLEYAKNPFLDFLQKGLMISLSTDDPMQFHFTKEPLMEEYAIAAQVFKLSTCDMCEVARNSVLQCGISHEFARSTITKYRRLSGSNARD

SEQ ID NO: 905570 - protein, 211 aa, Homo sapiens
PPPPVGWLVILQAGGAVRAPASGLCPPPPFPGPRLSFGKMSDTAVADTRRLNSKPQDLTDAYGPPSNFLEIDIFNPQTVGVGRARFTTYEVRMRTNLPIFKLKESCVRRRYSDFEWLKNELERDSKIVVPPLPGKALKRQLPFRGDEGIFEESFIEERRQGLEQFINKIAGHPLAQNERCLHMFLQEEAIDRNYVPGKSLAVSCPGWSAVA

SEQ ID NO: 905571 - protein, 163 aa, Homo sapiens
PPPPVGWLVILQAGGAVRAPASGLCPPPPFPGPRLSFGKMSDTAVADTRRLNSKPQDLTDAYGPPSNFLEIDIFNPQTVGVGRARFTTYEVRMRTNLPIFKLKESCVRRRYSDFEWLKNELERDSKIAIFLWASASLHLKKENSDYIGGSQQEKEYVFQWLPF

SEQ ID NO: 905572 - protein, 135 aa, Homo sapiens
PPPPVGWLVILQAGGAVRAPASGLCPPPPFPGPRLSFGKMSDTAVADTRRLNSKPQDLTDAYGPPSNFLEIDIFNPQTVGVGRARFTTYEVRMRTNLPIFKLKESCVRRRYSDFEWLKNELERDSKNCWAPTGSE

SEQ ID NO: 905573 - protein, 201 aa, Homo sapiens
PPPPVGWLVILQAGGAVRAPASGLCPPPPFPGPRLSFGKMSDTAVADTRRLNSKPQDLTDAYGPPSNFLEIDIFNPQTVGVGRARFTTYEVRMRTNLPIFKLKESCVRRRYSDFEWLKNELERDSKIVVPPLPGKALKRQLPFRGDEGIFEESFIEERRQGLEQFINKIAGHPLAQNERCLHMFLQEEAIDRNYVPGKVRQ

SEQ ID NO: 905574 - protein, 201 aa, Homo sapiens; identical to SEQ ID NO: 905573

SEQ ID NO: 905575 - protein, 201 aa, Homo sapiens; identical to SEQ ID NO: 905573

SEQ ID NO: 905576 - protein, 169 aa, Homo sapiens
PPPPVGWLVILQAGGAVRAPASGLCPPPPFPGPRLSFGKMSDTAVADTRRLNSKPQDLTDAYGPPSNFLEIDIFNPQTVGVGRARFTTYEVRMRTNLPIFKLKESCVRRRYSDFEWLKNELERDSKIVVPPLPGKALKRQLPFRGDEGIFEESFIEERRQGLEQFINKG

SEQ ID NO: 905577 - protein, 176 aa, Homo sapiens
PPPPVGWLVILQAGGAVRAPASGLCPPPPFPGPRLSFGKMSDTAVADTRRLNSKPQDLTDAYGPPSNFLEIDIFNPQTVGVGRARFTTYEVRMRTNLPIFKLKESCVRRRYSDFEWLKNELERDSKIVVPPLPGKALKRLCSLSHLANVVVAAFLICILCYRHFLKTISSFIVHKC

SEQ ID NO: 905578 - protein, 78 aa, Homo sapiens
GLTVACGLTVVCGLTVAVWVDRGLLRKVRIIWSLFPSFEVVNLSSHRNGLIFDLSHPDCSYGLSSCKLLAVGQDGPYA

SEQ ID NO: 905579 - protein, 201 aa, Homo sapiens; identical to SEQ ID NO: 905573

SEQ ID NO: 905580 - protein, 165 aa, Homo sapiens
PPPPVGWLVILQAGGAVRAPASGLCPPPPFPGPRLSFGKMSDTAVADTRRLNSKPQDLTDAYGPPSNFLEIDIFNPQTVGVGRARFTTYEVRMRTNLPIFKLKESCVRRRYSDFEWLKNELERDSKLVAFHGSNPPRVQAVCCMEQGVWVFWAHHYGCFRVRRKP

SEQ ID NO: 905581 - protein, 201 aa, Homo sapiens; identical to SEQ ID NO: 905573

SEQ ID NO: 905582 - protein, 201 aa, Homo sapiens; identical to SEQ ID NO: 905573

SEQ ID NO: 905583 - protein, 649 aa, Homo sapiens
MGIGKNTTSKSMEAGSSTEGKYEDEAKHPAFFTLPVVINGGATSSGEQDNEDTELMAIYTTENGIAEKSSLAETLDSTGSLDPQRSDMIYTIEDVPPWYLCIFLGLQHYLTCFSGTIAVPFLLADAMCVGYDQWATSQLIGTIFFCVGITTLLQTTFGCRLPLFQASAFAFLAPARAILSLDKWKCNTTDVSVANGTAELLHTEHIWYPRIREIQGAIIMSSLIEVVIGLLGLPGALLKYIGPLTITPTVALIGLSGFQAAGERAGKHWGIAMLTIFLVLLFSQYARNVKFPLPIYKSKKGWTAYKLQLFKMFPIILAILVSWLLCFIFTVTDVFPPDSTKYGFYARTDARQGVLLVAPWFKVPYPFQWGLPTVSAAGVIGMLSAVVASIIESIGDYYACARLSCAPPPPIHAINRGIFVEGLSCVLDGIFGTGNGSTSSSPNIGVLGITKVGSRRVIQCGAALMLALGMIGKFSALFASLPDPVLGALFCTLFGMITAVGLSNLQFIDLNSSRNLFVLGFSIFFGLVLPSYLRQNPLVTGITGIDQVLNVLLTTAMFVGGCVAFILDNTIPGTPEERGIRKWKKGVGKGNKSLDGMESYNLPFGMNIIKKYRCFSYLPISPTFVGYTWKGLRKSDNSRSSDEDSQATG

SEQ ID NO: 905584 - protein, 424 aa, Homo sapiens
MGIGKNTTSKSMEAGSSTEGKYEDEAKHPAFFTLPVVINGGATSSGEQDNEDTELMAIYTTENGIAEKSSLAETLDSTGSLDPQRSDMIYTIEDVPPWYLCIFLGLQHYLTCFSGTIAVPFLLADAMCVGYDQWATSQLIGTIFFCVGITTLLQTTFGCRLPLFQASAFAFLAPARAILSLDKWKCNTTDVSVANGTAELLHTEHIWYPRIREIQGAIIMSSLIEVVIGLLGLPGALLKYIGPLTITPTVALIGLSGFQAAGERAGKHWGIAMLTIFLVLLFSQYARNVKFPLPIYKSKKGWTAYKLQLFKMFPIILAILVSWLLCFIFTVTDVFPPDSTKYGFYARTDARQGVLLVAPWFKVPYPFQWGLPTVSAAGVIGMLSAVVASIIESIGDYYACARLSCAPPPPIHAINRYVPEKTSS

SEQ ID NO: 905585 - protein, 649 aa, Homo sapiens; identical to SEQ ID NO: 905583

SEQ ID NO: 905586 - protein, 649 aa, Homo sapiens; identical to SEQ ID NO: 905583

SEQ ID NO: 905587 - protein, 649 aa, Homo sapiens; identical to SEQ ID NO: 905583

SEQ ID NO: 905588 - protein, 649 aa, Homo sapiens; identical to SEQ ID NO: 905583
